United States Patent Application Publication US 2026/0240980 A1 - sequence listing, part 4

SEQ ID NO: 21698 - protein, 469 aa, synthetic construct; identical to SEQ ID NO: 16738
  REGION 1..469: note = neuraminidase__InfluenzaA__AFB70369

SEQ ID NO: 21699 - protein, 469 aa, synthetic construct; identical to SEQ ID NO: 16738
  REGION 1..469: note = neuraminidase__InfluenzaA__AFB70379

SEQ ID NO: 21700 - protein, 469 aa, synthetic construct; identical to SEQ ID NO: 16738
  REGION 1..469: note = neuraminidase__InfluenzaA__AFB70389

SEQ ID NO: 21701 - protein, 469 aa, synthetic construct; identical to SEQ ID NO: 16738
  REGION 1..469: note = neuraminidase__InfluenzaA__AFB70399

SEQ ID NO: 21702 - protein, 469 aa, synthetic construct; identical to SEQ ID NO: 16738
  REGION 1..469: note = neuraminidase__InfluenzaA__AFB70409

SEQ ID NO: 21703 - protein, 469 aa, synthetic construct
  REGION 1..469: note = neuraminidase__InfluenzaA__AFB77614
MHPNQEVISIVSVCMTIGMANLILQIGNIISIWISHSIQLGNQNQIETCNQSVITYENNTWVNQTYVNISNTNFAAGQSVVSVKLAGNSSLCPVSGWAIYSKDNSIRIGSKGDVFVIREPFISCSPLECRTFFLTQGALLNDKHSNGTIKDRSPYRTLMSCPIGEVPSPYNSRFESVAWSASACHDGINWLTIGISGPDNGAVAVLKYNGIITDTIKSWRNNILRTQESECACVNGSCFTIMTDGPSDGQASYKIFRIEKGKIVKSVEMNAPNYHYEECSCYPDSSEITCVCRDNWHGSNRPWVSFNQNLEYQIGYICSGIFGDNPRPNDKTGSCGPVSSNGANGVKGFSFKYGNGVWIGRTKSISSRKGFEMIWDPNGWTGTDNNFSIKQDIVGINEWSGYSGSFVQHPELTGLDCIRPCFWVELIRGRPKENTIWTSGSSISFCGVNSDTVGWFWPDGAELPFTIDK

SEQ ID NO: 21704 - protein, 469 aa, synthetic construct
  REGION 1..469: note = neuraminidase__InfluenzaA__AFB77615
MHPNQEIITFVSVCMTIGMANLILQIGNIISIWISHSIQLGNQNQIETCNQSVITYENNTWVNQTYVNISNTNFAAGQSVVSVKLAGNSSLCPVSGWAIYSKDNSIRIGSKGDVFVIREPFISCSPLECRTFFLTQGALLNDKHSNGTIKDRSPYRTLMSCPIGEVPSPYNSRFESVAWSASACHDGINWLTIGISGPDNGAVAVLKYNGIITDTIKSWRNNILRTQESECACVNGSCFTIMTDGPSDGQASYKIFRIEKGKIVKSVEMNAPNYHYEECSCYPDSSEITCVCRDNWHGSNRPWVSFNQNLEYQIGYICSGIFGDNPRPNDKTGSCGPVSSNGANGVKGFSFKYGNGVWIGRTKSISSRKGFEMIWDPNGWTGTDNNFSIKQDIVGINEWSGYSGSFVQHPELTGLDCIRPCFWVELIRGRPKENTIWTSGSSISFCGVNSDTVGWSWPDGAELPFTIDK

SEQ ID NO: 21705 - protein, 469 aa, synthetic construct
  REGION 1..469: note = neuraminidase__InfluenzaA__AFB78128
MNPNQKIITIGSVSLTIATICFLMQIVILVTTVTLHFKQHECNSPPNNQVMLCEPTIIERNITEIVYLTNTTIEKEICPKLAEYRNWSKPQCKITGFAPFSKDNSIRLSAGGDIWVTREPYVSCDPDKCYQFALGQGTTLNNRHSNDTVHDRTPYRTLLMNELGVPFHLGTKQVCIAWSSSSCHDGKAWLHVCVTGHDENATASFIYDGRLVDSIGSWSKKILRTQESECVCINGTCTVVMTDGSASGRADTKILFIEEGKIVHTSKLSGSAQHVEECSCYPRYPGVRCVCRDNWKGSNRPIVDINVKDYSIVSSYVCSGLVGDTPRKNDSSSSSHCLDPNNEEGGHGVKGWAFDDGNDVWMGRTISEKSRSGYETFKVIEGWSKPNSKLQINRQVIVERGNMSGYSGIFSVEGKSCINRCFYVELIRGRKQETEVWWTSNSIVVFCGTSGTYGTGSWPDGADINLMPI

SEQ ID NO: 21706 - protein, 469 aa, synthetic construct
  REGION 1..469: note = neuraminidase__InfluenzaA__AFC62078
MNPNQKIITIGSVCMTIGMANLILQIGNIISIWISHSIQLGNQSQIETCNQSVITYENNTWVNQTYVNISNTNFAAGQSVVSVKLAGNSSLCPVSGWAIYSKDNSIRIGSKGDVFVIRELFISCSPLECRTFFLTQGALLNDKHSNGTIKDRSPYRTLMSCPIGEVPSPYNSRFESVAWSASACHDGINWLTIGISGPDNGAVAVLKYNGIITDTIKSWRNDILRTQESECACVNGSCFTIMTDGPSDGQASYKIFRIEKGKIVKSVEMNAPNYHYEECSCYPDSSEITCVCRDNWHGSNRPWVSFNQNLEYQIGYICSGIFGDNPRPNDKTGSCGPVSSNGANGVKGFSFKYGNGVWIGRTKSISSRKGFEMIWDPNGWTGTDNNFSIKQDIVGINEWSGYSGSFVQHPELTGMDCIRPCFWVELIRGRPKENTIWTSGSSISFCGVNSDTVGWSWPDGAELPFTIDK

SEQ ID NO: 21707 - protein, 469 aa, synthetic construct
  REGION 1..469: note = neuraminidase__InfluenzaA__AFC62079
MNPNQKIITIGSVCMTIGMANLILQIGNIISIWISHSIQLGNQNQIETCNQSVITYENNTWVNQTYVNISNTNFAAGQSVVSVKLAGNSSLCPVSGWAIYSKDNSIRIGSKGDVFVIREPFISCSPLECRTFFLTQGALLNDKHSNGTIKDRSPYRTLMSCPIGEVPSPYNSRFESVAWSASACHDGINWLTIGISGPDNGAVAVLKYNGIITDTIKSWRNNILRTQESECACVNGSCFTVMTDGPSDGQASYKIFRIEKGKIIKSVEMNAPNYHYEECSCYPDSSEITCVCRDNWHGSNRPWVSFNQNLEYQIGYICSGILGDNPRPNDKTGSCGPVSSNGANGVKGFSFKYGNGVWVGRTKSISSRNGFEMIWDPNGWTGTDNNFSIKQDIVGIKEWSGYSGSFVQHPELTGLDCIRPCFWVELIRGRPKENTIWTSGSIISFCGVNSDTVGWSWPDGAELPFTIDK

SEQ ID NO: 21708 - protein, 469 aa, synthetic construct
  REGION 1..469: note = neuraminidase__InfluenzaA__AFC62080
MNPNQKIITIGSVCMTIGMANLILQIGNIISIWISHSIQLGNQSQIETCNQSVITYENNTWVNQTYVNISNTNFAAGQSVVSVKLAGNSSLCPVSGWAIYSKDNSIRIGSKGDVFVIREPFISCSPLECRTFFLTQGALLNDKHSNGTIKDRSPYRTLMSCPIGEVPSPYNSRFESVAWSASACHDGINWLTIGISGPDNGAVAVLKYNGIITDTIKSWRNNILRTQESECACVNGSCFTIMTDGPSDGQASYKIFRIEKGKIVKSVEMNAPNYYYEECSCYPDSSEITCVCRDNWHGSNRPWVSFNQNLEYQIGYICSGIFGDNPRPNDKTGSCGPVSSNGANGVKGFSFKYGNGVWIGRTKSISSRKGFEMIWDPNGWTGTDNNFSIKQDIVGINEWSGYSGSFVQHPELTGMGCIRPCFWVELIRGRPKENTIWTSGSSISFCGVNSDTVGWSWPDGAELPFTIDK

SEQ ID NO: 21709 - protein, 469 aa, synthetic construct
  REGION 1..469: note = neuraminidase__InfluenzaA__AFC62082
MNPNQKIITIGSVSLTISTICFFMQIAILITTVTLHFKQYEFNSPPNNQVMLCEPTIIERNITEIVYLTNTTIEKEICPKLAEYRNWSKPQCDITGFAPFSKDNSIRLSAGGDIWVTREPYVSCDPNKCYQFALGQGTTLNNVHSNNTVRGRTPYRTLLMNELGVPFHLGTKQVCIAWSSSSCHDGKAWLHVCITGDDKNATASFIYNGRLVDSVVSWSKEILRTQESECVCINGTCTVVMTDGSASGKADTKILFIEEGKIVHTSTLSGSAQHVEECSCYPRYPGVRCVCRDNWKGSNRPIVDINMKDHSIVSSYVCSGLVGDTPRKNDSSSSSHCFDPNDEEGGHGVKGWAFDDGNDVWMGRTISEKSRLGYETFKVIEGWSNPKSKLQINRQVIVDRGDRSGYSGIFSVEGKSCINRCFYVELIRGSKEETEVLWTSNSIVVFCGTSGTYGTGSWPDGADINLMPI

SEQ ID NO: 21710 - protein, 469 aa, synthetic construct; identical to SEQ ID NO: 14225
  REGION 1..469: note = neuraminidase__InfluenzaA__AFD63529

SEQ ID NO: 21711 - protein, 469 aa, synthetic construct; identical to SEQ ID NO: 14225
  REGION 1..469: note = neuraminidase__InfluenzaA__AFD63540

SEQ ID NO: 21712 - protein, 469 aa, synthetic construct
  REGION 1..469: note = neuraminidase__InfluenzaA__AFD63551
MNPNQKIITIGSVSLTIAAICFLMQIAILVTTVTLHFKQHECNPPPNNQVMLCEPTIIERNITEIVYLTNTTIEKEICPKLAEYRNWSKPQCNITGFAPFSKDNSIRLSAGGDIWVTREPYVSCDPDKCYQFALGQGTTLNNGHSNDTVHGRTPYRTLLMNELGVPFHLGTRQVCIAWSSSSCHDGKAWLHVCVTGDDKNATASFIYNGRLVDSIGSWSKKILRTQESECVCINGTCTVVMTDGSASGKADTKILFIEEGKIVHISTLSGSAQHVEECSCYPRYPGVRCVCRDNWKGSNRPIVDINVKDYSIVSSYVCSGLVGDTPRKNDSFSSSHCLDPNNEEGGHGVKGWAFDDGNDVWMGRTISEKLRSGYETFKVIEGWSKPNSKLQINRQVIVERGNRSGYSGIFSVEGKSCINRCFYVELIRGRKEETEVWWTSNSIVVFCGTSGTYGTGSWPDGADINLMPI

SEQ ID NO: 21713 - protein, 469 aa, synthetic construct; identical to SEQ ID NO: 14225
  REGION 1..469: note = neuraminidase__InfluenzaA__AFD63562

SEQ ID NO: 21714 - protein, 469 aa, synthetic construct
  REGION 1..469: note = neuraminidase__InfluenzaA__AFD63573
MNPNQKIITIGSVSLTIATICFLMQIAILVTTVTLHFKQHECNSPPNNQVMLCEPTIIGRNITEIVYLTNTTIEKEICPKLAEYRNWSKPQCNITGFAPFSKDNSIRLSAGGDIWVTREPYVSCDPDKCYQFALGQGTTLNNGHSNDTVHDRTPYRTLLMNELGVPFHLGTRQVCIAWSSSSCHDGKAWLHVCVTGDDKNATASFIYNGRLVDSIGSWSKKILRTQESECVCINGTCTVVMTDGSASGKADTKILFIEEGKIVHISTLSGSAQHVEECSCYPRYPGVRCVCRDNWKGSNRPIVDINVKDYSIVSSYVCSGLVGDTPRKNDSFSSSHCLDPNNEEGGHGVKGWAFDDGNDVWMGRTISEKLRSGYETFKVIEGWSKPNSKLQINRQVIVERGNRSGYSGIFSVEGKSCINRCFYVELIRGRKEETEVWWTSNSIVVFCGTSGTYGTGSWPDGADINLMPI

SEQ ID NO: 21715 - protein, 469 aa, synthetic construct
  REGION 1..469: note = neuraminidase__InfluenzaA__AFD63584
MNPNQKIITIGSVSLTIATICFLMQIAILVTTVTLHFKQYECNSPPNNQVMLCEPTIIERNITEIVYLTNTTIEKEICPKLAEYRNWSKPQCNITGFAPFSKDNSIRLSAGGDIWVTREPYVSCDPDKCYQFALGQGTTLNNGHSNDTVHERTPYRTLLMNELGVPFHLGTRQVCIAWSSSSCHDGKAWLHVCVTGDDKNATASFIYNGRLVDSIGSWSKKILRTQESECVCINGTCTVVMTDGSASGKADTKILFIEEGKIIHISTLSGSAQHVEECSCYPRYPGVRCVCRDNWKGSNRPIVDINVKDYSIVSSYVCSGLVGDTPRKNDSSSSSHCLDPNNEEGGHGVKGWAFDDGNDVWMGRTISEKLRSGYETFKVIEGWSKPNSKLQINRQVIVERGNRSGYSGIFSVEGKSCINRCFYVELIRGRKEETEVWWTSNSIVVFCGTSGTYGTGSWPDGADINLMPI

SEQ ID NO: 21716 - protein, 469 aa, synthetic construct
  REGION 1..469: note = neuraminidase__InfluenzaA__AFD63595
MNPNQKIITIGSVSLTIAAICFLMQIAILVTTVTLHFKQHECNSPPNNQVMLCEPTIIERNITEIVYLTNTTIEKEICPKLAEYRNWSKPQCNITGFAPFSKDNSIRLSAGGDIWVTREPYVSCDPDKCYQFALGQGTTLNNGHSNDTVHDRTPYRTLLMNELGVPFHLGTRQVCIAWSSSSCHDGKAWLHVCVTGDDKNATASFIYNGRLVDSIGSWSKKILRTQESECVCINGTCTVVMTDGSASGKADTKILFIEEGKIVHISTLSGSAQHVEECSCYPRYPGVRCVCKDNWKGSNRPIVDINVKDYSIVSSYVCSGLVGDTPRKNDSFSSSHCLDPNNEEGGHGVKGWAFDDGNDVWMGRTISEKLRSGYETFKVIEGWSKPNSKLQINRQVIVERGNRSGYSGIFSVEGKSCINRCFYVELIRGRKEETEVWWTSNSIVVFCGTSGTYGTGSWPDGADINLMPI

SEQ ID NO: 21717 - protein, 469 aa, synthetic construct; identical to SEQ ID NO: 14225
  REGION 1..469: note = neuraminidase__InfluenzaA__AFD63606

SEQ ID NO: 21718 - protein, 469 aa, synthetic construct; identical to SEQ ID NO: 14145
  REGION 1..469: note = neuraminidase__InfluenzaA__AFD63628

SEQ ID NO: 21719 - protein, 469 aa, synthetic construct; identical to SEQ ID NO: 14225
  REGION 1..469: note = neuraminidase__InfluenzaA__AFD63639

SEQ ID NO: 21720 - protein, 469 aa, synthetic construct; identical to SEQ ID NO: 14225
  REGION 1..469: note = neuraminidase__InfluenzaA__AFD63650

SEQ ID NO: 21721 - protein, 469 aa, synthetic construct
  REGION 1..469: note = neuraminidase__InfluenzaA__AFD63661
MNPNQKIITIGSVSLTIAAICFLMQIAILVTTVTLHFKQHECNSPPNNQVMLCEPTIIERNITEIVYLTNSTIEKEICPKLAEYRNWSKPQCNITGFAPFSKDNSIRLSAGGDIWVTREPYVSCDPDKCYQFALGQGTTLNNGHSNDTVHDRTPYRTLLMNELGVPFHLGTRQVCIAWSSSSCHDGKAWLHVCVTGDDKNATASFIYNGRLVDSIGSWSKKILRTQESECVCINGTCTVVMTDGSASGKADTKILFIEEGKIVHISTLSGSAQHVEECSCYPRYPGVRCVCRDNWKGSNRPIVDINVKDYSIVSSYVCSGLVGDTPRKNDSFSSSHCLDPNNEEGGHGVKGWAFDDGNDVWMGRTISEKLRSGYETFKVIEGWSKPNSKLQINRQVIVERGNRSGYSGIFSVEGKSCINRCFYVELIRGRKEETEVWWTSNSIVVFCGTSGTYGTGSWPDGADINLMPI

SEQ ID NO: 21722 - protein, 469 aa, synthetic construct; identical to SEQ ID NO: 15931
  REGION 1..469: note = neuraminidase__InfluenzaA__AFD63672

SEQ ID NO: 21723 - protein, 469 aa, synthetic construct
  REGION 1..469: note = neuraminidase__InfluenzaA__AFD63683
MNPNQKIITMGSVSLTIATICFLMQIAILVTTVTLHFKQYECNSPPNNQVMLCEPTIIERNITEIVYLTNTTIEKEICPKLAEYRNWSKPQCNITGFAPFSKDNSIRLSAGGDIWVTREPYVSCDPDKCYQFALGQGTTLNNGHSNDTVHGRTPYRTLLMNELGVPFHLGTRQVCIAWSSSSCHDGKAWLHVCVTGDDKNATASFIYNGRLVDSIGSWSKKILRTQESECVCINGTCTVVMTDGSASGKADTKILFIEEGKIIHISTLSGSAQHVEECSCYPRYPGVRCVCRDNWKGSNRPIVDINVKDYSIVSSYVCSGLVGDTPRKNDSSSSSHCLDPNNEEGGHGVKGWAFDDGNDVWMGRTISEKLRSGYETFKVIEGWSKPNSKLQINRQVIVERGNRSGYSGIFSVEGKSCINRCFYVELIRGRKEETEVWWTSNSIVVFCGTSGTYGTGSWPDGADINLMPI

SEQ ID NO: 21724 - protein, 469 aa, synthetic construct
  REGION 1..469: note = neuraminidase__InfluenzaA__AFD63694
MNPNQKIITIGSVSLTIATICFLMQIAILVTTITLHFKQHECNSPPNNQVMLCEPTIIERNITEIVYLTNTTIEKEICPKLAEYRNWSKPQCNITGFAPFSKDNSIRLSAGGDIWVTREPYVSCDPDKCYQFALGQGTTLNNGHSNDTVHDRTPYRTLLMNELGVPFHLGTRQVCIAWSSSSCHDGKAWLHVCVTGDDKNATASFIYNGRLVDSIGSWSKKILRTQESECVCINGTCTVVMTDGSASGKADTKILFIEEGKIVHISTLSGSAQHVEECSCYPRYPGVRCVCRDNWKGSNRPIVDINVKDYSIVSSYVCSGLVGDTPRKNDSFSSSHCLDPNNEEGGHGVKGWAFDDGNDVWMGRTISEKLRSGYETFKVIEGWSKPNSKLQINRQVIVERGNRSGYSGIFSVEGKSCINRCFYVELIRGRKEETEVWWTSNSIVVFCGTSGTYGTGSWPDGADINLMPI

SEQ ID NO: 21725 - protein, 469 aa, synthetic construct
  REGION 1..469: note = neuraminidase__InfluenzaA__AFD63705
MNPNQKIITIGSVSLTIAAICFLMQIAILVTTVTLHFKQHECNSPPNNQVMLCEPTIIERNITEIVYLTNTTIEKEICPKLAEYRNWSKPQCNITGFAPFSKDNSIRLSAGGDIWVTREPYVSCDPDKCYQFALGKGTTLNNGHSNDTVHDRTPYRTLLMNELGVPFHLGTRQVCIAWSSSSCHDGKAWLHVCVTGDDKNATASFIYNGRLVDSIGSWSKKILRTQESECVCINGTCTVVMTDGSASGKADTKILFIEEGKIVHISTLSGSAQHVEECSCYPRYPGVRCVCRDNWKGSNRPIVDINVKDYSIVSSYVCSGLVGDTPRKNDSFSSSHCLDPNNEEGGHGVKGWAFDDGNDVWMGRTISEKLRSGYETFKVIEGWSKPNSKLQINRQVIVERGNRSGYSGIFSVEGKSCINRCFYVELIRGRKEETEVWWTSNSIVVFCGTSGTYGTGSWPDGADINLMPI

SEQ ID NO: 21726 - protein, 469 aa, synthetic construct
  REGION 1..469: note = neuraminidase__InfluenzaA__AFD63716
MNPNQKIITIGSVSLTIAAICFLMQIAILVTTVTLHFKQHECNSPPNNQVMLCEPTIIERNITEIVYLTNTTIEKEICPKLAEYRNWSKPQCNITGFAPFSKDNSIRLSAGGDIWVTREPYVSCDPDKCHQFALGQGTTLNNGHSNDTVHDRTPYRTLLMNELGVPFHLGTRQVCIAWSSSSCHDGKAWLHVCVTGDDKNATASFIYNGRLVDSIGSWSKKILRTQESECVCINGTCTVVMTDGSASGKADTKILFIEEGKIVHISTLSGSAQHVEECSCYPRYPGVRCVCRDNWKGSNRPIVDINVKDYSIVSSYVCSGLVGDTPRKNDSFSSSHCLDPNNEEGGHGVKGWAFDDGNDVWMGRTISEKLRSGYETFKVIEGWSKPNSKLQINRQVIVERGNRSGYSGIFSVEGKSCINRCFYVELIRGRKEETEVWWTSNSIVVFCGTSGTYGTGSWPDGADINLMPI

SEQ ID NO: 21727 - protein, 469 aa, synthetic construct; identical to SEQ ID NO: 14225
  REGION 1..469: note = neuraminidase__InfluenzaA__AFD63727

SEQ ID NO: 21728 - protein, 469 aa, synthetic construct; identical to SEQ ID NO: 14225
  REGION 1..469: note = neuraminidase__InfluenzaA__AFD63738

SEQ ID NO: 21729 - protein, 469 aa, synthetic construct
  REGION 1..469: note = neuraminidase__InfluenzaA__AFD63749
MNPNQKIITISSVSLTIATICFLMQIAILVTTVTLHFKQHECNSPPNNQVMLCEPTIIERNITEIVYLTNTTIEKEICPKLAEYRNWSKPQCNITGFAPFSKDNSIRLSAGGDIWVTREPYVSCDPDKCYQFALGQGTTLNNGHSNDTVHDRTPYRTLLMNELGVPFHLGTRQVCIAWSSSSCHDGKAWLHVCVTGDDKNATASFIYNGRLVDSIGSWSKKILRTQESECVCINGTCTVVMTDGSASGKADTKILFIEEGKIVHISTLSGSAQHVEECSCYPRYPGVRCVCRDNWKGSNRPIVDINVKDYSIVSSYVCSGLVGDTPRKNDSFSSSHCLDPNNEEGGHGVKGWAFDDGNDVWMGRTISEKLRSGYETFKVIEGWSKPNSKLQINRQVIVERGNRSGYSGIFSVEGKSCINRCFYVELIRGRKEETEVWWTSNSIVVFCGTSGTYGTGSWPDGADINLMPI

SEQ ID NO: 21730 - protein, 469 aa, synthetic construct
  REGION 1..469: note = neuraminidase__InfluenzaA__AFD63760
MNPNQKIITIGSVSLTIATICFLMQIAILVTTVTLHFKQYECNSPPNNQVMLCEPTIIERNITEIVYLTNTTIEKEICPKLAEYRNWSKPQCNITGFAPFSKDNSIRLSAGGDIWVTREPYVSCDPDKCYQFALGQGTTLNNGHSNDTVHDRTPYRTLLMNELGVPFHLGTRQVCIAWSSSSCHDGKAWLHVCVTGDDKNATASFIYNGRLVDSIGSWSKKILRTQESECVCINGTCTVVMTDGSASGKADTKILFIEEGKIIHISTLSGSAQHVEECSCYPRYPGVRCVCRDNWKGSNRPIVDINVKDYSIVSSYVCSGLVGDTPRKNDSSSSSHCLDPNNEEGGHGVKGWAFDDGNDVWMGRTISEKLRSGYETFKVIEGWSKPNSKLQINRQVIVERGNRSGYSGIFSVEGKSCINRCFYVELIRGRKEETEVWWTSNSIVVFCGTSGTYGTGSWPDGADINLMPI

SEQ ID NO: 21731 - protein, 469 aa, synthetic construct; identical to SEQ ID NO: 14225
  REGION 1..469: note = neuraminidase__InfluenzaA__AFD63771

SEQ ID NO: 21732 - protein, 469 aa, synthetic construct; identical to SEQ ID NO: 14225
  REGION 1..469: note = neuraminidase__InfluenzaA__AFD63782

SEQ ID NO: 21733 - protein, 469 aa, synthetic construct; identical to SEQ ID NO: 21730
  REGION 1..469: note = neuraminidase__InfluenzaA__AFD63793

SEQ ID NO: 21734 - protein, 469 aa, synthetic construct; identical to SEQ ID NO: 14225
  REGION 1..469: note = neuraminidase__InfluenzaA__AFD63804

SEQ ID NO: 21735 - protein, 469 aa, synthetic construct; identical to SEQ ID NO: 14225
  REGION 1..469: note = neuraminidase__InfluenzaA__AFD63815

SEQ ID NO: 21736 - protein, 469 aa, synthetic construct; identical to SEQ ID NO: 14225
  REGION 1..469: note = neuraminidase__InfluenzaA__AFD63826

SEQ ID NO: 21737 - protein, 469 aa, synthetic construct; identical to SEQ ID NO: 21730
  REGION 1..469: note = neuraminidase__InfluenzaA__AFD63837

SEQ ID NO: 21738 - protein, 469 aa, synthetic construct
  REGION 1..469: note = neuraminidase__InfluenzaA__AFD63848
MNPNQKIITIGSVSLTIAAICFLMQIAILVTTVTLHFKQRECNSPPNNQVMLCEPTIIERNITEIVYLTNTTIEKEICPKLAEYRNWSKPQCNITGFAPFSKDNSIRLSAGGDIWVTREPYVSCDPDKCYQFALGQGTTLNNGHSNDTVHDRTPYRTLLMNELGVPFHLGTRQVCIAWSSSSCHDGKAWLHVCVTGDDKNATASFIYNGRLVDSIGSWSKKILRTQESECVCINGTCTVVMTDGSASGKADTKILFIEEGKIVHISTLSGSAQHVEECSCYPRYPGVRCVCRDNWKGSNRPIVDINVKDYSIVSSYVCSGLVGDTPRKNDSFSSSHCLDPNNEEGGHGVKGWAFDDGNDVWMGRTISEKLRSGYETFKVIEGWSKPNSKLQINRQVIVERGNRSGYSGIFSVEGKSCINRCFYVELIRGRKEKTEVWWTSNSIVVFCGTSGTYGTGSWPDGADINLMPI

SEQ ID NO: 21739 - protein, 469 aa, synthetic construct; identical to SEQ ID NO: 14145
  REGION 1..469: note = neuraminidase__InfluenzaA__AFD63859

SEQ ID NO: 21740 - protein, 469 aa, synthetic construct; identical to SEQ ID NO: 14145
  REGION 1..469: note = neuraminidase__InfluenzaA__AFD63870

SEQ ID NO: 21741 - protein, 469 aa, synthetic construct; identical to SEQ ID NO: 14225
  REGION 1..469: note = neuraminidase__InfluenzaA__AFD63881

SEQ ID NO: 21742 - protein, 469 aa, synthetic construct; identical to SEQ ID NO: 14225
  REGION 1..469: note = neuraminidase__InfluenzaA__AFD63892

SEQ ID NO: 21743 - protein, 469 aa, synthetic construct
  REGION 1..469: note = neuraminidase__InfluenzaA__AFD63903
MNPNQKIITIGSVSLTIAAICFLMQIAILVTTVTLHFKQHECNSPPNNQVMLCEPTIIERNITGIVYLTNTTIEKEICPKLAEYRNWSKPQCNITGFAPFSKDNSIRLSAGGDIWVTREPYVSCDPDKCYQFALGQGTTLNNGHSNDTVHDRTPYRTLLMNELGVPFHLGTRQVCIAWSSSSCHDGKAWLHVCVTGDDKNATASFIYNGRLVDSIGSWSKKILRTQESECVCINGTCTVVMTDGSASGKADTKILFIEEGKIVHISTLSGSAQHVEECSCYPRYPGVRCVCRDNWKGSNRPIVDINVKDYSIVSSYVCSGLVGDTPRKNDSFSSSHCLDPNNEEGGHGVKGWAFDDGNDVWMGRTISEKLRSGYETFKVIEGWSKPNSKLQINRQVIVERGNRSGYSGIFSVEGKSCINRCFYVELIRGRKEETEVWWTSNSIVVFCGTSGTYGTGSWPDGADINLMPI

SEQ ID NO: 21744 - protein, 469 aa, synthetic construct
  REGION 1..469: note = neuraminidase__InfluenzaA__AFD63914
MNPNQKIITIGSVSLTIAAICFLMQIAILVTTVTLHFKQHECNSPPNNQVMLCEPTIIERNITEIVYLTNTTIEKEICPKLAEYRNWSKPQCNITGFAPFSKDNSIRLSAGGDIWVTREPYVSCDPDKCYQFALGQGTTLNNGHSNDTVHDRTPYRTLLMNELGVPFHLGTRQVCIAWSSSSCHDGKAWLHVCVTGDDKNATASFIYNGRLVDSIGSWSKKILRTQESECVCINGTCTVVMTDGSASGKADTKILFIEEGKIVHISTLSGSAQHVEECSCYPRYPGVRCVCRDNWKGSNRPIVDINVKDYSIVSSYVCSGLVGDTPRKNDSFSSSHCLDPNNEEGGHGVKGWAFDDGNDVWMGRTISEKLRSGYETFKVIEGWSKPNSKLQINRQVIVERGNRSGYSGIFSVEGKSCINRCFYVELIRGRKEKTEVWWTSNSIVVFCGTSGTYGTGSWPDGADINLMPI

SEQ ID NO: 21745 - protein, 469 aa, synthetic construct; identical to SEQ ID NO: 21730
  REGION 1..469: note = neuraminidase__InfluenzaA__AFD63925

SEQ ID NO: 21746 - protein, 469 aa, synthetic construct
  REGION 1..469: note = neuraminidase__InfluenzaA__AFD63936
MNPNQKIITIGSVSLTIATICFLMQIAILVTTVTLHFKQHECNPPPNNQVMLCEPTIIERNITEIVYLTNTTIEKEICPKLAEYRNWSKPQCNITGFAPFSKDNSIRLSAGGDIWVTREPYVSCDPDKCYQFALGQGTTLNNGHSNDTVHDRTPYRTLLMNELGVPFHLGTRQVCIAWSSSSCHDGKAWLHVCVTGDDKNATASFIYNGRLVDSIGSWSKKILRTQESECVCINGTCTVVMTDGSASGKADTKILFIEEGKIVHISTLSGSAQHVEECSCYPRYPGVRCVCRDNWKGSNRPIVDINVKDYSIVSSYVCSGLVGDTPRKNDSFSSSHCLDPNNEEGGHGVKGWAFDDGNDVWMGRTISEKLRSGYETFKVIEGWSKPNSKLQINRQVIVERGNRSGYSGIFSVEGKSCINRCFYVELIRGRKEETEVWWTSNSIVVFCGTSGTYGTGSWPDGADINLMPI

SEQ ID NO: 21747 - protein, 469 aa, synthetic construct; identical to SEQ ID NO: 14225
  REGION 1..469: note = neuraminidase__InfluenzaA__AFD63947

SEQ ID NO: 21748 - protein, 469 aa, synthetic construct; identical to SEQ ID NO: 14225
  REGION 1..469: note = neuraminidase__InfluenzaA__AFD63958

SEQ ID NO: 21749 - protein, 469 aa, synthetic construct; identical to SEQ ID NO: 14225
  REGION 1..469: note = neuraminidase__InfluenzaA__AFD63969

SEQ ID NO: 21750 - protein, 469 aa, synthetic construct; identical to SEQ ID NO: 14225
  REGION 1..469: note = neuraminidase__InfluenzaA__AFD63980

SEQ ID NO: 21751 - protein, 469 aa, synthetic construct
  REGION 1..469: note = neuraminidase__InfluenzaA__AFD64002
MNPNQKIITIGSVSLTIAAICFLMQIAILVTTVTLHFKQHECNSPPNNQVMLCEPTIIERNITEIVYLTNTTIEKEICPKLAEYRNWSKPQCNITGFAPFSKDNSIRLSAGGDIWVTREPYVSCDPDKCYQFALGQGTTLNNGHSNDTVHDRTPYRTLLMNELGVPFHLGTRQVCIAWSSSSCHDGKAWLHVCVTGDDKNATASFIYNGRLVDSIGSWSKKILRTQESECVCINGTCTVVMTDGSASGKADTKILFIEEGKIVHISTLSGSAQHVEECSCYPRYPGVRCVCRDNWKGSNRPIVDINVKDYSIVSSYVCSGLVGDTPRKTDSFSSSHCLDPNNEEGGHGVKGWAFDDGNDVWMGRTISEKLRSGYETFKVIEGWSKPNSKLQINRQVIVERGNRSGYSGIFSVEGKSCINRCFYVELIRGRKEETEVWWTSNSIVVFCGTSGTYGTGSWPDGADINLMPI

SEQ ID NO: 21752 - protein, 469 aa, synthetic construct; identical to SEQ ID NO: 14135
  REGION 1..469: note = neuraminidase__InfluenzaA__AFD64013

SEQ ID NO: 21753 - protein, 469 aa, synthetic construct
  REGION 1..469: note = neuraminidase__InfluenzaA__AFD64024
MNPNQKIITIGSVSLTIAAICFLMQIAILVTTVTLHFKQHECNSPPNNQVMLCEPTIIEKNITEIVYLTNTTIEKEICPKLAEYRNWSKPQCNITGFAPFSKDNSIRLSAGGDIWVTREPYVSCDPDKCYQFALGQGTTLNNGHSNDTVHDRTPYRTLLMNELGVPFHLGTRQVCIAWSSSSCHDGKAWLHVCVTGDDKNATASFIYNGRLVDSIGSWSKKILRTQESECVCINGTCTVVMTDGSASGKADTKILFIEEGKIVHISTLSGSAQHVEECSCYPRYPGVRCVCRDNWKGSNRPIVDINVKDYSIVSSYVCSGLVGDTPRKNDSFSSSHCLDPNNEEGGHGVKGWAFDDGNDVWMGRTISEKLRSGYETFKVIEGWSKPNSKLQINRQVIVERGNRSGYSGIFSVEGKSCINRCFYVELIRGRKEETEVWWTSNSIVVFCGTSGTYGTGSWPDGADINLMPI

SEQ ID NO: 21754 - protein, 469 aa, synthetic construct
  REGION 1..469: note = neuraminidase__InfluenzaA__AFD64035
MNPNQKIITIGSVSLTIAAICFLMQIAILVTTVTLHFKQHECNSPPNNQVMLCEPTIIERNITEIVYLTNTTIEKEICPKLAEYRNWSKPQCNITGFAPFSKDNSIRLSAGGDIWVTREPYVSCDPDKCYQFALGQGTTLNNGHSNDTVHDRTPYRTLLMNELGVPFHLGTRQVCIAWSSSSCHDGKAWLHVCVTGDDKNATASFIYNGRLVDSIGSWSKKILRTQESECVCINGTCTVVMTDGSASGKADTKILFIEEGKIVHISTLSGSAQHVEECSCYPRYPGVRCVCRDNWKGSNRPIVDINVKDYSIVSSYVCSGLVGDTPRKNDSFSSSHCLDPNNEEGGHGVKGWAFDDGNDVWMGRTISEKLRSGYETFKVIEGWSKPNSKLQINRQVIVERGNRSGYSGIFSVEGKSCINRCFYVELIRGRKEETEVWWTSNSVVVFCGTSGTYGTGSWPDGADINLMPI

SEQ ID NO: 21755 - protein, 469 aa, synthetic construct
  REGION 1..469: note = neuraminidase__InfluenzaA__AFD64046
MNPNQKIITIGSVSLTIATICFLMQIAILVTTVTLHFKQHECNSPPNNQVMLCEPTIIERNITEIVYLTNTTIEKEICPKLAEYRNWSKPQCNITGFAPFSKDNSIRLSAGGDIWVTREPYVSCDPDKCYQFALGQGTTLNNGHSNDTVHERTPYRTLLMNELGVPFHLGTRQVCIAWSSSSCHDGKAWLHVCVTGDDKNATASFIYNGRLVDSIGSWSKKILRTQESECVCINGTCTVVMTDGSASGKADTKILFIEEGKIVHISTLSGSAQHVEECSCYPRYPGVRCVCRDNWKGSNRPIVDINVKDYSIVSSYVCSGLVGDTPRKNDSFSSSHCLDPNNEEGGHGVKGWAFDDGNDVWMGRTISEKLRSGYETFKVIEGWSKPNSKLQINRQVIVERGNRSGYSGIFSVEGKSCINRCFYVELIRGRKEETEVWWTSNSIVVFCGTSGTYGTGSWPDGADINLMPI

SEQ ID NO: 21756 - protein, 469 aa, synthetic construct; identical to SEQ ID NO: 21730
  REGION 1..469: note = neuraminidase__InfluenzaA__AFD64057

SEQ ID NO: 21757 - protein, 469 aa, synthetic construct
  REGION 1..469: note = neuraminidase__InfluenzaA__AFD64068
MNPNQKIITIGSVSLTISTICFFMQIAILITTVTLHFKQYEFNSPPNNQVMLCEPTIIERNITEIVYLTNTTIEKEICPKLAEYRNWSKPQCDITGFAPFSKDNSIRLSAGGDIWVTREPYVSCDPDKCYQFALGQGTTLNNVHSNDTVHNRTPYRTLLMNELGVPFHLGTKQVCIAWSSSSCHDGKAWLHVCVTGDDKNATASFIYNGRLVDSIVSWSKKILRTQESECVCINGTCTVVMTDGSASGKADTKILFIEEGKIVHTSTLSGSAQHVEECSCYPRYPGVRCVCRDNWKGSNRPIVDINIKDYSIVSSYVCSGLVGDTPRKNDSSSSSHCLDPNNEEGGHGVKGWAFDDGNDVWMGRTISEKSRSGYETFKVIEGWSNPNSKLQINRQVIVDRGNRSGYSGIFSVEGKSCINRCFYVELIRGRKEETEVLWTSNSIVVFCGTSGTYGTGSWPDGADINLMPI

SEQ ID NO: 21758 - protein, 469 aa, synthetic construct
  REGION 1..469: note = neuraminidase__InfluenzaA__AFD64079
MNPNQKIITIGSVSLTIAAICFLMQIAILVTTVTLHFKQHECNSPPNNQVMLCEPTIIERNITEIVYLTNTTIEKEICPKLAEYRNWSKPQCNITGFAPFSKDNSIRISAGGDIWVTREPYVSCDPDKCYQFALGQGTTLNNGHSNDTVHDRTPYRTLLMNELGVPFHLGTRQVCIAWSSSSCHDGKAWLHVCVTGDDKNATASFIYNGRLVDSIGSWSKKILRTQESECVCINGTCTVVMTDGSASGKADTKILFIEEGKIVHISTLSGSAQHVEECSCYPRYPGVRCVCRDNWKGSNRPIVDINVKDYSIVSSYVCSGLVGDTPRKNDSFSSSHCLDPNNEEGGHGVKGWAFDDGNDVWMGRTISEKLRSGYETFKVIEGWSKPNSKLQINRQVIVERGNRSGYSGIFSVEGKSCINRCFYVELIRGRKEETEVWWTSNSIVVFCGTSGTYGTGSWPDGADINLMPI

SEQ ID NO: 21759 - protein, 469 aa, synthetic construct; identical to SEQ ID NO: 14225
  REGION 1..469: note = neuraminidase__InfluenzaA__AFD64090

SEQ ID NO: 21760 - protein, 469 aa, synthetic construct
  REGION 1..469: note = neuraminidase__InfluenzaA__AFD64101
MNPNQKIITIGSVSLTIAAICFLMQIAILVTTVTLHFKQHECNSPPNNQVMLCEPTIIERNITEIVYLTNTTIEKEICPKLAEYRNWSKPQCNITGFAPFSKDNSIRLSAGGDIWVTREPYVSCDPDKCYQFALGQGTTLNNGHSNDTVHGRTPYRTLLMNELGVPFHLGTRQVCIAWSSSSCHDGKAWLHVCVTGDDKNATASFIYNGRLVDSIGSWSKKILRTQESECVCINGTCTVVMTDGSASGKADTKILFIEEGKIVHISTLSGSAQHVEECSCYPRYPGVRCVCRDNWKGSNRPIVDINVKDYSIVSSYVCSGLVGDTPRKNDSFSSSHCLDPNNEEGGHGVKGWAFDDGNDVWMGRTISEKLRSGYETFKVIEGWSKPNSKLQINRQVIVERGNRSGYSGIFSVEGKSCINRCFYVELIRGRKEETEVWWTSNSIVVFCGTSGTYGTGSWPDGADINLMPI

SEQ ID NO: 21761 - protein, 469 aa, synthetic construct
  REGION 1..469: note = neuraminidase__InfluenzaA__AFD64112
MNPNQKIITIGSVSLTIATICFLMQIAILVTTVTLHFKQYECNSPPNNQVMLCEPTIIERNITEIVYLTNTTIEKEICPKLAEYRNWSKPQCNITGFAPFSKDNSIRLSAGGDIWVTREPYVSCDPDKCYQFALGQGTTLNNGHSNDTVHDRTPYRTLLMNELGVPFHLGTRQVCIAWSSSSCHDGKAWLHVCVTGDDKNATASFIYNGRLVDSIGSWSKKILRTQESECVCINGTCTVVMTDGSASGKADTKILFIEEGKIIHISTLSGSAQHVEECSCYPRYPGVRCVCRDNWKGSNRPIVDINVKDYSIVSSYVCSGLVGDTPRKNDSSSSSHCLDPNNEEGGHGVKGWAFDDGNDVWMGRTISEKLRSGYETFKVIEGWSKPNSKLQINRQVIVERDNRSGYSGIFSVEGKSCINRCFYVELIRGRKEETEVWWTSNSIVVFCGTSGTYGTGSWPDGADINLMPI

SEQ ID NO: 21762 - protein, 469 aa, synthetic construct; identical to SEQ ID NO: 15931
  REGION 1..469: note = neuraminidase__InfluenzaA__AFD64123

SEQ ID NO: 21763 - protein, 469 aa, synthetic construct; identical to SEQ ID NO: 14225
  REGION 1..469: note = neuraminidase__InfluenzaA__AFD64134

SEQ ID NO: 21764 - protein, 469 aa, synthetic construct; identical to SEQ ID NO: 14225
  REGION 1..469: note = neuraminidase__InfluenzaA__AFD64145

SEQ ID NO: 21765 - protein, 469 aa, synthetic construct; identical to SEQ ID NO: 14225
  REGION 1..469: note = neuraminidase__InfluenzaA__AFD64156

SEQ ID NO: 21766 - protein, 469 aa, synthetic construct; identical to SEQ ID NO: 14145
  REGION 1..469: note = neuraminidase__InfluenzaA__AFD64167

SEQ ID NO: 21767 - protein, 469 aa, synthetic construct; identical to SEQ ID NO: 14225
  REGION 1..469: note = neuraminidase__InfluenzaA__AFD64181

SEQ ID NO: 21768 - protein, 469 aa, synthetic construct
  REGION 1..469: note = neuraminidase__InfluenzaA__AFD64192
MNPNQKIITIGSVSLTIAAICFLMQIAILVTTVTLHFKQHECNSPPNNQVMLCEPTIIERNITEIVYLTNTTIEKEICPKLAEYRNWSKPQCNITGFAPFSKDNSIRLSAGGDIWVTREPYVSCDPDKCYQFALGQGTTLNNGHSNDTVHDRTPYRTLLMNELGVPFHLGTRQVCIAWSSSSCHDGKAWLHVCVTGDDKNATASFIYNGRLVDSIGSWSKKILRTQESECVCINGTCTVVMTDGSASGKADTKILFIEEGKIVHVSTLSGSAQHVEECSCYPRYPGVRCVCRDNWKGSNRPIVDINVKDYSIVSSYVCSGLVGDTPRKNDSFSSSHCLDPNNEEGGHGVKGWAFDDGNDVWMGRTISEKLRSGYETFKVIEGWSKPNSKLQINRQVIVERGNRSGYSGIFSVEGKSCINRCFYVELIRGRKEETEVWWTSNSIVVFCGTSGTYGTGSWPDGADINLMPI

SEQ ID NO: 21769 - protein, 469 aa, synthetic construct
  REGION 1..469: note = neuraminidase__InfluenzaA__AFD64203
MNPNQKIITIGSVSLTIAAICFLMQIAILVTTVTLHFKQHECNSPPNNQVMLCEPTIIERNITEIVYLTNTTIEKEICPKLAEYRNWSKPQCNITGFAPFSKDNSIRLSAGGDIWVTREPYVSCDPDKCYQFALGQGTTLNNRHSNDTVHDRTPYRTLLMNELGVPFHLGTRQVCIAWSSSSCHDGKAWLHVCVTGDDKNATASFIYNGRLVDSIGSWSKKILRTQESECVCINGTCTVVMTDGSASGKADTKILFIEEGKIVHISTLSGSAQHVEECSCYPRYPGVRCVCRDNWKGSNRPIVDINVKDYSIVSSYVCSGLVGDTPRKNDSFSSSHCLDPNNEEGGHGVKGWAFDDGNDVWMGRTLSEKLRSGYETFKVIEGWSKPNSKLQINRQVIVERGNRSGYSGIFSVEGKSCINRCFYVELIRGRKEETEVWWTSNSIVVFCGTSGTYGTGSWPDGADINLMPI

SEQ ID NO: 21770 - protein, 469 aa, synthetic construct; identical to SEQ ID NO: 21730
  REGION 1..469: note = neuraminidase__InfluenzaA__AFD64214

SEQ ID NO: 21771 - protein, 469 aa, synthetic construct; identical to SEQ ID NO: 15929
  REGION 1..469: note = neuraminidase__InfluenzaA__AFD64225

SEQ ID NO: 21772 - protein, 469 aa, synthetic construct; identical to SEQ ID NO: 14225
  REGION 1..469: note = neuraminidase__InfluenzaA__AFD64317

SEQ ID NO: 21773 - protein, 469 aa, synthetic construct; identical to SEQ ID NO: 15931
  REGION 1..469: note = neuraminidase__InfluenzaA__AFD64328

SEQ ID NO: 21774 - protein, 469 aa, synthetic construct; identical to SEQ ID NO: 21730
  REGION 1..469: note = neuraminidase__InfluenzaA__AFD64339

SEQ ID NO: 21775 - protein, 469 aa, synthetic construct; identical to SEQ ID NO: 14225
  REGION 1..469: note = neuraminidase__InfluenzaA__AFD64350

SEQ ID NO: 21776 - protein, 469 aa, synthetic construct; identical to SEQ ID NO: 21730
  REGION 1..469: note = neuraminidase__InfluenzaA__AFD64361

SEQ ID NO: 21777 - protein, 469 aa, synthetic construct; identical to SEQ ID NO: 21730
  REGION 1..469: note = neuraminidase__InfluenzaA__AFD64372

SEQ ID NO: 21778 - protein, 469 aa, synthetic construct; identical to SEQ ID NO: 14225
  REGION 1..469: note = neuraminidase__InfluenzaA__AFD64383

SEQ ID NO: 21779 - protein, 469 aa, synthetic construct; identical to SEQ ID NO: 21730
  REGION 1..469: note = neuraminidase__InfluenzaA__AFD64394

SEQ ID NO: 21780 - protein, 469 aa, synthetic construct; identical to SEQ ID NO: 14225
  REGION 1..469: note = neuraminidase__InfluenzaA__AFD64405

SEQ ID NO: 21781 - protein, 469 aa, synthetic construct; identical to SEQ ID NO: 14225
  REGION 1..469: note = neuraminidase__InfluenzaA__AFD64416

SEQ ID NO: 21782 - protein, 469 aa, synthetic construct; identical to SEQ ID NO: 14225
  REGION 1..469: note = neuraminidase__InfluenzaA__AFD64427

SEQ ID NO: 21783 - protein, 469 aa, synthetic construct
  REGION 1..469: note = neuraminidase__InfluenzaA__AFD64438
MNPNQKIITIGSVSLTIAAICFLMQIAILVTTVTLHFKQHECNSPPNNQVMLCEPTIIERNITEIVYLTNTTIEKEICPNLAEYRNWSKPQCNITGFAPFSKDNSIRLSAGGDIWVTREPYVSCDPDKCYQFALGQGTTLNNGHSNDTVHDRTPYRTLLMNELGVPFHLGTRQVCIAWSSSSCHDGKAWLHVCVTGDDKNATASFIYNGRLVDSIGSWSKKILRTQESECVCINGTCTVVMTDGSASGKADTKILFIEEGKIVHISTLSGSAQHVEECSCYPRYPGVRCVCRDNWKGSNRPIVDINVKDYSIVSSYVCSGLVGDTPRKNDSFSSSHCLDPNNEEGGHGVKGWAFDDGNDVWMGRTISEKLRSGYETFKVIEGWSKPNSKLQINRQVIVERGNRSGYSGIFSVEGKSCINRCFYVELIRGRKEETEVWWTSNSIVVFCGTSGTYGTGSWPDGADINLMPI

SEQ ID NO: 21784 - protein, 469 aa, synthetic construct; identical to SEQ ID NO: 14225
  REGION 1..469: note = neuraminidase__InfluenzaA__AFD64449

SEQ ID NO: 21785 - protein, 469 aa, synthetic construct; identical to SEQ ID NO: 14145
  REGION 1..469: note = neuraminidase__InfluenzaA__AFD64460

SEQ ID NO: 21786 - protein, 469 aa, synthetic construct; identical to SEQ ID NO: 21143
  REGION 1..469: note = neuraminidase__InfluenzaA__AFD98098

SEQ ID NO: 21787 - protein, 469 aa, synthetic construct
  REGION 1..469: note = neuraminidase__InfluenzaA__AFD98120
MNPNQKIITIGSVSLTISTICFFMQIAILITTVTLHFKQYEFNSPPNNQVMLCEPTIIERNITEIVYLTNTTIEKEICPKLAEYRNWSKPQCDITGFAPFSKDNSIRLSAGGDIWVTREPYVSCDPDKCYQFALGQGTTLNNVHSNNTVRDRTPYRTLLMNELGVPFHLGTKQVCIAWSSSSCHDGKAWLHVCITGDDKNATASFIYNGRLVDSVVSWSKEILRTQESECVCINGTCTVVMTDGSASGKADTKILFIEEGKIVHTSTLSGSAQHVEECSCYPRYPGVRCVCRDNWKGSNRPIVDINIKDHSIVSSYVCSGLVGDTPRKNDSSSSSHCLDPNNEEGGHGVKGWAFDDGNDVWMGRTINETSRLGYETFKVIEGWSNPKSKLQINRQVIVDKGNRSGYSGIFSVEGKSCINRCFYVELIRGRKEETEVLWTSNSIVVFCGTSGTYGTGSWPDGADLNLMPI

SEQ ID NO: 21788 - protein, 469 aa, synthetic construct; identical to SEQ ID NO: 19518
  REGION 1..469: note = neuraminidase__InfluenzaA__AFD98131

SEQ ID NO: 21789 - protein, 469 aa, synthetic construct; identical to SEQ ID NO: 21143
  REGION 1..469: note = neuraminidase__InfluenzaA__AFD98142

SEQ ID NO: 21790 - protein, 469 aa, synthetic construct; identical to SEQ ID NO: 21787
  REGION 1..469: note = neuraminidase__InfluenzaA__AFD98164

SEQ ID NO: 21791 - protein, 469 aa, synthetic construct
  REGION 1..469: note = neuraminidase__InfluenzaA__AFD98175
MNPNQKIITIGSVSLTISTICFFMQIAILITTVTLHFKQYEFNSPPNNQVMLCEPTIIERNITEIVYLTNTTIEKEICPKLAEYRNWSKPQCDITGFAPFSKDNSIRLSAGGDIWVTREPYVSCDPDKCYQFALGQGTTLNNVHSNNTVHDRTPYRTLLMNELGVPFHLGTKQVCIAWSSSSCHDGKAWLHVCITGDDKNATASFIYNGRLVDSVVSWSKEILRTQESECVCINGTCTVVMTDGSASGKADTKILFIEEGKIVHTSTLSGSAQHVEECSCYPRYPGVRCVCRDNWKGSNRPIVDINIKDHSIVSSYVCSGLVGDTPRKNDSSSSSHCLDPNNEEGGHGVKGWAFDDGNDVWMGRTINETSRLGYETFKVIEGWSNPKSKLQINRQVIVDKGNRSGYSGIFSVEGKSCINRCFYVELIRGRKEETEVLWTSNSIVVFCGTSGTYGTGSWPDGADLNLMPI

SEQ ID NO: 21792 - protein, 469 aa, synthetic construct
  REGION 1..469: note = neuraminidase__InfluenzaA__AFD98186
MNPNQKIITIGSVSLTISTICFFMQIAILITTVTLHFKQYEFNSPPNNQVMLCEPTIIERNITEIVYLTNTTIEKEICPKLAEYRNWSKPQCDITGFAPFSKDNSIRLSAGGDIWVTREPYVSCDPDKCYQFALGQGTTLNNVHSNNTVRDRTPYRTLLMNELGVPFHLGTKQVCIAWSSSSCHDGKAWLHVCITGDDKNATASFIYNGKLVDSVVSWSKEILRTQESECVCINGTCTVVMTDGSASGKADTKILFVEEGKIVHTSTLSGSAQHVEECSCYPRYPGVRCVCRDNWKGSNRPIVDINIKDHSIISSYVCSGLVGDTPRKNDSSSSSHCLDPNNEEGGHGVKGWAFDDGNDVWMGRTINETSRLGYETFKVIEGWSNPKSKLQINRQVIVDRGNRSGYSGIFSVEGKSCINRCFYVELIRGRKEETEVLWTSNSIVVFCGTSGTYGTGSWPDGADLNLMPI

SEQ ID NO: 21793 - protein, 469 aa, synthetic construct; identical to SEQ ID NO: 19518
  REGION 1..469: note = neuraminidase__InfluenzaA__AFD98197

SEQ ID NO: 21794 - protein, 469 aa, synthetic construct; identical to SEQ ID NO: 20255
  REGION 1..469: note = neuraminidase__InfluenzaA__AFD98208

SEQ ID NO: 21795 - protein, 469 aa, synthetic construct
  REGION 1..469: note = neuraminidase__InfluenzaA__AFD98218
MNPNQKIITIGSVSLTISTICFFMQIAILITTVTLHFKQYEFNSPPNNQVMLCEPTIIERNITEIVYLTNTTIEKEICPKPAEYRNWSKPQCDITGFAPFSKDNSIRLSAGGDIWVTREPYVSCDPDKCYQFALGQGTTLNNVHSNNTVRDRTPYRTLLMNELGVPFHLGTKQVCIAWSSSSCHDGKAWLHVCITGDDKNATASFIYNGRLVDSVVSWSKEILRTQESECVCINGTCTVVMTDGSASGKADTKILFIEEGKIVHTSTLSGSAQHVEECSCYPRYPGVRCVCRDNWKGSNRPIVDINIKDHSIVSSYVCSGLVGDTPRKNDSSSSSHCLDPNNEEGGHGVKGWAFDDGNDVWMGRTIDETSRLGYETFKVIEGWSNPKSKLQINRQVIVDKGNRSGYSGIFSVEGKSCINRCFYVELIRGRKEETEVLWTSNSIVVSCGTSGTYGTGSWPDGADLNLMPI

SEQ ID NO: 21796 - protein, 469 aa, synthetic construct; identical to SEQ ID NO: 19518
  REGION 1..469: note = neuraminidase__InfluenzaA__AFD98229

SEQ ID NO: 21797 - protein, 469 aa, synthetic construct; identical to SEQ ID NO: 19518
  REGION 1..469: note = neuraminidase__InfluenzaA__AFD98240

SEQ ID NO: 21798 - protein, 469 aa, synthetic construct; identical to SEQ ID NO: 21787
  REGION 1..469: note = neuraminidase__InfluenzaA__AFD98251

SEQ ID NO: 21799 - protein, 469 aa, synthetic construct; identical to SEQ ID NO: 21787
  REGION 1..469: note = neuraminidase__InfluenzaA__AFD98262

SEQ ID NO: 21800 - protein, 469 aa, synthetic construct; identical to SEQ ID NO: 20709
  REGION 1..469: note = neuraminidase__InfluenzaA__AFD98273

SEQ ID NO: 21801 - protein, 469 aa, synthetic construct; identical to SEQ ID NO: 20257
  REGION 1..469: note = neuraminidase__InfluenzaA__AFD98283

SEQ ID NO: 21802 - protein, 469 aa, synthetic construct; identical to SEQ ID NO: 19518
  REGION 1..469: note = neuraminidase__InfluenzaA__AFD98293

SEQ ID NO: 21803 - protein, 469 aa, synthetic construct; identical to SEQ ID NO: 20709
  REGION 1..469: note = neuraminidase__InfluenzaA__AFD98313

SEQ ID NO: 21804 - protein, 469 aa, synthetic construct; identical to SEQ ID NO: 20257
  REGION 1..469: note = neuraminidase__InfluenzaA__AFD98323

SEQ ID NO: 21805 - protein, 469 aa, synthetic construct; identical to SEQ ID NO: 20709
  REGION 1..469: note = neuraminidase__InfluenzaA__AFD98333

SEQ ID NO: 21806 - protein, 469 aa, synthetic construct; identical to SEQ ID NO: 21787
  REGION 1..469: note = neuraminidase__InfluenzaA__AFD98343

SEQ ID NO: 21807 - protein, 469 aa, synthetic construct
  REGION 1..469: note = neuraminidase__InfluenzaA__AFD98354
MNPNQKIITIGSVSLTISTICFFMQIAILITTVTLHFKQYEFNSPPNNQVMLCEPTIIERNITEIVYLTNTTIEKEICPKLAEYRNWSKPQCDITGFAPFSKDNSIRLSAGGDIWVTREPYVSCDPDKCYQFALGQGTTLNNVHSNNTVRDRTPYRTLLMNELGVPFHLGTKQVCIAWSSSSCHDGKAWLHVCITGDDKNATASFIYNGRLVDSVVSWSKEILRTQESECVCINGTCTVVMTDGNASGKADTKILFIEEGKIVHTSTLLGSAQHVEECSCYPRYPGVRCVCRDNWKGSNRPIVDINIKDHSIVSSYVCSGLVGDTPRKNDSSSSSHCLDPNNEEGGHGVKGWAFDDGNDVWMGRTINETSRLGYETFKVIEGWSNPKSKLQINRQVIVDKGNRSGYSGIFSVEGKSCINRCFYVELIRGRKEETEVLWTSNSIVVFCGTSGTYGTGSWPDGADLNLMPI

SEQ ID NO: 21808 - protein, 469 aa, synthetic construct
  REGION 1..469: note = neuraminidase__InfluenzaA__AFD98365
MNPNQKIITIGSVSLTISTICFFMQIAILITTVTLHFKQYEFYSPPNNQVMLCEPTIIERNITEIVYLTNTTIEKEICPKLAEYRNWSKPQCDITGFAPFSKDNSIRLSAGGDIWVTREPYVSCDPDKCYQFALGQGTTLNNVHSNNTVRDRTPYRTLLMNELGVPFHLGTKQVCIAWSSSSCHDGKAWLHVCITGDDKNATASFIYNGRLVDSVVSWSKEILRTQESECVCINGTCTVVMTDGSASGKADTKILFIEEGKIVHTSTLSGSAQHVEECSCYPRYPGVRCVCRDNWKGSNRPIVDINIKDHSIVSSYVCSGLVGDTPRKNDSSSSSHCLDPNNEEGGHGVKGWAFDDGNDVWMGRTINETSRLGYETFKVIEGWSNPKSKLQINRQVIVDRGNRSGYSGIFSVEGKSCINRCFYVELIRGRKEETKVLWTSNSIVVFCGTSGTYGTGSWPDGADLNLMPI

SEQ ID NO: 21809 - protein, 469 aa, synthetic construct
  REGION 1..469: note = neuraminidase__InfluenzaA__AFD98376
MNPNQKIITIGSVSLTISTICFFMQIAILITTVTLHFKQYEFNFPPNNQVMLCEPTIIERNITEIVYLTNTTIEKEICPKLAEYRNWSKPQCDITGFAPFSKDNSIRLSAGGDIWVTREPYVSCDPDKCYQFALGQGTTLNNVHSNNTVRDRTPYRTLLMNELGVPFHLGTKQVCIAWSSSSCHDGKAWLHVCITGDDKNATASFIYNGRLVDSVVSWSKEILRTQESECVCINGTCTVVMTDGSASGKADTKILFIEEGKIVHTSTLSGSAQHVEECSCYPRYPGVRCVCRDNWKGSNRPIVDINIKDHSIVSSYVCSGLVGDTPRKNDSSSSGHCLDPNNEEGGHGVKGWAFDDGNDVWMGRTINETSRLGYETFKVIEGWSNPKSKLQINRQVIVDKGNRSGYSGIFSVEGKSCINRCFYVELIRGRKEETEVLWTSNSIVVFCGTSGTYGTGSWPDGADLNLMPI

SEQ ID NO: 21810 - protein, 469 aa, synthetic construct
  REGION 1..469: note = neuraminidase__InfluenzaA__AFD98387
MNPNQKIITIGSVSLTISTICFLMQIAILITTVTLHFKQYEFNSPPNNQVMLCEPTIIERNITEIVYLTNTTIEKEICPKLAEYRDWSKPQCDITGFAPFSKDNSIRLSAGGDIWVTREPYVSCDPDKCYQFALGQGTTLNNVHSNNTVRDRTPYRTLLMNELGVPFHLGTKQVCIAWSSSSCHDGKAWLHVCITGDDKNATASFIYNGKLVDSVVSWSKEILRTQESECVCINGTCTVVMTDGSASGKADTKILFIEEGKIVHTSTLSGSAQHVEECSCYPRYPGVRCVCRDNWKGSNRPIVDINIKDHSIVSSYVCSGLVGDTPRKNDRSSNSHCLDPNNEEGGHGVKGWAFDDGNDVWMGRTINETSRLGYETFKVIEGWSNPKSKLQINRQVIVDRGNRSGYSGIFSVEGKSCINRCFYVELIRGRKEETEVLWTSNSIVVFCGTSGTYGTGSWPDGADLNLMPI

SEQ ID NO: 21811 - protein, 469 aa, synthetic construct
  REGION 1..469: note = neuraminidase__InfluenzaA__AFD98398
MNPNQKIITIGSVSLTISTICFFMQIAILITTVTLHFKQYEFNSPPNNQVMLCEPTIIERNITEIVYLTNTTIEKEICPKLAEYRNWSKPQCDITGFAPFSKDNSIRLSAGGDIWVTREPYVSCDPDKCYQFALGQGTTLNNVHSNNTVRDRTPYRTLLMNELGVPFHLGTRQVCIAWSSSSCHDGKAWLHVCITGDDKNATASFIYNGRLVDSVVSWSKEILRTQESECVCINGTCTVVMTDGSASGKADTKILFIEEGKIVHTSTLSGSAQHVEECSCYPRYPGVRCVCRDNWKGSNRPIVDINIKDHSIVSSYVCSGLVGDTPRKNDSSSSSHCLDPNNEEGGHGVKGWAFDDGNDVWMGRTINETSRLGYETFKVIEGWSNPKSKLQINRQVIVDKGNRSGYSGIFSVEGKSCINRCFYVELIRGRKEETEVLWTSNSIVVFCGTSGTYGTGSWPDGADLNLMPI

SEQ ID NO: 21812 - protein, 469 aa, synthetic construct
  REGION 1..469: note = neuraminidase__InfluenzaA__AFD98409
MNPNQKIITIGSVSLTISTICFFMQIAILITTVTLHFKQYEFNSPPNNQVMLCEPTIIERNITEIVYLTNTTIEKEICPKLAEYRNWSKPQCDITGFAPFSKDNSIRLSAGGDIWVTREPYVSCDPDKCYQFALGQGTTLNNVHSNNTVRDRTPYRTLLMNELGVPFHLGTKQVCIAWSSSSCHDGKAWLHVCITGDDKNATASFIYNGRLVDSVVSWSKEILRTQESECVCINGTCTVVMTDGSASGKADTKILFIEEGKIVHTSTLSGSAQHVEECSCYPRYPGVRCVCRDNWKGSNRPIVDINIKDHSIVSSYVCSGLVGDTPRKNDSSSSGHCLDPNNEEGGHGVKGWAFDDGNDVWMGRTINETSRLGYETFKVIEGWSNPKSKLQINRQVIVDKGNRSGYSGIFSVEGKSCINRCFYVELIRGRKEETEVLWTSNSIVVFCGTSGTYGTGSWPDGADLNLMPI

SEQ ID NO: 21813 - protein, 469 aa, synthetic construct; identical to SEQ ID NO: 21787
  REGION 1..469: note = neuraminidase__InfluenzaA__AFD98420

SEQ ID NO: 21814 - protein, 469 aa, synthetic construct
  REGION 1..469: note = neuraminidase__InfluenzaA__AFD98431
MNPNQKIITIGSVSLTISTICFFMQIAILITTVTLHFKQYEFNSPPNNQVMLCEPTIIERNITEIVYLTNTTIEKEICPKLAEYRNWSKPQCDITGFAPFSKDNSIRLSAGGDIWVTREPYVSCDPDKCYQFALGQGTTLNNVHSNNTVRDRTPYRTLLMNELGVPFHLGTKQVCIAWSSSSCHDGKAWLHVCITGDDKNATASFIYNGRLVDSVVSWSKEILRTQESECVCINGTCTVVMTDGSASGKADTKILFIEEGKIVHTSTLSGSAQHVEECSCYPRYPGVRCVCRDNWKGSNRPIVDINIKDHSIVSSYVCSGLVGDTPRKNDSSSSSHCLDPNNEEGGHGVKGWAFDDGNDVWMGRTINETSRLGYETFKVIEGWSNPKSKLQINRQVIVGRGNRSGYSGIFSVEGKSCINRCFYVELIRGRKEETEVLWTSNSIVVFCGTSGTYGTGSWPDGADLNLMPI

SEQ ID NO: 21815 - protein, 469 aa, synthetic construct
  REGION 1..469: note = neuraminidase__InfluenzaA__AFD98442
MNPNQKIITIGSVCMTIGMANLILQIGNIISIWISHSIQLGNQNQIETCNQSVITYENNTWVNQTYVNISNTNFAAGQSVVSVKLAGNSSLCPVSGWAIYSKDNSIRIGSKGDVFVIREPFISCSPLECRTFFLTQGALLNDKHSNGTIKDRSPYRTLMSCPIGEVPSPYNSRFESVAWSASACHDGINWLTIGISGPDNGAVAVLKYNGIITDTIKSWRNNILRTQESECACVNGSCFTIMTDGPSDGQASYKIFRIEKGKIVKSVEMNAPNYHYEECSCYPDSGEITCVCRDNWHGSNRPWVSFNQNLEYQIGYICSGIFGDNPRPNDKTGSCGPVSSNGANGVKGFSFKYGNGVWIGRTKSISSRKGFEMIWDPNGWTGTDNNFAIKQDIVGINEWSGYSGSFVQHPELTGLDCIRPCFWVELIRGRPKENTIWTSGSSISFCGVNSDTVGWSWPDGAELPFTIDK

SEQ ID NO: 21816 - protein, 469 aa, synthetic construct
  REGION 1..469: note = neuraminidase__InfluenzaA__AFD98452
MNPNQKIITLGSVSLTISTICFFIQIAILITTVTLHFKQYEFNSPPNNQVMLCEPTIIERNITEIVYLTNTTIEKEICPKLAEYRNWSKPQCDITGFAPFSKDNSIRLSAGGDIWVTREPYVSCDPDKCYQFALGQGTTLNNVHSNNTVRDRTPYRTLLMNELGVPFHLGTKQVCIAWSSSSCHDGKAWLHVCITGDDKNATASFIYNGRLVDSVVSWSKEILRTQESECVCINGTCTVVMTDGSASGKADTKILFIEEGKIVHTSTLSGSAQHVEECSCYPRYPGVRCVCRDNWKGSNRPIVDINIKDHSIVSSYVCSGLVGDTPRKNDSSSSSHCLDPNNEEGGHGVKGWAFDDGNDVWMGRTINETSRLGYETFKVIEGWSNPKSKLQINRQVIVDRGNRSGYSGIFSVEGKSCINRCFYVELIRGRKEETEVLWTSNSIVVFCGTSGTYGTGSWPDGADLNLMPI

SEQ ID NO: 21817 - protein, 469 aa, synthetic construct; identical to SEQ ID NO: 21787
  REGION 1..469: note = neuraminidase__InfluenzaA__AFD98463

SEQ ID NO: 21818 - protein, 469 aa, synthetic construct
  REGION 1..469: note = neuraminidase__InfluenzaA__AFD98474
MNPNQKIITIGSVCMTIGMANLILQIGNIISIWISHSIQLGNQNQIETCNQSVITYENNTWVNQTYVNISNTNFAAGQSVVSVKLAGNSSLCPVSGWAIYSKDNSIRIGSKGDVFVIREPFISCSPLECRTFFLTQGALLNDKHSNGTIKDRSPYRTLMSCPIGEVPSPYNSRFESVAWSASACHDGINWLTIGISGPDNGAVAVLKYNGIITDTIKSWRNNILRTQESECACVNGSCFTIMTDGPSDGQASYKIFRIEKGKIVKSVEMNAPNYHYEECSCYPDSSEITCVCRDNWHGSNRPWVSFNQNLEYQIGYICSGIFGDNPRPNDKTGSCGPVSSNGANGVKGFSFKYGNGVWIGRTKSISSRKGFEMIWDPNGWTGTDNNFSIKQDIIGINEWSGYSGSFVQHPELTGLDCIRPCFWVELIRGRPKENTIWTSGSSISFCGVNSDTVGWSWPDGAELPFTIDK

SEQ ID NO: 21819 - protein, 469 aa, synthetic construct
  REGION 1..469: note = neuraminidase__InfluenzaA__AFD98484
MNPNQKIITIGSVSLTISTICFFMQIAILITTVTLHFKQYEFNSPPNNQVMLCEPTIIERNITEIVYLTNTTIEKEICPKLAEYRNWSKPQCDITGFAPFSKDNSIRLSAGGDIWVTREPYVSCDPDKCYQFALGQGTTLNNVHSNNTVRDRTPYRTLLMNELGVPFHLGTKQVCIAWSSSSCHDGKAWLHVCITGDDKNATASFIYNGRLVDSVVSWSKEILRTQESECVCINGTCTVVMTDGSASGKADTKILFIEEGKIVHTSTLSGSAQHVEECSCYPRYPGVRCVCRDNWKGSNRPIVDINIKDHSIVSSYVCSGLVGDTPRKNDSSSSSHCLDPNNEEGGHGVKGWAFDDGNDVWMGRTINETSRLGYETFKVIEGWSNPKSKLQMNRQVIVDRGNRSGYSGIFSVEGKSCINRCFYVELIRGRKEETEVLWTSNSIVVFCGTSGTYGTGSWPDGADLNLMPI

SEQ ID NO: 21820 - protein, 469 aa, synthetic construct
  REGION 1..469: note = neuraminidase__InfluenzaA__AFD98495
MNPNQKIITIGSVSLTISTICFFMQIAILITTVTLHFKQYEFNSPPNNQVMLCEPTIIERNITEIVYLTNTTIEKEICPKLAEYRNWSKPQCDITGFAPFSKDNSIRLSAGGDIWVTREPYVSCDPDKCYQFALGQGTTLNNVHSNNTVRDRTPYRTLLMNELGVPFHLGTKQVCIAWSSSSCHDGKAWLHVCITGDDKNATASFIYNGKLVDSVVSWSKEILRTQESECVCINGTCTVVMTDGSASGKANTKILFIEEGKIVHTSTLSGSAQHVEECSCYPRYPGVRCVCRDNWKGSNRPIVDINIKDHSIVSSYVCSGLVGDTPRKNDSSSSSHCLDPNNEEGGHGVKGWAFDDGNDVWMGRTINETSRLGYETFKVIEGWSNPKSKLQINRQVIVDRGNRSGYSGIFSVEGKSCINRCFYVELIRGRKEETEVLWTSNSIVVFCGTSGTYGTGSWPDGADLNLMPI

SEQ ID NO: 21821 - protein, 469 aa, synthetic construct; identical to SEQ ID NO: 21787
  REGION 1..469: note = neuraminidase__InfluenzaA__AFD98506

SEQ ID NO: 21822 - protein, 469 aa, synthetic construct
  REGION 1..469: note = neuraminidase__InfluenzaA__AFD98517
MNPNQKIITIGSVSLTISTICFFMQIAILITTVTLHFKQYEFNSPPNNQVMLCEPTIIERNITEIVYLTNTTIEKEICPKLAEYRNWSKPQCDITGFAPFSKDNSIRLSAGGDIWVTREPYVSCDPDKCYQFALGQGTTLNNVHSNNTVRDRTPYRTLLMNELGVPFHLGTKQVCIAWSSSSCHDGKAWLHVCITGDDKNATASFIYNGKLVDSVVSWSKEILRTQESECVCINGTCTVVMTDGSASGKADTKILFIKEGKIVHTSTLSGSAQHVEECSCYPRYPGVRCVCRDNWKGSNRPIVDINIKDHSIVSSYVCSGLVGDTPRKNDSSSSSHCLDPNNEEGGHGVKGWAFDDGNDVWMGRTINETSRLGYETFKVIEGWSNPKSKLQINRQVIVDRGNRSGYSGIFSVEGKSCINRCFYVELIRGRKEETEVLWTSNSIVVFCGTSGTYGTGSWPDGADLNLMPI

SEQ ID NO: 21823 - protein, 469 aa, synthetic construct; identical to SEQ ID NO: 19518
  REGION 1..469: note = neuraminidase__InfluenzaA__AFD98528

SEQ ID NO: 21824 - protein, 469 aa, synthetic construct; identical to SEQ ID NO: 21787
  REGION 1..469: note = neuraminidase__InfluenzaA__AFD98539

SEQ ID NO: 21825 - protein, 469 aa, synthetic construct; identical to SEQ ID NO: 21787
  REGION 1..469: note = neuraminidase__InfluenzaA__AFD98550

SEQ ID NO: 21826 - protein, 469 aa, synthetic construct
  REGION 1..469: note = neuraminidase__InfluenzaA__AFD98561
MNPNQKIITIGSVSLTISTICFFMQIAILITTVTLHFKQYEFNSPPNNQVMLCEPTIIERNITEIVYLTNTTIEKEICPKLAEYRNWSKPQCDITGFAPFSKDNSIRLSAGGDIWVTREPYVSCDPDKCYQFALGQGTTLNNVHSNNTVRDRTPYRTLLMNELGVPFHLGTKQVCIAWSSSSCHDGKAWLHVCITGDDKNATASFIYNGRLVDSVVSWSKEILRTQESECVCINGTCAVVMTDGSASGKADTKILFIEEGKIVHTSTLSGSAQHVEECSCYPRYPGVRCVCRDNWKGSNRPIVDINIKDHSIVSSYVCSGLVGDTPRKSDSSSSSHCLDPNNEEGGHGVKGWAFDDGNDVWMGRTINETSRLGYETFKVIEGWSNPKSKLQINRQVIVDRGNRSGYSGIFSVEGKSCINRCFYVELIRGRKEETEVLWTSNSIVVFCGTSGTYGTGSWPDGADLNLMPI

SEQ ID NO: 21827 - protein, 469 aa, synthetic construct
  REGION 1..469: note = neuraminidase__InfluenzaA__AFD98572
MNPNQKIITIGSVSLTISTICFFMQIAILITTVTLHFKQYEFNSPPNNQVMLCEPTIIERNITEIVYLTNTTLEKEICPKLAEYRNWSKPQCDITGFAPFSKDNSIRLSAGGDIWVTREPYVSCDPDKCYQFALGQGTTLNNVHSNNTVRDRTPYRTLLMNELGVPFHLGTKQVCIAWSSSSCHDGKAWLHVCITGDDKNATASFIYNGRLVDSVVSWSKEILRTQESECVCINGTCTVVMTDGSASGKADTKILFIEEGKIVHTSTLSGSAQHVEECSCYPRYPGVRCVCRDNWKGSNRPIVDINIKDHSIVSSYVCSGLVGDTPRKNDSSSSSHCLDPNNEEGGHGVKGWAFDDGNDVWMGRTINETSRLGYETFKVIEGWSNPKSKLQINRQVIVDRGNRSGYSGIFSVEGKSCINRCFYVELIRGRKEETEVLWTSNSIVVFCGTSGTYGTGSWPDGADLNLMPI

SEQ ID NO: 21828 - protein, 469 aa, synthetic construct
  REGION 1..469: note = neuraminidase__InfluenzaA__AFD98583
MNPNQKIITIGSVSLTISTICFFMQIAILITTVTLHFKQYEFNSPPNNQVMLCEPTIIERNITEIVYLTNTTIEKEICPKLAEYRNWSKPQCDITGFAPFSRDNSIRLSAGGDIWVTREPYVSCDPDKCYQFALGQGTTLNNVHSNNTVRDRTPYRTLLMNELGVPFHLGTKQVCIAWSSSSCHDGKAWLHVCITGDDKNATASFIYNGRLVDSVVSWSKEILRTQESECVCINGTCTVVMTDGSASGKADTKILFIEEGKIVHTSTLSGSAQHVEECSCYPRYPGVRCVCRDNWKGSNRPIVDINIKDHSIVSSYVCSGLVGDTPRKSDSSSSSHCLDPNNEEGGHGVKGWAFDDGNDVWMGRTINETSRLGYETFKVIEGWSNPKSKLQINRQVIVDRGNRSGYSGIFSVEGKSCINRCFYVELIRGRKEETEVLWTSNSIVVFCGTSGTYGTGSWPDGADLNLMPI

SEQ ID NO: 21829 - protein, 469 aa, synthetic construct
  REGION 1..469: note = neuraminidase__InfluenzaA__AFE02944
MNPNQKIITIGSVCMTIGMANLILQIGNIISIWISHSIQLGNQNQIETCNQSVITYENNTWVNQTYVNISNTNFAAGQSVVSVKLAGNSSLCPVSGWAIYSKDNSIRIGSKGDVFVIREPFISCSPLECRTFFLTQGALLNDKHSNGTIKDRSPYRTLMSCPIGEVPSPYNSRFESVAWSASACHDGINWLTIGISGPDNGAVAVLKYNGIITDTIKSWRNNILRTQESECACVNGSCFTVMTDGPSDGQASYKIFRIEKGKIVKSVEMNAPNYHYEECSCYPDSSEITCVCRDNWHGSNRPWVSFNQNLEYQIGYICSGIFGDNPRPNDKTGSCGPVSSNGANGVKGFSFKYGNGVWIGRTKSISSRNGFEMIWDPNGWTGTDNNFSIKQDIVGINEWSGYSGSFVQHPELTGLNCIRPCFWVELIRGRPKENTVWTSGSSISFCGVNSDTVGWSWPDGAELPFTIDK

SEQ ID NO: 21830 - protein, 469 aa, synthetic construct
  REGION 1..469: note = neuraminidase__InfluenzaA__AFE47627
MNPNQKIITIGSVSLTIATICFLMQIAILVTTVTLHFKQYECNSPPNNQVMLCEPTIIERNITEIVYLTNTTIEKEICPKLAEYRNWSKPQCNITGFAPFSKDNSIRLSAGGDIWVTREPYVSCDPDKCYQFALGQGTTLNNGHSNDTVHDRTPYRTLLMNELGVPFHLGTKQVCIAWSSSSCHDGKAWLHVCVTGDDENATASFIYNGRLVDSIGSWSKKILRTQESECVCINGTCTVVMTDGSASGKADTKILFIEEGKIVHTSSLSGSAQHVEECSCYPRYPGVRCVCRDNWKGSNRPIVDINVKDYSIVSSYVCSGLVGDTPRKNDSSSSSHCLDPNNEEGGHGVKGWAFDDGNDVWMGRTISEKLRSGYETFKVIEGWSKPNSKLQTNRQVIVDRGNRSGYSGIFSVESKSCINRCFYVELIRGRKQETEVLWTSNSIVVFCGTSGTYGTGSWPDGADINLMPI

SEQ ID NO: 21831 - protein, 469 aa, synthetic construct; identical to SEQ ID NO: 21143
  REGION 1..469: note = neuraminidase__InfluenzaA__AFF18509

SEQ ID NO: 21832 - protein, 469 aa, synthetic construct
  REGION 1..469: note = neuraminidase__InfluenzaA__AFF57129
MNPNQKIITIGSVCMTIGMANLILQIGNIISIWISHSIQLGNQNQIETCNQSVITYENNTWVNQTYVNISNTNFAAGQSVVSVKLAGNSSLCPVSGWAIYSKDNSIRIGSKGDVFVIREPFISCSPLECRTFFLTQGALLNDKHSNGTIKDRSPYRTLMSCPIGEVPSPYNSRFESVAWSASACHDGINWLTIGISGPDNGAVAVLKYNGIITDTIKSWRNNILRTQESECACVNGSCFTIMTDGPSDGQASYKIFRIEKGKIVKSVEMNAPNYHYEECSCYPDSSEITCVCRDNWHGSNRPWVSFNQNLEYQIGYICSGIFGDNPRPNDKTGSCGPVSSNGANGVKGFSFKYGNGVWIGRTKSISSRKGFEMIWDPNGWNGTDNNFSIKQDIVGINEWSGYSGSFVQHPELTGLDCIRPCFWVELIRGRPKENTIWTSGSSISFCGVNSDTVGWSWPDGAELPFTIDK

SEQ ID NO: 21833 - protein, 469 aa, synthetic construct
  REGION 1..469: note = neuraminidase__InfluenzaA__AFF57133
MNPNQKIITIGSVCMTIGMANLILQIGNIISIWISHSIQLGNQSQIETCNQSVITYENNTWLNQTYVNISNTNFAAGQSVVSVKLAGNSSLCPVSGWAIYSKDNSIRIGSKGDVFVIREPFISCSPSECRTFFLTQGALLNDKHSNGTIKDRSPYRTLMSCPIGEVPSPYNSRFESVAWSASACHDGINWLTIGISGPDNGAVAVLKYNGIITDTIKSWRNNILRTQESECACVNGSCFTIMTDGPSDGQASYKIFRIEKGKIVKSVEMNAPNYHYEECSCYPDSSEITCVCRDNWHGSNRPWVSFNQNLEYQIGYICSGIFGDNPRPNDKTGSCGPVSSNGANGVKGFSFKYGNGVWIGRTKSISSRKGFEMIWDPNGWTGTDNNFSIKQDIVGINEWSGYSGSFVQHPELTGLDCIRPCFWVELIRGRPKENTIWTSGSSISFCGVNSDTVGWSWPDGAELPFTIDK

SEQ ID NO: 21834 - protein, 469 aa, synthetic construct; identical to SEQ ID NO: 16893
  REGION 1..469: note = neuraminidase__InfluenzaA__AFF57137

SEQ ID NO: 21835 - protein, 469 aa, synthetic construct; identical to SEQ ID NO: 16893
  REGION 1..469: note = neuraminidase__InfluenzaA__AFF57141

SEQ ID NO: 21836 - protein, 469 aa, synthetic construct; identical to SEQ ID NO: 16893
  REGION 1..469: note = neuraminidase__InfluenzaA__AFF57145

SEQ ID NO: 21837 - protein, 469 aa, synthetic construct; identical to SEQ ID NO: 16893
  REGION 1..469: note = neuraminidase__InfluenzaA__AFF57149

SEQ ID NO: 21838 - protein, 469 aa, synthetic construct; identical to SEQ ID NO: 16893
  REGION 1..469: note = neuraminidase__InfluenzaA__AFF57153

SEQ ID NO: 21839 - protein, 469 aa, synthetic construct; identical to SEQ ID NO: 16893
  REGION 1..469: note = neuraminidase__InfluenzaA__AFF57157

SEQ ID NO: 21840 - protein, 469 aa, synthetic construct; identical to SEQ ID NO: 16893
  REGION 1..469: note = neuraminidase__InfluenzaA__AFF57161

SEQ ID NO: 21841 - protein, 469 aa, synthetic construct; identical to SEQ ID NO: 16893
  REGION 1..469: note = neuraminidase__InfluenzaA__AFF57165

SEQ ID NO: 21842 - protein, 469 aa, synthetic construct; identical to SEQ ID NO: 16893
  REGION 1..469: note = neuraminidase__InfluenzaA__AFF57169

SEQ ID NO: 21843 - protein, 469 aa, synthetic construct; identical to SEQ ID NO: 16893
  REGION 1..469: note = neuraminidase__InfluenzaA__AFF57173

SEQ ID NO: 21844 - protein, 469 aa, synthetic construct; identical to SEQ ID NO: 16893
  REGION 1..469: note = neuraminidase__InfluenzaA__AFF57177

SEQ ID NO: 21845 - protein, 469 aa, synthetic construct; identical to SEQ ID NO: 16893
  REGION 1..469: note = neuraminidase__InfluenzaA__AFF57181

SEQ ID NO: 21846 - protein, 469 aa, synthetic construct; identical to SEQ ID NO: 16893
  REGION 1..469: note = neuraminidase__InfluenzaA__AFF57185

SEQ ID NO: 21847 - protein, 469 aa, synthetic construct; identical to SEQ ID NO: 16893
  REGION 1..469: note = neuraminidase__InfluenzaA__AFF57189

SEQ ID NO: 21848 - protein, 449 aa, synthetic construct
  REGION 1..449: note = neuraminidase__InfluenzaA__AFF60789
MNPNKKIITIGSICMVTGMVSLMLQIGNLISIWVSHSIHTGNQHKAEPISNTNFLTEKAVASVKLAGNSSLCPINGWAVYSKDNSIRIGSKGDVFVIREPFISCSHLECRTFFLTQGALLNDKHSNGTVKDRSPHRTLMSCPVGEAPSPYNSRFESVAWSASACHDGTSWLTIGISGPDNGAVAVLKYNGIITDTIKSWRNNILRTQESECACVNGSCFTVMTDGPSNGQASHKIFKMEKGKVVKSVELDAPNYHYEECSCYPDAGEITCVCRDNWHGSNRPWVSFNQNLEYQIGYICSGVFGDNPRPNDGTGSCGPVSSNGAYGVKGFSFKYGNGVWIGRTKSTNSRSGFEMIWDPNGWTETDSSFSVKQDIVAITDWSGYSGSFVQHPELTGLDCIRPCFWVELIRGRPKESTIWTSGSSISFCGVTSDTVGWSWPDGAELPFTIDK

SEQ ID NO: 21849 - protein, 469 aa, synthetic construct
  REGION 1..469: note = neuraminidase__InfluenzaA__AFG29043
MNPNQKIITIGSVCMTIGMANLILQIGNIISIWISHSIQLGNQNQIETCNQSVITYENNTWVNQTYVNISNTNFAAGQSVVSVKLAGNSSLCPVSGWAIYSKDNSIRIGSKGDVFVIREPFISCSPLECRTFFLTQGALLNDKHSNGTIRDRSPYRTLMSCPIGEVPSPYNSRFESVAWSASACHDGINWLTIGISGPDNGAVAVLKYNGIITDTIKSWRNNILRTQESECACVNGSCFTVMTDGPSDGQASYKIFRIEKGKIVKSVEMNAPNYHYEECSCYPDSSEITCVCRDNWHGSNRPWVSFNQNLEYQIGYICSGIFGDNPRPNDKTGSCGPVSSNGANGVKGFSFKYGNGVWIGRTKSISSRNGFEMIWDPNGWTGTDNNFSIKQDIVGINEWSGYSGSFVQHPELTGLDCIRPCFWVELIRGRPKENTIWTSGSSISFCGVNSDTVGWSWPDGAELPFTIDK

SEQ ID NO: 21850 - protein, 469 aa, synthetic construct; identical to SEQ ID NO: 18519
  REGION 1..469: note = neuraminidase__InfluenzaA__AFG29045

SEQ ID NO: 21851 - protein, 469 aa, synthetic construct; identical to SEQ ID NO: 18651
  REGION 1..469: note = neuraminidase__InfluenzaA__AFG31063

SEQ ID NO: 21852 - protein, 469 aa, synthetic construct; identical to SEQ ID NO: 16738
  REGION 1..469: note = neuraminidase__InfluenzaA__AFG31073

SEQ ID NO: 21853 - protein, 469 aa, synthetic construct
  REGION 1..469: note = neuraminidase__InfluenzaA__AFG31083
MNPNQKIITIGSVCMTIGMANLILQIGNIISIWISHSIQLVNQNQIETCNQSVITYENNTWVNQTYVNISNTNFAAGQSVVSVKLAGNSSLCPVSGWAIYSKDNSVRIGSKGDVFVIREPFISCSPLECRTFFLTQGALLNDKHSNGTIKDRSPYRTLMSCPIGEVPSPYNSRFESVAWSASACHDGINWLTIGISGPDNGAVAVLKYNGIITDTIKSWRNNILRTQESECACVNGSCFTVMTDGPSNGQASYKIFRIEKGKIVKSVEMNAPNYHYEECSCYPDSSEITCVCRDNWHGSNRPWVSFNQNLEYQIGYICSGIFGDNPRPNDKTGSCGPVSSNGANGVKGFSFKYGNGVWIGRTKSISSRNGFEMIWDPNGWTGTDNNFSIKQDIVGINEWSGYSGSFVQHPELTGLDCIRPCFWVELIRGRPKENTIWTSGSSISFCGVNSDTVGWSWPDGAELPFTIDK

SEQ ID NO: 21854 - protein, 469 aa, synthetic construct; identical to SEQ ID NO: 16738
  REGION 1..469: note = neuraminidase__InfluenzaA__AFG31093

SEQ ID NO: 21855 - protein, 469 aa, synthetic construct; identical to SEQ ID NO: 16738
  REGION 1..469: note = neuraminidase__InfluenzaA__AFG31103

SEQ ID NO: 21856 - protein, 469 aa, synthetic construct; identical to SEQ ID NO: 16738
  REGION 1..469: note = neuraminidase__InfluenzaA__AFG31113

SEQ ID NO: 21857 - protein, 469 aa, synthetic construct; identical to SEQ ID NO: 16738
  REGION 1..469: note = neuraminidase__InfluenzaA__AFG31123

SEQ ID NO: 21858 - protein, 469 aa, synthetic construct; identical to SEQ ID NO: 16738
  REGION 1..469: note = neuraminidase__InfluenzaA__AFG31133

SEQ ID NO: 21859 - protein, 469 aa, synthetic construct; identical to SEQ ID NO: 16738
  REGION 1..469: note = neuraminidase__InfluenzaA__AFG31143

SEQ ID NO: 21860 - protein, 469 aa, synthetic construct; identical to SEQ ID NO: 16738
  REGION 1..469: note = neuraminidase__InfluenzaA__AFG31153

SEQ ID NO: 21861 - protein, 469 aa, synthetic construct; identical to SEQ ID NO: 16738
  REGION 1..469: note = neuraminidase__InfluenzaA__AFG31163

SEQ ID NO: 21862 - protein, 469 aa, synthetic construct
  REGION 1..469: note = neuraminidase__InfluenzaA__AFG31173
MNPNQKIITIGSVCMTIGMANLILQIGNIISIWISHSIQLGNQNQIETCNQSVITYENNTWVNQTYVNISNTNFAAGQSVVSVKLAGNSSLCPVSGWAIYSKDNSIRIGSKGDVFVIREPFISCSPLECRTFFLTQGALLNDKHSNGTIKDRSPYRTLMSCPIGEVPSPYNSRFESVAWSASACHDGINWLTIGISGPDNGAVAVLKYNGIITDTIKSWRNNILRTQESECACVNGSCFTVMTDGPSDGQASYKIFRIEKGKIVKSVEMNAPNYHYEECSCYPDSSEITCVCRDNWHGSNRPWVSFNQNLEYQIGYICSGIFGDNPRPNDKTGSCGPVSSNGANGVKGFSFKYGNGVWIGRTKSISSRNGFEMIWDPNGWTGTDNNFSIKQDIVGINEWSGYSGSFVQHPELTGLDCIRPCFWVELIRGLPKENTIWTSGSSISFCGVNSDTVGWSWPDGAELPFTIDK

SEQ ID NO: 21863 - protein, 469 aa, synthetic construct; identical to SEQ ID NO: 21862
  REGION 1..469: note = neuraminidase__InfluenzaA__AFG31183

SEQ ID NO: 21864 - protein, 469 aa, synthetic construct; identical to SEQ ID NO: 16738
  REGION 1..469: note = neuraminidase__InfluenzaA__AFG31193

SEQ ID NO: 21865 - protein, 469 aa, synthetic construct; identical to SEQ ID NO: 16738
  REGION 1..469: note = neuraminidase__InfluenzaA__AFG31203

SEQ ID NO: 21866 - protein, 469 aa, synthetic construct; identical to SEQ ID NO: 16738
  REGION 1..469: note = neuraminidase__InfluenzaA__AFG31213

SEQ ID NO: 21867 - protein, 469 aa, synthetic construct; identical to SEQ ID NO: 16738
  REGION 1..469: note = neuraminidase__InfluenzaA__AFG31223

SEQ ID NO: 21868 - protein, 469 aa, synthetic construct; identical to SEQ ID NO: 16738
  REGION 1..469: note = neuraminidase__InfluenzaA__AFG31233

SEQ ID NO: 21869 - protein, 469 aa, synthetic construct
  REGION 1..469: note = neuraminidase__InfluenzaA__AFG31243
MNPNQKIITIGSVCMTIGMANLILQIGNIISIWISHSIQLGNQNQIETCNQSVITYENNTWVNQTYVNISNTNFVAGQSVVSVKLAGNSSLCPVSGWAIYSKDNSIRIGSKGDVFVIREPFISCSPLECRTFFLTQGALLNDKHSNGTIKDRSPYRTLMSCPIGEVPSPYNSRFESVAWSASACHDGINWLTIGISGPDNGAVAVLKYNGIITDTIKSWRNNILRTQESECACVNGSCFTVMTDGPSDGQASYKIFRIEKGKIVKSVEMNAPNYHYEECSCYPDSSEITCVCRDNWHGSNRPWVSFNQNLEYQIGYICSGIFGDNPRPNDKTGSCGPVSSNGANGVKGFSFKYGNGVWIGRTKSISSRNGFEMIWDPNGWTGTDNNFSIKQDIVGINEWSGYSGSFVQHPELTGLDCIRPCFWVELIRGRPKENTIWTSGSSISFCGVNSDTVGWSWPDGAELPFTIDK

SEQ ID NO: 21870 - protein, 469 aa, synthetic construct; identical to SEQ ID NO: 19730
  REGION 1..469: note = neuraminidase__InfluenzaA__AFG31253

SEQ ID NO: 21871 - protein, 469 aa, synthetic construct; identical to SEQ ID NO: 16738
  REGION 1..469: note = neuraminidase__InfluenzaA__AFG31263

SEQ ID NO: 21872 - protein, 469 aa, synthetic construct; identical to SEQ ID NO: 16738
  REGION 1..469: note = neuraminidase__InfluenzaA__AFG31273

SEQ ID NO: 21873 - protein, 469 aa, synthetic construct; identical to SEQ ID NO: 16738
  REGION 1..469: note = neuraminidase__InfluenzaA__AFG31283

SEQ ID NO: 21874 - protein, 469 aa, synthetic construct; identical to SEQ ID NO: 16738
  REGION 1..469: note = neuraminidase__InfluenzaA__AFG31293

SEQ ID NO: 21875 - protein, 469 aa, synthetic construct; identical to SEQ ID NO: 16738
  REGION 1..469: note = neuraminidase__InfluenzaA__AFG31303

SEQ ID NO: 21876 - protein, 469 aa, synthetic construct; identical to SEQ ID NO: 16738
  REGION 1..469: note = neuraminidase__InfluenzaA__AFG31313

SEQ ID NO: 21877 - protein, 469 aa, synthetic construct; identical to SEQ ID NO: 16738
  REGION 1..469: note = neuraminidase__InfluenzaA__AFG31326

SEQ ID NO: 21878 - protein, 469 aa, synthetic construct; identical to SEQ ID NO: 16738
  REGION 1..469: note = neuraminidase__InfluenzaA__AFG31336

SEQ ID NO: 21879 - protein, 469 aa, synthetic construct; identical to SEQ ID NO: 19730
  REGION 1..469: note = neuraminidase__InfluenzaA__AFG31346

SEQ ID NO: 21880 - protein, 469 aa, synthetic construct; identical to SEQ ID NO: 19730
  REGION 1..469: note = neuraminidase__InfluenzaA__AFG31356

SEQ ID NO: 21881 - protein, 469 aa, synthetic construct; identical to SEQ ID NO: 19730
  REGION 1..469: note = neuraminidase__InfluenzaA__AFG31366

SEQ ID NO: 21882 - protein, 469 aa, synthetic construct; identical to SEQ ID NO: 19730
  REGION 1..469: note = neuraminidase__InfluenzaA__AFG31379

SEQ ID NO: 21883 - protein, 469 aa, synthetic construct; identical to SEQ ID NO: 19730
  REGION 1..469: note = neuraminidase__InfluenzaA__AFG31389

SEQ ID NO: 21884 - protein, 469 aa, synthetic construct; identical to SEQ ID NO: 19730
  REGION 1..469: note = neuraminidase__InfluenzaA__AFG31399

SEQ ID NO: 21885 - protein, 469 aa, synthetic construct; identical to SEQ ID NO: 19730
  REGION 1..469: note = neuraminidase__InfluenzaA__AFG31409

SEQ ID NO: 21886 - protein, 469 aa, synthetic construct; identical to SEQ ID NO: 16738
  REGION 1..469: note = neuraminidase__InfluenzaA__AFG31419

SEQ ID NO: 21887 - protein, 469 aa, synthetic construct; identical to SEQ ID NO: 16738
  REGION 1..469: note = neuraminidase__InfluenzaA__AFG31429

SEQ ID NO: 21888 - protein, 469 aa, synthetic construct; identical to SEQ ID NO: 16738
  REGION 1..469: note = neuraminidase__InfluenzaA__AFG31439

SEQ ID NO: 21889 - protein, 469 aa, synthetic construct; identical to SEQ ID NO: 16738
  REGION 1..469: note = neuraminidase__InfluenzaA__AFG31449

SEQ ID NO: 21890 - protein, 469 aa, synthetic construct; identical to SEQ ID NO: 16738
  REGION 1..469: note = neuraminidase__InfluenzaA__AFG31459

SEQ ID NO: 21891 - protein, 469 aa, synthetic construct; identical to SEQ ID NO: 16738
  REGION 1..469: note = neuraminidase__InfluenzaA__AFG31469

SEQ ID NO: 21892 - protein, 469 aa, synthetic construct; identical to SEQ ID NO: 16738
  REGION 1..469: note = neuraminidase__InfluenzaA__AFG31479

SEQ ID NO: 21893 - protein, 469 aa, synthetic construct; identical to SEQ ID NO: 16738
  REGION 1..469: note = neuraminidase__InfluenzaA__AFG31499

SEQ ID NO: 21894 - protein, 469 aa, synthetic construct; identical to SEQ ID NO: 18629
  REGION 1..469: note = neuraminidase__InfluenzaA__AFG31509

SEQ ID NO: 21895 - protein, 469 aa, synthetic construct; identical to SEQ ID NO: 19730
  REGION 1..469: note = neuraminidase__InfluenzaA__AFG31519

SEQ ID NO: 21896 - protein, 469 aa, synthetic construct; identical to SEQ ID NO: 16738
  REGION 1..469: note = neuraminidase__InfluenzaA__AFG31529

SEQ ID NO: 21897 - protein, 469 aa, synthetic construct; identical to SEQ ID NO: 18629
  REGION 1..469: note = neuraminidase__InfluenzaA__AFG31539

SEQ ID NO: 21898 - protein, 469 aa, synthetic construct; identical to SEQ ID NO: 16738
  REGION 1..469: note = neuraminidase__InfluenzaA__AFG31549

SEQ ID NO: 21899 - protein, 469 aa, synthetic construct; identical to SEQ ID NO: 16738
  REGION 1..469: note = neuraminidase__InfluenzaA__AFG31559

SEQ ID NO: 21900 - protein, 469 aa, synthetic construct; identical to SEQ ID NO: 19730
  REGION 1..469: note = neuraminidase__InfluenzaA__AFG31569

SEQ ID NO: 21901 - protein, 469 aa, synthetic construct; identical to SEQ ID NO: 16738
  REGION 1..469: note = neuraminidase__InfluenzaA__AFG31579

SEQ ID NO: 21902 - protein, 469 aa, synthetic construct; identical to SEQ ID NO: 16738
  REGION 1..469: note = neuraminidase__InfluenzaA__AFG31589

SEQ ID NO: 21903 - protein, 469 aa, synthetic construct; identical to SEQ ID NO: 16738
  REGION 1..469: note = neuraminidase__InfluenzaA__AFG31599

SEQ ID NO: 21904 - protein, 469 aa, synthetic construct; identical to SEQ ID NO: 16738
  REGION 1..469: note = neuraminidase__InfluenzaA__AFG31609

SEQ ID NO: 21905 - protein, 469 aa, synthetic construct; identical to SEQ ID NO: 16738
  REGION 1..469: note = neuraminidase__InfluenzaA__AFG31619

SEQ ID NO: 21906 - protein, 469 aa, synthetic construct; identical to SEQ ID NO: 16738
  REGION 1..469: note = neuraminidase__InfluenzaA__AFG31629

SEQ ID NO: 21907 - protein, 469 aa, synthetic construct; identical to SEQ ID NO: 19730
  REGION 1..469: note = neuraminidase__InfluenzaA__AFG31639

SEQ ID NO: 21908 - protein, 469 aa, synthetic construct; identical to SEQ ID NO: 16738
  REGION 1..469: note = neuraminidase__InfluenzaA__AFG31649

SEQ ID NO: 21909 - protein, 469 aa, synthetic construct; identical to SEQ ID NO: 16738
  REGION 1..469: note = neuraminidase__InfluenzaA__AFG31659

SEQ ID NO: 21910 - protein, 469 aa, synthetic construct; identical to SEQ ID NO: 16738
  REGION 1..469: note = neuraminidase__InfluenzaA__AFG31669

SEQ ID NO: 21911 - protein, 469 aa, synthetic construct; identical to SEQ ID NO: 14095
  REGION 1..469: note = neuraminidase__InfluenzaA__AFG71868

SEQ ID NO: 21912 - protein, 469 aa, synthetic construct; identical to SEQ ID NO: 14095
  REGION 1..469: note = neuraminidase__InfluenzaA__AFG71890

SEQ ID NO: 21913 - protein, 469 aa, synthetic construct; identical to SEQ ID NO: 14095
  REGION 1..469: note = neuraminidase__InfluenzaA__AFG71901

SEQ ID NO: 21914 - protein, 469 aa, synthetic construct; identical to SEQ ID NO: 14114
  REGION 1..469: note = neuraminidase__InfluenzaA__AFG71912

SEQ ID NO: 21915 - protein, 469 aa, synthetic construct
  REGION 1..469: note = neuraminidase__InfluenzaA__AFG71934
MNPNQKIITIGSVSLTIATVCFLMQIAILITTVTLHFKQYECDSPANNQVMPCEPIIIERNITEIVYLTNTTIEKEICPKLVEYRNWSKPQCKITGFAPFSKDNSIRLSAGGDIWVTREPYVSCDPGKCYQFALGQGTTLDNKHSNDTIHDRIPHRTLLMNELGVPFHLGTRQVCIAWSSSSCHDGKAWLHVCVTGDDKNATASFIYDGRLVDSIGSWSQNILRTQESECVCINGTCTVVMTDGSASGRADTRILFIEEGKIVHISPLSGSAQHVEECSCYPRYPGVRCICRDNWKGSNRPVVDINVKDYSIDSRYVCSGLVGDTPRNNDRFSNSNCRNPNNERGNHGVKGWAFDDGNDVWMGRTISKDSRSGYETFKVIGGWSTPNSKSQINRQVIVDSDNRSGYSGIFSVEGKSCINRCFYVELIRGREQETRVWWTSNSIVVFCGTSGTYGTGSWPDGADINLMPI

SEQ ID NO: 21916 - protein, 469 aa, synthetic construct
  REGION 1..469: note = neuraminidase__InfluenzaA__AFG71945
MNPNQKIITIGSVSLTIATVCFLMQIAILVTTVTLHFKQYECDSPANNQVMPCEPIIIERNITEIVYLTNTTIEKEICPKLVEYRNWSKPQCKITGFAPFSKDNSIRLSAGGDIWVTREPYVSCDPGKCYQFALGQGTTLDNKHSNDTIHDRIPHRTLLMNELGVPFHLGTRQVCIAWSSSSCHDGKAWLHVCVTGDDENATASFIYDGRLVDSIGSWSQNILRTQESECVCINGTCTVVMTDGSASGRADTRILFIEEGKIVHISPLSGSAQHVEECSCYPRYPGVRCICRDNWKGSNRPVVDINVKDYSIDSRYVCSGLVGDTPRNNDKSSNSNCRNPNNDKGNHGVKGWAFDDGNDVWMGRTISKDSRSGYETFKVIGGWSTPNSKSQINRQVIVDSDNRSGYSGIFSVEGKSCINRCFYVELIRGREQETKVWWTSNSIVVFCGTSGTYGTGSWPDGADINLMSI

SEQ ID NO: 21917 - protein, 469 aa, synthetic construct; identical to SEQ ID NO: 14118
  REGION 1..469: note = neuraminidase__InfluenzaA__AFG71967

SEQ ID NO: 21918 - protein, 469 aa, synthetic construct; identical to SEQ ID NO: 14118
  REGION 1..469: note = neuraminidase__InfluenzaA__AFG71978

SEQ ID NO: 21919 - protein, 469 aa, synthetic construct
  REGION 1..469: note = neuraminidase__InfluenzaA__AFG71988
MNPNQKIITIGSVSLTIATICFLMQIAILVTTVTLHFKQYECDSPANNQVMPCEPIIIERNITEIVYLTNTTIEKEICPKLVEYRNWSKPQCKITGFAPFSKDNSIRLSAGGDIWVTREPYVSCDPGKCYQFALGQGTTLDNKHSNDTIHDRTPHRTLLMNELGVPFHLGTRQVCIAWSSSSCHDGKAWLHVCVTGYDKNATASFIYDGRLVDSIGSWSQNILRTQESECICINGTCTVVMTDGSASGRADTKILFIEEGKIVHISPLSGSAQHVEECSCYPRYPGVRCICRDNWKGSNRPVVDINVKDYSIDSSYVCSGLVGDTPRNNDRSSNSYCRNPNNEKGNHGVKGWAFDDGNDVWMGRTISEDSRSGYETFKVIGGWSTPNSKLQINRQVIVDSDNRSGYSGIFSVEGKSCINRCFYVELIRGREQETRVWWTSNSIVVFCGTSGTYGTGSWPDGADINLMPI

SEQ ID NO: 21920 - protein, 469 aa, synthetic construct; identical to SEQ ID NO: 14118
  REGION 1..469: note = neuraminidase__InfluenzaA__AFG71999

SEQ ID NO: 21921 - protein, 469 aa, synthetic construct; identical to SEQ ID NO: 14576
  REGION 1..469: note = neuraminidase__InfluenzaA__AFG72021

SEQ ID NO: 21922 - protein, 469 aa, synthetic construct
  REGION 1..469: note = neuraminidase__InfluenzaA__AFG72032
MNPNQKIITIGSVSLTIATICFLMQIAILVTTVTLHFKQYECSSPPNNQVMPCEPIIIERNITEIVYLTNTTIEKEICPKLVEYRNWSKPQCKITGFAPFSKDNSIRLSAGGDIWVTREPYVSCDPGKCYQFALGQGTTLDNKHSNDTIHDRTPYRTLLMNELGVPFHLGTRQVCIAWSSSSCHDGKAWLHVCVTGYDKNATASFIYDGRLVDSIGSWSKNILRTQESECVCINGTCTVVMTDGSASERADTKILFIEEGKIVHISPLSGSAQHVEECSCYPRYPGVRCVCRDNWKGSNRPVVDINVKDYSIVSSYVCSGLVGDTPRKNDRSSSSYCRNPNNEKGNHGVKGWAFDDGNDVWMGRTISEESRSGYETFKVIGGWSTPNSKLQINRQVIVDSDNRSGYSGIFSVEGKSCINRCFYVELIRGREQETRVWWTSNSIVVFCGTSGTYGTGSWPDGADINLMPI

SEQ ID NO: 21923 - protein, 469 aa, synthetic construct; identical to SEQ ID NO: 14813
  REGION 1..469: note = neuraminidase__InfluenzaA__AFG72088

SEQ ID NO: 21924 - protein, 469 aa, synthetic construct
  REGION 1..469: note = neuraminidase__InfluenzaA__AFG72121
MNPNQKIITIGSVSLTIATICFLMQIAILVTTVTLHFKQYECSSPPNNRVMPCEPTIIERNITEIVYLTNTTIEKEICPKLVEYRNWSKPQCKITGFAPFSKDNSIRLSAGGDIWVTREPYVSCDPGKCYQFALGQGTTLNNRHSNDTVHDRTPYRTLLMNELGVPFHLGTKQVCMAWSSSSCHDGKAWLHVCVTGHDENATASFIYDGRLVDSIGSWSKNILRTQESECVCINGTCTVVMTDGSASERADTKILFIEEGKIVHISPLSGSAQHVEECSCYPRYPGVRCVCRDNWKGSNRPIVDINVKDYSIVSSYVCSGLVGDTPRKNDRSSSSYCRNPNNEKGSHGVKGWAFDDGNDVWMGRTIGEELRSGYETFKVIGGWSTPNSKLQINRQVIVDSGNRSGYSGIFSVEGKSCINRCFYVELIRGRKQETRVWWTSNSIVVFCGTSGTYGTGSWPDGADINLMPI

SEQ ID NO: 21925 - protein, 469 aa, synthetic construct
  REGION 1..469: note = neuraminidase__InfluenzaA__AFG72143
MNPNQKIITIGSVSLTIATICLLMQIAILVTTVTLHFKQYECSSPPNNQVMPCEPTIIERNITEIVYLTNTTIEKEICPKLVEYRNWSKPQCKITGFAPFSKDNSIRLSAGGDIWVTREPYVSCDPGKCYQFALGQGTTLNNRHSNDTVHDRTPYRTLLMNELGVPFHLGTKQVCIAWSSSSCHDGKAWLHVCVTGHDENATASFIYDGRLVDSIGSWSKNILRTQESECVCINGTCTVVMTDGSASERADTKILFIEEGKIVHISPLSGSAQHVEECSCYPRYPGVRCVCRDNWKGSNRPIVDINVKDYSIVSSYVCSGLVGDTPRKNDSSSSSYCRNPNNEKGSHGVKGWAFDDGNDVWMGRTIGEELRSGYETFKVIGGWSTPNSKLQINRQVIVDSGNRSGYSGIFSVEGKSCINRCFYVELIRGRKQETKVWWTSNSIVVFCGTSGTYGTGSWPDGADINLMPI

SEQ ID NO: 21926 - protein, 469 aa, synthetic construct
  REGION 1..469: note = neuraminidase__InfluenzaA__AFG72165
MNPNQKIITIGSVSLTIATICFLMQIAILVTTVTLHFKQYECNSPPNNQVMPCEPTIIERNITEIVYLTNTTIEKEICPKLVEYRNWSKPQCKITGFAPFSKDNSIRLSAGGDIWVTREPYVSCDPGKCYQFALGQGTTLNNRHSNDTVHDRTPYRTLLMNELGVPFHLGTKQVCIAWSSSSCHDGKAWLHVCVTGHDENATASFIYDGRLVDSIVSWSKNILRTQESECVCINGTCTVVMTDGSASERADTKILFIEEGKIVHISPLSGSAQHVEECSCYPRYPGVRCVCRDNWKGSNRPIVDINVKDYSIVSSYVCSGLVGDTPRKNDSSSSSYCRNPNNEKGSHGVKGWAFDDGNDVWMGRTIGEELRSGYETFKVIGGWSTPNSKLQTNRQVIVDRGNRSGYSGIFSVEGKSCINRCFYVELIRGRKQETKVWWTSNSIVVFCGTSGTYGTGSWPDGADINLMPI

SEQ ID NO: 21927 - protein, 469 aa, synthetic construct
  REGION 1..469: note = neuraminidase__InfluenzaA__AFG72176
MNPNQKIITIGSVSLTIATICFLMQITILVTTVTLHFKQYECNSPPNNQVMLCEPTIIERNITEIVYLTNTTIEKEKCPKLVEYRNWSKPQCKITGFAPFSKDNSIRLSAGGDIWVTREPYVSCDPGKCYQFALGQGTTLNNRHSNDTVHDRTPYRTLLMNELGVPFHLGTKQVCIAWSSSSCHDGKAWLHVCVTGHDENATASFIYDGRLVDSIGSWSKNILRTQESECVCINGTCTVVMTDGSASERADTKILFIEEGKIVHISPLSGSAQHVEECSCYPRYPGVRCVCRDNWKGSNRPIVDINVKDYSIVSSYVCSGLVGDTPRKNDSSSSSYCRNPNNEKGSHGVKGWAFDDGNDVWMGRTISEELRSGYETFKVIGGWSTPNSKLQINRQVIVDRGNRSGYSGIFSVEGKSCINRCFYVELIRGRKQENKVWWTSNSIVVFCGTSGTYGTGSWPDGADINLMPI

SEQ ID NO: 21928 - protein, 469 aa, synthetic construct; identical to SEQ ID NO: 21926
  REGION 1..469: note = neuraminidase__InfluenzaA__AFG72198

SEQ ID NO: 21929 - protein, 469 aa, synthetic construct; identical to SEQ ID NO: 21926
  REGION 1..469: note = neuraminidase__InfluenzaA__AFG72209

SEQ ID NO: 21930 - protein, 469 aa, synthetic construct
  REGION 1..469: note = neuraminidase__InfluenzaA__AFG72220
MNPNQKIITIGSVSLTIATICFLMQIAILVTTVTLHFKQYECNSPPNNQVMLCEPTIIERNITEIVHLTNTTIEKEICPKLAEYRNWSKPQCKITGFAPFSKDNSIRLSAGGDIWVTREPYVSCDPGKCYQFALGQGTTLNNRHSNDTVHDRTPYRTLLMNELGVPFHLGTKQVCIAWSSSSCHDGKAWLHVCVTGHDENATASFIYDGRLVDSIGSWSKNILRTQESECVCINGTCTVVMTDGSASERADTKILFIEEGKIVHISPLSGSAQHVEECSCYPRYPGVRCVCRDNWKGSNRPIVDINVKDYSIVSSYVCSGLVGDTPRKNDSSSSSYCRNPNNEKGSHGVKGWAFDDGNDVWMGRTISEELRSGYETFKVIGGWSKPNSKLQINRQVIVDRGNRSGYSGIFSVEGKSCINRCFYVELIRGRKQETEVWWTSNSIVVFCGTSGTYGTGSWPDGADINLMPI

SEQ ID NO: 21931 - protein, 469 aa, synthetic construct; identical to SEQ ID NO: 21926
  REGION 1..469: note = neuraminidase__InfluenzaA__AFG72231

SEQ ID NO: 21932 - protein, 469 aa, synthetic construct
  REGION 1..469: note = neuraminidase__InfluenzaA__AFG72297
MNPNQKIITIGSVSLTIATICFLMQIAILVTTVTLHFKQYECNSPPNNQVMLCEPTIIERNITEIVYLTNTTIEREICPKLAEYRNWSKPQCKITGFAPFSKDNSIRLSAGGDIWVTREPYVSCDPGKCYQFALGQGTTLNNRHSNDTVHERTPYRTLLMNELGVPFHLGTKQVCIAWSSSSCHDGKAWLHVCVTGHDENATASFIYDGRLVDSIGSWSKNILRTQESECVCINGTCTVVMTDGSASERADTKILFIEEGKIVHISPLSGSAQHVEECSCYPRYPGVRCVCRDNWKGSNRPIVDINVKDYSIVSSYVCSGLVGDTPRKNDSSSSSYCRNPNNEKGSHGVKGWAFDDGNDVWMGRTISEELRSGYETFKVIGGWSKPNSKLQINRQVIVDRGNRSGYSGIFSVEGKSCINRCFYVELIRGRKQETEVWWTSNSIVVFCGTSGTYGTGSWPDGADINLMPI

SEQ ID NO: 21933 - protein, 469 aa, synthetic construct
  REGION 1..469: note = neuraminidase__InfluenzaA__AFG72308
MNPNQKIITIGSVSLTIATICFLMQIAILVTTVTLHFKQYECNSPPSNQVMLCEPTIIERNITEIVYLTNTTIEKEICPKLAEYRNWSKPQCKITGFAPFSKDNSIRLSAGGDIWVTREPYVSCDPGKCYQFALGQGTTLNNRHSNDTVHDRTPYRTLLMNELGVPFHLGTKQVCIAWSSSSCHDGKAWLHVCVTGHDENATASFIYDGRLVDSIGSWSKNILRTQESECVCINGTCTVVMTDGSASERADTKILFIEEGKIVHISPLSGSAQHVEECSCYPRYPGVRCVCRDNWKGSNRPIVDINVKDYSIVSSYVCSGLVGDTPRKNDSSSSSYCRNPNNEKGSHGVKGWAFDDGNDVWMGRTISEELRSGYETFRVIGGWSKPNSKLQINRQVIVDRGNRSGYSGIFSVEGKSCINRCFYVELIRGRKQETEVWWTSNSIVVFCGTSGTYGTGSWPDGADINLMPI

SEQ ID NO: 21934 - protein, 469 aa, synthetic construct; identical to SEQ ID NO: 15185
  REGION 1..469: note = neuraminidase__InfluenzaA__AFG72320

SEQ ID NO: 21935 - protein, 469 aa, synthetic construct
  REGION 1..469: note = neuraminidase__InfluenzaA__AFG72331
MNPNQKIITIGSVSLTVATICFLMQIAILVTTVTLHFKQYECNSPPNNQVMLCEPTIIERNITEIVYLTNTTIEKEICPKLAEYRNWSKPQCKITGFAPFSKDNSIRLSAGGDIWVTREPYVSCDPGKCYQFALGQGTTLNNRHSNDTVHDRTPYRTLLMNELGVPFHLGTKQVCIAWSSSSCHDGKAWLHVCVTGHDENATASFIYDGRLVDSIGSWSKNILRTQESECVCINGTCTVVMTDGSASERADTKILFIEEGKIVHISPLSGSAQHVEECSCYPRYPGVRCVCRDNWKGSNRPIVDINVKDYSIVSSYVCSGLVGDTPRKNDSSSSSYCRNPNNEKGSHGVKGWAFDDGNDVWMGRTISEELRSGYETFKVIGGWSKPNSKLQINRQVIVDRGNRSGYSGIFSVEGKSCINRCFYVELIRGRKQETEVWWTSNSIVVFCGTSGTYGTGSWPDGADINLMPI

SEQ ID NO: 21936 - protein, 469 aa, synthetic construct
  REGION 1..469: note = neuraminidase__InfluenzaA__AFG72353
MNPNQKIITIGSVSLTIATICFLMQIAILVTTVTLHFKQYECNSPPNNQVMLCEPTIIERNITEIVYLTNTTIEKEICPKLAEYRNWSKPQCKITGFAPFSKDNSIRLSAGGDIWVTREPYVSCDSGKCYQFALGQGTTLNNRHSNDTVHDRTPYRTLLMNELGVPFHLGTKQVCIAWSSSSCHDGKAWLHVCVTGHDENATASFIYDGRLVDSIGSWSKNILRTQESECVCINGTCTVVMTDGSASERADTKILFIEEGKIVHISPLSGSAQHVEECSCYPRYPGVRCVCRDNWKGSNRPIVDINVKDYSIVSSYVCSGLVGDTPRKNDSSSSSYCRNPNNEKGSHGVKGWAFDDGNDVWMGRTISEELRSGYETFKVIGGWSKPNSKLQINRQVIVDRGNRSGYSGIFSVEGKSCINRCFYVELIRGRKQETEVWWTSNSIVVFCGTSGTYGTGSWPDGADINLMPI

SEQ ID NO: 21937 - protein, 469 aa, synthetic construct; identical to SEQ ID NO: 15185
  REGION 1..469: note = neuraminidase__InfluenzaA__AFG72364

SEQ ID NO: 21938 - protein, 469 aa, synthetic construct
  REGION 1..469: note = neuraminidase__InfluenzaA__AFG72430
MNPNQKIITIGSVSLTITTICFLMQIAILVITVTLHFKQCECNSPPNNQVMLCEPTIIERNITEIVYLTNTTIEKEICPKLAEYRNWSKPQCKITGFAPFSKDNSIRLSAGGDIWVTREPYVSCDPGKCYQFALGQGTTLNNRHSNDTVHDRTPYRTLLMNELGVPFHLGTKQVCIAWSSSSCHDGKAWLHVCVTGHNENATASFIYDGRLVDSIGSWSKNILRTQESECVCINGTCTVVMTDGSASGRADTKILFIEEGKIVHISQLSGSAQHVEECSCYPRYPGVRCVCRDNWKGSNRPIVDINVKDYSIVSSYVCSGLVGDTPRKNDSSSSSNCLDPNNEEGGHGVKGWAFDDGNDVWMGRTISEKLRSGYETFKVIGGWSKPNSKLQINRQVIVDRGNRSGYSGIFSVEGKSCINRCFYVELIRGRKQETEVWWTSNSIVVFCGTSGTYGTGSWPDGADINLMPI

SEQ ID NO: 21939 - protein, 469 aa, synthetic construct; identical to SEQ ID NO: 15185
  REGION 1..469: note = neuraminidase__InfluenzaA__AFG72452

SEQ ID NO: 21940 - protein, 469 aa, synthetic construct
  REGION 1..469: note = neuraminidase__InfluenzaA__AFG72474
MNPNQKIITIGSVSLTIATICFLMQIAILVTTVTLHFKQYECNSPPNNQVMLCEPTIIERNITEIVYLTNTTIEKEICPKLAEYRNWSKPQCEITGFAPFSKDNSIRLSAGGDIWVTREPYVSCDPGKCYQFALGQGTTLNNRHSNDTVHDRTPYRTLLMNELGVPFHLGTKQVCIAWSSSSCHDGKAWLHVCVTGHDENATASFIYDGRLVDSIGSWSKNILRTQESECVCINGTCTVVMTDGSASERADTKILFIEEGKIVHISPLSGSAQHVEECSCYPRYPGVRCVCRDNWKGSNRPIVDINVKDYSIVSSYVCSGLVGDTPRKNDSSSSSYCRNPNNEKGSHGVKGWAFDDGNDVWMGRTISEELRSGYETFKVIGGWSKPNSKLQINRQVIVDRGNRSGYSGIFSVEGKSCINRCFYVELIRGRKQETEVWWTSNSIVVFCGTSGTYGTGSWPDGADINLMPI

SEQ ID NO: 21941 - protein, 469 aa, synthetic construct
  REGION 1..469: note = neuraminidase__InfluenzaA__AFG72485
MNPNQKIITIGSVSLTIATICFLMQIAILVTTVTLHFKQHECNSPPNNQVMLCEPTIIERNITEIVYLTNTTIEKEICPKLAEYRNWSKPQCKITGFAPFSKDNSIRLSAGGDIWVTREPYVSCDPGKCYQFALGQGTTLNNRHSNDTVHDRTPYRTLLMNELGVPFHLGTKQVCIAWSSSSCHDGKAWLHVCVTGHDENATASFIYDGRLVDSIGSWSKNILRTQESECVCINGTCTVVMTDGSASERADTKILFIEEGKIVHISPLSGSAQHVEECSCYPRYPGVRCVCRDNWKGSNRPIVDINVKDYSIVSSYVCSGLVGDTPRKNDSSSSSYCRNPNNEKGSHGVKGWAFDDGNDVWMGRTISEELRSGYETFKVIGGWSKPNSKLQINRQVIVDRGNRSGYSGIFSVEGKSCINRCFYVELIRGRKQETEVWWTSNSIVVFCGTSGTYGTGSWPDGADINLMPI

SEQ ID NO: 21942 - protein, 469 aa, synthetic construct; identical to SEQ ID NO: 15101
  REGION 1..469: note = neuraminidase__InfluenzaA__AFG72507

SEQ ID NO: 21943 - protein, 469 aa, synthetic construct
  REGION 1..469: note = neuraminidase__InfluenzaA__AFG72529
MNPNQKIITIGSVSLTIATICFLMQIAILVTTVTLHFKQYECNSPPNNQVMLCEPTIIERNITEIVYLTNTTIEKEICPKLAEYRNWSKPQCKITGFAPFSKDNSIRLSAGGDIWVTREPYVSCDPGKCYQFALGQGTTLNNRHSNDTVHDRTPYRTLLMNELGVPFHLGTKQVCIAWSSSSCHDGKAWLHVCVTGHDENATASFIYDGRLVDSIGSWSKKILRTQESECVCINGTCTVVMTDGSASERADTKILFIEEGKIVHISPLSGSAQHVEECSCYPRYPGVRCVCRDNWKGSNRPIVDINVKDYSIVSSYVCSGLVGDTPRKNDSSSSSYCQNPNNENGSHGVKGWAFDDGNDVWMGRTISEELRSGYETFKVIGGWSKPNSKLQINRQVIVDRGNRSGYSGIFSVEGKSCINRCFYVELIRGRKQETEVWWTSNSIVVFCGTSGTYGTGSWPDGADINLMPI

SEQ ID NO: 21944 - protein, 469 aa, synthetic construct
  REGION 1..469: note = neuraminidase__InfluenzaA__AFG72540
MNPNQKIITIGSVSLTIATICFLMQIAILVTTVTLHFKQYECNPPPNNQVMLCEPTIIERNITEIVYLTNTTIKKEICPKLAEYRNWSKPQCKITGFAPFSKDNSIRLSAGGDIWVTREPYVSCDPGKCYQFALGQGTTLNNRHSNDTVHDRTPYRTLLMNELGVPFHLGTKQVCIAWSSSSCHDGKAWLHVCVTGHDENATASFIYDGRLVDSIGSWSKNILRTQESECVCINGTCTVVMTDGSASERADTKILFIEEGKIVHISPLSGSAQHVEECSCYPRYPGVRCVCRDNWKGSNRPIVDINVKDYSIVSSYVCSGLVGDTPRKNDSSSSSYCWNPNNEKGGHGVKGWAFDDGNDVWMGRTISEELRSGYETFKVIGGWSKPNSKLQINRQVIVDRGNRSGYSGIFSVEGKSCINRCFYVELIRGRKQETEVWWTSNSIVVFCGTSGTYGTGSWPDGADINLMPI

SEQ ID NO: 21945 - protein, 469 aa, synthetic construct
  REGION 1..469: note = neuraminidase__InfluenzaA__AFG72562
MNPNQKIITIGSVSLTIATICFLMQIAILVTTVTLHFKQYECNSPPNNQVMLCEPTIIERNITEIVYLTNTTIEKEICPKLAEYRNWSKPQCKITGFAPFSKDNSIRLSAGGDIWVTREPYVSCDPGKCYQFALGQGTTLNNRHSNDTVHDRTPYRTLLMNELGVPFHLGTKQVCIAWSSSSCHDGKAWLHVCVTGHDENATASFIYDGRLVDSIGSWSKNILRTQESECVCINGTCTVVMTDGSASERADTKILFIEEGKIVHISPLSGSAQHVEECSCYPRYPGVRCVCRDNWKGSNRPIVDINVKDYSIVSSYVCSGLVGDTPRKNDSSSSSYCWNPNNEKGGHGVKGWAFDDGNDVWMGRTISEELRSGYETFKVIGGWSKPNSKLQINRQVIVDRGNRSGYSGIFSVEGKSCINRCFYVELIRGRKQETEVWWTSNSIVVFCGTSGTYGTGSWPDGADINLMPI

SEQ ID NO: 21946 - protein, 469 aa, synthetic construct
  REGION 1..469: note = neuraminidase__InfluenzaA__AFG72584
MNPNQKIITIGSVSLTIATICFLMQIAILVTTVTLHFKQYECNSPPNNQVMLCEPTIIERNITEIVYLTNTTIEKEVCPKLAEYRNWSKPQCKITGFAPFSKDNSIRLSAGGDIWVTREPYVSCDPGKCYQFALGQGTTLNNKHSNDTVHDRTPYRTLLMNELGVPFHLGTKQVCIAWSSSSCHDGKAWLHVCVTGHDENATASFIYDGRLVDSIGSWSKNILRTQESECVCINGTCTVVMTDGSASEKADTKILFIEEGKIVHISPLSGSAQHVEECSCYPRYPGVRCVCRDNWKGSNRPIVDINVKDYSIVSSYVCSGLVGDTPRKNDSSSSSYCWNPNNEKGGHGVKGWAFDDGNDVWMGRTISEELRSGYETFKVIGGWSKPNSKLQINRQVIVDRGNRSGYSGIFSVEGKSCINRCFYVELIRGRKQETEVWWTSNSIVVFCGTSGTYGTGSWPDGADINLMPI

SEQ ID NO: 21947 - protein, 469 aa, synthetic construct
  REGION 1..469: note = neuraminidase__InfluenzaA__AFG72606
MNPNQKIITIGSVSLTIATICFLMQIAILVTTVTLHFKQYECNSPPNNQVMLCEPTIIERNITEIVYLTNTTIEKEICPKLAEYRNWSKPQCKITGFAPFSKDNSIRLSAGGDIWVTREPYVSCDPGKCYQFALGQGTTLNNRHSNDTVHDRTPYRTLLMNELGVPFHLGTKQVCIAWSSSSCHDGKAWLHVCVTGHDENATASFIYDGRLVDSIGSWSKNILRTQESECVCINGTCTVVMTDGSASERADTKILFIEEGKIVHISPLSGSAQHVEECSCYPRYPGVRCVCRDNWKGSNRPIVDINVKDHSIVSSYVCSGLVGDTPRKNDSSSSSYCLNPNNEEGGHGVKGWAFDDGNDVWMGRTISEKLRSGYETFKVIGGWSKPNSKLQINRQVIVDRGNRSGYSGIFSVEGKSCVNRCFYVELIRGRKQETEVWWTSNSIVVFCGTSGTYGTGSWPDGADINLMPI

SEQ ID NO: 21948 - protein, 469 aa, synthetic construct
  REGION 1..469: note = neuraminidase__InfluenzaA__AFG72617
MNPNQKIITIGSVSLTITTICFLMQIAILVITVTLHFKQCECNSPPNNQVMLCEPTIIERNITEIVYLTNTTIEKEICPKLAEYRNWSKPQCKITGFAPFSKDNSIRLSAGGDIWVTREPYVSCDPGKCYQFALGQGTTLNNRHSNDTVHDRTPYRTLLMNELGVPFHLGTKQVCIAWSSSSCHDGKAWLHVCVTGHNENATASFIYDGRLVDSIGSWSKNILRTQESECVCINGTCTVVMTDGSASGRADTKILFIEEGKIVHISPLSGSAQHVEECSCYPRYPGVRCVCRDNWKGSNRPIVDINVKDYSIVSSYVCSGLVGDTPRKNDSSSSSYCLNPNNEEGGHGVKGWAFDDGNDVWMGRTISEKLRSGYETFKVIGGWSKPNSKLQINRQVIVDRGNRSGYSGIFSVEGKSCINRCFYVELIRGRKQETEVWWTSNSIVVFCGTSGTYGTGSWPDGADINLMPI

SEQ ID NO: 21949 - protein, 469 aa, synthetic construct
  REGION 1..469: note = neuraminidase__InfluenzaA__AFG72628
MNPNQKIITIGSVSLTIATICFLMQIAILVTTVTLHFKQYECNSPPNNQVMLCEPTIIERNITEIVYLTNTTIEKEICPKLAEYRNWSKPQCKITGFAPFSKDNSIRLSAGGDIWVTREPYVSCDPDKCYQFALGQGTTLNNRHSNDTVHDRTPYRTLLMNELGVPFHLGTKQVCIAWSSSSCHDGKAWLHVCVTGHDENATASFIYDGRLVDSIGSWSKKILRTQESECVCINGTCTVVMTDGSASGRADTKILFIEEGKIVHISPLSGSAQHVEECSCYPRYSGVRCVCRDNWKGSNRPIVDINVKDYSIVSSYVCSGLVGDTPRKNDSSSSSHCLNPNNEEGGHGVKGWAFDDGNDVWMGRTISEKLRSGYETFKVIGGWSKPNSKLQINRQVIVDRGNRSGYSGIFSVEGKSCINRCFYVELIRGRKQETEVWWTSNSIVVFCGTSGTYGTGSWPDGADINLMPI

SEQ ID NO: 21950 - protein, 469 aa, synthetic construct; identical to SEQ ID NO: 14980
  REGION 1..469: note = neuraminidase__InfluenzaA__AFG72639

SEQ ID NO: 21951 - protein, 469 aa, synthetic construct
  REGION 1..469: note = neuraminidase__InfluenzaA__AFG72650
MNPNQKIITIGSVSLTIATICFLMQIAILVTTVTLHFKQYECNSPPNNQVMLCEPTIIERNITEIVYLTNTTIEKEICPKLAEYRNWSKPQCKITGFAPFSKDNSIRLSAGGDIWVTREPYVSCDPGKCYQFALGQGTTLNNRHSNDTVHDRTPYRTLLMNELGVPFHLGTKQVCIAWSSSSCHDGKAWLHVCVTGHDENATASFIYDGRLVDSIGSWSKNILRTQESECVCINGTCTVVMTDGSASERADTKILFIEEGKIVHISPLSGSAQHVEECSCYPRYPGVRCVCRDNWKGSNRPIVDINVKDYSIVSSYVCSGLVGDTPRKNDSSSSSYCLNPNNEEGGHGVKGWAFDDGNDVWMGRTISEKLRSGYETFKVIGGWSKPNSKLQINRQVIVDRGNRSGYSGIFSVEGKSCVNRCFYVELIRGRKQETEVWWTSNSIVVFCGTSGTYGTGSWPDGADINLMPI

SEQ ID NO: 21952 - protein, 469 aa, synthetic construct; identical to SEQ ID NO: 21949
  REGION 1..469: note = neuraminidase__InfluenzaA__AFG72672

SEQ ID NO: 21953 - protein, 468 aa, synthetic construct
  REGION 1..468: note = neuraminidase__InfluenzaA__AFG72683
MNPNQKIITIGSVSLTIATICFLMQIAILVITVTLHFKQYECNSPPNNQVMLCEPTIIERNITEIVYLTNTTIEKEICPKLAEYRNWSKPQCKITGFAPFSKDNSIRLSAGGDIWVTREPYVSCDPGKCYQFALGQGTTLNNRHSNEVHDRTPYRTLLMNELGVPFHLGTKQVCIAWSSSSCHDGKAWLHVCVTGHNENATASFIYDGRLVDSIGSWSKNILRTQESECVCINGTCTVVMTDGSASGRADTKILFIEEGKIVHISPLSGSAQHVEECSCYPRYPGVRCVCRDNWKGSNRPIVDINVKDYSIVSSYVCSGLVGDTPRKNDSSSSSHCLNPNNEEGGHGVKGWAFDDGNDVWMGRTISEKLRSGYETFKVIGGWSKPNSKLQINRQVIVDRGNRSGYSGIFSVEGKSCINRCFYVELIRGRKQETEVWWTSNSIVVFCGTSGTYGTGSWPDGADINLMPI

SEQ ID NO: 21954 - protein, 469 aa, synthetic construct
  REGION 1..469: note = neuraminidase__InfluenzaA__AFG72705
MNPNQKIITIGSVSLTIATICFLMQIAILVTTVTLHFKQYECNSPPNNQVMLCEPTIIERNITEIVYLTNTTIEKEICPKLAEYRNWSKPQCKITGFAPFSKDNSIRLSAGGDIWVTREPYVSCDPDKCYQFALGQGTTLNNRHSNDTVHDRTPYRTLLMNELGVPFHLGTKQVCIAWSSSSCHDGKAWLHVCVTGHDENATASFIYDGRLVDSIGSWSKKILRTQESECVCINGTCTVVMTDGSASGRADTKILFIEEGKIVHISQLSGSAQHVEECSCYPRYPGVRCVCRDNWKGSNRPIVDINVKDHSIVSSYVCSGLVGDTPRKNDSSSSSHCLNPNNEEGGHGVKGWAFDDGNDVWMGRTISEKLRSGYETFKVIEGWSKPNSKLQINRQVIVDRGNRSGYSGIFSVEGKSCINRCFYVELIRGRKQETEVWWTSNSIVVFCGTSGTYGTGSWPDGADINLMPI

SEQ ID NO: 21955 - protein, 469 aa, synthetic construct
  REGION 1..469: note = neuraminidase__InfluenzaA__AFG72716
MNPNQKIITIGSVSLTITTICFLMQIAILVITVTLHFKQCECNSPPNNQVMLCEPTIIERNITEIVYLTNTTIEKEICPKLAEYRNWSKPQCKITGFAPFSKDNSIRLSAGGDIWVTREPYVSCDPGKCYQFALGQGTTLNNRHSNDTVHDRTPYRTLLMNELGVPFHLGTKQVCIAWSSSSCHDGKAWLHVCVTGHNENATASFIYDGRLVDSIGSWSKNILRTQESECVCINGTCTVVMTDGSASGRADTKILFIEEGKIVHISPLSGSAQHVEECSCYPRYPGVRCVCRDNWKGSNRPIVDINVKDYSIVSSYVCSGLVGDTPRKNDSSSSSYCLDPNNEEGGHGVKGWAFDDGNDVWMGRTISEKSRSGYETFKVIGGWSKPNSKLQINRQVIVDRGNRSGYSGIFSVEGKSCINRCFYVELIRGRRQETEVWWTSNSIVVFCGTSGTYGTGSWPDGADINLMPI

SEQ ID NO: 21956 - protein, 469 aa, synthetic construct
  REGION 1..469: note = neuraminidase__InfluenzaA__AFG72738
MNPNQKIITIGSVSLTITTICFLMQIAILVITVTLHFKQCECNSPPNNQVMLCEPTIIERNITEIVYLTNTTIEKEICPKLAEYRNWSKPQCKITGFAPFSKDNSIRLSAGGDIWVTREPYVSCDPGKCYQFALGQGTTLNNRHSNDTVHDRTPYRTLLMNELGVPFHLGTKQVCIAWSSSSCHDGKAWLHVCVTGHNENATASFIYDGRLVDSIGSWSKNILRTQESECVCINGTCTVVMTDGSASGRADTKILFIEEGKIVHISQLSGSAQHVEECSCYPRYPGVRCVCRDNWKGSNRPIVDINVKDYSIVSSYVCSGLVGDTPRKNDSSSSSYCLDPNNEEGGHGVKGWAFDDGNDVWMGRTISEKLRSGYETFKVIGGWSKPNSKLQINRQVIVDRGNRSGYSGIFSVEGKSCINRCFYVELIRGRKQETEVWWTSNSIVVFCGTSGTYGTGSWPDGADINLMPI

SEQ ID NO: 21957 - protein, 469 aa, synthetic construct; identical to SEQ ID NO: 15185
  REGION 1..469: note = neuraminidase__InfluenzaA__AFG72749

SEQ ID NO: 21958 - protein, 469 aa, synthetic construct; identical to SEQ ID NO: 14573
  REGION 1..469: note = neuraminidase__InfluenzaA__AFG72760

SEQ ID NO: 21959 - protein, 469 aa, synthetic construct; identical to SEQ ID NO: 14040
  REGION 1..469: note = neuraminidase__InfluenzaA__AFG72771

SEQ ID NO: 21960 - protein, 469 aa, synthetic construct
  REGION 1..469: note = neuraminidase__InfluenzaA__AFG72782
MNPNQKIITIGSVSLTIATICFLMQIAILVTTVTLHFKQYECNSLPNNQVMLCEPTIIERNITEIVYLTNTTIEKEICPKLAEYRNWSKPQCKITGFAPFSKDNSIRLSAGGDIWVTREPYVSCDPDKCYQFALGQGTTLNNRHSNDTVHDRTPYRTLLMNELGVPFHLGTKQVCIAWSSSSCHDGKAWLHVCVTGHDENATASFIYDGRLVDSIGSWSKKILRTQESECVCINGTCTVVMTDGSASGRADTKILFIEEGKIIHTSQLSGSAQHVEECSCYPRYPGVRCVCRDNWKGSNRPIVDINVKDYSIVSSYVCSGLVGDTPRKNDSSSSSHCLNPNNEEGGHGVKGWAFDDGNDVWMGRTISEKFRSGYETFKVIEGWSKPNSKLQINRQVIVDRDNRSGYSGIFSVEGKSCINRCFYVELIRGRKQETEVWWTSNSIVVFCGTSGTYGTGSWPDGADINLMPI

SEQ ID NO: 21961 - protein, 469 aa, synthetic construct; identical to SEQ ID NO: 15749
  REGION 1..469: note = neuraminidase__InfluenzaA__AFG72793

SEQ ID NO: 21962 - protein, 469 aa, synthetic construct; identical to SEQ ID NO: 14284
  REGION 1..469: note = neuraminidase__InfluenzaA__AFG72804

SEQ ID NO: 21963 - protein, 469 aa, synthetic construct; identical to SEQ ID NO: 15929
  REGION 1..469: note = neuraminidase__InfluenzaA__AFG72826

SEQ ID NO: 21964 - protein, 469 aa, synthetic construct
  REGION 1..469: note = neuraminidase__InfluenzaA__AFG72837
MNPNQKIITIGSVSLTIATICFLMQIAILVTTVTLHFKQYECNSPPNNQVMLCEPTIIERNITEIVYLTNTTIEKEICPKLAEYRNWSKPQCNITGFAPFSKDNSIRLSAGGDIWVTREPYVSCDPDKCYQFALGQGTTLNNGHSNDTVHERTPYRTLLMNELGVPFHLGTKQVCIAWSSSSCHDGKAWLHVCVTGDDENATASFIYNGRLVDSIGSWSKKILRTQESECVCINGTCTVVMTDGSASGKADTKILFIEEGKIVHISTLSGSAQHVEECSCYPRYPGVRCVCRDNWKGSNRPIVDINVKDYSIVSSYVCSGLVGDTPRKNDSFSSSHCLDPNNEEGGHGVKGWAFDDGNDVWMGRTISEKLRSGYETFKVIEGWSKPNSKLQINRQVIVERGNRSGYSGIFSVEGKSCINRCFYVELIRGRKEETEVWWTSNSIVVFCGTSGTYGTGSWPDGADINLMPI

SEQ ID NO: 21965 - protein, 470 aa, synthetic construct
  REGION 1..470: note = neuraminidase__InfluenzaA__AFG72848
MNPNQKIITIGSVSLTIATICFLMQIAILVTTVTLHFKQYECNSPPNNQVMLCEPTIIERNITEIVYLTNTTIEKEICPKSAEYRNWSKPQCNITGFAPFSKDNSIRLSAGGDIWVTREPYVSCDPDKCYQFALGQGTTLNNGHSNDTVHDRTPYRTLLMNELGVPFHLGTRQVCIAWSSSSCHDGKAWLHVCVTGDDKNATASFIYNGRLVDSIGSWSKKYILRTQESECVCINGTCTVVMTDGSASGKADTKILFIEEGKIIHISTLSGSAQHVEECSCYPRYPGVRCVCRDNWKGSNRPIVDINVKDYSIVSSYVCSGLVGDTPRKNDSSSSSHCLDPNNEEGGHGVKGWAFDDGNDVWMGRTISEKLRSGYETFKVIEGWSKPNSKLQINRQVIVERGNRSGYSGIFSVEGKSCINRCFYVELIRGRKEETEVWWTSNSIVVFCGTSGTYGTGSWPDGADINLMPI

SEQ ID NO: 21966 - protein, 469 aa, synthetic construct
  REGION 1..469: note = neuraminidase__InfluenzaA__AFG72859
MNPNQKIITIGSVSLTISTICFFMQIAILITTVTLHFKQYEFNSPPNNQVMLCEPTIIERNITEIVYLTNTTIEKEICPKLAEYRNWSKPQCNITGFAPFSKDNSIRLSAGGDIWVTREPYVSCDPDKCYQFALGQGTTLNNVHSNDIVHDRTPYRTLLMNELGVPFHLGTKQVCIAWSSSSCHDGKAWLHVCVTGDDENATASFIYNGRLVDSIVSWSKKILRTQESECVCINGTCTVVMTDGSASGKADTKILFIEEGKIVHTSTLSGSAQHVEECSCYPRYPGVRCVCRDNWKGSNRPIVDINIKDYSIVSSYVCSGLVGDTPRKNDSSSSSHCLDPNNEEGGHGVKGWAFDDGNDVWMGRTISEKLRSGYETFKVIEGWSNPNSKLQINRQVIVDRGNRSGYSGIFSVEGKSCINRCFYVELIRGRKQETEVLWTSNSIVVFCGTSGTYGTGSWPDGADINLMPI

SEQ ID NO: 21967 - protein, 469 aa, synthetic construct
  REGION 1..469: note = neuraminidase__InfluenzaA__AFG72870
MNPNQKIITIGSVSLTIATICFLMQIAILVTTVTLHFKQYECNSPPNNQVMLCEPTIIERNITEIVYLTNTTIEKEICPKLAEYRNWSKPQCNITGFAPFSKDNSIRLSAGGDIWVTREPYVSCDPDKCYQFALGQGTTLNNGHSNDTVHDRTPYRTLLMNELGVPFHLGTKQVCIAWSSSSCHDGKAWLHVCVTGDDENATASFIYNGRLVDSIGSWSKKILRTQESECVCINGTCTVVMTDGSTSGKADTKILFIEEGKIVHISTLSGSAQHVEECSCYPRYPGVRCVCRDNWKGSNRPIVDINVKDYSIVSSYVCSGLVGDTPRKNDSFSSSHCLDPNNEEGGHGVKGWAFDDGNDVWMGRTISEKLRSGYETFKVIEGWSKPNSKLQINRQVIVERGNRSGYSGIFSVESKSCINRCFYVELIRGRKEETEVWWTSNSIVVFCGTSGTYGTGSWPDGADINLMPI

SEQ ID NO: 21968 - protein, 469 aa, synthetic construct
  REGION 1..469: note = neuraminidase__InfluenzaA__AFG72892
MNPNQKIITIGSVSLTISTICFFMQIAILITTVTLHFKQYEFNSPPNNQVMLCEPTIIERNITEIVYLTNTTIEKEICPKLAEYRNWSKPQCDITGFAPFSKDNSIRLSAGGDIWVTREPYVSCDPDKCYQFALGQGTTLNNVHSNDTVHDRTPYRTLLMNELGVPFHLGTKQVCIAWSSSSCHDGKAWLHVCVTGDDKNATASFIYNGRLVDSIVSWSKEILRTQESECVCINGTCTVVMTDGSASGKADTKILFIEEGKIVHTSTLSGSAQHVEECSCYPRYPGVRCVCRDNWKGSNRPIVDINIKDYSIVSSYVCSGLVGDTPRKNDSSSSSHCLDPNNEEGGHGVKGWAFDDGNDVWMGRTISEKLRSGYETFKVIEGWSNPNSKLQINRQVIVDRGNRSGYSGIFSVEGKSCINRCFYVELIRGRKEKTEVLWTSNSIVVFCGTSGTYGTGSWPDGADINLMPI

SEQ ID NO: 21969 - protein, 469 aa, synthetic construct
  REGION 1..469: note = neuraminidase__InfluenzaA__AFG72903
MNPNQKIITIGSVSLTISTICFFMQIAILITTVTLHFKQYEFNSPPNNQVMLCEPTIIERNITEIVYLTNTTIEKEICPKLAEYRNWSKPQCNITGFAPFSKDNSIRLSAGGDIWVTREPYVSCDPDKCYQFALGQGTTLNNVHSNDTVHDRTPYRTLLMNELGVPFHLGTKQVCIAWSSSSCHDGKAWLHVCVTGDDKNATASFIYNGRLVDSIVSWSKEILRTQESECVCINGTCTVVMTDGSASGKADTKILFIEEGKIVHTSTLSGSAQHVEECSCYPRYPGVRCVCRDNWKGSNRPIVDINIKDYSIVSSYVCSGLVGDTPRKKDSSSSSHCLDPNNEEGGHGVKGWAFDDGNDVWMGRTISEKLRSGYETFKVIEGWSNPNSKLQINRQVIVDRGDRSGYSGIFSVEGKSCINRCFYVELIRGRKEETEVLWTSNSIVVFCGTSGTYGTGSWPDGADINLMPI

SEQ ID NO: 21970 - protein, 469 aa, synthetic construct
  REGION 1..469: note = neuraminidase__InfluenzaA__AFG72936
MNPNQKIITIGSVSLTISTICFFIQIAILITTVTLHFKQYEFNSPPNNQVMLCEPTIIERNITEIVYLTNTTIEKEICPKLAEYRNWSKPQCDITGFAPFSKDNSIRLSAGGDIWVTREPYVSCDPDKCYQFALGQGTTLNNVHSNNIVRDRTPYRTLLMNELGVPFHLGTKQVCIAWSSSSCHDGKAWLHVCITGDDKNATASFIYNGRLVDSVVSWSKEILRTQESECVCINGTCTVVMTDGSASGKADTKILFIEEGKIVHTSTLSGSAQHVEECSCYPRYPGVRCVCRDNWKGSNRPIVDINIKDHSIVSSYVCSGLVGDTPRKNDSSSSSHCLDPNNEEGGHGVKGWAFDDGNDVWMGRTISEKSRLGYETFKVIEGWSNHKSKLQINRQVIVDRGNRSGYSGIFSVEGKSCINRCFYVELIRGRKEETEVLWTSNSIVVFCGTSGTYGTGSWPDGADLNLMPI

SEQ ID NO: 21971 - protein, 469 aa, synthetic construct
  REGION 1..469: note = neuraminidase__InfluenzaA__AFG72958
MNPNQKIITIGSVSLTISTICFFMQIAILITTVTLHFKQYEFNSPPNNQVMLCEPTIIERNITEIVYLTNTTIEKEICPKLAEYRNWSKPQCDITGFAPFSKDNSIRLSAGGDIWVTREPYVSCDPDKCYQFALGQGTTLNNVHSNNIVRDRTPYRTLLMNELGVPFHLGTKQVCIAWSSSSCHDGKAWLHVCITGDDKNATASFIYNGRLVDSVVSWSKEILRTQESECVCINGTCTVVMTDGSASGKADTKILFIEEGKIVHTSTLSGSAQHVEECSCYPRYPGVRCVCRDNWKGSNRPIVDINIKDHSIVSSYVCSGLVGDTPRKNDSSSSSHCLDPNNEEGGHGVKGWAFDDGNDVWMGRTINETSRLGYETFKVIEGWSNPKSKLQINRQVIVDRGNRSGYSGIFSVEGKSCINRCFYVELIRGRKEETEVLWTSNSIVVFCGTSGTYGTGSWPDGADLNLMPI

SEQ ID NO: 21972 - protein, 469 aa, synthetic construct; identical to SEQ ID NO: 14103
  REGION 1..469: note = neuraminidase__InfluenzaA__AFG98811

SEQ ID NO: 21973 - protein, 469 aa, synthetic construct
  REGION 1..469: note = neuraminidase__InfluenzaA__AFG98822
MNPNQKIITIGSVSLIIATVCFLMQIAILVTTVTLHFKQHECDSPSSNQVMLCEPIIIERNITEIVYLNNTTIEKETCPKLVEYRNWSKPQCKITGFAPFSKDNSIRLSAGGDIWVTREPYVSCDPGKCYQFALGQGTTLDNKHSNDTIHDRIPHRTLLMNELGVPFHLGTRQVCIAWSSSSCHDGKAWLHVCVTGDDKNATASFIYDGRLVDSIGSWSQNILRTQESECVCINGTCTVVMTDGSASGRADTRILFIEEGKIVHISPLSGSAQHVEECSCYPRYPDVRCICRDNWKGSNRPIVDINMKDYSIDSSYVCSGLVGDTPRNDDRSSKSNCRNPNNERGNHGVKGWAFDNGNDVWMGRTISKDLRSGYETFKVIGGWSTPNSKSQINRQVIVDSDNRSGYSGIFSVEGKSCINRCFYVELIRGREQETRVWWTSNSIVVFCGTSGTYGTGSWPDGANINFMPI

SEQ ID NO: 21974 - protein, 469 aa, synthetic construct; identical to SEQ ID NO: 20127
  REGION 1..469: note = neuraminidase__InfluenzaA__AFG98833

SEQ ID NO: 21975 - protein, 469 aa, synthetic construct
  REGION 1..469: note = neuraminidase__InfluenzaA__AFG98844
MNPNQKIITIGSVSLTIATICFLMQIAILVTTVTLHFKQYECDSPANNQVMPCEPIIIERNITEIVYLTNTTIEKEMCPKLVEYRNWSKPQCKITGFAPFSKDNSIRLSAGGDIWVTREPYVSCDPGKCYQFALGQGTTLNNRHSNDTIHDRIPHRTLLMNELGVPFHLGTRQVCIAWSSSSCHDGKAWLHVCVTGDDKNATASFIYDGRLVDSIGSWSQNILRTQESECVCINRTCTVVMTDGSASGKADTRILFIEEGKIVHISPLSGSAQHVEECSCYPRYPGVRCICRDNWKGSNRPVVDINVKDYSIDSSYVCSGLVGDTPRNNDRSSSSYCRNPNNERGNHGVKGWAFDDENDVWMGRTISKDSRSGYETFKVIGGWSTPNSKSQINRQVIVDSDNRSGYSGIFSVEGKSCINRCFYVELIRGREQETRVWWTSNSIVVFCGTSGTYGTGSWPDGADINLMPI

SEQ ID NO: 21976 - protein, 469 aa, synthetic construct; identical to SEQ ID NO: 14118
  REGION 1..469: note = neuraminidase__InfluenzaA__AFG98855

SEQ ID NO: 21977 - protein, 469 aa, synthetic construct; identical to SEQ ID NO: 14972
  REGION 1..469: note = neuraminidase__InfluenzaA__AFG98866

SEQ ID NO: 21978 - protein, 469 aa, synthetic construct
  REGION 1..469: note = neuraminidase__InfluenzaA__AFG98877
MNPNQKIITIGSVSLTIATICFLMQIAILVTTVTLHFKQYECDSPPNNQVMPCEPIIIERNITEIVYLTNTTIEKEICPKLVEYRNWSKPQCKITGFAPFSKDNSIRLSAGGDIWVTREPYVSCDPGKCYQFALGQGTTLDNKHSNDTIHDRTPHRTLLMNELGVPFHLGTRQVCIAWSSSSCHDGKAWLHVCVTGYDKNATASFIYDGRLVDSIGSWSQNILRTQESECVCINGTCTVVMTDGSASGRADTKILFIEEGKIVHISPLSGSAQHVEECSCYPRYPGVRCICRDNWKGSNRPVVDINVKDYSIDSSYVCSGLVGDTPRNNDRSSNSYCRNPNNEKGNHGVKGWAFDDGNDVWMGRTISEDSRSGYETFKVIGGWSTPNSKLQINRQVIVDSDNRSGYSGIFSVEGKSCINRCFYVELIRGREQETRVWWTSNSIVVFCGTSGTYGTGSWPDGADINLMPI

SEQ ID NO: 21979 - protein, 469 aa, synthetic construct; identical to SEQ ID NO: 14118
  REGION 1..469: note = neuraminidase__InfluenzaA__AFG98888

SEQ ID NO: 21980 - protein, 469 aa, synthetic construct
  REGION 1..469: note = neuraminidase__InfluenzaA__AFG98899
MNPNQKIITIGSVSLIIATICFLMQIAILVTTVTLHFKQYECDSPANNQVMPCEPIIIERNITEIVYLTNTTIEKEICPKLVEYRNWSKPQCKITGFAPFSKDNSIRLSAGGDIWVTREPYVSCDPGKCYQFALGQGTTLDNKHSNDTIHDRTPHRTLLMNELGVPFHLGTRQVCIAWSSSSCHDGKAWLHVCVTGYDKNATASFIYDGRLVDSIGSWSQNILRTQESECVCINGTCTVVMTDGSASGRADTKILFIEEGKIVHISPLSGSAQHVEECSCYPRYPGVRCICRDNWKGSNRPVVDINVKDYSIDSSYVCSGLVGDTPRNNDRSSNSYCRNPNNEKGNHGVKGWAFDDGNDVWMGRTISEDSRSGYETFKVIGGWSTPNSKLQINRQVIVDSDNRSGYSGIFSVEGKSCINRCFYVELIRGREQETRVWWTSNSIVVFCGTSGTYGTGSWPDGADINLMPI

SEQ ID NO: 21981 - protein, 469 aa, synthetic construct; identical to SEQ ID NO: 14118
  REGION 1..469: note = neuraminidase__InfluenzaA__AFG98910

SEQ ID NO: 21982 - protein, 469 aa, synthetic construct; identical to SEQ ID NO: 14118
  REGION 1..469: note = neuraminidase__InfluenzaA__AFG98921

SEQ ID NO: 21983 - protein, 469 aa, synthetic construct
  REGION 1..469: note = neuraminidase__InfluenzaA__AFG98932
MNPNQKIITIGSVSLTIATICFLMQIAILVTTVTLHFKQYECDSPANNQVMPCEPIIVERNITEIVYLTNTTIEKEICPKLVEYRKWSKPQCKITGFAPFSKDNSIRLSAGGDIWVTREPYVSCDPGKCYQFALGQGTTLDNKHSNDTIHDRTPHRTLLMNELGVPFHLGTRQVCIAWSSSSCHDGKAWLHVCVTGYDKNATASFIYDGRLVDSIGSWSQNILRTQESECVCINGTCTVVMTDGSASGRADTKILFIEEGKIVHISPLSGSAQHVEECSCYPRYPGVRCICRDNWKGSNRPVVDINVKDYSIDSSYVCSGLVGDTPRNNDRSSNSYCRNPNNEKGNHGVKGWAFDDGNDVWMGRTISEDSRSGYETFKVIGGWSTPNSKLQINRQVIVDSDNRSGYSGIFSVEGKSCINRCFYVELIRGREQETRVWWTSNSIVVFCGTSGTYGTGSWPDGADINLMPI

SEQ ID NO: 21984 - protein, 469 aa, synthetic construct
  REGION 1..469: note = neuraminidase__InfluenzaA__AFG98943
MNPNQKIITIGSVSLTIATICFLMQIAILVTTVTLHFKQYECDSPANNQVMPCEPIIIERNITEIVYLTNTTIEKEICPKLVEYRNWSKPQCKITGFAPFSKDNSIRLSAGGDIWVTREPYVSCDPGKCYQFALGQGTTLDNKHSNDTIHDRTPHRTLLMNELGVPFHLGTRQVCIAWSSSSCHDGKAWLHVCVTGYDKNATASFIYDGRLVDSIGSWSQNILRTQESECVCINGTCTVVMTDGSASGRADTKILFIEEGKIVHISPLSGSAQHVEECSCYPRYPGVRCICRDNWKGSNRPVVDINVKDYSIDSSYVCSGLVGDTPRKNDRSSNSYCRNPNNEKGNHGVKGWAFDDGNDVWMGRTISEDSRSGYETFKVIGGWSTPNSKLQINRQVIVDSDNRSGYSGIFSVEGKSCINRCFYVELIRGREQETRVWWTSNSIVVFCGTSGTYGTGSWPDGADIDLMPI

SEQ ID NO: 21985 - protein, 469 aa, synthetic construct
  REGION 1..469: note = neuraminidase__InfluenzaA__AFG98965
MNPNQKIITIGSVSLTIATICFLMQIAILVTTVTLHFKQYECDSPANNQVMPCEPTIIERNITEIVYLTNITIEKEICPKLVEYRNWSKPQCKITGFAPFSKDNSIRLSAGGDIWVTREPYVSCDPGKCYQFALGQGTTLDNKHSNDTIHDRTPHRTLLMNELGVPFHLGTRQVCIAWSSSSCHDGKAWLHVCVTGYDKNATASFIYDGRLVDSIGSWSQNILRTQESECVCINGTCTVVMTDGSASGRADTKILFIEEGKIVHISPLSGSAQHVEECSCYPRYPGVRCICRDNWKGSNRPVVDINVKDYSIDSSYVCSGLVGDTPRNNDRSSNSYCRNPNNEKGNHGVKGWAFDDGNDVWMGRTISEDSRSGYETFKVIGGWSTPNSKLQINRQVIVDSDNRSGYSGIFSVEGKSCINRCFYVELIRGREQETRVWWTSNSIVVFCGTSGTYGAGSWPDGADINLMPI

SEQ ID NO: 21986 - protein, 469 aa, synthetic construct
  REGION 1..469: note = neuraminidase__InfluenzaA__AFG98976
MNPNQKIITIGSVSLTIATICFLMQIAILVTTVTLHFKQYECDSPANNQVMPCEPIIIERNITEIVYLANTTIEKEICPKLVEYRNWSKPQCKITGFAPFSKDNSIRLSAGGDIWVTREPYVSCDPGKCYQFALGQGTTLDNKHSNDTIHDRTPHRTLLMNELGVPFHLGTRQVCIAWSSSSCHDGKAWLHVCVTGYDKNATASFIYDGRLVDSIGSWSKNILRTQESECVCINGTCTVVMTDGSASGRADTKILFIEEGKIVHISPLSGSAQHVEECSCYPRYPGVRCICRDNWKGSNRPVVDINVKDYSIDSSYVCSGLVGDTPRNNDRSSSSYCRNPNNEKGNHGVKGWAFDDGNDVWMGRTISEDSRSGYETFKVIGGWSTPNSKLQINRQVIVDSDNRSGYSGVFSVEGKSCINRCFYVELIRGRELETRVWWTSNSIVVFCGTSGTYGTGSWPDGADINLMPI

SEQ ID NO: 21987 - protein, 469 aa, synthetic construct; identical to SEQ ID NO: 21986
  REGION 1..469: note = neuraminidase__InfluenzaA__AFG98987

SEQ ID NO: 21988 - protein, 469 aa, synthetic construct
  REGION 1..469: note = neuraminidase__InfluenzaA__AFG98998
MNPNQKIITIGSVSLTIATICFLMQIAILVTTVTLHFKQYECDSPANNQVMPCEPIIIERNITEIVYLTNTTIEKEICPKLVEYRNWSKPQCKITGFAPFSKDNSIRLSAGGDIWVTREPYVSCDPGKCYQFALGQGTTLENKHSNDTIHDRTPHRTLLMNELGVPFHLGTRQVCIAWSSSSCHDGKAWLHVCVTGYDKNATASFIYDGRLVDSIGSWSQNILRTQESECVCINGTCTVVMTDGSASGRADTKILFIEEGKIVHISPLSGSAQHVEECSCYPRYPGVRCICRDNWKGSNRPVVDINVKDYSIDSSYVCSGLVGDTPRKNDRSSSSYCRNPNNEKGNHGVKGWAFDDGNDVWMGRTISEDSRSGYETFKVIGGWSTPNSKLQINRQVIVDSANRSGYSGIFSVEGKSCINRCFYVELIRGREQETRVWWTSNSIVVFCGTSGTYGTGSWPDGADINLMPI

SEQ ID NO: 21989 - protein, 469 aa, synthetic construct; identical to SEQ ID NO: 21986
  REGION 1..469: note = neuraminidase__InfluenzaA__AFG99009

SEQ ID NO: 21990 - protein, 469 aa, synthetic construct
  REGION 1..469: note = neuraminidase__InfluenzaA__AFG99020
MNPNQKIITIGSVSLTIATICFLMQIAILVTTVTLHFKQYECDSPANNQVMPCEPIIIERNITEIVYLTNTTIEKEICPKLVEYRNWSKPQCKITGFAPFSKDNSIRLSAGGDIWVTREPYVSCDPGKCYQFALGQGTTLDNKHSNDTIHDRTPHRTLLMNELGVPFHLGTRQVCIAWSSSSCHDGKAWLHVCVTGYDKNATASFIYDGRLVDSIGSWSQNILRTQESECVCINGTCTVVMTDGSASGRADTKILFIEEGKIVHTSPLSGSAQHVEECSCYPRYPGVRCICRDNWKGSNRPVVDINVKDYSIDSSYVCSGLVGDTPRNNDRSSSSYCRNPNNEKGTHGVKGWAFDDGNDVWMGRTISEDSRSGYETFKVIGGWSTPNSKLQINRQVIVDSDNRSGYSGIFSVEGKSCINRCFYVELIRGREQETRVWWTSNSIVVFCGTSGTYGTGSWPDGADINIMPI

SEQ ID NO: 21991 - protein, 469 aa, synthetic construct
  REGION 1..469: note = neuraminidase__InfluenzaA__AFG99031
MNPNQKIITIGSVSLTIATICFLMQIAILVTTVTLHFKQYECDSPANNQVMPCEPIIIERNITEIVYLTNTTIEKEICPKLVEYRNWSKPQCKITGFAPFSKDNSIRLSAGGDIWVTREPYVSCDPGKCYQFALGQGTTLDNKHSNDTIHDRTPHRTLLMNELGVPFHLGTRQVCIAWSSSSCHDGKAWLHVCVTGYDKNATASFIYDGRLVDSIGSWSQNILRTQESECVCINGTCTVVMTDGSASGRADTKILFIEEGKIVHTSPLSGSAQHVEECSCYPRYPGVRCICRDNWRGSNRPVVDINVKDYSIDSSYVCSGLVGDTPRNNDRSSSSYCRNPNNEKGTHGVKGWAFDDGNDVWMGRTISEDSRSGYETFKVIGGWSTPNSKLQINRQVIVDSDNRSGYSGIFSVEGKSCINRCFYVELVRGREQETRVWWTSNSIVVFCGTSGTYGTGSWPDGADINLMPI

SEQ ID NO: 21992 - protein, 469 aa, synthetic construct; identical to SEQ ID NO: 14576
  REGION 1..469: note = neuraminidase__InfluenzaA__AFG99042

SEQ ID NO: 21993 - protein, 469 aa, synthetic construct
  REGION 1..469: note = neuraminidase__InfluenzaA__AFG99053
MNPNQKIITIGSVSLTIATICFLMQIAILVTTVTLHFKQYECDSPANNQVMPCEPIIIERNITEIVYLTNTTIEKEICPKLVEYRNWSKPQCKITGFAPFSKDNSIRLSAGGDIWVTREPYVSCDPGKCYQFALGQGTTLDNKHSNDTIHDRTPHRTLLMNELGVPFHLGTRQVCIAWSSSSCHDGKAWLHVCVTGYDKNATASFIYDGRLVDSIGSWSQNILRTQESECVCINGTCTVVMTDGSASGRADTKILFIEEGKIVHTSSLSGSAQHVEECSCYPRYPGVRCICRDNWKGSNRPVVDINVKDYSIDSSYVCSGLVGDTPRNNDRSSSSYCRNPNNEKGTHGVKGWAFDDGNDVWMGRTISEDSRSGYETFKVIGGWSIPNSKLQINRQVIVDSDNRSGYSGIFSVEGKSCINRCFYVELIRGREQETRVWWTSNSIVVFCGTSGTYGTGSWPDGADINLMPI

SEQ ID NO: 21994 - protein, 469 aa, synthetic construct
  REGION 1..469: note = neuraminidase__InfluenzaA__AFG99064
MNPNQKIITIGSVSLTIATVCFLMQIAILVTTVTLHFKQYECDSPPNNQVMPCEPIIIERNVTEIVYLTNTTIEKEICPKLVEYRNWSKPQCKITGFAPFSKDNSIRLSAGGDIWVTREPYVSCDPSKCYQFALGQGTTLDNKHSNDTIHDRTPHRTLLMNELGVPFHLGTRQVCIAWSSSSCHDGKAWLHVCITGYDKNATASFIYDGRLVDSIGSWSKNILRTQESECVCINGTCTVVMTDGSASERADTKILFIEEGKIVHISPLSGSAQHVEECSCYPRYPGVRCICRDNWKGSNRPVVDINVKDYSIVSSYVCSGLVGDTPRKNDRSSSSYCRNPNNEKGNHGVKGWAFDDGNDVWMGRTISEESRSGYETFKVIGGWSTPNSKLQINRQVIVDSDNRSGYSGIFSVEGKSCINRCFYVELIRGREQETRVWWTSNSIVVFCGTSGTYGTGSWPDGADINLMPI

SEQ ID NO: 21995 - protein, 469 aa, synthetic construct
  REGION 1..469: note = neuraminidase__InfluenzaA__AFG99086
MNPNQKIITIGSVSLTIATICFLMQIAILVTTVTLHFKQYECDSPANNQVMPCEPIIIERNVTEIVYLTNTTIEKEICPKLVEYRNWSKPQCKITGFAPFSKDNSIRLSAGGDIWVTREPYVSCDPGKCYQFALGQGTTLDNKHSNDTIHDRTPYRTLLMNELGVPFHLGTRQVCIAWSSSSCHDGKAWLHVCVTGYDKNATASFIYDGRLVDSIGSWSKNILRTQESECVCINGTCTVVMTDGSASERADTKILFIEEGKIVHISPLSGSAQHVEECSCYPRYPGVRCICRDNWKGSNRPVVDINVKDYSIVSSYVCSGLVGDTPRKNDRSSSSYCRNPNNEKGNHGVKGWAFDDGNDVWMGRTISEESRSGYETFKVIGGWSTPNSKLQINRQVIVDSDNRSGYSGIFSVEGKSCINRCFYVELIRGREQETRVWWTSNSIVVFCGTSGTYGTGSWPDGADINLMPI

SEQ ID NO: 21996 - protein, 469 aa, synthetic construct
  REGION 1..469: note = neuraminidase__InfluenzaA__AFG99097
MNPNQKIITIGSVSLTIATICFLMQIAILVTTVTLHFKQYECDSPANNQVMPCEPIIIERNVTEIVYLTNTTIEKEICPKLVEYRNWSKPQCKITGFAPFSKDNSIRLSAGGDIWVTREPYVSCDPGKCYQFALGQGTTLDNKHSNDTIHDRTPYRTLLMNELGVPFHLGTRQVCIAWSSSSCHDGKAWLHVCVTGYDKNATASFIYDGRLVDSIGSWSKNILRTQESECVCINGTCTVVMTDGSASERADTKILFIEEGKIVHISPLSGSAQHVEECSCYPRYPGVRCICRDNWKGSNRPVVDINVKDYSIVSSYVCSGLVGDTPRKNDRSSSSYCRNPNNEKGNHGVKGWAFDDGNDVWMGRTISEESRLGYETFKVIGGWSTPNSKLQINRQVIVDSDNRSGYSGIFSVEGKSCINRCFYVELIRGREQETRVWWTSNSIVVFCGTSGTYGTGSWPDGADINLMPI

SEQ ID NO: 21997 - protein, 469 aa, synthetic construct
  REGION 1..469: note = neuraminidase__InfluenzaA__AFG99119
MNPNQKIITIGSVSLTIATICFLMQIAILVTTVTLHFKQYECSSPPNNQVMPCEPIIIERNITEIVYLTNTTIEKEICPKLVEYRNWSKPQCKITGFAPFSKDNSIRLSAGGDIWVTREPYVSCDPGKCYQFALGQGTTLDNKHSNDTIHDRTPYRTLLMNELGVPFHLGTRQVCIAWSSSSCHDGKAWLHVCVTGHDKNATASFIYDGRLVDSIGSWSKNILRTQESECVCINGTCTVVMTDGSASERADTKILFIEEGKIVHISPLSGSAQHVEECSCYPRYPGVRCVCRDNWKGSNRPIVDINVKDYSIVSSYVCSGLVGDTPRKNDRSSSSYCRNPNNEKGNHGVKGWAFDDGNDVWMGRTISEESRSGYETFKVIGGWSTPNSKLQINRQVIVDSDNRSGYSGIFSVEGKSCINRCFYVELIRGREQETRVWWTSNSIVVFCGTSGTYGTGSWPDGADINLMPI

SEQ ID NO: 21998 - protein, 469 aa, synthetic construct
  REGION 1..469: note = neuraminidase__InfluenzaA__AFG99130
MNPNQKIITIGSVSLTIATICFLMQIAILVTTVTLHFKQYECSSPPNNQVMPCGPIIIERNITEIVYLTNTTIEKEICPKLVEYRNWSKPQCKITGFAPFSKDNSIRLSAGGDIWVTREPYVSCDPGKCYQFALGQGTTLDNKHSNDTIHDRTPYRTLLMNELGVPFHLGTRQVCIAWSSSSCHDGKAWLHVCVTGHDKNATASFIYDGRLVDSIGSWSKNILRTQESECVCINGTCTVVMTDGSASERADTKILFIEEGKIVHISPLSGSAQHVEECSCYPRYPGVRCVCRDNWKGSNRPVVDINVKDYSIVSSYVCSGLVGDTPRKNDRSSSSYCRNPNNEKGNHGVKGWAFDDGNDVWMGRTISEESRSGYETFKVIGGWSTPNSKLQTNRQVIVDSDNRSGYSGIFSVEGKSCINRCFYVELIRGREQETRVWWTSNSIVVFCGTSGTYGTGSWPDGADINLMPI

SEQ ID NO: 21999 - protein, 469 aa, synthetic construct
  REGION 1..469: note = neuraminidase__InfluenzaA__AFG99141
MNPNQKIITIGSVSLTIATICFLMQIAILVTTVTLHFKQYECSSPPNNQVMPCEPIIIERNITEIVYLTNTTIEKEICPKLVEYRNWSKPQCKITGFAPFSKDNSIRLSAGGDIWVTREPYVSCDPGKCYQFALGQGTTLDNKHSNDTIHDRTPYRTLLMNELGVPFHLGTRQVCIAWSSSSCHDGKAWLHVCVTGHDKNATASFIYDGRLVDSIGSWSKNILRTQESECVCINGTCTVVMTDGSASERAETKILFIEEGKIVHISPLSGSAQHVEECSCYPRYPGVRCVCRDNWKGSNRPVVDINVKDYSIVSSYVCSGLVGDTPRKNDRSSSSYCRNPNNEKGNHGVKGWAFDDGNDVWMGRTISEESRSGYETFKVIGGWSTPNSKLQINRQVIVDSDNRSGYSGIFSVEGKSCINRCFYVELIRGREQETRVWWTSNSIVVFCGTSGTYGTGSWPDGADINLMPI

SEQ ID NO: 22000 - protein, 469 aa, synthetic construct
  REGION 1..469: note = neuraminidase__InfluenzaA__AFG99152
MNPNQKIMTIGSVSLTIATICFLMQIAILVTTVTLHFKHYEFSSPPNNQVMPCEPIIIERNITEIVYLTNTTIEKEVCPKLVEYRNWSKPQCKITGFAPFSKDNSIRLSAGGDIWVTREPYVSCDPGKCYQFALGQGTTLNNKHSNDTIHDRTPYRTLLMNELGVPFHLGTRQVCIAWSSSSCHDGKAWLHVCVTGHDKNATASFIYDGRLVDSIGSWSKNILRTQESECVCINGTCTVVMTDGSASGRADTKILFIEEGKIVHISPLSGSAQHVEECSCYPRYPGVRCVCRDNWKGSNRPIVDINVKDYSIVSSYVCSGLVGDTPRKNDRSSSSYCRNPNNEKGNHGVKGWAFDDGNDVWMGRTIGEELRSGYETFKVIGGWSTPNSKLQINRQVIVDSDNRSGYSGIFSVEGKSCINRCFYVELIRGREQETRVLWTSNSIVVFCGTSGTYGTGSWPDGADINLMPI

SEQ ID NO: 22001 - protein, 469 aa, synthetic construct; identical to SEQ ID NO: 18995
  REGION 1..469: note = neuraminidase__InfluenzaA__AFG99163

SEQ ID NO: 22002 - protein, 469 aa, synthetic construct
  REGION 1..469: note = neuraminidase__InfluenzaA__AFG99174
MNPSQKIITIGSVSLTIATICFLMQIAILVTTVTLHFKQYECSSPPNNQVMPCEPIIIERNITEIVYLTNTTIEKEICPKLMEYRNWSKPQCKITGFAPFSKDNSIRLSAGGDIWVTREPYVSCDPGKCYQFALGQGTTLDNKHSNDTIHDRTPYRTLLMNELGVPFHLGTRQVCIAWSSSSCHDGKAWLHVCVTGHDKNATASFIYDGRLVDSIGSWSKNILRTQESECVCINGTCTVVMTDGSASERAETKILFIEEGKIVHISPLSGSAQHVEECSCYPRYPGVRCVCRDNWKGSNRPVVDINVKDYSIVSSYVCSGLVGDTPRKNDRSSSSYCRNPNNEKGNHGVKGWAFDDGNDVWMGRTISEESRSGYETFKVIGGWSTPNSKLQINRQVIVDSDNRSGYSGIFSVEGKSCINRCFYVELIRGREQETRVWWTSNSIVVFCGTSGTYGTGSWPDGADINLMPI

SEQ ID NO: 22003 - protein, 469 aa, synthetic construct
  REGION 1..469: note = neuraminidase__InfluenzaA__AFG99185
MNPNQKIITIGSVSLTIATICFLMQIAILVTTVTLHFKQYECSSPPNNQVMPCEPIIIERNITEIVYLTNTTIEKEICPKLVEYRNWSKPQCKITGFAPFSKDNSIRLSAGGDIWVTREPYVSCDPGKCYQFALGQGTTLNNKHSNDTIHDRTPYRTLLMNELGVPFHLGTKQVCIAWSSSSCHDGKAWLHVCVTGHDKNATASFIYDGRLVDSIGSWSKNILRTQESECVCINGTCTVVMTDGSASERADTKILFIEEGKIVHISPLSGSAQHVEECSCYPRYPGVRCVCRDNWKGSNRPIVDINVKDYSIVSSYVCSGLVGDTPRKNDRSSSSYCRNPNNEKGNHGVKGWAFDDGNDVWMGRTIGEELRSGYETFKVIGGWSTPNSKLQINRQVIVDSKNRSGYSGIFSVEGKSCINRCFYVELIRGREQETRVWWTSNSIVVFCGTSGTYGTGSWPDGADINLMPI

SEQ ID NO: 22004 - protein, 469 aa, synthetic construct
  REGION 1..469: note = neuraminidase__InfluenzaA__AFG99196
MNPNQKIITIGSVSLTIATICFLTQIAILVTTVTLHFKQYECSSSPNNQVMPCEPIIIERNITEIVYLTNTTIEKEICPKLVEYRNWSKPQCKITGFAPFSKDNSIRLSAGGDIWVTREPYVSCDPGKCYQFALGQGTTLNNKHSNDTIHDRTPYRTLLMNELGVPFHLGTKQVCIAWSSSSCHDGKAWLHVCITGHDKNATASFIYDGRLVDSIGSWSKNILRTQESECVCINGTCTVVMTDGSASERADTKILFIEEGKIVHISPLSGSAQHVEECSCYPRYPGVRCVCRDNWKGSNRPIVDINVKDYSIVSSYVCSGLVGDTPRKNDRSSSSYCRNPNNEKGNHGVKGWAFDDGNDVWMGRTIGEELRSGYETFKVIGGWSTPNSKLQINRQVIVDSGNRSGYSGIFSVEGKSCINRCFYVELIRGREQETRVWWTSNSIVVFCGTSGTYGTGSWPDGADINLMPI

SEQ ID NO: 22005 - protein, 469 aa, synthetic construct
  REGION 1..469: note = neuraminidase__InfluenzaA__AFG99207
MNPNQKIITIGSVSLTIATICFLMQIAILVTTVTLHFKPYECSSPPNNQVMPCEPIIIERNITEIVYLTNTTIEKEICPKLVEYRNWSKPQCKITGFAPFSKDNSIRLSAGGDIWVTREPYVSCDPGKCYQFALGQGTTLNNKHSNDTIHDRTPYRTLLMNELGVPFHLGTKQVCIAWSSSSCHDGKAWLHVCVTGHDKNATASFIYDGRLVDSIGSWSKNILRTQESECVCINGTCTVVMTDGSASERADTKILFIEEGKIVHISPLSGSAQHVEECSCYPRYPGVRCVCRDNWKGSNRPIVDINVKDYSIVSSYVCSGLVGDTPRKNDRSSSSYCRNPNNEKGNHGVKGWAFDDGNDVWMGRTIGEELRSGYETFKVIGGWSTPNSKLQINRQVIVDSKSRSGYSGIFSVEGKSCINRCFYVELIRGREQETRVWWTSNSIVVFCGTSGTYGTGSWPDGADINLMPI

SEQ ID NO: 22006 - protein, 469 aa, synthetic construct; identical to SEQ ID NO: 14814
  REGION 1..469: note = neuraminidase__InfluenzaA__AFG99218

SEQ ID NO: 22007 - protein, 469 aa, synthetic construct
  REGION 1..469: note = neuraminidase__InfluenzaA__AFG99229
MNPNQKIITIGSVSLTIATICFLMQIAILVTTVTLHFKQYECSSPPNNQVMPCEPIIIERNITKIVYLTNTTIEKEICPKLVEYRNWSKPQCKITGFAPFSKDNSIRLSAGGDIWVTREPYVSCDPGKCYQFALGQGTTLNNKHSNDTIHDRTPYRTLLMNELGVPFHLGTKQVCIAWSSSSCHDGKAWLHVCVTGHDKNATASFIYDGRLVDSIGSWSKNILRTQESECVCINGTCTVVMTDGSASERADTKILFIEEGKIVHISPLSGSAQHVEECSCYPRYPGVRCVCRDNWKGSNRPIVDINVKDYSIVSSYVCSGLVGDTPRKNDRSSSSYCRNPNNEKGNHGVKGWAFDDGNDVWMGRTIGEELRSGYETFKVIGGWSTPNSKLQINRQVIVDSKNRSGYSGIFSVEGKSCINRCFYVELIRGREQETRVWWTSNSIVVFCGTSGTYGTGSWPDGADINLMPI

SEQ ID NO: 22008 - protein, 469 aa, synthetic construct
  REGION 1..469: note = neuraminidase__InfluenzaA__AFG99240
MNPNQKIITIGSVSLTIATICFLMQIAILVTTVTLHFKQYECSSPPSNQVMPCEPIIIERNITEIVYLTNTTIEKEICPKPVEYRNWSKPQCKITGFAPFSKDNSIRLSAGGDIWVTREPYVSCDPGKCYQFALGQGTTLNNKHSNDTIHDRTPYRTLLMNELGVPFHLGTKQVCIAWSSSSCHDGKAWLHVCVTGHDKNATASFIYDGRLVDSIGSWSKNILRTQESECVCINGTCTVVMTDGSASERADTKILFIEEGKIVHISPLSGSAQHVEECSCYPRYPGVRCVCRDNWKGSNRPIVDINVKDYSIVSSYVCSGLVGDTPRKNDRFSSSYCRNPNNEKGNHGVKGWAFDDGNDVWMGRTIGEELRSGYETFKVIGGWSTPNSKLQINRQVIVDSKNRSGYSGIFSVEGKSCINRCFYVELIRGREQETRVWWTSNSIVVFCGTSGTYGTGSWPDGADINLMPI

SEQ ID NO: 22009 - protein, 469 aa, synthetic construct; identical to SEQ ID NO: 14813
  REGION 1..469: note = neuraminidase__InfluenzaA__AFG99251

SEQ ID NO: 22010 - protein, 469 aa, synthetic construct
  REGION 1..469: note = neuraminidase__InfluenzaA__AFG99273
MNPNQKIITIGSVSLTIATMCFLMQIAILVTTVTLHFKQYECSSPPNNQVMPCEPTIIERNITEIVYLTNTTIEKEICPKLVEYRNWSKPQCKITGFAPFSKDNSIRLSAGGDIWVTREPYVSCDPGKCYQFALGQGTTLNNRHSNDTVHDRTPYRTLLMNELGVPFHLGTKQVCIAWSSSSCHDGKAWLHVCVTGHDKNATASFIYDGRLVDSIGSWSKNILRTQESECVCINGTCTVVMTDGSASERADTKILFIEEGKIVHISPLSGSAQHVEECSCYPRYPGVRCVCRDNWKGSNRPIVDINVKDYSIVSSYVCSGLVGDTPRKNDRSSSSYCRNPNNEKGSHGVKGWAFDDGNDVWMGRTIGEELRSGYETFKVIGGWSTPNSKLQINRQVIVDSGNRSGYSGIFSVEGKSCINRCFYVELIRGREQETRVWWTSNSIVVFCGTSGTYGTGSWPDGADINLMPI

SEQ ID NO: 22011 - protein, 469 aa, synthetic construct
  REGION 1..469: note = neuraminidase__InfluenzaA__AFG99284
MNPNQKIITIGSVSLTIATICFLMQIAILVTTVTLHFKQYECSSPPSNQVMPCEPIIIERNITKIVYLTNTTIEKEICPKLVEYRNWSKPQCKITGFAPFSKDNSIRLSAGGDIWVTREPYVSCDPSKCYQFALGQGTTLNNKHSNDTIHDRTPYRTLLMNELGVPFHLGTKQVCIAWSSSSCHDGKAWLHVCVTGHDDNATASFIYDGRLVDSIGSWSKNILRTQESECVCINGTCTVVMTDGSASERADTKILFIEEGKIVHISPLSGSAQHVEECSCYPRYPGVRCVCRDNWKGSNRPIVDINVKDYSIVSSYVCSGLVGDTPRKNDRSSSSYCRNPNNEKGSHGVKGWAFDDGNDVWMGRTIGEELRSGYETFKVIGGWSTPNSKLQINRQVIVDSKNRSGYSGIFSVEGKSCINRCFYVELIRGREQETRVWWTSNSIVVFCGTSGTYGTGSWPDGADINLMPI

SEQ ID NO: 22012 - protein, 469 aa, synthetic construct
  REGION 1..469: note = neuraminidase__InfluenzaA__AFG99295
MNPNQKIITIGSVSLTIATICFLMQIAILVTTVTLHFKQYECSSPPNNQVMPCEPTIIERNITEIVYLTNTTIEKEICPKLVEYRNWSKPQCKITGFAPFSKDNSIRLSAGGDIWVTREPYVSCDPDKCYQFALGQGTTLNNRHSNDTVHDRTPYRTLLMNELGVPFHLGTKQVCIAWSSSSCHDGKAWLHVCVTGHDKNATASFIYNGRLVDSIGSWSKNILRTQESECVCINGTCTVVMTDGSASERADTKILFIEEGKIVHISPLSGSAQHVEECSCYPRYPGVRCVCRDNWKGSNRPIVDINVKDYSIISSYVCSGLVGDTPRKNDRSSSSYCQNPNNEKGSHGVKGWAFDDGNDVWMGRTIGEELRSGYETFKVIGGWSTPNSKLQINRQVIVDSGNRSGYSGIFSVEGKSCINRCFYVELIRGRKQETRVWWTSNSIVVFCGTSGTYGTGSWPDGADINLMPI

SEQ ID NO: 22013 - protein, 469 aa, synthetic construct
  REGION 1..469: note = neuraminidase__InfluenzaA__AFG99317
MNPNQKIITIGSVSLTIATICFLMQIAILVTTVTLHFKQYECSSPPNNQVMPCEPTIIERNITEIVYLTNTTIEKEICPKLVEYRNWSKPQCNITGFAPFSKDNSIRLSAGGDIWVTREPYVSCDPGKCYQFALGQGTTLNNRHSNDTVHDRTPYRTLLMNELGVPFHLGTKQVCIAWSSSSCHDGKAWLHVCVTGHDENATASFIYDGRLVDSIGSWSKNILRTQESECVCINGTCTVVMTDGSASERADTKILFIEEGKIVHISPLSGSAQHVEECSCYPRYPGVRCVCRDNWKGSNRPIVDINVKDYSIVSSYVCSGLVGDTPRKNDRSSSSYCRNPNNEKGSHGVKGWAFDDGNDVWMGRTIDEELRSGYETFKVIGGWSTPNSKLQINRQVIVDSGNRSGYSGIFSVEGKSCINRCFYVELIRGRKQETRVWWTSNSIVVFCGTSGTYGTGSWPDGADINLMPI

SEQ ID NO: 22014 - protein, 469 aa, synthetic construct
  REGION 1..469: note = neuraminidase__InfluenzaA__AFG99328
MNPNQKIITIGSVSLTLATICFLMQIAILVTTVTLHFKQYECSSPPNNQVMPCEPTIIERNITEIVYLTNTTIEKEICPKLVEYRNWSKPQCKITGFAPFSKDNSIRLSAGGDIWVTREPYVSCDPSKCYQFALGQGTTLNNRHSNDTVHDRTPYRTLLMNELGVPFHLGTRQVCMAWSSSSCHDGKAWLHVCVTGHDENATASFIYDGRLVDSIGSWSKNVLRTQESECVCINGTCTVVMTDGSASERADTKILFIEEGKIVHISPLSGNAQHVEECSCYPRYPGVRCVCRDNWKGSNRPIVDINVKDYSIVSSYVCSGLVGDTPRKNDRSSSSYCRNPNNEKGSHGVKGWAFDDGNDVWMGRTIGEELRSGYETFKVIGGWSTPNSKLQINRQVIVDSGNRSGYSGIFSVEGKSCINRCFYVELIRGRKQETRVWWTSNSIVVFCGTSGTYGTGSWPDGADINLMPI

SEQ ID NO: 22015 - protein, 469 aa, synthetic construct
  REGION 1..469: note = neuraminidase__InfluenzaA__AFG99350
MNPNQKIITIGSVSLTLATICFLMQIAILVTTVTLHFKQYECSSPPNNQVMPCEPTIIERNITEIVYLTNTTIEKEICPKLVEYRNWSKPQCKITGFAPFSKDNSIRLSAGGDIWVTREPYVSCDPSKCYQFALGQGTTLNNRHSNDTVHDRTPYRTLLMNELGVPFHLGTRQVCMAWSSSSCHDGKAWLHVCVTGHDENATASFIYDGRLVDSIGSWSKNILRTQESECVCINGTCTVVMTDGSASERADTKILFIEEGKIVHISPLSGSAQHVEECSCYPRYPGVRCVCRDNWKGSNRPIVDINVKDYSIVSSYVCSGLVGDTPRKNDRSSSSYCRNPNNEKGSHGVKGWAFDDGNDVWMGRTIGEELRSGYETFKVIGGWSTPNSKLQINRQVIVDSGNRSGYSGIFSVEGKSCINRCFYVELIRGRKQETRVWWTSNSIVVFCGTSGTYGTGSWPDGADINLMPI

SEQ ID NO: 22016 - protein, 469 aa, synthetic construct
  REGION 1..469: note = neuraminidase__InfluenzaA__AFG99361
MNPNQKIITIGSVSLTIATICFLMQIAILVTTVTLHFKQYECNSPPNNQVMLCEPTIIERNITEIVYLTNTTIEKEKCPKLAEYRNWSKPQCKITGFAPFSKDNSIRLSAGGDIWVTREPYVSCDPGKCYQFALGQGTTLNNRHSNDTVHDRTPYRTLLMNELGVPFHLGTKQVCIAWSSSSCHDGKAWLHVCVTGHDENATASFIYDGRLVDSIGSWSKNILRTQESECVCINGTCTVVMTDGSASERADTKILFIEEGKIVHISPLSGSAQHVEECSCYPRYPGVRCVCRDNWKGSNRPIVDINVKDYSIVSSYVCSGLVGDTPRKNDSSSSSYCRNPNNEKGSHGVKGWAFDDGNDVWMGRTISEELRSGYETFKVIGGWSKPNSKLQINRQVIVDRGNRSGYSGIFSVEGKSCINRCFYVELIRGRKQETEVWWTSNSIVVFCGTSGTYGTGSWPDGADINLMPI

SEQ ID NO: 22017 - protein, 469 aa, synthetic construct
  REGION 1..469: note = neuraminidase__InfluenzaA__AFG99383
MNPNQKIITIGSVSLTIATICFLMQIAILVTTVTLHFKQYECSSPPNNQVMPCEPTIIERNITEIVYLTNTTIEKEICPKLVEYRNWSKPQCKITGFAPFSKDNSIRLSAGGDIWVTREPYVSCDPGKCYQFALGQGTTLNNRHSNDTVHDRTPYRTLLMNELGVPFHLGTKQVCIAWSSSSCHDGKAWLHVCVTGHDENATASFIYDGRLVDSIGSWSKNILRTQESECVCINGTCTVVMTDGSASERADTKILFIEEGKIVHISPLSGSAQHVEECSCYPRYPGVRCVCRDNWKGSNRPIVDINVKDYSIVSSYVCSGLVGDTPRKNDSSSSSYCRNPNNEKGSHGVKGWAFDDGNDVWMGRTIGEELRSGYETFKVIGGWSTPNSKLQINRQVIVDSGNRSGYSGIFSVEGKSCINRCFYVELIRGRKQETKVWWTSNSIVVFCGTSGTYGTGSWPDGADINLMPI

SEQ ID NO: 22018 - protein, 469 aa, synthetic construct; identical to SEQ ID NO: 22017
  REGION 1..469: note = neuraminidase__InfluenzaA__AFG99394

SEQ ID NO: 22019 - protein, 469 aa, synthetic construct
  REGION 1..469: note = neuraminidase__InfluenzaA__AFG99405
MNPNQKIITIGSVSLTIATICFLMQIAILVTTVTLHFKQYECSSPPNNQVMPCEPTIIERNITEIVYLTNTTIEKEICPKLVEYRNWSKPQCKITGFAPFSKDNSIRLSAGGDIWVTREPYVSCDPGKCYQFALGQGTTLNNRHSNDTVHDRTPYRTLLMNELGVPFHLGTKQVCIAWSSSSCHDGKAWLHVCVTGHDKNATASFIYDGRLVDSIGSWSKNILRTQESECVCINGTCTVVMTDGSASERADTKILFIEEGKIVHISPLSGSAQHVEECSCYPRYPGVRCVCRDNWKGSNRPIVDINVKDYSIISSYVCSGLVGDTPRKNDRSSSSYCRNPNNEKGSHGVKGWAFDDGNDVWMGRTIGEELRSGYETFKVIGGWSTPNSKLQINRQVIVDSGNRSGYSGIFSVEGKSCINRCFYVELIRGREQETRVWWTSNSIVVFCGTSGTYGTGSWPDGADINLMPI

SEQ ID NO: 22020 - protein, 469 aa, synthetic construct
  REGION 1..469: note = neuraminidase__InfluenzaA__AFG99416
MNPNQKIITIGSVSLTIATICFLMQIAILVTTVTLHFKQYECSSPPNNQVMPCEPTIIERNITEIVYLTNTTIEKEICPKLVEYRNWSKPQCKITGFAPFSKDNSIRLSAGGDIWVTREPYVSCDPGKCYQFALGQGTTLNNRHSNDTVHDRTPYRTLLMNELGVPFHLGTKQVCIAWSSSSCHDGKAWLHVCVTGHDENATASFIYDGRLVDSIGSWSKNILRTQESECVCINGTCTVVMTDGSASERADTKILFIEEGKIIHISPLSGSAQHVEECSCYPRYPGVRCVCRDNWKGSNRPIVDINVKDYSIVSSYVCSGLVGDTPRKNDSSSSSYCRNPNNEKGSHGVKGWAFDDGNDVWMGRTIGEELRSGYETFKVIGGWSTPNSKLQINRQVIVDGGNRSGYSGIFSVEGKSCINRCFYVELIRGRKQETKVWWTSNSIVVFCGTSGTYGTGSWPDGADINLMPI

SEQ ID NO: 22021 - protein, 469 aa, synthetic construct
  REGION 1..469: note = neuraminidase__InfluenzaA__AFG99427
MNPNQKIITIGSVSLTIATICFLMQIAILVTTVTLHFKQYECSSPPNNQVMPCEPTIIERNITEIVYLTNTTIEKEVCPKLVEYRNWSKPQCKITGFAPFSKDNSIRLSAGGDIWVTREPYVSCDPGKCYQFALGQGTTLNNRHSNDTVHDRTPYRTLLMNELGVPFHLGTKQVCIAWSSSSCHDGKAWLHVCVTGHDENATASFIYDGRLVDSIGSWSKNILRTQESECVCINGTCTVVMTDGSASERADTKILFIEEGKIIHISPLSGSAQHVEECSCYPRYPGVRCVCRDNWKGSNRPIVDINVKDYSIVSSYVCSGLVGDTPRKNDSSSSSYCRNPNNEKGSHGVKGWAFDDGNDVWMGRTIGEELRSGYETFKVIGGWSTPNSKLQINRQVIVDSGNRSGYSGIFSVEGKSCINRCFYVELIRGRKQETKVWWTSNSIVVFCGTSGTYGTGSWPDGADINLMPI

SEQ ID NO: 22022 - protein, 469 aa, synthetic construct
  REGION 1..469: note = neuraminidase__InfluenzaA__AFG99438
MNPNQKIITIGSVSLTIATICFLMQIAILVTTVTLHFRQYECSSPPNNQVMPCEPTIIERNITEIVYLTNTTIEKEICPKLVEYRNWSKPQCKITGFAPFSKDNSIRLSAGGDIWVTREPYVSCDPGKCYQFALGQGTTLNNRHSNDTVHDRTPYRTLLMNELGVPFHLGTKQVCMAWSSSSCHDGKAWLHVCVTGHDENATASFIYDGRLVDSIGSWSKNILRTQESECVCINGTCTVVMTDGSASERADTKILFIEEGKIVHISPLSGSAQHVEECSCYPRYPGVRCVCRDNWKGSNRPIVDINVKDYSIVSSYVCSGLVGDTPRKNDRSSSSYCRNPNNEKGSHGVKGWAFDDGNDVWMGRTIGEELRSGYETFKVIGGWSTPNSKLQINRQVIVDSGNRSGYSGIFSVEGKSCINRCFYVELIRGRKQETRVWWTSNSIVVFCGTSGTYGTGSWPDGADINLMPI

SEQ ID NO: 22023 - protein, 469 aa, synthetic construct
  REGION 1..469: note = neuraminidase__InfluenzaA__AFG99449
MNPNQKIITIGSVSLTIATICFLMQIAILVTTVTLHFRQYECSSPPNNQVMPCEPTIIERNITEIVYLTNTTIEKEICPKLVEYRNWSKPQCKITGFAPFSKDNSIRLSAGGDIWVTREPYVSCDPGKCYQFALGQGTTLNNRHSNDTVHDRTPYRTLLMNELGVPFHLGTKQVCMAWSSSSCHDGKAWLHVCVTGHDENATASFIYDGRLVDSIGSWSKNILRTQESECVCINGTCTVVMTDGSASERADTKILFIEEGKIVHISPLSGSAQHVEECSCYPRYPGVRCVCRDNWKGSNRPIVDINVKDYSIVSSYVCSGLVGDTPRKNDRSSSSYCRNPNNEKGSHGVKGWAFDDGNDVWMGRTIGEELRSGYETFKVIGGWSTPNSKLQINRQVIVDSGNRSGYSGIFSVEGKNCINRCFYVELIRGRKQETRVWWTSNSIVVFCGTSGTYGTGSWPDGADINLMPI

SEQ ID NO: 22024 - protein, 469 aa, synthetic construct
  REGION 1..469: note = neuraminidase__InfluenzaA__AFG99471
MNPNQKIITIGSVSLILATICFLMQIAILVTTVTLHFKQYECSSPPNNQVMPCEPTIIERNITEIVYLTNTTIEKEICPKLVEYRNWSKPQCKITGFAPFSKDNSIRLSAGGDIWVTREPYVSCDPGKCYQFALGQGTTLNNRHSNDTVHDRNPYRTLLMNELGVPFHLGTRQVCMAWSSSSCHDGKAWLHVCVTGHDENATASFIYDGRLVDSIGSWSKNILRTQESECVCINGTCTVVMTDGSASERADTKILFIEEGKIVHISPLSGSAQHVEECSCYPRYPGVRCVCRDNWKGSNRPIVDINVKDYSIVSSYVCSGLVGDTPRKNDRSSSSYCRNPNNEKGSHGVKGWAFDDGNDVWMGRTIGEELRSGYETFKVIGGWSTPNSKLQINRQVIVDSGNRSGYSGIFSVEGKSCINRCFYVELIRGRKQETRVWWTSNSIVVFCGTSGTYGTGSWPDGADINLMPI

SEQ ID NO: 22025 - protein, 469 aa, synthetic construct
  REGION 1..469: note = neuraminidase__InfluenzaA__AFG99482
MNPNQKIITIGSVSLTIATICFLMQIAILVTTVTLHFKQYECNSPPNNQVMPCEPTIIERNITEIVYLTNTTIEKEICPKLVEYRNWSKPQCKITGFAPFSKDNSIRLSAGGDIWVTREPYVSCDPGKCYQFALGQGTTLNNRHSNDTVHDRTPYRTLLMNELGVPFHLGTKQVCIAWSSSSCHDGKAWLHVCVTGHDENATASFIYDGRLVDSIGSWSKNILRTQESECVCINGTCTVVMTDGSASGRADTKILFIEEGKIVHISPLSGSAQHVEECSCYPRYPGVRCVCRDNWKGSNRPIVDINVKDYSIVSSYVCSGLVGDTPRKNDSSSSSYCRNPNNEKGSHGVKGWAFDDGNDVWMGRTIGEELRSGYETFKVIGGWSTPNSKLQINRQVIVDRGNRSGYSGIFSVEGKNCINRCFYVELIRGRKQETKVWWTSNSIVVFCGTSGTYGTGSWPDGADINLMSI

SEQ ID NO: 22026 - protein, 469 aa, synthetic construct
  REGION 1..469: note = neuraminidase__InfluenzaA__AFG99493
MNPNQKIITIGSVSLTIATICFLMQIAILVTTVTLHFKQYECNSPPNNQVMPCEPTIIERNITEIVYLTNTTIEKEICPKLVEYRNWSKPQCKITGFAPFSKDNSIRLSAGGDIWVTREPYVSCDPGKCYQFALGQGTTLNNRHSNDTVHDRTPYRTLLMNELGVPFHLGTKQVCIAWSSSSCHDGKAWLHVCVTGHDENATASFIYDGRLVDSIGSWSKNILRTQESECVCINGTCTVVMTDGSASGRADTKILFIEEGKIVHISPLSGSAQHVEECSCYPRYPGVRCVCRDNWKGSNRPIVDINVKDYSIVSSYVCSGLVGDTPRKNDSSSSSYCRNPNNEKGSHGVKGWAFDDGNDVWMGRTIGEELRSGYETFKVIGGWSTPNSKLQINRQVIVDRGNRSGYSGIFSVEGKSCINRCFYVELIRGRKQETKVWWTSNSIVVFCGTSGTYGTGSWPDGADINLMPI

SEQ ID NO: 22027 - protein, 469 aa, synthetic construct
  REGION 1..469: note = neuraminidase__InfluenzaA__AFG99504
MNPNQKIITIGSVSLTIATICFLMQIAILVTTVTLHFKQYECSSPPNNQVMPCEPTIIERNITEIVYLTNTTIEKEICPKLVEYRNWSKPQCKITGFAPFSKDNSIRLSAGGDIWVTREPYVSCDPGKCYQFALGQGTTLNNRHSNDTVHDRTPYRTLLMNELGVPFHLGTKQVCIAWSSSSCHDGKAWLHVCVTGHDENATASFIYDGRLVDSIGSWSKNILRTQESECVCINGTCTVVMTDGSASERADTKILFIEEGKIVHISPLSGSAQHVEECSCYPRYPGVRCVCRDNWKGSNRPIVDINVKDYSIVSSYVCSGLVGDTPRKNDRSSSSYCRNPNNEKGSHGVKGWAFDDGNDVWMGRTIGEELRSGYETFKVIGGWSTPNSKLQINRQVIVDSGNRSGYSGIFSVEGKSCINRCFYVELIRGRKQETRVWWTSNSIVVFCGTSGTYGTGSWPDGADINLMPI

SEQ ID NO: 22028 - protein, 469 aa, synthetic construct
  REGION 1..469: note = neuraminidase__InfluenzaA__AFG99515
MNPNQKIITIGSVSLTIATICFLMQIAILVTTVTLHFKQYECNSPPNNQVMLCEPTIIERNITEIVYLTNTTIEKEICPKLAEYRNWSKPQCKITGFAPFSKDNSIRLSAGGDIWVTREPYVSCDPGKCYQFALGQGTTLNNRHSNDTVHDRTPYRTLLMNELGVPFHLGTKQVCIAWSSSSCHDGKAWLHVCVTGHDENATASFIYDGRLVDSIGSWSKNILRTQESECVCINGTCTVVMTDGSASERADTKILFIEEGKIVHISPLSGSAQHVEECSCYPRYPGVRCVCRDNWKGSNRPIVDINVKDYSIVSSYVCSGLVGDTPRKNDSSSSSYCRNPNNEKGSHGVKGWAFDDGNDVWMGRTIGEELRSGYETFKVIGGWSTPNSKLQINRQVIVDRGNRSGYSGIFSVEGKSCINRCFYVELIRGRKQETEVWWTSNSIVVFCGTSGTYGTGSWPDGADINLMPI

SEQ ID NO: 22029 - protein, 469 aa, synthetic construct
  REGION 1..469: note = neuraminidase__InfluenzaA__AFG99526
MNPNQKIITIGSVSLTLATICFLMQIAILVTTVTLHFKQYECSSPPNNQVMPCEPTIIERNITEIVYLTNTTIEKEVCPKLVEYRNWSKPQCKITGFAPFSKDNSIRLSAGGDIWVTREPYVSCDPGKCYQFALGQGTTLNNRHSNDTVHDRTPYRTLLMNELGVPFHLGTRQVCMAWSSSSCHDGKAWLHVCVTGHDENATASFIYDGRLVDSIGSWSKNILRTQESECVCINGTCTVVMTDGSASGRADTKILFIEEGKIVHISPLSGSAQHVEECSCYPRYPGVRCVCRDNWKGSNRPIVDINVKDYSIVSSYVCSGLVGDTPRKNDRSSSSYCRNPNNEKGSHGVKGWAFDDGNDVWMGRTIGEELRSGYETFKVIGGWSTPNSKLQINRQVIVDSGNRSGYSGIFSVEGKSCINRCFYVELIRGRKQETRVWWTSNSIVVFCGTSGTYGTGSWPDGADINLMPI

SEQ ID NO: 22030 - protein, 469 aa, synthetic construct; identical to SEQ ID NO: 21926
  REGION 1..469: note = neuraminidase__InfluenzaA__AFG99537

SEQ ID NO: 22031 - protein, 469 aa, synthetic construct; identical to SEQ ID NO: 21926
  REGION 1..469: note = neuraminidase__InfluenzaA__AFG99548

SEQ ID NO: 22032 - protein, 469 aa, synthetic construct; identical to SEQ ID NO: 21926
  REGION 1..469: note = neuraminidase__InfluenzaA__AFG99559

SEQ ID NO: 22033 - protein, 469 aa, synthetic construct; identical to SEQ ID NO: 21926
  REGION 1..469: note = neuraminidase__InfluenzaA__AFG99570

SEQ ID NO: 22034 - protein, 469 aa, synthetic construct; identical to SEQ ID NO: 21926
  REGION 1..469: note = neuraminidase__InfluenzaA__AFG99581

SEQ ID NO: 22035 - protein, 469 aa, synthetic construct
  REGION 1..469: note = neuraminidase__InfluenzaA__AFG99592
MNPNQKIITIGSVSLTIATTCFLMQIAILVTTVTLHFKQYECNSPPNNQVMPCEPTIIERNITEIVYLTNTTIEKEICPKLVEYRNWSKPQCKITGFAPFSKDNSIRLSAGGDIWVTREPYVSCDPGKCYQFALGQGTTLNNRHSNDTVHDRTPYRTLLMNELGVPFHLGTKQVCIAWSSSSCHDGKAWLHVCVTGHDENATASFIYDGRLVDSIVSWSKNILRTQESECVCINGTCTVVMTDGSASERADTKILFIEEGKIVHISPLSGSAQHVEECSCYPRYPGVRCVCRDNWKGSNRPIVDINVKDYSIVSSYVCSGLVGDTPRKNDSSSSSYCRNPNNEKGSHGVKGWAFDDGNDVWMGRTIGEELRSGYETFKVIGGWSTPNSKLQTNRQVIVDRGNRSGYSGIFSVEGKSCINRCFYVELIRGRKQETKVWWTSNSIVVFCGTSGTYGTGSWPDGADINLMPI

SEQ ID NO: 22036 - protein, 469 aa, synthetic construct; identical to SEQ ID NO: 21926
  REGION 1..469: note = neuraminidase__InfluenzaA__AFG99603

SEQ ID NO: 22037 - protein, 469 aa, synthetic construct; identical to SEQ ID NO: 21926
  REGION 1..469: note = neuraminidase__InfluenzaA__AFG99614

SEQ ID NO: 22038 - protein, 469 aa, synthetic construct; identical to SEQ ID NO: 21926
  REGION 1..469: note = neuraminidase__InfluenzaA__AFG99625

SEQ ID NO: 22039 - protein, 469 aa, synthetic construct
  REGION 1..469: note = neuraminidase__InfluenzaA__AFG99636
MNPNQKIITIGSVSLTIATICFLMQIAILVTTVTLHFKQYECNSPPNNQVMLCEPTIIERNITEIVYLTNTTIEKEICPKLAEYRNWSKPQCKITGFAPFSKDNSIRLSAGGDIWVTREPYVSCDPGKCYQFALGQGTTLNNRHSNDTVHDRTPYRTLLMNELGVPFHLGTKQVCIAWSSSSCHDGKAWLHVCVTGHDENATASFIYDGRLVDSIVSWSKNILRTQESECVCINGTCTVVMTDGSASERADTKILFIEEGKIVHISPLSGSAQHVEECSCYPRYPGVRCVCRDNWKGSNRPIVDINVKDYSIVSSYVCSGLVGDTPRKNDSSSSSYCRNPNNEKGSHGVKGWAFDDGNDVWMGRTIGEDLRSGYETFKVIGGWSTPNSKLQTNRQVIVDRGNRSGYSGIFSVEGKSCINRCFYVELIRGRKQETKVWWTSNSIVVFCGTSGTYGTGSWPDGADINLMPI

SEQ ID NO: 22040 - protein, 469 aa, synthetic construct
  REGION 1..469: note = neuraminidase__InfluenzaA__AFG99658
MNPNQKIITIGSVSLTIATICFLMQITILVTTVTLHFKQYECNSPPNNQVMLCEPTIIERNITEIVYLTNTTIEKEICPKLVEYRNWSKPQCKITGFAPFSKDNSIRLSAGGDIWVTREPYVSCDPGKCYQFALGQGTTLNNRHSNDTVHDRTPYRTLLMNELGVPFHLGTKQVCIAWSSSSCHDGKAWLHVCVTGHDENATASFIYDGRLVDSISSWSKNILRTQESECVCINGTCTVVMTDGSASERADTKILFIEEGKIVHISPLSGSAQHVEECSCYPRYPGVRCVCRDNWKGSNRPIVDINVKDYSIVSSYVCSGLVGDTPRKNDSSSSSYCRNPNNEKGSHGVKGWAFDDGNDVWMGRTISEELRSGYETFKVIGGWSTPNSKLQINRQVIVDRGNRSGYSGIFSVEGKSCINRCFYVELIRGRKQENKVWWTSNSIVVFCGTSGTYGTGSWPDGADINLMPI

SEQ ID NO: 22041 - protein, 469 aa, synthetic construct
  REGION 1..469: note = neuraminidase__InfluenzaA__AFG99680
MNPNQKIITIGSVSLTIATICFLMQIAILVTTVTLHFKQYECSSPPNNQVILCQPTIIERNITEIVYLTNTTIEKEICPKLVEYRNWSKPQCKITGFAPFSKDNSIRLSAGGDIWVTREPYVSCDPSKCYQFALGQGTTLNNRHSNDTVHDRTPYRTLLMNELGVPFHLGTKQVCIAWSSSSCHDGKAWLHVCVTGHDENATASFIYDGRLVDSIGSWSKNILRTQESECVCINGTCTVVMTDGSASERADTKILFIEEGKVVHISPLSGSAQHVEECSCYPRYPGVRCVCRDNWKGSNRPIVDINVKDYSIVSSYVCSGLVGDTPRKNDSSSSSYCRNPNNEKGSHGVKGWAFDDGNDVWMGRTISEELRSGYETFKVIGGWSTPNSKLQINRQVIVDSGNRSGYSGIFSVEGKSCINRCFYVELIRGRKQETKVWWTSNSIVVFCGTSGTYGTGSWPDGADINLMPI

SEQ ID NO: 22042 - protein, 469 aa, synthetic construct
  REGION 1..469: note = neuraminidase__InfluenzaA__AFG99691
MNPNQKIITIGSVSLTIATICFLMQIAILVTTVTLHFKQYECNSPPNNQVMPCEPTIIERNTTEIVYLTNTTIEKEICPKLVEYRNWSKPQCKITGFAPFSKDNSIRLSAGGDIWVTREPYVSCDPGKCYQFALGQGTTLNNRHSNDTVHDRTPYRTLLMNELGVPFHLGTKQVCIAWSSSSCHDGKAWLHVCVTGHDENATASFIYDGRLVDSIVSWSKNILRTQESECVCINGTCTVVMTDGSASERADTKILFIEEGKIVHISPLSGSAQHVEECSCYPRYPGVRCVCRDNWKGSNRPIVDINVKDYSIVSSYVCSGLVGDTPRKNDSSSSSYCRNPNNEKGSHGVKGWAFDDGNDVWMGRTIGEELRSGYETFKVIGGWSTPNSKLQTNRQVIVDRGNRSGYSGIFSVEGKSCINRCFYVELIRGRKQETKVWWTSNSIVVFCGTSGTYGTGSWPDGADINLMPI

SEQ ID NO: 22043 - protein, 469 aa, synthetic construct; identical to SEQ ID NO: 21926
  REGION 1..469: note = neuraminidase__InfluenzaA__AFG99704

SEQ ID NO: 22044 - protein, 469 aa, synthetic construct; identical to SEQ ID NO: 21926
  REGION 1..469: note = neuraminidase__InfluenzaA__AFG99715

SEQ ID NO: 22045 - protein, 469 aa, synthetic construct; identical to SEQ ID NO: 21926
  REGION 1..469: note = neuraminidase__InfluenzaA__AFG99726

SEQ ID NO: 22046 - protein, 469 aa, synthetic construct
  REGION 1..469: note = neuraminidase__InfluenzaA__AFG99737
MNPNQKIITIGSVSLTIATICFLMQITILVTTVTLHFKQYECNSPPNNQVMLCEPTIIERNITEIVYLTNTTIEKEICPKLVEYRNWSKPQCKITGFAPFSKDNSIRLSAGGDIWVTREPYVSCDPGKCYQFALGQGTTLNNRHSNDTVHDRTPYRTLLMNELGVPFHLGTKQVCIAWSSSSCHDGKAWLHVCVTGHDENATASFIYDGRLVDSIGSWSKNILRTQESECVCINGTCTVVMTDGSASERADTKILFIEEGKIVHISPLSGSAQHVEECSCYPRYPGVRCVCRDNWKGSNRPIVDINVKDYSIVSSYVCSGLVGDTPRKNDSSSSSYCRNPNNEKGSHGVKGWAFDDGNDVWMGRTISEELRSGYETFKVIGGWSTPNSKLQINRQVIVDRGNRSGYSGIFSVEGKSCINRCFYVELIRGRKQENKVWWTSNSIVVFCGTSGTYGTGSWPDGADINLMPI

SEQ ID NO: 22047 - protein, 469 aa, synthetic construct
  REGION 1..469: note = neuraminidase__InfluenzaA__AFG99748
MNPNQKIITIGSVSLTIATICFLMQIAILVTTVTLHFKQYDCNSPPNNQAMLCEPTIIERNITEIVYLTNTTIEKEICPKLAEYRNWSKPQCKITGFAPFSKDNSIRLSAGGDIWVTREPYVSCDPGKCYQFALGQGTTLNNRHSNDTVHDRTPYRTLLMNELGVPFHLGTKQVCIAWSSSSCHDGKAWLHVCVTGHDENATASFIYDGRLVDSIGSWSKNILRTQESECVCINGTCTVVMTDGSASERADTKILFIEEGKIVHISPLSGSAQHVEECSCYPRYPGVRCVCRDNWKGSNRPIVDINVKDYSIVSSYVCSGLVGDTPRKNDSSSSSYCRNPNNEKGSHGVKGWAFDDGNDVWMGRTIGEELRSGYETFKVIGGWSTPNSKLQINRQVIVDRGNRSGYSGIFSVEGKSCTNRCFYVELIRGRKQETEVWWTSNSIVVFCGTSGTYGTGSWPDGADINLMPI

SEQ ID NO: 22048 - protein, 469 aa, synthetic construct; identical to SEQ ID NO: 21926
  REGION 1..469: note = neuraminidase__InfluenzaA__AFG99759

SEQ ID NO: 22049 - protein, 469 aa, synthetic construct
  REGION 1..469: note = neuraminidase__InfluenzaA__AFG99770
MNPNQKIITIGSVSLTIATICFLMQIAILVTTVTLHFKQYECNSPPNNQIMLCEPTIIERNITEIVYLTNTTIEREICPKLVEYRNWSKPQCKITGFAPFSKDNSIRLSAGGDIWVTREPYVSCDPGKCYQFALGQGTTLNNRHSNDTVHDRTPYRTLLMNELGVPFHLGTKQVCIAWSSSSCHDGKAWLHVCVTGHDENATASFIYDGRLVDSIGSWSKNILRTQESECVCINGTCTVVMTDGSASERADTKILFIEEGKIVHISPLSGSAQHVEECSCYPRYPGVRCVCRDNWKGSNRPIVDINVKDYSIVSSYVCSGLVGDTPRKNDSSSSSYCRNPNNEKGSHGVKGWAFDDGNDVWMGRTIGEELRSGYETFKVIGGWSTPNSKLQINRQVIVDRGNRSGYSGIFSVEGKSCINRCFYVELIRGRKQETEVWWTSNSIVVFCGTSGTYGTGSWPDGADINLMPI

SEQ ID NO: 22050 - protein, 469 aa, synthetic construct
  REGION 1..469: note = neuraminidase__InfluenzaA__AFG99781
MNPNQKIITIGSVSLTIATICFLMQIAILVTTVTLHFKQYECSSPPNNQVMLCQPTIIERNITEIVYLTNTTIEKEICPKLVEYRNWSKPQCKITGFAPFSKDNSIRLSAGGDIWVTREPYVSCDPGKCYQFALGQGTTLNNRHSNDTVHDRTPYRTLLMNELGVPFHLGTKQVCIAWSSSSCHDGKAWLHVCVTGHDENATASFIYDGRLVDSIGSWSKNILRTQESECVCINGTCTVVMTDGSASKRADTKILFIEEGKIVHISPLSGSAQHVEECSCYPRYPGVRCVCRDNWKGSNRPIVDINVKDYSIVSSYVCSGLVGDTPRKNDSSSSSYCRNPNNEKGSHGVKGWAFDDGNDVWMGRTISEELRSGYETFKVIGGWSTPNSKLQTNRQVIVDSGNRSGYSGIFSVEGKSCINRCFYVELIRGRKQETKVWWTSNSIVVFCGTSGTYGTGSWPDGADINLMPI

SEQ ID NO: 22051 - protein, 469 aa, synthetic construct; identical to SEQ ID NO: 21926
  REGION 1..469: note = neuraminidase__InfluenzaA__AFG99792

SEQ ID NO: 22052 - protein, 469 aa, synthetic construct; identical to SEQ ID NO: 22046
  REGION 1..469: note = neuraminidase__InfluenzaA__AFG99803

SEQ ID NO: 22053 - protein, 469 aa, synthetic construct; identical to SEQ ID NO: 21926
  REGION 1..469: note = neuraminidase__InfluenzaA__AFG99825

SEQ ID NO: 22054 - protein, 469 aa, synthetic construct; identical to SEQ ID NO: 21926
  REGION 1..469: note = neuraminidase__InfluenzaA__AFG99836

SEQ ID NO: 22055 - protein, 469 aa, synthetic construct; identical to SEQ ID NO: 21926
  REGION 1..469: note = neuraminidase__InfluenzaA__AFG99847

SEQ ID NO: 22056 - protein, 469 aa, synthetic construct; identical to SEQ ID NO: 21926
  REGION 1..469: note = neuraminidase__InfluenzaA__AFG99858

SEQ ID NO: 22057 - protein, 469 aa, synthetic construct; identical to SEQ ID NO: 21926
  REGION 1..469: note = neuraminidase__InfluenzaA__AFG99869

SEQ ID NO: 22058 - protein, 469 aa, synthetic construct; identical to SEQ ID NO: 21926
  REGION 1..469: note = neuraminidase__InfluenzaA__AFG99880

SEQ ID NO: 22059 - protein, 469 aa, synthetic construct
  REGION 1..469: note = neuraminidase__InfluenzaA__AFG99891
MNPNQKIITIGSVSLTIATICFLMQIAILVTTVTLHFKQYECNSPPNNQVMLCEPTIIERNITEIVYFTNTTIEKEICPKLAEYRNWSKPQCKITGFAPFSKDNSIRLSAGGDIWVTREPYVSCDPGKCYQFALGQGTTLNNRHSNDTVHDRTPYRTLLMNELGVPFHLGTKQVCIAWSSSSCHDGKAWLHVCVTGHDENATASFIYDGRLVDSIGSWSKNILRTQESECVCINGTCTVVMTDGSASERADTKILFIEEGKIVHISSLSGSAQHVEECSCYPRYPGVRCVCRDNWKGSNRPIVDINVKDYSIVSSYVCSGLVGDTPRKNDSSSSSYCRNPNNEKGSHGVKGWAFDDGNDVWMGRTIGEELRSGYETFRVIGGWSTPNSKLQINRQVIVDRGNRSGYSGIFSVEGKSCINRCFYVELIRGRKQETEVWWTSNSIVVFCGTSGTYGTGSWPDGADINLMPI

SEQ ID NO: 22060 - protein, 469 aa, synthetic construct; identical to SEQ ID NO: 21926
  REGION 1..469: note = neuraminidase__InfluenzaA__AFG99902

SEQ ID NO: 22061 - protein, 469 aa, synthetic construct; identical to SEQ ID NO: 21926
  REGION 1..469: note = neuraminidase__InfluenzaA__AFG99913

SEQ ID NO: 22062 - protein, 469 aa, synthetic construct; identical to SEQ ID NO: 21926
  REGION 1..469: note = neuraminidase__InfluenzaA__AFG99924

SEQ ID NO: 22063 - protein, 469 aa, synthetic construct
  REGION 1..469: note = neuraminidase__InfluenzaA__AFG99935
MNPNQKIITIGSVSLTIATICFLMQIAILVTTVTLHFKQYECNSPPNNQVMLCEPTIVERNITEIVYLTNTTIEKEICPKLAEYRNWSKPQCKITGFAPFSKDNSIRLSAGGDIWVTREPYVSCDPSKCYQFALGQGTTLNNRHSNDTVHDRTPYRTLLMNELGVPFHLGTKQVCIAWSSSSCHDGKAWLHVCVTGHDENATASFIYDGRLVDSIGSWSKNILRTQESECVCINGTCTVVMTDGSASERADTKILFIEEGKIVHISPLSGSAQHVEECSCYPRYPGVRCVCRDNWKGSNRPIVDINMKDYSIVSSYVCSGLVGDTPRNNDSSSSSYCRNPNNEKGSHGVKGWAFDDGNDVWMGRTIGEELRSGYETFKVIGGWSTPNSKLQINRQVIVDRGNRSGYSGIFSVEGKSCINRCFYVELIRGRKQETEVWWTSNSIVVFCGTSGTYGTGSWPDGADINLMPI

SEQ ID NO: 22064 - protein, 469 aa, synthetic construct; identical to SEQ ID NO: 21926
  REGION 1..469: note = neuraminidase__InfluenzaA__AFG99946

SEQ ID NO: 22065 - protein, 469 aa, synthetic construct
  REGION 1..469: note = neuraminidase__InfluenzaA__AFG99957
MNPNQKIITIGSVSLTIATICFLMQIAILVTTVTLHFKQYECNSPPNNQAMLCEPTIIERNITEIVYLTNTTIEKEICPKLAEYRNWSKPQCKITGFAPFSKDNSIRLSAGGDIWVTREPYVSCDPGKCYQFALGQGTTLNNRHSNDTVHDRTPYRTLLMNELGVPFHLGTKQVCIAWSSSSCHDGKAWLHVCVTGHDENATASFIYDGRLVDSIGSWSKNILRTQESECVCINGTCTVVMTDGSASERADTKILFIEEGKIVHISPLSGSAQHVEECSCYPRYPGVRCVCRDNWKGSNRPIVDINVKDYSIVSSYVCSGLVGDTPRKNDSSSSSYCRNPNNEKGSHGVKGWAFDDGNDVWMGRTIGEELRSGYETFKVIGGWSTPNSKLQINRQVIVDRGNRSGYSGIFSVEGKSCTNRCFYVELIRGRKQETEVWWTSNSIVVFCGTSGTYGTGSWPDGADINLMPI

SEQ ID NO: 22066 - protein, 469 aa, synthetic construct; identical to SEQ ID NO: 21926
  REGION 1..469: note = neuraminidase__InfluenzaA__AFG99968

SEQ ID NO: 22067 - protein, 469 aa, synthetic construct
  REGION 1..469: note = neuraminidase__InfluenzaA__AFG99979
MNPNQKIITIGSVSLTIATICFLMQIAILVTTVTLHFKQYECNSPPNNQVMPCEPTIIERNITEIVYLTNTTIEKEICPKLVEYRNWSKPQCKITGFAPFSKDNSIRLSAGGDIWVTREPYVSCDPGKCYQFALGQGTTLNNRHSNDTVHDRTPYRTLLMNELGVPFHLGTKQVCIAWSSSSCHDGKAWLHVCVTGHDENATASFIYDGRLVDSIVSWSKNILRTQESECVCINGTCTVVMTDGSASERADTKILFIEEGKIVHISPLSGSAQHVEECSCYPRYPGVRCVCRDNWKGSNRPIVDINVKDYSIVSSYVCSGLVGDTPRKNDSSSSSYCLNPNNEKGSHGVKGWAFDDGNDVWMGRTIGEELRSGYETFKVIGGWSTPNSKLQTNRQVIVDRGNRSGYSGIFSVESKSCINRCFYVELIRGRKQETKVWWTSNSIVVFCGTSGTYGTGSWPDGADINLMPI

SEQ ID NO: 22068 - protein, 469 aa, synthetic construct
  REGION 1..469: note = neuraminidase__InfluenzaA__AFG99990
MNPNQKIITIGSVSLTIATICFLMQIAILVTTVTLHFKQYECNSPPNNQAMLCEPKIIERNITEIVYLTNTTIEKEICPKLAEYRNWSKPQCKITGFAPFSKDNSIRLSAGGDIWVTREPYVSCDPGKCYQFALGQGTTLNNRHSNDTVHDRTPYRTLLMNELGVPFHLGTKQVCIAWSSSSCHDGKAWLHVCVTGHDENATASFIYDGRLVDSIGSWSKNILRTQESECVCINGTCTVVMTDGSASERADTKILFIEEGKIVHISPLSGSAQHVEECSCYPRYPGVRCVCRDNWKGSNRPIVDINVKDYSIVSSYVCSGLVGDTPRKNDSSSSSYCRNPNNEKGSHGVKGWAFDDGNDVWMGRTISEELRSGYETFKVIGGWSKPNSKLQINRQVIVDRGNRSGYSGIFSVEGKSCINRCFYVELIRGRKQETEVWWTSNSIVVFCGTSGTYGTGSWPDGADINLMPI

SEQ ID NO: 22069 - protein, 469 aa, synthetic construct
  REGION 1..469: note = neuraminidase__InfluenzaA__AFH00002
MNPNQKIITIGSVSLTIATICFLMQIAILVTTVTLHFKQYECSSPPNNQVIPCQPTIIERNITEIVYLTNTTIEKEICPKLVEYRNWSKPQCKITGFAPFSKDNSIRLSAGGDIWVTREPYVSCDPGKCYQFALGQGTTLNNRHSNDTVHDRTPYRTLLMNELGVPFHLGTKQVCIAWSSSSCHDGKAWLHVCVTGHDENATASFIYDGRLVDSIGSWSKNILRTQESECVCINGTCAVVMTDGSASERADTKILFIEEGKVVHISPLSGSAQHVEECSCYPRYPGVRCVCRDNWKGSNRPIVDINVKNYSIVSSYVCSGLVGDTPRKNDSSSSSYCRNPNNEKGSHGVKGWAFDDGNDVWMGRTISEELRSGYETFKVIGGWSTPNSKLQINRQVIVDSGNRSGYSGIFSVEGKSCINRCFYVELIRGRKQETKVWWTSNSIVVFCGTSGTYGTGSWPDGADINLMPI

SEQ ID NO: 22070 - protein, 469 aa, synthetic construct; identical to SEQ ID NO: 15185
  REGION 1..469: note = neuraminidase__InfluenzaA__AFH00013

SEQ ID NO: 22071 - protein, 469 aa, synthetic construct
  REGION 1..469: note = neuraminidase__InfluenzaA__AFH00024
MNPNQKIITIGSVSLTIATICFLMQITILVTTVTLHFKQYECNSPPNNQVMLCEPTIIERNITEIVYLTNTTIEKEICPKLVEYRNWSKPQCKITGFAPFSKDNSIRLSAGGDIWVTREPYVSCDPGKCYQFALGQGTTLNNRHSNDTVHDRTPYRTLLMNELGVPFHLGTKQVCIAWSSSSCHDGKAWLHVCVTGHDENATASFIYDGRLVDSIGSWSKNILRTQESECVCINGTCTVVMTDGSASERADTKILFIEEGRIVHISPLSGSAQHVEECSCYPRYPGVRCVCRDNWKGSNRPIVDINVKDYSIVSSYVCSGLVGDTPRKNDSSSSSYCRNPNNEKGSHGVKGWAFDDGNDVWMGRTISEELRSGYETFKVIGGWSTPNSKLQINRQVIVDRGNRSGYSGIFSVEGKSCINRCFYVELIRGRKQENKVWWTSNSIVVFCGTSGTYGTGSWPDGADINLMPI

SEQ ID NO: 22072 - protein, 469 aa, synthetic construct; identical to SEQ ID NO: 15185
  REGION 1..469: note = neuraminidase__InfluenzaA__AFH00035

SEQ ID NO: 22073 - protein, 469 aa, synthetic construct; identical to SEQ ID NO: 15185
  REGION 1..469: note = neuraminidase__InfluenzaA__AFH00046

SEQ ID NO: 22074 - protein, 469 aa, synthetic construct
  REGION 1..469: note = neuraminidase__InfluenzaA__AFH00057
MNPNQKIITIGSVSLTIATICFLMQIAILVTTVTLHFKQYECNSPPNNQVMLCEPTIIERNITEIVYLTNTTIEKEICPKLAEYRNWSKPQCKITGFAPFSKDNSIRLSAGGDIWVTREPYVSCDPGKCYQFALGQGTTLNNRHSNDTVHDRTPYRTLLMNELGVPFHLGTKQVCIAWSSSSCHDGKAWLHVCVTGHDENATASFIYDGRLVDSIGSWSKNVLRTQESECVCINGTCTVVMTDGSASERADTKILFIEEGKIVHISPLSGSAQHVEECSCYPRYPGVRCVCRDNWKGSNRPIVDINVKDYSIVSSYVCSGLVGDTPRKNDSSSSSYCRNPNNEKGSHGVKGWAFDDGNDVWMGRTISEELRSGYETFKVIGGWSNPNSKLQINRQVIVDRGNRSGYSGIFSVEGKSCINRCFYVELIRGRKQETEVWWTSNSIVVFCGTSGTYGTGSWPDGADINLMPI

SEQ ID NO: 22075 - protein, 469 aa, synthetic construct; identical to SEQ ID NO: 15185
  REGION 1..469: note = neuraminidase__InfluenzaA__AFH00068

SEQ ID NO: 22076 - protein, 469 aa, synthetic construct
  REGION 1..469: note = neuraminidase__InfluenzaA__AFH00079
MNPNQKIITIGSVSLTIATICFLMQIAILVTTVTLHFKQYECNSPPNNQVMLCEPTIIERNITEIVYLTNTTIEKEICPKLAEYRNWSKPQCKITGFAPFSKDNSIRLSAGGDIWVTREPYVSCDPGKCYQFALGQGTTLNNRHSNDTVHDRTPYRTLLMNELGVPFHLGTKQVCIAWSSSSCHDGKAWLHVCVTGHDENATASFIYDGRLVDSIGSWSKNILRTQESECVCINGTCTVVMTDGSASERADTKILFIEEGKIVHISPLSGSAQHVEECSCYPRYPGVRCVCRDNWKGSNRPIVDINVKDYSIVSSYVCSGLVGDTPRKNDSSSSSYCRNPNNEKGSHGVKGWAFDDGNDVWMGRTISEELRSGYETFKVIEGWSKPNSKLQINRQVIVDRGNRSGYSGIFSVEGKSCINRCFYVELIRGRKQETEVWWTSNSIVVFCGTSGTYGTGSWPDGADINLMPI

SEQ ID NO: 22077 - protein, 469 aa, synthetic construct
  REGION 1..469: note = neuraminidase__InfluenzaA__AFH00090
MNPNQKIITIGSVSLTIATICFLMQIAILVTTVTLHFKQYECNSPPNNQVMLCEPTIIERNITEIVYLTNTTIEKEICPKLAEYRNWSKPQCKITGFAPFSKDNSIRLSAGGDIWVTREPYVSCDPGKCYQFALGQGTTLNNRHSNDTVHDRTPYRTLLMNELGVPFHLGTKQVCIAWSSSSCHDGKAWLHVCVTGHDENATASFIYDGRLVDSIGSWSKNILRTQESECVCINGTCTVVMTDGSASERADTKILFIEEGKIVHISPLSGSAQHVEECSCYPRYPGVRCVCRDNWKGSNRPIVDINVKDYSIVSSYVCSGLVGDTPRKNDSSSSSYCWNPNNEKGSHGVKGWAFDDGNDVWMGRTISEELRSGYETFKVIGGWSKPNSKLQINRQVIVDRGNRSGYSGIFSVEGKSCINRCFYVELIRGRKQETEVWWTSNSIVVFCGTSGTYGTGSWPDGADINLMPI

SEQ ID NO: 22078 - protein, 469 aa, synthetic construct
  REGION 1..469: note = neuraminidase__InfluenzaA__AFH00101
MNPNQKIITIGSVSLTIATICFLMQIAILVTTVTLHFKQYECNSPPNNQVMLCEPTIIERNITEIVYLTNTTIEKEICPKLAEYRNWSKPQCKITGFAPFSKDNSIRLSAGGDIWVTREPYVSCDPGKCYQFALGQGTTLNNRHSNDTVHDRTPYRTLLMNELGVPFHLGTKQVCIAWSSSSCHDGKAWLHVCVTGHDENATASFIYDGRLVDSIGSWSKKILRTQESECVCINGTCTVVMTDGSASERADTKILFIEEGKIVHISPLSGSAQHVEECSCYPRYPGVRCVCRDNWKGSNRPIVDINVKDYSIVSSYVCSGLVGDTPRKNDSSSSSYCRNPNNEKGSHGVKGWAFDDGNDVWMGRTISEELRSGYETFKVIGGWSKPNSKLQINRQVIVDRGNRSGYSGIFSVEGKSCINRCFYVELIRGRKQETEVWWTSNSIVVFCGTSGTYGTGSWPDGADINLMPI

SEQ ID NO: 22079 - protein, 469 aa, synthetic construct; identical to SEQ ID NO: 15101
  REGION 1..469: note = neuraminidase__InfluenzaA__AFH00112

SEQ ID NO: 22080 - protein, 469 aa, synthetic construct; identical to SEQ ID NO: 15101
  REGION 1..469: note = neuraminidase__InfluenzaA__AFH00123

SEQ ID NO: 22081 - protein, 469 aa, synthetic construct
  REGION 1..469: note = neuraminidase__InfluenzaA__AFH00156
MNPNQKIITIGSVSLTIATICFLMQIAILVTTVTLHFKQYECNSPPNNQVMLCEPTIIERNITEIVYLTNTTIEKEICPKLAEYRNWSKPQCKITGFAPFSKDNSIRLSAGGDIWVTREPYVSCDPGKCYQFALGQGTTLNNRHSNDTVHDRTPYRTLLMNELGVPFHLGTKQVCIAWSSSSCHDGKAWLHVCVTGHDENATASFIYDGRLVDSIGSWSKNILRTQESECVCINGTCTVVMTDGSASERADTKILFIEEGKIVHISPLSGSAQHVEECSCYPRYPGVRCVCRDNWKGSNRPIIDINVKDYSIVSSYVCSGLVGDTPRKNDSSSSSYCRNPNNEKGSHGVKGWAFDDGNDVWMGRTISEELRSGYETFKVIGGWSKPNSKLQINRQVIVDRGNRSGYSGIFSVEGKSCINRCFYVELIRGRKQETEVWWTSNSIVVFCGTSGTYGTGSWPDGADINLMPI

SEQ ID NO: 22082 - protein, 469 aa, synthetic construct
  REGION 1..469: note = neuraminidase__InfluenzaA__AFH00167
MNPNQKIITIGSVSLTIATMCFLMQIAILVTTVTLHFKQYECNSPPNNQVMLCEPTIIERNITEIVYLTNTTIEKEICPKLAEYRNWSKPQCKITGFAPFSKDNSIRLSAGGDIWVTREPYVSCDPGKCYQFALGQGTTLNNRHSNDTVHDRTPYRTLLMNELGVPFHLGTKQVCIAWSSSSCHDGKAWLHVCVTGHDENATASFIYDGRLVDSIGSWSKNILRTQESECVCINGTCTVVMTDGSASERADTKILFIEEGKIVHISPLSGSAQHVEECSCYPRYPGVRCVCRDNWKGSNRPIVDINVKDYSIVSSYVCSGLVGDTPRKNDSSSSSYCRNPNNEKGSHGVKGWAFDDGNDVWMGRTISEELRSGYETFKVIGGWSKPNSKLQINRQVIVDRGNRSGYSGIFSVEGKSCINRCFYVELIRGRKQETEVWWTSNSIVVFCGTSGTYGTGSWPDGADINLMPI

SEQ ID NO: 22083 - protein, 469 aa, synthetic construct; identical to SEQ ID NO: 22081
  REGION 1..469: note = neuraminidase__InfluenzaA__AFH00178

SEQ ID NO: 22084 - protein, 469 aa, synthetic construct
  REGION 1..469: note = neuraminidase__InfluenzaA__AFH00189
MNPNQKIITIGSVSLTIATICFLMQIAILVTTVTLHFKQYEYNSPPNNQVMLCEPKIIERNITEIVYLTNTTIEKEICPKLAEYRNWSKPQCKITGFAPFSKDNSIRLSAGGDIWVTREPYVSCDPGKCYQFALGQGTTLNNRHSNDTVHDRTPYRTLLMNELGVPFHLGTKQVCIAWSSSSCHDGKAWLHVCVTGHDENATASFIYDGRLVDSIGSWSKNILRTQESECVCINGTCTVVMTDGSASERADTKILFIEEGKIVHISPLSGSAQHVEECSCYPRYPGVRCVCRDNWKGSNRPIVDINVKDYSIVSSYVCSGLVGDTPRKNDSSSSSYCRNPNNEKGSHGVKGWAFDDGNDVWMGRTISEELRSGYETFKVIGGWSKPNSKLQINRQVIVDRGNRSGYSGIFSVEGKSCINRCFYVELIRGRKQETEVWWTSNSIVVFCGTSGTYGTGSWPDGADINLMPI

SEQ ID NO: 22085 - protein, 469 aa, synthetic construct; identical to SEQ ID NO: 15185
  REGION 1..469: note = neuraminidase__InfluenzaA__AFH00200

SEQ ID NO: 22086 - protein, 469 aa, synthetic construct; identical to SEQ ID NO: 22082
  REGION 1..469: note = neuraminidase__InfluenzaA__AFH00211

SEQ ID NO: 22087 - protein, 469 aa, synthetic construct
  REGION 1..469: note = neuraminidase__InfluenzaA__AFH00222
MNPNQKIITIGSVSLTIATICFLMQIAILVTTVTLHFKQYECNSPPNNQVMLCEPTIIERNITEIVYLTNTTIEKEICPKLAEYRNWSKPQCKITGFAPFSKDNSIRLSAGGDIWVTREPYVSCDPGKCYQFALGQGTTLNNRHSNNTVHDRTPYRTLLMNELGVPFHLGTKQVCIAWSSSSCHDGKAWLHVCVTGHDENATASFIYDGRLVDSIGSWSKNILRTQESECVCINGTCTVVMTDGSASERADTKILFIEEGKIVHISPLSGSAQHVEECSCYPRYPGVRCVCRDNWKGSNRPIVDINVKDYSIVSSYVCSGLVGDTPRKNDSSSSSYCRNPNNEKGSHGVKGWAFDDGNDVWMGRTISEELRSGYETFKVIGGWSKPNSKLQINRQVIVDRGNRSGYSGIFSVEGKSCINRCFYVELIRGRKQETEVWWTSNSIVVFCGTSGTYGTGSWPDGADINLMPI

SEQ ID NO: 22088 - protein, 469 aa, synthetic construct; identical to SEQ ID NO: 15101
  REGION 1..469: note = neuraminidase__InfluenzaA__AFH00233

SEQ ID NO: 22089 - protein, 469 aa, synthetic construct
  REGION 1..469: note = neuraminidase__InfluenzaA__AFH00244
MNPNQKIITIGSVSLTIATICFLMQIAILVTTVTLYFKQYECNSPPSNQVMLCEPTIVERNITEIVYLTNTTIEKEICPKLAEYRNWSKPQCKITGFAPFSKDNSIRLSAGGDIWVTREPYVSCDPGKCYQFALGQGTTLNNRHSNDTVHDRTPYRTLLMNELGVPFHLGTKQVCIAWSSSSCHDGKAWLHVCVTGHDENATASFIYDGRLVDSIGSWSKNILRTQESECVCINGTCTVVMTDGSASERADTKILFIEEGKIVHISPLSGSAKHVEECSCYPRYPGVRCVCRDNWKGSNRPIVDINVKDYSIVSSYVCSGLVGDTPRKNDSSSSSYCRNPNNEKGSHGVKGWAFDDGNDVWMGRTISEELRSGYETFKVIGGWSKPNSKLQINRQVIVDRGNRSGYSGIFSVEGKSCINRCFYVELIRGRKQETEVWWTSNSIVVFCGTSGTYGTGSWPDGADINLMPI

SEQ ID NO: 22090 - protein, 469 aa, synthetic construct; identical to SEQ ID NO: 15185
  REGION 1..469: note = neuraminidase__InfluenzaA__AFH00255

SEQ ID NO: 22091 - protein, 469 aa, synthetic construct; identical to SEQ ID NO: 15185
  REGION 1..469: note = neuraminidase__InfluenzaA__AFH00266

SEQ ID NO: 22092 - protein, 469 aa, synthetic construct
  REGION 1..469: note = neuraminidase__InfluenzaA__AFH00277
MNPNQKIITIGSVSLTIATICFLMQIAILVTTVTLHFKQYECNSPPSNQVMLCEPTIIERNITEIVYLTNTTIEKEICPKLAEYRNWSKPQCKITGFAPFSKDNSIRLSAGGDIWVTREPYVSCDPGKCYQFALGQGTTLNNRHSNDTVHDRTPYRTLLMNELGVPFHLGTKQVCIAWSSSSCHDGKAWLHVCVTGHDENATASFIYDGRLVDSIGSWSKNILRTQESECVCINGTCTVVMTDGSASERADTKILFIEEGKIVHISPLSGSAQHVEECSCYPRYPGVRCVCRDNWKGSNRPIVDINVKDYSIVSSYVCSGLVGDTPRKNDSSSSSYCRKPNNEKGSHGLKGWAFDDGNDVWMGRTISEELRSGYETFKVIGGWSKPNSKLQINRQVIVDRGNRSGYSGIFSVEGKSCINRCFYVELIRGRKQETEVWWTSNSIVVFCGTSGTYGTGSWPDGADINLMPI

SEQ ID NO: 22093 - protein, 469 aa, synthetic construct; identical to SEQ ID NO: 15185
  REGION 1..469: note = neuraminidase__InfluenzaA__AFH00288

SEQ ID NO: 22094 - protein, 469 aa, synthetic construct; identical to SEQ ID NO: 22017
  REGION 1..469: note = neuraminidase__InfluenzaA__AFH00299

SEQ ID NO: 22095 - protein, 469 aa, synthetic construct
  REGION 1..469: note = neuraminidase__InfluenzaA__AFH00310
MNPNQKIITIGSVSLTIATICFLMQIAILVTTVTLHFKQYECSSSPNNQVIPCQPTIIERNITEIVYLTNTTIEKEICPKLVEYRNWSKPQCKITGFAPFSKDNSIRLSAGGDIWVTREPYVSCDPGKCYQFALGQGTTLNNRHSNDTVHDRTPYRTLLMNELGVPFHLGTKQVCIAWSSSSCHDGKAWLHVCVTGHDENATASFIYDGRLVDSIGSWSKNILRTQESECVCINGTCTVVMTDGSASEKADTKILFIEEGKVVHISPLSGSAQHVEECSCYPRYPGVRCVCRDNWKGSNRPIVDINVKNYSIVSSYVCSGLVGDTPRKNDSSSSSYCRNPNNEKGSHGVKGWAFDDGNDVWMGRTISEELRSGYETFKVIGGWSTPNSKLQINRQVIVDSGNRSGYSGIFSVEGKSCINRCFYVELIRGRKQETKVWWTSNSLVVFCGTSGTYGTGSWPDGADINLMPI

SEQ ID NO: 22096 - protein, 469 aa, synthetic construct; identical to SEQ ID NO: 22095
  REGION 1..469: note = neuraminidase__InfluenzaA__AFH00321

SEQ ID NO: 22097 - protein, 469 aa, synthetic construct
  REGION 1..469: note = neuraminidase__InfluenzaA__AFH00332
MNPNQKIITIGSVSLTIATICFLMQIAILVTTVTLHFKQYECNSPPNNQVMLCEPTIIERNITEIVYLTNTTIEKEICPKLAEYRNWSKPQCKITGFAPFSKDNSIRLSAGGDIWVTREPYVSCDPGKCYQFALGQGTTLNNRHSNDTVHDRTPYRTLLMNELGVPFHLGTKQVCIAWSSSSCHDGKAWLHVCVTGHDENATASFIYDGRLVDSIGSWSKNILRTQESECVCINGTCTVVMTDGSASERADTKILFIEEGKIVHISPLSGSAQHVEECSCYPRYPGVRCVCRDNWKGSNRPIVDINVKDYSIVSSYVCSGLVGDTPRKNDSSSSSHCLNPNNEEGGHGVKGWAFDDGNDVWMGRTISEKLRSGYETFKVIGGWSKPNSKLQINRQVIVDRGNRSGYSGIFSVEGKGCINRCFYVELIRGRKQETEVWWTSNSIVVFCGTSGTYGTGSWPDGADINLMPI

SEQ ID NO: 22098 - protein, 469 aa, synthetic construct
  REGION 1..469: note = neuraminidase__InfluenzaA__AFH00343
MNPNQKIITIGSVSLTIATICFLMQIAILVTTVTLHFKQYECNSPPSNQAMLCEPTIIERNITEIVYLTNTTIEKEICPKLAEYRNWSKPQCKITGFAPFSKDNSIRLSAGGDIWVTREPYVSCDPGKCYQFALGQGTTLNNRHSNDTVHDRTPYRTLLMNELGVPFHLGTKQVCIAWSSSSCHDGKAWLHVCVTGHDENATASFIYDGRLVDSIGSWSKNILRTQESECVCINGTCTVVMTDGSASERADTKILFIEEGKIVHISPLSGSAQHVEECSCYPRYPGVRCVCRDNWKGSNRPIVDINVKDYSIVSSYVCSGLVGDTPRKNDSSSSSYCRNPNNEKGSHGVKGWAFDDGNDVWMGRTISEELRSGYETFKVIGGWSKPNSKLQINRQVIVDRGNRSGYSGIFSVEGKSCINRCFYVELIRGRKQETEVWWTSNSIVVFCGTSGTYGTGSWPDGADINLMPI

SEQ ID NO: 22099 - protein, 469 aa, synthetic construct
  REGION 1..469: note = neuraminidase__InfluenzaA__AFH00354
MNPNQKIITIGSVSLTIATICFLMQIAILVTTVTLHFKQYECNSPPNNQVMLCEPTIIERNITKIVYLTNTTIEKEICPKLAEYRNWSKPQCKITGFAPFSKDNSIRLSAGGDIWVTREPYVSCDPGKCYQFALGQGTTLNNRHSNDTVHDRTPYRTLLMNELGVPFHLGTKQVCIAWSSSSCHDGKAWLHVCVTGHDENATASFIYDGRLVDSIGSWSKNILRTQESECVCINGTCTVVMTDGSASERADTKILFIEEGKIVHISPLSGSAQHVEECSCYPRYPGVRCVCRDNWKGSNRPIVDINVKDYSIVSSYVCSGLVGDTPRKNDSSSSSYCLNPNNEEGGHGVKGWAFDDGNDVWMGRTISEKLRSGYETFKVIGGWSKPNSKLQINRQVIVDRGNRSGYSGIFSVEGKSCVNRCFYVELIRGRKQETEVWWTSNSIVVFCGTSGTYGTGSWPDGADINLMPI

SEQ ID NO: 22100 - protein, 469 aa, synthetic construct; identical to SEQ ID NO: 14980
  REGION 1..469: note = neuraminidase__InfluenzaA__AFH00365

SEQ ID NO: 22101 - protein, 469 aa, synthetic construct
  REGION 1..469: note = neuraminidase__InfluenzaA__AFH00376
MNPNQKIITIGSVSLTIATICFLMQIAILVTTVTLHFKQCECNSPPNNQVMLCEPTIIERNITEIVYLTNTTIEKEICPKLAEYRNWSKPQCKITGFAPFSKDNSIRLSAGGDIWVTREPYVSCDPGKCYQFALGQGTTLNNRHSNDTVHDRTPYRTLLMNELGVPFHLGTKQVCIAWSSSSCHDGKAWLHVCVTGHDENATASFIYDGRLVDSIGSWSKNILRTQESECVCINGTCTVVMTDGSASGRADTKILFIEEGKIVHISPLSGSAQHVEECSCYPRYPGVRCVCRDNWKGSNRPIVDINVKDYSIVSSYVCSGLVGDTPRKNDSSSSSYCLNPNNEEGGHGVKGWAFDDGNDVWMGRTISEKLRSGYETFKVIGGWSKPNSKLQINRQVIVDRGNRSGYSGIFSVEGKSCINRCFYVELIRGRKQETEVWWTSNSIVVFCGTSGTYGTGSWPDGADINLMPI

SEQ ID NO: 22102 - protein, 469 aa, synthetic construct
  REGION 1..469: note = neuraminidase__InfluenzaA__AFH00387
MNPNQKIITIGSVSLTIATICFLMQIAILVTTVTLHFKQYECNSPPNNQVMLCEPTIIERNITEIVYLTNTTIEKEICPKLAEYRNWSKPQCKITGFAPFSKDNSIRLSAGGDIWVTREPYVSCDPDKCYQFALGQGTTLNNRHSNDTVHDRTPYRTLLMNELGVPFHLGTKQVCIAWSSSSCHDGKAWLHVCVTGHDENATASFIYDGRLVDSISSWSKNILRTQESECVCINGTCTVVMTDGSASERADTKILFIEEGKIVHISPLSGSAQHVEECSCYPRYPGVRCVCRDNWKGSNRPIVDINVKDYSIVSSYVCSGLVGDTPRKNDSSSSSYCLNPNNEEGGHGVKGWAFDDGNDVWMGRTISEKLRSGYETFKVIGGWSKPNSKLQINRQVIVDRGNRSGYSGIFSVEGKSCVNRCFYVELIRGRKQETEVWWTSNSIVVFCGTSGTYGTGSWPDGADINLMPI

SEQ ID NO: 22103 - protein, 469 aa, synthetic construct
  REGION 1..469: note = neuraminidase__InfluenzaA__AFH00398
MNPNQKIITIGSVSLTIATICFLMQIAILVTTVTLHFKQYECNSPPNNQVMLCEPTIIERNITEIVYLTNTTIEKEICPKLAEYRNWSKPQCKITGFAPFSKDNSIRLSAGGDIWVTREPYVSCDPGKCYQFALGQGTTLNNRHSNDTVHDRTPYRTLLMNELGVPFHLGTKQVCIAWSSSSCHDGKAWLHVCVTGHDENATASFIYDGRLVDSIGSWSKNILRTQESECVCINGTCTVVMTDGSASERADTKILFIEEGKIVHISPLSGSAQHVEECSCYPRYPGVRCVCRDNWKGSNRPIVDINVKDYSIVSSYVCSGLVGDTPRKNDSSSSSYCLNPNNEEGGHGVKGWAFDDGNDVWMGRTISEKLRSGYETFKVIGGWSKPNSKLQINRQVIVDRGNRSGYSGIFSVEGKSCVNRCFYVELIRGRKQETEVWWTSNSIVVFCGTSGTYGAGSWPDGADINLMPI

SEQ ID NO: 22104 - protein, 469 aa, synthetic construct
  REGION 1..469: note = neuraminidase__InfluenzaA__AFH00409
MNPNQKIITIGSVSLTIATICFLMQIAILVTTVTLHFKQYECNSPPNNQVMLCEPTIIERNITEIVYLTNTTIEKEICPKLAEYRNWSKPQCKITGFAPFSKDNSIRLSAGGDIWVTREPYVSCDPGKCYQFALGQGTTLNNRHSNDTVHDRTPYRTLLMNELGVPFHLGTKQVCIAWSSSSCHDGKAWLHVCVTGHNENATASFIYDGRLVDSIGSWSKNILRTQESECVCINGTCTVVMTDGSASGRADTKILFIEEGKIVHISPLSGSAQHVEECSCYPRYPGVRCVCRDNWKGSNRPIVDINVKDYSIVSSYVCSGLVGDTPRKNDSSSSSYCLNPNNEEGGHGVKGWAFDDGNDVWMGRTISEKLRSGYETFKVIGGWSKPNSKLQINRQVIVDRGNRSGYSGIFSVEGKSCINRCFYVELIRGRKQETEVWWTSNSIVVFCGTSGTYGTGSWPDGADINLMPI

SEQ ID NO: 22105 - protein, 469 aa, synthetic construct; identical to SEQ ID NO: 14980
  REGION 1..469: note = neuraminidase__InfluenzaA__AFH00420

SEQ ID NO: 22106 - protein, 469 aa, synthetic construct; identical to SEQ ID NO: 15113
  REGION 1..469: note = neuraminidase__InfluenzaA__AFH00431

SEQ ID NO: 22107 - protein, 469 aa, synthetic construct
  REGION 1..469: note = neuraminidase__InfluenzaA__AFH00442
MNPNQKIITIGSVSLTIATICFLMQIAILVITVTLHFKQYECNSPPNNQVMLCEPTIIERNITEIVYLTNTTIEKEICPKLAEYRNWSKPQCKITGFAPFSKDNSIRLSAGGDIWVTREPYVSCDPGKCYQFALGQGTTLNNRHSNDTVHDRTPYRTLLMNELGVPFHLGTKQVCIAWSSSSCHDGKAWLHVCVTGHNENATASFIYDGRLVDSIGSWSKNILRTQESECVCINGTCTVVMTDGSASGRADTKILFIEEGKIVHISPLSGSAQHVEECSCYPRYPGVRCVCRDNWKGSNRPIVDINVKDYSIVSSYVCSGLVGDTPRKNDSSSSSHCLNPNNEEGGHGVKGWAFDDGNDVWMGRTISEKLRSGYETFKVIGGWSKPNSKLQINRQVIVDRGNRSGYSGIFSVEGKSCINRCFYVELIRGRKQETEVWWTSNSIVVFCGTSGTYGTGSWPDGADINLMPI

SEQ ID NO: 22108 - protein, 469 aa, synthetic construct
  REGION 1..469: note = neuraminidase__InfluenzaA__AFH00453
MNPNQKIITIGSVSLTIATICFLMQIAILVTTVTLHFKQYECNSPPNNQVMLCEPTIIERNITEVVYLTNTTIEKEICPKLAEYRNWSKPQCKITGFAPFSKDNSIRLSAGGDIWVTREPYVSCDPDKCYQFALGQGTTLNNRHSNDIVHDRTPYRTLLMNELGVPFHLGTKQVCIAWSSSSCHDGKAWLHVCVTGHDENATASFIYDGRLVDSIGSWSKKILRTQESECVCINGTCTVVMTDGSASGRADTKILFIEEGKIVHISPLSGSAQHVEECSCYPRYPGVRCVCRDNWKGSNRPIVDINVKDYSIVSSYVCSGLVGDTPRKNDSSSSSHCLNPNNEEGGHGVKGWAFDDGNDVWMGRTISEKLRSGYETFKVIGGWSKPNSKLQINRQVIVDRGNRSGYSGIFSVEGKSCINRCFYVELIRGRKQETEVWWTSNSIVVFCGTSGTYGTGSWPDGADINLMPI

SEQ ID NO: 22109 - protein, 469 aa, synthetic construct
  REGION 1..469: note = neuraminidase__InfluenzaA__AFH00464
MNPNQKIITIGSVSLTIATICFLMQIAILVTTVTLHFKQYECNSPPNNQVMLCEPTIIERNITEIVYLTNTTIEKEICPKLAEYRNWSKPQCKITGFAPFSKDNSIRLSAGGDIWVTREPYVSCDPGKCYQFALGQGTTLKNRHSNDTVHDRTPYRTLLMNELGVPFHLGTKQVCIAWSSSSCHDGKAWLHVCVTGHDENATASFIYGGRLVDSIGSWSKKILRTQESECVCINGTCTVVMTDGSASGRADTKILFIEEGKIVHISPLSGSAQHVEECSCYPRYPGVRCVCRDNWKGSNRPIVDINVKDYSIVSSYVCSGLVGDTPRKNDSSSSSYCLNPNNEEGGHGVKGWAFDDGNDVWMGRTISEKLRSGYETFKVIGGWSKPNSKLQINRQVIVDRGNRSGYSGIFSVEGKSCINRCFYVELIRGRKQETEVWWTSNSIVVFCGTSGTYGTGSWPDGADINLMPI

SEQ ID NO: 22110 - protein, 469 aa, synthetic construct
  REGION 1..469: note = neuraminidase__InfluenzaA__AFH00475
MNPNQKIITIGSVSLTIATICFLMQIAILVTTVTLHFKQYECNSPPNNQVMLCEPTIIERNITEIVYLTNTTIEKEICPKLAEYRNWSKPQCKITGFAPFSKDNSIRLSAGGDIWVTREPYVSCNPDKCYQFALGQGTTLNNRHSNDTVHDRTPYRTLLMNELGVPFHLGTKQVCIAWSSSSCHDGKAWLHVCVTGHDENATASFIYDGRLVDSIGSWSKKILRTQESECVCINGTCTVVMTDGSASGRADTKILFIEEGKIVHISPLSGSAQHVEECSCYPRYPGVRCVCRDNWKGSNRPIVDINVKDYSIVSSYVCSGLVGDTPRKNDSSSSSHCLNPNNEEGGHGVKGWAFDDGNDVWMGRTISEKLRSGYETFKVIEGWSKPNSKLQINRQVIVDRGNRSGYSGIFSVEGKSCINRCFYVELIRGRKQETEVWWTSNSIVVFCGTSGTYGTGSWPDGADINLMPI

SEQ ID NO: 22111 - protein, 469 aa, synthetic construct
  REGION 1..469: note = neuraminidase__InfluenzaA__AFH00486
MNPNQKIITIGSVSLTIATICFLMQIAILVTTVTLHFKQYECNSPPNNQVMLCEPTIIERNITEIVYLTNTTIEKEICPKLAEYRNWSKPQCKITGFAPFSKDNSIRLSAGGDIWVTREPYVSCDPDKCYQFALGQGTTLNNRHSNDTVHDRTPYRTLLMNELGVPFHLGTKQVCIAWSSSSCHDGKAWLHVCVTGHDENATASFIYDGRLVDSIGSWSKKILRTQESECVCINGTCTVVMTDGSASGRADTKILFIEEGKIVHISPLLGSAQHVEECSCYPRYPGVRCVCRDNWKGSNRPIVDINVKDYSIVSSYVCSGLVGDTPRKNDSSSSSHCLNPNNEEGGHGVKGWAFDDGNDVWMGRTISEKLRSGYETFKVIEGWSKPNSKLQINRQVIVDRGNRSGYSGIFSVEGKSCINRCFYVELIRGRKQETEVWWTSNSIVVFCGTSGTYGTGSWPDGADINLMPI

SEQ ID NO: 22112 - protein, 469 aa, synthetic construct
  REGION 1..469: note = neuraminidase__InfluenzaA__AFH00497
MNPNQKIITIGSVSLTIATICFLMQIAILVTTVTLHFKQYECNSPPNNQVMLCEPTIIERNITEIVYLTNTTIKKEICPKLAEYRNWSKPQCKITGFAPFSKDNSIRLSAGGDIWVTREPYVSCDPGKCYQFALGQGTTLNNRHSNDTVHDRTPYRTLLMNELGVPFHLGTKQVCIAWSSSSCHDGKAWLHVCVTGHDENATASFIYDGRLVDSIGSWSKNILRTQESECVCINGTCTVVMTDGSASERADTKILFIEEGKIVHISPLSGSAQHVEECSCYPRYPGVRCVCRDNWKGSNRPIVDINVKDYSIVSSYVCSGLVGDTPRKNDSSSSSYCWNPNNEKGGHGVKGWAFDDGNDVWMGRTISEELRSGYETFKVIGGWSKPNSKLQINRQVIVDRGNRSGYSGIFSVEGKSCINRCFYVELIRGRKQETEVWWTSNSIVVFCGTSGTYGTGSWPDGADINLMPI

SEQ ID NO: 22113 - protein, 469 aa, synthetic construct
  REGION 1..469: note = neuraminidase__InfluenzaA__AFH00508
MNPNQKIITIGSVSLTIATICFLMQIAILVITVTLHFKQYECNSPPNNQVMLCEPTIIERNITEIVYLTNTTIEKEICPKLAEYRNWSKPQCKITGFAPFSKDNSIRLSAGGDIWVTREPYVSCDPGKCYQFALGQGTTLNNRHSNDTVHDRTPYRTLLMNELGVPFHLGTKQVCIAWSSSSCHDGKAWLHVCVTGHNENATASFIYDGRLVDSIGSWSKNILRTQESECVCINGTCTVVMTDGSASGRADTKILFIEEGKIVHISPLSGSAQHVEECSCYPRYPGVRCVCRDNWKGSNRPIVDINVKDYSIVSSYVCSGLVGDTPRKNDSSSSSHCLNPNNEEGGHGVKGWAFDDGNDVWMGRTISEKLRSGYETFRVIGGWSKPNSKLQINRQVIVDRGNRSGYSGIFSVEGKSCINRCFYVELIRGRKQETEVWWTSNSIVVFCGTSGTYGTGSWPDGADINLMPI

SEQ ID NO: 22114 - protein, 469 aa, synthetic construct
  REGION 1..469: note = neuraminidase__InfluenzaA__AFH00519
MNPNQKIITIGSVSLTIATMCFLMQIAILVTTVTLHFKQYECNSPPNNQVMLCEPTIIERNITEIVYLTNTTIEKEICPKLAEYRNWSKPQCKITGFAPFSKDNSIRLSAGGDIWVTREPYVSCDPGKCYQFALGQGTTLNNGHSNDTVHDRTPYRTLLMNELGVPFHLGTKQVCIAWSSSSCHDGKAWLHVCVTGHDENATASFIYDGRLVDSIGSWSKNILRTQESECVCINGTCTVVMTDGSASGRADTKILFIEEGKIVHISPLSGSAQHVEECSCYPRYPGVRCVCRDNWKGSNRPIVDINVKDYSIVSSYVCSGLVGDTPRKNDSSSSSHCLNPNNEEGGHGVKGWAFDDGNDVWMGRTISEKLRSGYETFKVIGGWSKPNSKLQINRQVIVDRGNRSGYSGIFSVEGKSCINRCFYVELIRGRKQETEVWWTSNSIVVFCGTSGTYGTGSWPDGADINLMPI

SEQ ID NO: 22115 - protein, 469 aa, synthetic construct; identical to SEQ ID NO: 14573
  REGION 1..469: note = neuraminidase__InfluenzaA__AFH00530

SEQ ID NO: 22116 - protein, 469 aa, synthetic construct; identical to SEQ ID NO: 14573
  REGION 1..469: note = neuraminidase__InfluenzaA__AFH00541

SEQ ID NO: 22117 - protein, 469 aa, synthetic construct
  REGION 1..469: note = neuraminidase__InfluenzaA__AFH00552
MNPNQKIITIGSVSLTIATICFLMQIAILVTTVTLHFKQYECNSLPNNQVMLCEPTIIERNITEIVYLTNTTIEKEICPKLAEYRNWSKPQCKITGFAPFSKDNSIRLSAGGDIWVTREPYVSCDPDKCYQFALGQGTTLNNRHSNDTVHDRTPYRTLLMNELGVPFHLGTKQVCIAWSSSSCHDGKAWLHVCVTGHDENATASFIYDGRLVDSIGSWSKKILRTQESECVCINGTCTVVMTDGSASGRADTKILFIEEGKIIHISQLSGSTQHVEECSCYPRYPGVRCVCRDNWKGSNRPIVDINVKDYSIVSSYVCSGLVGDTPRKNDSSSSSHCLNPNNEEGGHGVKGWAFDDGNDVWMGRTISEKFRSGYETFKVIEGWSKPNSKLQINRQVIVDRDNRSGYSGIFSVEGKSCINRCFYVELIRGRKQETEVWWTSNSIVVFCGTSGTYGTGSWPDGADINLMPI

SEQ ID NO: 22118 - protein, 469 aa, synthetic construct
  REGION 1..469: note = neuraminidase__InfluenzaA__AFH00563
MNPNQKIITIGSVSLTIATICFLMQIAILVTTVTLHFKQYECNSPPNNQVMLCEPTIIERNITEIVYLTNTTIEKEICPKLAEYRNWSKPQCNITGFAPFSKDNSIRLSAGGDIWVTREPYVSCDPDKCYQFALGQGTTLNNGHSNDTVHERTPYRTLLMNELGVPFHLGTKQVCIAWSSSSCHDGKAWLHVCVTGDDENATASFIYNGRLVDSIGSWSKKILRTQESECVCINGTCTVVMTDGSASGKADTKILFIEEGKIVHTSPLSGSAQHVEECSCYPRYPGVRCVCRDNWKGSNRPIVDINVKDYSIVSSYVCSGLVGDTPRKNDSSSSSHCLDPNNEEGGHGVKGWAFDDGNDVWMGRTISEKLRSGYETFKVIEGWSKPNSKLQINRQVIVDRGNRSGYSGIFSVEGKSCINRCFYVELIRGRKQETEVLWTSNSIVVFCGTSGTYGTGSWPDGADINLMPI

SEQ ID NO: 22119 - protein, 469 aa, synthetic construct
  REGION 1..469: note = neuraminidase__InfluenzaA__AFH00574
MNPNQKIITIGSVSLTIATICFLMQIAILVTTVTLHFKQYECNSPPNNQVMLCEPKIIERNITEIVYLNNTTIEKEICPKLAEYRNWSKPQCNITGFAPFSKDNSIRLSAGGDIWVTREPYVSCDPDKCYQFALGQGTTLNNGHSNDTVHDRTPYRTLLMNELGVPFHLGTKQVCIAWSSSSCHDGKAWLHVCVTGDDENATASFIYNGRLVDSIGSWSKKILRTQESECVCINGTCTVVMTDGSASGKADTKILFIEEGKIVHTSLLSGSAQHVEECSCYPRYPGVRCVCRDNWKGSNRPIVDINVKDYSIVSSYVCSGLVGDTPRKNDSSSSSHCLDPNNEEGGHGVKGWAFDDGNDVWMGRTISEKLRSGYETFKVIEGWSKPNSKLQINRQVIVDRGNRSGYSGIFSVEGKSCINRCFYVELIRGRKQETEVLWTSNSIVVFCGTSGTYGTGSWPDGADINLMPI

SEQ ID NO: 22120 - protein, 469 aa, synthetic construct
  REGION 1..469: note = neuraminidase__InfluenzaA__AFH00585
MNPNQKIITIGSVSLTIATICFLMQIAILVTTVTLHFKQYECNSPPNNQVMLCEPTIIERNITEIVYLTNTTIKKEICPKLAEYRNWSKPQCNITGFAPFSKDNSIRLSAGGDIWVTREPYVSCDPDKCYQFALGQGTTLNNRHSNDKVHDRTPYRTLLMNELGVPFHLGTKQVCIAWSSSSCHDGKAWLHVCVTGDDENATASFIYNGRLVDSIGSWSKKILRTQESECVCINGTCTVVMTDGSASGKADTKILFIKEGKIVHTSSLSGSAQHVEECSCYPRYPGVRCVCRDNWKGSNRPIVDINVKDYSIVSSYVCSGLVGDTPRKNDSSSSSHCLDPNNEEGGHGVKGWAFDDGNDVWMGRTISEKLRSGYETFKVIEGWSKANSKLQINRQVIVDRGNRSGYSGIFSVESKSCINRCFYVELIRGRKQETEVLWTSNSIVVFCGTSGTYGTGSWPDGADINLMPI

SEQ ID NO: 22121 - protein, 469 aa, synthetic construct; identical to SEQ ID NO: 14708
  REGION 1..469: note = neuraminidase__InfluenzaA__AFH00596

SEQ ID NO: 22122 - protein, 469 aa, synthetic construct
  REGION 1..469: note = neuraminidase__InfluenzaA__AFH00607
MNPNQKIITIGFVFFTIATICFLMQIAILVTTVTLHFKQYECNPPPNNQVMLCEPTIIERNITEIVYLTNTTIEKEICPKLAEYRNWSKPQCNITGFAPFSKDNSIRLSAGGDIWVTREPYVSCDPDKCYQFALGQGTTLNNGHSNDTVHDRTPYRTLLMNELGVPFHLGTRQVCIAWSSSSCHDGKAWLHVCVTGDDENATASFIYNGRLVDSIGSWSKKILRTQESECVCINGTCTVVMTDGSASGKADTKILFIEEGKIVHISTLSGSAQHVEECSCYPRYPGVRCVCRDNWKGSNRPIVDINVKDYSIVSSYVCSGLVGDTPRKNDSFSSSHCLDPNNEEGGHGVKGWAFDDGNDVWMGRTISEKLRSGYETFKVIEGWSKPNSKLQTNRQVIVERGNRSGYSGIFSVEGKSCINRCFYVELIRGRKEETEVWWTSNSIVVFCGTSGTYGTGSWPDGADINLMPI

SEQ ID NO: 22123 - protein, 469 aa, synthetic construct; identical to SEQ ID NO: 15929
  REGION 1..469: note = neuraminidase__InfluenzaA__AFH00618

SEQ ID NO: 22124 - protein, 469 aa, synthetic construct
  REGION 1..469: note = neuraminidase__InfluenzaA__AFH00629
MNPNQKIITIGSVSLTIATICFLMQITILVTTVTLHFKQYECNSPPNNQVMLCEPTIIERNITEIVYLTNTTIEKGICPKLAEYRNWSKPQCNITGFAPFSKDNSIRLSAGGDIWVTREPYVSCDPDKCYQFALGQGTTLNNGHSNDTVHDRTPYRTLLMNELGVPFHLGTRQVCIAWSSSSCHDGKAWLHVCVTGDDKNATASFIYNGRLVDSIGSWSKKILRTQESECVCINGTCTVVMTDGSASGKADTKILFIEEGKIIHISTLLGSAQHVEECSCYPRYPGVRCVCRDNWKGSNRPIVDINVKDYSIVSSYVCSGLVGDTPRKNDSSSSSHCLDPNNEEGGHGVKGWAFDDGNDVWMGRTISEKLRSGYETFKVIEGWSKPNSKLQINRQVIVERGNRSGYSGIFSVEGKSCINRCFYVELIRGRKEETEVWWTSNSIVVFCGTSGTYGTGSWPDGADINLMPI

SEQ ID NO: 22125 - protein, 469 aa, synthetic construct; identical to SEQ ID NO: 14327
  REGION 1..469: note = neuraminidase__InfluenzaA__AFH00640

SEQ ID NO: 22126 - protein, 469 aa, synthetic construct; identical to SEQ ID NO: 16456
  REGION 1..469: note = neuraminidase__InfluenzaA__AFH00651

SEQ ID NO: 22127 - protein, 469 aa, synthetic construct; identical to SEQ ID NO: 14327
  REGION 1..469: note = neuraminidase__InfluenzaA__AFH00662

SEQ ID NO: 22128 - protein, 469 aa, synthetic construct
  REGION 1..469: note = neuraminidase__InfluenzaA__AFH00673
MNPNQKIITIGSVSLTISTICFFMQIAILITTVTLHFKQYEFSSPPNNQVMLCEPTIIERNITEIVYLTNTTIEKETCPKLAEYRNWSKPQCDITGFAPFSKDNSIRLSAGGDIWVTREPYVSCDPDKCYQFALGQGTTLNNVHSNDTVHDRTPYRTLLMNELGVPFHLGTKQVCIAWSSSSCHDGKAWLHVCVTGDDKNATASFIYNGRLVDSIVSWSKEILRTQESECVCINGTCTVVMTDGSASGKADTKILFIEEGKIVHTSTLSGSAQHVEECSCYPRYPGVRCVCRDNWKGSNRPIVDINIKDYSIVSRYVCSGLVGDTPRKNDSSSSSHCLDPNNEEGGHGVKGWAFDDGNDVWMGRTISVKSRSGYETFKVIEGWSNPNSKLQINRQVIVDRGNRSGYSGIFSVEGKSCINRCFYVELIRGRKEETEVLWTSNSIVVFCGTSGTYGTGSWPDGADINLMPI

SEQ ID NO: 22129 - protein, 469 aa, synthetic construct
  REGION 1..469: note = neuraminidase__InfluenzaA__AFH00684
MNPNQKIITIGSVSLTISTICFFMQIAILITTVTLHFKQYEFNSPPNNQVMLCEPTIIERNITEIVYLTNTTIEKEICPKLAEYRNWSKPQCDITGFAPFSKDNSIRLSAGGDIWVTREPYVSCDPDKCYQFALGQGTTLNNVHSNNTVRERTPYRTLLMNELGVPFHLGTKQVCIAWSSSSCHDGKAWLHVCITGDDKNATASFIYNGRLVDSIVSWSKEILRTQESECVCINGTCTVVMTDGSASGKADTKILFIEEGKIVHTSTLSGSAQHVEECSCYPRYPGVRCVCRDNWKGSNRPIVDINIKDHSIVSSYVCSGLVGDTPRKNDSSSSSHCLDPNNEEGGHGVKGWAFDDGNDVWMGRTISEKSRLGYETFKVIEGWSNPKSKLQINRQVIVDRGNRSGYSGIFSVEGKSCINRCFYVELIRGRKEETEVLWTSNSIVVFCGTSGTYGTGSWPDGADINLMPI

SEQ ID NO: 22130 - protein, 469 aa, synthetic construct
  REGION 1..469: note = neuraminidase__InfluenzaA__AFH00695
MNPNQKIITIGSVSLTISTICFFMQIAILITTVTLHFKQYEFNSPPNNQVMLCEPTIIERNITEIVYLTNTTIEKEICPKLAEYRNWSKPQCDITGFAPFSKDNSIRLSAGGDIWVTREPYVSCDPDKCYQFALGQGTTLNNVHSNDTVRERTPYRTLLMNELGVPFHLGTKQVCIAWSSSSCHDGKAWLHVCITGDDKNATASFIYNGRLVDSIVSWSKEILRTQESECVCINGTCTVVMTDGSASGKADTKILFIEEGKIVHTSTLSGSAQHVEECSCYPRYPGVRCVCRDNWKGSNRPIVDINIKDHSIVSSYVCSGLVGDTPRKNDSSSSSHCLDPNNEEGGHGVKGWAFDDGNDVWMGRTISEKSRLGYETFKVIEGWSNPKSKLQINRQVIVDRGNRSGYSGIFSVEGKSCINRCFYVELIRGRKEETEVLWTSNSIVVFCGTSGTYGTGSWPDGADINLMPI

SEQ ID NO: 22131 - protein, 469 aa, synthetic construct
  REGION 1..469: note = neuraminidase__InfluenzaA__AFH00706
MNPNQKIITIGSVSLTISTICFFMQIAILITTVTLHFKQYEFNSPPNNQVMLCEPTIIERNITEIVYLTNTTIEKEICPKLAEYRNWSKPQCDITGFAPFSKDNSIRLSAGGDIWVTREPYVSCDPNKCYQFALGQGTTLNNVHSNNTVRDRTPYRTLLMNELGVPFHLGTKQVCIAWSSSSCHDGKAWLHVCITGDDKNATASFIYNGRLVDSVVSWSKEILRTQESECVCINGTCTVVMTDGSASGKADTKILFIEEGKIVHTSTLSGSAQHVEECSCYPRYPGVRCVCRDNWKGSNRPIVDINMKDHSIVSSYVCSGLVGDTPRKNDSSSSSHCFDPNNEEGGHGVKGWAFDDGNDVWMGRTISEKSRLGYETFKVIEGWSNPKSKLQINRQVIVDRGDRSGYSGIFSVEGKSCINRCFYVELIRGSKEETEVLWTSNSIVVFCGTSGTYGTGSWPDGADINLMPI

SEQ ID NO: 22132 - protein, 469 aa, synthetic construct
  REGION 1..469: note = neuraminidase__InfluenzaA__AFH00728
MNPNQKIITIGSVSLTIATICFLMQIAILVTTVTLHFKQYECSSPPNNQVMPCEPIIIERNITEIVYLTNTTIEKEICPKLVEYRNWSKPQCKITGFAPFSKDNSIRLSAGGDIWVTREPYVSCDPGKCYQFALGQGTTLNNKHSNDTIHDRTPYRTLLMNELGVPFHLGTRQVCIAWSSSSCHDGKAWLHVCVTGHDKNATASFIYNGRLVDSIGSWSKNILRTQESECVCINGTCTVVMTDGSASERADTKILFIEEGKIVHISPLSGSAQHVEECSCYPRYPGVRCVCRDNWKGSNRPIVDINVKDYSIVSSYVCSGLVGDTPRKNDRSSSSYCRNPNNEKGNHGVKGWAFDDGNDVWMGRTIGEELRSGYETFKVIGGWSTPNSKLQINRQVIVDSDNRSGYSGIFSVEGKSCINRCFYVELIRGREQETRVLWTSNSIVVFCGTSGTYGTGSWPDGADINLMPI

SEQ ID NO: 22133 - protein, 469 aa, synthetic construct
  REGION 1..469: note = neuraminidase__InfluenzaA__AFH00739
MNPNQKIITIGSVSLTIATICFLMQIAILVTTVTLHFKQYECSSPPNNQVMPCEPTIIERNITEIVYLTNTTIEKEICPKLVEYRNWSKPQCKITGFAPFSKDNSIRLSAGGDIWVTREPYVSCDPGKCYQFALGQGTTLNNRHSNDTVHDRTPYRTLLMNELGVPFHLGTKQVCIAWSSSSCHDGKAWLHVCVTGHDKNATASFIYDGRLVDSIGSWSKNILRTQESECVCINGTCTVVMTDGSASERADTKILFIEEGKIVHISPLSGSAQHVEECSCYPRYPGVRCVCRDNWKGSNRPIVDINVKDYSIVSSYVCSGLVGDTPRKNDRSSSSYCRNPNNEKGSHGVKGWAFDDGNDVWMGRTIGEELRSGYETFKVIGGWSTPNSKLQINRQVIVDSGNRSGYSGIFSVEGKSCINRCFYVELIRGRGQETRVWWTSNSIVVFCGTSGTYGTGSWPDGADINLMPI

SEQ ID NO: 22134 - protein, 469 aa, synthetic construct
  REGION 1..469: note = neuraminidase__InfluenzaA__AFH00750
MNPNQKIITIGSVSLTIATICFLMQIAILVTTVTLHFKQYECSSPPNNQVMPCEPTIIERNITEIVYLTNTTIEKEICPKLVEYRNWSKPQCKITGFAPFSKDNSIRLSAGGDIWVTREPYVSCDPGKCYQFALGQGTTLNNRHSNDTVHDRTPYRTLLMNELGVPFHLGTKQVCIAWSSSSCHDGKAWLHVCVTGHDKNATASFIYDGRLVDSIGSWSKNILRTQESECVCINGTCTVVMTDGSASERAYTKILFIKEGKIVHISPLSGSAQHVEECSCYPRYPGVRCVCRDNWKGSNRPIVDINVKDYSIVSSYVCSGLVGDTPRKNDRSSSSYCRNPNNEKGSHGVKGWAFDDGNDVWMGRTIGEELRSGYETFKVIGGWSTPNSKLQINRQVIVESGNRSGYSGIFSVEGKSCINRCFYVELIRGREQETRVWWTSNSIVVFCGTSGTYGTGSWPDGADINLMPI

SEQ ID NO: 22135 - protein, 469 aa, synthetic construct
  REGION 1..469: note = neuraminidase__InfluenzaA__AFH00761
MNPNQKIITIGSVSLTIATICFLMQIAILVTTVTLHFKQYECNSPPNNQVMPCEPTIIERNITEIVYLTNTTIEKEICPKLVEYRNWSKPQCKITGFAPFSKDNSIRLSAGGDIWVTREPYVSCDPGKCYQFALGQGTTLNNRHSNDTVHDRTPYRTLLMNELGVPFHLGTKQVCIAWSSSSCHDGKAWLHVCVTGHDENATASFIYDGRLVDSIGSWSKNILRTQESECVCINGTCTVVMTDGSASERADTKILFIEEGKIVHISPLSGSAQHVEECSCYPRYPGVRCVCRDNWKGSNRPIVDINVKDYSIVSSYVCSGLVGDTPRKNDSSSSSYCRNPNNEKGSHGVKGWAFDDGDDVWMGRTIGEELRSGYETFKVIGGWSTPNSKLQINRQVIVDRGNRSGYSGIFSVEGKSCINRCFYVELIRGRKQETKVWWTSNSIVVFCGTSGTYGTGSWPDGADINLMPI

SEQ ID NO: 22136 - protein, 469 aa, synthetic construct
  REGION 1..469: note = neuraminidase__InfluenzaA__AFH00783
MNPNQKIITIGSVSLTIATICFLMQIAILVTTVTLHFKQYECNSPPNNQVMLCEPTIIERNITEIVYLTNTTIEKEICPKLAEYRNWSKPQCKITGFAPFSKDNSIRLSAGGDIWVTREPYVSCDPDKCYQFALGRGTTLNNRHSNDTVHDRTPYRTLLMNELGVPFHLGTKQVCIAWSSSSCHDGKAWLHVCVTGHDENATASFIYDGRLVDSIGSWSKKILRTQESECVCINGTCTVVMTDGSASGRADTKILFIEEGKIVHISPLSGSAQHVEECSCYPRYSGVRCVCRDNWKGSNRPIVDINVKDYSIVSSYVCSGLVGDTPRKNDSSSSSHCLNPNNEEGGHGVKGWAFDDGNDVWMGRTISEKFRSGYETFKVIGGWSKPNSKLQINRQVIVDRGNRSGYSGIFSVEGKSCINRCFYVELIRGRKQETEVWWTSNSIVVFCGTSGTYGTGSWPDGADINLMPI

SEQ ID NO: 22137 - protein, 469 aa, synthetic construct
  REGION 1..469: note = neuraminidase__InfluenzaA__AFH00794
MNPNQKIITIGSVSLTIATICFLMQIAILVTTVTLHFKQYECNSPPNNQVMLCEPTIIERNITEIVYLTNTTIEKEICPKLAEYRNWSKPQCKITGFAPFSKDNSIRLAAGGDIWVTREPYVSCDPDKCYQFALGQGTTLNNRHSNDTVHDRTPYRTLLMNELGVPFHLGTKQVCIAWSSSSCHDGKAWLHVCVTGHDENATASFIYDGRLVDSIGSWSKKILRTQESECVCINGTCTVVMTDGSASERADTKILFIEEGKIVHISQLSGSAQHVEECSCYPRYPGVRCVCRDNWKGSNRPIVDINVKDYSIVSSYVCSGLVGDTPRKNDSSSSSHCLNPNNEEGGHGVKGWAFDDGDDVWMGRTISEKLRSGYETFKVIEGWSKPNSKLQTNRQVIVDRGNRSGYSGIFSVEGKSCINRCFYVELIRGRKQETEVWWTSNSIVVFCGTSGTYGTGSWPDGADINLMPI

SEQ ID NO: 22138 - protein, 469 aa, synthetic construct; identical to SEQ ID NO: 15488
  REGION 1..469: note = neuraminidase__InfluenzaA__AFH00805

SEQ ID NO: 22139 - protein, 469 aa, synthetic construct; identical to SEQ ID NO: 19518
  REGION 1..469: note = neuraminidase__InfluenzaA__AFH00816

SEQ ID NO: 22140 - protein, 469 aa, synthetic construct
  REGION 1..469: note = neuraminidase__InfluenzaA__AFH00827
MNPNQKIITIGSVSLTISTTCFFMQIAILITTVTLHFKQYEFNSPPNNQVMLCEPTIIERNMTEIVYLTNTTIEKEICPKPAEYRNWSKPQCDITGFAPFSKDNSIRLSAGGDIWVTREPYVSCDPDKCYQFALGQGTTLNNVHSNNTVRDRTPYRTLLMNELGVPFHLGTKQVCIAWSSSSCHDGKAWLHVCITGDDKNATASFIYNGRLVDSVVSWSKEILRTQESECVCINGTCTVVMTDGSASGKADTKILFIEEGKIVHTSTLSGSAQHVEECSCYPRYPGVRCVCRDNWKGSNRPIVDINIKDHSIVSSYVCSGLVGDTPRKNDSSSSSHCLDPNNEEGGHGVKGWAFDDGNDVWMGRTINETSRLGYETFKVIEGWSNPKSKLQINRQVIVDRGDRSGYSGIFSVEGKSCINRCFYVELIRGRKEETEVLWTSNSIVVFCGTSGTYGTGSWPDGADLNLMPL

SEQ ID NO: 22141 - protein, 469 aa, synthetic construct; identical to SEQ ID NO: 15929
  REGION 1..469: note = neuraminidase__InfluenzaA__AFH01410

SEQ ID NO: 22142 - protein, 469 aa, synthetic construct
  REGION 1..469: note = neuraminidase__InfluenzaA__AFH34942
MNPNQKIITIGSVSLTISTICFFMQIAILITTVTLHFKQYEFNSPPNNQVMLCEPKIIERNITEIVYLTNTTIEKEICPKPAEYRNWSKPQCDITGFAPFSKDNSIRLSAGGDIWVTREPYVSCDPDKCYQFALGQGTTLNNVHSNNTVRNRTPYRTLLMNELGVPFHLGTKQVCIAWSSSSCHDGKAWLHVCITGDDKNATASFIYNGKLVDSVVSWSKEILRTQESECVCINGTCTVVMTDGSASGKADTKILFIEEGKIVHTSTLSGSAQHVEECSCYPRYPGVRCVCRDNWKGSNRPIVDINIKDHSIVSSYVCSGLVGDTPRKNDSSSSSHCLDPNNEEGGHGVKGWAFDDGNDVWMGRTINETSRLGYETFKVIEGWSNPKSKLQINRQVIVDRGDRSGYSGIFSVEGKSCINRCFYVELIRGRKEETEVLWTSNSIVVFCGTSGTYGTGSWPDGADLNLMPI

SEQ ID NO: 22143 - protein, 469 aa, synthetic construct
  REGION 1..469: note = neuraminidase__InfluenzaA__AFH34956
MNPNQKIITIGSVSLTISTICFFMQIAILITTVTLHFKQYEFNSPPNNQVMLCEPTIIERNITEIVYLTNTTIEKEICPKPAEYRNWSKPQCDITGFAPFSKDNSIRLSAGGDIWVTREPYVSCDPDKCYQFALGQGTTLNNVHSNNTVRGRTPYRTLLMNELGVPFHLGTKQVCIAWSSSSCHDGKAWLHVCITGDDKNATASFIYNGRLVDSVVSWSKEILRTQESECVCINGTCTVVMTDGSASGKADTKILFIEEGKIVHTSTLSGSAQHVEECSCYPRYPGVRCVCRDNWKGSNRPIVDINIKDHSIVSSYVCSGLVGDTPRKNDSSSSSHCLDPNNEEGGHGVKGWAFDDGNDVWMGRTINETSRLGYETFKVIEGWSNPKSKLQINRQVIVDRGDRSGYSGIFSVEGKSCINRCFYVELIRGRKEENEVLWTSNSIVVFCGTSGTYGTGSWPDGADLNLMPI

SEQ ID NO: 22144 - protein, 469 aa, synthetic construct
  REGION 1..469: note = neuraminidase__InfluenzaA__AFH34963
MNPNQKIITIGSVSLTISTICFFMQIAILITTVTLHFKQYEFNSPPNNQVMLCEPTIIERNITEIVYLTNTTIEKEICPKPAEYRNWSKPQCDITGFAPFSKDNSIRLSAGGDIWVTREPYVSCDPDKCYQFALGQGTTLNNVHSNNIVRDRTPYRTLLMNELGVPFHLGTKQVCIAWSSSSCHDGKAWLHVCITGDDKNATASFIYNGRLVDSVVSWSKEILRTQESECVCINGTCTVVMTDGSASGKADTKILFIEEGKIVHTSTLSGSAQHVEECSCYPRYPGVRCVCRDNWKGSNRPIVDINIKDHSIVSSYVCSGLVGDTPRKNDSSSSSHCLDPNNEEGGHGVKGWAFDDGNDVWMGRTINETSRLGYETFKVIEGWSNPKSKLQINRQVIVDRGDRSGYSGIFSVEGKSCINRCFYVELIRGRKEENEVLWTSNSIVVFCGTSGTYGTGSWPDGADLNLMPI

SEQ ID NO: 22145 - protein, 469 aa, synthetic construct
  REGION 1..469: note = neuraminidase__InfluenzaA__AFH34970
MNPNQKIITIGSVSLTISTICFFMQIAILITTVTLHFKQYEFNSPPNNQVMLYEPTIIERNITEIVYLTNTTIEKEICPKPAEYRNWSKPQCDITGFAPFSKDNSIRLSAGGDIWVTREPYVSCDPDKCYQFALGQGTTLNNVHSNNTVRDRTPYRTLLMNELGVPFHLGTKQVCIAWSSSSCHDGKAWLHVCITGDDKNATASFIYNGRLVDSVVSWSKEILRTQESECVCINGTCTVVMTDGSASGKADTKILFIEEGKIVHTSTLSGSAQHVEECSCYPRYPGVRCVCRDNWKGSNRPIVDINIKDHSIVSSYVCSGLVGDTPRKNDSSSSSHCLDPNNEEGGHGVKGWAFDDGNDVWMGRTINETSRLGYETFKVIEGWSNPKSKLQINRQVIVDRGDRSGYSGIFSVEGKSCINRCFYVELIRGRKEENEVLWTSNSIVVFCGTSGTYGTGSWPDGADLNLMPI

SEQ ID NO: 22146 - protein, 469 aa, synthetic construct
  REGION 1..469: note = neuraminidase__InfluenzaA__AFH34977
MNPNQKIITIGSVSLTISTICFFMQIAILITTVTLHFKQYEFNSPPNNQVMLCEPTIIERNITEIVYLTNTTIEKEICPKPAEYRNWSKPQCGITGFAPFSKDNSIRLSAGGDIWVTREPYVSCDPDKCYQFALGQGTTLNNVHSNNTVRDRTPYRTLLMNELGVPFHLGTKQVCIAWSSSSCHDGKAWLHVCITGDDKNATASFIYNGRLVDSVVSWSKEILRTQESECVCINGTCTVVMTDGSASGKADTKILFIEEGKIVHTSTLSGSAQHVEECSCYPRYPGVRCVCRDNWKGSNRPIVDINIKDHSIVSSYVCSGLVGDTPRKNDSSSSSHCLDPNNEEGGHGVKGWAFDDGNDVWMGRTINETSRLGYETFKVIEGWSNPKSKLQINRQVIVDRGDRSGYSGIFSVEGKSCINRCFYVELIRGRKEETEVLWTSNSIVVFCGTSGTYGTGSWPDGADLNLMPI

SEQ ID NO: 22147 - protein, 469 aa, synthetic construct
  REGION 1..469: note = neuraminidase__InfluenzaA__AFH74468
MNPNQKIITIGSVSLTISTICFFMQTAILITTVTLHFKQCEFNSPPNNQVMLCEPTIIERNITEIVYLTNTTIEKEICPKLAEYRNWSKPQCDITGFAPFSKDNSIRLSAGGDIWVTREPYVSCDPDKCYQFALGQGTTLNNVHSNNTVRDRTPYRTLLMNELGVPFHLGTKQVCIAWSSSSCHDGKAWLHVCITGDDKNATASFIYNGRLVDSVVSWSKEILRTQESECVCINGTCTVVMTDGSASGKADTKILFIEEGRIVHTSTLSGSAQHVEECSCYPRYPGVRCVCRDNWKGSNRPIVDINIKDHSIVSSYVCSGLVGDTPRKNDSSSSSHCLDPNNEEGDNGVKGWAFDDGNDVWMGRTISEKSRLGYETFKVIEGWSNPKSKLQINRQVIVDRGNRSGYSGIFSVEGKSCINRCFYVELIRGRKEETEVLWTSNSIVVFCGTSGTYGTGSWPDGADINLMPI

SEQ ID NO: 22148 - protein, 469 aa, synthetic construct; identical to SEQ ID NO: 18651
  REGION 1..469: note = neuraminidase__InfluenzaA__AFH74469

SEQ ID NO: 22149 - protein, 469 aa, synthetic construct; identical to SEQ ID NO: 16599
  REGION 1..469: note = neuraminidase__InfluenzaA__AFH74480

SEQ ID NO: 22150 - protein, 469 aa, synthetic construct; identical to SEQ ID NO: 16599
  REGION 1..469: note = neuraminidase__InfluenzaA__AFH74491

SEQ ID NO: 22151 - protein, 469 aa, synthetic construct; identical to SEQ ID NO: 21642
  REGION 1..469: note = neuraminidase__InfluenzaA__AFH74502

SEQ ID NO: 22152 - protein, 469 aa, synthetic construct
  REGION 1..469: note = neuraminidase__InfluenzaA__AFH74513
MNPNQKIITIGSVSLTISTICFFMQIAILITTVTLHFKQYEFNSPPNNQVMLCEPTIIERNITEIVYLTNTTIEKETCPKLAEYRNWSKPQCDITGFAPFSKDNSIRLSAGGDIWVTREPYVSCDPDKCYQFALGQGTTLNNVHSNNTVRDRTPYRTLLMNELGVPFHLGTKQVCIAWSSSSCHDGKAWLHVCITGDDKNATASFIYNGRLVDSVVSWSKEILRTQESECVCINGTCTVVMTDGSASGKADTKILFIEEGKIVHTSTLSGSAQHVEECSCYPRYPGVRCVCRDNWKGSNRPIVDINIKDHSIVSSYVCSGLVGDTPRKNDSSSSSHCLDPNNEEGGHGVKGWAFDDGNDVWMGRTISEKSRLGYETFKVIEGWSNPKSKLQINRQVIVDRGNRSGYSGIFSVEGKSCINRCFYVELIRGRKEETEVLWTSNSIVVFCGTSGTYGTGSWPDGADINLMPV

SEQ ID NO: 22153 - protein, 469 aa, synthetic construct
  REGION 1..469: note = neuraminidase__InfluenzaA__AFH74524
MNPNQKIITIGSVSLTISTICFFMQIAILITTVTLHFKQYEFNSPPNNQVMLCEPTIIERNITEIVYLTNTTIEKEICPKLAEYRNWSKPQCDITGFAPFSKDNSIRLSAGGDIWVTREPYVSCDPDKCYQFALGQGTTINNVHSNNTVRDRTPYRTLLMNELGVPFHLGTKQVCIAWSSSSCHDGKAWLHVCITGDDKNATASFIYNGRLVDSVVSWSKEILRTQESECVCINGTCTVVMTDGSASGKADTKILFIEEGKIVHTSTLSGSAQHVEECSCYPRYPGVRCVCRDNWKGSNRPIVDINMKDHSIVSSYVCSGLVGDTPRKNDSSSSSHCLDPNNEEGGHGVKGWAFDDGNDVWMGRTISEKSRLGYETFKVIEGWSNPKSKLQINRQVIVDRGNRSGYSGIFSVEGKSCINRCFYVELIRGRKEETEVLWTSNSVVVFCGTSGTYGTGSWPDGADINLMPI

SEQ ID NO: 22154 - protein, 469 aa, synthetic construct; identical to SEQ ID NO: 16599
  REGION 1..469: note = neuraminidase__InfluenzaA__AFH74535

SEQ ID NO: 22155 - protein, 469 aa, synthetic construct; identical to SEQ ID NO: 21635
  REGION 1..469: note = neuraminidase__InfluenzaA__AFH74546

SEQ ID NO: 22156 - protein, 469 aa, synthetic construct; identical to SEQ ID NO: 21635
  REGION 1..469: note = neuraminidase__InfluenzaA__AFH74557

SEQ ID NO: 22157 - protein, 469 aa, synthetic construct; identical to SEQ ID NO: 21635
  REGION 1..469: note = neuraminidase__InfluenzaA__AFH74568

SEQ ID NO: 22158 - protein, 469 aa, synthetic construct; identical to SEQ ID NO: 21638
  REGION 1..469: note = neuraminidase__InfluenzaA__AFH74579

SEQ ID NO: 22159 - protein, 469 aa, synthetic construct
  REGION 1..469: note = neuraminidase__InfluenzaA__AFH74590
MNPNQKIITIGSVSLTISTICFFMQIAILITTVTLHFKQYEFNSPPNNQVMLCEPTIIERNITEIVYLTNTTIEKEICPKLAEYRNWSKPQCDITGFAPFSKDNSIRLSAGGDIWVTREPYVSCDPDKCYQFALGQGTTLNNVHSNNTVRDRTPYRTLLMNELGVPFHLGTKQVCIAWSSSSCHDGKAWLHVCITGDDKNATASFIYNGRLVDSVVSWSKEILRTQESECVCINGTCTVVMTDGSASGKADTKILFIEEGKIVHTSTLSGSAQHVEECSCYPRYPGVRCVCRDNWKGSNRPIVDINIKDHSIVSSYVCSGLVGDTPRKNDSSSSSHCLDPNNEEGGHGVKGWAFDDGNDVWMGRTISEKSRLGYETFKVIEGWSNPKSKLQINRQVIVDRGNRSGYSGIFSVEGKSCINRCFYVELIRGRKEETEVLWTSNSIVVFCGTSGTYGTGSWPDGADINLMSV

SEQ ID NO: 22160 - protein, 469 aa, synthetic construct; identical to SEQ ID NO: 21635
  REGION 1..469: note = neuraminidase__InfluenzaA__AFH74601

SEQ ID NO: 22161 - protein, 469 aa, synthetic construct
  REGION 1..469: note = neuraminidase__InfluenzaA__AFH74612
MNPNQKIITIGSVSLTISTICFFMQTAILITTVTLHFKQCEFNSPPNNQVMLCEPTIIERNITEIVYLTNTTIEKEICPKLAEYRNWSKPQCDITGFAPFSKDNSIRLSAGGDIWVTREPYVSCDPDKCYQFALGQGTTLSNVHSNNTVRDRTPYRTLLMNELGVPFHLGTKQVCIAWSSSSCHDGKAWLHVCITGDDKNATASFIYNGRLVDSVVSWSKEILRTQESECVCINGTCTVVMTDGSASGKADTKILFIEEGKIVHTSTLSGSAQHVEECSCYPRYPGVRCVCRDNWKGSNRPIVDINIKDHSIVSSYVCSGLVGDTPRKNDSSSSSHCLDPNNEEGGHGVKGWAFDDGNDVWMGRTISEKSRLGYETFKVIEGWSNPKSKLQINRQVIVDRGNRSGYSGIFSVEGKSCINRCFYVELIRGRKEETEVLWTSNSIVVFCGTSGTYGTGSWPDGADINLMPI

SEQ ID NO: 22162 - protein, 469 aa, synthetic construct; identical to SEQ ID NO: 21635
  REGION 1..469: note = neuraminidase__InfluenzaA__AFH74623

SEQ ID NO: 22163 - protein, 469 aa, synthetic construct; identical to SEQ ID NO: 21635
  REGION 1..469: note = neuraminidase__InfluenzaA__AFH74634

SEQ ID NO: 22164 - protein, 469 aa, synthetic construct; identical to SEQ ID NO: 21642
  REGION 1..469: note = neuraminidase__InfluenzaA__AFH74645

SEQ ID NO: 22165 - protein, 469 aa, synthetic construct; identical to SEQ ID NO: 21642
  REGION 1..469: note = neuraminidase__InfluenzaA__AFH74656

SEQ ID NO: 22166 - protein, 469 aa, synthetic construct; identical to SEQ ID NO: 21642
  REGION 1..469: note = neuraminidase__InfluenzaA__AFH74667

SEQ ID NO: 22167 - protein, 469 aa, synthetic construct; identical to SEQ ID NO: 21642
  REGION 1..469: note = neuraminidase__InfluenzaA__AFH74678

SEQ ID NO: 22168 - protein, 469 aa, synthetic construct; identical to SEQ ID NO: 16599
  REGION 1..469: note = neuraminidase__InfluenzaA__AFH74689

SEQ ID NO: 22169 - protein, 469 aa, synthetic construct; identical to SEQ ID NO: 16599
  REGION 1..469: note = neuraminidase__InfluenzaA__AFH74700

SEQ ID NO: 22170 - protein, 469 aa, synthetic construct
  REGION 1..469: note = neuraminidase__InfluenzaA__AFH74711
MNPNQKIITIGSVSLTISTICFFMQIAILITTVTLHFKQYEFNSPPNNQVMLCEPTIIERNITEIVYLTNTTIEKEICPKLAEYRNWSKPQCDITGFAPFSKDNSIRLSAGGDIWVTREPYVSCDPDKCYQFALGQGTTLNNVHSNNTVRDRTPYRTLLMNELGVPFHLGTKQVCIAWSSSSCHDGKAWLHVCITGDDKNATASFIYNGRLVDSVVSWSKEILRTQESECVCINGTCTVVMTDGSASGKADTKILFIEEGKIVHTSTLSGSAQHVEECSCYPRYPCVRCVCRDNWKGSNRPIVDINIKDHSIVSSYVCSGLVGDTPRKNDSSSSSHCLDPNNEEGGHGVKGWAFDDGNDVWMGRTISEKSRLGYETFKVIEGWSNPKSKLQINRQVIVDRGNRSGYSGIFSVEGKSCINRCFYVELIRGRKEETEVLWTSNSIVVFCGTSGTYGTGSWPDGADINLMPV

SEQ ID NO: 22171 - protein, 469 aa, synthetic construct; identical to SEQ ID NO: 21635
  REGION 1..469: note = neuraminidase__InfluenzaA__AFH74722

SEQ ID NO: 22172 - protein, 469 aa, synthetic construct; identical to SEQ ID NO: 21635
  REGION 1..469: note = neuraminidase__InfluenzaA__AFH74733

SEQ ID NO: 22173 - protein, 469 aa, synthetic construct
  REGION 1..469: note = neuraminidase__InfluenzaA__AFH74744
MNPNQKIITIGSVSLTISTICFFMQIAILITTVTLHFKQYEFNSPPNNQVMLCEPTIIERNITEIVYLTNTTIEKEICPKLAEYRNWSKPQCDITGFAPFSKDNSIRLSAGGDIWVTREPYVSCDPDKCYQFALGQGTTLNNVHSNNTVRDRTPYRTLLMNELGVPFHLGTKQVCIAWSSSSCHDGKAWLHVCITGDDKNATASFIYNGRLVDSVVSWSKEILRTQESECVCINGTCTVVMTDGSASGKADTKILFIEEGKIVHTSTLSGSAQHVEECSCYPRYPGVRCVCRDNWKGSNRPIVDINIKDHSIVSNYVCSGLVGDTPRKNDSSSSSHCLDPNNEEGGHGVKGWAFDDGNDVWMGRTISEKSRLGYETFKVIEGWSNPKSKLQINRQVIVDRGNRSGYSGIFSVEGKSCINRCFYVELIRGRKEETEVLWTSNSIVVFCGTSGTYGTGSWPDGADINLMPV

SEQ ID NO: 22174 - protein, 469 aa, synthetic construct; identical to SEQ ID NO: 21635
  REGION 1..469: note = neuraminidase__InfluenzaA__AFH74755

SEQ ID NO: 22175 - protein, 469 aa, synthetic construct; identical to SEQ ID NO: 21635
  REGION 1..469: note = neuraminidase__InfluenzaA__AFH74766

SEQ ID NO: 22176 - protein, 469 aa, synthetic construct; identical to SEQ ID NO: 21635
  REGION 1..469: note = neuraminidase__InfluenzaA__AFH74777

SEQ ID NO: 22177 - protein, 469 aa, synthetic construct; identical to SEQ ID NO: 16599
  REGION 1..469: note = neuraminidase__InfluenzaA__AFH74788

SEQ ID NO: 22178 - protein, 469 aa, synthetic construct
  REGION 1..469: note = neuraminidase__InfluenzaA__AFH74799
MNPNQKIITIGSVSLTISTICFFMQIAILITTVTLHFKQYEFNSPPNNQVMLCEPTIIERNITEIVYLTNTTIEKEICPKLAEYRNWSKPQCDITGFAPFSKDNSIRLSAGGDIWVTREPYVSCGPDKCYQFALGQGTTLNNVHSNNTVRDRTPYRTLLMNELGVPFHLGTKQVCIAWSSSSCHDGKAWLHVCITGDDKNATASFIYNGRLVDSVVSWSKEILRTQESECVCINGTCTVVMTDGSASGKADTKILFIEEGKIVHTSTLSGSAQHVEECSCYPRYPGVRCVCRDNWKGSNRPIVDINIKDHSIVSSYVCSGLVGDTPRKNDSSSSSHCLDPNNEEGGHGVKGWAFDDGNDVWMGRTISEKSRLGYETFKVIEGWSNPKSKLQINRQVIVDRGNRSGYSGIFSVEGKSCINRCFYVELIRGRKEETEVLWTSNSIVVFCGTSGTYGTGSWPDGADINLMPV

SEQ ID NO: 22179 - protein, 469 aa, synthetic construct; identical to SEQ ID NO: 21655
  REGION 1..469: note = neuraminidase__InfluenzaA__AFH74810

SEQ ID NO: 22180 - protein, 469 aa, synthetic construct; identical to SEQ ID NO: 21655
  REGION 1..469: note = neuraminidase__InfluenzaA__AFH74821

SEQ ID NO: 22181 - protein, 469 aa, synthetic construct; identical to SEQ ID NO: 21655
  REGION 1..469: note = neuraminidase__InfluenzaA__AFH74832

SEQ ID NO: 22182 - protein, 469 aa, synthetic construct; identical to SEQ ID NO: 21655
  REGION 1..469: note = neuraminidase__InfluenzaA__AFH74843

SEQ ID NO: 22183 - protein, 469 aa, synthetic construct; identical to SEQ ID NO: 21635
  REGION 1..469: note = neuraminidase__InfluenzaA__AFH74854

SEQ ID NO: 22184 - protein, 469 aa, synthetic construct; identical to SEQ ID NO: 21635
  REGION 1..469: note = neuraminidase__InfluenzaA__AFH74865

SEQ ID NO: 22185 - protein, 469 aa, synthetic construct; identical to SEQ ID NO: 21635
  REGION 1..469: note = neuraminidase__InfluenzaA__AFH74876

SEQ ID NO: 22186 - protein, 469 aa, synthetic construct; identical to SEQ ID NO: 21635
  REGION 1..469: note = neuraminidase__InfluenzaA__AFH74887

SEQ ID NO: 22187 - protein, 469 aa, synthetic construct; identical to SEQ ID NO: 21635
  REGION 1..469: note = neuraminidase__InfluenzaA__AFH74898

SEQ ID NO: 22188 - protein, 469 aa, synthetic construct; identical to SEQ ID NO: 21635
  REGION 1..469: note = neuraminidase__InfluenzaA__AFH74909

SEQ ID NO: 22189 - protein, 469 aa, synthetic construct
  REGION 1..469: note = neuraminidase__InfluenzaA__AFH74920
MNPNQKIITIGSVSLTISTICFFMQTAILITTVTLHFKQCEFNSPPNNQVMLCEPTIIERNITEIVYLTNTTIEKEICPKLAEYRNWSKPQCDITGFAPFSKDNSIRLSAGGDIWVTREPYVSCDPDKCYQFALGQGTTLNNVHSNNTVRDRTPYRTLLMNELGVPFHLGTKQVCIAWSSSSCHDGKAWLHVCITGDDKNATASFIYNGRLVDSVVSWSKEILRTQESECVCINGTCTVVMTDGSASGKADTKILFIEEGKIVHTSTLSGSAQHVEECSCYPRYPGVRCVCRDNWKGSNRPIVDINIKDHSIVSSYVCSGLVGDTPRKNDSSSSSHCLDPNNEEGDHGVKGWAFDDGNDVWMGRTISEKSRLGYETFKVIEGWSNPKSKLQINRQVIVDRGNRSGYSGIFSVEGKSCINRCFYVELIRGRKEETEVLWTSNSIVVFCGTSGTYGTGSWPDGADINLMPI

SEQ ID NO: 22190 - protein, 469 aa, synthetic construct; identical to SEQ ID NO: 16599
  REGION 1..469: note = neuraminidase__InfluenzaA__AFH74931

SEQ ID NO: 22191 - protein, 469 aa, synthetic construct; identical to SEQ ID NO: 16599
  REGION 1..469: note = neuraminidase__InfluenzaA__AFH74942

SEQ ID NO: 22192 - protein, 469 aa, synthetic construct; identical to SEQ ID NO: 21635
  REGION 1..469: note = neuraminidase__InfluenzaA__AFH74953

SEQ ID NO: 22193 - protein, 469 aa, synthetic construct
  REGION 1..469: note = neuraminidase__InfluenzaA__AFH74964
MNPNQKIITIGSVSLTISTICFFMQIAILITTVTLHFKQYEFNSPPNNQVMLCEPTIIERNITEIVYLTNTTIEKEICPKLAEYRNWSKPQCDITGFAPFSKDNSIRLSAGGDIWVTREPYVSCDPDKCYQFALGQGTTLNNVHSNNTVRDRTPYRTLLMNELGVPFHLGTKQVCIAWSSSSCHDGKAWLHVCITGDDKNATASFIYNGRLVDSVVSWSKEILRTQESECVCINGTCTVVMTDGSASGKADTKILFIEEGKIVHTSILSGSAQHVEECSCYPRYPGVRCVCRDNWKGSNRPIVDINIKDHSIVSSYVCSGLVGDTPRKNDSSSSSHCLDPNNEEGGHGVKGWAFDDGNDVWMGRTISEKSRLGYETFKVIEGWSNPKSKLQINRQVIVDRGNRSGYSGIFSVEGKSCINRCFYVELIRGRKEETEVLWTSNSIVVFCGTSGTYGTGSWPDGADINLMPV

SEQ ID NO: 22194 - protein, 469 aa, synthetic construct; identical to SEQ ID NO: 21635
  REGION 1..469: note = neuraminidase__InfluenzaA__AFH75391

SEQ ID NO: 22195 - protein, 469 aa, synthetic construct; identical to SEQ ID NO: 16738
  REGION 1..469: note = neuraminidase__InfluenzaA__AFH97143

SEQ ID NO: 22196 - protein, 469 aa, synthetic construct
  REGION 1..469: note = neuraminidase__InfluenzaA__AFI56407
MNPNQKIITIGSVCMTIGMANLILQIGNIISIWISHSIQLGNQNQIETCNQSVITYENNTWVNQTYVNISNTNFAAGQSVVSVKLAGNSSLCPVSGWAIYSKDNSIRIGSKGNVFVIREPFISCSPLECRTFFLTQGALLNDKHSNGTIKDRSPYRTLMSCPIGEVPSPYNSRFESVAWSASACHDGINWLTIGISGPDNGAVAVLKYNGIITDTIKSWRNNILRTQESECACVNGSCFTIMTDGPSDGQASYKIFRIEKGKIVKSVEMNAPNYHYEECSCYPDSSEITCVCRDNWHGSNRPWVSFNQNLEYQIGYICSGIFGDNPRPNDKTGSCGPVSSNGANGVKGFSFKYGNGVWIGRTKSISSRKGFEMIWDPNGWTGTDNSFSIKQDIVGINEWSGYSGSFVQHPELTGLDCIRPCFWVELIRGRPKENTIWTSGSSISFCGVNSGTVGWSWPDGAELPFTIDK

SEQ ID NO: 22197 - protein, 469 aa, synthetic construct
  REGION 1..469: note = neuraminidase__InfluenzaA__AFJ05141
MNPNQKIITIGSVSLTISTICFFMQIAILITTVTLHFKQYEFNSPPNNQVMLCEPTIIERNITEIVYLTNTTIEKEICPKPAEYRNWSKPQCDITGFAPFSKDNSIRLSAGGDIWVTREPYVSCDPDKCYQFALGQGTTLNNVHSNNTVRDRTPYRSLLMNELGVPFHLGTKQVCIAWSSSSCHDGKAWLHVCITGDDKNATASFIYNGRLVDSVVSWSKEILRTQESECVCINGTCTVVMTDGSASGKADTKILFIEEGKIVHTSTLSGSAQHVEECSCYPRYPGVRCVCRDNWKGSNRPIVDINIKDHSIVSSYVCSGLVGDTPRKNDSSSSSHCLDPNNEEGGHGVKGWAFDDGNDVWMGRTINETSRLGYETFKVIEGWSNPKSKLQINRQVIVDRGDRSGYSGIFSVEGKSCINRCFYVELIRGRKEETEVLWTSNSIVVFCGTSGTYGTGSWPDGADLNLMPI

SEQ ID NO: 22198 - protein, 469 aa, synthetic construct
  REGION 1..469: note = neuraminidase__InfluenzaA__AFJ05145
MNPNQKIITIGSVSLTMSTICFFMQIAILITTVTLHFKQYEFNSPPNNQVMLCEPTIIERNITEIVYLTNTTIEKEICPKPAEYRNWSKPQCDITGFAPFSKDNSIRLSAGGDIWVTREPYVSCDPDKCYQFALGQGTTLNNVHSNNTVRDRTPYRTLLMNELGVPFHLGTKQVCIAWSSSSCHDGKAWLHVCITGDDKNATASFIYNGRLVDSVVSWSKEILRTQESECVCINGTCTVVMTDGSASGKADTKILFIEEGKIVHTSTLSGSAQHVEECSCYPRYPGVRCVCRDNWKGSNRPIVDINIKDHSIVSSYVCSGLVGDTPRKNDSSSSSHCLDPNNEEGGHGVKGWAFDDGNDVWMGRTINETSRLGYETFKVIEGWSNPKSKLQINRQVIVDRGDRSGYSGIFSVEGKSCINRCFYVELIRGRKEETEVLWTSNSIVVFCGTSGTYGTGSWPDGADLNLMPI

SEQ ID NO: 22199 - protein, 469 aa, synthetic construct
  REGION 1..469: note = neuraminidase__InfluenzaA__AFJ05635
MNPNQKIITIGSVCMTIGMANLILQIGNIISIWISHSIQLRNQSQIETCNQSVITYENNTWVNQTYVNISNTNFAAGQSVVSMKLAGNSSLCPVSGWAIYSKDNSIRIGSKGDVFVIREPFISCSPLECRTFFLTQGALLNDKHSNGTIKDRSPYRTLMSCPIGEVPSPYNSRFESVAWSASACHDGINWLTIGISGPDNGAVAVLKYNGIITDTIKSWRNNILRTQESECACVNGSCFTIMTDGPSDGQASYKIFRIEKGKIVKSVEMNAPNYHYEECSCYPDSSEITCVCRDNWHGSNRPWVSFNQNLEYQIGYICSGIFGDNPRPNDKTGSCGPVSSNGANGVKGFSFKYGNGVWIGRTKSISSRKGFEMIWDPNGWTGTDNNFSIKQDIVGINEWSGYSGSFVQHPELTGLDCIRPCFWVELIRGRPKENTIWTSGSSISFCGVNSDTVGWSWPDGAELPFTIDK

SEQ ID NO: 22200 - protein, 469 aa, synthetic construct
  REGION 1..469: note = neuraminidase__InfluenzaA__AFJ11709
MNPNQKIITIGSVSLTISTICFFMQIAILITTVTLHFKQYEFNSPPNNQVMLCEPTIIERNITEIVYLTNTTIEKEICPKLAEYRNWSKPQCDITGFAPFSKDNSIRLSAGGDIWVTREPYVSCDPDKCYQFALGQGTTLNNVHSNNTVRDRTPYRTLLMNELGVPFHLGTKQVCIAWSSSSCHDGKAWLHVCITGDDKNATASFIYNGRLVDSVVSWSKEILRTQESECVCINGTCTVVMTDGSASGKADTKILFIEEGKIVHTSTLSGSAQHVEECSCYPRYPGVRCVCRDNWKGSNRPIVDINIKDHSIVSSYVCSGLVGDTPRKNDSSSSSHCLDPNNEEGGHGVKGWAFDDGNDVWMGRTINETSRLGYETFKVIEGWSNPKSKLQINRQVIVDRGNRSGYSGIFSVEGKSCINRCFYVELIRGRKEETEVLWTSNSIVVFCGTSGTYGTGSWPDGADLNLMLI

SEQ ID NO: 22201 - protein, 469 aa, synthetic construct
  REGION 1..469: note = neuraminidase__InfluenzaA__AFJ11720
MNPNQKIITIGSVSLTISTICFFMQIAILITTVTLHFKQYEFNSPPNNQVMLCEPTIIERNITEIVYLTNTTIEKEICPKLAEYRNWSKPQCDITGFAPFSKDNSIRLSAGGDIWVTREPYVSCDPDKCYQFALGQGTTLNNVHSNNTVRDRTPYRTLLMNELGVPFHLGTKQVCIAWSSSSCHDGKAWLHVCITGDDKNATASFIYNGRLIDSVVSWSKEILRTQESECVCINGTCTVVMTDGSASGKADTKILFIEEGKIVHTSTLSGSAQHVEECSCYPRYPGVRCVCRDNWKGSNRPIVDINIKDHSIVSSYVCSGLVGDTPRKNDSSSSSHCLDPNNEEGGHGVKGWAFDDGNDVWMGRTINETSRLGYETFKVIEGWSNPKSKLQINRQVIVDKGNRSGYSGIFSVEGKSCINRCFYVELIRGRKEETEVLWTSNSIVVFCGTSGTYGTGSWPDGADLNLMPI

SEQ ID NO: 22202 - protein, 469 aa, synthetic construct; identical to SEQ ID NO: 21143
  REGION 1..469: note = neuraminidase__InfluenzaA__AFJ11731

SEQ ID NO: 22203 - protein, 469 aa, synthetic construct
  REGION 1..469: note = neuraminidase__InfluenzaA__AFJ19845
MNPNQKIITIGSVSLTISTICFFMQIAILITTVTLHFKQYEFNSPPNNQVMLCEPTIIERNITEIVYLTNTTIEKEICPKLAEYRNWSKPQCDITGFAPFSKDNSIRLSAGGDIWVTREPYVSCDPDKCYQFALGQGTTLNNVHSNNTVRDRTPYRTLLMNELGVPFHLGTKQVCIAWSSSSCHDGKAWLHVCITGDDKNATASFIYNGRLVDSVVSWSKEILRTQESECVCINGTCTVVMTDGSASGKADTKILFIEEGKIVHTSTLSGSAQHVEECSCYPRYPDVRCVCRDNWKGSNRPIVDINIKDHSIVSSYVCSGLVGDTPRKNDSSSSSHCLDPNNEEGGHGVKGWAFDDGNDVWMGRTINETSRLGYETFKVIEGWSNPKSKLQINRQVIVDKGNRSGYSGIFSVEGKSCINRCFYVELIRGRKEETEVLWTSNSIVVFCGTSGTYGTGSWPDGADLNLMPI

SEQ ID NO: 22204 - protein, 469 aa, synthetic construct; identical to SEQ ID NO: 16738
  REGION 1..469: note = neuraminidase__InfluenzaA__AFJ44697

SEQ ID NO: 22205 - protein, 469 aa, synthetic construct; identical to SEQ ID NO: 20257
  REGION 1..469: note = neuraminidase__InfluenzaA__AFJ69989

SEQ ID NO: 22206 - protein, 469 aa, synthetic construct
  REGION 1..469: note = neuraminidase__InfluenzaA__AFJ69990
MNPNQKIITIGSVCMTIGMANLILQIGNITSIWISHSIQLGNQNQIETCNQSVITYENNTWVNQTYVNISNTNFAAGQSVVSVKLAGNSSLCPVSGWAIYSKDNSIRIGSKGDVFVIREPFISCSPLECRTFFLTQGALLNDKHSNGTIKDRSPYRTLMSCPIGEVPSPYNSRFESVAWSASACHDGINWLTIGISGPDNGAVAVLKYNGIITDTIKSWRNNILRTQESECACVNGSCFTVMTDGPSDGQASYKIFRIEKGKIVKSVEMNAPNYHYEECSCYPDSSEITCVCRDNWHGSNRPWVSFNQNLEYRIGYICSGIFGDNPRPNDKTGSCGPVSSNGANGVKGFSFKYGNGVWIGRTKSISSRNGFEMIWDPNGWTGTDNNFSIKQDIIGINEWSGYSGSFVQHPELTGLDCIRPCFWVELIRGRPKENTIWTSGSSISFCGVNSDTVGWSWPDGAELPFTIDK

SEQ ID NO: 22207 - protein, 469 aa, synthetic construct
  REGION 1..469: note = neuraminidase__InfluenzaA__AFJ69991
MNPNQKIITIGSVCMTIGMANLILQIGNIISIWISHSIQLGNQSQIETCNQSVITYENNTWVNQTYVNISNTNFAAGQSVVSVKLAGNSSLCPVSGWAIYSKDNSIRIGSKGDVFVIREPFISCSPLECRTFFLTQGALLNDKHSNGTIKDRSPYRTLMSCPIGEVPSPYNQDLSHSAWSASACHDGINWLTIGISGPDNGAVAVLKYNGIITDTIKSWRNNILRTQESECACVNGSCFTIMTDGPSDGQASYKIFRIEKGKIVKSVEMNAPNYHYEECSCYPDSSEITCVCRDNWHGSNRPWVSFNQNLEYQIGYICSGIFGDNPRPNDKTGSCGPVSSNGANGVKGFSFKYGNGVWIGRTKSISSRKGFEMIWDPNGWTGTDNNFSIKQDIVGINEWSGYSGSFVQHPELTGLDCIRPCFWVELIRGRPKENTIWTSGSSISFCGVNSDTVGWSWPDGAELPFTIDK

SEQ ID NO: 22208 - protein, 469 aa, synthetic construct; identical to SEQ ID NO: 17564
  REGION 1..469: note = neuraminidase__InfluenzaA__AFJ69992

SEQ ID NO: 22209 - protein, 469 aa, synthetic construct
  REGION 1..469: note = neuraminidase__InfluenzaA__AFJ69993
MNPNQKIITIGSVSLTISTICFFMQIAILITTVTLHFKQYEFNSPPNNQVMLCEPTIIERNITEIVYLTNTTIEKEICPKLAEYRNWSKPQCDITGFAPFSKDNSIRLSAGGDIWVTREPYVSCDPDKCYQFALGQGTTLNNVHSNNTVRDRTPYRTLLMNELGVPFHLGTKQVCIAWSSSSCHDGKAWLHVCITGDDKNATASFIYNGRLVDSVVSWSKEILRTQESECVCINGTCTVVMTDGSASGKADTKILFIEEGKIVHTSTLSGSAQHVEECSCYPRYPGVRCVCRDNWKGSNRPIVDINIKDHSIVSSYVCSGLVGDTPRKNDSSSSSHCLDPNNEEGGHGVKGWAFDDGNDVWMGRTINETSRLGYETFKVIEGWSNPKSKLQINRQVIVGRGNRSGYSGIFSVEGKSCINRCFYVELIRGRKEETEVLWTSNSIVVFCGTSGTYGTGSWPDGANLNLMPI

SEQ ID NO: 22210 - protein, 469 aa, synthetic construct; identical to SEQ ID NO: 19518
  REGION 1..469: note = neuraminidase__InfluenzaA__AFJ69994

SEQ ID NO: 22211 - protein, 470 aa, synthetic construct
  REGION 1..470: note = neuraminidase__InfluenzaA__AFJ74389
MNPNQKIITIGSISIAIGIISLILQIGNIISIWASHSIQTGSQNHTGVCNQRIITYENSTWVNQTYVNINNTNVVAGKDKTSMTLAGNSSLCPIRGWAIYTKDNSIRIGSKGDVFVIREPFISCSHLECRTFFLTQGALLNDKHSNGTVKDRSPYRALMSCPLGEAPSPYNSRFESVAWSASACHDGLGWLTIGISGPDNGAVAVLKYNGIITETIKSWKKRILRTQESECVCMNGSCFTIMTDGPSNGAASYRIFKIEKGRVTKSIELDAPNYHYEECSCYPDTGTVMCVCRDNWHGSNRPWVSFNQNLDYQIGYICSGVFGDNPRPKDGEGSCNPVTVDGADGVKGFSYRYGNGVWIGRTKSNRLRKGFEMIWDPNGWTDTDSDFSMKQDIVAMTDWSGYSGSFVQHPELTGLDCMRPCFWVELVRGLPRENTTIWTSGSSISFCGVNSDTANWSWPDGAELPFTIDK

SEQ ID NO: 22212 - protein, 469 aa, synthetic construct
  REGION 1..469: note = neuraminidase__InfluenzaA__AFJ74399
MNPNQKIITIGSVSLTIATICFLMQIAILVITLTLHFKQYECNSPPNNQVMLCEPTIIERNITEIVYLTNTTIEKEICPKLAEYRNWSKPQCKITGFAPFSKDNSIRLSAGGDIWVTREPYVSCDPGKCYQFALGQGTTLNNRHSNDTVHDRTPYRTLLMNELGVPFHLGTKQVCIAWSSSSCHDGKAWLHVCVTGHNENATASFIYDGRLVDSIGSWSKNILRTQESECVCINGTCTVVMTDGSASGRADTKILFIEEGKIVHISPLSGSAQHVEECSCYPRYPGVRCVCRDNWKGSNRPIVDINVKDFSIVSSYVCSGLVGDTPRKNDSSSSSHCLNPNNEEGGHGVKGWAFDDGNDVWMGRTISEKLRSGYETFKVIGGWSKPNSKLQINRQVIVDRGNRSGYSGIFSVEGKSCINRCFYVELIRGRKQETEVWWTSNSIVVFCGTSGTYGTGSWPDGADINLMPI

SEQ ID NO: 22213 - protein, 469 aa, synthetic construct
  REGION 1..469: note = neuraminidase__InfluenzaA__AFJ74410
MNPNQKIITIGSVSLTIATICFLMQIAILVMTVTLHFKQYECNSPPNNQVMLCEPTIIERNITEIVYLTNTTIEKEICPKLAEYRNWSKPQCKITGFAPFSKDNSIRLSAGGDIWVTREPYVSCDPGKCYQFALGQGTTLNNRHSNDTVHDRTPYRTLLMNELGVPFHLGTKQVCIAWSSSSCHDGKAWLHVCVTGHNENATASFIYDGRLVDSIGSWSKNILRTQESECVCINGTCTVVMTDGSASGRADTKILFIEEGKIVHISPLSGSAQHVEECSCYPRYPGVRCVCRDNWKGSNRPIVDINVKDYSIISSYVCSGLVGDTPRKNDSSSSSHCLNPNNEEGGHGVKGWAFDDGNDVWMGRTISEKLRSGYETFKVIGGWSKPNSKLQINRQVIVDRGNRSGYSGIFSVEGKSCINRCFYVELIRGRKQETEVWWTSNSIVVFCGTSGTYGTGSWPDGADINLMPI

SEQ ID NO: 22214 - protein, 469 aa, synthetic construct; identical to SEQ ID NO: 14315
  REGION 1..469: note = neuraminidase__InfluenzaA__AFJ74451

SEQ ID NO: 22215 - protein, 470 aa, synthetic construct
  REGION 1..470: note = neuraminidase__InfluenzaA__AFJ74462
MNPNQKIITIGSISVAIGIISLILQIGNIISIWASHSIQTGSQNYTGICNQRIITYENSTWVNQTYVNINNTNVVAGKDKTSMTLAGNSSLCPIRGWAIYTKDNSIRIGSKGDVFVIREPFISCSHLECRTFFLTQGALLNDKHSNGTVKDRSPYRALMSCPLGEAPSPYNSRFESVAWSASACHDGLGWLTIGISGPDNGAVAVLKYNGIITETIKSWKKQILRTQESECVCVNGSCFTIMTDGPSNRAASYRIFKIEKGRVTKSIELDAPNYHYEECSCYPDTGTVMCVCRDNWHGSNRPWVSFNQNLDYQIGYICSGVFGDNPRPKDGEGSCNPVTVDGADGVKGFSYRYGNGVWIGRTKSNRLRKGFEMIWDPNGWTDTDSDFSMKQDVVAMTDWSGYSGSFVQHPELTGLDCMRPCFWVELVRGLPRENTTIWTSGSSISFCGVNSETANWSWPDGAELPFTIDK

SEQ ID NO: 22216 - protein, 469 aa, synthetic construct
  REGION 1..469: note = neuraminidase__InfluenzaA__AFJ74517
MNPNQKIITIGSVSLTIATICFLMQIAILVTTVTLHFKQYECNSPPNNQVMLCEPTIIERNITEIVYMTNTTIEKEICPKLAEYRNWSKPQCKITGFAPFSKDNSIRLSAGGDIWVTREPYVSCDPDKCYQFALGQGTTLNNRHSNDTVHDRTPYRTLLMNELGVPFHLGTKQVCIAWSSSSCHDGKAWLHVCVTGHDENATASFIYDGRLVDSIGSWSKKILRTQESECVCINGTCTVVMTDGSASGRADTKILFIEEGKIVHISQLSGSAQHVEECSCYPRYPGVRCVCRDNWKGSNRPIVDINVKDYSIVSSYVCSGLVGDTPRKNDSSSSSHCLNPNNEEGGHGVKGWAFDDGNDVWMGRTISEKLRSGYETFKVIEGWSKPNSKLQINRQVIVDRGNRSGYSGIFSVEGKSCINRCFYVELIRGRKQENEVWWTSNSIVVFCGTSGTYGTGSWPDGADINLMPI

SEQ ID NO: 22217 - protein, 469 aa, synthetic construct
  REGION 1..469: note = neuraminidase__InfluenzaA__AFJ74564
MNPNQKIITIGSVSLTIATICFLMQIAILVTTVTLHFKQYECNSPPNNQVMLCEPTIIERNITEIVYLTNTTTEKEICPKLAEYRNWSKPQCNITGFAPFSKDNSIRLSAGGDIWVTREPYVSCDPDKCYQFALGQGTTLNNGHSNDTVHDRTPYRTLLMNELGVPFHLGTRQVCIAWSSSSCHDGKAWLHVCVTGDDENATASFIYNGRLVDSIGSWSKKILRTQESECVCINGTCTVVMTDGSASGKADTKILFIEEGKIVHISTLSGSAQHVEECSCYPRYPGVRCVCRDNWKGSNRPIVDINVKDYSIVSSYVCSGLVGDTPRKNDSFSSSHCLDPNNEEGGHGVKGWAFDDGNDVWMGRTISETLRSGYETFKVIEGWSKPNSKLQINRQVIVERGNRSGYSGIFSVEGKSCINRCFYVELIRGRKEETEVWWTSNSIVVFCGTSGTYGTGSWPDGADINLMPI

SEQ ID NO: 22218 - protein, 470 aa, synthetic construct
  REGION 1..470: note = neuraminidase__InfluenzaA__AFJ74639
MNPNQKIITIGSISIAIGIISLMLQIGNIISIWASHSIQTGSQNHTGICNQRIITYENNTWVNHTYVNINNTNVVAGKDKTSVTLAGNSSLCSISGWAIYTKDNSIRIGSKGDVFVIREPFISCSHLECRTFFLTQGALLNDKHSNGTVKDRSPYRALMSCPLGEAPSPYNSKFESVAWSASACHDGMGWLTIGISGPDNGAVAVLKYNGIITETIKSWKKRILRTQESECVCMNGSCFTIMTDGPSNGAASYKIFKIEKGKVTKSIELNAPSFHYEECSCYPDTGTVMCVCRDNWHGSNRPWVSFNQNLDYQIGYICSGVFGDNPRPKDGEGSCNPVTVDGADGVKGFSYKYGNGVWIGRTKSNRLRKGFEMIWDPNGWTNTDSDFSVKQDVVAITDWSGYSGSFVQHPELTGLDCIRPCFWVELVRGLPRENTTIWTSGSSISFCGVNSDTANWSWPDGAELPFTIDK

SEQ ID NO: 22219 - protein, 469 aa, synthetic construct
  REGION 1..469: note = neuraminidase__InfluenzaA__AFJ74640
MNPNQKIITIGSVSLTISTICFFMQIAILITTVTLHFKQYEFNSPPNNQVMLCEPTIIERNITEIVYLTNTTIEKEICPKLAGYRNWSKPQCNITGFAPFSKDNSIRLSAGGDIWVTREPYVSCDPDKCYQFALGQGTTLNNVHSNDTVHDRTPYRTLLMNELGVPFHLGTKQVCIAWSSSSCHDGKAWLHVCVTGDDENATASFIYNGRLVDSIVSWSKKILRTQESECVCINGTCTVVMTDGSASGKADTKILFIEEGKIVHTSTLSGSAQHVEECSCYPRYPGVRCVCRDNWKGSNRPIVDINIKDYSIVSSYVCSGLVGDTPRKNDSSSSSHCLDPNNEEGGHGVKGWAFDDGNDVWMGRTISEKLRSGYETFKVIEGWSNPNSKLQINRQVIVDKGNRSGYSGIFSVEGKSCINRCFYVELIRGRKQETEVLWTSNSIVVFCGTSGTYGTGSWPDGADINLMPI

SEQ ID NO: 22220 - protein, 470 aa, synthetic construct; identical to SEQ ID NO: 22218
  REGION 1..470: note = neuraminidase__InfluenzaA__AFJ74659

SEQ ID NO: 22221 - protein, 470 aa, synthetic construct
  REGION 1..470: note = neuraminidase__InfluenzaA__AFJ74679
MNPNQKIITIGSISIAIGIISLMLQIGNIISIWASHSIQTGSQNHTGICNQRIITYENNTWVNHTYVNINNTNVVAGKDKTSVTLAGNSSLCSISGWAIYTKDNSIRIGSKGDVFVIREPFISCSHLECRTFFLTQGALLNDKHSNGTVKDRSPYRALMSCPLGEAPSPYNSKFESVAWSASACHDGMGWLTIGISGPDNGAVAVLKYNGIITETIKSWKKRILRTQESECVCMNGSCFTIMTDGPSNGAASYKIFKIEKGKVTKSIELNAPSFHYEECSCYPDTGTVMCVCRDNWHGSNRPWVSFNQNLDYQIGYICSGVFGDNPRPKDGEGSCNPVTVDGADGVKGFSYKYDNGVWIGRTKSNRLRKGFEMIWDPNGWTNTDSDFSVKQDVVAITDWSGYSGSFVQHPELTGLDCIRPCFWVELVRGLPRENTTIWTSGSSISFCGVNSDTANWSWPDGAELPFTIDK

SEQ ID NO: 22222 - protein, 469 aa, synthetic construct
  REGION 1..469: note = neuraminidase__InfluenzaA__AFJ74680
MNPNQKIITIGSVSLTISTICFFMQIAILITTVTLHFKQYEFNSPPNNQVILCEPTIIERNITEIVYLTNTTIEKEICPKLAEYRNWSKPQCNITGFAPFSKDNSIRLSAGGDIWVTREPYVSCDPDKCYQFALGQGTTLNNVHSNDTVHDRTPYRTLLMNELGVPFHLGTKQVCIAWSSSSCHDGKAWLHVCVTGDDENATASFIYNGRLVDSIVSWSKKILRTQESECVCINGTCTVVMTDGSASGKADTKILFIKEGKIVHTSTLSGSAQHVEECSCYPRYPGVRCVCRDNWKGSNRPIVDINIKDYSIVSSYVCSGLVGDTPRKNDSSSSSHCLDPNNEEGGHGVKGWAFDDGNDVWMGRTISEKLRSGYETFKVIEGWSNPNSKLQINRQVIVDRGNRSGYSGIFSVEGKSCINRCFYVELIRGRKQETEVLWTSNSIVVFCGTSGTYGTGSWPDGADINLMPI

SEQ ID NO: 22223 - protein, 469 aa, synthetic construct
  REGION 1..469: note = neuraminidase__InfluenzaA__AFJ74701
MNPNQKIITIGSVSLTIATICFLMQIAILVTTVTLHFNQYECNSPPNNQVMLCEPTIIERNITEIVYLTNTTIEKEICPKLAEYRIWSKPQCNITGFAPFSKDNSIRLSAGGDIWVTREPYVSCDPDKCYQFALGQGTTLNNGHSNDTVHDRTPYRTLLMNELGVPFHLGTRQVCMAWSSSSCHDGKAWLHVCVTGDDENATASFIYNGRLVDSIGSWSKKILRTQESECVCINGTCTVVMTDGSASGKADTKILFIEEGKIVHISTLSGSAQHVEECSCYPRYPGVRCVCRDNWKGSNRPIVDINVKDYSIVSSYVCSGLVGDTPRKNDSFSSSHCLDPNNEEGGHGVKGWAFDDGNDVWMGRTISEKLRSGYETFKVIEGWSKPNSKLQVNRQVIVERGNRSGYSGIFSVEGKSCINRCFYVELIRGRKEETEVWWTSNSIVVFCGTSGTYGTGSWPDGADINLMPI

SEQ ID NO: 22224 - protein, 469 aa, synthetic construct
  REGION 1..469: note = neuraminidase__InfluenzaA__AFJ74731
MNPNQKIITIGSVSLTISTICFFMQIAILITTVTLHFKQYEFNSPPNNQVMLCEPTIIERNITEIVYLTNTTIEKEICPKLAEYRNWSKPQCNITGFAPFSKDNSIRLSAGGDIWVTREPYVSCDPDKCYQFALGQGTTLNNVHSNDTVHDRTPYRTLLMNELGVPFHLGTKQVCIAWSSSSCHDGKAWLHVCVTGDDENATASFIYNGRLVDSIVSWSKKILRTQESECVCINGTCTVVMTDGSASGKADTKILFIEEGKIVHTSTLSGSAQHVEECSCYPRYPGVRCVCRDNWKGSNRPIVDINIKDYSIVSSYVCSGLVGDTPRKTDSSSSSHCLDPNNEEGGHGVKGWAFDDGNDVWMGRTISEKLRSGYETFKVIEGWSNPNSKLQINRQVIVDRGNRSGYSGIFSVEGKSCINRCFYVELIRGRNQETEVLWTSNSIVVFCGTSGTYGTGSWPDGAEINLMPI

SEQ ID NO: 22225 - protein, 470 aa, synthetic construct; identical to SEQ ID NO: 22218
  REGION 1..470: note = neuraminidase__InfluenzaA__AFJ74766

SEQ ID NO: 22226 - protein, 469 aa, synthetic construct
  REGION 1..469: note = neuraminidase__InfluenzaA__AFJ74767
MNPNQKIITIGSVSLTISTICFFMQIAILITTVTLHFKQYEFNSPPNNQVMLCEPTIIERNITEIVYLTNTTIEKEICPKLAEYRNWSKPQCNITGFAPFSKDNSIRLSAGGDIWVTREPYVSCDPDKCYQFALGQGTTLNNVHSNDTVHDRTPYRTLLMNELGVPFHLGTKQVCIAWSSSSCHDGKAWLHVCVTGDDENATASFIYNGRLVDSIVSWSKKILRTQESECVCINGTCTVVMTDGSASGKADTKILFIEEGKIVHTSTLSGSAQHVEECSCYPRYPGVRCVCRDNWKGSNRPIVDINIKDYSIVSSYVCSGLVGDTPRKNDSSSSSHCLDPNNEEGGHGVKGWAFDDGNDVWMGRTISEKLRSGYETFKVIEGWSNPNSKLQINRQVIVDRGNRSGYSGIFSVEGKSCINRCFYVELIRGRNQETEVLWTSNSIVVFCGTSGTYGTGSWPDGADINLMPI

SEQ ID NO: 22227 - protein, 469 aa, synthetic construct; identical to SEQ ID NO: 22226
  REGION 1..469: note = neuraminidase__InfluenzaA__AFJ74783

SEQ ID NO: 22228 - protein, 469 aa, synthetic construct; identical to SEQ ID NO: 14145
  REGION 1..469: note = neuraminidase__InfluenzaA__AFJ74807

SEQ ID NO: 22229 - protein, 469 aa, synthetic construct; identical to SEQ ID NO: 14145
  REGION 1..469: note = neuraminidase__InfluenzaA__AFJ74822

SEQ ID NO: 22230 - protein, 469 aa, synthetic construct; identical to SEQ ID NO: 14714
  REGION 1..469: note = neuraminidase__InfluenzaA__AFJ74834

SEQ ID NO: 22231 - protein, 469 aa, synthetic construct; identical to SEQ ID NO: 14145
  REGION 1..469: note = neuraminidase__InfluenzaA__AFJ74845

SEQ ID NO: 22232 - protein, 470 aa, synthetic construct
  REGION 1..470: note = neuraminidase__InfluenzaA__AFJ75039
MNPNQKIITIGSISIAIGIISLMLQIGNIISIWASHSIQTGSQNHTGICNQRIITYENSTWVNNTYVNINNTSVVAEKDKTSVTLAGNSSLCSISGWAIYTKDNSIRIGSKGDVFVIREPFISCSHLECRTFFLTQGALLNDKHSNGTVKDRSPYRALMSCPLGEAPSPYNSKFESVAWSASACHDGMGWLTIGISGPDNGAVAVLKYNGIITETIKSWKKRILRTQESECVCMNGSCFTIMTDGPSNGGASYKIFKIEKGKVTKSIELNAPNFHYEECSCYPDTGTVMCVCRDNWHGSNRPWVSFNQNLDYQIGYICSGVFGDNPRPKDGEGSCNPVTIDGADGVKGFSYKYGNGVWIGRTKSNRLRKGFEMIWDPNGWTNTDSDFSVKQDVVAITDWSGYSGSFVQHPELTGLDCIRPCFWVELVRGLPRENTTIWTSGSSISFCGVNSDTANWSWPDGAELPFTIDK

SEQ ID NO: 22233 - protein, 469 aa, synthetic construct
  REGION 1..469: note = neuraminidase__InfluenzaA__AFJ75050
MNPNQKIITIGSVSLTISTICFFMQIAILITTVTLHFKQYEFNSPPNNQVMLCEPTIIERNITEIVYLTNTTIEKEICPKLAEYRNWSKPQCNITGFAPFSKDNSVRLSAGGDIWVTREPYVSCDPDKCYQFALGQGTTLNNVHSNDTVHDRTPYRTLLMNELGVPFHLGTKQVCIAWSSSSCHDGKAWLHVCVTGDDKNATASFIYNGRLVDSIVSWSKEILRTQESECVCINGTCTVVMTDGSASGKADTKILFIVEGKIVHTSALSGSAQHVEECSCYPRYPGVRCVCRDNWKGSNRPIVDINIKDYSIVSSYVCSGLVGDTPRKNDSSSSSHCLDPNNEEGGHGVKGWAFDDGNDVWMGRTISEKLRSGYETFKVIEGWSNPNSKLQINRQVIVDRGNRSGYSGIFSVEGKSCINRCFYVELIRGRKEETEVLWTSNSIVVFCGTSGTYGTGSWPDGADINLMPI

SEQ ID NO: 22234 - protein, 469 aa, synthetic construct
  REGION 1..469: note = neuraminidase__InfluenzaA__AFJ75094
MNPNQKIITIGSVSLTISTICFFMQIAILITTVTLHFKQYEFNSPPNNQVMLCEPTIIEKNITEIVYLTNTTIEKEICPKLAEYRNWSKPQCDITGFAPFSKDNSIRLSAGGDIWVTREPYVSCDPDKCYQFALGQGTTLNNVHSNDTVRDRTPYRTLLMNELGVPFHLGTKQVCIAWSSSSCHDGKAWLHVCITGDDKNATASFIYNGRLVDSIVSWSKEILRTQESECVCINGTCTVVMTDGSASGKADTKILFIEEGKIVHTSTLSGSAQHVEECSCYPRYPGVRCVCRDNWKGSNRPIVDINIKDHSIVSSYVCSGLVGDTPRKNDSSSSSNCLDPNNEEGGHGVKGWAFDDGNDVWMGRTISEKSRLGYETFKVIEGWSNPNSKLQINRQVIVDRGNRSGYSGIFSVEGKSCINRCFYVELIRGRKEEIEVLWTSNSIVVFCGTSGTYGTGSWPDGADINIMPI

SEQ ID NO: 22235 - protein, 470 aa, synthetic construct
  REGION 1..470: note = neuraminidase__InfluenzaA__AFJ75104
MNPNQKIITIGSISIAIGIISLMLQIGNIISIWASHSIQTGSQNHTGICNQRIITYENSTWVNHTYVNINNTNVVAGKDKTPVTLAGNSSLCSISGWAIHTKDNSIRIGSKGDVFVIREPFISCSHLECKTFFLTQGALLNDKHSNGTVKDRSPYRALMSCPLGEAPSPYNSKFESVAWSASACHDGIGWLTIGISGPDNGAVAVLKYNGIITGTIKSWKKQILRTQESECVCMNGSCFTIMTDGPSNGAASYKIFKIEKGKVTKSMELNAPNFHYEECSCYPDTGTVMCVCRDNWHGSNRPWVSFNQNLDYQIGYICSGVFGDNPRPEDGEGSCNPVTVDGANGVKGFSYKYGNGVWIGRTKSNRIRKGFEMIWDPNGWTNTDSDFSVKQDIVAITDWSGYSGSFVQHPELTGLDCIRPCFWVELVRGLPRENTTIWTSGSSISFCGVNSDIANWSWPDGAELPFTIDK

SEQ ID NO: 22236 - protein, 469 aa, synthetic construct; identical to SEQ ID NO: 15884
  REGION 1..469: note = neuraminidase__InfluenzaA__AFJ75114

SEQ ID NO: 22237 - protein, 469 aa, synthetic construct; identical to SEQ ID NO: 15884
  REGION 1..469: note = neuraminidase__InfluenzaA__AFJ75452

SEQ ID NO: 22238 - protein, 469 aa, synthetic construct; identical to SEQ ID NO: 15884
  REGION 1..469: note = neuraminidase__InfluenzaA__AFJ75463

SEQ ID NO: 22239 - protein, 470 aa, synthetic construct; identical to SEQ ID NO: 22235
  REGION 1..470: note = neuraminidase__InfluenzaA__AFJ75552

SEQ ID NO: 22240 - protein, 470 aa, synthetic construct
  REGION 1..470: note = neuraminidase__InfluenzaA__AFJ75574
MNPNQKIITIGSISIAIGIISLMLQIGNIISIWASHSIQTGSQNHTGICNQRIITYENSTWVNHTYVNINNTNVVAGKDKTPVTLAGNSSLCSISGWAIHTKDNSIRIGSKGDVFVIREPFISCSHLECKTFFLTQGALLNDKHSNGTVKDRSPYRALMSCPLGEAPSPYNSKFESVAWSASACHDGIGWLTIGISGPDNGAVAVLKYNGIITGTIKSWKGQILRTQESECVCMNGSCFTIMTDGPSNGAASYKIFKIEKGKVTKSMELNAPNFHYEECSCYPDTGTVMCVCRDNWHGSNRPWVSFNQNLDYQIGYICSGVFGDNPRPEDGEGSCNPVTVDGANGVKGFSYKYGNGVWIGRTKSNRIRKGFEMIWDPNGWTNTDSDFSVKQDIVAITDWSGYSGSFVQHPELTGLDCIRPCFWVELVRGLPRENTTIWTSGSSISFCGVNSDIANWSWPDGAELPFTIDK

SEQ ID NO: 22241 - protein, 469 aa, synthetic construct; identical to SEQ ID NO: 15884
  REGION 1..469: note = neuraminidase__InfluenzaA__AFJ75585

SEQ ID NO: 22242 - protein, 469 aa, synthetic construct
  REGION 1..469: note = neuraminidase__InfluenzaA__AFJ75596
MNPNQKIITIGSVSLTISTICFFMQTAILITTVTLHFKQYEFNSPPNNQVMLCEPTIIERNITEIVYLTNTTIEKEICPKLAEYRNWSKPQCGITGFAPFSKDNSIRLSAGGDIWVTREPYVSCDPDKCYQFALGQGTTLNNVHSNNTVRDRTPYRTLLMNELGVPFHLGTKQVCIAWSSSSCHDGKAWLHVCITGDDKNATASFIYNGRLVDSIVSWSKEILRTQESECVCINGTCTVVMTDGSASGKADTKILFIEEGKIVHTSTLSGSAQHVEECSCYPRYPGVRCVCRDNWKGSNRPIVDINIKDHSIVSSYVCSGLVGDTPRKNDSSSSSHCLDPNNEEGGHGVKGWAFDDGNDVWMGRTISEKSRLGYETFKVIEGWSNPKSKLQINRQVIVDRGNRSGYSGIFSVEGKSCINRCFYVELIRGRKEETEVLWTSNSIVVFCGTSGTYGTGSWPDGADINLMPI

SEQ ID NO: 22243 - protein, 469 aa, synthetic construct
  REGION 1..469: note = neuraminidase__InfluenzaA__AFJ75607
MNPTQKIITIGSVSLTISTICFFMQTAILITTVTLHFKQYEFNSPPNNQVMLCEPTIIERNITEIVYLTNTTIEKEICPKLAEYRNWSKPQCDITGFAPFSKDNSIRLSAGGDIWVTREPYVSCDPEKCYQFALGQGTTLNNVHSNNTVRDRTPYRTLLMNELGVPFHLGTKQVCIAWSSSSCHDGKAWLHVCITGDDKNATASFIYNGRLVDSIVSWSKEILRTQESECVCINGTCTVVMTDGSASGKADTKILFIEEGKIVHTSKLSGSAQHVEECSCYPRYPGVRCVCRDNWKGSNRPIVDINIKDHSIVSSYVCSGLVGDTPRKNDSSGSSHCLDPNNEEGGHGVKGWAFDDGNDVWMGRTISEKSRLGYETFKVIEGWSNPKSKLQINRQVIVDRGNRSGYSGIFSVEGKSCINRCFYVELIRGRKEETEVLWTSNSIVVFCGTSGTYGTGSWPDGADINLMPI

SEQ ID NO: 22244 - protein, 469 aa, synthetic construct
  REGION 1..469: note = neuraminidase__InfluenzaA__AFJ75633
MNPNQKIITIGSVSLTISTICFFMQIAILITTVTLHFKQYEFNSPPNNQVMLCEPTIIERNITEIVYLTNTTIEKEICPKLAEYRNWSKPQCDITGFAPFSKDNSIRLSAGGDIWVTREPYVSCDPDKCYQFALGQGTTLNNVHSNDTVRDRTPYRTLLMNELGVPFHLGTKQVCIAWSSSSCHDGKAWLHVCITGDDKNATASFIYNGRLVDSVVSWSKDILRTQESECVCINGTCTVVMTDGSASGKADTKILFIEEGKIVHTSTLSGSAQHVEECSCYPRYPGVRCVCRDNWKGSNRPIVDINIKNHSIVSSYVCSGLVGDTPRKNDSSSSSHCLDPNNEEGGHGVKGWAFDDGNDVWMGRTISEKSRLGYETFKVIEGWSNPKSKLQINRQVIVDRGNRSGYSGIFSVEGKSCINRCFYVELIRGRKEETEVLWTSNSIVVFCGTSGTYGTGSWPDGADINLMPI

SEQ ID NO: 22245 - protein, 470 aa, synthetic construct; identical to SEQ ID NO: 17461
  REGION 1..470: note = neuraminidase__InfluenzaA__AFJ75654

SEQ ID NO: 22246 - protein, 469 aa, synthetic construct; identical to SEQ ID NO: 15884
  REGION 1..469: note = neuraminidase__InfluenzaA__AFJ75665

SEQ ID NO: 22247 - protein, 470 aa, synthetic construct
  REGION 1..470: note = neuraminidase__InfluenzaA__AFJ75676
MNPNQKIITIGSISIAIGIISLMLQIGNIISIWASHSIQTGSQNHTGICNQRIITYENSTWVNHTYVNINNTNVVAGKDKTPVTLAGNSSLCSISGWAIHTKDNSIRIGSKGDVFVIREPFISCSHLECKTFFLTQGALLNDKHSNGTVKDRSPYRALMSCPLGEAPSPYNSKFESVAWSASACHDGIGWLTIGISGPDNGAVAVLKYNGIITGTIKSWKKQILRTQESECVCMNGSCFTIMTDGPSNGAASYKIFKIEKGKVTKSMELNAPNFHYEECSCYPDTGTVMCVCRDNWHGSNRPWVSFNQNLDYQIGYICSGVFGDNPRPKDGEGSCNPVTVDGANGVKGFSYKYGNGVWIGRTKSNRIRKGFEMIWDPNGWTNTDSDFSVKQDIVAITDWSGYSGSFVQHPELTGLDCIRPCFWVELVRGLPRENTTIWTSGSSISFCGVNSDIANWSWPDGAELPFTIDK

SEQ ID NO: 22248 - protein, 470 aa, synthetic construct; identical to SEQ ID NO: 17461
  REGION 1..470: note = neuraminidase__InfluenzaA__AFJ75687

SEQ ID NO: 22249 - protein, 469 aa, synthetic construct; identical to SEQ ID NO: 16738
  REGION 1..469: note = neuraminidase__InfluenzaA__AFJ76122

SEQ ID NO: 22250 - protein, 469 aa, synthetic construct; identical to SEQ ID NO: 21316
  REGION 1..469: note = neuraminidase__InfluenzaA__AFJ76134

SEQ ID NO: 22251 - protein, 469 aa, synthetic construct; identical to SEQ ID NO: 16738
  REGION 1..469: note = neuraminidase__InfluenzaA__AFJ76146

SEQ ID NO: 22252 - protein, 469 aa, synthetic construct; identical to SEQ ID NO: 16738
  REGION 1..469: note = neuraminidase__InfluenzaA__AFJ76159

SEQ ID NO: 22253 - protein, 469 aa, synthetic construct; identical to SEQ ID NO: 16738
  REGION 1..469: note = neuraminidase__InfluenzaA__AFJ76173

SEQ ID NO: 22254 - protein, 469 aa, synthetic construct; identical to SEQ ID NO: 16738
  REGION 1..469: note = neuraminidase__InfluenzaA__AFJ76191

SEQ ID NO: 22255 - protein, 470 aa, synthetic construct
  REGION 1..470: note = neuraminidase__InfluenzaA__AFJ76192
MNPNQKIITIGSISIAIGIISLMVQIGNIISIWASHSIQTGIQNNTGICNQRIITYENSTWVNHTYVNINNTNVVAGEDKTSVTLAGNSSLCSISGWAIYTKDNSIRIGSKGDVFVIREPFISCSHLECRTFFLTQGALLNDKHSNGTVKDRSPYRALMSCPLGEAPSPYNSKFESVAWSASACHDGMGWLTIGISGPDNGAVAVLKYNGIITGTIKSWKKQILRTQESECVCMNGSCFTIMTDGPSNKAASYKIFKIEKGKVTKSIELNAPNFYYEECSCYPDTGIVMCVCRDNWHGSNRPWVSFNQNLDYQIGYICSGVFGDNPRPEDGEGSCNPVTVDGANGVKGFSYKYGNGVWIGRTKSNRLRKGFEMIWDPNGWTNTDSDFSVKQDVVAITDWSGYSGSFVQHPELTGLDCIRPCFWVELVRGLPRENTTIWTSGSSISFCGVNSDTANWSWPDGAELPFTIDK

SEQ ID NO: 22256 - protein, 469 aa, synthetic construct; identical to SEQ ID NO: 16738
  REGION 1..469: note = neuraminidase__InfluenzaA__AFJ76206

SEQ ID NO: 22257 - protein, 469 aa, synthetic construct
  REGION 1..469: note = neuraminidase__InfluenzaA__AFJ76216
MNPNQKIITIGSVSLTIATICFLMQIAILVTTVTLHFKQHECNSPPNNQVMLCEPTIIKRNITEIVYLTNTTIEKEICPKLAEYRNWSKPQCNITGFAPFSKDNSIRLSAGGDIWVTREPYVSCDPDKCYQFALGQGTTLNNGHSNDTVHDRTPYRTLLMNELGVPFHLGTRQVCIAWSSSSCHDGKAWLHVCVTGDDKNATASFIYNGRLVDSIGSWSKKILRTQESECVCINGTCTVVMTDGSASGKADTKILFIEEGKIVHISTLSGSAQHVEECSCYPRYPGVRCVCRDNWKGSNRPIVDINVKDYSIVSSYVCSGLVGDTPRKNDSFSSSHCLDPNNEEGGHGVKGWAFDDGNDVWMGRTISEKLRSGYETFKVIEGWSKPNSKLQINRQVIVERGNRSGYSGIFSVEGKSCINRCFYVELIRGRKEETEVWWTSNSIVVFCGTSGTYGTGSWPDGADINLMPI

SEQ ID NO: 22258 - protein, 469 aa, synthetic construct
  REGION 1..469: note = neuraminidase__InfluenzaA__AFJ77411
MNPNQKIITIGSVSLTIATICFLMQIVILVTTVTLHFKQYECNSPPNNQVMLCEPTIIERNITEIVYLTNTTIEKEICPKLAEYRNWSKPQCKITGFAPFSKDNSIRLSAGGDIWVTREPYVSCDPGKCYQFALGQGTTLNNRHSNDTVHDRTPYRTLLMNELGVPFHLGTKQVCIAWSSSSCHDGKAWLHVCVTGHDENATASFIYDGRLVDSIGSWSKNILRTQESECVCINGTCTVVMTDGSASERADTKILFIEEGKIVHISPLSGSAQHVEECSCYPRYPGVRCVCRDNWKGSNRPIVDINVKDYSIVSSYVCSGLVGDTPRKNDSSSSSYCLNPNNEEGGHGVKGWAFDDGNDVWMGRTISEKLRSGYETFKVIGGWSKPNSKLQINRQVIVDRGNRSGYSGIFSVEGKSCVNRCFYVELIRGRKQETEVWWTSNSIVVFCGTSGTYGTGSWPDGADINLMPI

SEQ ID NO: 22259 - protein, 469 aa, synthetic construct
  REGION 1..469: note = neuraminidase__InfluenzaA__AFJ77422
MNPNQKIITIGSVSLTIATICFLMQIAILVITVTLHFKQYECNSPPNNQVMLCEPTIIERNITEIVYLTNTTIEKEICPKLAEYRNWSKPQCKITGFAPFSKDNSIRLSAGGDIWVTREPYVSCDPDKCYQFALGQGTTLNNRHSNDTVHDRTPYRTLLMNELGVPFHLGTKQVCIAWSSSSCHDGKAWLHVCVTGHDENATASFIYDGRLVDSIGSWSKKILRTQESECVCINGTCTVVMTDGSASGRADTKILFIEEGKIVHISPLSGSAQHVEECSCYPRYSGVRCVCRDNWKGSNRPIVDINVKDYSIVSSFVCSGLVGDTPRKNDSSSSSHCLNPNNEEGGHGVKGWAFDDGNDVWMGRTISEKLRSGYETFKVIGGWSKPNSKLQINRQVIVDRGNRSGYSGIFSVEGKSCINRCFYVELIRGRKQETEVWWTSNSIVVFCGTSGTYGTGSWPDGADINLMPI

SEQ ID NO: 22260 - protein, 469 aa, synthetic construct
  REGION 1..469: note = neuraminidase__InfluenzaA__AFJ77433
MNPNQKIITIGSVSLTIATICFLMQIVILVTTVTLHFKQYECNSPPNNQVMLCEPTIIERNITEIVYLTNTTIEKEICPKLAEYRNWSKPQCKITGFAPFSKDNSIRLSAGGDIWVTREPYVSCDPGKCYQFALGQGTTLNNRHSNDTVHDRTPYRTLLMNELGVPFHLGTKQVCIAWSSSSCHDGKAWLHVCVTGHDENATASFIYDGRLVDSIGSWSKNILRTQESECVCINGTCTVVMTDGSASERADTKILFIEEGKIVHISPLSGSAQHVEECSCYPRYPGVRCVCRDNWKGSNRPIVDINVKDYSIVSSYVCSGLVGDTPRKTDSSSSSDCLNPNNEEGGHGVKGWAFDDGNDVWMGRTISEKLRSGYETFKVIGGWSKPNSKLQINRQVIVDRGNRSGYSGIFSVEGKSCVNRCFYVELIRGRKQETEVWWTSNSIVVFCGTSGTYGTGSWPDGADINLMPI

SEQ ID NO: 22261 - protein, 469 aa, synthetic construct
  REGION 1..469: note = neuraminidase__InfluenzaA__AFJ77443
MNPNQKIITIGSVSLTIATICFLMQIAILVITLTLHFKQYECNSPPNNQVMLCEPTIIERNITEIVYLTNTTIEKEICPKLAEYRNWSKPQCKITGFAPFSKDNSIRLSAGGDIWVTREPYVSCDPGKCYQFALGQGTTLNNRHSNDTVHDRTPYRTLLMNELGVPFHLGTKQVCIAWSSSSCHDGKAWLHVCVTGHNENATASFIYDGRLVDSIGSWSKNILRTQESECVCINGTCTVVMTDGSASGRADTKILFIEEGKIVHISPLSGSAQHVEECSCYPRYPGVRCVCRDNWKGSNRPIVDINVKDFSIVSSYVCSGLVGDTPRKNDSSSSSHCLNPNNEEGGNGVKGWAFDDGNDVWMGRTISEKLRSGYETFKVIGGWSKPNSKLQINRQVIVDRGNRSGYSGIFSVEGKSCINRCFYVELIRGRKQETEVWWTSNSIVVFCGTSGTYGTGSWPDGADINLMPI

SEQ ID NO: 22262 - protein, 469 aa, synthetic construct
  REGION 1..469: note = neuraminidase__InfluenzaA__AFJ77465
MNPNQKIITIGSVSLTIATICFLMQIAILVTTVTLHFKQYECNPPPNNQVMLCEPTIIERNITEIVYLTNTTIEKEICPKLAEYRNWSKPQCKITGFAPFSKDNSIRLSAGGDIWVTREPYVSCDPDKCYQFALGQGTTLNNRHSNDTVHDRTPYRTLLMNELGVPFHLGTKQVCIAWSSSSCHDGKAWLHVCVTGHDENATASFIYDGRLVDSIGSWSKKILRTQESECVCINGTCTVVMTDGSASGRADTKILFIEEGKIVHISPLSGSAQHVEECSCYPRYPGVRCVCRDNWKGSNRPIVDINVKNYSIVSSYVCSGLVGDTPRKNDSSSSSHCLNPNNEEGGHGVKGWAFDDGNDVWMGRTISEKLRSGYETFKVIEGWSKPNSKLQINRQVIVDRGNRSGYSGIFSVEGKSCINRCFYVELIRGRKQETEVWWTSNSIVVFCGTSGTYGTGSWPDGADINLMPI

SEQ ID NO: 22263 - protein, 469 aa, synthetic construct
  REGION 1..469: note = neuraminidase__InfluenzaA__AFJ77476
MNPNQKIITIGSVSLTIATICFLMQIAILVTTVTLHFKQYECNSLPNNQVMLCEPTIIERNITEIVYLTNTTIEKEICPKLAEYRNWSKPQCKITGFAPFSKDNSIRLSAGGDIWVTREPYVSCDPDKCYQFALGQGTTLNNRHSNDTVHDRTPYRTLLMNELGVPFHLGTKQVCIAWSSSSCHDGKAWLHVCVTGHDENATASFIYGGRLVDSIGSWSKKILRTQESECVCINGTCTVVMTDGSASGRADTKILFIEEGKIIHISQLSGSAQHVEECSCYPRYPGVRCVCRDNWKGSNRPIVDINVKDYSIVSSYVCSGLVGDTPRKNDSSSSSHCLDPNNEEGGHGVKGWAFDDGNDVWMGRTISEKFRSGYETFKVIEGWSKPNSKLQINRQIIVDRDNRSGYSGIFSVEGKSCINRCFYVELIRGRKQETEVWWTSNSIVVFCGTSGTYGTGSWPDGADINLMPI

SEQ ID NO: 22264 - protein, 469 aa, synthetic construct; identical to SEQ ID NO: 14315
  REGION 1..469: note = neuraminidase__InfluenzaA__AFJ77487

SEQ ID NO: 22265 - protein, 469 aa, synthetic construct
  REGION 1..469: note = neuraminidase__InfluenzaA__AFJ77498
MNPNQKIITIGSVSLTIATICFLMQIAILVTTVTLHFKQYECNSPPNNQVMLCEPTIIERNITEIVYLTNTTIEKEICPKLAEYRNWSKPQCKITGFAPFSKDNSIRLSAGGDIWVTREPYVSCDPDKCYQFALGQGTTLNNRHSNDTVHDRTPYRTLLMNELGVPFHLGTKQVCIAWSSSSCHDGKAWLHVCVTGHDENATASFIYDGRLVDSIGSWSKKILRTQESECVCINGTCTVVMTDGSASGRADTKILFIEEGKIVHTSKLSGSAQHVEECSCYPRYPGVRCVCRDNWKGSNRPIVDINVKDYSIISSYVCSGLVGDTPRKNDSSSSSHCLDPNNEEGGHGVKGWAFDDGNDVWMGRTISEKSRSGYETFKVIEGWSKPNSKLQINRQVIVERGNMSGYSGIFSVEGKSCINRCFYVELIRGRKQETEVWWTSNSIVVFCGTSGTYGTGSWPDGADINLMPI

SEQ ID NO: 22266 - protein, 469 aa, synthetic construct; identical to SEQ ID NO: 14315
  REGION 1..469: note = neuraminidase__InfluenzaA__AFJ77509

SEQ ID NO: 22267 - protein, 469 aa, synthetic construct
  REGION 1..469: note = neuraminidase__InfluenzaA__AFJ77520
MNPNQKIITIGSVSLTIATICFLMQIAILVTTVTLHFKQYECNSPPNNQVMLCEPTIIERNITEIVYLTNTTIEKEICPKLAEYRNWSKPQCNITGFAPFSKDNSIRLSAGGDIWVTREPYVSCDPDKCYQFALGQGTTLNNGHSNDTVHDRTPYRTLLMNELGVPFHLGTKQVCIAWSSSSCHDGKAWLHVCVTGDDENATASFIYNGRLVDSIGSWSKKILRTQESECVCINGTCTVVMTDGSASGKADTKILFIEEGKIVHTSSLSGSAQHVEECSCYPRYPGVRCVCRDNWKGSNRPIVDINVKDYSIVSSYVCSGLVGDTPRKNDSSSSSHCLDPNNEEGGHGVKGWAFDDGNDVWMGRTISEKLRSGYETFKVIEGWSKPNSKLQINRQVIVDRGNRSGYSGIFSVEGKSCINRCFYVELIRGRKQEIEVLWTSNSIVVFCGTSGTYGTGSWPDGADINLMPI

SEQ ID NO: 22268 - protein, 469 aa, synthetic construct
  REGION 1..469: note = neuraminidase__InfluenzaA__AFJ77531
MNPNQKIITIGSVSLTITTICFLMQIAILVITVTLHFKQCECNSPPNNQVMLCEPTIIERNITEIVYLTNTTIEKEICPKLAEYRNWSKPQCKVTGFAPFSKDNSIRLSAGGDIWVTREPYVSCDPGKCYQFALGQGTTLNNRHSNDTVHDRTPYRTLLMNELGVPFHLGTKQVCIAWSSSSCHDGKAWLHVCVTGHNENATASFIYDGRLVDSIGSWSKNILRTQESECVCINGTCTVVMTDGSASGRADTKILFIEEGKIVHISPLSGSAQHVEECSCYPRYPGVRCVCRDNWKGSNRPIVDINVKDYSIVSSYVCSGLVGDTPRKNDSSSSSYCLDPNNEEGGHGVKGWAFDDGNDVWMGRTISEKLRSGYETFKVIGGWSKPNSKLQINRQVIVDRGNRSGYSGIFSVEGKSCINRCFYVELIRGRKQETEVWWTSNSIVVFCGTSGTYGTGSWPDGADINLMPI

SEQ ID NO: 22269 - protein, 469 aa, synthetic construct
  REGION 1..469: note = neuraminidase__InfluenzaA__AFJ77542
MNPNQKIITIGSVSLTISTICFLMQIAILVTTVTLHFKQYECNSPPNNQVMLCEPTIIERNITEIVYLTNTTIEKEICPKLAEYRNWSKPQCNITGFAPFSKDNSIRLSAGGDIWVTREPYVSCDPDKCYQFALGQGTTLNNGHSNDTVHDRTPYRTLLMNELGVPFHLGTKQVCIAWSSSSCHDGKAWLHVCVTGDDENATASFIYNGRLVDSIGSWSKKILRTQESECVCINGTCTVVMTDGSASGKADTKILFIEEGKIVHTSTLSGSAQHVEECSCYPRYPGVRCVCRDNWKGSNRPIVDINIKDYSIVSSYVCSGLVGDTPRKNDSSSSSHCLDPNNEEGGHGVKGWAFDDGNDVWMGRTISEKLRSGYETFKVIEGWSKPNSKLQINRQVIVDRGNRSGYSGIFSVEGKSCINRCFYVELIRGRKQETEVLWTSNSIVVFCGTSGTYGTGSWPDGADINLMPI

SEQ ID NO: 22270 - protein, 469 aa, synthetic construct; identical to SEQ ID NO: 14253
  REGION 1..469: note = neuraminidase__InfluenzaA__AFJ77553

SEQ ID NO: 22271 - protein, 469 aa, synthetic construct
  REGION 1..469: note = neuraminidase__InfluenzaA__AFJ77564
MNPNQKIITIGSVSLTIATICFLMQIAILVTTVTLHFKQYECNSPPNNQVMLCEPTIIERNITEIVYLTNTTIEKEICPKLAEYRNWSKPQCKITGFAPFSKDNSIRLSAGGDIWVTREPYVSCDPDKCYQFALGQGTTLNNRHSNDTVHDRTPYRTLLMNELGVPFHLGTKQVCIAWSSSSCHDGKAWLHVCVTGHDENATASFIYDGRLVDSIGSWSKKILRTQESECVCINGTCTVVMTDGSASGRADTKILFIEEGKIVHISQLSGSAQHVEECSCYPRYPGVRCVCRDNWKGSNRPIVDINVKDYSIVSSYVCSGLVGDTPRKNDSSSSSHCLNPNNEEGGHGVKGWAFDDGNDVWMGRTISEKLRSGYETFKVIEGWSKPNSKLQINRQVIVDRGNRSGYSGIFSVEGKSCINRCFYVELIRGRKQENEVWWTSNSIVVFCGTSGTYGTGSWPDGADINLMPI

SEQ ID NO: 22272 - protein, 442 aa, synthetic construct
  REGION 1..442: note = neuraminidase__InfluenzaA__AFJ77575
MNPNQKIITIGSVSLTIATICFLMQIAILVIERNITEIVYLTNTTIEKEICPKLAEYRNWSKPQCNITGFAPFSKDNSIRLSAGGDIWVTREPYVSCDPDKCYQFALGQGTTLNNGHSNDTVHDRTPYRTLLMNELGVPFHLGTKQVCIAWSSSSCHDGKAWLHVCVTGDDENATASFIYNGRLVDSIGSWSKKILRTQESECVCINGTCTVVMTDGSASGKADTKILFIEEGKIVHTSSLSGSAQHVEECSCYPRYPGVRCVCRDNWKGSNRPIVDINVKDYSIVSSYVCSGLVGDTPRKNDSSSSSHCLDPNNEEGGHGVKGWAFDDGNDVWMGRTISEKLRSGYETFKVIEGWSKPNSKLQINRQVIVDRGNRSGYSGIFSVEGKSCINRCFYVELIRGRKQETEVLWTSNSIVVFCGTSGTYGTGSWPDGADINLMPI

SEQ ID NO: 22273 - protein, 469 aa, synthetic construct
  REGION 1..469: note = neuraminidase__InfluenzaA__AFJ77597
MNPNQKIITIGSVSLTIATICFLMQIAILVTTVTLHFKQYECNSPPNNQVMLCEPTIIERNITEIVYLTNTTIEKEICPKLAEYRNWSKPQCNITGFAPFSKDNSIRLSAGGDIWVTREPYVSCDPDKCYQFALGQGTTLNNGHSNDTVHDRTPYRTLLMNELGVPFHLGTKQVCIAWSSSSCHDGKAWLHVCVTGDDENATASFIYNGRLVDSIGSWSKKILRTQESECVCINGTCTVVMTDGSASGKADTKILFIEEGKIVHTRPLSGSAQHVEECSCYPRYPGVRCVCRDNWKGSNRPIVDINVKDYSIVSSYVCSGLVGDTPRKNDSSSSSHCLDPNNEEGGHGVKGWAFDDGNDVWMGRTISEKLRSGYETFKVIEGWSKPNSKLQINRQVIVDRGNRSGYSGIFSVEGKSCINRCFYVELIRGRKQETEVLWTSNSIVVFCGTSGTYGTGSWPDGADINLMPI

SEQ ID NO: 22274 - protein, 469 aa, synthetic construct
  REGION 1..469: note = neuraminidase__InfluenzaA__AFJ77608
MNPNQKIITIGSVSLTIATICFLMQTAILVTTVTLHFKQYECNSPPNNQVMLCEPTIIERNMTEIVYLTNTTIEKEICPKLAEYRNWSKPQCNITGFAPFSKDNSIRLSAGGDLWVTREPYVSCDPDKCYQFALGQGTTLNNGHSNDTVHDRTPYRTLLMNELGVPFHLGTKQVCIAWSSSSCHDGKAWLHVCVTGDDENATASFIYNGRLVDSIGSWSKKILRTQESECVCINGTCTVVMTDGSASGKADTKILFIEEGKIVHTSSLSGSAQHVEECSCYPRYPGVRCVCRDNWKGSNRPIVDINVKDYSIVSSYVCSGLVGDTPRKNDSSSSSHCLDPNNEEGGHGVKGWAFDDGNDVWMGRTISEKLRSGYETFKVIEGWSKPNSKLQINRQVIVDRGNRSGYSGIFSVEGKSCINRCFYVELIRGRKQETEVLWTSNSIVVFCGTSGTYGTGSWPDGADINLMPI

SEQ ID NO: 22275 - protein, 469 aa, synthetic construct; identical to SEQ ID NO: 22273
  REGION 1..469: note = neuraminidase__InfluenzaA__AFJ77619

SEQ ID NO: 22276 - protein, 469 aa, synthetic construct; identical to SEQ ID NO: 22273
  REGION 1..469: note = neuraminidase__InfluenzaA__AFJ77630

SEQ ID NO: 22277 - protein, 469 aa, synthetic construct; identical to SEQ ID NO: 22269
  REGION 1..469: note = neuraminidase__InfluenzaA__AFJ77641

SEQ ID NO: 22278 - protein, 469 aa, synthetic construct; identical to SEQ ID NO: 22269
  REGION 1..469: note = neuraminidase__InfluenzaA__AFJ77652

SEQ ID NO: 22279 - protein, 469 aa, synthetic construct; identical to SEQ ID NO: 14040
  REGION 1..469: note = neuraminidase__InfluenzaA__AFJ77663

SEQ ID NO: 22280 - protein, 469 aa, synthetic construct; identical to SEQ ID NO: 14040
  REGION 1..469: note = neuraminidase__InfluenzaA__AFJ77674

SEQ ID NO: 22281 - protein, 469 aa, synthetic construct; identical to SEQ ID NO: 14040
  REGION 1..469: note = neuraminidase__InfluenzaA__AFJ77685

SEQ ID NO: 22282 - protein, 469 aa, synthetic construct
  REGION 1..469: note = neuraminidase__InfluenzaA__AFJ77696
MNPNQKIITIGSVSLTIATICFLMQIAILVTTVTLHFKQYECNSPPNNQVMLCEPTIIERNITEIVYLTNTTIEKEICPKLAEYRNWSKPQCNITGFAPFSKDNSIRLSAGGDIWVTREPYVSCDPDKCYQFALGQGTTLNNGHSNDTVHDRTPYRTLLMNELGVPFHLGTKQVCIAWSSSSCHDGKAWLHVCVTGDDENATASFIYNGRLVDSIGSWSKKILRTQESECVCINGTCTVVMTDGSASEKADTKILFIEEGKIVHTSLLSGSAQHVEECSCYPRYPGVRCVCRDNWKGSNRPIVDINVKDYSIVSSYVCSGLVGDTPRKNDSSSSSHCLDPNNEEGGHGVKGWAFDDGNDVWMGRTISEKLRSGYETFKVIEGWSKPNSKLQINRQVIVDRGNRSGYSGIFSVEGKSCINRCFYVELIRGRKQETEVLWTSNSIVVFCGTSGTYGTGSWPDGADINLMPI

SEQ ID NO: 22283 - protein, 469 aa, synthetic construct; identical to SEQ ID NO: 14040
  REGION 1..469: note = neuraminidase__InfluenzaA__AFJ77707

SEQ ID NO: 22284 - protein, 469 aa, synthetic construct; identical to SEQ ID NO: 14061
  REGION 1..469: note = neuraminidase__InfluenzaA__AFJ77718

SEQ ID NO: 22285 - protein, 469 aa, synthetic construct; identical to SEQ ID NO: 14061
  REGION 1..469: note = neuraminidase__InfluenzaA__AFJ77729

SEQ ID NO: 22286 - protein, 469 aa, synthetic construct
  REGION 1..469: note = neuraminidase__InfluenzaA__AFJ77740
MNPNQKIITIGSVSLTISTICFFMQIAILITTVTLHFKQYEFNSPPNNQVMLCEPTIIERNITEIVYLTNTTIEKEICPKLAEYRNWSKPQCNITGFAPFSKDNSIRLSAGGDIWVTREPYVSCDPDKCYQFALGQGTTLNNVHSNDTVHDRTPYRTLLMNELGVPFHLGTKQVCIAWSSSSCHDGKAWLHVCVTGDDENATASFIYNGRLVDSIVSWSKKILRTQESECVCINGTCIVVMTDGSASGKADTKILFIEEGKIVHTSTLSGSAQHVEECSCYPRYPGVRCVCRDNWKGSNRPIVDINIKDYSIVSSYVCSGLVGDTPRKNDSSSSSHCLDPNNEEGGHGVKGWAFDDGNDVWMGRTISEKLRSGYETFKVIEGWSNPNSKLQINRQVIVDRGNRSGYSGIFSVEGKSCINRCFYVELIRGRKQETEVLWTSNSIVVFCGTSGTYGTGSWPDGADINLMPI

SEQ ID NO: 22287 - protein, 469 aa, synthetic construct
  REGION 1..469: note = neuraminidase__InfluenzaA__AFJ77751
MNPNQKIITIGSVSLTIATICFLMQIAILVTTVTLHFKQHECNSPPNNQVMLCEPTIIERNITEIVYLTNTTIEKEICPKLAEYRNWSKPQCNITGFAPFSKDNSIRLSAGGDIWVTREPYVSCDPDKCYQFALGQGTTLNNGHSNDTVRDRTPYRTLLMNELGVPFHLGTRQVCIAWSSSSCHDGKAWLHVCVTGDDKNATASFIYNGRLVDSIGSWSKKILRTQESECVCINGTCTVVMTDGSASGKADTKILFIEEGKIVHISTLSGSAQHVEECSCYPRYPGVRCVCRDNWKGSNRPIVDINVKDYSIFSSYVCSGLVGDTPRKNDSFSSSHCLDPNNEEGGHGVKGWAFDDGNDVWMGRTISEKLRSGYETFKVIEGWSKPNSKLQINRQVIVERGNRSGYSGIFSVEGKSCINRCFYVELIRGRKEETEVWWTSNSIVVFCGTSGTYGTGSWPDGADINLMPI

SEQ ID NO: 22288 - protein, 469 aa, synthetic construct; identical to SEQ ID NO: 14145
  REGION 1..469: note = neuraminidase__InfluenzaA__AFJ77762

SEQ ID NO: 22289 - protein, 469 aa, synthetic construct; identical to SEQ ID NO: 14145
  REGION 1..469: note = neuraminidase__InfluenzaA__AFJ77773

SEQ ID NO: 22290 - protein, 469 aa, synthetic construct; identical to SEQ ID NO: 14145
  REGION 1..469: note = neuraminidase__InfluenzaA__AFJ77784

SEQ ID NO: 22291 - protein, 469 aa, synthetic construct; identical to SEQ ID NO: 14714
  REGION 1..469: note = neuraminidase__InfluenzaA__AFJ77795

SEQ ID NO: 22292 - protein, 469 aa, synthetic construct; identical to SEQ ID NO: 14714
  REGION 1..469: note = neuraminidase__InfluenzaA__AFJ77806

SEQ ID NO: 22293 - protein, 469 aa, synthetic construct; identical to SEQ ID NO: 14714
  REGION 1..469: note = neuraminidase__InfluenzaA__AFJ77817

SEQ ID NO: 22294 - protein, 469 aa, synthetic construct; identical to SEQ ID NO: 14714
  REGION 1..469: note = neuraminidase__InfluenzaA__AFJ77828

SEQ ID NO: 22295 - protein, 469 aa, synthetic construct
  REGION 1..469: note = neuraminidase__InfluenzaA__AFJ77839
MNPNQKIITIGSVSLTISTICFFMQIAILITTVTLHFKQYEFNSPPNNQVMLCEPTIIERNITEIVYLTNTTIEKEICPKLAEYRNWSKPQCDITGFAPFSKDNSIRLSAGGDIWVTREPYVSCDPDKCYQFALGQGTTLNNVHSNDTVHDRTPYRTLLMNELGVPFHLGTKQVCIAWSSSSCHDGKAWLHVCVTGDDKNATASFIYNGRLVDSIVSWSKKILRTQESECVCINGTCTVVMTDGSASGKADTKILFIEEGKIIHTSTLSGSAQHVEECSCYPRYPGVRCVCRDNWKGSNRPIVDINIKDYSIVSSYVCSGLVGDTPRKNDSSSSSHCLDPNNEEGGHGVKGWAFDDGNDVWMGRTISEKLRSGYETFKVIEGWSNPNSKLQINRQVIVDRGNRSGYSGIFSVEGKSCINRCFYVELIRGRKEETEVLWTSNSIVVFCGTSGTYGTGSWPDGADINLMPI

SEQ ID NO: 22296 - protein, 469 aa, synthetic construct
  REGION 1..469: note = neuraminidase__InfluenzaA__AFJ77850
MNPNQKIITIGSVSLTISTICFFMQIAILITTVTLHFKQYEFNSPPNNQVMLCEPTIIERNITEIVYLTNTTIEKEICPKLAKYRNWSKPQCDITGFAPFSKDNSIRLSAGGDIWVTREPYVSCDPDKCYQFALGQGTTLNNVHSNDTVHDRTPYRTLLMNELGVPFHLGTKQVCIAWSSSSCHDGKAWLHVCVTGDDKNATASFIYNGRLVDSIVSWSKKILRTQESECVCINGTCTVVMTDGSASGKADTKILFIEEGKIVHTSTLSGSAQHVEECSCYPRYPGVRCVCRDNWKGSNRPIVDINIKDYSIVSSYVCSGLVGDTPRKNDSSSSSHCLDPNNEEGGHGVKGWAFDDGNDVWMGRTISEKLRSGYETFKVIEGWSNPNSKLQINRQVIVDRGNRSGYSGIFSVEGKSCINRCFYVELIRGRKEETEVLWTSNSIVVFCGTSGTYGTGSWPDGADINLMPI

SEQ ID NO: 22297 - protein, 469 aa, synthetic construct; identical to SEQ ID NO: 14714
  REGION 1..469: note = neuraminidase__InfluenzaA__AFJ77861

SEQ ID NO: 22298 - protein, 469 aa, synthetic construct; identical to SEQ ID NO: 14714
  REGION 1..469: note = neuraminidase__InfluenzaA__AFJ77872

SEQ ID NO: 22299 - protein, 469 aa, synthetic construct; identical to SEQ ID NO: 15180
  REGION 1..469: note = neuraminidase__InfluenzaA__AFJ77883

SEQ ID NO: 22300 - protein, 469 aa, synthetic construct; identical to SEQ ID NO: 14714
  REGION 1..469: note = neuraminidase__InfluenzaA__AFJ77894

SEQ ID NO: 22301 - protein, 469 aa, synthetic construct; identical to SEQ ID NO: 14714
  REGION 1..469: note = neuraminidase__InfluenzaA__AFJ77905

SEQ ID NO: 22302 - protein, 469 aa, synthetic construct
  REGION 1..469: note = neuraminidase__InfluenzaA__AFJ77916
MNPNQKIITIGSVSLTISTICFFMQIAILITTVTLHFKQYEFNSPPNNQVMLCEPTIIERNITEIVYLTNTTIEKEICPKLAEYRNWSKPQCDITGFAPFSKDNSIRLSAGGDIWVTREPYVSCDPDKCYQFALGQGTTLNNVHSNDTVHDRTPYRTLLMNELGVPFHLGTKQVCIAWSSSSCHDGKAWLHVCVTGDDKNATASFIYNGRLVDSIVSWSKKILRTQESECVCINGTCTVVMTDGSASGKADTKILFIEEGKIVHTSTLSGSAQHVEECSCYPRYPGVRCVCRDNWKGSNRPIVDINIKDYSIVSSYVCSGLVGDTPRKNDSSSSSHCLDPNNEEGGHGVKGWAFDDGNDVWMGRTISEKLRSGYETFKVIEGWSNPNSKLQINRQVIVDRGNRSGYSGIFSVEGKSCINRCFYVELIRGRKEETEVLWTSNSIIVFCGTSGTYGTGSWPDGADINLMPI

SEQ ID NO: 22303 - protein, 469 aa, synthetic construct; identical to SEQ ID NO: 14736
  REGION 1..469: note = neuraminidase__InfluenzaA__AFJ77927

SEQ ID NO: 22304 - protein, 469 aa, synthetic construct; identical to SEQ ID NO: 14736
  REGION 1..469: note = neuraminidase__InfluenzaA__AFJ77938

SEQ ID NO: 22305 - protein, 469 aa, synthetic construct; identical to SEQ ID NO: 14714
  REGION 1..469: note = neuraminidase__InfluenzaA__AFJ77949

SEQ ID NO: 22306 - protein, 469 aa, synthetic construct; identical to SEQ ID NO: 14714
  REGION 1..469: note = neuraminidase__InfluenzaA__AFJ77960

SEQ ID NO: 22307 - protein, 469 aa, synthetic construct
  REGION 1..469: note = neuraminidase__InfluenzaA__AFJ77971
MNPNQKIITIGSVSLTISTICFFMQIAILITTVTLHFKQYEFNSPPNNQVMLCEPTIIERNITEIVYLTNTTIEKEICPKLAEYRNWSKPQCNITGFAPFSKDNSIRLSAGGDIWVTREPYVSCDPDKCYQFALGQGTTLNNVHSNDTVHDRTPYRTLLMNELGVPFHLGTKQVCIAWSSSSCHDGKAWLHVCVTGDDKNATASFIYNGRLVDSIVSWSKEILRTQESECVCINGTCTVVMTDGSASGKADTKILFIEEGKIVHTSTLSGSAQHVEECSCYPRYPGVRCVCRDNWKGSNRPIVDINIKDYSIVSSYVCSGLVGDTPRKNDSSSSSHCLDPNNEEGGHGVKGWAFDDGNDVWMGRTISEKLRSGYETFKVIEGWSNPNSKLQINRQVIVDRGNRSGYSGIFSVEGKSCINRCFYVELIRGRKDETEVLWTSNSIVVFCGTSGTYGTGSWPDGADINLMPI

SEQ ID NO: 22308 - protein, 469 aa, synthetic construct
  REGION 1..469: note = neuraminidase__InfluenzaA__AFJ77982
MNPNQKIITIGFVSLTISTICFFMQIAILITTVPLHFKQYEFNSPPNNQVMLCEPTIIERNITEIVYLTNTTIEKEICPKLAEYRNWSKPQCNITGFAPFSKDNSIRLSAGGDIWVTREPYVSCDPDKCYQFALGQGTTLNNVHSNDTVHDRTPYRTLLMNELGVPFHLGTKQVCIAWSSSSCHDGKAWLHVCVTGDDKNATASFIYNGRLVDSIVSWSKEILRTQESECVCINGTCTVVMTDGSASGKADTKILFIEEGKIVHTSTLSGSAQHVEECSCYPRYPGVRCVCRDNWKGSNRPIVDINIKDYSIVSSYVCSGIVGDTPRKNDSSSSSHCLDPNNEEGGHGVKGWAFDDGNDVWMGRTISEKLRSGYETFKVIEGWSNPNSKLQINRQVIVDRGNRSGYSGIFSVEGKSCINRCFYVELIRGRKEETEVLWTSNSIVVFCGTSGTYGTGSWPDGADINLMPI

SEQ ID NO: 22309 - protein, 469 aa, synthetic construct; identical to SEQ ID NO: 14712
  REGION 1..469: note = neuraminidase__InfluenzaA__AFJ77993

SEQ ID NO: 22310 - protein, 469 aa, synthetic construct
  REGION 1..469: note = neuraminidase__InfluenzaA__AFJ78004
MNPNQKIITIGSVSLTISTICFFMQIAILITTVTLHFKQYEFNSPPNNQVMLCEPTIIEKNITEIVYLTNTTIEKEICPKLAEYRNWSKPQCNITGFAPFSKDNSIRLSAGGDIWVTREPYVSCDPDKCYQFALGQGTTLNNVHSNDTVHDRTPYRTLLMNELGVPFHLGTKQVCIAWSSSSCHDGKAWLHVCVTGDDKNATASFIYNGRLVDSIVSWSKEILRTQESECVCINGTCTVVMTDGSASGKADTKILFIEEGKIVHTSTLSGSAQHVEECSCYPRYPGVRCVCRDNWKGSNRPIVDINIKDYSIVSSYVCSGLVGDTPRKNDSSSSSHCLDPNNEEGGHGVKGWAFDDGNDVWMGRTISEKLRSGYETFKVIEGWSNPNSKLQINRQVIVDRGNRSGYSGIFSVEGKSCINRCFYVELIRGRKEETEVLWTSNSIVVFCGTSGTYGTGSWPDGADINLMPI

SEQ ID NO: 22311 - protein, 469 aa, synthetic construct; identical to SEQ ID NO: 14712
  REGION 1..469: note = neuraminidase__InfluenzaA__AFJ78015

SEQ ID NO: 22312 - protein, 469 aa, synthetic construct; identical to SEQ ID NO: 21569
  REGION 1..469: note = neuraminidase__InfluenzaA__AFJ78026

SEQ ID NO: 22313 - protein, 469 aa, synthetic construct; identical to SEQ ID NO: 21569
  REGION 1..469: note = neuraminidase__InfluenzaA__AFJ78037

SEQ ID NO: 22314 - protein, 469 aa, synthetic construct
  REGION 1..469: note = neuraminidase__InfluenzaA__AFJ78048
MNPNQKIITIGSVSLTISTICFFMQIAILITTVTLHFKQYEFNSPPNNQVMLCEPTIIERNITEIVYLTNTTIEKEICPKLAEYRNWSKPQCNITGFAPFSKDNSIRLSAGGDIWVTREPYVSCDPDKCYQFALGQGTTLNNVHSNDTVHDRTPYRTLLMNELGVPFHLGTKQVCIAWSSSSCHDGKAWLHVCVTGDDKNATASFIYNGRLVDSIVSWSKEILRTQESECVCINGTCTVVMTDGNASGKADTKILFIEEGKIVHTSTLSGSAQHVEECSCYPRYPGVRCVCRDNWKGSNRPIVDINIKDYSIVSSYVCSGLVGDTPRKNDSSSSSHCLDPNNEEGGHGVKGWAFDDGNDVWMGRTISEKLRSGYETFKVIEGWSNPNSKLQINRQVIVDRGNRSGYSGIFSVEGKSCINRCFYVELIRGRKEETEVLWTSNSIVVFCGTSGTYGTGSWPDGADINLMPI

SEQ ID NO: 22315 - protein, 469 aa, synthetic construct
  REGION 1..469: note = neuraminidase__InfluenzaA__AFJ78059
MNPNQKIITIGSVSLTISTICFFMQIAILITTVTLHFKQYEFNPPPNNQVMLCEPTIIERNITEIVYLTNTTIEKEICPKLAEYRNWSKPQCNITGFAPFSKDNSIRLSAGGDIWVTREPYVSCDPDKCYQFALGQGTTLNNVHSNDTVHDRTPYRTLLMNELGVPFHLGTKQVCIAWSSSSCHDGKAWLHVCVTGDDKNATASFIYNGRLVDSIVSWSKEILRTQESECVCINGTCTVVMTDGSASGKADTKILFIEEGKIVHTSTLSGSAQHVEECSCYPRYPGVRCVCRDNWKGSNRPIVDINIKDYSIVSSYVCSGLVGDTPRKNDSSSSSHCLDPNNEEGGHGVKGWAFDDGNDVWMGRTISEKLRSGYETFKVIEGWSNPNSKLQINRQVIVDRGNRSGYSGIFSVEGKSCINRCFYVELIRGRKDETEVLWTSNSIVVFCGTSGTYGTGSWPDGADINLMPI

SEQ ID NO: 22316 - protein, 469 aa, synthetic construct
  REGION 1..469: note = neuraminidase__InfluenzaA__AFJ78070
MNPNQKIITIGSVSLTISTICFFMQIAILITTVTLHFKQYEFNSPPNNQVMLCEPTIIERNITEIVYLTNTTIEKEICPKLAEYRKWSKPQCNITGFAPFSKDNSIRLSAGGDIWVTREPYVSCDPDKCYQFALGQGTTLNNVHSNDTVRDRTPYRTLLMNELGVPFHLGTKQVCIAWSSSSCHDGKAWLHVCVTGDDKNATASFIYNGRLVDSIVSWSKEILRTQESECVCINGTCTVVMTDGSASGKADTKILFIEEGKIVHTSTLSGSAQHVEECSCYPRYPGVRCVCRDNWKGSNRPIVDINIKDYSIVSSYVCSGLVGDTPRKNDSSSSGHCLDPNNEEGGHGVKGWAFDDGNDVWMGRTISEKSRSGYETFKVIEGWSNPNSKLQINRQVIVDRGNRSGYSGIFSVEGKSCINRCFYVELIRGRKEETEVLWTSNSIVVFCGTSGTYGTGSWPDGADINLMPI

SEQ ID NO: 22317 - protein, 469 aa, synthetic construct
  REGION 1..469: note = neuraminidase__InfluenzaA__AFJ78081
MNPNQKIITIGSVSLTISTICFFMQIAILITTVTLHFKQYEFNSPPNNQVMLCEPTIIERNITEIVYLTNTTIEKEICPKLAEYRNWSKPQCDITGFAPFSKDNSIRLSAGGDIWVTREPYVSCDPDKCYQFALGQGTTLNNVHSNDTVRDRTPYRTLLMNELGVPFHLGTKQVCIAWSSSSCHDGKAWLHVCITGDDKNATASFIYNGRLVDSIVSWSKEILRTQESECVCINGTCTVVMTDGSASGKADTKILFIEEGKIVHTSTLSGSAQHVEECSCYPRYPGVRCVCRDNWKGSNRPIVDINIKDHSIVSSYVCSGLVGDTPRKNDNSSSSHCLDPNNEEGGHGVKGWAFDDGNDVWMGRTISEKSRLGYETFKVIEGWSNPNSKLQMNRQVIVDRGNRSGYSGIFSVEGKSCINRCFYVELIRGRKEETEVLWTSNSIVVFCGTSGTYGTGSWPDGADINLMPI

SEQ ID NO: 22318 - protein, 469 aa, synthetic construct; identical to SEQ ID NO: 22234
  REGION 1..469: note = neuraminidase__InfluenzaA__AFJ78092

SEQ ID NO: 22319 - protein, 469 aa, synthetic construct
  REGION 1..469: note = neuraminidase__InfluenzaA__AFJ78103
MNPNQKIITIGSVSLTISTICFFMQIAILITTVTLHFKQYEFNSPPNNQVMLCEPTIIERNITEIVYLTNTTIEKEICPKLAEYRNWSKPQCDITGFAPFSKDNSIRLSAGGDIWVTREPYVSCDPDKCYQFALGQGTTLNNVHSNDTVRDRTPYRTLLMNELGVPFHLGTKQVCIAWSSSSCHDGKAWLHVCITGDDKNATASFIYNGRLVDSIVSWSKEILRTQESECVCINGTCTVVMTDGSASGKADTKILFIEEGKIVHTSTLLGSAQHVEECSCYPRYPGVRCVCRDNWKGSNRPIVDINIKDHSIVSSYVCSGLVGDTPRKNDSSSSGHCLDPNNEEGGHGVKGWAFDDGNDVWMGRTISEKSRLGYETFKVIEGWSNPSSKLQINRQVIVDRGNRSGYSGIFSVEGKSCINRCFYVELIRGRKEETEVLWTSNSIVVFCGTSGTYGTGSWPDGADINLMPI

SEQ ID NO: 22320 - protein, 469 aa, synthetic construct
  REGION 1..469: note = neuraminidase__InfluenzaA__AFJ78114
MNPNQKIITIGSVSLTISTICFFMQIAILITTVTLHFKQYELNSPPNNQVMLCEPTIIERNITEIVYLTNTTIEKEICPKLAEYRNWSKPQCDITGFAPFSKDNSIRLSAGGDIWVTREPYVSCDPDKCYQFALGQGTTLNNVHSNDTVRDRTPYRTLLMNELGVPFHLGTKQVCIAWSSSSCHDGKAWLHVCITGDDKNATASFIYNGRLVDSIVSWSKEILRTQESECVCINGTCTVVMTDGSASGKADTKILFIEEGKIVHTSTLSGSAQHVEECSCYPRYPGVRCVCRDNWKGSNRPIVDINIKDHSIVSSYVCSGLVGDTPRKNDSSSSSHCLDPNNEEGGHGVKGWAFDDGNDVWMGRTISEKSRLGYETFKVIEGWSNPNSKLQINRQVIVDRSNRSGYSGIFSVEGKSCINRCFYVELIRGRKEETEVLWTSNSIVVFCGTSGTYGTGSWPDGADINLMPI

SEQ ID NO: 22321 - protein, 469 aa, synthetic construct
  REGION 1..469: note = neuraminidase__InfluenzaA__AFJ78125
MNPNQKIITIGSVSLTISTICFFMQIAILITTVTLHFKQYEFNSPPNNQVMLCEPTIIERNITEIVYLTNTTIEKEMCPKLAEYRNWSKPQCDITGFAPFSKDNSIRLSAGGDIWVTREPYVSCDPDKCYQFALGQGTTLNNVHSNDTVRDRTPYRTLLMNELGVPFHLGTKQVCIAWSSSSCHDGKAWLHVCITGDDKNATASFIYNGRLVDSIVSWSKEILRTQESECVCINGTCTVVMTDGSASGKADTKILFIEEGKIVHTSTLSGSAQHVEECSCYPRYPGVRCVCRDNWKGSNRPIVDINIKDHSIVSSYVCSGLVGDTPRKNDSSSSSHCLDPNNEEGGHGVKGWAFDDGNDVWMGRTISEKSRLGYETFKVIEGWSNPNSKLQMNRQVIVDRGNRSGYSGIFSVEGKSCINRCFYVELIRGRKEETEVLWTSNSIVVFCGTSGTYGTGSWPDGADINLMPI

SEQ ID NO: 22322 - protein, 469 aa, synthetic construct
  REGION 1..469: note = neuraminidase__InfluenzaA__AFJ78136
MNPNQKIITIGSVSLTISTICFFMQTAILITTVTLHFKQYEFNSPPNNQVMLCEPTIIERNITEIVYLTNTTIEKEICPKLAEYRNWSKPQCDITGFAPFSKDNSIRLSAGGDIWVTREPYVSCDPDKCYQFALGQGTTLNNVHSNNTVRDRTPYRTLLMNELGVPFHLGTKQVCIAWSSSSCHDGKAWLHVCITGDDKNATASFIYNGRLVDSIVSWSKEILRTQESECVCINGTCTVVMTDGSASGKADTKILFIEEGKIVHTSTLSGSAQHVEECSCYPRYPGVRCVCRDNWKGSNRPIVDINIKDHSIVSSYVCSGLVGDTPRKNDSSSSSHCLDPNNEEGGHGVKGWAFDDGNDVWMGRTISEKSRLGYETFKVIEGWSNPKSKLQINRQVIVDRGNRSGYSGIFSVEGKSCINRCFYVELIRGRKEETEVLWTSNSIVVFCGTSGTYGTGSWPDGADINLMPI

SEQ ID NO: 22323 - protein, 469 aa, synthetic construct; identical to SEQ ID NO: 22322
  REGION 1..469: note = neuraminidase__InfluenzaA__AFJ78147

SEQ ID NO: 22324 - protein, 469 aa, synthetic construct; identical to SEQ ID NO: 22322
  REGION 1..469: note = neuraminidase__InfluenzaA__AFJ78158

SEQ ID NO: 22325 - protein, 469 aa, synthetic construct; identical to SEQ ID NO: 15884
  REGION 1..469: note = neuraminidase__InfluenzaA__AFJ78169

SEQ ID NO: 22326 - protein, 469 aa, synthetic construct; identical to SEQ ID NO: 16402
  REGION 1..469: note = neuraminidase__InfluenzaA__AFJ78180

SEQ ID NO: 22327 - protein, 469 aa, synthetic construct; identical to SEQ ID NO: 15884
  REGION 1..469: note = neuraminidase__InfluenzaA__AFJ78191

SEQ ID NO: 22328 - protein, 469 aa, synthetic construct
  REGION 1..469: note = neuraminidase__InfluenzaA__AFJ78202
MNPNQKIITIGSVSLTISTICFFMQTAILITTVTLHFKQYEFNSPPNNQVMLCEPTIIERNITEIVYLINTTIEKEICPKLAEYRNWSKPQCDITGFAPFSKDNSIRLSAGGDIWVTREPYVSCDPDKCYQFALGQGTTLNNVHSNNTVRDRTPYRTLLMNELGVPFHLGTKQVCIAWSSSSCHDGKAWLHVCITGDDKNATASFIYNGRLVDSIVSWSKEILRTQESECVCINGTCTVVMTDGSASGKADTKILFIEEGKIVHTSTLSGGAQHVEECSCYPRYPGVRCVCRDNWKGSNRPIVDINIKDHSIVSSYVCSGLVGDTPRKNDSSSSSHCLDPNNEEGGHGVKGWAFDDGNDVWMGRTISEKSRLGYETFKVIEGWSNPKSKLQINRQVIVDRGNRSGYSGIFSVEGKSCINRCFYVELIRGRKEETEVLWTSNSIVVFCGTSGTYGTGSWPDGADISLMPI

SEQ ID NO: 22329 - protein, 469 aa, synthetic construct
  REGION 1..469: note = neuraminidase__InfluenzaA__AFJ78213
MNPNQKIITIGSVSLTISTICFFMQIAILITTVTLHFKQYEFNSPPNNQVMLCEPTIIERNITEIVYLTNTTIEKEICPKLAEYRNWSKPQCDITGFAPFSKDNSIRLSAGGDIWVTREPYVSCDPDKCYQFALGQGTTLNNVHSNDTVRDRTPYRTLLMNELGVPFHLGTKQVCIAWSSSSCHDGKAWLHVCITGDDKNATASFIYNGRLVDSIVSWSKEILRTQESECVCINGTCTVVMTDGSASGKADTKILFIEEGKIVHTSTLSGSAQHVEECSCYPRYPGVRCVCRDNWKGSNRPIVDINIKDHSIVSSYVCSGLVGDTPRKNDSSSSSHCLDPNNEEGGHGVKGWAFDDGNDVWMGRTISEKSRLGYETFKVIEGWSNPKSKLQINRQVIVDRGNRSGYSGIFSVEGKSCINRCFYVELIRGRKEETEVLWTSNSIVVFCGTSGTYGTGSWPDGADINLMLI

SEQ ID NO: 22330 - protein, 469 aa, synthetic construct; identical to SEQ ID NO: 15884
  REGION 1..469: note = neuraminidase__InfluenzaA__AFJ78224

SEQ ID NO: 22331 - protein, 469 aa, synthetic construct; identical to SEQ ID NO: 15884
  REGION 1..469: note = neuraminidase__InfluenzaA__AFJ78235

SEQ ID NO: 22332 - protein, 469 aa, synthetic construct
  REGION 1..469: note = neuraminidase__InfluenzaA__AFJ78246
MNPNQKIITIGSVSLTISTICFFMQIAILITTVTLHFKQYEFNSPPNNQAMLCEPTIIERNITEIVYLTNTTIEKEICPKLAEYRNWSKPQCDITGFAPFSKDNSIRLSAGGDIWVTREPYVSCDPDKCYQFALGQGTTLNNVHSNDTVRDRTPYRTLLMNELGVPFHLGTKQVCIAWSSSSCHDGKAWLHVCITGDDKNATASFIYNGRLVDSIVSWSKEILRTQESECVCINGTCTVVMTDGSASGKADTKILFIEEGKIVHTSTLSGSAQHVEECSCYPRYPGVRCVCRDNWKGSNRPIVDINIKDHSIVSSYVCSGLVGDTPRKNDSSSSSHCLDPNNEEGGHGVKGWAFDDGNDVWMGRTISEKSRLGYETFKVIEGWSNPKSKLQINRQVIVDRGNRSGYSGIFSVEGKSCINRCFYVELIRGRKEETEVLWTSNSIVVFCGTSGTYGTGSWPDGADINLMPI

SEQ ID NO: 22333 - protein, 469 aa, synthetic construct
  REGION 1..469: note = neuraminidase__InfluenzaA__AFJ78268
MNPNQKIITIGSVSLTISTICFFMQTAILITTVTLHFKQYEFNSPPNNQVMLCEPTIIERNITEIVYLTNTTIEKEICPKLAEYRNWSKPQCDITGFAPFSKDNSIRLSAGGDIWVTREPYVSCDPDKCYQFALGQGTTLNNVHSNNTVRDRTPYRTLLMNELGVPFHLGTKQVCIAWSSSSCHDGKAWLHVCITGDDKNATASFIYNGRLVDSIVSWSKEILRTQESECVCINGTCTVVMTDGSASGKADTKILFIEEGKIVHTSKLSGSAQHVEECSCYPRYPGVRCVCRDNWKGSNRPIVDINMKDHSIVSSYVCSGLVGDTPRKNDSSSSSHCLDPNNEEGGHGVKGWAFDDGNDVWMGRTISEKSRLGYETFKVIEGWSNPKSKLQINRQVIVDRGNRSGYSGIFSVEGKSCINRCFYVELIRGRKEETEVLWTSNSIVVFCGTSGTYGTGSWPDGADINLMPI

SEQ ID NO: 22334 - protein, 469 aa, synthetic construct
  REGION 1..469: note = neuraminidase__InfluenzaA__AFJ78279
MNPNQKIITIGSVSLTISTICFFMQTAILITTVTLHFKQYEFNSPPNNQVMLCEPTIIERNITEIVYLINTTIEKEICPKLAEYRNWSKPQCDITGFAPFSKDNSIRLSAGGDIWVTREPYVSCDPDKCYQFALGQGTTLNNVHSNNTVRDRTPYRTLLMNELGVPFHLGTKQVCIAWSSSSCHDGKAWLHVCITGDDKNATASFIYNGRLVDSIVSWSKEILRTQESECVCINGTCTVVMTDGSASGKADTKILFIEEGKIVHTSTLSGGAQHVEECSCYPRYPGVRCVCRDNWKGSNRPIVDINIKDHSIVSSYVCSGLVGDTPRKNDSSSSSHCLDPNNEEGGHGVKGWAFDDGNDVWMGRTISEKSRLGYETFKVIEGWSNPKSKLQINRQVIVDRGNRSGYSGIFSVEGKSCINRCFYVELIRGRKEETEVLWTSNSIVVFCGTSGTYGTGSWPDGADINLMPI

SEQ ID NO: 22335 - protein, 469 aa, synthetic construct
  REGION 1..469: note = neuraminidase__InfluenzaA__AFJ78290
MNPNQKIITIGSVSLTISTICFFMQIAILITTVTLHFKQYEFNSPPNNQVMLCEPTIIERNITEIVYLTNTTIEKEICPKLAEYRNWSKPQCDITGFAPFSKDNSIRLSAGGDIWVTREPYVSCDPDKCYQFALGQGTTLNNVHSNNTVRDRTPYRTLLMNELGVPFHLGTKQVCIAWSSSSCHDGKAWLHVCITGDDKNATASFIYNGRLVDSVVSWSKEILRTQESECVCINGTCTVVMTDGSASGKADTKILFIEEGKIVHTSALSGSAQHVEECSCYPRYPGVRCVCRDNWKGSNRPIVDINIKDHSIVSSYVCSGLVGDTPRKNDSSSSSHCLDPNNEEGGHGVKGWAFDDGNDVWMGRTISEKSRLGYETFKVIEGWSNPKSKLQINRQVIVDRGNRSGYSGIFSVEGKSCINRCFYVELIRGRKEETEVLWTSNSIVVFCGTSGTYGTGSWPDGADINLMPI

SEQ ID NO: 22336 - protein, 470 aa, synthetic construct
  REGION 1..470: note = neuraminidase__InfluenzaA__AFJ78312
MNPNQKIITIGSISIAIGIISLMLQIGNIISIWASHSIQTGSQNHTGICNQRIITYENSTWVNHTYVNINNTNVVAGKDKTSVTLAGNSSLCSISGWAIYTKDNSIRIGSKGDVFVIREPFISCSHLECRTFFLTQGALLNDKHSNGTVKDRSPYRALMSCPLGEAPSPYNSKFESVAWSASACHDGMGWLTIGISGPDNGAVAVLKYNGIITETIKSWEKRILRTQESECVCVNGSCFTIMTDGPSNGAASYKIFKIEKGKVTKSIELNAPNSHYEECSCYPDTGTVMCVCRDNWHGSNRPWVSFNQNLDYQIGYICSGVFGDNPRPKDGEGSCNPVTADGADGVKGFSYKYGNGVWIGRTKSNRLRKGFEMIWDPNGWTDTDSDFSVKQDVVAITDWSGYSGSFVQHPELTGLDCIRPCFWVELVRGRPRENTTIWTSGSSISFCGVNSDTANWSWPDGAELPFTIDK

SEQ ID NO: 22337 - protein, 469 aa, synthetic construct; identical to SEQ ID NO: 22269
  REGION 1..469: note = neuraminidase__InfluenzaA__AFJ78323

SEQ ID NO: 22338 - protein, 470 aa, synthetic construct
  REGION 1..470: note = neuraminidase__InfluenzaA__AFJ78334
MNPNQKIITIGSISIAIGIISLMLQIGNIISIWASHSIQTGSQNHTGICNQRIITYENSTWVNHTYVNINNTNVVAGKDKTSVTLAGNSSLCSISGWAIYTKDNSIRIGSKGDVFVIREPFISCSHLECRTFFLTQGALLNDKHSNGTVKDRSPYRALMSCPLGEAPSPYNSKFESVAWSASACHDGMGWLTIGISGPDNGAVAVLKYNGIITETIKSWKKQILRTQESECVCVNGSCFTIMTDGPSNGAASYKIFKIEKGKVTKSIELNAPNFHYEECSCYPDTGTVMCVCRDNWHGSNRPWVSFNQNLDYQIGYICSGVFGDNPRPKDGEGSCNPVTVDGADGVKGFSYKYGNGVWIGRTKSNRLRKGFEMIWDPNGWTDTDSDFSVKQDVVAITDWSGYSGSFVQHPELTGLDCIRPCFWVELVRGLPRENTTIWTSGSSISFCGVNSDTANWSWPDGAELPFTIDK

SEQ ID NO: 22339 - protein, 470 aa, synthetic construct; identical to SEQ ID NO: 22338
  REGION 1..470: note = neuraminidase__InfluenzaA__AFJ78345

SEQ ID NO: 22340 - protein, 470 aa, synthetic construct
  REGION 1..470: note = neuraminidase__InfluenzaA__AFJ78356
MNPNQKIITIGSISIAIGIISLMLQIGNIISIWASHSIQTGSQNHTGICNQRIITYENSTWVNHTYVNINNTNVVVGKDKTSVTLAGNSSLCSISGWAIYTKDNSIRIGSKGDVFVIREPFISCSHLECRTFFLTQGALLNDKHSNGTVKDRSPYRALMSCPLGEAPSPYNSKFESVAWSASACHDGMGWLTIGISGPDNGAVAVLKYNGIITETIKSWKKQILRTQESECVCVNGSCFTIMTDGPSNGAASYKIFKIEKGKVTKSIELNAPNFHYEECSCYPDTGTVMCICRDNWHGSNRPWVSFNQNLDYQIGYICSGVFGDNPRPKDGEGSCNPVTVDGADGVKGFSYKYGNGVWIGRTKSNRLRKGFEMIWDPNGWTDTDSDFSVKQDVVAITDWSGYSGSFVQHPELTGLDCIRPCFWVELVRGLPRENTTIWTSGSSISFCGVNSDTANWSWPDGAELPFTIDK

SEQ ID NO: 22341 - protein, 470 aa, synthetic construct
  REGION 1..470: note = neuraminidase__InfluenzaA__AFJ78367
MNPNQKIITIGSISIAIGIISLMLQIGNIISIWASHSIQTGSQNHTGICNQRIITYENSTWVNHTYVNINNTNVVAGKDKTSVTLAGNSSLCSISGWAIYTKDNSIRIGSKGDVFVIREPFISCSHLECRTFFLTQGALLNDKHSNGTVKDRSPYRALMSCPLGEAPSPYNSKFESVAWSASACHDGMGWLTIGISGPDNGAVAVLKYNGIITETIKSWKKRILRTQESECVCVNGSCFTIMTDGPSNGAASYKIFKIEKGKVTKSIELNAPNSHYEECSCYPDTGTVMCVCRDNWHGSNRPWVSFNQNLDYQIGYICSGVFGDNPRPKDGEGSCNPVTADGADGVKGFSYKYGNGVWIGRTKSNRLRKGFEMIWDPNGWTDTDSDFSVKQDVVAITDWSGYSGSFVQHPELTGLDCIRPCFWVELVRGRPRENTTIWTSGSSISFCGVNGDTANWSWPDGAELPFTIDK

SEQ ID NO: 22342 - protein, 470 aa, synthetic construct
  REGION 1..470: note = neuraminidase__InfluenzaA__AFJ78378
MNPNQKVITIGSISIAIGIISLMLQIGNIISIWASHSIQTGSQNHTGICNQRIITYENSTWVNHTYVNINNTNVVAGKDKTSVTLAGNSSLCSISGWAIYTKDNSIRIGSKGDVFVIREPFISCSHMECRTFFLTQGALLNDKHSNGTVKDRSPYRALMSCPLGEAPSPYNSKFESVAWSASACHDGMGWLTIGISGPDNGAVAVLKYNGIITETIKSWKKRILRTQESECVCVNGSCFTIMTDGPSNGAASYKIFKIEKGKVTKSIELNAPNSHYEECSCYPDTGTVMCVCRDNWHGSNRPWVSFNQNLDYQIGYICSGVFGDNPRPRDGEGSCNPVTVDGADGVKGFSYKYGNGVWIGRTKSNRLRKGFEMIWDPNGWTDTDSDFAVKQDVVAITDWSGYSGSFVQHPELTGLDCIRPCFWVELVRGLPRENTTIWTSGSSISFCGVNSDTANWSWPDGAELPFTIDK

SEQ ID NO: 22343 - protein, 470 aa, synthetic construct; identical to SEQ ID NO: 14386
  REGION 1..470: note = neuraminidase__InfluenzaA__AFJ78389

SEQ ID NO: 22344 - protein, 470 aa, synthetic construct; identical to SEQ ID NO: 14386
  REGION 1..470: note = neuraminidase__InfluenzaA__AFJ78400

SEQ ID NO: 22345 - protein, 470 aa, synthetic construct; identical to SEQ ID NO: 14386
  REGION 1..470: note = neuraminidase__InfluenzaA__AFJ78411

SEQ ID NO: 22346 - protein, 470 aa, synthetic construct
  REGION 1..470: note = neuraminidase__InfluenzaA__AFJ78422
MNPNQKIITIGSISIAIGIISLMLQIGNIISIWASHSIQTGSQNHTGICNQRIITYENSTWVNHTYVNINNTNVVAGKDKTSVTLAGNSSLCSISGWAIYTKDNSIRIGSKGDVFVIREPFISCSHLECRTFFLTQGALLNDKHSNGTVKDRSPYRALMSCPLGEAPSPYNSKFESVAWSASACHDGTGWLTIGISGPDNGAVAVLKYNGIITETIKSWKKRILRTQESECVCMNGSCFTIMTDGPSNGAASYKIFKIEKGKVTKSIELNAPSFHYEECSCYPDTGTVMCVCRDNWHGSNRPWVSFNQNLDYQIGYICSGVFGDNPRPQDGEGSCNPVTVDGADGVKGFSYKYGNGVWIGRTKSNRLRKGFEMIWDPNGWTNTDSDFSVKQDVVAITDWSGYSGSFVQHPELTGLDCIRPCFWVELVRGLPRENTTIWTSGSSISFCGVNSDTANWSWPDGAELPFTIDK

SEQ ID NO: 22347 - protein, 470 aa, synthetic construct; identical to SEQ ID NO: 16493
  REGION 1..470: note = neuraminidase__InfluenzaA__AFJ78433

SEQ ID NO: 22348 - protein, 470 aa, synthetic construct; identical to SEQ ID NO: 16493
  REGION 1..470: note = neuraminidase__InfluenzaA__AFJ78444

SEQ ID NO: 22349 - protein, 470 aa, synthetic construct
  REGION 1..470: note = neuraminidase__InfluenzaA__AFJ78466
MNPNQKIITIGSISIAIGIISLMLQIGNIISIWASHSIQTGSQNHTGICNQRIITYENSTWVNHTYVNINNTNVVAGKDKTSVTLAGNSSLCSISGWAIYTKDNSIRIGSKGDVFVIREPFISCSHLECRTFFLTQGALLNDKHSNGTVKDRSPYRALMSCPLGEAPSPYNSKFESVAWSASACHDGIGWLTIGISGPDNGAVAVLKYNGIITGTIKSWKKQILRTQESECVCINGSCFTIMTDGPSNGAASYKIFKIEKGKVTKSIELNAPNFHYEECSCYPDTGTVMCVCRDNWHGSNRPWVSFNQNLDYQIGYICSGVFGDNPRPKDGEGRCNPVTVDGADGVKGFSYKYGNGVWIGRTKSNRLRKGFEMIWDPNGWTNTDSDFSVKQDVVAITDWSGYSGSFVQHPELTGLDCIRPCFWVELVRGLPRENTTIWTSGSSISFCGVNSDTANWSWPDGAELPFTIDK

SEQ ID NO: 22350 - protein, 470 aa, synthetic construct
  REGION 1..470: note = neuraminidase__InfluenzaA__AFJ78477
MNPNQKIITIGSISIAIGIIGLMLQIGNIISIWASHSIQTGSQNHTGICSQRIITYENSTWVNNTYVNINNTNVVAEKDKTSVTLAGNSSLCSISGWAIYTKDNSIRIGSKGDVFVIREPFISCSHLECRTFFLTQGALLNDKHSNGTVKDRSPYRALMSCPLGEAPSPYNSRFESVAWSASACHDGMGWLTIGISGPDNGAVAVLKYNGIITETIKSWKKRILRTQESECVCMNGSCFTIMTDGPSNGAASYKIFKIEKGKVTKSIELNAPNFHYEECSCYPDTGTVMCVCRDNWHGSNRPWVSFNQNLDYQIGYICSGVFGDNPRPKDGEGSCNPVTVDGADGVKGFSYKYGNGVWIGRTKSNRLRKGFEMIWDPNGWTNTDSDFSVKQDVVAITDWSGYSGSFVQHPELTGLDCIRPCFWVELVRGLPRENTTIWTSGSSISFCGVNSGTANWSWPDGAELPFTIDK

SEQ ID NO: 22351 - protein, 470 aa, synthetic construct
  REGION 1..470: note = neuraminidase__InfluenzaA__AFJ78488
MNPNQKIITIGSISIAIGIISLILQIGNIISIWASHSIQTGSQNHTGICNQRIITYENSTWVNNTYVNINNTNVVAEKDKTSVTLAGNSSLCSISGWAIYTKDNSIRIGSKGDVFVIREPFISCSHLECRTFFLTQGALLNDKHSNGTVKDRSPYRALMSCPLGEAPSPYNSRFESVAWSASACHDGMGWLTIGISGPDNGAVAVLKYNGIITETIKSWKKRILRTQESECVCMNGSCFTIMTDGPSNGAASYKIFKIEKGKVTKTIELNAPNFHYEECSCYPDTGTVMCVCRDNWHGSNRPWVSFNQNLDYQIGYICSGVFGDNPRPKDGEGSCNPVTVDGADGVKGFSYKYGNGVWIGRTKSNRLRKGFEMIWDPNGWTNTDSDFSMKQDVVAITDWSGYSGSFVQHPELTGLDCIRPCFWVELVRGLPRENTTIWTSGSSISFCGVNSGTANWSWPDGAELPFTIDK

SEQ ID NO: 22352 - protein, 470 aa, synthetic construct
  REGION 1..470: note = neuraminidase__InfluenzaA__AFJ78510
MNPNQKIITIGSISIAIGIISLMLQIGNIISIWASHSIQTGSQNHTGICNQRIITYENSTWVNHTYVNINNTNVVAGKDKTSVTLAGNSSLCSISGWAIYTKDNSIRIGSKGDVFVIREPFISCSHLECRTFFLTQGALLNDKHSNGTVKDRSPYRALMSCPLGEAPSPYNSKFESVAWSASACHDGMGWLTIGISGPDNGAVAVLKYNGIITGTIKSWKKQILRTQESECVCMNGSCFTIMTDGPSNGAASYKIFKIEKGKVTKSIELNAPNFHYEECSCYPDTGIVMCVCRDNWHGSNRPWVSFNQNLDYQIGYICSGVFGDNPRPKDGEGSCNPVTVDGADGVKGFSYKYDNGVWIGRTKSNRLRKGFEMIWDPNGWTNTDSDFSVKQDVVAITDWSGYSGSFVQHPELTGLDCIRPCFWVELVRGLPRENTTIWTSGSSISFCGVNSDTANWSWPDGAELPFTIDK

SEQ ID NO: 22353 - protein, 470 aa, synthetic construct
  REGION 1..470: note = neuraminidase__InfluenzaA__AFJ78521
MNPNQKIITIGSISIAIGIISLILQIGNIISIWASHSIQTGSQNHTGICNQRIITYENSTWVNNTYVNINNTNVVAEKDKTSVTLAGNSSLCSISGWAIYTKDNSIRIGSKGDVFVIREPFISCSHLECRTFFLTQGALLNDKHSNGTVKDRSPYRALMSCPLGEAPSPYNSRFESVAWSASACHDGMGWLTIGISGPDNGAVAVLKYNGIITETIKSWKKRILRTQESECVCMNGSCFTIMTDGPSNGAASYKIFKIEKGKVTKTIELNAPNFHYEECSCYPDTGTVMCVCRDNWHGSNRPWVSFNQNLDYQIGYICSGVFGDNPRPKDGEGSCNPVTVDGADGVKGFSYKYGNGVWIGRTKSNRLRKGFEMIWDPNGWTNTDSDFSVKQDVVAITDWSGYSGSFVQHPELTGLDCIRPCFWVELVRGLPRENTTIWTSGSSISFCGVNSGTANWSWPDGAELPFTIDK

SEQ ID NO: 22354 - protein, 470 aa, synthetic construct; identical to SEQ ID NO: 22247
  REGION 1..470: note = neuraminidase__InfluenzaA__AFJ78532

SEQ ID NO: 22355 - protein, 470 aa, synthetic construct; identical to SEQ ID NO: 22247
  REGION 1..470: note = neuraminidase__InfluenzaA__AFJ78543

SEQ ID NO: 22356 - protein, 470 aa, synthetic construct; identical to SEQ ID NO: 22247
  REGION 1..470: note = neuraminidase__InfluenzaA__AFJ78554

SEQ ID NO: 22357 - protein, 470 aa, synthetic construct; identical to SEQ ID NO: 22235
  REGION 1..470: note = neuraminidase__InfluenzaA__AFJ78565

SEQ ID NO: 22358 - protein, 470 aa, synthetic construct
  REGION 1..470: note = neuraminidase__InfluenzaA__AFJ78576
MNPNQKIITIGSISIAIGIISLMLQIGNIISIWASHSIQTGSQNHTGICNQRIITYENSTWVNHTYVNINNTNVVAGKDKTPVTLAGNSSLCSISGWAIHTKDNSIRIGSKGDVFVIREPFISCSHLECKTFFLTQGALLNDKHSNGTVKDRSPYRALMSCPLGEAPSPYNSKFESVAWSASACHDGIGWLTIGISGPDNGAVAVLKYNGIITGTIKSWKKQILRTQESECVCMNGSCFTIMTDGPSNGAASYKIFKIEKGKVTKSMELNAPNFHYEECSCYPDTGTVMCVCRDNWHGSNRPWVSFNQNLDYQIGYICTGVFGDNPRPEDGEGSCNPVTVDGANGVKGFSYKYGNGVWIGRTKSNRIRKGFEMIWDPNGWTNTDSDFSVKQDIVAITDWSGYSGSFVQHPELTGLDCIRPCFWVELVRGLPRENTTIWTSGSSISFCGVNSDIANWSWPDGAELPFTIDK

SEQ ID NO: 22359 - protein, 470 aa, synthetic construct
  REGION 1..470: note = neuraminidase__InfluenzaA__AFJ78598
MNPNQKIITIGSISIAIGIISLMLQIGNIISIWASHSIQTGIQNNTGICNQRIITYENSTWVNHTYVNINNTNVVAGEDKTSVTLAGNSSLCSISGWAIYTKDNSIRIGSKGDVFVIREPFISCSHLECRTFFLTQGALLNDKHSNGTVKDRSPYRALMSCPLGEAPSPYNSKFESVAWSASACHDGMGWLTIGISGPDNGAVAVLKYNGIITGTIKSWKKQILRTQESECVCMNGSCFTIMTDGPSNKAASYKIFKIEKGKVTKSIELNAPNFHYEECSCYPDTGIVMCVCRDNWHGSNRPWVSFNQNLDYQIGYICSGVFGDNPRPEDGEGSCNPVTVDGANGVKGFSYKYDNGVWIGRTKSNRLRKGFEMIWDPNGWTNTDSDFSVKQDVVAITDWSGYSGSFVQHPELTGLDCIRPCFWVELVRGLPRENTTIWTSGSSISFCGVNSDTANWSWPDGAELPFTIDK

SEQ ID NO: 22360 - protein, 470 aa, synthetic construct
  REGION 1..470: note = neuraminidase__InfluenzaA__AFJ78609
MNPNQKIITIGSISIAIGIISLMLQIGNIISIWASHSIQTGSQNNTGICNQRIITYENSTWVNHTYVNINNTNVVAGEDKTSVILAGNSSLCSISGWAIYTKDNSIRIGSKGDVFVIREPFISCSHLECRTFFLTQGALLNDKHSNGTVKDRSPYRALMSCPLGEAPSPYNSKFESVAWSASACHDGMGWLTIGISGPDNGAVAVLKYNGIITGTIKSWKKQILRTQESECVCMNGSCFTIMTDGPSNKAASYKIFKIEKGKVTKSIELNAPNFYYEECSCYPDTGIVMCVCRDNWHGSNRPWVSFNQNLDYQIGYICSGVFGDNPRPEDGEGSCNPVTVDGANGVKGFSYKYGNGVWIGRTKSNRLRKGFEMIWDPNGWTNTDSDFSVKQDVVAITDWSGYSGSFVQHPELTGLDCIRPCFWVELVRGLPRENTTIWTSGSSISFCGVNSDTANWSWPDGAELPFTIDK

SEQ ID NO: 22361 - protein, 470 aa, synthetic construct; identical to SEQ ID NO: 17461
  REGION 1..470: note = neuraminidase__InfluenzaA__AFJ78620

SEQ ID NO: 22362 - protein, 470 aa, synthetic construct; identical to SEQ ID NO: 22235
  REGION 1..470: note = neuraminidase__InfluenzaA__AFJ78631

SEQ ID NO: 22363 - protein, 470 aa, synthetic construct; identical to SEQ ID NO: 17461
  REGION 1..470: note = neuraminidase__InfluenzaA__AFJ78642

SEQ ID NO: 22364 - protein, 470 aa, synthetic construct; identical to SEQ ID NO: 17461
  REGION 1..470: note = neuraminidase__InfluenzaA__AFJ78653

SEQ ID NO: 22365 - protein, 469 aa, synthetic construct; identical to SEQ ID NO: 16738
  REGION 1..469: note = neuraminidase__InfluenzaA__AFJ78664

SEQ ID NO: 22366 - protein, 469 aa, synthetic construct; identical to SEQ ID NO: 16738
  REGION 1..469: note = neuraminidase__InfluenzaA__AFJ78674

SEQ ID NO: 22367 - protein, 469 aa, synthetic construct; identical to SEQ ID NO: 16738
  REGION 1..469: note = neuraminidase__InfluenzaA__AFJ78684

SEQ ID NO: 22368 - protein, 469 aa, synthetic construct; identical to SEQ ID NO: 16738
  REGION 1..469: note = neuraminidase__InfluenzaA__AFJ78694

SEQ ID NO: 22369 - protein, 469 aa, synthetic construct; identical to SEQ ID NO: 16738
  REGION 1..469: note = neuraminidase__InfluenzaA__AFJ78704

SEQ ID NO: 22370 - protein, 469 aa, synthetic construct; identical to SEQ ID NO: 16738
  REGION 1..469: note = neuraminidase__InfluenzaA__AFJ78714

SEQ ID NO: 22371 - protein, 469 aa, synthetic construct
  REGION 1..469: note = neuraminidase__InfluenzaA__AFJ78724
MNPNQKIITIGSVCMTIGMANLILQIGNIISIWISHSIQLGNQNQIETCNQSVITYENNTWVNQTYVNISNTNFAAGQSVVSVKLAGNSSLCPVSGWAIYSKDNSIRIGSKGDVFVIREPFISCSPLECRTFFLTQGALLNDKHSNGTIKDRSPYRTLMSCPIGEVPSPYNSRFESVAWSASACHDGINWLTIGISGPDNGAVAVLKYNGIITDTIKSWRNNILRTQESECACVNGSCFTLMTDGPSDGQASYKIFRIEKGKIVKSVEMNAPNYHYEECSCYPDSSEITCVCRDNWHGSNRPWVSFNQNLEYQIGYICSGIFGDNPRPNDKTGSCGPVSSNGANGVKGFSFKYGNGVWIGRTKSISSRNGFEMIWDPNGWTGTDNNFSIKQDIVGINEWSGYSGSFVQHPELTGLDCIRPCFWVELIRGRPKENTIWTSGSSISFCGVNSDTVGWSWPDGAELPFTIDK

SEQ ID NO: 22372 - protein, 469 aa, synthetic construct; identical to SEQ ID NO: 16738
  REGION 1..469: note = neuraminidase__InfluenzaA__AFJ78734

SEQ ID NO: 22373 - protein, 469 aa, synthetic construct; identical to SEQ ID NO: 16738
  REGION 1..469: note = neuraminidase__InfluenzaA__AFJ78744

SEQ ID NO: 22374 - protein, 469 aa, synthetic construct; identical to SEQ ID NO: 16738
  REGION 1..469: note = neuraminidase__InfluenzaA__AFJ78754

SEQ ID NO: 22375 - protein, 469 aa, synthetic construct; identical to SEQ ID NO: 16738
  REGION 1..469: note = neuraminidase__InfluenzaA__AFJ78764

SEQ ID NO: 22376 - protein, 469 aa, synthetic construct; identical to SEQ ID NO: 16738
  REGION 1..469: note = neuraminidase__InfluenzaA__AFJ78774

SEQ ID NO: 22377 - protein, 469 aa, synthetic construct; identical to SEQ ID NO: 16738
  REGION 1..469: note = neuraminidase__InfluenzaA__AFJ78784

SEQ ID NO: 22378 - protein, 469 aa, synthetic construct
  REGION 1..469: note = neuraminidase__InfluenzaA__AFJ78794
MNPNQKIITIGSVCMTIGMANLILQIGNIISIWISHSIQLGNQNQIETCNQSVITYENNTWVNQTYVNISNTNFAAGQSVVSVKLAGNSSLCPVSGWAIYSKDNSIRIGSKGDVFVIREPFISCSPLECRTFFLTQGALLNDKHSNGTIKDRSPYRTLMSCPIGEVPSPYNSRFESVAWSASACHDGINWLTIGISGPDNGAVAVLKYNGIITDTIKSWRNNILRTQESECACVNGSCFTVMTDGPSDGQASYKIFRIEKGKIVKSVEMNAPNYHYEECSCYPDSGEITCVCRDNWHGSNRPWVSFNQNLEYQIGYICSGIFGDNPRPNDKTGSCGPVSSNGANGVKGFSFKYGNGVWIGRTKSISSRNGFEMIWDPNGWTGTDNNFSIKQDIVGINEWSGYSGSFVQHPELTGLDCIRPCFWVELIRGRPKENTIWTSGSSISFCGVNSDTVGWSWPDGAELPFTIDK

SEQ ID NO: 22379 - protein, 469 aa, synthetic construct; identical to SEQ ID NO: 16738
  REGION 1..469: note = neuraminidase__InfluenzaA__AFJ78804

SEQ ID NO: 22380 - protein, 469 aa, synthetic construct; identical to SEQ ID NO: 16738
  REGION 1..469: note = neuraminidase__InfluenzaA__AFJ78814

SEQ ID NO: 22381 - protein, 469 aa, synthetic construct; identical to SEQ ID NO: 16738
  REGION 1..469: note = neuraminidase__InfluenzaA__AFJ78824

SEQ ID NO: 22382 - protein, 469 aa, synthetic construct; identical to SEQ ID NO: 16738
  REGION 1..469: note = neuraminidase__InfluenzaA__AFJ78834

SEQ ID NO: 22383 - protein, 469 aa, synthetic construct; identical to SEQ ID NO: 16738
  REGION 1..469: note = neuraminidase__InfluenzaA__AFJ78844

SEQ ID NO: 22384 - protein, 469 aa, synthetic construct; identical to SEQ ID NO: 18987
  REGION 1..469: note = neuraminidase__InfluenzaA__AFJ78854

SEQ ID NO: 22385 - protein, 469 aa, synthetic construct; identical to SEQ ID NO: 16738
  REGION 1..469: note = neuraminidase__InfluenzaA__AFJ78864

SEQ ID NO: 22386 - protein, 469 aa, synthetic construct; identical to SEQ ID NO: 16738
  REGION 1..469: note = neuraminidase__InfluenzaA__AFJ78874

SEQ ID NO: 22387 - protein, 469 aa, synthetic construct; identical to SEQ ID NO: 16738
  REGION 1..469: note = neuraminidase__InfluenzaA__AFJ78884

SEQ ID NO: 22388 - protein, 469 aa, synthetic construct; identical to SEQ ID NO: 16738
  REGION 1..469: note = neuraminidase__InfluenzaA__AFJ78894

SEQ ID NO: 22389 - protein, 469 aa, synthetic construct; identical to SEQ ID NO: 16738
  REGION 1..469: note = neuraminidase__InfluenzaA__AFJ78904

SEQ ID NO: 22390 - protein, 469 aa, synthetic construct; identical to SEQ ID NO: 16738
  REGION 1..469: note = neuraminidase__InfluenzaA__AFJ78914

SEQ ID NO: 22391 - protein, 469 aa, synthetic construct
  REGION 1..469: note = neuraminidase__InfluenzaA__AFJ78924
MNPNQKIITIGSVCMTIGMANLILQIGNIISIWISHSIQLGNQNQIETCNQSVITYENNTWVNQTYVDISNTNFAAGQSVVSVKLAGNSSLCPVSGWAIYSKDNSIRIGSKGDVFVIREPFISCSPLECRTFFLTQGALLNDKHSNGTIKDRSPYRTLMSCPIGEIPSPYNSRFESVAWSASACHDGINWLTIGISGPDNGAVAVLKYNGIITDTIKSWRNNILRTQESECACVNGSCFTVMTDGPSDGQASYKIFRIEKGKIVKSVEMNAPNYHYEECSCYPDSSEITCVCRDNWHGSNRPWVSFNQNLEYQIGYICSGIFGDNPRPNDKTGSCGPVSSNGANGVKGFSFKYGNGVWIGRTKSISSRNGFEMIWDPNGWTGTDNNFSIKQDIVGINEWSGYSGSFVQHPELTGLDCIRPCFWVELIRGRPKENTIWTSGSSISFCGVNSDTVGWSWPDGAELPFTIDK

SEQ ID NO: 22392 - protein, 469 aa, synthetic construct
  REGION 1..469: note = neuraminidase__InfluenzaA__AFJ97569
MNPNQKIITIGSVCMTIGMANLILQIGNIISIWISHSIQLGNQNQIETCNQSVITYENNTWVNQTYVNISNTNFAAGQSVVSVKLAGNSSLCPVSGWAIYSKDNSIRIGSKGDVFVIREPFISCSPLECRTFFLTQGALLNDKHSNETIKDRSPYRTLMSCPIGEVPSPYNSRFESVAWSASACHDGINWLTIGISGPDNGAVAVLKYNGIITDTIKSWRNNILRTQESECACVNGSCFTVMTDGPSDGQASYKIFRIEKGKIVKSVEMNAPNYHYEECSCYPDSSEITCVCRDNWHGSNRPWVSFNQNLEYQIGYICSGIFGDNPRPNDKTGSCGPVSSNGANGVKGFSFKYGNGVWIGRTKSISSRNGFEMIWDPNGWTGTDNNFSIKQDIVGINEWSGYSGSFVQHPELTGLDCIRPCFWVELIRGRPKENTIWTSGSSISFCGVNSDTVSWSWPDGAELPFTIDK

SEQ ID NO: 22393 - protein, 469 aa, synthetic construct; identical to SEQ ID NO: 16728
  REGION 1..469: note = neuraminidase__InfluenzaA__AFK14107

SEQ ID NO: 22394 - protein, 469 aa, synthetic construct; identical to SEQ ID NO: 16738
  REGION 1..469: note = neuraminidase__InfluenzaA__AFK14117

SEQ ID NO: 22395 - protein, 469 aa, synthetic construct; identical to SEQ ID NO: 17505
  REGION 1..469: note = neuraminidase__InfluenzaA__AFK14141

SEQ ID NO: 22396 - protein, 469 aa, synthetic construct
  REGION 1..469: note = neuraminidase__InfluenzaA__AFK14150
MNPNQKIITIGSVCMTIGMANLILQIGNIISIWISHSIRLGNQNQIETCNQSVITYENNTWVNQTYVNISNTNFAAGQSVVSVKLAGNSSLCPVSGWAIYSKDNSIRIGSKGDVFVIREPFISCSPLECRTFFLTQGALLNDKHSNGTIKDRSPYRTLMSCPIGEVPSPYNSRFESVAWSASACHDGINWLTIGISGPDNGAVAVLKYNGIITDTIKSWRNNILRTQESECACVNGSCFTVMTDGPSDEQASYKIFRIEKGKIVKSVEMNAPNYHYEECSCYPDSSEITCVCRDNWHGSNRPWVSFNQNLEYQIGYICSGIFGDNPRPNDKTGSCGPVSSNGANGVKGFSFKYGNGVWIGRTKSISSRNGFEMIWDPNGWTGTDNNFSIKQDIVGINEWSGYSGSFVQHPELTGLDCIRPCFWVELIRGRPKENTIWTSGSSISFCGVNSDTVGWSWPDGAELPFTIDK

SEQ ID NO: 22397 - protein, 469 aa, synthetic construct; identical to SEQ ID NO: 17321
  REGION 1..469: note = neuraminidase__InfluenzaA__AFK14159

SEQ ID NO: 22398 - protein, 469 aa, synthetic construct; identical to SEQ ID NO: 16738
  REGION 1..469: note = neuraminidase__InfluenzaA__AFK14168

SEQ ID NO: 22399 - protein, 469 aa, synthetic construct; identical to SEQ ID NO: 16738
  REGION 1..469: note = neuraminidase__InfluenzaA__AFK14177

SEQ ID NO: 22400 - protein, 469 aa, synthetic construct
  REGION 1..469: note = neuraminidase__InfluenzaA__AFK14186
MNPNQKIITIGSVCMTIGMANLILQIGNIISIWISHSIQLGNQNQIETCNQSVITYENNTWVNQTYVNISNTNFAAGQSVVSVKLAGNSSLCPVSGWAIYSKDNSIRIGSKGDVFVIREPFISCSPLECRTFFLTQGALLNDKHSNGTIKDRSPYRTLMSCPIGEVPSPYNSRFESVAWSASACHDGINWLTIGISGPDNGAVAVLKYNGIITDTIKSWRNNILRTQESECACVNGSCFTVMTDGPSDGQASYKIFRIEKGKIVKSVEMNAPNYHFEECSCYPDSSEITCVCRDNWHGSNRPWVSFNQNLEYQIGYICSGIFGDNPRPNDKTGSCGPVSSNGANGVKGFSFKYGNGVWIGRTKSISSRNGFEMIWDPNGWTGTDNNFSIKQDIVGINEWSGYSGSFVQHPELTGLDCIRPCFWVELIRGRPKENTIWTSGSSISFCGVNSDTVGWSWPDGAELPFTIDK

SEQ ID NO: 22401 - protein, 469 aa, synthetic construct; identical to SEQ ID NO: 18719
  REGION 1..469: note = neuraminidase__InfluenzaA__AFK14195

SEQ ID NO: 22402 - protein, 469 aa, synthetic construct; identical to SEQ ID NO: 16738
  REGION 1..469: note = neuraminidase__InfluenzaA__AFK14204

SEQ ID NO: 22403 - protein, 469 aa, synthetic construct; identical to SEQ ID NO: 18719
  REGION 1..469: note = neuraminidase__InfluenzaA__AFK14213

SEQ ID NO: 22404 - protein, 469 aa, synthetic construct
  REGION 1..469: note = neuraminidase__InfluenzaA__AFK14222
MNPNQKIITIGSVCMTIGMANLILQIGNIISIWISHSIRLGNQNQIETCNQSVITYENNTWVNQTYVNISNTNFAAGQSVVSVKLAGNSSLCPVSGWAIYSKDNSIRIGSKGDVFVIREPFISCSPLECRTFFLTQGALLNDKHSNGTIKDRSPYRTLMSCPIGEVPSPYNSRFESVAWSASACHDGINWLTIGISGPDNGAVAVLKYNGIITDTIKSWRNNILRTQESECACVNGSCFTVMTDGPSDGQASYKIFRIEKGKIVKSVEMNAPNYHYEECSCYPDSSEITCVCRDNWHGSNRPWVSFNQNLEYQIGYICSGIFGDNPRPNDKTGSCGPVSSNGANGVKGFSFKYGNGVWIGRTKSISSRNGFEMIWDPNGWTGTDNNFSIKQDIVGINEWSGYSGSFVQHPELTGLDCIRPCFWVELIRGRPKENTIWTSGSSISFCGVNSDTVGWSWPDGAELPFTIDK

SEQ ID NO: 22405 - protein, 469 aa, synthetic construct; identical to SEQ ID NO: 17321
  REGION 1..469: note = neuraminidase__InfluenzaA__AFK14231

SEQ ID NO: 22406 - protein, 469 aa, synthetic construct; identical to SEQ ID NO: 16738
  REGION 1..469: note = neuraminidase__InfluenzaA__AFK14240

SEQ ID NO: 22407 - protein, 469 aa, synthetic construct; identical to SEQ ID NO: 17505
  REGION 1..469: note = neuraminidase__InfluenzaA__AFK14249

SEQ ID NO: 22408 - protein, 469 aa, synthetic construct; identical to SEQ ID NO: 16738
  REGION 1..469: note = neuraminidase__InfluenzaA__AFK14257

SEQ ID NO: 22409 - protein, 469 aa, synthetic construct; identical to SEQ ID NO: 16738
  REGION 1..469: note = neuraminidase__InfluenzaA__AFK14266

SEQ ID NO: 22410 - protein, 469 aa, synthetic construct; identical to SEQ ID NO: 16738
  REGION 1..469: note = neuraminidase__InfluenzaA__AFK14274

SEQ ID NO: 22411 - protein, 469 aa, synthetic construct
  REGION 1..469: note = neuraminidase__InfluenzaA__AFK14281
MNPNQKIITIGSVCMTIGMANLILQIGNIISIWISHSIQLGNQNQIETCNQSVITYENNTWVNQTDVNISNTNFAAGQSVVSVKLAGNSSLCPVSGWAIYSKDNSIRIGSKGDVFVIREPFISCSPLECRTFFLTQGALLNDKHSNGTIKDRSPYRTLMSCPIGEVPSPYNSRFESVAWSASACHDGINWLTIGISGPDNGAVAVLKYNGIITDTIKSWRNNILRTQESECACVNGSCFTVMTDGPSDGQASYKIFRIEKGKIVKSVEMNAPNYHYEECSCYPDSSEITCVCRDNWHGSNRPWVSFNQNLEYQIGYICSGIFGDNPRPNDKTGSCGPVSSNGANGVKGFSFKYGNGVWIGRTKSISSRNGFEMIWDPNGWTGTDNNFSIKQDIVGINEWSGYSGSFVQHPELTGLDCIRPCFWVELIRGRPKENTIWTSGSSISFCGVNSDTVGWSWPDGAELPFTIDK

SEQ ID NO: 22412 - protein, 469 aa, synthetic construct; identical to SEQ ID NO: 16738
  REGION 1..469: note = neuraminidase__InfluenzaA__AFK14289

SEQ ID NO: 22413 - protein, 469 aa, synthetic construct; identical to SEQ ID NO: 17321
  REGION 1..469: note = neuraminidase__InfluenzaA__AFK14298

SEQ ID NO: 22414 - protein, 469 aa, synthetic construct; identical to SEQ ID NO: 16738
  REGION 1..469: note = neuraminidase__InfluenzaA__AFK14307

SEQ ID NO: 22415 - protein, 469 aa, synthetic construct; identical to SEQ ID NO: 18719
  REGION 1..469: note = neuraminidase__InfluenzaA__AFK14316

SEQ ID NO: 22416 - protein, 469 aa, synthetic construct
  REGION 1..469: note = neuraminidase__InfluenzaA__AFK14325
MNPNQKIITIGSVCMTIGMANLILQIGNIISIWISHSIQLGNQNQIETCNQSVITYENNTWVNQTYVNISNTNFAAGQSVVSVKLAGNSSLCPVSGWAIYSKDNSIRIGSKGDVFVIREPFISCSPLECRTFFLTQGALLNDKHSNGTIKDRSPYRTLMSCPIGEVPSPYNSRFESVAWSASACHDGINWLTIGISGPDNGAVAVLKYNGIITDTIKSWRNNILRTQESECACVNGSCFTVMTDGPSDGQASYKIFRIERGKIVKSVEMNAPNYHYEECSCYPDSSEITCVCRDNWHGSNRPWVSFNQNLEYQIGYICSGIFGDNPRPNDKTGSCGPVSSNGANGVKGFSFKYGNGVWIGRTKSISSRNGFEMIWDPNGWTGTDNNFSIKQDIVGINEWSGYSGSFVQHPELTGLDCIRPCFWVELIRGRPKENTIWTSGSSISFCGVNSDTVGWSWPDGAELPFTIDK

SEQ ID NO: 22417 - protein, 469 aa, synthetic construct; identical to SEQ ID NO: 16738
  REGION 1..469: note = neuraminidase__InfluenzaA__AFK14334

SEQ ID NO: 22418 - protein, 469 aa, synthetic construct; identical to SEQ ID NO: 16738
  REGION 1..469: note = neuraminidase__InfluenzaA__AFK14343

SEQ ID NO: 22419 - protein, 469 aa, synthetic construct; identical to SEQ ID NO: 16738
  REGION 1..469: note = neuraminidase__InfluenzaA__AFK14352

SEQ ID NO: 22420 - protein, 469 aa, synthetic construct; identical to SEQ ID NO: 16738
  REGION 1..469: note = neuraminidase__InfluenzaA__AFK14360

SEQ ID NO: 22421 - protein, 469 aa, synthetic construct; identical to SEQ ID NO: 16738
  REGION 1..469: note = neuraminidase__InfluenzaA__AFK14369

SEQ ID NO: 22422 - protein, 469 aa, synthetic construct
  REGION 1..469: note = neuraminidase__InfluenzaA__AFK14387
MNPNQKIITIGSVCMTIGMANLILQIGNITSIWISHSIQLGNQNQIDTCNQSVITYENNTWVNQTYVNISNTNFAAGQSVVSVKLAGNSSLCPVSGWAIYSKDNSIRIGSKGDVFVIREPFISCSPLECRTFFLTQGALLNDKHSNGTIKDRSPYRTLMSCPIGEVPSPYNSRFESVAWSASACHDGINWLTIGISGPDNGAVAVLKYNGIITDTIKSWRNNILRTQESECACVNGSCFTVMTDGPSDGQASYKIFRIEKGKIVKSVEMNAPNYHYEECSCYPDSSEITCVCRDNWHGSNRPWVSFNQNLEYQIGYICSGIFGDNPRPNDKTGSCGPVSSNGANGVKGFSFKYGNGVWIGRTKSISSRNGFEMIWDPNGWTGTDNNFSIKQDIVGINEWSGYSGSFVQHPELTGLDCIRPCFWVELIRGRPKENTIWTSGSSISFCGVNSDTVGWSWPDGAELPFTIDK

SEQ ID NO: 22423 - protein, 469 aa, synthetic construct; identical to SEQ ID NO: 17321
  REGION 1..469: note = neuraminidase__InfluenzaA__AFK14397

SEQ ID NO: 22424 - protein, 469 aa, synthetic construct; identical to SEQ ID NO: 16738
  REGION 1..469: note = neuraminidase__InfluenzaA__AFK14406

SEQ ID NO: 22425 - protein, 469 aa, synthetic construct; identical to SEQ ID NO: 16738
  REGION 1..469: note = neuraminidase__InfluenzaA__AFK14415

SEQ ID NO: 22426 - protein, 469 aa, synthetic construct; identical to SEQ ID NO: 16738
  REGION 1..469: note = neuraminidase__InfluenzaA__AFK14424

SEQ ID NO: 22427 - protein, 469 aa, synthetic construct
  REGION 1..469: note = neuraminidase__InfluenzaA__AFK14433
MNPNQKIITIGSVCMIIGMANLILQIGNIISIWISHSIQLGNQNQIETCNQSVITYENNTWVNQTYVNISNTNFAAGQSVVSVKLAGNSSLCPVSGWAIYSKDNSIRIGSKGDVFVIREPFISCSPLECRTFFLTQGALLNDKHSNGTIKDRSPYRTLMSCPIGEVPSPYNSRFESVAWSASACHDGINWLTIGISGPDNGAVAVLKYNGIITDTIKSWRNNILRTQESECACVNGSCFTVMTDGPSDGQASYKIFRIEKGKIVKSVEMNAPNYHYEECSCYPDSSEITCVCRDNWHGSNRPWVSFNQNLEYQIGYICSGIFGDNPRPNDKTGSCGPVSSNGANGVKGFSFKYGNGVWIGRTKSISSRNGFEMIWDPNGWTGTDNNFSIKQDIVGINEWSGYSGSFVQHPELTGLDCIRPCFWVELIRGRPKENTIWTSGSSISFCGVNSDTVGWSWPDGAELPFTIDK

SEQ ID NO: 22428 - protein, 469 aa, synthetic construct; identical to SEQ ID NO: 16738
  REGION 1..469: note = neuraminidase__InfluenzaA__AFK14442

SEQ ID NO: 22429 - protein, 469 aa, synthetic construct
  REGION 1..469: note = neuraminidase__InfluenzaA__AFK14451
MNPNQKIITIGSVCMTIGMANLILQIGNIISIWISHSIQLGNQNQIETCNQSVITYENNTWVNQTYVNISNTNFAAGQSVASAKLAGNSSLCPVSGWAIYSKDNSIRIGSKGDVFVIREPFISCSPLECRTFFLTQGALLNDKHSNGTIKDRSPYRTLMSCPIGEVPSPYNSRFESVAWSASACHDGINWLTIGISGPDNGAVAVLKYNGIITDTIKSWRNNILRTQESECACVNGSCFTVMTDGPSDGQASYKIFRIEKGKIVKSVEMNAPNYHYEECSCYPDSSEITCVCRDNWHGSNRPWVSFNQNLEYQIGYICSGIFGDNPRPNDKTGSCGPVSSNGANGVKGFSFKYGNGVWIGRTKSISSRNGFEMIWDPNGWTGTDNNFSIKQDIVGINEWSGYSGSFVQHPELTGLDCIRPCFWVELIRGRPKENTIWTSGSIISFCGVNSDTVGWSWPDGAELPFTIDK

SEQ ID NO: 22430 - protein, 469 aa, synthetic construct; identical to SEQ ID NO: 16738
  REGION 1..469: note = neuraminidase__InfluenzaA__AFK14458

SEQ ID NO: 22431 - protein, 469 aa, synthetic construct; identical to SEQ ID NO: 16738
  REGION 1..469: note = neuraminidase__InfluenzaA__AFK14467

SEQ ID NO: 22432 - protein, 469 aa, synthetic construct; identical to SEQ ID NO: 16738
  REGION 1..469: note = neuraminidase__InfluenzaA__AFK14476

SEQ ID NO: 22433 - protein, 469 aa, synthetic construct; identical to SEQ ID NO: 19797
  REGION 1..469: note = neuraminidase__InfluenzaA__AFK14485

SEQ ID NO: 22434 - protein, 469 aa, synthetic construct; identical to SEQ ID NO: 16738
  REGION 1..469: note = neuraminidase__InfluenzaA__AFK14504

SEQ ID NO: 22435 - protein, 469 aa, synthetic construct; identical to SEQ ID NO: 16738
  REGION 1..469: note = neuraminidase__InfluenzaA__AFK14514

SEQ ID NO: 22436 - protein, 469 aa, synthetic construct; identical to SEQ ID NO: 16738
  REGION 1..469: note = neuraminidase__InfluenzaA__AFK14522

SEQ ID NO: 22437 - protein, 469 aa, synthetic construct; identical to SEQ ID NO: 16738
  REGION 1..469: note = neuraminidase__InfluenzaA__AFK14529

SEQ ID NO: 22438 - protein, 469 aa, synthetic construct; identical to SEQ ID NO: 16738
  REGION 1..469: note = neuraminidase__InfluenzaA__AFK14538

SEQ ID NO: 22439 - protein, 469 aa, synthetic construct; identical to SEQ ID NO: 19113
  REGION 1..469: note = neuraminidase__InfluenzaA__AFK14547

SEQ ID NO: 22440 - protein, 469 aa, synthetic construct
  REGION 1..469: note = neuraminidase__InfluenzaA__AFK14555
MNPNQKIITIGSVCMTIGMANLILQIGNIISIWISHSIQLGNQNQIETCNQSVITYENNTWVNQTYVNISNTNFAAGQSVISVKLAGNSSLCPVSGWAIYSKDNSIRIGSKGDVFVIREPFISCSPLECRTFFLTQGALLNDKHSNGTIKDRSPYRTLMSCPIGEVPSPYNSRFESVAWSASACHDGINWLTIGISGPDNGAVAVLKYNGIITDTIKSWRNNILRTQESECACVNGSCFTVMTDGPSDGQASYKIFRIEKGKIVKSVEMNAPNYHYEECSCYPDSSEITCVCRDNWHGSNRPWVSFNQNLEYQIGYICSGIFGDNPRPNDKTGSCGPVSSNGANGVKGFSFKYGNGVWIGRTKSISSRNGFEMIWDPNGWTGTDNNFSIKQDIVGINEWSGYSGSFVQHPELTGLDCIRPCFWVELIRGRPKENTIWTSGSSISFCGVNSDTVGWSWPDGAELPFTIDK

SEQ ID NO: 22441 - protein, 469 aa, synthetic construct; identical to SEQ ID NO: 16738
  REGION 1..469: note = neuraminidase__InfluenzaA__AFK14564

SEQ ID NO: 22442 - protein, 469 aa, synthetic construct; identical to SEQ ID NO: 16738
  REGION 1..469: note = neuraminidase__InfluenzaA__AFK14573

SEQ ID NO: 22443 - protein, 469 aa, synthetic construct
  REGION 1..469: note = neuraminidase__InfluenzaA__AFK14579
MNPNQKIITIGSVCMTIGMANLILQIGNIISIWISHSIQLGNQNQIETCNQSVITYENNTWVNQTYVNISNTNFAAGQSVVSVKLAGNSSLCPVSGWAIYSKDNSIRIGSKGDVFVIREPFISCSPLECRTFFLTQGALLNDKHSNGTIKDRSPYRTLMSCPIGEVPSPYNSRFESVAWSASACHDGINWLTIGISGPDNGAVAVLKYNGIITDTIKSWRNNILRTQESECACVNGSCFTVMTDGPSDGQASYKIFRIEKGKIVKSVEMNAPNYHYEECSCYPDSSEITCVCRDNWHGSNRPWVSFNQNLEYQIGYMCSGIFGDNPRPNDKTGSCGPVSSNGANGVKGFSFKYGNGVWIGRTKSISSRNGFEMIWDPNGWTGTDNNFSIKQDIVGINEWSGYSGSFVQHPELTGLDCIRPCFWVELIRGRPKENTIWTSGSSISFCGVNSDTVGWSWPDGAELPFTIDK

SEQ ID NO: 22444 - protein, 469 aa, synthetic construct; identical to SEQ ID NO: 16738
  REGION 1..469: note = neuraminidase__InfluenzaA__AFK14588

SEQ ID NO: 22445 - protein, 469 aa, synthetic construct; identical to SEQ ID NO: 16738
  REGION 1..469: note = neuraminidase__InfluenzaA__AFK14597

SEQ ID NO: 22446 - protein, 469 aa, synthetic construct; identical to SEQ ID NO: 16738
  REGION 1..469: note = neuraminidase__InfluenzaA__AFK14604

SEQ ID NO: 22447 - protein, 469 aa, synthetic construct; identical to SEQ ID NO: 16738
  REGION 1..469: note = neuraminidase__InfluenzaA__AFK14632

SEQ ID NO: 22448 - protein, 469 aa, synthetic construct; identical to SEQ ID NO: 16728
  REGION 1..469: note = neuraminidase__InfluenzaA__AFK14641

SEQ ID NO: 22449 - protein, 469 aa, synthetic construct; identical to SEQ ID NO: 16738
  REGION 1..469: note = neuraminidase__InfluenzaA__AFK14651

SEQ ID NO: 22450 - protein, 469 aa, synthetic construct; identical to SEQ ID NO: 16738
  REGION 1..469: note = neuraminidase__InfluenzaA__AFK14656

SEQ ID NO: 22451 - protein, 469 aa, synthetic construct; identical to SEQ ID NO: 16738
  REGION 1..469: note = neuraminidase__InfluenzaA__AFK14663

SEQ ID NO: 22452 - protein, 469 aa, synthetic construct; identical to SEQ ID NO: 16738
  REGION 1..469: note = neuraminidase__InfluenzaA__AFK14672

SEQ ID NO: 22453 - protein, 469 aa, synthetic construct; identical to SEQ ID NO: 16738
  REGION 1..469: note = neuraminidase__InfluenzaA__AFK14680

SEQ ID NO: 22454 - protein, 469 aa, synthetic construct; identical to SEQ ID NO: 16738
  REGION 1..469: note = neuraminidase__InfluenzaA__AFK14690

SEQ ID NO: 22455 - protein, 469 aa, synthetic construct; identical to SEQ ID NO: 16738
  REGION 1..469: note = neuraminidase__InfluenzaA__AFK14707

SEQ ID NO: 22456 - protein, 469 aa, synthetic construct; identical to SEQ ID NO: 16738
  REGION 1..469: note = neuraminidase__InfluenzaA__AFK14715

SEQ ID NO: 22457 - protein, 469 aa, synthetic construct; identical to SEQ ID NO: 16738
  REGION 1..469: note = neuraminidase__InfluenzaA__AFK14724

SEQ ID NO: 22458 - protein, 469 aa, synthetic construct; identical to SEQ ID NO: 16738
  REGION 1..469: note = neuraminidase__InfluenzaA__AFK14733

SEQ ID NO: 22459 - protein, 469 aa, synthetic construct; identical to SEQ ID NO: 16738
  REGION 1..469: note = neuraminidase__InfluenzaA__AFK14751

SEQ ID NO: 22460 - protein, 469 aa, synthetic construct; identical to SEQ ID NO: 16738
  REGION 1..469: note = neuraminidase__InfluenzaA__AFK14757

SEQ ID NO: 22461 - protein, 469 aa, synthetic construct; identical to SEQ ID NO: 16738
  REGION 1..469: note = neuraminidase__InfluenzaA__AFK14766

SEQ ID NO: 22462 - protein, 469 aa, synthetic construct; identical to SEQ ID NO: 17321
  REGION 1..469: note = neuraminidase__InfluenzaA__AFK14774

SEQ ID NO: 22463 - protein, 469 aa, synthetic construct; identical to SEQ ID NO: 22440
  REGION 1..469: note = neuraminidase__InfluenzaA__AFK14781

SEQ ID NO: 22464 - protein, 469 aa, synthetic construct; identical to SEQ ID NO: 17321
  REGION 1..469: note = neuraminidase__InfluenzaA__AFK14790

SEQ ID NO: 22465 - protein, 469 aa, synthetic construct
  REGION 1..469: note = neuraminidase__InfluenzaA__AFK14800
MNPNQKIITIGSVCMTIGMANLILQIGNIISIWISHSIQLGNQNQIETCNQSVITYENNTWVNQTYVNISNTNFAAGQSVVSVKLAGNSSLCPVSGWAIYSKDNSIRIGSKGDVFVIREPFISCSPLECRTFFLTQGALLNDKHSNGTIKDRSPYRTLMSCPIGEVPSPYNSRFESVAWSASACHDGINWLTIGISGPDNGAVAVLKYNGIITDTIKSWRNNILRTQESECACVNGSCFTVMTDGPSDGQASYKIFRIEKGKIVKSVEMNAPNYHYEECSCYPDSSEITCVCRDNWHGSNRPWVSFNQNLEYQIGYICSGIFGDNPRPNDKTGSCGPVSSNGANGVKGFSFKYGNGVWIGRTKSISSRNGFEMIWDPNGWTGTDNNFSIKQDIVGINEWSGYSGSFVQHPELTGLDCIRPCFWVELIRGRPRENTIWTSGSSISFCGVNSDTVGWSWPDGAELPFTIDK

SEQ ID NO: 22466 - protein, 469 aa, synthetic construct; identical to SEQ ID NO: 18719
  REGION 1..469: note = neuraminidase__InfluenzaA__AFK14809

SEQ ID NO: 22467 - protein, 469 aa, synthetic construct; identical to SEQ ID NO: 18719
  REGION 1..469: note = neuraminidase__InfluenzaA__AFK14816

SEQ ID NO: 22468 - protein, 469 aa, synthetic construct; identical to SEQ ID NO: 16738
  REGION 1..469: note = neuraminidase__InfluenzaA__AFK14824

SEQ ID NO: 22469 - protein, 469 aa, synthetic construct; identical to SEQ ID NO: 16738
  REGION 1..469: note = neuraminidase__InfluenzaA__AFK14841

SEQ ID NO: 22470 - protein, 469 aa, synthetic construct; identical to SEQ ID NO: 17811
  REGION 1..469: note = neuraminidase__InfluenzaA__AFK14849

SEQ ID NO: 22471 - protein, 469 aa, synthetic construct
  REGION 1..469: note = neuraminidase__InfluenzaA__AFK14856
MNPNQKIITIGSVCMTIGMANLILQIGNIISIWISHSIQLGNQNQIETCNQSVITYENNTWVNQTYVNISNTNFAAGQSVVSVKLAGNSSLCPVSGWAIYSKDNSVRIGSKGDVFVIREPFISCSPLECRTFFLTQGALLNDKHSNGTIKDRSPYRTLMSCPIGEVPSPYNSRFESVAWSASACHDGINWLTIGISGPDNGAVAVLKYNGIITDTIKSWRNNILRTQESECACVNGSCFTVMTDGPSNGQASYKIFKIEKGKIVKSVEMNAPNYHYEECSCYPDSSEITCVCRDNWHGSNRPWVSFNQNLEYQIGYICSGIFGDNPRPIDKTGSCGPVSSNGANGVKGFSFKYGNGVWIGRTKSISSRNGFEMIWDPNGWTGTDNNFSIKQDIVGINEWSGYSGSFVQHPELTGLDCIRPCFWVELIRGRPKENTIWTSGSSISFCGVNSDTVGWSWPDGAELPFTIDK

SEQ ID NO: 22472 - protein, 469 aa, synthetic construct; identical to SEQ ID NO: 16738
  REGION 1..469: note = neuraminidase__InfluenzaA__AFK14870

SEQ ID NO: 22473 - protein, 469 aa, synthetic construct; identical to SEQ ID NO: 16738
  REGION 1..469: note = neuraminidase__InfluenzaA__AFK14879

SEQ ID NO: 22474 - protein, 469 aa, synthetic construct; identical to SEQ ID NO: 16738
  REGION 1..469: note = neuraminidase__InfluenzaA__AFK14885

SEQ ID NO: 22475 - protein, 469 aa, synthetic construct; identical to SEQ ID NO: 16738
  REGION 1..469: note = neuraminidase__InfluenzaA__AFK14894

SEQ ID NO: 22476 - protein, 469 aa, synthetic construct; identical to SEQ ID NO: 16738
  REGION 1..469: note = neuraminidase__InfluenzaA__AFK14903

SEQ ID NO: 22477 - protein, 469 aa, synthetic construct; identical to SEQ ID NO: 16738
  REGION 1..469: note = neuraminidase__InfluenzaA__AFK14912

SEQ ID NO: 22478 - protein, 469 aa, synthetic construct; identical to SEQ ID NO: 16738
  REGION 1..469: note = neuraminidase__InfluenzaA__AFK14921

SEQ ID NO: 22479 - protein, 469 aa, synthetic construct; identical to SEQ ID NO: 16738
  REGION 1..469: note = neuraminidase__InfluenzaA__AFK14931

SEQ ID NO: 22480 - protein, 469 aa, synthetic construct
  REGION 1..469: note = neuraminidase__InfluenzaA__AFK25604
MNPNQKIITIGSVCMTIGMANLILQIGNIISIWISHSIQLRNQSQIETCNQSVITYENNTWVNQTYVNISNTNFAAGQSVVSVKLAGNSSLCPVSGWAIYSKDNSIRIGSKGDVFVIREPFISCSPLECRTFFLTQGALLNDKHSNGTIKDRSPYRTLMSCPIGEVPSPYNSRFESVAWSASACHDGINWLTIGISGPDNGAVAVLKYNGIITDTIKSWRNNILRTQESECACVNGSCFTIMTDGPSDGQASYKIFRIEKGKIVKSVEMNAPNYYYEECSCYPDSSEITCVCRDNWHGSNRPWVSFNQNLEYQIGYICSGIFGDNPRPNDKTGSCGPVSSNGANGVKGFSFKYGNGVWIGRTKSISSRKGFEMIWDPNGWTGTDNNFSIKQDIVGINEWSGYSGSFVQHPELTGLDCIRPCFWVELIRGRPKENTIWTSGSSISFCGVNSDTVGWSWPDGAELPFTIDK

SEQ ID NO: 22481 - protein, 469 aa, synthetic construct; identical to SEQ ID NO: 22480
  REGION 1..469: note = neuraminidase__InfluenzaA__AFK25606

SEQ ID NO: 22482 - protein, 469 aa, synthetic construct; identical to SEQ ID NO: 18089
  REGION 1..469: note = neuraminidase__InfluenzaA__AFK74537

SEQ ID NO: 22483 - protein, 469 aa, synthetic construct; identical to SEQ ID NO: 16738
  REGION 1..469: note = neuraminidase__InfluenzaA__AFK74547

SEQ ID NO: 22484 - protein, 469 aa, synthetic construct; identical to SEQ ID NO: 19730
  REGION 1..469: note = neuraminidase__InfluenzaA__AFK74557

SEQ ID NO: 22485 - protein, 469 aa, synthetic construct; identical to SEQ ID NO: 16738
  REGION 1..469: note = neuraminidase__InfluenzaA__AFK74567

SEQ ID NO: 22486 - protein, 469 aa, synthetic construct; identical to SEQ ID NO: 16738
  REGION 1..469: note = neuraminidase__InfluenzaA__AFK74578

SEQ ID NO: 22487 - protein, 469 aa, synthetic construct; identical to SEQ ID NO: 21853
  REGION 1..469: note = neuraminidase__InfluenzaA__AFK74588

SEQ ID NO: 22488 - protein, 469 aa, synthetic construct; identical to SEQ ID NO: 16738
  REGION 1..469: note = neuraminidase__InfluenzaA__AFK74598

SEQ ID NO: 22489 - protein, 469 aa, synthetic construct; identical to SEQ ID NO: 16738
  REGION 1..469: note = neuraminidase__InfluenzaA__AFK74608

SEQ ID NO: 22490 - protein, 469 aa, synthetic construct; identical to SEQ ID NO: 16738
  REGION 1..469: note = neuraminidase__InfluenzaA__AFK74618

SEQ ID NO: 22491 - protein, 469 aa, synthetic construct; identical to SEQ ID NO: 16738
  REGION 1..469: note = neuraminidase__InfluenzaA__AFK74628

SEQ ID NO: 22492 - protein, 469 aa, synthetic construct; identical to SEQ ID NO: 16738
  REGION 1..469: note = neuraminidase__InfluenzaA__AFK74638

SEQ ID NO: 22493 - protein, 469 aa, synthetic construct; identical to SEQ ID NO: 16738
  REGION 1..469: note = neuraminidase__InfluenzaA__AFK74648

SEQ ID NO: 22494 - protein, 469 aa, synthetic construct; identical to SEQ ID NO: 21862
  REGION 1..469: note = neuraminidase__InfluenzaA__AFK74658

SEQ ID NO: 22495 - protein, 469 aa, synthetic construct; identical to SEQ ID NO: 21862
  REGION 1..469: note = neuraminidase__InfluenzaA__AFK74668

SEQ ID NO: 22496 - protein, 469 aa, synthetic construct; identical to SEQ ID NO: 16738
  REGION 1..469: note = neuraminidase__InfluenzaA__AFK74678

SEQ ID NO: 22497 - protein, 469 aa, synthetic construct; identical to SEQ ID NO: 16738
  REGION 1..469: note = neuraminidase__InfluenzaA__AFK74688

SEQ ID NO: 22498 - protein, 469 aa, synthetic construct; identical to SEQ ID NO: 16738
  REGION 1..469: note = neuraminidase__InfluenzaA__AFK74698

SEQ ID NO: 22499 - protein, 469 aa, synthetic construct; identical to SEQ ID NO: 21869
  REGION 1..469: note = neuraminidase__InfluenzaA__AFK74708

SEQ ID NO: 22500 - protein, 469 aa, synthetic construct; identical to SEQ ID NO: 19730
  REGION 1..469: note = neuraminidase__InfluenzaA__AFK74718

SEQ ID NO: 22501 - protein, 469 aa, synthetic construct; identical to SEQ ID NO: 16738
  REGION 1..469: note = neuraminidase__InfluenzaA__AFK74728

SEQ ID NO: 22502 - protein, 469 aa, synthetic construct; identical to SEQ ID NO: 16738
  REGION 1..469: note = neuraminidase__InfluenzaA__AFK74738

SEQ ID NO: 22503 - protein, 469 aa, synthetic construct; identical to SEQ ID NO: 16738
  REGION 1..469: note = neuraminidase__InfluenzaA__AFK74748

SEQ ID NO: 22504 - protein, 469 aa, synthetic construct; identical to SEQ ID NO: 16738
  REGION 1..469: note = neuraminidase__InfluenzaA__AFK74758

SEQ ID NO: 22505 - protein, 469 aa, synthetic construct; identical to SEQ ID NO: 16738
  REGION 1..469: note = neuraminidase__InfluenzaA__AFK74768

SEQ ID NO: 22506 - protein, 469 aa, synthetic construct; identical to SEQ ID NO: 16738
  REGION 1..469: note = neuraminidase__InfluenzaA__AFK74778

SEQ ID NO: 22507 - protein, 469 aa, synthetic construct; identical to SEQ ID NO: 19730
  REGION 1..469: note = neuraminidase__InfluenzaA__AFK74788

SEQ ID NO: 22508 - protein, 469 aa, synthetic construct; identical to SEQ ID NO: 19730
  REGION 1..469: note = neuraminidase__InfluenzaA__AFK74798

SEQ ID NO: 22509 - protein, 469 aa, synthetic construct; identical to SEQ ID NO: 19730
  REGION 1..469: note = neuraminidase__InfluenzaA__AFK74808

SEQ ID NO: 22510 - protein, 469 aa, synthetic construct; identical to SEQ ID NO: 19730
  REGION 1..469: note = neuraminidase__InfluenzaA__AFK74818

SEQ ID NO: 22511 - protein, 469 aa, synthetic construct; identical to SEQ ID NO: 16738
  REGION 1..469: note = neuraminidase__InfluenzaA__AFK74828

SEQ ID NO: 22512 - protein, 469 aa, synthetic construct; identical to SEQ ID NO: 18629
  REGION 1..469: note = neuraminidase__InfluenzaA__AFK74838

SEQ ID NO: 22513 - protein, 469 aa, synthetic construct; identical to SEQ ID NO: 16738
  REGION 1..469: note = neuraminidase__InfluenzaA__AFK74848

SEQ ID NO: 22514 - protein, 469 aa, synthetic construct; identical to SEQ ID NO: 16738
  REGION 1..469: note = neuraminidase__InfluenzaA__AFK74898

SEQ ID NO: 22515 - protein, 469 aa, synthetic construct; identical to SEQ ID NO: 16738
  REGION 1..469: note = neuraminidase__InfluenzaA__AFK74908

SEQ ID NO: 22516 - protein, 469 aa, synthetic construct; identical to SEQ ID NO: 16738
  REGION 1..469: note = neuraminidase__InfluenzaA__AFK74918

SEQ ID NO: 22517 - protein, 469 aa, synthetic construct; identical to SEQ ID NO: 16738
  REGION 1..469: note = neuraminidase__InfluenzaA__AFK74928

SEQ ID NO: 22518 - protein, 469 aa, synthetic construct
  REGION 1..469: note = neuraminidase__InfluenzaA__AFK74938
MNPNQKIITIGSVCMTIGMANLILQIGNIISIWISHSIQLGNQNQIETCNQSVITYENNTWVNQTYVNISNTNFAAGQSVVSVKLAGNSSLCPVSGWAIYSKDNSIRIGSKGDVFVIREPFISCSPLECRTFFLTQGALLNDKHSNGTIKDRSPYRTLMSCPIGEVPSPYNSRFESVAWSASACHDGINWLTIGISGPDNGAVAVLKYNGIITDTIKSWRNNILRTQESECACVNGSCFTVMTDGPSDGQASYKIFRIEKGKIVKSVEMNAPNYHYEECSCYPDSSEITCVCRDNWHGSNRPWVSFNQNLEYQIGYICSGIFGDNPRPNDNTGSCGPVSSNGANGVKGFSFKYGNGVWIGRTKSISSRNGFEMIWDPNGWTGTDNNFSIKQDIVGINEWSGYSGSFVQHPELTGLDCIRPCFWVELIRGRPKENTIWTSGSSISFCGVNSDTVGWSWPDGAELPFTIDK

SEQ ID NO: 22519 - protein, 469 aa, synthetic construct; identical to SEQ ID NO: 16738
  REGION 1..469: note = neuraminidase__InfluenzaA__AFK74948

SEQ ID NO: 22520 - protein, 469 aa, synthetic construct; identical to SEQ ID NO: 18629
  REGION 1..469: note = neuraminidase__InfluenzaA__AFK74958

SEQ ID NO: 22521 - protein, 469 aa, synthetic construct; identical to SEQ ID NO: 19730
  REGION 1..469: note = neuraminidase__InfluenzaA__AFK74968

SEQ ID NO: 22522 - protein, 469 aa, synthetic construct; identical to SEQ ID NO: 16738
  REGION 1..469: note = neuraminidase__InfluenzaA__AFK74978

SEQ ID NO: 22523 - protein, 469 aa, synthetic construct; identical to SEQ ID NO: 18629
  REGION 1..469: note = neuraminidase__InfluenzaA__AFK74988

SEQ ID NO: 22524 - protein, 469 aa, synthetic construct; identical to SEQ ID NO: 16738
  REGION 1..469: note = neuraminidase__InfluenzaA__AFK74998

SEQ ID NO: 22525 - protein, 469 aa, synthetic construct; identical to SEQ ID NO: 19730
  REGION 1..469: note = neuraminidase__InfluenzaA__AFK75008

SEQ ID NO: 22526 - protein, 469 aa, synthetic construct; identical to SEQ ID NO: 16738
  REGION 1..469: note = neuraminidase__InfluenzaA__AFK75018

SEQ ID NO: 22527 - protein, 469 aa, synthetic construct; identical to SEQ ID NO: 16738
  REGION 1..469: note = neuraminidase__InfluenzaA__AFK75028

SEQ ID NO: 22528 - protein, 469 aa, synthetic construct; identical to SEQ ID NO: 16738
  REGION 1..469: note = neuraminidase__InfluenzaA__AFK75038

SEQ ID NO: 22529 - protein, 469 aa, synthetic construct; identical to SEQ ID NO: 16738
  REGION 1..469: note = neuraminidase__InfluenzaA__AFK75048

SEQ ID NO: 22530 - protein, 469 aa, synthetic construct; identical to SEQ ID NO: 16738
  REGION 1..469: note = neuraminidase__InfluenzaA__AFK75058

SEQ ID NO: 22531 - protein, 469 aa, synthetic construct; identical to SEQ ID NO: 19730
  REGION 1..469: note = neuraminidase__InfluenzaA__AFK75068

SEQ ID NO: 22532 - protein, 469 aa, synthetic construct; identical to SEQ ID NO: 16738
  REGION 1..469: note = neuraminidase__InfluenzaA__AFK75078

SEQ ID NO: 22533 - protein, 469 aa, synthetic construct; identical to SEQ ID NO: 16738
  REGION 1..469: note = neuraminidase__InfluenzaA__AFK75088

SEQ ID NO: 22534 - protein, 469 aa, synthetic construct; identical to SEQ ID NO: 16738
  REGION 1..469: note = neuraminidase__InfluenzaA__AFK75098

SEQ ID NO: 22535 - protein, 469 aa, synthetic construct; identical to SEQ ID NO: 18651
  REGION 1..469: note = neuraminidase__InfluenzaA__AFK75108

SEQ ID NO: 22536 - protein, 469 aa, synthetic construct; identical to SEQ ID NO: 16738
  REGION 1..469: note = neuraminidase__InfluenzaA__AFK77860

SEQ ID NO: 22537 - protein, 469 aa, synthetic construct; identical to SEQ ID NO: 16738
  REGION 1..469: note = neuraminidase__InfluenzaA__AFK77870

SEQ ID NO: 22538 - protein, 469 aa, synthetic construct; identical to SEQ ID NO: 16738
  REGION 1..469: note = neuraminidase__InfluenzaA__AFK77880

SEQ ID NO: 22539 - protein, 469 aa, synthetic construct
  REGION 1..469: note = neuraminidase__InfluenzaA__AFK77890
MNPNQKIITIGSVCMTIGMANLILQIGNIISIWISHSIQLGNQNQIETCNQSVITYENNTWVNQTYVNISNTNFAAGQSVVSVKLAGNSSLCPVSGWAIYSKDNSIRIGSKGDVFVIREPFISCSPLECRTFFLTQGALLNDKHSNGTIKDRSPYRTLMSCPIGEVPSPYNSRFESVAWSASACHDGINWLTIGISGPDNGAVAVLKYNGIITDTIKSWRNNILRTQESECACVNGSCFTVMTDGPSDGQASYKIFRIEKGKIVKSVEMNAPNYHYEECSCYPDSSEITCVCRDNWHGSNRPWVSFNQNLEYQIGYICSGIFGDNPRPNDKTGSCGPVSSNGANGVKGFSFKYGNGVWIGRTKGISSRNGFEMIWDPNGWTGTDNNFSIKQDIVGINEWSGYSGSFVQHPELTGLDCIRPCFWVELIRGRPKENTIWTSGSSISFCGVNSDTVGWSWPDGAELPFTIDK

SEQ ID NO: 22540 - protein, 469 aa, synthetic construct
  REGION 1..469: note = neuraminidase__InfluenzaA__AFK77900
MNPNQKIITIGSVCMTIGMANLILQIGNIISIWISHSIQIGNQNQIETCNQSVITYENNTWVNQTYVNISNTNFAAGQSVASVKLAGNSSLCPVSGWAIYSKDNSIRIGSKGDVFVIREPFISCSPLECRTFFLTQGALLNDKHSNGTIKDRSPYRALMSCPIGEVPSPYNSRFESVAWSASACHDGINWLTIGISGPDNGAVAVLKYNGIITDTIKSWRNNILRTQESECACVNGSCFTIMTDGPSDGQASYKIFRIEKGKIVKSVEMNAPNYHYEECSCYPDSSEITCVCRDNWHGSNRPWVSFNQNLEYQIGYICSGIFGDNPRPNDKTGSCGPVSSNGANGVKGFSFKYGNGVWIGRTKSISSRKGFEMIWDPNGWTGTDNNFSIKQDIVGMNEWSGYSGSFVQHPELTGLDCIRPCFWVELIRGRPKENTIWTSGSSISFCGVNSDTVGWSWPDGAELPFTIDK

SEQ ID NO: 22541 - protein, 469 aa, synthetic construct
  REGION 1..469: note = neuraminidase__InfluenzaA__AFK78031
MNPNQKIITIGSVCMTIGMANLILQIGNIISIWISHSIQLGNQNQIETCNQSVITYENNTWVNQTYVNISNTNFAAGQSVASVKLAGNSSLCPVSGWAIYSKDNSIRIGSKGDVFVIREPFISCSPLECRTFFLTQGALLNDKHSNGTIKDRSPYRALMSCPIGEVPSPYNSRFESVAWSASACHDGINWLTIGISGPDNGAVAVLKYNGIITDTIKSWRNNILRTQESECACVNGSCFTIMTDGPSDGQASYKIFRIEKGKIVKSVEMNAPNYHYEECSCYPDSSEITCVCRDNWHGSNRPWVSFNQNLEYQIGYICSGIFGDNPRPNDKTGSCGPVSSNGANGVKGFSFKYGNGVWIGRTKSISSRKGFEMIWDPNGWTGTDNNFSIKQDIVGMNEWSGYSGSFVQHPELTGLDCIRPCFWVELIRGRPKENTIWTSGSSISFCGVNSDTVGWSWPDGAELPFTIDK

SEQ ID NO: 22542 - protein, 469 aa, synthetic construct; identical to SEQ ID NO: 16738
  REGION 1..469: note = neuraminidase__InfluenzaA__AFK78190

SEQ ID NO: 22543 - protein, 453 aa, synthetic construct
  REGION 1..453: note = neuraminidase__InfluenzaA__AFM68957
MNPNQKIITIGSICMVVGIISLILQIGNIISIWISHSIQTGNQNHTGICNQGIITHNVVAGQDSTSVILTGNSSLCPIRGWAIHSKDNGIRIGSKGDVFVIREPFISCSHLECRTFFLTQGALLNDKHSYGTSKDRSPYRALMSCPVGEAPSPYNSRFESVAWSASACHDGMGWLTIGISGPDNGAVAVLKYNGIITETIKSWRKKILRTQESECTCVNGSCFTIMTDGPSDGLASYKIFKIEKGKVTKSIELNAPNSHYEECSCYPDTGKVMCVCRDNWHGSNRPWVSFDQNLDYQIGYICSGVFGDNPRPKDGTGSCGPVSADGANGVKGFSYRYGNGVWIGRTKSDSSRHGFEMIWDPNGWTETDSRFSVRQDVVAMTDRSGYSGSFVQHPELTGLDCMRPCFWVELIRGQPEEETIWTSGSIISFCGVNSDTVDWSWPDGAELPFTIDK

SEQ ID NO: 22544 - protein, 469 aa, synthetic construct
  REGION 1..469: note = neuraminidase__InfluenzaA__AFM68968
MNPNQKIITIGSVSLTIATICFLMQIAILVTTVTLHFKQYECDSPANNQVMPCEPIIIERNITEIVYLTNTTIEKEICPKLVEYRNWSKPQCKITGFAPFSKDNSIRLSAGGDIWVTREPYVSCDPGKCYQFALGQGTTLDNKHSNDTIHDRTPHRTLLMNELGVPFHLGTRQVCIAWSSSSCHDGKAWLHVCVTGYDKNATASFIYDGRLVDSIGSWSKNILRTQESECVCINGTCTVVMTDGSASERADTKILFIEEGKIVHISPLSGSAQHVEECSCYPRYPGVRCVCRDNWKGSNRPIVDINVKDYSIASSYVCSGLVGDTPRKNDRSSSSYCRNPNNEKGNHGVKGWAFDDGNDVWMGRTISEESRSGYETFKVIGGWSTPNSKLQINRQVIVDSDNRSGYSGIFSVEGKSCINRCFYVELIRGREQETRVWWTSNSIVVFCGTSGTYGTGSWPDGADINLMPI

SEQ ID NO: 22545 - protein, 469 aa, synthetic construct
  REGION 1..469: note = neuraminidase__InfluenzaA__AFM68979
MNPNQKIITIGSVSLTIATICFLMQIAILVTTVTLHFKQYECSSPPNNQVMPCEPIIIERNITEIVYLTNTTIEKEICPKLVEYRNWSKPQCKITGFAPFSKDNSIRLSAGGGIWVTREPYVSCDPGKCYQFALGQGTTLDNKHSNDTIHDRTPYRTLLMNELGVPFHLGTRQVCIAWSSSSCHDGKAWLHVCVTGYDKNATASFIYDGRLVDSIGSWSKNILRTQESECVCINGTCTVVMTDGSASERADTKILFIEEGKIVHISPLSGSAQHVEECSCYPRYPGVRCVCRDNWKGSNRPVVDINVKDYSIVSSYVCSGLVGDTPRKNDRSSSSYCRNPNNEKGNHGVKGWAFDDGNDVWMGRTISEESRSGYETFKVIGGWSTPNSKLQINRQVIVDSDNRSGYSGIFSVEGKSCINRCFYVELIRGREQETRVWWTSNSIVVFCGTSGTYGTGSWPDGADINLMPI

SEQ ID NO: 22546 - protein, 469 aa, synthetic construct; identical to SEQ ID NO: 22545
  REGION 1..469: note = neuraminidase__InfluenzaA__AFM68990

SEQ ID NO: 22547 - protein, 469 aa, synthetic construct; identical to SEQ ID NO: 14813
  REGION 1..469: note = neuraminidase__InfluenzaA__AFM71723

SEQ ID NO: 22548 - protein, 469 aa, synthetic construct; identical to SEQ ID NO: 22135
  REGION 1..469: note = neuraminidase__InfluenzaA__AFM71734

SEQ ID NO: 22549 - protein, 469 aa, synthetic construct; identical to SEQ ID NO: 21949
  REGION 1..469: note = neuraminidase__InfluenzaA__AFM71745

SEQ ID NO: 22550 - protein, 469 aa, synthetic construct; identical to SEQ ID NO: 18609
  REGION 1..469: note = neuraminidase__InfluenzaA__AFM71771

SEQ ID NO: 22551 - protein, 469 aa, synthetic construct; identical to SEQ ID NO: 21635
  REGION 1..469: note = neuraminidase__InfluenzaA__AFM71782

SEQ ID NO: 22552 - protein, 469 aa, synthetic construct; identical to SEQ ID NO: 21635
  REGION 1..469: note = neuraminidase__InfluenzaA__AFM71794

SEQ ID NO: 22553 - protein, 469 aa, synthetic construct; identical to SEQ ID NO: 16599
  REGION 1..469: note = neuraminidase__InfluenzaA__AFM71805

SEQ ID NO: 22554 - protein, 469 aa, synthetic construct
  REGION 1..469: note = neuraminidase__InfluenzaA__AFM71827
MNPNQKIITIGSVSLTISTICFFMQIAILITTVTLHFKQYEFNSPPNNQVMLCEPTIIERNITEIVYLTNTTIEKEICPKLAEYRNWSKPQCDITGFAPFSKDNSIRLSAGGDIWVTREPYVSCDPDKCYQFALGQGTTLNNVHSNNTVRDRTPYRTLLMNELGVPFHLGTKQVCIAWSSSSCHDGKAWLHVCITGDDKNATASFIYNGRLVDSVVSWSKEILRTQESECVCINGTCTVVMTDGSASGKADTKILFIEEGKIVHTSTLSGSAQHVEECSCYPRYPGVRCVCRDNWKGSNRPIVDINIKDHSIVSSYVCSGLVGDTPRKNDSSSSSHCLDPNNEEGGHGVKGWAFDDGKDVWMGRTISEKSRLGYETFKVIEGWSNPKSKLQINRQVIVDRGNRSGYSGIFSVEGKSCINRCFYVELIRGRKEETEVLWTSNSIVVFCGTSGTYGTGSWPDGADINLMPI

SEQ ID NO: 22555 - protein, 469 aa, synthetic construct; identical to SEQ ID NO: 19518
  REGION 1..469: note = neuraminidase__InfluenzaA__AFM71838

SEQ ID NO: 22556 - protein, 454 aa, synthetic construct; identical to SEQ ID NO: 15719
  REGION 1..454: note = neuraminidase__InfluenzaA__AFM71849

SEQ ID NO: 22557 - protein, 469 aa, synthetic construct; identical to SEQ ID NO: 14095
  REGION 1..469: note = neuraminidase__InfluenzaA__AFM71860

SEQ ID NO: 22558 - protein, 469 aa, synthetic construct; identical to SEQ ID NO: 14327
  REGION 1..469: note = neuraminidase__InfluenzaA__AFM71871

SEQ ID NO: 22559 - protein, 469 aa, synthetic construct; identical to SEQ ID NO: 14327
  REGION 1..469: note = neuraminidase__InfluenzaA__AFM71882

SEQ ID NO: 22560 - protein, 469 aa, synthetic construct
  REGION 1..469: note = neuraminidase__InfluenzaA__AFM71893
MNPNQKIITIGSVSLTIATVCFLMQIAILATTVTLHFKQHECDSPASNQVMPCEPIIIERNITEIVYLNNTTIEKEICPEVVEYRNWSKPQCQITGFAPFSKDNSIRLSAGGDIWVTREPYVSCDPGKCYQFALGQGTTLDNKHSNGTIHDRIPHRTLLMNELGVPFHLGTKQVCVAWSSSSCHDGKAWLHVCVTGDDRNATASFIYDGRLVDSIGSWSQNILRTQESECVCINGTCTVVMTDGSASGRADTRILFIKEGKIVHISPLSGSAQHIEECSCYPRYPDVRCICRDNWKGSNRPVIDINMEDYSIDSSYVCSGLVGDTPRNDDSSSNSNCRDPNNERGNPGVKGWAFDNGDDVWMGRTINKESRSGYETFKVIGGWSTPNSKSQVNRQVIVDNNNWSGYSGIFSVEGKSCINRCFYVELIRGRPQETRVWWTSNSIVVFCGTSGTYGTGSWPDGANINFMPI

SEQ ID NO: 22561 - protein, 469 aa, synthetic construct
  REGION 1..469: note = neuraminidase__InfluenzaA__AFM71904
MNPNQKIITIGSVSLTIATVCFLMQIAILATTVTLHFKQHECDSPASNQVMPCEPIIIERNITEIVYLNNTTIEKEICPEVVEYRNWSKPQCQITGFAPFSKDNSIRLSAGGDIWVTREPYVSCDPGKCYQFALGQGTTLDNKHSNVTIHDRIPHRTLLMNELGVPFHLGTKQVCVAWSSSSCHDGKAWLHVCVTGDDRNATASFIYDGRLVDSIGSWSQNILRTQESECVCINGTCTVVMTDGSASGRADTRILFIKEGKIVHISPLSGSAQHIEECSCYPRYPDVRCICRDNWKGSNRPVIDINMEDYSIDSGYVCSGLVGDTPRNDDSSSNSNCRDPNNERGNPGVKGWAFDNGDDVWMGRTINKESRSGYETFKVIGGWSTPNSKSQVNRQVIVDNNNWSGYSGIFSVEGKSCINRCFYVELIRGRPQETRVWWTSNSIVVFCGTSGTYGTGSWPDGANINFMPI

SEQ ID NO: 22562 - protein, 469 aa, synthetic construct; identical to SEQ ID NO: 14972
  REGION 1..469: note = neuraminidase__InfluenzaA__AFM71915

SEQ ID NO: 22563 - protein, 469 aa, synthetic construct; identical to SEQ ID NO: 14972
  REGION 1..469: note = neuraminidase__InfluenzaA__AFM71926

SEQ ID NO: 22564 - protein, 469 aa, synthetic construct; identical to SEQ ID NO: 14972
  REGION 1..469: note = neuraminidase__InfluenzaA__AFM71937

SEQ ID NO: 22565 - protein, 469 aa, synthetic construct; identical to SEQ ID NO: 21980
  REGION 1..469: note = neuraminidase__InfluenzaA__AFM71948

SEQ ID NO: 22566 - protein, 469 aa, synthetic construct; identical to SEQ ID NO: 21980
  REGION 1..469: note = neuraminidase__InfluenzaA__AFM71959

SEQ ID NO: 22567 - protein, 469 aa, synthetic construct
  REGION 1..469: note = neuraminidase__InfluenzaA__AFM71970
MNPNQKIITIGSVSLTIATICFLMQIAILVTTVTLHFKQYECDSPANNQVMPYEPIIIERNITEIVYLTNTTIEKEICPKLVEYRNWSKPQCKITGFAPFSKDNSIRLSAGGDIWVTREPYVSCDPGKCYQFALGQGTTLENKHSNDTIHDRTPHRTLLMNELGVPFHLGTRQVCIAWSSSSCHDGKAWLHVCVTGYDKNATASFIYDGRLVDSIGSWSQNILRTQESECVCINGTCTVVMTDGSASGRADTKILFIEEGKIVHISPLSGSAQHVEECSCYPRYPGVRCICRDNWKGSNRPVVDINVKDYSIDSSYVCSGLVGDTPRKNDRSSSSYCRNPNNEKGNHGVKGWAFDDGNDVWMGRTISEDSRSGYETFKVIGGWSTPNSKLQINRQVIVDSANRSGYSGIFSVEGKSCINRCFYVELIRGREQETRVWWTSNSIVVFCGTSGTYGTGSWPDGADINLMPI

SEQ ID NO: 22568 - protein, 469 aa, synthetic construct; identical to SEQ ID NO: 21988
  REGION 1..469: note = neuraminidase__InfluenzaA__AFM71981

SEQ ID NO: 22569 - protein, 469 aa, synthetic construct
  REGION 1..469: note = neuraminidase__InfluenzaA__AFM71992
MNPNQKIITIGSVSLTISTICFFMQIAILITTVTLHFKQYEFNSPPNNQVMLCEPTIIERNITEIVYLTNTTIEKEICPKLAEYRNWSKPQCDITGFAPFSKDNSIRLSAGGDIWVTREPYVSCDPDKCYQFALGQGTTLNNVHSNNTVRDRTPYRTLLMNELGVPFHLGTKQVCIAWSSSSCHDGKAWLHVCITGDDKNATASFIYNGRLVDSVVSWSQEILRTQESECVCINGTCTVVMTDGSASGKADTKILFIEEGKIVHTSTLSGSAQHVEECSCYPRYPGVRCVCRDNWKGSNRPIVDINIKDHSIVSSYVCSGLVGDTPRKNDSSSSSHCLDPNNEEGGHGVKGWAFDDGNDVWMGRTINETSRLGYETFKVIEGWSNPKSKLQMNRQVIVDRGNRSGYSGIFSVEGKSCINRCFYVELIRGRKEETEVLWTSNSIVVFCGTSGTYGTGSWPDGADLNLMPI

SEQ ID NO: 22570 - protein, 469 aa, synthetic construct; identical to SEQ ID NO: 22544
  REGION 1..469: note = neuraminidase__InfluenzaA__AFM72013

SEQ ID NO: 22571 - protein, 454 aa, synthetic construct; identical to SEQ ID NO: 15719
  REGION 1..454: note = neuraminidase__InfluenzaA__AFM72024

SEQ ID NO: 22572 - protein, 469 aa, synthetic construct; identical to SEQ ID NO: 18995
  REGION 1..469: note = neuraminidase__InfluenzaA__AFM72035

SEQ ID NO: 22573 - protein, 469 aa, synthetic construct; identical to SEQ ID NO: 18995
  REGION 1..469: note = neuraminidase__InfluenzaA__AFM72046

SEQ ID NO: 22574 - protein, 470 aa, synthetic construct
  REGION 1..470: note = neuraminidase__InfluenzaA__AFM72057
MNPNQKIITIGSICTTIGIISLILQIGNIISIWVSHSIQTGSQNHTGICNQRIITYENSTWVNQTYVNINNTNVVAGKDTTSVTLAGNSSLCPIRGWAIYSKDNSIRIGSKGDVFVIREPFISCSHLECRTFFLTQGALLNDKHSNGTVKDRSPYRALMSCPIGEAPSPYNSRFESVAWSASACHDGMGWLTIGISGPDDGAVAVLKYNGIITETIKSWRKRILRTQESECVCVNGSCFTIMTDGPSNGPASYRIFKIEKGKITKSIELDAPNSHYEECSCYPDTGTVMCVCRDNWHGSNRPWVSFNQNLDYQIGYICSGVFGDNPRPKDGKGSCDPVTVDGADGVKGFSYRYGNGVWIGRTKSNSSRKGFEMIWDPNGWTDTDSNFLVKQDVVAMTDWSGYSGSFVQHPELTGLDCMRPCFWVELIRGRPREKTTIWTSGSSISFCGVNSDTANWSWPDGAELPFTIDK

SEQ ID NO: 22575 - protein, 470 aa, synthetic construct; identical to SEQ ID NO: 15059
  REGION 1..470: note = neuraminidase__InfluenzaA__AFM72068

SEQ ID NO: 22576 - protein, 469 aa, synthetic construct
  REGION 1..469: note = neuraminidase__InfluenzaA__AFM72090
MNPNQKIITIGSVSLTIATICFLMQIAILVTTVTLHFKQYECSSPPNNQVMPCEPIIIERNITEIVYLTNTTIEKEICPKLVEYRNWSKPQCKITGFAPFSKDNSIRLSAGGDIWVTREPYVSCDPGKCYQFALGQGTTLNNKHSNDTVHDRTPYRTLLMNELGVPFHLGTKQVCIAWSSSSCHDGKAWLHVCVTGHDKNATASFIYDGRLVDSIGSWSKNILRTQESECVCINGTCTVVMTDGSASERADTKILFIEEGKIVHISPLSGSAQHVEECSCYPRYPGVRCVCRDNWKGSNRPIVDINVKDYSIVSSYVCSGLVGDTPRKNDRSSSSYCRNPNNEKGNHGVKGWAFDDGNDVWMGRTIGEELRLGYETFKVIGGWSTPNSKLQINRQVIVDSKNRSGYSGIFSVEGKSCINRCFYVELIRGREQETRVWWTSNSIVVFCGTSGTYGTGSWPDGADINLMPI

SEQ ID NO: 22577 - protein, 469 aa, synthetic construct
  REGION 1..469: note = neuraminidase__InfluenzaA__AFM72101
MNPNQKIITIGSVSLTIATICFLMQIAILVTTVTLHFKQYECSSPPNNQAMPCEPTIIERNITEIVYLTNTTIEKEICPKLVEYRNWSKPQCKITGFAPFSKDNSIRLSAGGDIWVTREPYVSCDPGKCYQFALGQGTTLNNRHSNDTVHDRTPYRTLLMNELGVPFHLGTKQVCIAWSSSSCHDGKAWLHVCVTGHDKNATASFIYDGRLVDSIGSWSKNILRTQESECVCINGTCTVVMTDGSASERADTKILFIEEGKIVHISPLSGSAQHVEECSCYPRYPGVRCVCRDNWKGSNRPIVDINVKDYSIVSSYVCSGLVGDTPRKNDRSSSSYCRNPNNEKGSHGVKGWAFDDGNDVWMGRTIGEELRSGYETFKVIGGWSTPNSKLQINRQVIVDSGNRSGYSGIFSVEGKSCINRCFYVELIRGREQETRVWWTSNSIVVFCGTSGTYGTGSWPDGADINLMPI

SEQ ID NO: 22578 - protein, 469 aa, synthetic construct; identical to SEQ ID NO: 14813
  REGION 1..469: note = neuraminidase__InfluenzaA__AFM72112

SEQ ID NO: 22579 - protein, 469 aa, synthetic construct
  REGION 1..469: note = neuraminidase__InfluenzaA__AFM72123
MNPNQKIITIGSVSLTIATICFLMQIAILVTTVTLHFKQYECSSPPNNQVMPCEPTIIERNITEIVYLTNTTIEKEICPKLVEYRNWSKPQCKITGFAPFSKDNSIRLSAGGDIWVTREPYVSCDPGKCYQFALGQGTTLNNRHSNDTVHDRTPYRTLLMNELGVPFHLGTKQVCIAWSSSSCHDGKAWLHVCVTGHDKNATASFIYDGRLVDSIGSWSKNILRTQESECVCINGTCTVVMTDGSASERADTKILFIEEGKIVHISPLSGSAQHVEECSCYPRYPGVRCVCRDNWKGSNRPIVDINVKDYSIVSSYVCSGLVGDTPRKNDRSSSSYCRNPNNEKGSHGVKGWAFDDGNDVWMGRTIGEELRSGYETFKVIGGWSTPNSKLQTNRQVIVDSGNRSGYSGIFSVEGKSCINRCFYVELIRGREQETRVWWTSNSIVVFCGTSGTYGTGSWPDGADINLMPI

SEQ ID NO: 22580 - protein, 469 aa, synthetic construct; identical to SEQ ID NO: 22135
  REGION 1..469: note = neuraminidase__InfluenzaA__AFM72134

SEQ ID NO: 22581 - protein, 469 aa, synthetic construct
  REGION 1..469: note = neuraminidase__InfluenzaA__AFM72145
MNPNQKIITIGSVSLTIATICFLMQIAILAITVTLHFKQYECNSPPNNQVMLCEPTIIERNTTEIVYLTNTTIEKEVCPKLAEYRNWSKPQCKITGFAPFSKDNSIRLSAGGDIWVTREPYVSCDPGKCYQFALGQGTTLNNRHSNDTVHDRTPYRTLLMNELGVPFHLGTKQVCIAWSSSSCHDGKAWLHVCVTGHDENATASFIYDGRLVDSIGSWSKNILRTQESECVCINGTCTVVMTDGSASERADTKILFIEEGKIVHISPLSGSAQHVEECSCYPRYPGVRCVCRDNWKGSNRPIVDINVKDYSIVSSYVCSGLVGDTPRKNDSSSSSYCRNPNNEKGSHGVKGWAFDDGNDVWMGRTISEELRSGYETFKVIGGWSKPNSKLQINRQVIVDRGNRSGYSGIFSVEGKSCINRCFYVELIRGRKQETEVWWTSNSIVVFCGTSGTYGTGSWPDGADINLMPI

SEQ ID NO: 22582 - protein, 469 aa, synthetic construct; identical to SEQ ID NO: 15185
  REGION 1..469: note = neuraminidase__InfluenzaA__AFM72156

SEQ ID NO: 22583 - protein, 469 aa, synthetic construct
  REGION 1..469: note = neuraminidase__InfluenzaA__AFM72167
MNPNQKIITIGSISLTIATICFLMQIAILVTTVTLHFKQYECNSPPNNQVMLCEPTIIERNITEIVYLTNTTIEKEICPELAEYRNWSKPQCKITGFAPFSKDNSIRLSAGGDIWVTREPYVSCDPGKCYQFALGQGTTLNNRHSNDTVHDRTPYRTLLMNELGVPFHLGTKQVCIAWSSSSCHDGKAWLHVCVTGHDENATASFIYDGRLVDSIGSWSKNILRTQESECVCINGTCTVVMTDGSASERADTKILFIEEGKIVHISPLSGSAQHVEECSCYPRYPGVRCVCRDNWKGSNRPIVDINVKDYSIVSSYVCSGLVGDTPRKNDSSSSSYCWNPNNEKGGHGVKGWAFDDGNDVWMGRTISEELRSGYETFKVIGGWSKPNSKLQINRQVIVDRGNRSGYSGIFSVEGKSCINRCFYVELIRGRKQETEVWWTSNSIVVFCGTSGTYGTGSWPDGADINLMPI

SEQ ID NO: 22584 - protein, 469 aa, synthetic construct
  REGION 1..469: note = neuraminidase__InfluenzaA__AFM72178
MNPNQKIITIGSVSLTIATICFLMQIAILVTTVTLHFKQYECNSPPNNQVMLCEPTIIERNITEIVYLTNTTIEKEICPELAEYRNWSKPQCKITGFAPFSKDNSIRLSAGGDIWVTREPYVSCDPGKCYQFALGQGTTLNNRHSNDTVHDRTPYRTLLMNELGVPFHLGTKQVCIAWSSSSCHDGKAWLHVCVTGHDENATASFIYDGRLVDSIGSWSKNILRTQESECVCINGTCTVVMTDGSASERADTKILFIEEGKIVHISPLSGSAQHVEECSCYPRYPGVRCVCRDNWKGSNRPIVDINVKDYSIVSSYVCSGLVGDTPRKNDSSSSSYCWNPNNEKGGHGVKGWAFDDGNDVWMGRTISEELRSGYETFKVIGGWSKPNSKLQINRQVIVDRGNRSGYSGIFSVEGKSCINRCFYVELIRGRKQETEVWWTSNSIVVFCGTSGTYGTGSWPDGADINLMPI

SEQ ID NO: 22585 - protein, 469 aa, synthetic construct
  REGION 1..469: note = neuraminidase__InfluenzaA__AFM72189
MNPNQKIITIGSVSLTIATICFLMQIAILVTTVTLHFKQYECNSPPNNQVMLCEPTIIERNITEIVYLTNTTIEKEICPKLAEYRNWSKPQCKITGFAPFSKDNSIRLSAGGDIWVTREPYVSCDPDKCYQFALGQGTTLNNRHSNDTVHDRTPYRTLLMNELGVPFHLGTKQVCIAWSSSSCHDGKAWLHVCVTGHDENATASFIYDGRLVDSIGSWSKKILRTQESECVCINGTCTVVMTDGSASGRADTKILFIEEGKIVHISPLLGSAQHVEECSCYPRYPGVRCVCRDNWKGSNRPIVDINVKDYSIVSSYVCSGLVGDTPRKNDSSSSSHCLNPNNEEGGHGVKGWAFDDGDDVWMGRTISEKLRSGYETFKVIEGWSKPNSKLQINRQVIVDRGNRSGYSGIFSVEGKSCINRCFYVELIRGRKQETEVWWTSNSIVVFCGTSGTYGTGSWPDGADINLMPI

SEQ ID NO: 22586 - protein, 469 aa, synthetic construct; identical to SEQ ID NO: 22585
  REGION 1..469: note = neuraminidase__InfluenzaA__AFM72200

SEQ ID NO: 22587 - protein, 469 aa, synthetic construct; identical to SEQ ID NO: 15749
  REGION 1..469: note = neuraminidase__InfluenzaA__AFM72211

SEQ ID NO: 22588 - protein, 469 aa, synthetic construct; identical to SEQ ID NO: 15749
  REGION 1..469: note = neuraminidase__InfluenzaA__AFM72222

SEQ ID NO: 22589 - protein, 470 aa, synthetic construct; identical to SEQ ID NO: 16453
  REGION 1..470: note = neuraminidase__InfluenzaA__AFM72233

SEQ ID NO: 22590 - protein, 469 aa, synthetic construct; identical to SEQ ID NO: 14573
  REGION 1..469: note = neuraminidase__InfluenzaA__AFM72249

SEQ ID NO: 22591 - protein, 469 aa, synthetic construct; identical to SEQ ID NO: 14061
  REGION 1..469: note = neuraminidase__InfluenzaA__AFM72260

SEQ ID NO: 22592 - protein, 469 aa, synthetic construct; identical to SEQ ID NO: 14061
  REGION 1..469: note = neuraminidase__InfluenzaA__AFM72271

SEQ ID NO: 22593 - protein, 469 aa, synthetic construct
  REGION 1..469: note = neuraminidase__InfluenzaA__AFM72293
MNPNQKIITIGSVSLTIATICFLMQIAILVTTVTLHFKQYECNSPPNNQVMLCEPTIIERNITEIVYLTNTTIEKEICPKLAEYRNWSKPQCNITGFAPFSKDNSIRLSAGGDIWVTREPYVSCDPDKCYQFALGQGTTLNNGHSNYTVHDRTPYRTLLMNELGVPFHLGTKQVCIAWSSSSCHDGKAWLHVCVTGDDENATASFIYNGRLVDSIGSWSKKILRTQESECVCINGTCTVVMTDGSASGKADTKILFIEEGKIVHTSSLSGSAQHVEECSCYPRYPGVRCVCRDNWKGSNRPIVDINVKDYSIVSSYVCSGLVGDTPRKNDSSSSSHCLDPNNEEGGHGVKGWAFDDGNDVWMGRTISEKLRSGYETFKVIEGWSKPNSKLQINRQVIVDRGNRSGYSGIFSVEGKSCINRCFYVELIRGRKQETEVLWTSNSIVVFCGTSGTYGTGSWPDGADINLMPI

SEQ ID NO: 22594 - protein, 469 aa, synthetic construct; identical to SEQ ID NO: 15929
  REGION 1..469: note = neuraminidase__InfluenzaA__AFM72304

SEQ ID NO: 22595 - protein, 469 aa, synthetic construct
  REGION 1..469: note = neuraminidase__InfluenzaA__AFM72315
MNPNQKIITIGSVSLTISTICFFMQIAILITTVTLHFKQYEFNSPPNNQVMLCEPTIIERNITEIVYLTNTTIEKEICPKLAEYRNWSKPQCNITGFAPFSKDNSIRLSAGGDIWVTREPYVSCDPDKCYQFALGQGTTLNNVHSNDTVHDRTPYRTLLMNELGVPFHLGTKQVCIAWSSSSCHDGKAWLHVCVTGDDENATASFIYNGRLVDSIVSWSKKILRTQESECVCINGTCTVVMTDGSASGKADTKILFIEEGKIVHTSTLSGSAQHVEECSCYPRYPGVRCVCRDNWKGSNRPIVDINIKDYSIVSSYVCSGLVGDTPRKNDSSSSSHCLDPNNEKGGHGVKGWAFDDGNDVWMGRTISEKLRSGYETFKVIEGWSNPNSKLQINRQVIVDRDNRSGYSGIFSVEGKSCINRCFYVELIRGRNQETEVLWTSNSIVVFCGTSGTYGTGSWPDGADINLMPI

SEQ ID NO: 22596 - protein, 469 aa, synthetic construct
  REGION 1..469: note = neuraminidase__InfluenzaA__AFM72326
MNPNQKIITIGSVSLTISTICFFMQIAILITTVTLHFKQYEFNSPPNNQVMLCEPTIIERNITEIVYLTNTTIEKEICPKLAEYRNWSKPQCNITGFAPFSKDNSIRLSAGGDIWVTREPYVSCDPDKCYQFALGQGTTLNNVHSNDTVHDRTPYRTLLMNELGVPFHLGTKQVCIAWSSSSCHDGKAWLHVCVTGDDENATASFIYNGRLVDSIVSWSKKILRTQESECVCINGTCTVVMTDGSASGKADTKILFIEEGKIVHTSTLSGSAQHVEECSCYPRYPGVRCVCRDNWKGSNRPIVDINIKDYSIVSSYVCSGLVGDTPRKNDSSSSSHCLDPNNEEGGHGVKGWAFDDGNDVWMGRTISEKLRSGYETFKVIEGWSNPNSKFQINRQVIVDRDNRSGYSGIFSVEGKSCINRCFYVELIRGRNQETEVLWTSNSIVVFCGTSGTYGTGSWPDGADINLMPI

SEQ ID NO: 22597 - protein, 469 aa, synthetic construct
  REGION 1..469: note = neuraminidase__InfluenzaA__AFM72337
MNPNQKIITIGSVSLTISTICFFMQIAILITTVTLHFKQYEFNSPPNNQVMLCEPTIIERNITEIVYLTNTTIEKEICPKLAEYRNWSKPQCDITGFAPFSKDNSIRLSAGGDIWVTREPYVSCDPDKCYQFALGQGTTLNNVHSNDTVRDRTPYRTLLMNELGVPFHLGTKQVCIAWSSSSCHDGKAWLHVCITGDDKNATASFIYNGRLVDSVVSWSKEILRTQESECVCINGTCTVVMTDGSASGKADTKILFIEEGKIVHTSTLSGSAQHVEECSCYPRYPGVRCVCRDNWKGSNRPIVDINIKDHSIVSSYVCSGLVGDTPRKNDSSSSSHCLDPNNEEGGHGVKGWAFDDGNDVWMGRTINETSRLGYETFKVIEGWSNPKSKLQINRQVIVDRGNRSGYSGIFSVEGKSCINRCFYVELIRGRKEETEVLWTSNSIVVFCGTSGTYGTGSWPDGADLNLMPI

SEQ ID NO: 22598 - protein, 469 aa, synthetic construct
  REGION 1..469: note = neuraminidase__InfluenzaA__AFM72348
MNPNQKIITIGSVSLTIATICFLMQIAILVTTVTLHFKQHECNSPPNNQVMLCEPTIIERNITEIVYLTNTTIEKEICPKLAEYRNWSKPQCNITGFAPFSKDNSIRLSAGGDIWVTREPYVSCDPDKCYQFALGQGTTLNNGHSNDTVHDRTPYRTLLMNELGIPFHLGTRQVCIAWSSSSCHDGKAWLHVCVTGDDKNATASFIYNGRLVDSIGSWSKKILRTQESECVCINGTCTVVMTDGSASGKADTKILFIEEGKIVHISTLSGSAQHVEECSCYPRYPGVRCVCRDNWKGSNRPIVDINVKDYSIVSSYVCSGLVGDTPRKNDSSSSSHCLDPNNEEGGHGVKGWAFDDGNDVWMGRTISEKLRSGYETFKVIEGWSKPNSKLQINRQVIVERGNRSGYSGIFSVEGKSCINRCFYVELIRGRKEETEVWWTSNSIVVFCGTSGTYGTGSWPDGADINLMPI

SEQ ID NO: 22599 - protein, 469 aa, synthetic construct
  REGION 1..469: note = neuraminidase__InfluenzaA__AFM72359
MNPNQKIITIGSVSLTISTICFFMQIAILITTVTLHFKQYEFNSPPNNQVMLCEPTIIERNITEIVYLTNTTIEKEICPKLAEYRNWSKPQCDITGFAPFSKDNSIRLSAGGDIWVTREPYVSCDPDKCYQFALGQGTTLNNVHSNDTVHDRTPYRTLLMNELGVPFHLGTKQVCIAWSSSSCHDGKAWLHVCVTGDDKNATASFIYNGRLVDSIVSWSKKILRTQESECVCINGTCTVVMTDGSASGKADTKILFIEEGKIVHTSTLSGSAQHVEECSCYPRYPGVRCVCRDNWKGSNRPIVDINIKDYSIVSSYVCSGLVGDTPRKNDSSSSSHCLDPNNEEGGHGVKGWAFDDGNDVWMGRTISEKLRSGYETFKVIEGWSNPNSKLQINRQVIVDRGNRSGYSGIFSVEGKSCINRCFYVELIRGRKEETKVLWTSNSIVVFCGTSGTYGTGSWPDGADINLMPI

SEQ ID NO: 22600 - protein, 469 aa, synthetic construct; identical to SEQ ID NO: 22599
  REGION 1..469: note = neuraminidase__InfluenzaA__AFM72370

SEQ ID NO: 22601 - protein, 469 aa, synthetic construct; identical to SEQ ID NO: 19518
  REGION 1..469: note = neuraminidase__InfluenzaA__AFM72381

SEQ ID NO: 22602 - protein, 469 aa, synthetic construct; identical to SEQ ID NO: 19518
  REGION 1..469: note = neuraminidase__InfluenzaA__AFM72392

SEQ ID NO: 22603 - protein, 469 aa, synthetic construct; identical to SEQ ID NO: 16402
  REGION 1..469: note = neuraminidase__InfluenzaA__AFM72403

SEQ ID NO: 22604 - protein, 469 aa, synthetic construct; identical to SEQ ID NO: 16402
  REGION 1..469: note = neuraminidase__InfluenzaA__AFM72414

SEQ ID NO: 22605 - protein, 469 aa, synthetic construct; identical to SEQ ID NO: 16066
  REGION 1..469: note = neuraminidase__InfluenzaA__AFM72425

SEQ ID NO: 22606 - protein, 469 aa, synthetic construct; identical to SEQ ID NO: 16066
  REGION 1..469: note = neuraminidase__InfluenzaA__AFM72436

SEQ ID NO: 22607 - protein, 469 aa, synthetic construct; identical to SEQ ID NO: 16066
  REGION 1..469: note = neuraminidase__InfluenzaA__AFM72447

SEQ ID NO: 22608 - protein, 469 aa, synthetic construct; identical to SEQ ID NO: 16066
  REGION 1..469: note = neuraminidase__InfluenzaA__AFM72458

SEQ ID NO: 22609 - protein, 469 aa, synthetic construct; identical to SEQ ID NO: 16066
  REGION 1..469: note = neuraminidase__InfluenzaA__AFM72469

SEQ ID NO: 22610 - protein, 469 aa, synthetic construct
  REGION 1..469: note = neuraminidase__InfluenzaA__AFM72491
MNPNQKIITIGSVSLTISTICFFMQIAILITTVTLHFKQYEFNSPPNNQVMMCEPTIIERNITEIVYLTNTTIEKEICPKLAEYRNWSKPQCDITGFAPFSKDNSIRLSAGGDIWVTREPYVSCDPDKCYQFALGQGTTLNNVHSNDTVRDRTPYRTLLMNELGVPFHLGTKQVCIAWSSSSCHDGKAWLHVCITGDDKNATASFIYNGRLVDSIVSWSKEILRTQESECVCINGTCTVVMTDGSASGKADTKILFIEEGKIVHTSTLSGSAQHVEECSCYPRYPGVRCVCRDNWKGSNRPIVDINIKDHSIVSSYVCSGLVGDTPRKNDSSSSSHCLDPNNEEGGHGVKGWAFDDGNDVWMGRTISEKSRLGYETFKVIEGWSNPNSKLQINRQVIVDRGNRSGYSGIFSVEGKSCINRCFYVELIRGRKEETEVLWTSNSIVVFCGTSGTYGTGSWPDGADINLMPI

SEQ ID NO: 22611 - protein, 469 aa, synthetic construct; identical to SEQ ID NO: 22610
  REGION 1..469: note = neuraminidase__InfluenzaA__AFM72502

SEQ ID NO: 22612 - protein, 470 aa, synthetic construct; identical to SEQ ID NO: 16632
  REGION 1..470: note = neuraminidase__InfluenzaA__AFM72513

SEQ ID NO: 22613 - protein, 470 aa, synthetic construct; identical to SEQ ID NO: 16632
  REGION 1..470: note = neuraminidase__InfluenzaA__AFM72524

SEQ ID NO: 22614 - protein, 470 aa, synthetic construct; identical to SEQ ID NO: 16632
  REGION 1..470: note = neuraminidase__InfluenzaA__AFM72535

SEQ ID NO: 22615 - protein, 470 aa, synthetic construct; identical to SEQ ID NO: 16632
  REGION 1..470: note = neuraminidase__InfluenzaA__AFM72546

SEQ ID NO: 22616 - protein, 470 aa, synthetic construct; identical to SEQ ID NO: 16632
  REGION 1..470: note = neuraminidase__InfluenzaA__AFM72557

SEQ ID NO: 22617 - protein, 469 aa, synthetic construct
  REGION 1..469: note = neuraminidase__InfluenzaA__AFM72579
MNPNQKIITIGSVSLTISTICFFMQTAILITTVTLHFKQYEFNSPPNNQVMLCEPTIIERNITEIVYLTNTTIEKEICPKLAEYRNWSKPQCDITGFAPFSKDNSIRLSAGGDIWVTREPYVSCDPDKCYQFALGQGTTLNNVHSNDTVHDRTPYRTLLMNELGVPFHLGTKQVCIAWSSSSCHDGKAWLHVCITGDDKNATASFIYNGRLVDSIVSWSKEILRTQESECVCINGTCTVVMTDGSASGKADTKILFIEEGKIVHTSILSGSAQHVEECSCYPRYPGVRCVCRDNWKGSNRPIVDINIKDHSIVSSYVCSGLVGDTPRKNDSSSSSHCLDPNNEEGGHGVKGWAFDDGNDVWMGRTISEKSRLGYETFKVIEGWSNPKSKLQINRQVIVDRGNRSGYSGIFSVEGKSCINRCFYVELIRGRKEETEVLWTSNSIVVFCGTSGTYGTGSWPDGADINLMPI

SEQ ID NO: 22618 - protein, 470 aa, synthetic construct
  REGION 1..470: note = neuraminidase__InfluenzaA__AFM72802
MNPNQKIITIGSISIAIGIISLMLQIGNIISIWASHSIQTGSQNHTGMCNQRIITYENSTWVNHTYVNINNTNVVAGKDKTPVTLAGNSSLCSISGWAIHTKDNSIRIGSKGDVFVIREPFISCSHLECKTFFLTQGALLNDKHSNGTVKDRSPYRALMSCPLGEAPSPYNSKFESVAWSASACHDGIGWLTIGISGPDNGAVAVLKYNGIITGTIKSWKKQILRTQESECVCMNGSCFTIMTDGPSNGAASYKIFKIEKGKVIKSMELNAPNFHYEECSCYPDTGTVMCVCRDNWHGSNRPWVSFNQNLDYQIGYICSGVFGDNPRPEDGEGSCNPVTVDGANGVKGFSYKYGNGVWIGRTKSNRIRKGFEMIWDPNGWTNTDSDFSVKQDIVAITDWSGYSGSFVQHPELTGLDCIRPCFWVELVRGLPRENTTIWTSGSSISFCGVNSDIANWSWPDGAELPFTIDK

SEQ ID NO: 22619 - protein, 470 aa, synthetic construct; identical to SEQ ID NO: 22618
  REGION 1..470: note = neuraminidase__InfluenzaA__AFM72813

SEQ ID NO: 22620 - protein, 470 aa, synthetic construct; identical to SEQ ID NO: 22618
  REGION 1..470: note = neuraminidase__InfluenzaA__AFM72824

SEQ ID NO: 22621 - protein, 469 aa, synthetic construct; identical to SEQ ID NO: 16728
  REGION 1..469: note = neuraminidase__InfluenzaA__AFM72835

SEQ ID NO: 22622 - protein, 469 aa, synthetic construct; identical to SEQ ID NO: 16728
  REGION 1..469: note = neuraminidase__InfluenzaA__AFM72845

SEQ ID NO: 22623 - protein, 469 aa, synthetic construct; identical to SEQ ID NO: 16728
  REGION 1..469: note = neuraminidase__InfluenzaA__AFM72855

SEQ ID NO: 22624 - protein, 469 aa, synthetic construct; identical to SEQ ID NO: 16728
  REGION 1..469: note = neuraminidase__InfluenzaA__AFM72865

SEQ ID NO: 22625 - protein, 469 aa, synthetic construct
  REGION 1..469: note = neuraminidase__InfluenzaA__AFM72875
MNPNQKIITIGSVSLTISTICFFMQIAILITTVTLHFKQYEFNSPPNNQVMLCEPTIIERNITEIVYLTNTTIEKEICPKLAEYRNWSKPQCDITGFAPFSKDNSIRLSAGGDIWVTREPYVSCDPDKCYQFALGQGTTLNNVHSNNTVRDRTPYRTLLMNELGVPFHLGTKQVCIAWSSSSCHDGKAWLHVCITGDDKNATASFIYNGRLVDSVVSWSKEILRTQESECVCINGTCTVVMTDGSASGKADTKILFIEEGKIVHTSTLSGSAQHVEECSCYPRYPGVRCVCRDNWKGSNRPIVDINIKDHSIVSSYVCSGLVGDTPRKSDSSSSSHCLDPNNEEGGHGVKGWAFDDGNDVWMGRTISEKSRLGYETFKVIEGWSNPKSKLQINRQVIVDRGNRSGYSGIFSVEGKSCINRCFYVELIRGRKEETEVLWTSNSIVVFCGTSGTYGTGSWPDGADINLMPV

SEQ ID NO: 22626 - protein, 469 aa, synthetic construct; identical to SEQ ID NO: 16599
  REGION 1..469: note = neuraminidase__InfluenzaA__AFM72886

SEQ ID NO: 22627 - protein, 469 aa, synthetic construct; identical to SEQ ID NO: 16599
  REGION 1..469: note = neuraminidase__InfluenzaA__AFM72897

SEQ ID NO: 22628 - protein, 469 aa, synthetic construct
  REGION 1..469: note = neuraminidase__InfluenzaA__AFM72908
MNPNQKIITIGSVSLTISTICFFMQIAILITTVTLHFKQYEFNSPPNNQVMLCEPTIIERNITEIVYLTNTTIEKEICPKLAEYRNWSKPQCDITGFAPFSKDNSIRLSAGGDIWVTREPYVSCDPDKCYQFALGQGTTLNNVHSNNTVRDRTPYRTLLMNELGVPFHLGTKQVCIAWSSSSCHDGKAWLHVCITGDDKNATASFIYNGRLVDSVVSWSKEILRTQESECVCINGTCTVVMTDGSASGKADTKILFIEEGKIVHTSTLSGSAQHVEECSCYPRYPGVRCVCRDNWKGSNRPIVDINTKDHSIVSSYVCSGLVGDTPRKNDSSSSSHCLDPNNEEGGHGVKGWAFDDGNDVWMGRTISEKSRLGYETFKVIEGWSNPKSKLQINRQVIVDRGNRSGYSGIFSVEGKSCINRCFYVELIRGRKEETEVLWTSNSIVVFCGTSGTYGTGSWPDGADINLMPV

SEQ ID NO: 22629 - protein, 469 aa, synthetic construct
  REGION 1..469: note = neuraminidase__InfluenzaA__AFM72919
MNPNQKIITIGSVSLTISTICFFMQIAILITTVTLHFKQHEFNSPPNNQVMLCEPTIIERNITEIVYLTNTTIEKEICPKLAEYRNWSKPQCDITGFAPFSKDNSIRLSAGGDIWVTREPYVSCDPDKCYQFALGQGTTLNNVHSNNTVRDRTPYRTLLMNELGVPFHLGTKQVCIAWSSSSCHDGKAWLHVCITGDDKNATASFIYNGRLVDSVVSWSKEILRTQESECVCINGTCTVVMTDGSASGKADTKILFIEEGKIVHTSTLSGSAQHVEECSCYPRYPGVRCVCRDNWKGSNRPIVDINTKDHSIVSSYVCSGLVGDTPRKNDSSSSSHCLDPNNEEGGHGVKGWAFDDGNDVWMGRTISEKSRLGYETFKVIEGWSNPKSKLQINRQVIVDRGNRSGYSGIFSVEGKSCINRCFYVELIRGRKEETEVLWTSNSIVVFCGTSGTYGTGSWPDGADINLMPV

SEQ ID NO: 22630 - protein, 469 aa, synthetic construct; identical to SEQ ID NO: 17905
  REGION 1..469: note = neuraminidase__InfluenzaA__AFM72930

SEQ ID NO: 22631 - protein, 469 aa, synthetic construct; identical to SEQ ID NO: 17905
  REGION 1..469: note = neuraminidase__InfluenzaA__AFM72941

SEQ ID NO: 22632 - protein, 469 aa, synthetic construct; identical to SEQ ID NO: 17905
  REGION 1..469: note = neuraminidase__InfluenzaA__AFM72952

SEQ ID NO: 22633 - protein, 469 aa, synthetic construct; identical to SEQ ID NO: 17905
  REGION 1..469: note = neuraminidase__InfluenzaA__AFM72963

SEQ ID NO: 22634 - protein, 469 aa, synthetic construct; identical to SEQ ID NO: 17905
  REGION 1..469: note = neuraminidase__InfluenzaA__AFM72974

SEQ ID NO: 22635 - protein, 469 aa, synthetic construct; identical to SEQ ID NO: 19518
  REGION 1..469: note = neuraminidase__InfluenzaA__AFM72985

SEQ ID NO: 22636 - protein, 469 aa, synthetic construct; identical to SEQ ID NO: 19518
  REGION 1..469: note = neuraminidase__InfluenzaA__AFM72996

SEQ ID NO: 22637 - protein, 469 aa, synthetic construct; identical to SEQ ID NO: 19518
  REGION 1..469: note = neuraminidase__InfluenzaA__AFM73007

SEQ ID NO: 22638 - protein, 469 aa, synthetic construct
  REGION 1..469: note = neuraminidase__InfluenzaA__AFM73018
MNPNQKIITIGSVCMTIGMANLILQIGNIISIWISHSIQLGNQSQIETCNQSVITYENNTWVNQTYVNISNTNFAAGQSVVSVKLAGNSSLCPVSGWAIYSKDNSIRIGSKGDVFVIREPFISCSPLECRTFFLTQGALLNDKHSNGTIKDRSPYRTLMSCPIGEVPSPYNSRFESVAWSASACHDGINWLTIGISGPDNGAVAVLKYNGIITDTIKSWRNNILRTQESECACVNGSCFTIMTDGPSDGQASYKIFRIEKGKIVKSVEMNAPNYHYEECSCYPDSSEITCVCRDNWHGSNRPWVSFNQNLEYQIGYICSGIFGDNPRPNDKTGSCGPVSSNGANGVKGFSFKYGNGIWIGRTKSISSRKGFEMIWDPNGWTGTDNNFSIKQDIVGINEWSGYSGSFVQHPELTGLDCIRPCFWVELIRGRPKENTIWTSGSSISFCGVNSDTVGWSWPDGAELPFTIDK

SEQ ID NO: 22639 - protein, 469 aa, synthetic construct; identical to SEQ ID NO: 22638
  REGION 1..469: note = neuraminidase__InfluenzaA__AFM73028

SEQ ID NO: 22640 - protein, 469 aa, synthetic construct; identical to SEQ ID NO: 22638
  REGION 1..469: note = neuraminidase__InfluenzaA__AFM73038

SEQ ID NO: 22641 - protein, 469 aa, synthetic construct; identical to SEQ ID NO: 18473
  REGION 1..469: note = neuraminidase__InfluenzaA__AFM73048

SEQ ID NO: 22642 - protein, 469 aa, synthetic construct
  REGION 1..469: note = neuraminidase__InfluenzaA__AFM73058
MNPNQKIITIGSFCMTIGLANLILQIGNIISIWISHSIQLGNQNQIETCNQSVITYENNTWVNQTYVNISNTNFAAGQSVVSVKLAGNSSLCPVSGWAIYSKDNSVRIGSKGDVFVIREPFISCSPLECRTFFLTQGALLNDKHSNGTIKDRSPYRTLMSCPIGEVPSPYNSRFESVAWSASACHDGINWLTIGISGPDNGAVAVLKYNGIITDTIKSWRNNILRTQESECACVNGSCFTVMTDGPSDGQASYKIFRIEKGKIVKSVEMNAPNYHYEECSCYPDSSEITCVCRDNWHGSNRPWVSFNQNLEYRIGYICSGIFGDNPRPNDKTGSCGPVSSNGANGVKGFSFKYGNGVWIGRTKSISSRNGFEMIWDPNGWTGTDKNFSIKQDIVGINEWSGYSGSFVQHPELTGLDCIRPCFWVELIRGRPKENTIWTSGSSISFCGVNSDTVGWSWPDGAELPFTIDK

SEQ ID NO: 22643 - protein, 469 aa, synthetic construct; identical to SEQ ID NO: 18473
  REGION 1..469: note = neuraminidase__InfluenzaA__AFM73068

SEQ ID NO: 22644 - protein, 470 aa, synthetic construct; identical to SEQ ID NO: 14951
  REGION 1..470: note = neuraminidase__InfluenzaA__AFM73480

SEQ ID NO: 22645 - protein, 449 aa, synthetic construct
  REGION 1..449: note = neuraminidase__InfluenzaA__AFM78569
MNPNQKIITIGSICMVIGIVSLMLQIGNMISIWVIHSIQTGNQHQAESISNTNPLTEKAVASVTLAGNSSLCPIRGWAVHSKDNNIRIGSKGDVFVIREPFISCSHLECRTFFLTQGALLNDKHSNGTVKDRSPHRTLMSCPVGEAPSPYNSRFESVAWSASACHDGTSWLTIGISGPDNEAVAVLKYNGIITDTIKSWRNDILRTQESECACVNGSCFTVMTDGPSNGQASYKIFKMEKGKVVKSVELDAPNYHYEECSCYPDAGEITCVCRDNWHGSNRPWVSFNQNLEYQIGYICSGVFGDNPRPNDGTGSCGPMSPNGAYGVKGFSFKYGNGVWIGRTKSTNSRSGFEMIWDPNGWTGTDSSFSVKQDIVAITDWSGYSGSFVQHPELTGLDCIRPCFWVELIRGRPKESTIWTSGSSISFCGVNSDTVSWSWPDGAELPFTIDK

SEQ ID NO: 22646 - protein, 469 aa, synthetic construct
  REGION 1..469: note = neuraminidase__InfluenzaA__AFM85180
MNPNQKIITIGSVSLTIATICFLTQIAILVTTVTLHFKQYECNSSPNNQVMLCEPTIIERNITEIVYLTNTTIEKEICPKLAEYRNWSKPQCNITGFAPFSKDNSIRLSAGGDIWVTREPYVSCGPDKCYQFALGQGTTLNNGHSNDTVHDRTPYRTLLMNELGVPFHLGTKQVCIAWSSSSCHDGKAWLHVCVTGDDKNATASFIYNGRLVDSIGSWSKKILRTQESECVCINGTCTVVMTDGSASGKADTKILFIEEGKIVHTSLLSGSAQHVEECSCYPRYPGVRCVCRDNWKGSNRPIVDINVKDYSIVSSYVCSGLVGDTPRKNDSSSSSHCLDPNNEEGGHGVKGWAFDDGNDVWMGRTISEKLRSGYETFKVIEGWSKPNSKLQINRQVIVDRGNRSGYSGIFSVEGKSCINRCFYVELIRGRNQETEVLWTSNSIVVFCGTSGTYGTGSWPDGADINLMPI

SEQ ID NO: 22647 - protein, 469 aa, synthetic construct; identical to SEQ ID NO: 14103
  REGION 1..469: note = neuraminidase__InfluenzaA__AFN11830

SEQ ID NO: 22648 - protein, 469 aa, synthetic construct
  REGION 1..469: note = neuraminidase__InfluenzaA__AFN11831
MNPNQKIITIGSVSLTIATICFLMQIAILVTTVTLHFKQYECDSPANNQVMPCEPIIIERNITEIVYLTNTTIEKEICPKLVEYRNWSKPQCKITGFAPFSKDNSIRLSAGGDIWVTREPYVSCDPGKCYQFALGQGTTLDNKHSNDTIHDRTPHRTLLMNELGVPFHLGTRQVCIAWSSSSCHDGKAWLHVCVTGYDKNATASFIYDGRLVDSIGSWSKNILRTQESECVCINGTCTVVMTDGSASGRADTKILFIEEGKIVHISPLSGSAQHVEECSCYPRYPGVRCVCRDNWKGSNRPVVDINVKDYSIVSSYVCSGLVGDTPRNNDRSSSSYCRNPNNEKGNHGVKGWAFDDGNDVWMGRTISEESRSGYETFKVIGGWSTPNSKLQINRQVIVDSDNRSGYSGIFSVEGKSCINRCFYVELIRGREQETRVWWTSNSIVVFCGTSGTYGTGSWPDGADINLMPI

SEQ ID NO: 22649 - protein, 469 aa, synthetic construct; identical to SEQ ID NO: 14576
  REGION 1..469: note = neuraminidase__InfluenzaA__AFN11833

SEQ ID NO: 22650 - protein, 469 aa, synthetic construct; identical to SEQ ID NO: 16511
  REGION 1..469: note = neuraminidase__InfluenzaA__AFN11835

SEQ ID NO: 22651 - protein, 469 aa, synthetic construct
  REGION 1..469: note = neuraminidase__InfluenzaA__AFN11836
MNPNQKIITIGSVSLTIATMCFLMQIAILVTTVTLHFKQYECSSPPNNQVMPCEPTIIERNITEIVYLTNTTIEKEICPKLVEYRNWSKPQCKITGFAPFSKDNSIRLSAGGDIWVTREPYVSCDPGKCYQFALGQGTTLNNRHSNDTVHDRTPYRTLLMNELGVPFHLGTKQVCIAWSSSSCHDGKAWLHVCVTGHDKNATASFIYDGRLVDSIGSWSKNILRTQESECVCINGTCTVVMTDGSASERADTKILFIEEGKIIHISPLSGSAQHVEECSCYPRYPGVRCVCRDNWKGSNRPIVDINVKDYSIVSSYVCSGLVGDTPRKNDRSSSSYCRNPNNEKGSHGVKGWAFDDGNDVWMGRTIGEELRSGYETFKVIGGWSTPNSKLQINRQVIVDSGNRSGYSGIFSVEGKSCINRCFYVELIRGREQETRVWWTSNSIVVFCGTSGTYGTGSWPDGADINLMPI

SEQ ID NO: 22652 - protein, 469 aa, synthetic construct
  REGION 1..469: note = neuraminidase__InfluenzaA__AFN11839
MNPNQKIITIGSVSLTIATICFLMQIAILVTTVTLHFKQYECSSPPNNQVMPCQPTIIERNITEIVYLTNTTIEKEICPKLVEYRNWSKPQCKITGFAPFSKDNSIRLSAGGDIWVTREPYVSCDPGKCYQFALGQGTTLNNRHSNDTVHDRTPYRTLLMNELGVPFHLGTKQVCIAWSSSSCHDGKAWLHVCVTGHDENATASFIYDGRLVDSIGSWSKNILRTQESECVCINGTCTVVMTDGSASERADTKILFIEEGKIVHISPLSGSAQHVEECSCYPRYPGVRCVCRDNWKGSNRPIVDINMKDYSIVSSYVCSGLVGDTPRKNDSSSSSYCRNPNNEKGSHGVKGWAFDDGNDVWMGRTISEELRSGYETFKVIGGWSTPNSKLQINRQVIVDSGNRSGYSGIFSVEGKSCINRCFYVELIRGRKQETKVWWTSNSIVVFCGTSGTYGTGSWPDGADINLMPI

SEQ ID NO: 22653 - protein, 469 aa, synthetic construct
  REGION 1..469: note = neuraminidase__InfluenzaA__AFN11840
MNPNQKIITIGSVSLTIATICFLMQIAILVTTVTLHFKQYECNSPPNNQVMLCEPTIIERNITEIVYLTNTTIEKEICPKLAEYRNWSKPQCKITGFAPFSKDNSIRLSAGGDIWVTREPYVSCDPGKCYQFALGQGTTLNNRHSNDTVHDRTPYRTLLMNELGVPFHLGTKQVCIAWSSSSCHDGKAWLHVCVTGHDENATASFIYDGRLVDSIGSWSKNILRTQESECVCINGTCTVVMTDGSASERADTKILFIEEGKIVHISPLSGSAQHVEECSCYPRYPGVRCVCRDNWKGSNRPIVDINVKDYSIVSSYVCSGLVGDTPRKNDSSSSSYCRNPNNEKGSHGVKGWAFDDGNDVWMGRTIGEELRSGYETFKVIGGWSTPNSKLQINRQVIVDRGNRSGYSGIFSVEGKSCINRCFYVELVRGRKQETEVWWTSNSIVVFCGTSGTYGTGSWPDGADINLMPI

SEQ ID NO: 22654 - protein, 469 aa, synthetic construct; identical to SEQ ID NO: 15929
  REGION 1..469: note = neuraminidase__InfluenzaA__AFN11841

SEQ ID NO: 22655 - protein, 469 aa, synthetic construct; identical to SEQ ID NO: 22017
  REGION 1..469: note = neuraminidase__InfluenzaA__AFN11842

SEQ ID NO: 22656 - protein, 469 aa, synthetic construct
  REGION 1..469: note = neuraminidase__InfluenzaA__AFN11844
MNPNQKIITIGSVSLTISTICFFMQIAILITTVTLHFKQYEFNSPPNNQVMLCEPTIIERNITEIVYLTNTTIEKEICPKLAEYRNWSKPQCNITGFAPFSKDNSIRLSAGGDIWVTREPYVSCDPDKCYQFALGQGTTLNNVHSNDTVRDRTPYRTLLMNELGVPFHLGTKQVCIAWSSSSCHDGKAWLHVCVTGDDKNATASFIYNGRLVDSIVSWSKEILRTQESECVCINGTCTVVMTDGSASGKADTKILFIEEGKIVHTSTLSGSAQHVEECSCYPRYPGVRCVCRDNWKGSNRPIVDINIKDYSIVSSYVCSGLVGDTPRKNDSSSSSHCLDPNNEEGGHGVKGWAFDDGNDVWMGRTISEKLRSGYETFKVIEGWSNPNSKLQINRQVIVDRGNRSGYSGIFSVEGKSCINRCFYVELIRGRKEETEVLWTSNSIVVFCGTSGTYGTGSWPDGADIGLMPM

SEQ ID NO: 22657 - protein, 469 aa, synthetic construct; identical to SEQ ID NO: 22576
  REGION 1..469: note = neuraminidase__InfluenzaA__AFN11845

SEQ ID NO: 22658 - protein, 469 aa, synthetic construct; identical to SEQ ID NO: 22104
  REGION 1..469: note = neuraminidase__InfluenzaA__AFN11847

SEQ ID NO: 22659 - protein, 469 aa, synthetic construct
  REGION 1..469: note = neuraminidase__InfluenzaA__AFN11848
MNPNQKIITIGSVSLTISTICFFMQIAILITTVTLHFKQYEFNSPPNNQVMLCEPTIIERNITEIVYLTNTTIEKEICPKLAEYRNWSKPQCNITGFAPFSKDNSIRLSAGGDIWVTREPYVSCDPDKCYQFALGQGTTLNNVHSNDTVHDRTPYRTLLMNELGVPFHLGTKQVCIAWSSSSCHDGKAWLHVCVTGDDENATASFIYNGRLVDSIVSWSKKILRTQESECVCINGTCTVVMTDGSASGKADTKILFIEEGKIVHTSTLSGSAQHVEECSCYPRYPGVRCVCRDNWKGSNRPIVDINIKDYSIVSSYVCSGLVGDTPRKNDSSSSSHCLGPNNEEGGHGVKGWAFDDGNDVWMGRTISEKLRSGYETFKVIEGWSNPNSKLQINRQVIVDRGNRSGYSGIFSVEGKSCINRCFYVELIRGRKQETEVLWTSNSIVVFCGTSGTYGTGSWPDGADINLMPI

SEQ ID NO: 22660 - protein, 469 aa, synthetic construct
  REGION 1..469: note = neuraminidase__InfluenzaA__AFN11850
MNPNQKIITIGSVSLTISTICFFMQIAILITTVTLHFKQYEFNSPPNNQVMLCEPTIIERNITEIVYLTNTTIEKEICPKLAEYRNWSKPQCDITGFAPFSKDNSIRLSAGGDIWVTREPYVSCDPDKCYQFALGQGTTLNNVHSNNTVRGRTPYRTLLMNELGVPFHLGTKQVCIAWSSSSCHDGKAWLHVCITGDDKNATASFIYNGRLVDSVVSWSKEILRTQESECVCINGTCTVVMTDGSASGKADTKILFIEEGKIVHTSTLSGSAQHVEECSCYPRYPGVRCVCRDNWKGSNRPIVDINIKDHSIVSSYVCSGLVGDTPRKNDSSSSSHCLDPNNEEGGHGVKGWAFDDGNDVWMGRTISEKSRLGYETFKVIEGWSNHKSKLQINRQVIVDRGNRSGYSGIFSVEGKSCINRCFYVELIRGRKEETEVLWTSNSIVVFCGTSGTYGTGSWPDGADLNLMPI

SEQ ID NO: 22661 - protein, 469 aa, synthetic construct
  REGION 1..469: note = neuraminidase__InfluenzaA__AFN11851
MNPNQKIITIGSVSLTIATICLLMQIAILVTTVTLHFKQYECNSPPNNQVMLCEPTIIERNITKIVYLTNTTIEKEICPKLAEYRNWSKPQCKITGFAPFSKDNSIRLSAGGDIWVTREPYVSCDPGKCYQFALGQGTTLNNRHSNDTVHDRTPYRTLLMNELGVPFHLGTKQVCIAWSSSSCHDGKAWLHVCVTGHDENATASFIYDGRLVDSIGSWSKNILRTQESECVCINGTCTVVMTDGSASERADTKILFIEEGKIVHISPLSGSAQHVEECSCYPRYPGVRCVCRDNWKGSNRPIVDINVKDYSIVSSYVCSGLVGDTPRKNDSSSSSYCRNPNNEKGSHGVKGWAFDDGNDVWMGRTISEELRSGYETFKVIGGWSKPNSKLQINRQVIVDRGNRSGYSGIFSVEGKSCINRCFYVELIRGRKQETEVWWTSNSIVVFCGTSGTYGTGSWPDGADINLMPI

SEQ ID NO: 22662 - protein, 469 aa, synthetic construct; identical to SEQ ID NO: 14327
  REGION 1..469: note = neuraminidase__InfluenzaA__AFN11853

SEQ ID NO: 22663 - protein, 469 aa, synthetic construct
  REGION 1..469: note = neuraminidase__InfluenzaA__AFN11855
MNPNQKIITIGSVSLTISTICFFMQTAILITIVTLHFKQYEFNSPPNNQVMLCEPTIIERNITEIVYLTNTTIEKEICPKLAEYRNWSKPQCDITGFAPFSKDNSIRLSAGGDIWVTREPYVSCDPDKCYQFALGQGTTLNNVHSNDTVHDRTPYRTLLMNELGVPFHLGTKQVCIAWSSSSCHDGKAWLHVCITGDDKNATASFIYNGRLVDSIVSWSKEILRTQESECVCINGTCTVVMTDGSASGKADTKILFIEEGKIVHTSILSGSAQHVEECSCYPRYPGVRCVCRDNWKGSNRPIVDINIKDHSIVSSYVCSGLVGDTPRKNDSSSSSHCLDPNNEEGGHGVKGWAFDDGNDVWMGRTISEKSRLGYETFKVIEGWSNPKSKLQINRQVIVDRGNRSGYSGIFSVEGKSCINRCFYVELIRGRKEETEVLWTSNSIVVFCGTSGTYGTGSWPDGADINLMPI

SEQ ID NO: 22664 - protein, 469 aa, synthetic construct; identical to SEQ ID NO: 15929
  REGION 1..469: note = neuraminidase__InfluenzaA__AFN11857

SEQ ID NO: 22665 - protein, 469 aa, synthetic construct; identical to SEQ ID NO: 16738
  REGION 1..469: note = neuraminidase__InfluenzaA__AFN17373

SEQ ID NO: 22666 - protein, 469 aa, synthetic construct; identical to SEQ ID NO: 22371
  REGION 1..469: note = neuraminidase__InfluenzaA__AFN17383

SEQ ID NO: 22667 - protein, 469 aa, synthetic construct; identical to SEQ ID NO: 16738
  REGION 1..469: note = neuraminidase__InfluenzaA__AFN17393

SEQ ID NO: 22668 - protein, 469 aa, synthetic construct; identical to SEQ ID NO: 16738
  REGION 1..469: note = neuraminidase__InfluenzaA__AFN17403

SEQ ID NO: 22669 - protein, 469 aa, synthetic construct; identical to SEQ ID NO: 16738
  REGION 1..469: note = neuraminidase__InfluenzaA__AFN17413

SEQ ID NO: 22670 - protein, 469 aa, synthetic construct; identical to SEQ ID NO: 16738
  REGION 1..469: note = neuraminidase__InfluenzaA__AFN17423

SEQ ID NO: 22671 - protein, 469 aa, synthetic construct; identical to SEQ ID NO: 16738
  REGION 1..469: note = neuraminidase__InfluenzaA__AFN17433

SEQ ID NO: 22672 - protein, 469 aa, synthetic construct; identical to SEQ ID NO: 16738
  REGION 1..469: note = neuraminidase__InfluenzaA__AFN17443

SEQ ID NO: 22673 - protein, 469 aa, synthetic construct; identical to SEQ ID NO: 16738
  REGION 1..469: note = neuraminidase__InfluenzaA__AFN17453

SEQ ID NO: 22674 - protein, 469 aa, synthetic construct; identical to SEQ ID NO: 16738
  REGION 1..469: note = neuraminidase__InfluenzaA__AFN17459

SEQ ID NO: 22675 - protein, 469 aa, synthetic construct; identical to SEQ ID NO: 16738
  REGION 1..469: note = neuraminidase__InfluenzaA__AFN17469

SEQ ID NO: 22676 - protein, 469 aa, synthetic construct; identical to SEQ ID NO: 16738
  REGION 1..469: note = neuraminidase__InfluenzaA__AFN17479

SEQ ID NO: 22677 - protein, 469 aa, synthetic construct; identical to SEQ ID NO: 16738
  REGION 1..469: note = neuraminidase__InfluenzaA__AFN17489

SEQ ID NO: 22678 - protein, 469 aa, synthetic construct; identical to SEQ ID NO: 16738
  REGION 1..469: note = neuraminidase__InfluenzaA__AFN17499

SEQ ID NO: 22679 - protein, 469 aa, synthetic construct; identical to SEQ ID NO: 16738
  REGION 1..469: note = neuraminidase__InfluenzaA__AFN17509

SEQ ID NO: 22680 - protein, 469 aa, synthetic construct; identical to SEQ ID NO: 16738
  REGION 1..469: note = neuraminidase__InfluenzaA__AFN17519

SEQ ID NO: 22681 - protein, 469 aa, synthetic construct; identical to SEQ ID NO: 16738
  REGION 1..469: note = neuraminidase__InfluenzaA__AFN17529

SEQ ID NO: 22682 - protein, 469 aa, synthetic construct; identical to SEQ ID NO: 16738
  REGION 1..469: note = neuraminidase__InfluenzaA__AFN17539

SEQ ID NO: 22683 - protein, 469 aa, synthetic construct; identical to SEQ ID NO: 16738
  REGION 1..469: note = neuraminidase__InfluenzaA__AFN17549

SEQ ID NO: 22684 - protein, 469 aa, synthetic construct; identical to SEQ ID NO: 16738
  REGION 1..469: note = neuraminidase__InfluenzaA__AFN17559

SEQ ID NO: 22685 - protein, 469 aa, synthetic construct; identical to SEQ ID NO: 16738
  REGION 1..469: note = neuraminidase__InfluenzaA__AFN17569

SEQ ID NO: 22686 - protein, 469 aa, synthetic construct; identical to SEQ ID NO: 16738
  REGION 1..469: note = neuraminidase__InfluenzaA__AFN17575

SEQ ID NO: 22687 - protein, 469 aa, synthetic construct; identical to SEQ ID NO: 16738
  REGION 1..469: note = neuraminidase__InfluenzaA__AFN17581

SEQ ID NO: 22688 - protein, 469 aa, synthetic construct; identical to SEQ ID NO: 16738
  REGION 1..469: note = neuraminidase__InfluenzaA__AFN17587

SEQ ID NO: 22689 - protein, 469 aa, synthetic construct; identical to SEQ ID NO: 16738
  REGION 1..469: note = neuraminidase__InfluenzaA__AFN17597

SEQ ID NO: 22690 - protein, 469 aa, synthetic construct; identical to SEQ ID NO: 22371
  REGION 1..469: note = neuraminidase__InfluenzaA__AFN17607

SEQ ID NO: 22691 - protein, 469 aa, synthetic construct; identical to SEQ ID NO: 16738
  REGION 1..469: note = neuraminidase__InfluenzaA__AFN17617

SEQ ID NO: 22692 - protein, 469 aa, synthetic construct; identical to SEQ ID NO: 16738
  REGION 1..469: note = neuraminidase__InfluenzaA__AFN17627

SEQ ID NO: 22693 - protein, 469 aa, synthetic construct; identical to SEQ ID NO: 16738
  REGION 1..469: note = neuraminidase__InfluenzaA__AFN17637

SEQ ID NO: 22694 - protein, 469 aa, synthetic construct; identical to SEQ ID NO: 16738
  REGION 1..469: note = neuraminidase__InfluenzaA__AFN17647

SEQ ID NO: 22695 - protein, 469 aa, synthetic construct; identical to SEQ ID NO: 16738
  REGION 1..469: note = neuraminidase__InfluenzaA__AFN17657

SEQ ID NO: 22696 - protein, 469 aa, synthetic construct; identical to SEQ ID NO: 16738
  REGION 1..469: note = neuraminidase__InfluenzaA__AFN17667

SEQ ID NO: 22697 - protein, 469 aa, synthetic construct; identical to SEQ ID NO: 16738
  REGION 1..469: note = neuraminidase__InfluenzaA__AFN17677

SEQ ID NO: 22698 - protein, 469 aa, synthetic construct; identical to SEQ ID NO: 22371
  REGION 1..469: note = neuraminidase__InfluenzaA__AFN17687

SEQ ID NO: 22699 - protein, 469 aa, synthetic construct; identical to SEQ ID NO: 16738
  REGION 1..469: note = neuraminidase__InfluenzaA__AFN17697

SEQ ID NO: 22700 - protein, 469 aa, synthetic construct; identical to SEQ ID NO: 22371
  REGION 1..469: note = neuraminidase__InfluenzaA__AFN17707

SEQ ID NO: 22701 - protein, 469 aa, synthetic construct; identical to SEQ ID NO: 16738
  REGION 1..469: note = neuraminidase__InfluenzaA__AFN17717

SEQ ID NO: 22702 - protein, 469 aa, synthetic construct; identical to SEQ ID NO: 22371
  REGION 1..469: note = neuraminidase__InfluenzaA__AFN17727

SEQ ID NO: 22703 - protein, 469 aa, synthetic construct; identical to SEQ ID NO: 16738
  REGION 1..469: note = neuraminidase__InfluenzaA__AFN17737

SEQ ID NO: 22704 - protein, 469 aa, synthetic construct; identical to SEQ ID NO: 16738
  REGION 1..469: note = neuraminidase__InfluenzaA__AFN17743

SEQ ID NO: 22705 - protein, 469 aa, synthetic construct; identical to SEQ ID NO: 22371
  REGION 1..469: note = neuraminidase__InfluenzaA__AFN17749

SEQ ID NO: 22706 - protein, 469 aa, synthetic construct; identical to SEQ ID NO: 16738
  REGION 1..469: note = neuraminidase__InfluenzaA__AFN17759

SEQ ID NO: 22707 - protein, 469 aa, synthetic construct; identical to SEQ ID NO: 16738
  REGION 1..469: note = neuraminidase__InfluenzaA__AFN17769

SEQ ID NO: 22708 - protein, 469 aa, synthetic construct; identical to SEQ ID NO: 16738
  REGION 1..469: note = neuraminidase__InfluenzaA__AFN17775

SEQ ID NO: 22709 - protein, 469 aa, synthetic construct
  REGION 1..469: note = neuraminidase__InfluenzaA__AFN17785
MNPNQKIITIGSVCMTIGMANLILQIGNIISIWISHSIQLGNQNQIETCNQSVITYENNTWVNQTYVNISNTNFAAGQSVVSVKLAGNSSLCPVSGWAIYSKDNSIRIGSKGDVFVIREPFISCSPLECRTFFLTQGALLNDKHSNGTIKDRSPYRTLMSCPIGEVPSPYNSRFESVAWSASACHDGINWLTIGISGPDNGAVAVLKYNGIITDTIKSWRNNILRTQESECACVNGSCFTLMTDGPSDGQASYKIFRIEKGKIVKSVEMNAPNYHYEECSCYPDSSEITCVCRDNWHGSNRPWVSFNQNLEYQIGYICSGIFGDNPRPNDKTGSCGPVSSNGANGVKGFSFKYGNGVWIGRTKSISSRNGFEMIWDPNGWTGTDNTFSIKQDIVGINEWSGYSGSFVQHPELTGLDCIRPCFWVELIRGRPKENTIWTSGSSISFCGVNSDTVGWSWPDGAELPFTIDK

SEQ ID NO: 22710 - protein, 469 aa, synthetic construct
  REGION 1..469: note = neuraminidase__InfluenzaA__AFN17795
MNPNQKIITIGSVCMTIGMANLILQIGNIISIWISHSIQLGNQNQIETCNQSVITYENNTWVNQTYVNISNTNFAAGQSVVSVKLAGNSSLCPVGGWAIYSKDNSIRIGSKGDVFVIREPFISCSPLECRTFFLTQGALLNDKHSNGTIKDRSPYRTLMSCPIGEVPSPYNSRFESVAWSASACHDGINWLTIGISGPDNGAVAVLKYNGIITDTIKSWRNNILRTQESECACVNGSCFTVMTDGPSDGQASYKIFRIEKGKIVKSVEMNAPNYHYEECSCYPDSSEITCVCRDNWHGSNRPWVSFNQNLEYQIGYICSGIFGDNPRPNDKTGSCGPVSSNGANGVKGFSFKYGNGVWIGRTKSISSRNGFEMIWDPNGWTGTDNNFSIKQDIVGINEWSGYSGSFVQHPELTGLDCIRPCFWVELIRGRPKENTIWTSGSSISFCGVNSDTVGWSWPDGAELPFTIDK

SEQ ID NO: 22711 - protein, 469 aa, synthetic construct; identical to SEQ ID NO: 16738
  REGION 1..469: note = neuraminidase__InfluenzaA__AFN17805

SEQ ID NO: 22712 - protein, 469 aa, synthetic construct
  REGION 1..469: note = neuraminidase__InfluenzaA__AFN17815
MNPNQKIITIGSVSMTIGMANLILQIGNIISIWISHSIQLGNQNQIETCNQSVITYENNTWVNQTYVNISNTNFAAGQSVVSVKLAGNSSLCPVSGWAIYSKDNSIRIGSKGDVFVIREPFISCSPLECRTFFLTQGALLNDKHSNGTIKDRSPYRTLMSCPIGEVPSPYNSRFESVAWSASACHDGINWLTIGISGPDNGAVAVLKYNGIITDTIKSWRNNILRTQESECACVNGSCFTVMTDGPSDGQASYKIFRIEKGKIVKSVEMNAPNYHYEECSCYPDSSEITCVCRDNWHGSNRPWVSFNQNLEYQIGYICSGIFGDNPRPNDKTGSCGPVSSNGANGVKGFSFKYGNGVWIGRTKSISSRNGFEMIWDPNGWTGTDNNFSIKQDIVGINEWSGYSGSFVQHPELTGLDCIRPCFWVELIRGRPKENTIWTSGSSISFCGVNSDTVGWSWPDGAELPFTIDK

SEQ ID NO: 22713 - protein, 469 aa, synthetic construct; identical to SEQ ID NO: 16738
  REGION 1..469: note = neuraminidase__InfluenzaA__AFN17825

SEQ ID NO: 22714 - protein, 469 aa, synthetic construct; identical to SEQ ID NO: 22371
  REGION 1..469: note = neuraminidase__InfluenzaA__AFN17835

SEQ ID NO: 22715 - protein, 469 aa, synthetic construct; identical to SEQ ID NO: 16738
  REGION 1..469: note = neuraminidase__InfluenzaA__AFN17845

SEQ ID NO: 22716 - protein, 469 aa, synthetic construct; identical to SEQ ID NO: 16738
  REGION 1..469: note = neuraminidase__InfluenzaA__AFN17855

SEQ ID NO: 22717 - protein, 469 aa, synthetic construct; identical to SEQ ID NO: 18552
  REGION 1..469: note = neuraminidase__InfluenzaA__AFN17865

SEQ ID NO: 22718 - protein, 469 aa, synthetic construct; identical to SEQ ID NO: 22371
  REGION 1..469: note = neuraminidase__InfluenzaA__AFN17875

SEQ ID NO: 22719 - protein, 469 aa, synthetic construct; identical to SEQ ID NO: 22371
  REGION 1..469: note = neuraminidase__InfluenzaA__AFN17885

SEQ ID NO: 22720 - protein, 469 aa, synthetic construct; identical to SEQ ID NO: 16738
  REGION 1..469: note = neuraminidase__InfluenzaA__AFN17895

SEQ ID NO: 22721 - protein, 469 aa, synthetic construct; identical to SEQ ID NO: 22371
  REGION 1..469: note = neuraminidase__InfluenzaA__AFN17905

SEQ ID NO: 22722 - protein, 469 aa, synthetic construct; identical to SEQ ID NO: 16738
  REGION 1..469: note = neuraminidase__InfluenzaA__AFN17911

SEQ ID NO: 22723 - protein, 469 aa, synthetic construct; identical to SEQ ID NO: 22371
  REGION 1..469: note = neuraminidase__InfluenzaA__AFN17921

SEQ ID NO: 22724 - protein, 469 aa, synthetic construct
  REGION 1..469: note = neuraminidase__InfluenzaA__AFN17931
MNPNQKIITIGSVCMTIGMANLILQIGNIISIWISHSIQLGNQNQIETCNQSVITYENNTWVNQTYVNISNTNFAAGQSVVSVKLAGNSSLCPVSGWAIYSKDNSIRIGSRGDVFVIREPFISCSPLECRTFFLTQGALLNDKHSNGTIKDRSPYRTLMSCPIGEVPSPYNSRFESVAWSASACHDGINWLTIGISGPDNGAVAVLKYNGIITDTIKSWRNNILRTQESECACVNGSCFTVMTDGPSDGQASYKIFRIEKGKIVKSVEMNAPNYHYEECSCYPDSSEITCVCRDNWHGSNRPWVSFNQNLEYRIGYICSGIFGDNPRPNDKTGSCGPVSSNGANGVKGFSFKYGNGVWIGRTKSISSRNGFEMIWDPNGWTGTDNNFSIKQDIVGINEWSGYSGSFVQHPELTGLDCIRPCFWVELIRGRPKENTIWTSGSSISFCGVNSDTVGWSWPDGAELPFTIDK

SEQ ID NO: 22725 - protein, 469 aa, synthetic construct; identical to SEQ ID NO: 16738
  REGION 1..469: note = neuraminidase__InfluenzaA__AFN17941

SEQ ID NO: 22726 - protein, 469 aa, synthetic construct; identical to SEQ ID NO: 16738
  REGION 1..469: note = neuraminidase__InfluenzaA__AFN17951

SEQ ID NO: 22727 - protein, 469 aa, synthetic construct
  REGION 1..469: note = neuraminidase__InfluenzaA__AFN17961
MNPNQKIITIGSVCMTIGMANLILQIGNIISIWISHSIQLGNQNQIETCNQSVITYENNTWVNQTYVNISNTNFAAGQSVVSVKLAGNSSLCPVSGWAIYSKDNSIRIGSKGDVFVIREPFISCSPLECRTFFLTQGALLNDKHSNGTIKDRSPYRTLMSCPIGEVPSPYNSRFESVAWSASACHDGINWLTIGISGPDNGAVAVLKYNGIITDTIKSWRNNILRTQESECACVNGSCFTVMTDGPSDGQASYKIFRIEKGKIVNSVEMNAPNYHYEECSCYPDSSEITCVCRDNWHGSNRPWVSFNQNLEYQIGYICSGIFGDNPRPNDKTGSCGPVSSNGANGVKGFSFKYGNGVWIGRTKSISSRNGFEMIWDPNGWTGTDNNFSIKQDIVGINEWSGYSGSFVQHPELTGLDCIRPCFWVELIRGRPKENTIWTSGSSISFCGVNSDTVGWSWPDGAELPFTIDK

SEQ ID NO: 22728 - protein, 469 aa, synthetic construct; identical to SEQ ID NO: 16738
  REGION 1..469: note = neuraminidase__InfluenzaA__AFN17971

SEQ ID NO: 22729 - protein, 469 aa, synthetic construct; identical to SEQ ID NO: 16738
  REGION 1..469: note = neuraminidase__InfluenzaA__AFN17981

SEQ ID NO: 22730 - protein, 469 aa, synthetic construct; identical to SEQ ID NO: 16738
  REGION 1..469: note = neuraminidase__InfluenzaA__AFN17991

SEQ ID NO: 22731 - protein, 469 aa, synthetic construct
  REGION 1..469: note = neuraminidase__InfluenzaA__AFN18001
MNPNQKIITISSVCMTIGMANLILQIGNIISIWISHSIQLGNQNQIETCNQSVITYENNTWVNQTYVNISNTNFAAGQSVVSVKLAGNSSLCPVSGWAIYSKDNSIRIGSKGDVFVIREPFISCSPLECRTFFLTQGALLNDKHSNGTIKDRSPYRTLMSCPIGEVPSPYNSRFESVAWSASACHDGINWLTIGISGPDNGAVAVLKYNGIITDTIKSWRNNILRTQESECACVNGSCFTLMTDGPSDGQASYKIFRIEKGKIVKSVEMNAPNYHYEECSCYPDSSEITCVCRDNWHGSNRPWVSFNQNLEYQIGYICSGIFGDNPRPNDKTGSCGPVSSNGANGVKGFSFKYGNGVWIGRTKSISSRNGFEMIWDPNGWTGTDNNFSIKQDIVGINEWSGYSGSFVQHPELTGLDCIRPCFWVELIRGRPKENTIWTSGSSISFCGVNSDTVGWSWPDGAELPFTIDK

SEQ ID NO: 22732 - protein, 469 aa, synthetic construct; identical to SEQ ID NO: 16738
  REGION 1..469: note = neuraminidase__InfluenzaA__AFN18011

SEQ ID NO: 22733 - protein, 469 aa, synthetic construct; identical to SEQ ID NO: 16738
  REGION 1..469: note = neuraminidase__InfluenzaA__AFN18021

SEQ ID NO: 22734 - protein, 469 aa, synthetic construct
  REGION 1..469: note = neuraminidase__InfluenzaA__AFN18031
MNPNQKIITIGSICMTIGMANLILQIGNIISIWISHSIQLGNQNQIETCNQSVITYENNTWVNQTYVNISNTNFAAGQSVVSVKLAGNSSLCPVSGWAIYSKDNSIRIGSKGDVFVIREPFISCSPLECRTFFLTQGALLNDKHSNGTIKDRSPYRTLMSCPIGEVPSPYNSRFESVAWSASACHDGINWLTIGISGPDNGAVAVLKYNGIITDTIKSWRNNILRTQESECACVNGSCFTLMTDGPSDGQASYKIFRIEKGKIVKSVEMNAPNYHYEECSCYPDSSEITCVCRDNWHGSNRPWVSFNQNLEYQIGYICSGIFGDNPRPNDKTGSCGPVSSNGANGVKGFSFKYGNGVWIGRTKSISSRNGFEMIWDPNGWTGTDNNFSIKQDIVGINEWSGYSGSFVQHPELTGLDCIRPCFWVELIRGRPKENTIWTSGSSISFCGVNSDTVGWSWPDGAELPFTIDK

SEQ ID NO: 22735 - protein, 469 aa, synthetic construct; identical to SEQ ID NO: 16738
  REGION 1..469: note = neuraminidase__InfluenzaA__AFN18041

SEQ ID NO: 22736 - protein, 469 aa, synthetic construct; identical to SEQ ID NO: 22371
  REGION 1..469: note = neuraminidase__InfluenzaA__AFN18051

SEQ ID NO: 22737 - protein, 469 aa, synthetic construct; identical to SEQ ID NO: 22371
  REGION 1..469: note = neuraminidase__InfluenzaA__AFN18061

SEQ ID NO: 22738 - protein, 469 aa, synthetic construct; identical to SEQ ID NO: 16738
  REGION 1..469: note = neuraminidase__InfluenzaA__AFN18070

SEQ ID NO: 22739 - protein, 469 aa, synthetic construct; identical to SEQ ID NO: 16738
  REGION 1..469: note = neuraminidase__InfluenzaA__AFN18080

SEQ ID NO: 22740 - protein, 469 aa, synthetic construct; identical to SEQ ID NO: 16738
  REGION 1..469: note = neuraminidase__InfluenzaA__AFN18090

SEQ ID NO: 22741 - protein, 469 aa, synthetic construct; identical to SEQ ID NO: 16738
  REGION 1..469: note = neuraminidase__InfluenzaA__AFN18100

SEQ ID NO: 22742 - protein, 469 aa, synthetic construct; identical to SEQ ID NO: 16738
  REGION 1..469: note = neuraminidase__InfluenzaA__AFN18106

SEQ ID NO: 22743 - protein, 469 aa, synthetic construct
  REGION 1..469: note = neuraminidase__InfluenzaA__AFN18108
MNPNQKIITIGSVCMTIGMANLILQIGNIISIWISHSIQLGNQNQIETCNQSVITYENNTWVNQTYVNISNTNFAAGQSVVSVKLAGNSSLCPVSGWAIYSKDNSIRIGSKGDVFVIREPFISCSPLECRTFFLTQGALLNDKHSNGTIKDRSPYRTLMSCPIGEVPSPYNSRFESVAWSASACHDGINWLTIGISGPDNGAVAVLKYNGIITDTIKSWRNNILRTQESECACVNGSCFTVMTDGPSDGQASYKIFRIEKGKIVKSVEMNAPNYHYEECSCYPDSSEITCVCRDNWHGSNRPWVSFNQNLEYRIGYICSGIFGDNPRPNDKTGSCGPVLSNGANGVKGFSFKYGNGVWIGRTKSISSRNGFEMIWDPNGWTGTDNNFSIKQDIVGINEWSGYSGSFVQHPELTGLDCIRPCFWVELIRGRPKENTIWTSGSSISFCGVNSDTVGWSWPDGAELPFTIDK

SEQ ID NO: 22744 - protein, 469 aa, synthetic construct
  REGION 1..469: note = neuraminidase__InfluenzaA__AFN18118
MNPNQKIITIGSVCMTIGMANLILQIGNMISIWISHSIQLGNQNQIETCNQSVITYENNTWVNQTYVKISNTNFAAGQSVVSVKLAGNSSLCPVSGWAIYSKDNSIRIGSKGDVFVIREPFISCSPLECRTFFLTQGALLNDKHSNGTIKDRSPYRTLMSCPIGEVPSPYNSRFESVAWSASACHDGINWLTIGISGPDNGAVAVLKYNGIITDTIKSWRNNILRTQESECACVNGSCFTLMTDGPSDGQASYKIFRIEKGKIVKSVEMNAPNYHYEECSCYPDSSEITCVCRDNWHGSNRPWVSFNQNLEYQIGYICSGIFGDNPRPNDKTGSCGPVSSNGANGVKGFSFKYGNGVWIGRTKSISSRNGFEMIWDPNGWTGTDNNFSIKQDIVGINEWSGYSGSFVQHPELTGLDCIRPCFWVELIRGRPKENTIWTSGSSISFCGVNSDTVGWSWPDGAELPFTIDK

SEQ ID NO: 22745 - protein, 469 aa, synthetic construct; identical to SEQ ID NO: 16738
  REGION 1..469: note = neuraminidase__InfluenzaA__AFN18120

SEQ ID NO: 22746 - protein, 469 aa, synthetic construct; identical to SEQ ID NO: 16738
  REGION 1..469: note = neuraminidase__InfluenzaA__AFN18122

SEQ ID NO: 22747 - protein, 469 aa, synthetic construct; identical to SEQ ID NO: 22371
  REGION 1..469: note = neuraminidase__InfluenzaA__AFN18128

SEQ ID NO: 22748 - protein, 469 aa, synthetic construct; identical to SEQ ID NO: 22371
  REGION 1..469: note = neuraminidase__InfluenzaA__AFN18134

SEQ ID NO: 22749 - protein, 469 aa, synthetic construct; identical to SEQ ID NO: 16738
  REGION 1..469: note = neuraminidase__InfluenzaA__AFN18136

SEQ ID NO: 22750 - protein, 469 aa, synthetic construct; identical to SEQ ID NO: 16738
  REGION 1..469: note = neuraminidase__InfluenzaA__AFN18138

SEQ ID NO: 22751 - protein, 469 aa, synthetic construct
  REGION 1..469: note = neuraminidase__InfluenzaA__AFN18140
MNPNQKIITIGSVCMTIGMANLILQIGNIISIWISHSIQLGNQNQIETCNQSVITYENNTWVNQTYVNISNTNFAAGQSVVSVKLAGNSSLCPVSGWAIYSKDNSIRIGSKGDVFVIREPFISCSPLECRTFFLTQGALLNDKHSNGTIKDRSPYRTLMSCPIGEVPSPYNSRFESVAWSASACHDGINWLTIGISGPDNGAVAVLKYNGIITDTIKSWRNNILRTQESECACVNGSCFTVMTDGPSDGQASYKIFRIEKGKIVKSVEMNAPNYHYEECSCYPDSSEITCVCRDNWHGSNRPWVSFNQNLEYRIGYICSGIFGDNPRPNDKTGSCGPVSSNGANGVKGFSFKYGNGIWIGRTKSISSRNGFEMIWDPNGWTGTDNNFSIKQDIVGINEWSGYSGSFVQHPELTGLDCIRPCFWVELIRGRPKENTIWTSGSSISFCGVNSDTVGWSWPDGAELPFTIDK

SEQ ID NO: 22752 - protein, 469 aa, synthetic construct; identical to SEQ ID NO: 16738
  REGION 1..469: note = neuraminidase__InfluenzaA__AFN18144

SEQ ID NO: 22753 - protein, 469 aa, synthetic construct; identical to SEQ ID NO: 16738
  REGION 1..469: note = neuraminidase__InfluenzaA__AFN18150

SEQ ID NO: 22754 - protein, 469 aa, synthetic construct; identical to SEQ ID NO: 16738
  REGION 1..469: note = neuraminidase__InfluenzaA__AFN18156

SEQ ID NO: 22755 - protein, 469 aa, synthetic construct; identical to SEQ ID NO: 16738
  REGION 1..469: note = neuraminidase__InfluenzaA__AFN18158

SEQ ID NO: 22756 - protein, 469 aa, synthetic construct; identical to SEQ ID NO: 18552
  REGION 1..469: note = neuraminidase__InfluenzaA__AFN18160

SEQ ID NO: 22757 - protein, 469 aa, synthetic construct
  REGION 1..469: note = neuraminidase__InfluenzaA__AFN18166
MNPNQKIITIGSVCMTIGMANLILQIGNIISIWISHSIQLGNQNQIETCNQSVITYENKTWVNQTYVNISNANFAAGQSVVSVKLAGNSSLCPVSGWAIYSKDNSIRIGSKGDVFVIREPFISCSPLECRTFFLTQGALLNDKHSNGTIKDRSPYRTLMSCPIGEVPSPYNSKFESVAWSASACHDGINWLTIGISGPDNGAVAVLKYNGIITDTIKSWRNNILRTQESECACVNGSCFTVMTDGPSDGQASYKIFRIEKGKIVKSVEMNAPNYHYEECSCYPDSSEITCVCRDNWHGSNRPWVSFNQNLEYQIGYICSGIFGDNPRPNDKTGSCGPVSSNGANGVKGFSFKYGNGVWIGRTKSISSRNGFEMIWDPNGWTGTDNNFSIKQDIVGINEWSGYSGSFVQHPELTGLDCIRPCFWVELIRGRPKENTIWTSGSSISFCGVNSDTVGWSWPDGAELPFTIDK

SEQ ID NO: 22758 - protein, 469 aa, synthetic construct; identical to SEQ ID NO: 16738
  REGION 1..469: note = neuraminidase__InfluenzaA__AFN18172

SEQ ID NO: 22759 - protein, 469 aa, synthetic construct; identical to SEQ ID NO: 17756
  REGION 1..469: note = neuraminidase__InfluenzaA__AFN18178

SEQ ID NO: 22760 - protein, 469 aa, synthetic construct
  REGION 1..469: note = neuraminidase__InfluenzaA__AFN18184
MNPNQKIITIGSVCMTIGMANLILQIGNIISIWISHSIQLGNQNQIETCNQSVITYENNTWVNQTYVNISNTNFAAGQSMVSVKLAGNSSLCPVSGWAIYSKDNSIRIGSKGDVFVIREPFISCSPLECRTFFLTQGALLNDKHSNGTIKDRSPYRTLMSCPIGEVPSPYNSRFESVAWSASACHDGINWLTIGISGPDNGAVAVLKYNGIITDTIKSWRNNILRTQESECACVNGSCFTVMTDGPSDGQASYKIFRIEKGKIVKSVEMNAPNYHYEECSCYPDSSEITCVCRDNWHGSNRPWVSFNQNLEYQIGYICSGIFGDNPRPNDKTGSCGPVSSNGANGVKGFSFKYGNGVWIGRTKSISSRNGFEMIWDPNGWTGTDNNFSIKQDIVGINEWSGYSGSFVQHPELTGLDCIRPCFWVELIRGRPKENTIWTSGSSISFCGVNSDTVGWSWPDGAELPFTIDK

SEQ ID NO: 22761 - protein, 469 aa, synthetic construct; identical to SEQ ID NO: 19730
  REGION 1..469: note = neuraminidase__InfluenzaA__AFN18190

SEQ ID NO: 22762 - protein, 469 aa, synthetic construct; identical to SEQ ID NO: 20751
  REGION 1..469: note = neuraminidase__InfluenzaA__AFN18196

SEQ ID NO: 22763 - protein, 469 aa, synthetic construct
  REGION 1..469: note = neuraminidase__InfluenzaA__AFN18202
MNPNQKIITIGSVCMTIGMANLILQIGNIISIWISHSIQLGNQNQIETCNQSVITYENNTWVNQTYVNISNTNFAAGRSVVSVKLAGNSSLCPVSGWAIYSKDNSIRIGSKGDVFVIREPFISCSPLECRTFFLTQGALLNDKHSNGTIKDRSPYRTLMSCPIGEVPSPYNSRFESVAWSASACHDGINWLTIGISGPDNGAVAVLKYNGIITDTIKSWRNNILRTQESECACVNGSCFTVMTDGPSDGQASYKIFRIEKGKIVKSVEMNAPNYHYEECSCYPDSSEITCVCRDNWHGSNRPWVSFNQNLEYQIGYICSGIFGDNPRPNDKTGSCGPVSSNGANGVKGFSFKYGNGVWIGRTKSISSRNGFEMIWDPNGWTGTDNNFSIKQDIVGINEWSGYSGSFVQHPELTGLDCIRPCFWVELIRGRPKENTIWTSGSSISFCGVNSDTVGWSWPDGAELPFTIDK

SEQ ID NO: 22764 - protein, 469 aa, synthetic construct; identical to SEQ ID NO: 16738
  REGION 1..469: note = neuraminidase__InfluenzaA__AFN18208

SEQ ID NO: 22765 - protein, 469 aa, synthetic construct
  REGION 1..469: note = neuraminidase__InfluenzaA__AFN18210
MNPNQKIITIGSVCMTIGMANLILQIGNIISIWISHSIQLGNQNQIETCNQSVITYENNTWVNQTYVNISNTNFAAGQSVVSVKLAGNSSLCPVSGWAIYSKDNSIRIGSKGDVFVIREPFISCSPLECRAFFLTQGALLNDKHSNGTIKDRSPYRTLMSCPIGEVPSPYNSRFESVAWSASACHDGINWLTIGISGPDNGAVAVLKYNGIITDTIKSWRNNILRTQESECACVNGSCFTVMTDGPSDGQASYKIFRIEKGKIVKSVEMNAPNYHYEECSCYPDSSEITCVCRDNWHGSNRPWVSFNQNLEYRIGYICSGIFGDNPRPNDKTGSCGPVSSNGANGVKGFSFKYGNGVWIGRTKSISSRNGFEMIWDPNGWTGTDNNFSIKQDIVGINEWSGYSGSFVQHPELTGLDCIRPCFWVELIRGRLKENTIWTSGSSISFCGVNSDTVGWSWPDGAELPFTIDK

SEQ ID NO: 22766 - protein, 469 aa, synthetic construct; identical to SEQ ID NO: 17321
  REGION 1..469: note = neuraminidase__InfluenzaA__AFN18216

SEQ ID NO: 22767 - protein, 469 aa, synthetic construct; identical to SEQ ID NO: 19067
  REGION 1..469: note = neuraminidase__InfluenzaA__AFN18226

SEQ ID NO: 22768 - protein, 469 aa, synthetic construct; identical to SEQ ID NO: 16738
  REGION 1..469: note = neuraminidase__InfluenzaA__AFN18232

SEQ ID NO: 22769 - protein, 469 aa, synthetic construct; identical to SEQ ID NO: 16738
  REGION 1..469: note = neuraminidase__InfluenzaA__AFN18234

SEQ ID NO: 22770 - protein, 469 aa, synthetic construct; identical to SEQ ID NO: 16738
  REGION 1..469: note = neuraminidase__InfluenzaA__AFN18244

SEQ ID NO: 22771 - protein, 469 aa, synthetic construct; identical to SEQ ID NO: 16738
  REGION 1..469: note = neuraminidase__InfluenzaA__AFN18246

SEQ ID NO: 22772 - protein, 469 aa, synthetic construct; identical to SEQ ID NO: 19067
  REGION 1..469: note = neuraminidase__InfluenzaA__AFN18256

SEQ ID NO: 22773 - protein, 469 aa, synthetic construct; identical to SEQ ID NO: 16738
  REGION 1..469: note = neuraminidase__InfluenzaA__AFN18262

SEQ ID NO: 22774 - protein, 469 aa, synthetic construct; identical to SEQ ID NO: 16738
  REGION 1..469: note = neuraminidase__InfluenzaA__AFN18268

SEQ ID NO: 22775 - protein, 469 aa, synthetic construct; identical to SEQ ID NO: 16738
  REGION 1..469: note = neuraminidase__InfluenzaA__AFN18270

SEQ ID NO: 22776 - protein, 469 aa, synthetic construct; identical to SEQ ID NO: 19727
  REGION 1..469: note = neuraminidase__InfluenzaA__AFN18272

SEQ ID NO: 22777 - protein, 469 aa, synthetic construct; identical to SEQ ID NO: 16738
  REGION 1..469: note = neuraminidase__InfluenzaA__AFN18274

SEQ ID NO: 22778 - protein, 469 aa, synthetic construct; identical to SEQ ID NO: 16738
  REGION 1..469: note = neuraminidase__InfluenzaA__AFN18282

SEQ ID NO: 22779 - protein, 469 aa, synthetic construct; identical to SEQ ID NO: 16738
  REGION 1..469: note = neuraminidase__InfluenzaA__AFN18304

SEQ ID NO: 22780 - protein, 469 aa, synthetic construct
  REGION 1..469: note = neuraminidase__InfluenzaA__AFN18306
MNPNQKIITIGSVCMTIGIANLILQIGNIISIWISHSIQLGNQNQIETCNQSVITYENNTWVNQTYVNISNTNFAAGQSVVSVKLAGNSSLCPVSGWAIYSKDNSIRIGSKGDVFVIREPFISCSPLECRTFFLTQGALLNDKHSNGTIKDRSPYRTLMSCPIGEVPSPYNSRFESVAWSASACHDGINWLTIGISGPDNGAVAVLKYNGIITDTIKSWRNNILRTQESECACVNGSCFTVMTDGPSDGQASYKIFRIEKGKIVKSVEMNAPNYHYEECSCYPDSSEITCVCRDNWHGSNRPWVSFNQNLEYQIGYICSGIFGDNPRPNDKTGSCGPVSSNGANGVKGFSFKYGNGVWIGRTKSISSRNGFEMIWDPNGWTGTDNNFSIKQDIVGINEWSGYSGSFVQHPELTGLDCIRPCFWVELIRGRPKENTIWTSGSSISFCGVNSDTVGWSWPDGAELPFTIDK

SEQ ID NO: 22781 - protein, 469 aa, synthetic construct
  REGION 1..469: note = neuraminidase__InfluenzaA__AFN18308
MNPNQKIITIGSVCMTIGMANLILQIGNIISIWISHSIQLGNQNQIETCNQSVITYENNTWVNQTYVNISNTNFAAGQSVVSVKLAGNSSLCPVSGWAIYSKDNSIRIGSKGDVFVIREPFISCSPLECRTFFLTQGALLNDKHSNGTIKDRSPYRTLMSCPIGEVPSPYNSRFESVAWSASACHDGINWLTIGISGPDNGAVAVLKYNGIITDTIKSWRNNILRTQESECACVNGSCFTVMTDGPSDGQASYKIFRIEKGKIVKSVEMNAPNYHYEECSCYPDSSEITCVCRDNWHGSNRPWVSFNQNLEYQIGYICSGIFGDNPRPNDKTGSCGPVSSKGANGVKGFSFKYGNGVWIGRTKSISSRNGFEMIWDPNGWTGTDNNFSIKQDIVGINEWSGYSGSFVQHPELTGLDCIRPCFWVELIRGRPKENTIWTSGSSISFCGVNSDTVGWSWPDGAELPFTIDK

SEQ ID NO: 22782 - protein, 469 aa, synthetic construct
  REGION 1..469: note = neuraminidase__InfluenzaA__AFN18314
MNPNQKIITIGSVCMTIGMANLILQIGNIISIWISHSIQLGNQNQIETCNQSVITYENNTWVNQTYVNISNTNFAAGQSVVSVKLAGNSSLCPVSGWAIYSKDNSIRIGSKGDVFVIREPFISCSPLECRTFFLTQGALLNDKHSNGTIKDRSPYRTLMSCPIGEVPSPYNSRFESVAWSASACHDGINWLTIGISGPDNGAVAVLKYNGIITDTIKSWRNNILRTQESECACVNGSCFTVMTDGPSDGQASYKIFRIEKGKIVKSVEMNAPNYHYEECSCYPDSSEITCVCRDNWHGSNRPWVSFNQNLEYQIGYICSGIFGDNPRPNDKTGSCGPVSSNGANGVKGFSFKYGNGVWIGRTKSISSRNGFEMIWDPNGWTGTDNNFSIKQDIVGINEWSGYSGSFVQHPELTGLDCIRPCFWVELIRGRPKEKTIWTSGSSISFCGVNSDTVGWSWPDGAELPFTIDK

SEQ ID NO: 22783 - protein, 469 aa, synthetic construct; identical to SEQ ID NO: 16738
  REGION 1..469: note = neuraminidase__InfluenzaA__AFN18320

SEQ ID NO: 22784 - protein, 469 aa, synthetic construct
  REGION 1..469: note = neuraminidase__InfluenzaA__AFN18326
MNPNQKIITIGSVCMTIGMANLLLQIGNIISIWISHSIQLGNQNQIETCNQSVITYENNTWVNQTYVNISNTNFAAGQSVVSVKLAGNSSLCPVSGWAIYSKDNSIRIGSKGDVFVIREPFISCSPLECRTFFLTQGALLNDKHSNGTIKDRSPYRTLMSCPIGEVPSPYNSRFESVAWSASACHDGINWLTIGISGPDNGAVAVLKYNGIITDTIKSWRNNILRTQESECACVNGSCFTVMTDGPSDGQASYKIFRIEKGKIVKSVEMNAPNYHYEECSCYPDSSEITCVCRDNWHGSNRPWVSFNQNLEYQIGYICSGIFGDNPRPNDKTGSCGPVSSNGANGVKGFSFKYGNGVWIGRTKSISSRNGFEMIWDPNGWTGTDNNFSIKQDIVGINEWSGYSGSFVQHPELTGLDCIRPCFWVELIRGRPKENTIWTSGSSISFCGVNSDTVGWSWPDGAELPFTIDK

SEQ ID NO: 22785 - protein, 469 aa, synthetic construct; identical to SEQ ID NO: 16738
  REGION 1..469: note = neuraminidase__InfluenzaA__AFN18336

SEQ ID NO: 22786 - protein, 469 aa, synthetic construct; identical to SEQ ID NO: 16738
  REGION 1..469: note = neuraminidase__InfluenzaA__AFN18346

SEQ ID NO: 22787 - protein, 469 aa, synthetic construct; identical to SEQ ID NO: 22371
  REGION 1..469: note = neuraminidase__InfluenzaA__AFN18356

SEQ ID NO: 22788 - protein, 469 aa, synthetic construct
  REGION 1..469: note = neuraminidase__InfluenzaA__AFN18366
MNPNQKIITIGSVCMTIGMANLILQIGNIISIWISHSIQLGNQNQIETCNQSVITYENNTWVNQTYVNISNTNFAAEQSVVSVKLAGNSSLCPVSGWAIYSKDNSIRIGSKGDVFVIREPFISCSPLECRTFFLTQGALLNDKHSNGTIKDRSPYRTLMSCPIGEVPSPYNSRFESVAWSASACHDGINWLTIGISGPDNGAVAVLKYNGIITDTIKSWRNNILRTQESECACVNGSCFTVMTDGPSDGQASYKIFRIEKGKIVKSVEMNAPNYHYEECSCYPDSSEVTCVCRDNWHGSNRPWVSFNQNLEYQIGYICSGIFGDNPRPNDKTGSCGPVSSNGANGVKGFSFKYGNGVWIGRTKSISSRNGFEMIWDPNGWTGTDNNFSIKQDIVGINEWSGYSGSFVQHPELTGLDCIRPCFWVELIRGRPKENTIWTSGSSISFCGVNSDTVGWSWPDGAELPFTIDK

SEQ ID NO: 22789 - protein, 469 aa, synthetic construct; identical to SEQ ID NO: 22371
  REGION 1..469: note = neuraminidase__InfluenzaA__AFN18376

SEQ ID NO: 22790 - protein, 469 aa, synthetic construct; identical to SEQ ID NO: 16738
  REGION 1..469: note = neuraminidase__InfluenzaA__AFN18382

SEQ ID NO: 22791 - protein, 469 aa, synthetic construct; identical to SEQ ID NO: 16738
  REGION 1..469: note = neuraminidase__InfluenzaA__AFN18392

SEQ ID NO: 22792 - protein, 469 aa, synthetic construct; identical to SEQ ID NO: 16738
  REGION 1..469: note = neuraminidase__InfluenzaA__AFN18402

SEQ ID NO: 22793 - protein, 469 aa, synthetic construct; identical to SEQ ID NO: 16738
  REGION 1..469: note = neuraminidase__InfluenzaA__AFN18412

SEQ ID NO: 22794 - protein, 469 aa, synthetic construct; identical to SEQ ID NO: 16738
  REGION 1..469: note = neuraminidase__InfluenzaA__AFN18422

SEQ ID NO: 22795 - protein, 469 aa, synthetic construct; identical to SEQ ID NO: 16738
  REGION 1..469: note = neuraminidase__InfluenzaA__AFN18432

SEQ ID NO: 22796 - protein, 469 aa, synthetic construct; identical to SEQ ID NO: 16738
  REGION 1..469: note = neuraminidase__InfluenzaA__AFN18442

SEQ ID NO: 22797 - protein, 469 aa, synthetic construct; identical to SEQ ID NO: 16738
  REGION 1..469: note = neuraminidase__InfluenzaA__AFN18452

SEQ ID NO: 22798 - protein, 469 aa, synthetic construct; identical to SEQ ID NO: 16738
  REGION 1..469: note = neuraminidase__InfluenzaA__AFN18462

SEQ ID NO: 22799 - protein, 469 aa, synthetic construct
  REGION 1..469: note = neuraminidase__InfluenzaA__AFN18472
MNPNQKIITIGSVCMTIGMANLILQIGNIISIWISHSIQLGNQNQIETCNQSVITYENNTWVNQTYVNISNTNFAAGQSVVSVKLAGNSSLCPVSGWAIYSKDNSIRIGSKGDVFVIREPFISCSPLECRTFFLTQGALLNDKHSNGTIKDRSPYRTLMSCPIGEVPSPYNSRFESVAWSASACHDGINWLTIGISGPDNGAVAVLKYNGIITDTIKSWRNNILRTQESECACVNGSCFTVMTDGPSDGQASYKIFRIEKGKIVKSVEMNAPNYHYEECSCYPDSSEITCVCRDNWHGSNRPWVSFNQNLEYQIGYICSGIFGDNPRPNDKTGSCGPVSSNGAKGVKGFSFKYGNGVWIGRTKSISSRNGFEMIWDPNGWTGTDNNFSIKQDIVGINEWSGYSGSFVQHPELTGLDCIRPCFWVELIRGRPKENTIWTSGSSISFCGVNSDTVGWSWPDGAELPFTIDK

SEQ ID NO: 22800 - protein, 469 aa, synthetic construct; identical to SEQ ID NO: 16738
  REGION 1..469: note = neuraminidase__InfluenzaA__AFN18482

SEQ ID NO: 22801 - protein, 469 aa, synthetic construct; identical to SEQ ID NO: 16738
  REGION 1..469: note = neuraminidase__InfluenzaA__AFN18492

SEQ ID NO: 22802 - protein, 469 aa, synthetic construct
  REGION 1..469: note = neuraminidase__InfluenzaA__AFN18514
MNPNQKIITIGSVCMTIGMANLILQIGNIISIWISHSIQLGNQNQIETCNQSVITYENNTWVNQTYVNISNTNFAAGQSVVSVKLVGNSSLCPVSGWAIYSKDNSIRIGSKGDVFVIREPFISCSPLECRTFFLTQGALLNDKHSNGTIKDRSPYRTLMSCPIGEVPSPYNSRFESVAWSASACHDGINWLTIGISGPDNGAVAVLKYNGIITDTIKSWRNNILRTQESECACVNGSCFTVMTDGPSDGQASYKIFRIEKGKIVKSVEMNAPNYHYEECSCYPDSSEITCVCRDNWHGSNRPWVSFNQNLEYQIGYICSGIFGDNPRPNDKTGSCGPVSSNGANGVKGFSFKYGNGVWIGRTKSISSRNGFEMIWDPNGWTGTDNNFSIKQDIVGINEWSGYSGSFVQHPELTGLDCIRPCFWVELIRGRPKENTIWTSGSSISFCGVNSDTVGWSWPDGAELPFTIDK

SEQ ID NO: 22803 - protein, 469 aa, synthetic construct
  REGION 1..469: note = neuraminidase__InfluenzaA__AFN18520
MNPNQKIITIGSVCMTIGMANLILQIGNIISIWISHSIQLGNQNQIETCNQSVITYENNTWVNQTYVNISNTNFAAGQSVVSVKLAGNSSLCPVSGWAIYSKDNSIRIGSKGDVFVIREPFISCSPLECRTFFLTQGALLNDKHSNGTIKDRSPYRTLMSCPIGEVPSPYNSRFESVAWSASACHDGINWLTIGISGPDNGAVAVLKYNGVITDTIKSWRNNILRTQESECACVNGSCFTLMTDGPSDGQASYKIFRIEKGKIVKSVEMNAPNYHYEECSCYPDSSEITCVCRDNWHGSNRPWVSFNQNLEYQIGYICSGIFGDNPRPNDKTGSCGPVSSNGANGVKGFSFKYGNGVWIGRTKSISSRNGFEMIWDPNGWTGTDNNFSIKQDIVGINEWSGYSGSFVQHPELTGLDCIRPCFWVELIRGRPKENTIWTSGSSISFCGVNSDTVGWSWPDGAELPFTIDK

SEQ ID NO: 22804 - protein, 469 aa, synthetic construct; identical to SEQ ID NO: 16738
  REGION 1..469: note = neuraminidase__InfluenzaA__AFN18522

SEQ ID NO: 22805 - protein, 469 aa, synthetic construct; identical to SEQ ID NO: 16738
  REGION 1..469: note = neuraminidase__InfluenzaA__AFN18524

SEQ ID NO: 22806 - protein, 469 aa, synthetic construct; identical to SEQ ID NO: 22371
  REGION 1..469: note = neuraminidase__InfluenzaA__AFN18530

SEQ ID NO: 22807 - protein, 469 aa, synthetic construct; identical to SEQ ID NO: 16738
  REGION 1..469: note = neuraminidase__InfluenzaA__AFN18532

SEQ ID NO: 22808 - protein, 469 aa, synthetic construct; identical to SEQ ID NO: 16738
  REGION 1..469: note = neuraminidase__InfluenzaA__AFN18538

SEQ ID NO: 22809 - protein, 469 aa, synthetic construct; identical to SEQ ID NO: 16738
  REGION 1..469: note = neuraminidase__InfluenzaA__AFN18544

SEQ ID NO: 22810 - protein, 469 aa, synthetic construct; identical to SEQ ID NO: 16738
  REGION 1..469: note = neuraminidase__InfluenzaA__AFN18546

SEQ ID NO: 22811 - protein, 469 aa, synthetic construct; identical to SEQ ID NO: 16738
  REGION 1..469: note = neuraminidase__InfluenzaA__AFN18552

SEQ ID NO: 22812 - protein, 469 aa, synthetic construct; identical to SEQ ID NO: 16738
  REGION 1..469: note = neuraminidase__InfluenzaA__AFN18558

SEQ ID NO: 22813 - protein, 469 aa, synthetic construct; identical to SEQ ID NO: 16738
  REGION 1..469: note = neuraminidase__InfluenzaA__AFN18560

SEQ ID NO: 22814 - protein, 469 aa, synthetic construct; identical to SEQ ID NO: 16738
  REGION 1..469: note = neuraminidase__InfluenzaA__AFN18562

SEQ ID NO: 22815 - protein, 469 aa, synthetic construct; identical to SEQ ID NO: 16738
  REGION 1..469: note = neuraminidase__InfluenzaA__AFN18564

SEQ ID NO: 22816 - protein, 469 aa, synthetic construct; identical to SEQ ID NO: 16738
  REGION 1..469: note = neuraminidase__InfluenzaA__AFN18566

SEQ ID NO: 22817 - protein, 469 aa, synthetic construct; identical to SEQ ID NO: 16738
  REGION 1..469: note = neuraminidase__InfluenzaA__AFN18572

SEQ ID NO: 22818 - protein, 469 aa, synthetic construct; identical to SEQ ID NO: 16738
  REGION 1..469: note = neuraminidase__InfluenzaA__AFN18582

SEQ ID NO: 22819 - protein, 469 aa, synthetic construct; identical to SEQ ID NO: 16738
  REGION 1..469: note = neuraminidase__InfluenzaA__AFN18592

SEQ ID NO: 22820 - protein, 469 aa, synthetic construct; identical to SEQ ID NO: 22371
  REGION 1..469: note = neuraminidase__InfluenzaA__AFN18602

SEQ ID NO: 22821 - protein, 469 aa, synthetic construct
  REGION 1..469: note = neuraminidase__InfluenzaA__AFN18612
MNPNQKIITIGSVCMTIGMANLILQIGNIISIWISHSIQLGNQNQIETCNQSVITYENNTWVNQTYVNISNTNFAAGQSVVSVKLAGNSSLCPVSGWAIYSKDNSIRIGSKGDVFVIREPFISCSPLECRTFFLTQGALLNDKHSNGTIKDRSPYRTLMSCPIGEVPSPYNSRFESVAWSASACHDGINWLTIGISGPDNGAVAVLKYNGIITDTIKSWRNNILRTQESECACVNGSCFTVMTDGPSDGQASYKIFRIEKGKIIKSVEMNAPNYHYEECSCYPDSSEITCVCRDNWHGSNRPWVSFNQNLEYQIGYICSGIFGDNPRPNDKTGSCGPVSSNGANGVKGFSFKYGNGVWIGRTKSISSRNGFEMIWDPNGWTGTDNNFSIKQDIVGINEWSGYSGSFVQHPELTGLDCIRPCFWVELIRGRPKENTIWTSGSSISFCGVNSDTVGWSWPDGAELPFTIDK

SEQ ID NO: 22822 - protein, 469 aa, synthetic construct; identical to SEQ ID NO: 16738
  REGION 1..469: note = neuraminidase__InfluenzaA__AFN18618

SEQ ID NO: 22823 - protein, 469 aa, synthetic construct; identical to SEQ ID NO: 17564
  REGION 1..469: note = neuraminidase__InfluenzaA__AFN18624

SEQ ID NO: 22824 - protein, 469 aa, synthetic construct
  REGION 1..469: note = neuraminidase__InfluenzaA__AFN18630
MNPNQKIITIGSVCMTIGMANLILQIGNIISIWISHSIQLGNQNQIETCNQSVITYENNTWVNQTYVNISNTNFAAGQSVVSVKLAGNSSLCPVSGWAIYSKDNSIRIGSKGDVFVIREPFISCSPLECRTFFLTQGALLNDKHSNGTIKDRSPYRTLMSCPIGEVPSPYNSRFESVAWSASACHDGINWLTIGISGPDNGAVAVLKYNGIITDTIKSWRNNILRTQESECACVNGSCFTVMTDGPSDGQASYKIFRIEKGKIVKSVEMNAPNYHYEECSCYPDSSEITCVCRDNWHGSNRPWVSFNQNLEYQIGYICSGIFGDNPRPNDKTGSCGPVSSNGANGVKGFSFKYGNGVWIGRTKSISSRNGFEMIWDPNGWTGTDNNFSIKQDIVGINEWSGYSGSFVQHPELTGLGCIRPCFWVELIRGRPKENTIWTSGSSISFCGVNSDTVGWSWPDGAELPFTIDK

SEQ ID NO: 22825 - protein, 469 aa, synthetic construct
  REGION 1..469: note = neuraminidase__InfluenzaA__AFN18636
MNPNQKIITIGSVCMTIGMANLILQIGNIISIWISHSIQLGNQNQIETCNQSVITYENNTWVNQTYVNISNTNFAAGQSVVSVKLAGNSSLCPVSGWAIYSKDNSIRIGSKGDVFVIREPFISCSPLECRTFFLTQGALLNDKHSNGTIKDRSPYRTLMSCPIGEVPSPYNSRFESVAWSASACHDGINWLTIGISGPDNGAVAVLKYNGIITDTIKSWRNNILRTQESECACVNGSCFTVMTDGPSDGQASYKIFRIEKGKIVKSVEMNAPNYHYEECSCYPDSSEITCVCRDNWHGSNRPWVSFNQNLEYRIGYICSGIFGDNPRPNDKTGSCGPVSSNGANGVKGFSFKYGNGVWIGRTKSISSRNGFEMIWDPNGWTGTDNNFSIKQDIVGINEWSGYSGSFVQHPELTGLDCIRPCFWVELIRGRSKENTIWTSGSSISFCGVNSDTVGWSWPDGAELPFTIDK

SEQ ID NO: 22826 - protein, 469 aa, synthetic construct; identical to SEQ ID NO: 16738
  REGION 1..469: note = neuraminidase__InfluenzaA__AFN18646

SEQ ID NO: 22827 - protein, 469 aa, synthetic construct; identical to SEQ ID NO: 16738
  REGION 1..469: note = neuraminidase__InfluenzaA__AFN18656

SEQ ID NO: 22828 - protein, 469 aa, synthetic construct
  REGION 1..469: note = neuraminidase__InfluenzaA__AFN18666
MNPNQKIITIGSVCMTIGMANLILQIGNIISIWISHSIQLGNQNQIETCNQSVITYENNTWVNQTYVNISNTNFAAGQSVVSVKLAGNSSLCPVSGWAIYSKDNSIRIGSKGDVFVIREPFISCSPLECRTFFLTQGALLNDKHSNGTIKDRSPYRTLMSCPIGEVPSPYNSRFESVAWSASACHDGINWLTIGISGPDNGAVAVLKYNGIITDTIKSWRNNILRTQESECACVNGSCFTVMTDGPSDGQASYKIFRIEKGKIVKSVEMNAPNYHYEECSCYPDSSEITCVCRDNWHGSNRPWVSFNQNLEYQIGYICSGIFGDNPRPNDKTGSCGPVSSNGANGVKGFSFKYGNGVWIGRTKSISSRNGFEMIWDPNGWTGTDNNFSIKQDIVGINEWSGYSGSFVQHPELTGLDCIRPCFWVELIRGRPKENTIWTSGSSISFCGVNSDTVGWSWPDGAELPFIIDK

SEQ ID NO: 22829 - protein, 469 aa, synthetic construct
  REGION 1..469: note = neuraminidase__InfluenzaA__AFN18676
MNPNQKIITIGSVCMTIGMANLILQIGNIISIWISHSIQLGNQNQIETCNQSVITYENNTWVNQTYVNISNTNFAAGQSVVSVKLAGNSSLCPVSGWAIYSKDNSIRIGSKGDVFVIREPFISCSPLECRTFFLTQGALLNDKHSNGTIKDRSPYRTLMSCPIGEVPSPYNSRFESVAWSASACHDGINWLTIGISGPDNGAVAVLKYNGIITDTIKSWRNNILRTQESECACVNGSCFTVMTDGPSDGQASYKIFRIEKGKIVKSVEMNAPNYHYEECSCYPDSSEITCVCRDNWHGSNRPWVSFNQNLEYRIGYICSGIFGDNPRPNDKTGSCGPVSSNGANGVKGFSFKYGNGVWIGRTKSISSRNGFEMIWDPNGWTETDNNFSIKQDIVGINEWSGYSGSFVQHPELTGLDCIRPCFWVELIRGRPKENTIWTSGSSISFCGVNSDTVGWSWPDGAELPFTIDK

SEQ ID NO: 22830 - protein, 469 aa, synthetic construct
  REGION 1..469: note = neuraminidase__InfluenzaA__AFN18686
MNPNQKIITIGSVCMTIGMANLILQIGNIISIWISHSIQLGNQNQIETCNQSVITYENNTWVNQTYVNISSTNFAAGQSVVSVKLAGNSSLCPVSGWAIYSKDNSIRIGSKGDVFVIREPFISCSPLECRTFFLTQGALLNDKHSNGTIKDRSPYRTLMSCPIGEVPSPYNSRFESVAWSASACHDGINWLTIGISGPDNGAVAVLKYNGIITDTIKSWRNNILRTQESECACVNGSCFTLMTDGPSDGQASYKIFRIEKGKIVKSVEMNAPNYHYEECSCYPDSSEITCVCRDNWHGSNRPWVSFNQNLEYQIGYICSGIFGDNPRPNDKTGSCGPVSSNGANGVKGFSFKYGNGVWIGRTKSISSRNGFEMIWDPNGWTGTDNNFSIKQDIVGINEWSGYSGSFVQHPELTGLDCIRPCFWVELIRGRPKENTIWTSGSSISFCGVNSDTVGWSWPDGAELPFTIDK

SEQ ID NO: 22831 - protein, 469 aa, synthetic construct; identical to SEQ ID NO: 16738
  REGION 1..469: note = neuraminidase__InfluenzaA__AFN18696

SEQ ID NO: 22832 - protein, 469 aa, synthetic construct; identical to SEQ ID NO: 19325
  REGION 1..469: note = neuraminidase__InfluenzaA__AFN18706

SEQ ID NO: 22833 - protein, 469 aa, synthetic construct; identical to SEQ ID NO: 16738
  REGION 1..469: note = neuraminidase__InfluenzaA__AFN18716

SEQ ID NO: 22834 - protein, 469 aa, synthetic construct; identical to SEQ ID NO: 16738
  REGION 1..469: note = neuraminidase__InfluenzaA__AFN18727

SEQ ID NO: 22835 - protein, 469 aa, synthetic construct
  REGION 1..469: note = neuraminidase__InfluenzaA__AFN18737
MNPNQKIITIGSVCMTIGMANLILQIGNIISIWISHSIQLGNQNQIETCNQSVITYENNTWVNQTYVNISNTNFAAGQSVVSVKLAGNSSLCPVSGWAIYSKDNSIRIGSKGDVFVIREPFISCSPLECRTFFLTQGALLNDKHSNGTIKDRSPYRTLMSCPIGEVPSPYNSRFESVAWSASACHDGINWLTIGISGPDNGAVAVLKYNGIITDTIKSWRNNILRTQESECACVNGSCFTVMTDGPSDGQASYKIFRIEKGKIVKSVEMNAPNYHYEECSCYPDSSEITCVCRDNWHGSNRPWVSFNQNLEYQIGYICSGIFGDNPRPNDKTGSCGPVSSNGANGVKGFSFKYGNGVWIGRTKSISSRNGFEMVWDPNGWTGTDNNFSIKQDIVGINEWSGYSGSFVQHPELTGLDCIRPCFWVELIRGRPKENTIWTSGSSISFCGVNSDTVGWSWPDGAELPFTIDK

SEQ ID NO: 22836 - protein, 469 aa, synthetic construct; identical to SEQ ID NO: 16738
  REGION 1..469: note = neuraminidase__InfluenzaA__AFN18743

SEQ ID NO: 22837 - protein, 469 aa, synthetic construct; identical to SEQ ID NO: 16738
  REGION 1..469: note = neuraminidase__InfluenzaA__AFN18749

SEQ ID NO: 22838 - protein, 469 aa, synthetic construct; identical to SEQ ID NO: 16738
  REGION 1..469: note = neuraminidase__InfluenzaA__AFN18759

SEQ ID NO: 22839 - protein, 469 aa, synthetic construct
  REGION 1..469: note = neuraminidase__InfluenzaA__AFN18769
MNPNQKIITIGSVCMTIGMANLILQIGNIISIWISHSIQLGNQNQIETCNQSVITYENNTWVNQTYVNISNTNFAAGQSVVSVKLAGNSSLCPVSGWAIYSKDNSIRIGSKGDVFVIREPFISCSPLECRTFFLTQGALLNDKHSNGTIKDRSPYRTLMSCPIGEVPSPYNSRFESVAWSASACHDGINWLTIGISGPDNGAVAVLKYNGIITDTIKSWRNNILRTQESECACVNGSCFTLMTDGPSDGQASYKIFRIEKGKIVKSVEMNAPNYHYEECSCYPDSNEITCVCRDNWHGSNRPWVSFNQNLEYQIGYICSGIFGDNPRPNDKTGSCGPVSSNGANGVKGFSFKYGNGVWIGRTKSISSRNGFEMIWDPNGWTGTDNNFSIKQDIVGINEWSGYSGSFVQHPELTGLDCIRPCFWVELIRGRPKENTIWTSGSSISFCGVNSDTVGWSWPDGAELPFTIDK

SEQ ID NO: 22840 - protein, 469 aa, synthetic construct; identical to SEQ ID NO: 18640
  REGION 1..469: note = neuraminidase__InfluenzaA__AFN18775

SEQ ID NO: 22841 - protein, 469 aa, synthetic construct; identical to SEQ ID NO: 16738
  REGION 1..469: note = neuraminidase__InfluenzaA__AFN18777

SEQ ID NO: 22842 - protein, 469 aa, synthetic construct; identical to SEQ ID NO: 16738
  REGION 1..469: note = neuraminidase__InfluenzaA__AFN18779

SEQ ID NO: 22843 - protein, 469 aa, synthetic construct
  REGION 1..469: note = neuraminidase__InfluenzaA__AFN18785
MNPNQKIITIGSVCMTIGMANLILQIGNIISIWISHSIQLGNQNQIETCNQSVITYENNTWVNQTYVNISNTNFAAGQSVVSVKLAGNSSLCPVSGWAIYSKDNSIRIGSKGDVFVIREPFISCSPLECRTFFLTQGALLNDKHSNGTIKDRSPYRTLMSCPIGEVPSPYNSRFESVAWSASACHDGINWLTIGISGPDNGAVAVLKYNGIITDTIKSWRNNILRTQESECACVNGSCFTVMTDGPSDGQASYKIFRIEKGKIVKSVEMNAPNYHYEECSCYPDSSEITCVCRDNWHGSNRPWVSFNQNLEYQIGYICSGIFGDNPRPNDKTGSCGPVSSNGANGVKGFSFKYGNGVWIGRTKSISSRNGFEMIWDPNGWTGTDNNFSIRQDIVGINEWSGYSGSFVQHPELTGLDCIRPCFWVELIRGRPKENTIWTSGSSISFCGVNSDTVGWSWPDGAELPFTIDK

SEQ ID NO: 22844 - protein, 469 aa, synthetic construct
  REGION 1..469: note = neuraminidase__InfluenzaA__AFN18791
MNPNQKIITIGSVCMTIGMANLILQIGNIISIWISHSIQLGNQNQIETCNQSVITYENNTWVNQTYVNISNTNFAAGQSVVSVKLAGNSSLCPVSGWAIYSKDNSIRIGSKGDVFVIREPFISCSPLECRTFFLTQGALLNDKHSNGTIKDRSPYRTLMSCPIGEVPSPYNSRFESVAWSASACHDGINWLTIGISGPDNGAVAVLKYNGIITDTIKSWRNNILRTQESECACVNGSCFTVMTDGPSDGQASYKIFRIEKGKIVKSVEMNAPNYHYEECSCYPESSEITCVCRDNWHGSNRPWVSFNQNLEYQIGYICSGIFGDNPRPNDKTGSCGPVSSNGANGVKGFSFKYGNGVWIGRTKSISSRNGFEMIWDPNGWTGTDNNFSIKQDIVGINEWSGYSGSFVQHPELTGLDCIRPCFWVELIRGRPKENTIWTSGSSISFCGVNSDTVGWSWPDGAELPFTIDK

SEQ ID NO: 22845 - protein, 469 aa, synthetic construct; identical to SEQ ID NO: 16738
  REGION 1..469: note = neuraminidase__InfluenzaA__AFN18801

SEQ ID NO: 22846 - protein, 469 aa, synthetic construct; identical to SEQ ID NO: 19157
  REGION 1..469: note = neuraminidase__InfluenzaA__AFN18811

SEQ ID NO: 22847 - protein, 469 aa, synthetic construct; identical to SEQ ID NO: 16738
  REGION 1..469: note = neuraminidase__InfluenzaA__AFN18817

SEQ ID NO: 22848 - protein, 469 aa, synthetic construct; identical to SEQ ID NO: 16738
  REGION 1..469: note = neuraminidase__InfluenzaA__AFN18819

SEQ ID NO: 22849 - protein, 469 aa, synthetic construct; identical to SEQ ID NO: 19730
  REGION 1..469: note = neuraminidase__InfluenzaA__AFN18821

SEQ ID NO: 22850 - protein, 469 aa, synthetic construct; identical to SEQ ID NO: 16738
  REGION 1..469: note = neuraminidase__InfluenzaA__AFN18823

SEQ ID NO: 22851 - protein, 469 aa, synthetic construct; identical to SEQ ID NO: 16738
  REGION 1..469: note = neuraminidase__InfluenzaA__AFN18825

SEQ ID NO: 22852 - protein, 469 aa, synthetic construct; identical to SEQ ID NO: 16738
  REGION 1..469: note = neuraminidase__InfluenzaA__AFN18827

SEQ ID NO: 22853 - protein, 469 aa, synthetic construct; identical to SEQ ID NO: 16738
  REGION 1..469: note = neuraminidase__InfluenzaA__AFN18829

SEQ ID NO: 22854 - protein, 469 aa, synthetic construct; identical to SEQ ID NO: 16738
  REGION 1..469: note = neuraminidase__InfluenzaA__AFN18831

SEQ ID NO: 22855 - protein, 469 aa, synthetic construct; identical to SEQ ID NO: 17875
  REGION 1..469: note = neuraminidase__InfluenzaA__AFN18833

SEQ ID NO: 22856 - protein, 469 aa, synthetic construct; identical to SEQ ID NO: 17913
  REGION 1..469: note = neuraminidase__InfluenzaA__AFN18835

SEQ ID NO: 22857 - protein, 469 aa, synthetic construct; identical to SEQ ID NO: 16738
  REGION 1..469: note = neuraminidase__InfluenzaA__AFN18841

SEQ ID NO: 22858 - protein, 469 aa, synthetic construct
  REGION 1..469: note = neuraminidase__InfluenzaA__AFN18851
MNPNQKIITIGSVCMTIGMANLILQIGNMISIWISHSIQLGNQNQIETCNQSVITYENNTWVNQTYVNISNTNFAAGQSVVSVKLAGNSSLCPVSGWAIYSKDNSIRIGSKGDVFVIREPFISCSPLECRTFFLTQGALLNDKHSNGTIKDRSPYRTLMSCPIGEVPSPYNSRFESVAWSASACHDGINWLTIGISGPDNGAVAVLKYNGIITDTIKSWRNNILRTQESECACVNGSCFTVMTDGPSDGQASYKIFRIEKGKIVKSVEMNAPNYHYEECSCYPDSSEITCVCRDNWHGSNRPWVSFNQNLEYQIGYICSGIFGDNPRPNDKTGSCGPVSSNGANGVKGFSFKYGNGVWIGRTKSISSRNGFEMIWDPNGWTGTDNNFSIKQDIVGINEWSGYSGSFVQHPELTGLDCIRPCFWVELIRGRPKENTIWTSGSSISFCGVNSDTVGWSWPDGAELPFTIDK

SEQ ID NO: 22859 - protein, 469 aa, synthetic construct; identical to SEQ ID NO: 16738
  REGION 1..469: note = neuraminidase__InfluenzaA__AFN18857

SEQ ID NO: 22860 - protein, 469 aa, synthetic construct
  REGION 1..469: note = neuraminidase__InfluenzaA__AFN18859
MNPNQKIITIGSVCMTIGLANLILQIGNIISIWISHSIQLGNQNQIETCNQSVITYENNTWVNQTYVNISNTNFAAGQSVVSVKLAGNSSLCPVSGWAIYSKDNSIRIGSKGDVFVIREPFISCSPLECRTFFLTQGALLNDKHSNGTIKDRSPYRTLMSCPIGEVPSPYNSRFESVAWSASACHDGINWLTIGISGPDNGAVAVLKYNGIITDTIKSWRNNILRTQESECACVNGSCFTVMTDGPSDGQASYKIFRIEKGKIVKSVEMNAPNYHYEECSCYPDSSEITCVCRDNWHGSNRPWVSFNQNLEYQIGYICSGIFGDNPRPNDKTGSCGPVSSNGANGVKGFSFKYGNGVWIGRTKSISSRNGFEMIWDPNGWTGTDNNFSIKQDIVGINEWSGYSGSFVQHPELTGLDCIRPCFWVELIRGRPKENTIWTSGSSISFCGVNSDTVGWSWPDGAELPFTIDK

SEQ ID NO: 22861 - protein, 469 aa, synthetic construct
  REGION 1..469: note = neuraminidase__InfluenzaA__AFN18861
MNPNQKIITIGSVCMTIGMANLILQIGNIISIWISHSIQLGNQNQIETCNQSVITYENNTWVNQTYVNISNTNFAAGQSVVSVKLAGNSSLCSVSGWAIYSKDNSIRIGSKGDVFVIREPFISCSPLECRTFFLTQGALLNDKHSNGTIKDRSPYRTLMSCPIGEVPSPYNSRFESVAWSASACHDGINWLTIGISGPDNGAVAVLKYNGIITDTIKSWRNNILRTQESECACVNGSCFTVMTDGPSDGQASYKIFRIEKGKIVKSVEMNAPNYHYEECSCYPDSSEITCVCRDNWHGSNRPWVSFNQNLEYQIGYICSGIFGDNPRPNDKTGSCGPVSSNGANGVKGFSFKYGNGVWIGRTKSISSRNGFEMIWDPNGWTGTDNNFSIKQDIVGINEWSGYSGSFVQHPELTGLDCIRPCFWVELIRGRPKENTIWTSGSSISFCGVNSDTVGWSWPDGAELPFTIDK

SEQ ID NO: 22862 - protein, 469 aa, synthetic construct; identical to SEQ ID NO: 16738
  REGION 1..469: note = neuraminidase__InfluenzaA__AFN18867

SEQ ID NO: 22863 - protein, 469 aa, synthetic construct; identical to SEQ ID NO: 18552
  REGION 1..469: note = neuraminidase__InfluenzaA__AFN18877

SEQ ID NO: 22864 - protein, 469 aa, synthetic construct; identical to SEQ ID NO: 16738
  REGION 1..469: note = neuraminidase__InfluenzaA__AFN18887

SEQ ID NO: 22865 - protein, 469 aa, synthetic construct; identical to SEQ ID NO: 17756
  REGION 1..469: note = neuraminidase__InfluenzaA__AFN18893

SEQ ID NO: 22866 - protein, 469 aa, synthetic construct
  REGION 1..469: note = neuraminidase__InfluenzaA__AFN18895
MNPNQKIITIGSVCMTIGMANLILQIGNIISIWISHSIQLGNQNQIETCNQSVITYENNTWVNQTYVNISNTNFAAGQSVVSVKLAGNSSLCPVSGWAIYSKDNSIRIGSKGDVFVIREPFISCSPLECRTFFLTQGALLNDKHSNGTIKDRSPYRTLMSCPIGEVPSPYNSRFESVAWSASACHDGINWLTIGISGPDNGAVAVLKYNGIITDTIKSWRNNILRTQESECACVNGSCFTVMTDGPSDGQASYKIFRIEKGKIVKSVEMNAPNYHYEECSCYPDSSEITCVCRDNWHGSNRPWVSFNQNLEYRIGYICSGIFGDNPRPNDKTGSCGPVSSNGANGVKGFSFKYGNGVWIGRTKSISSRNGFEMIWDPNGWTGTDNNFSIKQDIVGINEWSGYSGSFVQHPELTGLDCIRPCFWVELIKGRPKENTIWTSGSSISFCGVNSDTVGWSWPDGAELPFTIDK

SEQ ID NO: 22867 - protein, 469 aa, synthetic construct; identical to SEQ ID NO: 18640
  REGION 1..469: note = neuraminidase__InfluenzaA__AFN18905

SEQ ID NO: 22868 - protein, 469 aa, synthetic construct; identical to SEQ ID NO: 18552
  REGION 1..469: note = neuraminidase__InfluenzaA__AFN18913

SEQ ID NO: 22869 - protein, 469 aa, synthetic construct
  REGION 1..469: note = neuraminidase__InfluenzaA__AFN18919
MNPNQKIITIGSVCMTIGMANLILQIGNIISIWISHSIQLGNQNQIETCNQSVITYENNTWVNQTYVNISNTNFAAGQSVVSVKLAGNSSLCPVSGWAIYSKDNSIRIGSKGDVFVIREPFISCSPLECRTFFLTQGALLNDKHSNGTIKDRSPYRTLMSCPIGEVPSPYNSRFESVAWSASACHDGINWLTIGISGPDNGAVAVLKYNGIITDTIKSWRNNILRTQESECACVNGSCFTVMTDGPSDGQASYKIFRIEKGKIVKSVEMNAPNYHYEECSCYPDSSEITCVCRDNWHGSNRPWVSFNQNLEYQIGYICSGIFGDNPRPNDKTGSCGPVSSNGENGVKGFSFKYGNGVWIGRTKSISSRNGFEMIWDPNGWTGTDNNFSIKQDIVGINEWSGYSGSFVQHPELTGLDCIRPCFWVELIRGRPKENTIWTSGSSISFCGVNSDTVGWSWPDGAELPFTIDK

SEQ ID NO: 22870 - protein, 469 aa, synthetic construct
  REGION 1..469: note = neuraminidase__InfluenzaA__AFN18929
MNPNQKIITIGSVCMTIGMANLILQIGNIISIWISHSIQLGNQNQIETCNQSVITYENNTWVNQTYVNISNTNFAAGQSVVSVKLAGNSSLCPVSGWAIYSKDNSIRIGSKGDVFVIREPFISCSPLECRTFFLTQGALLNDKHSNGTIKDRSPYRTLMSCPIGEVPSPYNSRFESVAWSASACHDGINWLTIGISGPDNGAVAVLKYNGIITDTIKSWRNNILRTQESECACVNGSCFTLMTDGPSDGQASYKIFRIEKGKIVKSVEMNAPNYHYEECSCYPDSSEITCVCRDNWHGSNRPWVSFNQNLEYQIGYICSGIFGDNPRPNDKTGSCGPVSSNGANGVKGFSFKYGNGVWIGRTKSISSRNGFEMIWDPNGWTGTDNNFSIKQDIVGINEWSGYSGSFVQHPELTGLDCIRPCFWVELIRGRPKENTIWTSGSSISFCGVNSDTVGWSWSDGAELPFTIDK

SEQ ID NO: 22871 - protein, 469 aa, synthetic construct; identical to SEQ ID NO: 16738
  REGION 1..469: note = neuraminidase__InfluenzaA__AFN18939

SEQ ID NO: 22872 - protein, 469 aa, synthetic construct; identical to SEQ ID NO: 16738
  REGION 1..469: note = neuraminidase__InfluenzaA__AFN18953

SEQ ID NO: 22873 - protein, 469 aa, synthetic construct; identical to SEQ ID NO: 16738
  REGION 1..469: note = neuraminidase__InfluenzaA__AFN18959

SEQ ID NO: 22874 - protein, 469 aa, synthetic construct; identical to SEQ ID NO: 16738
  REGION 1..469: note = neuraminidase__InfluenzaA__AFN18965

SEQ ID NO: 22875 - protein, 469 aa, synthetic construct; identical to SEQ ID NO: 20808
  REGION 1..469: note = neuraminidase__InfluenzaA__AFN18975

SEQ ID NO: 22876 - protein, 469 aa, synthetic construct; identical to SEQ ID NO: 16738
  REGION 1..469: note = neuraminidase__InfluenzaA__AFN18981

SEQ ID NO: 22877 - protein, 469 aa, synthetic construct
  REGION 1..469: note = neuraminidase__InfluenzaA__AFN18983
MNPNQKIITIGSVCMTIGMANLILQIGNIISIWISHSIQLGNQNQIETCNQSVITYENNTWVNQTYVNISNTNFAAGQSVVSVKLAGNSSLCPVSGWAIYSKDNSIRIGSKGDVFVIREPFISCSPLECRTFFLTQGALLNDKHSNGTIKDRSPYRTLMSCPIGEVPSPYNSRFESVAWSASACHDGINWLTIGISGPDNGAVAVLKYNGIITDTIKSWRNNILRTQESECACVNGSCFTVMTDGPSDGQASYKIFRIEKGKIVKSVEMNASNYHYEECSCYPDSSEITCVCRDNWHGSNRPWVSFNQNLEYQIGYICSGIFGDNPRPNDKTGSCGPVSSNGANGVKGFSFKYGNGVWIGRTKSISSRNGFEMIWDPNGWTGTDNNFSIKQDIVGINEWSGYSGSFVQHPELTGLDCIRPCFWVELIRGRPKENTIWTSGSIISFCGVNSDTVGWSWPDGAELPFTIDK

SEQ ID NO: 22878 - protein, 469 aa, synthetic construct; identical to SEQ ID NO: 16738
  REGION 1..469: note = neuraminidase__InfluenzaA__AFN18985

SEQ ID NO: 22879 - protein, 469 aa, synthetic construct
  REGION 1..469: note = neuraminidase__InfluenzaA__AFN18987
MNPNQKIITIGSVCMTIGMANLILQIGNIISIWISHSIQLGNQNQIETCNQSVITYENNTWVNQTYVNISNTNFAAGQSVVSVKLAGNSSLCPVSGWAIYSKDNSIRIGSKGDVFVIREPFISCSPLECRTFFLTQGALLNDKHSNGTIKDRSPYRTLMSCPIGEVPSPYNSRFESVAWSASACHDGINWLTIGISGPDNGAVAVLKYNGIITDTIKSWRNNILRTQESECACVNGSCFTVMTDGPSDGQASYKIFRIEKGKIVKSVEMNAPNYHYEECSCYPDSSEITCVCRDNWHGSNRPWVSFNQNLEYQIGYICSGIFGDNPRPIDKTGSCGPVSSNGANGVKGFSFKYGNGVWIGRTKSISSRNGFEMIWDPNGWTGTDNNFSIKQDIVGINEWSGYSGSFVQHPELTGLDCIRPCFWVELIRGRPKENTIWTSGSSISFCGVNSDTVGWSWPDGAELPFTIDK

SEQ ID NO: 22880 - protein, 469 aa, synthetic construct; identical to SEQ ID NO: 16738
  REGION 1..469: note = neuraminidase__InfluenzaA__AFN18989

SEQ ID NO: 22881 - protein, 469 aa, synthetic construct; identical to SEQ ID NO: 16738
  REGION 1..469: note = neuraminidase__InfluenzaA__AFN18995

SEQ ID NO: 22882 - protein, 469 aa, synthetic construct; identical to SEQ ID NO: 22860
  REGION 1..469: note = neuraminidase__InfluenzaA__AFN19001

SEQ ID NO: 22883 - protein, 469 aa, synthetic construct; identical to SEQ ID NO: 16738
  REGION 1..469: note = neuraminidase__InfluenzaA__AFN19007

SEQ ID NO: 22884 - protein, 469 aa, synthetic construct; identical to SEQ ID NO: 16738
  REGION 1..469: note = neuraminidase__InfluenzaA__AFN19024

SEQ ID NO: 22885 - protein, 469 aa, synthetic construct
  REGION 1..469: note = neuraminidase__InfluenzaA__AFN19025
MNPNQKIITIGSVCMTIGMANLILQIGNIISIWISHSIQLGNQNQIETCNQSVITYENNTWVNQTYVNISNTNFAAGQSVVSVKLAGNSSLCPVSGWAIYSKDNSIRIGSKGDVFVIREPFISCSPLECRTFFLTQGALLNDKHSNGTIKDRSPYRTLMSCPIGEVPSPYNSRFESVAWSASACHDGINWLTIGISGPDNGAVAVLKYNGIITDTIKSWRNKILRTQESECACVNGSCFTVMTDGPSDGQASYKIFRIEKGKIVKSVEMNAPNYHYEECSCYPDSSEITCVCRDNWHGSNRPWVSFNQNLEYQIGYICSGIFGDNPRPNDKTGSCGPVSSNGANGVKGFSFKYGNGVWIGRTKSISSRNGFEMIWDPNGWTGTDNNFSIKQDIVGINEWSGYSGSFVQHPELTGLDCIRPCFWVELIRGRPKENTIWTSGSSISFCGVNSDTVGWSWPDGAELPFTIDK

SEQ ID NO: 22886 - protein, 469 aa, synthetic construct; identical to SEQ ID NO: 16738
  REGION 1..469: note = neuraminidase__InfluenzaA__AFN19027

SEQ ID NO: 22887 - protein, 469 aa, synthetic construct; identical to SEQ ID NO: 16738
  REGION 1..469: note = neuraminidase__InfluenzaA__AFN19032

SEQ ID NO: 22888 - protein, 469 aa, synthetic construct; identical to SEQ ID NO: 16738
  REGION 1..469: note = neuraminidase__InfluenzaA__AFN19038

SEQ ID NO: 22889 - protein, 469 aa, synthetic construct; identical to SEQ ID NO: 22371
  REGION 1..469: note = neuraminidase__InfluenzaA__AFN19049

SEQ ID NO: 22890 - protein, 469 aa, synthetic construct; identical to SEQ ID NO: 16738
  REGION 1..469: note = neuraminidase__InfluenzaA__AFN19055

SEQ ID NO: 22891 - protein, 469 aa, synthetic construct; identical to SEQ ID NO: 16738
  REGION 1..469: note = neuraminidase__InfluenzaA__AFN19065

SEQ ID NO: 22892 - protein, 469 aa, synthetic construct; identical to SEQ ID NO: 16738
  REGION 1..469: note = neuraminidase__InfluenzaA__AFN19071

SEQ ID NO: 22893 - protein, 469 aa, synthetic construct; identical to SEQ ID NO: 16738
  REGION 1..469: note = neuraminidase__InfluenzaA__AFN19077

SEQ ID NO: 22894 - protein, 469 aa, synthetic construct; identical to SEQ ID NO: 16738
  REGION 1..469: note = neuraminidase__InfluenzaA__AFN19083

SEQ ID NO: 22895 - protein, 469 aa, synthetic construct; identical to SEQ ID NO: 16738
  REGION 1..469: note = neuraminidase__InfluenzaA__AFN19089

SEQ ID NO: 22896 - protein, 469 aa, synthetic construct; identical to SEQ ID NO: 16738
  REGION 1..469: note = neuraminidase__InfluenzaA__AFN19099

SEQ ID NO: 22897 - protein, 469 aa, synthetic construct; identical to SEQ ID NO: 16738
  REGION 1..469: note = neuraminidase__InfluenzaA__AFN19105

SEQ ID NO: 22898 - protein, 469 aa, synthetic construct; identical to SEQ ID NO: 16738
  REGION 1..469: note = neuraminidase__InfluenzaA__AFN19114

SEQ ID NO: 22899 - protein, 469 aa, synthetic construct; identical to SEQ ID NO: 16738
  REGION 1..469: note = neuraminidase__InfluenzaA__AFN19126

SEQ ID NO: 22900 - protein, 469 aa, synthetic construct; identical to SEQ ID NO: 16738
  REGION 1..469: note = neuraminidase__InfluenzaA__AFN19136

SEQ ID NO: 22901 - protein, 469 aa, synthetic construct; identical to SEQ ID NO: 16738
  REGION 1..469: note = neuraminidase__InfluenzaA__AFN19146

SEQ ID NO: 22902 - protein, 469 aa, synthetic construct; identical to SEQ ID NO: 16738
  REGION 1..469: note = neuraminidase__InfluenzaA__AFN19156

SEQ ID NO: 22903 - protein, 469 aa, synthetic construct; identical to SEQ ID NO: 16738
  REGION 1..469: note = neuraminidase__InfluenzaA__AFN19166

SEQ ID NO: 22904 - protein, 469 aa, synthetic construct; identical to SEQ ID NO: 16738
  REGION 1..469: note = neuraminidase__InfluenzaA__AFN19186

SEQ ID NO: 22905 - protein, 469 aa, synthetic construct; identical to SEQ ID NO: 22371
  REGION 1..469: note = neuraminidase__InfluenzaA__AFN19196

SEQ ID NO: 22906 - protein, 469 aa, synthetic construct; identical to SEQ ID NO: 16738
  REGION 1..469: note = neuraminidase__InfluenzaA__AFN19205

SEQ ID NO: 22907 - protein, 469 aa, synthetic construct; identical to SEQ ID NO: 16738
  REGION 1..469: note = neuraminidase__InfluenzaA__AFN19215

SEQ ID NO: 22908 - protein, 469 aa, synthetic construct; identical to SEQ ID NO: 16738
  REGION 1..469: note = neuraminidase__InfluenzaA__AFN19225

SEQ ID NO: 22909 - protein, 469 aa, synthetic construct; identical to SEQ ID NO: 16738
  REGION 1..469: note = neuraminidase__InfluenzaA__AFN19235

SEQ ID NO: 22910 - protein, 469 aa, synthetic construct; identical to SEQ ID NO: 16738
  REGION 1..469: note = neuraminidase__InfluenzaA__AFN19245

SEQ ID NO: 22911 - protein, 469 aa, synthetic construct; identical to SEQ ID NO: 16738
  REGION 1..469: note = neuraminidase__InfluenzaA__AFN19251

SEQ ID NO: 22912 - protein, 469 aa, synthetic construct; identical to SEQ ID NO: 16738
  REGION 1..469: note = neuraminidase__InfluenzaA__AFN19261

SEQ ID NO: 22913 - protein, 469 aa, synthetic construct; identical to SEQ ID NO: 22371
  REGION 1..469: note = neuraminidase__InfluenzaA__AFN19271

SEQ ID NO: 22914 - protein, 469 aa, synthetic construct; identical to SEQ ID NO: 18469
  REGION 1..469: note = neuraminidase__InfluenzaA__AFN19281

SEQ ID NO: 22915 - protein, 469 aa, synthetic construct
  REGION 1..469: note = neuraminidase__InfluenzaA__AFN19287
MNPNQKIITIGSVCMTIGMANLILQIGNIISIWISHSIQLGNQNQIETCNQSVITYENNTWVNQTYVNISNTNFAAGQSVVSVKLAGNSSLCPVSGWAIYSKDNSIRIGSKGDVFVIREPFISCSPLECRTFFLTQGALLSDKHSNGTIKDRSPYRTLMSCPIGEVPSPYNSRFESVAWSASACHDGINWLTIGISGPDNGAVAVLKYNGIITDTIKSWRNNILRTQESECACVNGSCFTVMTDGPSDGQASYKIFRIEKGKIVKSVEMNAPNYHYEECSCYPDSSEITCVCRDNWHGSNRPWVSFNQNLEYQIGYICSGIFGDNPRPNDKTGSCGPVSSNGANGVKGFSFKYGNGVWIGRTKSISSRNGFEMIWDPNGWTGTDNNFSIKQDIVGINEWSGYSGSFVQHPELTGLDCIRPCFWVELIRGRPKENTIWTSGSSISFCGVNSDTVGWSWPDGAELPFTIDK

SEQ ID NO: 22916 - protein, 469 aa, synthetic construct; identical to SEQ ID NO: 16738
  REGION 1..469: note = neuraminidase__InfluenzaA__AFN19297

SEQ ID NO: 22917 - protein, 469 aa, synthetic construct; identical to SEQ ID NO: 16738
  REGION 1..469: note = neuraminidase__InfluenzaA__AFN19307

SEQ ID NO: 22918 - protein, 469 aa, synthetic construct; identical to SEQ ID NO: 16738
  REGION 1..469: note = neuraminidase__InfluenzaA__AFN19317

SEQ ID NO: 22919 - protein, 469 aa, synthetic construct; identical to SEQ ID NO: 22371
  REGION 1..469: note = neuraminidase__InfluenzaA__AFN19327

SEQ ID NO: 22920 - protein, 469 aa, synthetic construct; identical to SEQ ID NO: 16738
  REGION 1..469: note = neuraminidase__InfluenzaA__AFN19346

SEQ ID NO: 22921 - protein, 469 aa, synthetic construct
  REGION 1..469: note = neuraminidase__InfluenzaA__AFN19352
MNPNQKIITIGSVSLTISTICFFMQIAILITTVTLHFKQYEFNSPPNNQVMLCEPTIIERNMTEIVYLTNTTIEKEICPKPAEYRNWSKPQCDITGFAPFSKDNSIRLSAGGDIWVTREPYVSCDPDKCYQFALGQGTTLNNVHSNNTVRDRTPYRTLLMNELGVPFHLGTKQVCIAWSSSSCHDGKAWLHVCITGDDKNATASFIYNGRLVDSVVSWSKEILRTQESECVCINGTCTVVMTDGSASGKADTKILFIEEGKIVHTSTLSGSAQHVEECSCYPRYPGVRCVCRDNWKGSNRPIVDINIKDHSIVSSYVCSGLVGDTPRKNDSSSSGHCLDPNNEEGGHGVKGWAFDDGNDVWMGRTINETSRLGYETFKVIEGWSNPKSKLQINRQVIVDRSDRSGYSGIFSVEGKSCINRCFYVELIRGRKEETEVLWTSNSIVVFCGTSGTYGTGSWPDGADLNLMPI

SEQ ID NO: 22922 - protein, 469 aa, synthetic construct
  REGION 1..469: note = neuraminidase__InfluenzaA__AFN19354
MNPNQKIITIGSVSLTISTICFFMQIAILITTVTLHFKQYEFNSPPNNQVMLCEPTIIERNITEIVYLTNTTIEKEICPKPAEYRNWSKPQCDITGFAPFSKDNSIRLSAGGDIWVTREPYVSCDPDKCYQFALGQGTTLNNVHSNNTVRDRTPYRTLLMNELGVPFHLGTKQVCIAWSSSSCHDGKAWLHVCITGDDKNATASFIYNGRLVDSVVSWSKEILRTQESECVCINGTCTVVMTDGSASGKADTKILFIEEGKIVHTSTLSGSAQHVEECSCYPRYPGVRCVCRDNWKGSNRPIVDINIKDHSIVSSYVCSGLVGDTPRKNDSSSSSHCLDPNNEEGGHGVKGWAFDDGNDVWMGRTINETSRLGYETFKVIEGWSNPKSKLQINRQVIVDRGDRSGYSGIFSVEGKSCINRCFYVELIRGRKEETEVLWTSNSIVVFCGTSGTYGTGSWPDGADLNLMPI

SEQ ID NO: 22923 - protein, 469 aa, synthetic construct; identical to SEQ ID NO: 22922
  REGION 1..469: note = neuraminidase__InfluenzaA__AFN19356

SEQ ID NO: 22924 - protein, 469 aa, synthetic construct; identical to SEQ ID NO: 22922
  REGION 1..469: note = neuraminidase__InfluenzaA__AFN19358

SEQ ID NO: 22925 - protein, 469 aa, synthetic construct; identical to SEQ ID NO: 22922
  REGION 1..469: note = neuraminidase__InfluenzaA__AFN19360

SEQ ID NO: 22926 - protein, 469 aa, synthetic construct
  REGION 1..469: note = neuraminidase__InfluenzaA__AFN19362
MNPNQKIITIGSVSLTISTICFFMQIAILITTVTLHFKQYEFNSPPNNQVMLCEPTIIERNITEIVYLTNTTIEKEICPKPAEYRNWSKPQCDITGFAPFSKDNSIRLSAGGDIWVTREPYVSCDPDKCYQFALGQGTTLNNVHSNNTVRDRTPYRTLLMNELGVPFHLGTKQVCIAWSSSSCHDGKAWLHVCITGDDKNATASFIYNGRLVDSVVSWSKEILRTQESECVCINGTCTVVMTDGSASGKADTKILFIEEGKIVHTSTLSGSAQHVEECSCYPRYPGVRCVCRDNWKGSNRPIVDINIKDHSIVSSYVCSGLVGDTPRKNDSSSSSHCLDPNNEEGGHGVKGWAFDDGNDVWMGRTINETSRLGYETFKVIEGWSNPKSKLQINRQVIVDRGDRSGYSGIFSVEGKRCINRCFYVELIRGRKEETEVLWTSNSIVVFCGTSGTYGTGSWPDGADLNLMPI

SEQ ID NO: 22927 - protein, 469 aa, synthetic construct; identical to SEQ ID NO: 22922
  REGION 1..469: note = neuraminidase__InfluenzaA__AFN19364

SEQ ID NO: 22928 - protein, 469 aa, synthetic construct; identical to SEQ ID NO: 19518
  REGION 1..469: note = neuraminidase__InfluenzaA__AFN19366

SEQ ID NO: 22929 - protein, 469 aa, synthetic construct; identical to SEQ ID NO: 22922
  REGION 1..469: note = neuraminidase__InfluenzaA__AFN19370

SEQ ID NO: 22930 - protein, 469 aa, synthetic construct
  REGION 1..469: note = neuraminidase__InfluenzaA__AFN19374
MNPNQKIITIGSVSLTISTICFFMQIAILITTVTLHFKQYEFNSPPNNQVMLCEPTIIERNITEIVYLTNTTIEKEICPKPAEYRNWSKPQCGITGFAPFSKDNSIRLSAGGDIWVTREPYVSCDPDKCYQFALGQGTTLNNVHSNNTVRDRTPYRTLLMNELGVPFHLGTKQVCIAWSSSSCHDGKAWLHVCITGDDKNATASFIYNGRLVDSVVSWSKEILRTQESECVCINGTCTVVMTDGSASGKADTKILFIKEGKIVHTSTLSGSAQHVEECSCYPRYPGVRCVCRDNWKGSNRPIVDINIKDHSIVSSYVCSGLVGDTPRKTDSSSSSHCLDPNNEEGGHGVKGWAFDDGNDVWMGRTINETSRLGYETFKVIEGWSNPKSKLQINRQVIVDRGDRSGYSGIFSVEGKSCINRCFYVELIRGRKEETEVLWTSNSIVVFCGTSGTYGTGSWPDGADLNLMPI

SEQ ID NO: 22931 - protein, 469 aa, synthetic construct; identical to SEQ ID NO: 22922
  REGION 1..469: note = neuraminidase__InfluenzaA__AFN19376

SEQ ID NO: 22932 - protein, 469 aa, synthetic construct; identical to SEQ ID NO: 22922
  REGION 1..469: note = neuraminidase__InfluenzaA__AFN19378

SEQ ID NO: 22933 - protein, 469 aa, synthetic construct
  REGION 1..469: note = neuraminidase__InfluenzaA__AFN19380
MNPNQKIITIGSVSLTISTICFFMQIAILITTVTLHFKQYEFNSPPNNQVMLCEPTIIERNITEIVYLTNTTIEKEICPKPSEYRNWSKPQCDITGFAPFSKDNSIRLSAGGDIWVTREPYVSCDPDKCYQFALGQGTTLNNVHSNNTVRDRTPYRTLLMNELGVPFHLGTKQVCIAWSSSSCHDGKAWLHVCITGDDKNATASFIYNGRLVDSVVSWSKEILRTQESECVCINGTCTVVMTDGSASGKADTKILFIEEGKIVHTSTLSGSAQHVEECSCYPRYPGVRCVCRDNWKGSNRPIVDINIKDHSIVSSYVCSGLVGDTPRKNDSSSSSHCLDPNNEEGGHGVKGWAFDDGNDVWMGRTINETSRLGYETFKVIEGWSNPKSKLQINRQVIVDRGDRSGYSGIFSVEGKSCINRCFYVELIRGRKEETEVLWTSNSIVVFCGTSGTYGTGSWPDGADLNLMPI

SEQ ID NO: 22934 - protein, 469 aa, synthetic construct; identical to SEQ ID NO: 22930
  REGION 1..469: note = neuraminidase__InfluenzaA__AFN19382

SEQ ID NO: 22935 - protein, 469 aa, synthetic construct; identical to SEQ ID NO: 22922
  REGION 1..469: note = neuraminidase__InfluenzaA__AFN19384

SEQ ID NO: 22936 - protein, 469 aa, synthetic construct
  REGION 1..469: note = neuraminidase__InfluenzaA__AFN19386
MNPNQKIITIGSVSLTISTICFFMQIAILITTVTLHFKQYEFNSPPNNQVMLCEPTIIERNITEIVYLTNTTIEKEICPKPAEYRNWSKPQCDITGFAPFSKDNSIRLSAGGDIWVTREPYVSCDPDKCYQFALGQGTTLNNVHSNNTVRDRTPYRTLLMNELGVPFHLGTKQVCIAWSSSSCHDGKAWLHVCITGDDKNATASFIYNGRLVDSVVSWSKEILRTQESECVCINGTCTVVMTDGSASGKADTKILFIEEGKIVHTSTLSGSAQHVEECSCYPRYPGVRCVCRDNWKGSNRPIVDINIKDHSIVSSYVCSGLVGDTPRKNDSSSSSHCLDPNNEEGGHGVKGWAFDDGNDVWMGRTINETSRLGYETFKVIEGWSNPKSKLQINRQIIVDRGDRSGYSGIFSVEGKSCINRCFYVELIRGRKEETEVLWTSNSIVVFCGTSGTYGTGSWPDGADLNLMPI

SEQ ID NO: 22937 - protein, 469 aa, synthetic construct; identical to SEQ ID NO: 22922
  REGION 1..469: note = neuraminidase__InfluenzaA__AFN19388

SEQ ID NO: 22938 - protein, 469 aa, synthetic construct; identical to SEQ ID NO: 22922
  REGION 1..469: note = neuraminidase__InfluenzaA__AFN19390

SEQ ID NO: 22939 - protein, 469 aa, synthetic construct
  REGION 1..469: note = neuraminidase__InfluenzaA__AFN19392
MNPNQKIITIGSVSLTISTICFFMQIAVLITTVTLHFKQYEFNSPPNNQVMLCEPTIIERNITEIVYLTNTTIEKEICPKPAEYRNWSKPQCDITGFAPFSKDNSIRLSAGGDIWVTREPYVSCDPDKCYQFALGQGTTLNNVHSNNTVRDRTPYRTLLMNELGVPFHLGTKQVCIAWSSSSCHDGKAWLHVCITGDDKNATASFIYNGRLVDSVVSWSKEILRTQESECVCINGTCTVVMTDGSASGKADTKILFIEEGKIVHTSTLSGSAQHVEECSCYPRYPGVRCVCRDNWKGSNRPIVDINIKDHSIVSSYVCSGLVGDTPRKNDSSSSSHCLDPNNEEGGHGVKGWAFDDGNDVWMGRTINETSRLGYETFKVIEGWSNPKSKLQINRQVIVDRGDRSGYSGIFSVEGKSCINRCFYVELIRGRKEETEVLWTSNSIVVFCGTSGTYGTGSWPDGADLNLMPI

SEQ ID NO: 22940 - protein, 469 aa, synthetic construct; identical to SEQ ID NO: 21787
  REGION 1..469: note = neuraminidase__InfluenzaA__AFN19394

SEQ ID NO: 22941 - protein, 469 aa, synthetic construct
  REGION 1..469: note = neuraminidase__InfluenzaA__AFN19396
MNPNQKIITIGSVSLTISTICFFMQIAILITTVTLHFKQYEFNSPPNNQVMLCEPTIIERNITEIVYLTNTTIEKEICPKLAEYRNWSKPQCDITGFAPFSKDNSIRLSAGGDIWVTREPYVSCDPDKCYQFALGQGTTLNNVHSNNTVRDRTPYRTLLMNELGVPFHLGTKQVCIAWSSSSCHDGKAWLHVCITGDDKNATASFIYNGRLVDSVVSWSKDILRTQESECVCINGTCAVVMTDGSASGKADTKILFIEEGKIVHTSTLSGSAQHVEECSCYPRYPGVRCVCRDNWKGSNRPIVDINIKDHSIVSSYVCSGLVGDTPRKNDSSSSSHCLDPNNEEGGHGVKGWAFDDGNDVWMGRTINETSRLGYETFKVIEGWSNPKSKLQINRQVIVDRGNRSGYSGIFSVEGKNCINRCFYVELIRGRKEETEVLWTSNSIVVFCGTSGTYGTGSWPDGADLNLMPI

SEQ ID NO: 22942 - protein, 469 aa, synthetic construct
  REGION 1..469: note = neuraminidase__InfluenzaA__AFN19398
MNPNQKIITIGSVSLTISTICFFMQIAILITTVTLHFKQYEFNSPPNNQVMLCEPTIIERNITEIVYLTNTTIEKEICPKPAEYRNWSKPQCDITGFAPFSKDNSIRLSAGGDIWVTREPYVSCDPDKCYQFALGQGTTLNNVHSNNTVRDRTPYRTLLMNELGVPFHLGTKQVCIAWSSSSCHDGKAWLHVCITGDDKNATASFIYNGRLVDSVVSWSKEILRTQESECVCINGTCTVVMTDGSASGKADTKILFIEEGKIVHTSTLSGSAQHVEECSCYPRYPGVRCVCRDNWRGSNRPIVDINIKDHSIVSSYVCSGLVGDTPRKNDSSSSSHCLDPNNEEGGHGVKGWAFDDGNDVWMGRTINETSRLGYETFKVIEGWSNPKSKLQINRQVIVDRGDRSGYSGIFSVEGKSCINRCFYVELIRGRKEETEVLWTSNSIVVFCGTSGTYGTGSWPDGADLNLMPI

SEQ ID NO: 22943 - protein, 469 aa, synthetic construct
  REGION 1..469: note = neuraminidase__InfluenzaA__AFN19400
MNPNQKIITIGSVSLTISTICFFMQIAILITTVTLHFKQYEFNSPPNNQVMLCEPTIIERNITEIVYLTNTTIEKEICPKPSEYRNWSKPQCDITGFAPFSKDNSIRLSDGGDIWVTREPYVSCDPDKCYQFALGQGTTLNNVHSNNTVRDRTPYRTLLMNELGVPFHLGTKQVCIAWSSSSCHDGKAWLHVCITGDDKNATASFIYNGRLVDSVVSWSKEILRTQESECVCINGTCTVVMTDGSASGKADTKILFIEEGKIVHTSTLSGSAQHVEECSCYPRYPGVRCVCRDNWKGSNRPIVDINIKDHSIVSSYVCSGLVGDTPRKNDSSSSSHCLDPNNEEGGHGVKGWAFDDGNDVWMGRTINETSRLGYETFKVIEGWSNPKSKLQINRQVIVDRGDRSGYSGIFSVEGKSCINRCFYVELIRGRKEETEVLWTSNSIVVFCGTSGTYGTGSWPDGADLNLMPI

SEQ ID NO: 22944 - protein, 469 aa, synthetic construct; identical to SEQ ID NO: 22922
  REGION 1..469: note = neuraminidase__InfluenzaA__AFN19402

SEQ ID NO: 22945 - protein, 469 aa, synthetic construct; identical to SEQ ID NO: 22922
  REGION 1..469: note = neuraminidase__InfluenzaA__AFN19404

SEQ ID NO: 22946 - protein, 469 aa, synthetic construct; identical to SEQ ID NO: 22922
  REGION 1..469: note = neuraminidase__InfluenzaA__AFN19406

SEQ ID NO: 22947 - protein, 469 aa, synthetic construct; identical to SEQ ID NO: 22922
  REGION 1..469: note = neuraminidase__InfluenzaA__AFN19410

SEQ ID NO: 22948 - protein, 469 aa, synthetic construct; identical to SEQ ID NO: 22922
  REGION 1..469: note = neuraminidase__InfluenzaA__AFN19412

SEQ ID NO: 22949 - protein, 469 aa, synthetic construct; identical to SEQ ID NO: 22922
  REGION 1..469: note = neuraminidase__InfluenzaA__AFN19414

SEQ ID NO: 22950 - protein, 469 aa, synthetic construct; identical to SEQ ID NO: 22922
  REGION 1..469: note = neuraminidase__InfluenzaA__AFN19416

SEQ ID NO: 22951 - protein, 469 aa, synthetic construct
  REGION 1..469: note = neuraminidase__InfluenzaA__AFN19418
MNPNQKIITIGSVSLTISTICFFMQIAILITTVTLHFKQYEFNSPPNNQVMLCEPTIIERNITEIVYLTNTTIEKEICPKPAEYRNWSKPQCDITGFAPFSKDNSIRLSAGGDIWVTREPYVSCDPDKCYQFALGQGTTLNNVHSNNTVRDRTPYRTLLMNELGVPFHLGTKQVCIAWSSSSCHDGKAWLHVCITGDDKNATASFIYNGRLVDSVVSWSKEILRTQESECVCINGTCTVVMTDGSASGRADTKILFIEEGKIVHTSTLSGSAQHVEECSCYPRYPGVRCVCRDNWKGSNRPIVDINIKDHSIVSSYVCSGLVGDTPRKNDSSSSSHCLDPNNEEGGHGVKGWAFDDGNDVWMGRTINETSRLGYETFKVIEGWSNPKSKLQINRQVIVDRGDRSGYSGIFSVEGKSCINRCFYVELIRGRKEETEVLWTSNSIVVFCGTSGTYGTGSWPDGADLNLMPI

SEQ ID NO: 22952 - protein, 469 aa, synthetic construct
  REGION 1..469: note = neuraminidase__InfluenzaA__AFN19420
MNPNQKIITIGSVSLTISTICFFMQIAILITTVTLHFKQYEFNSPPNNQVMLCEPTIIERNMTEIVYLTNTTIEKEICPKPAEYRNWSKPQCDITGFAPFSKDNSIRLSAGGDIWVTREPYVSCDPDKCYQFALGQGTTLNNVHSNNTVRDRTPYRTLLMNELGVPFHLGTKQVCIAWSSSSCHDGKAWLHVCITGDDKNATASFIYNGRLVDSVVSWSKEILRTQESECVCINGTCTVVMTDGSASGKADTKILFIEEGKIVHTSTLSGSAQHVEECSCYPRYPGVRCVCRDNWKGSNRPIVDINIKDHSIVSSYVCSGLVGDTPRKNDSSSSSHCLDPNNEEGGHGVKGWAFDDGNDVWMGRTINETSRLGYETFKVIEGWSNPKSKLQINRQVIVDRGDRSGYSGIFSVEGKSCINRCFYVELIRGRKEETEVLWTSNSIVVFCGTSGTYGTGSWPDGADLNLMPI

SEQ ID NO: 22953 - protein, 469 aa, synthetic construct
  REGION 1..469: note = neuraminidase__InfluenzaA__AFN19422
MNPNQKIITIGSVSLTISTICFFMQIAILITTVTLHFKQYEFNSPPNNQVMLCEPTIIERNITEIVYLTNTTIEKEICPKPAEYRNWSKPQCGITGFAPFSKDNSIRLSAGGDIWVTREPYVSCDPDKCYQFALGQGTTLNNVHSNNTVRDRTPYRTLLMNELGVPFHLGTKQVCIAWSSSSCHDGKAWLHVCITGNDKNATASFIYNGRLVDSVVSWSKEVLRTQESECVCINGTCTVVMTDGSASGKADTKILFIEEGKIVHTSTLSGSAQHVEECSCYPRYPGVRCVCRDNWKGSNRPIVDINIKDHSIVSSYVCSGLVGDTPRKNDSSSSSHCLDPNNEEGGHGVKGWAFDDGNDVWMGRTINETSRLGYETFKVIEGWSNPKSKLQINRQVIVDRGDRSGYSGIFSVEGKSCINRCFYVELIRGRKEETEVLWTSNSIVVFCGTSGTYGTGSWPDGADLNLMPI

SEQ ID NO: 22954 - protein, 469 aa, synthetic construct
  REGION 1..469: note = neuraminidase__InfluenzaA__AFN19426
MNPNQKIITIGSVSLTISTICFFMQIAILITTVTLHFKQYEFNSPPNNQVMLCEPTIIERNITEIVYLTNTTIEKEICPKPAEYRNWSKPQCDITGFAPFSKDNSIRLSAGGDIWVTREPYVSCDPDKCYQFALGQGTTLNNVHSNNTVRDRTPYRTLLMNELGVPFHLGTKQVCIAWSSSSCHDGKAWLHVCITGDDENATASFIYNGRLVDSVVSWSKEILRTQESECVCINGTCTVVMTDGSASGKADTKILFIEEGKIVHTSTLSGSAQHVEECSCYPRYPGVRCVCRDNWKGSNRPIVDINIKDHSIVSSYVCSGLVGDTPRKNDSSSSSHCLDPNNEEGGHGVKGWAFDDGNDVWMGRTINETSRLGYETFKVIEGWSNPKSKLQINRQVIVDRGDRSGYSGIFSVEGKSCINRCFYVELIRGRKEETEVLWTSNSIVVFCGTSGTYGTGSWPDGADLNLMPI

SEQ ID NO: 22955 - protein, 469 aa, synthetic construct; identical to SEQ ID NO: 22922
  REGION 1..469: note = neuraminidase__InfluenzaA__AFN19428

SEQ ID NO: 22956 - protein, 469 aa, synthetic construct
  REGION 1..469: note = neuraminidase__InfluenzaA__AFN19430
MNPNQKIITIGSVSLTISTICFFMQIAILIITVTLHFKQYEFNSPPNNQVMLCEPTIIERNMTEIVYLTNTTIEKEICPKPAEYRNWSKPQCDITGFAPFSKDNSIRLSAGGDIWVTREPYVSCDPDKCYQFALGQGTTLNNVHSNNTVRDRTPYRTLLMNELGVPFHLGTKQVCIAWSSSSCHDGKAWLHVCITGDDKNATASFIYNGRLVDSVVSWSKEILRTQESECVCINGTCTVVMTDGSASGKADTKILFIEEGKIVHTSTLSGSAQHVEECSCYPRYPGVRCVCRDNWKGSNRPIVDINIKDHSIVSSYVCSGLVGDTPRKNDSSSSSHCLDPNNEEGGHGVKGWAFDDGNDVWMGRTINETSRLGYETFKVIEGWSNPKSKLQINRQVIVDRSDRSGYSGIFSVEGKSCINRCFYVELIRGRKEETEVLWTSNSIVVFCGTSGTYGTGSWPDGADLNLMPI

SEQ ID NO: 22957 - protein, 469 aa, synthetic construct
  REGION 1..469: note = neuraminidase__InfluenzaA__AFN19432
MNPNQKIITIGSVSLTISTICFFMQIAILITTVTLHFKQYEFNSPPNNQVMLCEPTIIERNITEIVYLTNTTIEKEICPKPAEYRNWSKPQCDITGFAPFSKDNSIRLSAGGDIWVTREPYVSCDPDKCYQFALGQGTTLNNVHSNNTVRDRTPHRTLLMNELGVPFHLGTKQVCIAWSSSSCHDGKAWLHVCITGDDKNATASFIYNGRLVDSVVSWSKEILRTQESECVCINGTCTVVMTDGSASGKADTKILFIEEGKIVHTSTLSGSAQHVEECSCYPRYPGVRCVCRDNWKGSNRPIVDINIKDHSIVSSYVCSGLVGDTPRKNDSSSSSHCLDPNNEEGGHGVKGWAFDDGNDVWMGRTINETSRLGYETFKVIEGWSNPKSKLQINRQVIVDRGDRSGYSGIFSVEGKSCINRCFYVELIRGRKEETEVLWTSNSIVVFCGTSGTYGTGSWPDGADLNLMPI

SEQ ID NO: 22958 - protein, 469 aa, synthetic construct
  REGION 1..469: note = neuraminidase__InfluenzaA__AFN19434
MNPNQKIITIGSVSLTISTICFFMQIAILITTVTLHFKQYEFNSPPNNQVMLCEPTIIERNMTEIVYLTNTTIEKEICPKPAEYRNWSKPQCDITGFAPFSKDNSIRLSAGGDIWVTREPYVSCDPDKCYQFALGQGTTLNNVHSNNTVRDRTPYRTLLMNELGVPFHLGTKQVCIAWSSSSCHDGKAWLHVCITGDDKNATASFIYNGRLVDSVVSWSKEILRTQESECVCINGTCTVVMTDGSASGKADTKILFIEEGKIVHTSTLSGSAQHVEECSCYPRYPGVRCVCRDNWKGSNRPIVDINIKDHSIVSSYVCSGLVGDTPRKNDSSSSSHCLDPNNEEGGHGVKGWAFDDGNDVWMGRTINETSRLGYETFKVIEGWSNPKSKLQINRQVIVDRSDRSGYSGIFSVEGKSCINRCFYVELIRGRKEETEVLWTSNSIVVFCGTSGTYGTGSWPDGADLNLMPI

SEQ ID NO: 22959 - protein, 469 aa, synthetic construct; identical to SEQ ID NO: 22146
  REGION 1..469: note = neuraminidase__InfluenzaA__AFN19436

SEQ ID NO: 22960 - protein, 469 aa, synthetic construct
  REGION 1..469: note = neuraminidase__InfluenzaA__AFN19438
MNPNQKIITIGSVSLTISTICFFMQIAILITTVTLHFKQYEFNSPPNNQVMLCEPTIIERNMTEIVYLTNTTIEKEICPKPAEYRNWSKPQCDITGFAPFSKDNSIRLSAGGDIWVTREPYVSCDPDKCYQFALGQGTTLNNVHSNNTVRDRTPYRTLLMNELGVPFHLGTKQVCIAWSSSSCHDGKAWLHVCITGDDKNATASFIYNGRLVDSVVSWSKEILRTQESECVCINGTCTVVMTDGSASGKADTKILFIEEGKIVHTSTLSGSAQHVEECSCYPRYPGVRCVCRDNWKGSNRPIVDINIKDHSIVSSYVCSGLVGDTPRKNDSSSSSHCLDPNNEEGGHGVKGWAFDDGNDVWMGRTINETSRLGYETFKVIEGWSNPKSKLQINRQVIVDRSDRSGYSGIFSVEGKSCINRCFYVELIRGRKEETEVLWTSNSIVVFCGTSGTYGTGSWPDGADLNLMSI

SEQ ID NO: 22961 - protein, 469 aa, synthetic construct
  REGION 1..469: note = neuraminidase__InfluenzaA__AFN19442
MNPNQKIITIGSVSLTISTICFFMQIAILITTVTLHFKQYEFNSPPNNQVMLCEPTIIERNITEIVYLTNTIIEKEICPKPTEYRNWSKPQCDITGFAPFSKDNSIRLSAGGDIWVTREPYVSCDPDKCYQFALGQGTTLNNVHSNNTVRDRTPYRTLLMNELGVPFHLGTKQVCIAWSSSSCHDGKAWLHVCITGDDKNATASFIYNGRLVDSVVSWSKEILRTQESECVCINGTCTVVMTDGSASGKADTKILFIEEGKIVHTSTLSGSAQHVEECSCYPRYPGVRCVCRDNWKGSNRPIVDINIKDHSIVSSYVCSGLVGDTPRKNDSSSSSHCLDPNNEEGGHGVKGWAFDDGNDVWMGRTINETSRLGYETFKVIEGWSNPKSKLQINRQVIVDRGDRSGYSGIFSVEGKSCINRCFYVELIRGRKEETEVLWTSNSIVVFCGTSGTYGTGSWPDGADLNLMHI

SEQ ID NO: 22962 - protein, 469 aa, synthetic construct; identical to SEQ ID NO: 22146
  REGION 1..469: note = neuraminidase__InfluenzaA__AFN19446

SEQ ID NO: 22963 - protein, 469 aa, synthetic construct; identical to SEQ ID NO: 22146
  REGION 1..469: note = neuraminidase__InfluenzaA__AFN19448

SEQ ID NO: 22964 - protein, 469 aa, synthetic construct; identical to SEQ ID NO: 22922
  REGION 1..469: note = neuraminidase__InfluenzaA__AFN19458

SEQ ID NO: 22965 - protein, 469 aa, synthetic construct
  REGION 1..469: note = neuraminidase__InfluenzaA__AFN19460
MNPNQKIITIGSVSLTISTICFFMQIAILITTVTLHFKQYEFNSPPNNQVMLCEPTIIERNITEIVYLTNTTIEKEICPKPAEYRNWSKPQCGITGFAPFSKDNSIRLSAGGDIWVTREPYVSCDPDKCYQFALGQGTTLNNMHSNNTVRDRTPYRTLLMNELGVPFHLGTKQVCIAWSSSSCHDGKAWLHVCITGDDKNATASFIYNGRLVDSVVSWSNEILRTQESECVCINGTCTVVMTDGSASGKADTKILFIEEGKIVHTSTLSGSAQHVEECSCYPRYPGVRCVCRDNWKGSNRPIVDINIKDHSIVSSYVCSGLVGDTPRKNDSSSSSHCLDPNNEEGGHGVKGWAFDDGNDVWMGRTINETSRLGYETFKVIEGWSNPKSKLQINRQVIVDRGDRSGYSGIFSVEGKSCINRCFYVELIRGRKEENEVLWTSNSIVVFCGTSGTYGTGSWPDGADLNLMPI

SEQ ID NO: 22966 - protein, 469 aa, synthetic construct; identical to SEQ ID NO: 22146
  REGION 1..469: note = neuraminidase__InfluenzaA__AFN19462

SEQ ID NO: 22967 - protein, 469 aa, synthetic construct
  REGION 1..469: note = neuraminidase__InfluenzaA__AFN19466
MNPNQKIITIGSVSLTISTICFFMQIAILITTVTLHFKQYEFNSPPNNQVMLCEPTIIERNITEIVYLTNTTIEKEICPKPAEYRNWSKPQCDIAGFAPFSKDNSIRLSAGGDIWVTREPYVSCDPDKCYQFALGQGTTLNNVHSNNTVRDRTPYRTLLMNELGVPFHLGTKQVCIAWSSSSCHDGKAWLHVCITGDDKNATASFIYNGRLVDSVVSWSKEILRTQESECVCINGTCTVVMTDGSASGKADTKILFIEEGKIVHTSTLSGSAQHVEECSCYPRYPGVRCVCRDNWKGSNRPIVDINIKDHSIVSSYVCSGLVGDTPRKNDSSSSSHCLDPNNEEGGHGVKGWAFDDGNDVWMGRTINETSRLGYETFKVIEGWSNPKSKLQINRQVIVDRGDRSGYSGIFSVEGKSCINRCFYVELIRGRKEETEVLWTSNSIVVFCGTSGTYGTGSWPDGADLNLMPI

SEQ ID NO: 22968 - protein, 469 aa, synthetic construct; identical to SEQ ID NO: 22146
  REGION 1..469: note = neuraminidase__InfluenzaA__AFN19468

SEQ ID NO: 22969 - protein, 469 aa, synthetic construct
  REGION 1..469: note = neuraminidase__InfluenzaA__AFN19470
MNPNQKIITIGSVSLTISTICFFMQIAILITTVTLHFKQYEFNSPPNNQVMLCEPTIIERNMTEIVYLTNTTIEKEICPKPAEYRNWSKPQCDITGFAPFSKDNSIRLSAGGDIWVTREPYVSCDPDKCYQFALGQGTTLNNVHSNNTVRDRTPYRTLLMNELGVPFHLGTKQVCIAWSSSSCHDGKAWLHVCITGDDKNATASFIYNGRLVDSVVSWSKEILRTQESECVCINGTCTVVMTDGSASGKADTKILFIEEGKIVHTSTLSGSAQHVEECSCYPRYPGVRCVCRDNWKGSNRPIVDINIKDHSIVSSYVCSGLVGDTPRKNDSSSSSHCLDPNNEEGGHGVKGWAFDDGNDVWMGRTINETSRLGYETFKVIEGWSNPKSKLQINRQVIVNKSDRSGYSGIFSVEGKSCINRCFYVELIRGRKEETEVLWTSNSIVVFCGTSGTYGTGSWPDGADLNLMPI

SEQ ID NO: 22970 - protein, 469 aa, synthetic construct; identical to SEQ ID NO: 22922
  REGION 1..469: note = neuraminidase__InfluenzaA__AFN19472

SEQ ID NO: 22971 - protein, 469 aa, synthetic construct
  REGION 1..469: note = neuraminidase__InfluenzaA__AFN19476
MNPNQKIITIGSVSLTISTICFFMQIAILITTVTLHFKQYEFNSPPNNQVMLCEPTIIERNITEIVYLTNTTIEKEICPKPAEYRNWSKPQCGITGFAPLSKDNSIRLSAGGDIWVTREPYVSCDPDKCYQFALGQGTTLNNVHSNNTVRDRTPYRTLLMNELGVPFHLGTKQVCIAWSSSSCHDGKAWLHVCITGDDKNATASFIYNGRLVDSVVSWSKEILRTQESECVCINGTCTVVMTDGSASGKADTKILFIEEGKIVHTSTLSGSAQHVEECSCYPRYPGVRCVCRDNWKGSNRPIVDINIKDHSIVSSYVCSGLVGDTPRKNDSSSSSHCLDPNNEEGGHGVKGWAFDDGNDVWMGRTINETSRLGYETFKVIEGWSNPKSKLQINRQVIVDRGDRSGYSGIFSVEGKSCINRCFYVELIRGRKEETEVLWTSNSIVVFCGTSGTYGTGSWPDGADLNLMPI

SEQ ID NO: 22972 - protein, 469 aa, synthetic construct; identical to SEQ ID NO: 22922
  REGION 1..469: note = neuraminidase__InfluenzaA__AFN19478

SEQ ID NO: 22973 - protein, 469 aa, synthetic construct
  REGION 1..469: note = neuraminidase__InfluenzaA__AFN19480
MNPNQKIITIGSVSLTISTICFFMQIAILITTVTLHFKQYEFNSPPNNQVMLCEPTIIERNMTEIVYLTNTTIEKEICPKPAEYRNWSKPQCDITGFAPFSKDNSIRLSAGGDIWVTREPYVSCDPDKCYQFALGQGTTLNNVHSNNTVGDRTPYRTLLMNELGVPFHLGTKQVCIAWSSSSCHDGKAWLHVCITGDDKNATASFIYNGRLVDSVVSWSKEILRTQESECVCINGTCTVVMTDGSASGKADTKILFIEEGKIVHTSTLSGSAQHVEECSCYPRYPGVRCVCRDNWKGSNRPIVDINIKDHSIVSSYVCSGLVGDTPRKNDSSSSSHCLDPNNEEGGHGVKGWAFDDGNDVWMGRTINETSRLGYETFKVIEGWSNPKSKLQINRQVIVDRSDRSGYSGIFSVEGKSCINRCFYVELIRGRKEETEVLWTSNSIVVFCGTSGTYGTGSWPDGADLNLMPI

SEQ ID NO: 22974 - protein, 469 aa, synthetic construct
  REGION 1..469: note = neuraminidase__InfluenzaA__AFN19482
MNPNQKIITIGSVSLTISTICFFMQIAILITTVTLHFKQYEFNSPPNNQVMLCEPTIIERNITEIVYLTNTTIEKEICPKPAKYRNWSKPQCDITGFAPFSKDNSIRLSAGGDIWVTREPYVSCDPDKCYQFALGQGTTLNNVHSNNTVRDRTPYRTLLMNELGVPFHLGTKQVCIAWSSSSCHDGKAWLHVCITGDDKNATASFIYNGRLVDSVVSWSKEILRTQESECVCINGTCTVVMTDGSASGKADTKILFIEEGKIVHTSTLSGSAQHVEECSCYPRYPGVRCVCRDNWKGSNRPIVDINIKDHSIVSSYVCSGLVGDTPRKNDSSSSSHCLDPNNEEGGHGVKGWAFDDGNDVWMGRTINETSRLGYETFKVIEGWSNPKSKLQINRQVIVDRSDRSGYSGIFSVEGKSCINRCFYVELIRGRKEETEVLWTSNSIVVFCGTSGTYGTGSWPDGADLNLMPI

SEQ ID NO: 22975 - protein, 469 aa, synthetic construct; identical to SEQ ID NO: 22146
  REGION 1..469: note = neuraminidase__InfluenzaA__AFN19484

SEQ ID NO: 22976 - protein, 469 aa, synthetic construct; identical to SEQ ID NO: 22922
  REGION 1..469: note = neuraminidase__InfluenzaA__AFN19488

SEQ ID NO: 22977 - protein, 469 aa, synthetic construct
  REGION 1..469: note = neuraminidase__InfluenzaA__AFN19492
MNPNQKIITIGSVSLTISTICFFMQIAILITTVTLHFKQYEFNSPPNNQVMLCEPTIIERNITEIVYLTNTTIEKEICPKPAEYRNWSKPQCDITGFAPFSKDNSIRLSAGGDIWVTREPYVSCDPDKCYQFALGQGTTLNNVHSNNTVRDRTPYRTLLMNELGVPFHLGTKQVCIAWSSSSCHDGKAWLHVCITGDDKNATASFIYNGKLVDSVVSWSKEILRTQESECVCINGTCTVVMTDGSASGKADTKILFIEEGKIVHTSTLSGSAQHVEECSCYPRYPGVRCVCRDNWKGSNRPIVDINIKDHSIVSSYVCSGLVGDTPRKNDSSSSSHCLDPNNEEGGHGVKGWAFDDGNDVWMGRTINETSRLGYETFKVIEGWSNPKSKLQINRQVIVDRGDRSGYSGIFSVEGKSCINRCFYVELIRGRKEETEVLWTSNSIVVFCGTSGTYGTGSWPDGADLNLMPI

SEQ ID NO: 22978 - protein, 469 aa, synthetic construct
  REGION 1..469: note = neuraminidase__InfluenzaA__AFN19494
MNPNQKIITIGSVSLTISTICFFMQIAILITTVTLHFKQYEFNSPPNNQVMLCEPTIIERNITEIVYLTNTTIEKEICPKLAEYRNWSKPQCDITGFAPFSKDNSIRLSAGGDIWVTREPYVSCDPDKCYQFALGQGTTLNNMHSNNTVRDRTPYRTLLMNELGVPFHLGTKQVCIAWSSSSCHDGKAWLHVCITGDDKNATASFIYNGRLVDSVVSWSKEILRTQESECVCINGTCTVVMTDGSASGKADTKILFIEEGKIVHTSTLSGSAQHVEECSCYPRYPGVRCVCRDNWKGSNRPIVDINIKDHSIVSSYVCSGLVGDTPRKNDSSSSSHCLDPNNEEGGHGVKGWAFDDGNDVWMGRTINETSRLGYETFKVIEGWSNPKSKLQINRQVIVDRGNRSGYSGIFSVEGKSCINRCFYVELIRGRKEETEVLWTSNSIVVFCGTSGTYGTGSWPDGADLNLMPI

SEQ ID NO: 22979 - protein, 469 aa, synthetic construct; identical to SEQ ID NO: 21787
  REGION 1..469: note = neuraminidase__InfluenzaA__AFN19496

SEQ ID NO: 22980 - protein, 469 aa, synthetic construct
  REGION 1..469: note = neuraminidase__InfluenzaA__AFN19498
MNPNQKIITIGSVSLTISTICFFMQIAILITTVTLHFKQYEFNSPPNNQVMLCEPTIIERNITEIVYLTNTTIEKEICPKLAEYRNWSKPQCDITGFAPFSKDNSIRLSAGGDIWVTREPYVSCDPDKCYQFALGQGTTLNNVHSNNTVRDRTPYRTLLMNELGVPFHLGTKQVCIAWSSSSCHDGKAWLHVCITGDDKNATASFIYNGKLVDSVVSWSKEILRTQESECVCINGTCTVVMTDGSASGKADTKILFIEEGKIVHTSTLSGSAQHVEECSCYPRYPGVRCVCRDNWKGSNRPIVDINIKDHSIVSSYVCSGLVGDTPRKNDSSSSSHCLDPNNEEGGHGVKGWAFDDGNDVWMGRTINETSRLGYETFKVIEGWSNPKSKLQINRQVIVDRGNRSGYSGIFSVEGKSCINRCFYVELIRGRTEETEVLWTSNSIVVFCGTSGTYGTGSWPDGADLNLMPI

SEQ ID NO: 22981 - protein, 469 aa, synthetic construct; identical to SEQ ID NO: 22930
  REGION 1..469: note = neuraminidase__InfluenzaA__AFN19500

SEQ ID NO: 22982 - protein, 469 aa, synthetic construct; identical to SEQ ID NO: 22922
  REGION 1..469: note = neuraminidase__InfluenzaA__AFN19502

SEQ ID NO: 22983 - protein, 469 aa, synthetic construct; identical to SEQ ID NO: 19518
  REGION 1..469: note = neuraminidase__InfluenzaA__AFN19504

SEQ ID NO: 22984 - protein, 469 aa, synthetic construct; identical to SEQ ID NO: 19518
  REGION 1..469: note = neuraminidase__InfluenzaA__AFN19506

SEQ ID NO: 22985 - protein, 469 aa, synthetic construct; identical to SEQ ID NO: 22930
  REGION 1..469: note = neuraminidase__InfluenzaA__AFN19508

SEQ ID NO: 22986 - protein, 469 aa, synthetic construct; identical to SEQ ID NO: 22922
  REGION 1..469: note = neuraminidase__InfluenzaA__AFN19510

SEQ ID NO: 22987 - protein, 469 aa, synthetic construct; identical to SEQ ID NO: 22922
  REGION 1..469: note = neuraminidase__InfluenzaA__AFN19512

SEQ ID NO: 22988 - protein, 469 aa, synthetic construct; identical to SEQ ID NO: 22922
  REGION 1..469: note = neuraminidase__InfluenzaA__AFN19516

SEQ ID NO: 22989 - protein, 469 aa, synthetic construct; identical to SEQ ID NO: 22930
  REGION 1..469: note = neuraminidase__InfluenzaA__AFN19518

SEQ ID NO: 22990 - protein, 469 aa, synthetic construct; identical to SEQ ID NO: 22930
  REGION 1..469: note = neuraminidase__InfluenzaA__AFN19520

SEQ ID NO: 22991 - protein, 469 aa, synthetic construct; identical to SEQ ID NO: 22922
  REGION 1..469: note = neuraminidase__InfluenzaA__AFN19522

SEQ ID NO: 22992 - protein, 469 aa, synthetic construct
  REGION 1..469: note = neuraminidase__InfluenzaA__AFN19524
MNPNQKIITIGSVSLTISTICFFMQIAILITTVTLHFKQYEFNSPPNNQVMLCEPTIIERNITEIVYLTNTTIEKEICPKPAEYRNWSKPQCDITGFAPFSKDNSIRLSAGGDIWVTREPYVSCDPDKCYQFALGQGTTLNNVHSNNTVRDRTPYRTLLMNELGVPFHLGTKQVCIAWSSSSCHDGKAWLHVCITGDDKNATASFIYNGRLVDSVVSWSKEILRTQESECVCINGTCTVVMTDGSASGKADTKILFIEEGKIVHTSTLSGSAQHVEECSCYPRYPGVRCVCRDNWKGSNRPIVDINIKDHSIVSSYVCSGLVGDTPRKNDSSSSSHCLDPNNEEGGHGVKGWAFDDGNDVWMGRTINETSRLGYETFKVIEGWSNPKSKLQINRQVIVDRGDRSGYSGIFSVEGKSCINRCFYVELIRGRKEETEVLWTSNSIVVFCGTSGTYGTGSWPDGADLSLMPI

SEQ ID NO: 22993 - protein, 469 aa, synthetic construct
  REGION 1..469: note = neuraminidase__InfluenzaA__AFN19526
MNPNQKIITIGSVSLTISTICFFMQIAILITTVTLHFKQCEFNSPPNNQVMLCEPTIIERNITEIVYLTNTTTEKEICPKPAEYRNWSKPQCDITGFAPFSKDNSIRLSAGGDIWVTREPYVSCDPDKCYQFALGQGTTLNNVHSNNTVRDRTPYRTLLMNELGVPFHLGTKQVCIAWSSSSCHDGKAWLHVCITGDDKNATASFIYNGRLVDSVVSWSKEILRTQESECVCINGTCTVVMTDGSASGKADTKILFIEEGKIVHTSTLSGSAQHVEECSCYPRYPGVRCVCRDNWKGSNRPIVDINIKDHSIVSSYVCSGLVGDTPRKTDSSSSSHCLDPNNEEGGHGVKGWAFDDGNDVWMGRTINETSRLGYETFKVIEGWSNPKSKLQINRQVIVDRGDRSGYSGIFSVEGKSCINRCFYVELIRGRKEETEVLWTSNSIVVFCGTSGTYGTGSWPDGADLNLMPI

SEQ ID NO: 22994 - protein, 469 aa, synthetic construct
  REGION 1..469: note = neuraminidase__InfluenzaA__AFN19528
MNPNQKIITIGSVSLTISTICFFMQIAILITTVTLHFKQYEFNSPPNNQVMLCEPTIIERNMTEIVYLTNTTIEKEICPKPAEYRNWSKPQCDITGFAPFSKDNSIRLSAGGDIWVTREPYVSCDPDKCYQFALGQGTTLNNVHSNNTVRDRTPYRTLLMNELGVPFHLGTKQVCIAWSSSSCHDGKAWLHVCITGDDKNATASFIYNGRLVDSVVSWSKEILRTQESECVCINGTCTVVMTDGSASGKSDTKILFIEEGKIVHTSTLSGSAQHVEECSCYPRYPGVRCVCRDNWKGSNRPIVDINIKDHSIVSSYVCSGLVGDTPRKNDSSSSSHCLDPNNEEGGHGVKGWAFDDGNDVWMGRTINETSRLGYETFKVIEGWSNPKSKLQINRQVIVDRSDRSGYSGIFSVEGKSCINRCFYVELIRGRKEETEVLWTSNSIVVFCGTSGTYGTGSWPDGADLNLMPI

SEQ ID NO: 22995 - protein, 469 aa, synthetic construct; identical to SEQ ID NO: 22958
  REGION 1..469: note = neuraminidase__InfluenzaA__AFN19530

SEQ ID NO: 22996 - protein, 469 aa, synthetic construct; identical to SEQ ID NO: 22922
  REGION 1..469: note = neuraminidase__InfluenzaA__AFN19532

SEQ ID NO: 22997 - protein, 469 aa, synthetic construct; identical to SEQ ID NO: 22958
  REGION 1..469: note = neuraminidase__InfluenzaA__AFN19534

SEQ ID NO: 22998 - protein, 469 aa, synthetic construct; identical to SEQ ID NO: 22922
  REGION 1..469: note = neuraminidase__InfluenzaA__AFN19536

SEQ ID NO: 22999 - protein, 469 aa, synthetic construct; identical to SEQ ID NO: 22922
  REGION 1..469: note = neuraminidase__InfluenzaA__AFN19538

SEQ ID NO: 23000 - protein, 469 aa, synthetic construct; identical to SEQ ID NO: 22922
  REGION 1..469: note = neuraminidase__InfluenzaA__AFN19544

SEQ ID NO: 23001 - protein, 469 aa, synthetic construct
  REGION 1..469: note = neuraminidase__InfluenzaA__AFN19546
MNPNQKIITIGSVSLTISTICFFMQIAILITTVTLHFKQYEFNSPPNNQVMLCEPTIIERNITEIVYLTNTTIEKEICPKPAEYRNWSKPQCGITGFAPFSKDNSIRLSAGGDIWVTREPYVSCDPDKCYQFALGQGTTLNNVHSNNTVRDRTPYRTLLMSELGVPFHLGTKQVCIAWSSSSCHDGKAWLHVCITGDDKNATASFIYNGRLVDSVVSWSKEILRTQESECVCINGTCTVVMTDGSASGKADTKILFIEEGKIVHTSTLSGSAQHVEECSCYPRYPGVRCVCRDNWKGSNRPIVDINIKDHSIVSSYVCSGLVGDTPRKNDSSSSSHCLDPNNEEGGHGVKGWAFDDGNDVWMGRTINETSRLGYETFKVIEGWSNPKSKLQINRQVIVDRGDRSGYSGIFSVEGKSCINRCFYVELIRGRKEETEVLWTSNSIVVFCGTSGTYGTGSWPDGADLNLMPI

SEQ ID NO: 23002 - protein, 469 aa, synthetic construct
  REGION 1..469: note = neuraminidase__InfluenzaA__AFN19548
MNPNQKIITIGSVSLTISTICFFMQIAILITTVTLHFKQYEFNSPPNNQVMLCEPTIIERNITEIVYLTNTTIEKEICPKPAEYRNWSKPQCDITGFAPFSKDNSIRLSAGGDIWVTREPYVSCDPDKCYQFALGQGTTLNNVHSNNTVRDRTPYRTLLMNELGVPFHLGTKQVCIAWSSSSCHDGKAWLHVCITGDDKNATASFIYNGRLVDSVVSWSKEILRTQESECVCINGTCTVVMTDGSASGKADTKILFIEEGKIVHTSTLSGSAQHVEECSCYPRYPGVRCVCRDNWKGSNRPIVDINIKDHSIVSSYVCSGLVGDTPRKNDSFSSSHCLDPNNEEGGHGVKGWAFDDGNDVWMGRTINETSRLGYETFKVIEGWSNPKSKLQINRQVIVDRGDRSGYSGIFSVEGKSCINRCFYVELIRGRKEETEVLWTSNSIVVFCGTSGTYGTGSWPDGADLNLMPI

SEQ ID NO: 23003 - protein, 469 aa, synthetic construct
  REGION 1..469: note = neuraminidase__InfluenzaA__AFN19550
MNPNQKIITIGSVSLTISTICFFMQIAILITTVTLHFKQYEFNSPPNNQVMLCEPTIIERNITEIVYLTNTTIEKEICPKLAEYRNWSKPQCDITGFAPFSKDNSIRLSAGGDIWVTREPYVSCDPDKCYQFALGQGTTLNNVHSNNTVRDRTPYRTLLMNELGVPFHLGTKQVCIAWSSSSCHDGKAWLHVCITGDDKNATASFIYNGRLVDSVVSWSKEILRTQESECVCINGTCTVVMTDGSASGEADTKILFIEEGKIIHTSTLSGSAQHVEECSCYPRYPGVRCVCRDNWKGSNRPIVDINIKDHSIVSSYVCSGLVGDTPRKNDSSSSSHCLDPNNEEGGHGVKGWAFDDGNDVWMGRTINETSRLGYETFKVIEGWSNPKSKLQINRQVIVDRGNRSGYSGIFSVEGKSCINRCFYVELIRGRKEETEVLWTSNSIVVFCGTSGTYGTGSWPDGADLNLMPI

SEQ ID NO: 23004 - protein, 469 aa, synthetic construct; identical to SEQ ID NO: 22922
  REGION 1..469: note = neuraminidase__InfluenzaA__AFN19552

SEQ ID NO: 23005 - protein, 469 aa, synthetic construct; identical to SEQ ID NO: 22146
  REGION 1..469: note = neuraminidase__InfluenzaA__AFN19554

SEQ ID NO: 23006 - protein, 469 aa, synthetic construct; identical to SEQ ID NO: 22146
  REGION 1..469: note = neuraminidase__InfluenzaA__AFN19556

SEQ ID NO: 23007 - protein, 469 aa, synthetic construct
  REGION 1..469: note = neuraminidase__InfluenzaA__AFN19558
MNPNQKIITIGSVSLTISTICFFMQIAILITTVTLHFKQYEFNSPPNNQVMLCEPTIIERNITEIVYLTNTTIEKEICPKPAEYRNWSKPQCDITGFAPFSKDNSIRLSAGGDIWVTREPYVSCDPDKCYQFALGQGTTLNNVHSNNTVRDRTPYRTLLMNELGVPFHLGTKQVCIAWSSSSCHDGKAWLHVCITGDDKNATASFIYNGRLVDSVVSWSKEILRTQESECVCINGTCTVVMTDGSASGKADTKILFIEEGKIVHTSTLSGSAQHVEECSCYPRYPGVRCVCRDNWKGSNRPIVDINIKDHSIVSSYVCSGLVGDTPRKNDSSSSSHCLDPNNEEGGHGVKGWAFDDGNDVWMGRTINETSRLGYETFKVIEGWSNPKSKLQMNRQVIVDRGDRSGYSGIFSVEGKSCINRCFYVELIRGRKEETEVLWTSNSIVVFCGTSGTYGTGSWPDGADLNLMPI

SEQ ID NO: 23008 - protein, 469 aa, synthetic construct
  REGION 1..469: note = neuraminidase__InfluenzaA__AFN19560
MNPNQKIITIGSVSLTISTICFFMQIAILITTVTLHFKQYEFNSPPNNQVMLCEPTIIERNITEIVYLTNTTIEKEICPKPAEYRNWSKPQCGITGFAPFSKDNSIRLSAGGDIWVTREPYVSCDPDKCYQFALGQGTTLNNVHSNNTVRDRTPYRTLLMNELGVPFHLGTKQVCIAWSSSSCHDGKAWLHVCITGDDKNATASFIYNGRLVDSVVSWSKEILRTQESECVCINGTCTVVMTDGSASGKADTKILFIEEGKIVHTSTLSGSAQHVEECSCYPRYPGVRCVCRDNWKGSNRPIVDINIKDHSIVSSYVCSGLVGDTPRKNDSSSSSHCLDPNNEGGGHGVKGWAFDDGNDVWMGRTINETSRLGYETFKVIEGWSNPKSKLQINRQVIVDRGDRSGYSGIFSVEGKSCINRCFYVELIRGRKEETEVLWTSNSIVVFCGTSGTYGTGSWPDGADLNLMPI

SEQ ID NO: 23009 - protein, 469 aa, synthetic construct; identical to SEQ ID NO: 22969
  REGION 1..469: note = neuraminidase__InfluenzaA__AFN19562

SEQ ID NO: 23010 - protein, 469 aa, synthetic construct
  REGION 1..469: note = neuraminidase__InfluenzaA__AFN19564
MNPNQKIITIGSVSLTISTICFFMQIAILITTVTLHFKQYEFNSPPNNQVMLCEPTIIERNITEIVYLTNTTIEKEICPKPAEYRNWSKPQCGITGFAPFSKDNSIRLSAGGDIWVTREPYVSCDPDKCYQFALGQGTTLNNVHSNNTVRDRTPYRTLLMNELGVPFHLGTKQVCIAWSSSSCHDGKAWLHVCITGDDKNATASFIYNGRLVDSVVSWSKEILRTQESECVCINGTCTVVMTDGSASGKADTKILFIEEGKIVHTSTLSGSAQHVEECSCYPRYPGVRCVCRDNWKGSNRPIVDINIKDHSIVSSYVCSGLVGDTPRKTDSSSSSHCLDPNNEEGGHGVKGWAFDDGNDVWMGRTINETSRLGYETFKVIEGWSNPKSKLQINRQVIVDRGDRSGYSGIFSVEGKSCINRCFYVELIRGRKEETEVLWTSNSIVVFCGTSGTYGTGSWPDGADLNLMPI

SEQ ID NO: 23011 - protein, 469 aa, synthetic construct
  REGION 1..469: note = neuraminidase__InfluenzaA__AFN19566
MNPNQKIITIGSVSLTISTICFFMQIAILITTVTLHFKQYEFNSPPNNQVMLCEPTIIERNITEIVYLTNTTIEKEICPKPAEYRNWSKPQCGITGFAPFSKDNSIRLSAGGDIWVTREPYVSCDPDKCYQFALGQGTTLNNVHSNNTVRDRTPYRTLLMNELGVPFHLGTKQVCIAWSSSSCHDGKAWLHVCITGDDKNATASFIYNGRLVDSVVSWSNEILRTQESECVCINGTCTVVMTDGSASGKADTKILFIEEGKIVHTSTLSGSAQHVEECSCYPRYPGVRCVCRDNWKGSNRPIVDINIKDHSIVSSYVCSGLVGDTPRKNDSSSSSHCLDPNNEEGGHGVKGWAFDDGNDVWMGRTINETSRLGYETFKVIEGWSNPKSKLQINRQVIVDRGDRSGYSGIFSVEGKSCINRCFYVELIRGRKEENEVLWTSNSIVVFCGTSGTYGTGSWPDGADLNLMPI

SEQ ID NO: 23012 - protein, 469 aa, synthetic construct
  REGION 1..469: note = neuraminidase__InfluenzaA__AFN19568
MNPNQKIITIGSVSLTISTICFFMQIAILITTVTLHFKQYEFNSPPNNQVMLCEPTIIERNITEIVYLTNTTIEKEICPKPAEYRNWSKPQCGITGFAPFSKDNSIRLSAGGDIWVTREPYVSCDPDKCYQFALGQGTTLNNVHSNNTVRDRTPYRTLLMNELGVPFHLGTKQVCIAWSSSSCHDGKAWLHVCITGDDKNATASFIYNGRLVDSVVSWSKEILRTQESECVCINGTCTVVMTDGSASGKADTKILFIEEGKIVHTSTLSGSAQHVEECSCYPRYPGVRCVCRDNWKGSNRPIVDINIKDHSIVSSYVCSGLVGDTPRKNDSSSSSHCLDPNNEEGGHGVKGWAFDDGNDVWMGRTINETSRLGYETFKVIEGWSNPKSKLQVNRQVIVDRGDRSGYSGIFSVEGKSCINRCFYVELIRGRKEEIEVLWTSNSIVVFCGTSGTYGTGSWPDGADLNLMPI

SEQ ID NO: 23013 - protein, 469 aa, synthetic construct
  REGION 1..469: note = neuraminidase__InfluenzaA__AFN19570
MNPNQKIITIGSVSLTISTICFFMQIAILITTVTLHFKQYEFNYPPNNQVMLCEPTIIERNITEIVYLTNTTIEKEICPKPAEYRNWSKPQCGITGFAPFSKDNSIRLSAGGDIWVTREPYVSCDPDKCYQFALGQGTTLNNMHSNNTVRDRTPYRTLLMNELGVPFHLGTKQVCIAWSSSSCHDGKAWLHVCITGDDKNATASFIYNGRLVDSVVSWSNEILRTQESECVCINGTCTVVMTDGSASGKADTKILFIEEGKIVHTSTLSGSAQHVEECSCYPRYPGVRCVCRDNWKGSNRPIVDINIKDHSIVSSYVCSGLVGDTPRKNDSSSSSHCLDPNNEEGGHGVKGWAFDDGNDVWMGRTINETSRLGYETFKVIEGWSNPKSKLQINRQVIVDRGDRSGYSGIFSVEGKSCINRCFYVELIRGRKEENEVLWTSNSIVVFCGTSGTYGTGSWPDGADLNLMPI

SEQ ID NO: 23014 - protein, 469 aa, synthetic construct
  REGION 1..469: note = neuraminidase__InfluenzaA__AFN19572
MNPNQKIITIGSVSLTISTICFFMQIAILITTVTLHFKQYEFNSPPNNQVMLCEPTIIERNITEIVYLTNTTIEKEICPKPAEYRNWSKPQCDITGFAPFSKDNSIRISAGGDIWVTREPYVSCDPDKCYQFALGQGTTLNNVHSNNTVRDRTPYRTLLMNELGVPFHLGTKQVCIAWSSSSCHDGKAWLHVCITGDDKNATASFIYNGKLVDSVVSWSKEILRTQESECVCINGTCTVVMTDGSASGKADTKILFIEEGKIVHTSTLSGSAQHVEECSCYPRYPGVRCVCRDNWKGSNRPIVDINIKDHSIVSSYVCSGLVGDTPRKNDSSSSSHCLDPNNEEGGHGVKGWAFDDGNDVWMGRTINETSRLGYETFKVIEGWSNPKSKLQINRQVIVDRGDRSGYSGIFSVEGKSCINRCFYVELIRGRKEETEVLWTSNSIVVFCGTSGTYGTGSWPDGADLNLMPI

SEQ ID NO: 23015 - protein, 469 aa, synthetic construct
  REGION 1..469: note = neuraminidase__InfluenzaA__AFN19574
MNPNQKIITIGSVSLTISTICFFMQIAILITTVTLHFKQYEFNSPPNNQVMLCEPTIIERNITEIVYLTNTTIEKEICPKLAEYRNWSKPQCDITGFAPFSKDNSIRLSAGGDIWVTREPYVSCDPNKCYQFALGQGTTLNNVHSNNTVRDRTPYRTLLMNELGVPFHLGTKQVCIAWSSSSCHDGKAWLHVCITGDDKNATASFIYNGRLVDSVVSWSKKILRTQESECVCINGTCTVVMTDGSASGKADTKILFIEEGKIVHTSTLSGSAQHVEECSCYPRYPGVRCVCRDNWKGSNRPIVDINMKDHSIVSSYVCSGLVGDTPRKNDSSSSSHCFDPNDEEGGHGVKGWAFDDGNDVWMGRTISEKSRLGYETFKVIEGWSNPKSKLQINRQVIVDRGDRSGYSGIFSVEGKSCINRCFYVELIRGSKEETEVLWTSNSIVVFCGTSGTYGTGSWPDGADINLMPI

SEQ ID NO: 23016 - protein, 469 aa, synthetic construct
  REGION 1..469: note = neuraminidase__InfluenzaA__AFN19576
MNPNQKIITIGSVSLTISTICFFMQIAILITTVTLHFKQYEFNSPPNNQMMLCEPTIIERNITEIVYLTNTTIEKEICPKPAEYRNWSKPQCDITGFAPFSKDNSIRLSAGGDIWVTREPYVSCDPDKCYQFALGQGTTLNNVHSNNTVRDRTPYRTLLMNELGVPFHLGTKQVCIAWSSSSCHDGKAWLHVCITGDDKNATASFIYNGRLVDSVVSWSKEILRTQESECVCINGTCTVVMTDGSASGKADTKILFIEEGKIVHTSTLSGSAQHVEECSCYPRYPGVRCVCRDNWKGSNRPIVDINIKDHSIVSSYVCSGLVGDTPRKNDSSSSSHCLDPNNEEGGHGVKGWAFDDGNDVWMGRTINETSRLGYETFKVIEGWSNPKSKLQINRQVIVDRGDRSGYSGIFSVEGKSCINRCFYVELIRGRKEETEVLWTSNSIVVFCGTSGTYGTGSWPDGADLNLMPI

SEQ ID NO: 23017 - protein, 469 aa, synthetic construct; identical to SEQ ID NO: 22922
  REGION 1..469: note = neuraminidase__InfluenzaA__AFN19578

SEQ ID NO: 23018 - protein, 469 aa, synthetic construct; identical to SEQ ID NO: 22922
  REGION 1..469: note = neuraminidase__InfluenzaA__AFN19582

SEQ ID NO: 23019 - protein, 469 aa, synthetic construct; identical to SEQ ID NO: 22922
  REGION 1..469: note = neuraminidase__InfluenzaA__AFN19584

SEQ ID NO: 23020 - protein, 469 aa, synthetic construct; identical to SEQ ID NO: 22922
  REGION 1..469: note = neuraminidase__InfluenzaA__AFN19588

SEQ ID NO: 23021 - protein, 469 aa, synthetic construct; identical to SEQ ID NO: 22922
  REGION 1..469: note = neuraminidase__InfluenzaA__AFN19590

SEQ ID NO: 23022 - protein, 469 aa, synthetic construct; identical to SEQ ID NO: 22958
  REGION 1..469: note = neuraminidase__InfluenzaA__AFN19592

SEQ ID NO: 23023 - protein, 469 aa, synthetic construct; identical to SEQ ID NO: 22922
  REGION 1..469: note = neuraminidase__InfluenzaA__AFN19594

SEQ ID NO: 23024 - protein, 469 aa, synthetic construct; identical to SEQ ID NO: 22930
  REGION 1..469: note = neuraminidase__InfluenzaA__AFN19596

SEQ ID NO: 23025 - protein, 469 aa, synthetic construct; identical to SEQ ID NO: 22930
  REGION 1..469: note = neuraminidase__InfluenzaA__AFN19600

SEQ ID NO: 23026 - protein, 469 aa, synthetic construct
  REGION 1..469: note = neuraminidase__InfluenzaA__AFN19602
MNPNQKIITIGSVSLTLSTICFFMQIAILITTVTLHFKQYEFNSPPNNQVMLCEPTIIERNMTEIVYLTNTTIEKEICPKPAEYRNWSKPQCDITGFAPFSKDNSIRLSAGGDIWVTREPYVSCDPDKCYQFALGQGTTLNNVHSNNTVRDRTPYRTLLMNELGVPFHLGTKQVCIAWSSSSCHDGKAWLHVCITGDDKNATASFIYNGRLVDSVVSWSKEILRTQESECVCINGTCTVVMTDGSASGKADTKILFIEEGKIVHTSTLSGSAQHVEECSCYPRYPGVRCVCRDNWKGSNRPIVDINIKDHSIVSSYVCSGLVGDTPRKNDSSSSSHCLDPNNEEGGHGVKGWAFDDGNDVWMGRTINETSRLGYETFKVIEGWSNPKSKLQINRQVIVDRSDRSGYSGIFSVEGKSCINRCFYVELIRGRKEETEVLWTSNSIVVFCGTSGTYGTGSWPDGADLNLMPI

SEQ ID NO: 23027 - protein, 469 aa, synthetic construct; identical to SEQ ID NO: 22922
  REGION 1..469: note = neuraminidase__InfluenzaA__AFN19604

SEQ ID NO: 23028 - protein, 469 aa, synthetic construct; identical to SEQ ID NO: 22922
  REGION 1..469: note = neuraminidase__InfluenzaA__AFN19606

SEQ ID NO: 23029 - protein, 469 aa, synthetic construct; identical to SEQ ID NO: 22922
  REGION 1..469: note = neuraminidase__InfluenzaA__AFN19608

SEQ ID NO: 23030 - protein, 469 aa, synthetic construct; identical to SEQ ID NO: 22922
  REGION 1..469: note = neuraminidase__InfluenzaA__AFN19610

SEQ ID NO: 23031 - protein, 469 aa, synthetic construct; identical to SEQ ID NO: 22930
  REGION 1..469: note = neuraminidase__InfluenzaA__AFN19612

SEQ ID NO: 23032 - protein, 469 aa, synthetic construct; identical to SEQ ID NO: 22146
  REGION 1..469: note = neuraminidase__InfluenzaA__AFN19614

SEQ ID NO: 23033 - protein, 469 aa, synthetic construct
  REGION 1..469: note = neuraminidase__InfluenzaA__AFN19618
MNPNQKIITIGSVSLTISTICFFMQIAILITTVTLHFKQYEFNSPPNNQVMLCEPTIIERNITEIVYLTNTTIEKEICPKPAEYRNWSKPQCGITGFAPFSKDNSIRLSAGGDIWVTREPYVSCDPDKCYQFALGQGTTLNNVHSNNTVRDRTPYRTLLMNELGVPFHLGTKQVCIAWSSSSCHDGKAWLHVCITGDDKNATASFIYNGRLVDSVVSWSNEILRTQESECVCINGTCTVVMTDGSASGKADTKILFIEEGKIVHTSTLSGSAQHVEECSCYPRYPGVRCVCRDNWKGSNRPIVDINIKDHSIVSSYVCSGLVGDTPRKNDSSSSSHCLDPNNEEGGHGVKGWAFDDGNDVWMGRTINETSRLGYETFKVIEGWSNPKSKLQINRQVIVDRGDRSGYSGIFSVEGKSCINRCFYVELIRGRKEETEVLWTSNSIVVFCGTSGTYGTGSWPDGADLNLMPI

SEQ ID NO: 23034 - protein, 469 aa, synthetic construct; identical to SEQ ID NO: 22922
  REGION 1..469: note = neuraminidase__InfluenzaA__AFN19620

SEQ ID NO: 23035 - protein, 469 aa, synthetic construct; identical to SEQ ID NO: 22958
  REGION 1..469: note = neuraminidase__InfluenzaA__AFN19624

SEQ ID NO: 23036 - protein, 469 aa, synthetic construct; identical to SEQ ID NO: 22922
  REGION 1..469: note = neuraminidase__InfluenzaA__AFN19630

SEQ ID NO: 23037 - protein, 469 aa, synthetic construct
  REGION 1..469: note = neuraminidase__InfluenzaA__AFN19632
MNPNQKIITIGSVSLTISTICFFMQIAILITTVTLHFKQYEFNSPPNNQVMLCEPTIIERNITEIVYLTNTTIEKEICPKPTEYRNWSKPQCDITGFAPFSKDNSIRLSAGGDIWVTREPYVSCDPDKCYQFALGQGTTLNNVHSNNTVRDRTPYRTLLMNELGVPFHLGTKQVCIAWSSSSCHDGKAWLHVCITGDDKNATASFIYNGRLVDSVVSWSKEILRTQESECVCINGTCTVVMTDGSASGKADTKILFIEEGKIVHTSTLSGSAQHVEECSCYPRYPGVRCVCRDNWKGSNRPIVDINIKDHSIVSSYVCSGLVGDTPRKNDSSSSSHCLDPNNEEGGHGVKGWAFDDGNDVWMGRTINETSRLGYETFKVIEGWSNPKSKLQINRQVIVDRGDRSGYSGIFSVEGKSCINRCFYVELIRGRKEETEVLWTSNSIVVFCGTSGTYGTGSWPDGADLNLMPI

SEQ ID NO: 23038 - protein, 469 aa, synthetic construct
  REGION 1..469: note = neuraminidase__InfluenzaA__AFN19634
MNPNQKIITIGSVSLTISTICFFMQIAILITTVTLHFKQYEFNSPPNNQVMLCEPTIIERNITEIVYLTNTTIEKEICPKPAEYRNWSKPQCDITGFAPFSKDNSIRLSAGGDIWVTREPYVSCDPDKCYQFALGQGTTLNNVHSNNTVRDRTSYRTLLMNELGVPFHLGTKQVCIAWSSSSCHDGKAWLHVCITGDDKNATASFIYNGRLVDSVVSWSKEILRTQESECVCINGTCTVVMTDGSASGKADTKILFIEEGKIVHTSTLSGSAQHVEECSCYPRYPGVRCVCRDNWKGSNRPIVDINIKDHSIVSSYVCSGLVGDTPRKNDSSSSSHCLDPNNEEGGHGVKGWAFDDGNDVWMGRTINETSRLGYETFKVIEGWSNPKSKLQINRQVIVDRGDRSGYSGIFSVEGKSCINRCFYVELIRGRKEETEVLWTSNSIVVFCGTSGTYGTGSWPDGADLNLMPI

SEQ ID NO: 23039 - protein, 469 aa, synthetic construct
  REGION 1..469: note = neuraminidase__InfluenzaA__AFN19636
MNPNQKIITIGSVSLTISTICFFMQIAILITTVTLHFKQYEFNSPPNNQVMLCEPTIIERNITEIVYLTNTIIEKEICPKPTEYRNWSKPQCDITGFAPFSKDNSIRLSAGGDIWVTREPYVSCDPDKCYQFALGQGTTLNNVHSNNTVRDRTPYRTLLMNELGVPFHLGTKQVCIAWSSSSCHDGKAWLHVCITGDDKNATASFIYNGRLVDSVVSWSKEILRTQESECVCINGTCTVVMTDGSASGKADTKILFIEEGKIVHTSTLSGSAQHVEECSCYPRYPGVRCVCRDNWKGSNRPIVDINIKDHSIVSSYVCSGLVGDTPRKNDSSSSSHCLDPNNEEGGHGVKGWAFDDGNDVWMGRTINETSRLGYETFKVIEGWSNPKSKLQINRQVIVDRGDRSGYSGIFSVEGKSCINRCFYVELIRGRKEETEVLWTSNSIVVFCGTSGTYGTGSWPDGADLNLMPI

SEQ ID NO: 23040 - protein, 469 aa, synthetic construct; identical to SEQ ID NO: 23039
  REGION 1..469: note = neuraminidase__InfluenzaA__AFN19638

SEQ ID NO: 23041 - protein, 469 aa, synthetic construct; identical to SEQ ID NO: 22922
  REGION 1..469: note = neuraminidase__InfluenzaA__AFN19640

SEQ ID NO: 23042 - protein, 469 aa, synthetic construct
  REGION 1..469: note = neuraminidase__InfluenzaA__AFN19642
MNPNQKIITIGSVSLTISTICFFMQIAILITTVTLHFKQYEFNSPPNNQVMLCEPTIIERNMTEIVYLTNTTIEKEICPKPAEYRNWSKPQCDITGFAPFSKDNSIRLSAGGDIWVTREPYVSCDPDKCYQFALGQGTTLNNVHSNNTVSDRTPYRTLLMNELGVPFHLGTKQVCIAWSSSSCHDGKAWLHVCITGDDKNATASFIYNGRLVDSVVSWSKEILRTQESECVCINGTCTVVMTDGSASGKADTKILFIEEGKIVHTSTLSGSAQHVEECSCYPRYPGVRCVCRDNWKGSNRPIVDINIKDHSIVSSYVCSGLVGDTPRKNDSSSSSHCLDPNNEEGGHGVKGWAFDDGNDVWMGRTINETSRLGYETFKVIEGWSNPKSKLQINRQVIVDRSDRSGYSGIFSVEGKSCINRCFYVELIRGRKEETEVLWTSNSIVVFCGTSGTYGTGSWPDGADLNLMPI

SEQ ID NO: 23043 - protein, 469 aa, synthetic construct; identical to SEQ ID NO: 23039
  REGION 1..469: note = neuraminidase__InfluenzaA__AFN19644

SEQ ID NO: 23044 - protein, 469 aa, synthetic construct
  REGION 1..469: note = neuraminidase__InfluenzaA__AFN19646
MNPNQKIITIGSVSLTISTICFFIQIAILITTVTLHFKQYEFNSPPNNQVMLCEPTIIERNITEIVYLTNTTIEKEICPKPAEYRNWSKPQCDITGFAPFSKDNSIRLSAGGDIWVTREPYVSCDPDKCYQFALGQGTTLNNVHSNNTVRDRTPYRTLLMNELGVPFHLGTKQVCIAWSSSSCHDGKAWLHVCITGDDKNATASFIYNGRLVDSVVSWSKEILRTQESECVCINGTCTVVMTDGSASGKADTKILFIEEGKIVHTSTLSGSAQHVEECSCYPRYPGVRCVCRDNWKGSNRPIVDINIKDHSIVSSYVCSGLVGDTPRKNDSSSSSHCLDPNNEEGGHGVKGWAFDDGNDVWMGRTINETSRLGYETFKVIEGWSNPKSKLQINRQVIVNRSDRSGYSGIFSVEGKSCINRCFYVELIRGRKEETEVLWTSNSIVVFCGTSGTYGTGSWPDGADLNLMPI

SEQ ID NO: 23045 - protein, 469 aa, synthetic construct; identical to SEQ ID NO: 22922
  REGION 1..469: note = neuraminidase__InfluenzaA__AFN19648

SEQ ID NO: 23046 - protein, 469 aa, synthetic construct; identical to SEQ ID NO: 22958
  REGION 1..469: note = neuraminidase__InfluenzaA__AFN19650

SEQ ID NO: 23047 - protein, 469 aa, synthetic construct
  REGION 1..469: note = neuraminidase__InfluenzaA__AFN19652
MNPNQKIITIGSVSLTISTICFFMQIAILITTVTLHFKQYEFNSPPNNQVMLCEPTIIERNITEVVYLTNTTIEKEICPKPAEYRNWSKPQCDITGFAPFSKDNSIRLSAGGDIWVTREPYVSCDPDKCYQFALGQGTTLNNVHSNNTVRDRTPYRTLLMNELGVPFHLGTKQVCIAWSSSSCHDGKAWLHVCITGDDKNATASFIYNGRLVDSVVSWSKEILRTQESECVCINGTCTVVMTDGSASGKADTKILFIEEGKIVHTSTLSGSAQHVEECSCYPRYPGVRCVCRDNWKGSNRPIVDINIKDHSIVSSYVCSGLVGDTPRKNDSSSSSHCLDPNNEEGGHGVKGWAFDDGNDVWMGRTINETSRLGYETFKVIEGWSNPKSKLQINRQVIVDRGDRSGYSGIFSVEGKSCINRCFYVELIRGRKEETEVLWTSNSIVVFCGTSGTYGTGSWPDGADLNLMPI

SEQ ID NO: 23048 - protein, 469 aa, synthetic construct
  REGION 1..469: note = neuraminidase__InfluenzaA__AFN19654
MNPNQKIITIGSVSLTISTICFFMQIAILITTVTLHFKQYEFNSPPNNQVMLCEPTIIERNITEIVYLTNTTIEKETCPKPTEYRNWSKPQCDITGFAPFSKDNSIRLSAGGDIWVTREPYVSCDPDKCYQFALGQGTTLNNVHSNNTVRDRTPYRTLLMNELGVPFHLGTKQVCIAWSSSSCHDGKAWLHVCITGDDKNATASFIYNGRLVDSVVSWSKEILRTQESECVCINGTCTVVMTDGSASGKADTKILFIEEGKIVHTSTLSGSAQHVEECSCYPRYPGVRCVCRDNWKGSNRPIVDINIKDHSIVSSYVCSGLVGDTPRKNDSSSSSHCLDPNNEEGGHGVKGWAFDDGNDVWMGRTINETSRLGYETFKVIEGWSNPKSKLQINRQVIVDRGDRSGYSGIFSVEGKSCINRCFYVELIRGRKEETEVLWTSNSIVVFCGTSGTYGTGSWPDGADLNLMPI

SEQ ID NO: 23049 - protein, 469 aa, synthetic construct; identical to SEQ ID NO: 22922
  REGION 1..469: note = neuraminidase__InfluenzaA__AFN19656

SEQ ID NO: 23050 - protein, 469 aa, synthetic construct; identical to SEQ ID NO: 22146
  REGION 1..469: note = neuraminidase__InfluenzaA__AFN19658

SEQ ID NO: 23051 - protein, 469 aa, synthetic construct; identical to SEQ ID NO: 23039
  REGION 1..469: note = neuraminidase__InfluenzaA__AFN19660

SEQ ID NO: 23052 - protein, 469 aa, synthetic construct; identical to SEQ ID NO: 22146
  REGION 1..469: note = neuraminidase__InfluenzaA__AFN19662

SEQ ID NO: 23053 - protein, 469 aa, synthetic construct
  REGION 1..469: note = neuraminidase__InfluenzaA__AFN19664
MNPNQKIITIGSVSLTISTICFFMQIAILITTVTLHFKQYEFNSPPNNQVMLCEPTIIERNITEIVYLTNNTIEKEICPKPAEYRNWSKPQCGITGFAPFSKDNSIRLSAGGDIWVTREPYVSCDPDKCYQFALGQGTTLNNVHSNNTVRDRTPYRTLLMNELGVPFHLGTKQVCIAWSSSSCHDGKAWLHVCITGDDKNATASFIYNGRLVDSVVSWSKEILRTQESECVCINGTCTVVMTDGSASGKADTKILFIEEGKIVHTSTLSGSAQHVEECSCYPRYPGVRCVCRDNWKGSNRPIVDINIKDHSIVSSYVCSGLVGDTPRKNDSSSSSHCLDPNNEEGGHGVKGWAFDDGNDVWMGRTINETSRLGYETFKVIEGWSNPKSKLQINRQVIVDRGDRSGYSGIFSVEGKSCINRCFYVELIRGRKEETEVLWTSNSIVVFCGTSGTYGTGSWPDGADLNLMPI

SEQ ID NO: 23054 - protein, 469 aa, synthetic construct
  REGION 1..469: note = neuraminidase__InfluenzaA__AFN19666
MNPNQKIITIGSVSLTISTICFFMQIAILITTVTLHFKQYEFNSPPNNQVMLCEPTIIERNMTEIVYLTNTTIEKEICPKPAEYRNWSKPQCDITGFAPFSKDNSIRLSAGGDIWVTREPYVSCDPDKCYQFALGQGTTLNNVHSNNTVRDRTPYRTLLMNELGVPFHLGTKQVCIAWSSSSCHDGKAWLHVCITGDDKNATASFIYNGRLVDSVVSWSKEILRTQESECVCINGTCTVVMTDGSASGKADTKILFIEEGKIVHTSTLSGSAQHVEECSCYPRYPGVRCVCRDNWKGSNRPIVDINIKDHSIVSSYVCSGLVGDTPRKNDSSSSSHCLDPNNEEGGHGVKGWAFDDGNDVWMGRTINETSRLGYETFKVIEGWSNPKSKLQINRQVIVNRSDRSGYSGIFSVEGKSCINRCFYVELIRGRKEETEVLWTSNSIVVFCGTSGTYGTGSWPDGADLNLMPI

SEQ ID NO: 23055 - protein, 469 aa, synthetic construct
  REGION 1..469: note = neuraminidase__InfluenzaA__AFN19668
MNPNQKIITIGSVSLTISTICFFMQIAILITTVTLHFKQYEFNSPPNNQVMLCEPTIIERNMTEIVYLTNTTIEKEICPKPAEYRNWSKPQCDITGFAPFSKDNSIRLSAGGDIWVTREPYVSCDPDKCYQFALGQGTTLNNEHSNNTVRDRTPYRTLLMNELGVPFHLGTKQVCIAWSSSSCHDGKAWLHVCITGDDKNATASFIYNGRLVDSVVSWSKEILRTQESECVCINGTCTVVMTDGSASGKADTKILFIEEGKIVHTSTLSGSAQHVEECSCYPRYPGVRCVCRDNWKGSNRPIVDINIKDHSIVSSYVCSGLVGDTPRKNDSSSSSHCLDPNNEEGGHGVKGWAFDDGNDVWMGRTINETSRLGYETFKVIEGWSNPKSKLQINRQVIVDRSDRSGYSGIFSVEGKSCINRCFYVELIRGRKEETEVLWTSNSIVVFCGTSGTYGTGSWPDGADLNLMPI

SEQ ID NO: 23056 - protein, 469 aa, synthetic construct; identical to SEQ ID NO: 22958
  REGION 1..469: note = neuraminidase__InfluenzaA__AFN19670

SEQ ID NO: 23057 - protein, 469 aa, synthetic construct; identical to SEQ ID NO: 22146
  REGION 1..469: note = neuraminidase__InfluenzaA__AFN19673

SEQ ID NO: 23058 - protein, 469 aa, synthetic construct; identical to SEQ ID NO: 22922
  REGION 1..469: note = neuraminidase__InfluenzaA__AFN19675

SEQ ID NO: 23059 - protein, 469 aa, synthetic construct
  REGION 1..469: note = neuraminidase__InfluenzaA__AFN19677
MNPNQKIITIGSVSLTISIICFFMQIAILITTVTLHFKQYEFNSPPNNQVMLCEPTIIERNITEIVYLTNTTIEKEICPKPAEYRNWSKPQCDITGFAPFSKDNSIRLSAGGDIWVTREPYVSCDPDKCYQFALGQGTTLNNVHSNNTVRDRTPYRTLLMNELGVPFHLGTKQVCIAWSSSSCHDGKAWLHVCITGDDKNATASFIYNGRLVDSVVSWSKEILRTQESECVCINGTCTVVMTDGSASGKADTKILFIEEGKIVHTSTLSGSAQHVEECSCYPRYPGVRCVCRDNWKGSNRPIVDINIKDHSIVSSYVCSGLVGDTPRKNDSSSSSHCLDPNNEEGGHGVKGWAFDDGNDVWMGRTINETSRLGYETFKVIEGWSNPKSKLQINRQVIVDRGDRSGYSGIFSVEGKSCINRCFYVELIRGRKEETEVLWTSNSIVVFCGTSGTYGTGSWPDGADLNLMPI

SEQ ID NO: 23060 - protein, 469 aa, synthetic construct; identical to SEQ ID NO: 22958
  REGION 1..469: note = neuraminidase__InfluenzaA__AFN19683

SEQ ID NO: 23061 - protein, 469 aa, synthetic construct; identical to SEQ ID NO: 22922
  REGION 1..469: note = neuraminidase__InfluenzaA__AFN19685

SEQ ID NO: 23062 - protein, 469 aa, synthetic construct; identical to SEQ ID NO: 22922
  REGION 1..469: note = neuraminidase__InfluenzaA__AFN19687

SEQ ID NO: 23063 - protein, 469 aa, synthetic construct; identical to SEQ ID NO: 22922
  REGION 1..469: note = neuraminidase__InfluenzaA__AFN19689

SEQ ID NO: 23064 - protein, 469 aa, synthetic construct; identical to SEQ ID NO: 22146
  REGION 1..469: note = neuraminidase__InfluenzaA__AFN19691

SEQ ID NO: 23065 - protein, 469 aa, synthetic construct
  REGION 1..469: note = neuraminidase__InfluenzaA__AFN19693
MNPNQKIITIGSVSLTISTICFFMQIAILITTVTLHFKQYEFNSPPNNQVMLCEPTIIERNITEIVYLTNTTIEKEICPKLAEYRNWSKPQCDITGFAPFSKDNSIRLSAGGDIWVTREPYVSCDPDKCYQFALGQGTTLNNVHSNNTVRDRTPYRTLLMNELGVPFHLGTKQVCIAWSSSSCHDGKAWLHVCITGDDKNATASFIYNGRLVDSVVSWSKDILRTQESECVCINGTCAVVMTDGSASGKADTKILFIEEGKIVHTSTLSGSAQHVEECSCYPRYPGVRCVCRDNWKGSNRPIVDINIKDHSIVSSYVCSGLVGDTPRKNDSSSSSNCLDPNNEEGGHGVKGWAFDDGNDVWMGRTINETSRLGYETFKVIEGWSNPKSKLQINRQVIVDRGNRSGYSGIFSVEGKNCINRCFYVELIRGRKEETEVLWTSNSIVVFCGTSGTYGTGSWPDGADLNLMPI

SEQ ID NO: 23066 - protein, 469 aa, synthetic construct
  REGION 1..469: note = neuraminidase__InfluenzaA__AFN19697
MNPNQKIITIGSVSLTISTICFFMQIAILITTVTLHFKQYEFNSPPNNQVMLCEPTIIERNITEIVYLTNTTIEKEICPKPAEYRNWSKPQCGITGFAPFSKDNSIRLSAGGDIWVTREPYVSCDPDKCYQFALGQGTTLNNVHSNNTVRDRTPYRTLLMNELGVPFHLGTKQVCIAWSSSSCHDGKAWLHVCITGDDKNATASFIYNGRLVDSVVSWSKETLRTQESECVCINGTCTVVMTDGSASGKADTKILFIEEGKIVHTSTLSGSAQHVEECSCYPRYPGVRCVCRDNWKGSNRPIVDINIKDHSIVSSYVCSGLVGDTPRKNDSSSSSHCLDPNNEEGGHGVKGWAFDDGNDVWMGRTINETSRLGYETFKVIEGWSNPKSKLQINRQVIVDRGDRSGYSGIFSVEGKSCINRCFYVELIRGRKEETEVLWTSNSIVVFCGTSGTYGTGSWPDGADLNLMPI

SEQ ID NO: 23067 - protein, 469 aa, synthetic construct; identical to SEQ ID NO: 22922
  REGION 1..469: note = neuraminidase__InfluenzaA__AFN19699

SEQ ID NO: 23068 - protein, 469 aa, synthetic construct; identical to SEQ ID NO: 22958
  REGION 1..469: note = neuraminidase__InfluenzaA__AFN19701

SEQ ID NO: 23069 - protein, 469 aa, synthetic construct
  REGION 1..469: note = neuraminidase__InfluenzaA__AFN19703
MNPNQKIITIGSVSLTISTICFFMQIAILITTVTLHFKQYEFNSPPNNQVMLCEPTIIERNITEIVYLTNTTIEKEICPKPAEYRNWSKPQCGITGFAPFSKDNSIRLSAGGDIWVTREPYVSCDPDKCYQFALGQGTTLDNVHSNNTVRDRTPYRTLLMNELGVPFHLGTKQVCIAWSSSSCHDGKAWLHVCITGDDKNATASFIYNGRLVDSVVSWSKEILRTQESECVCINGTCTVVMTDGSASGKADTKILFIEEGKIVHTSTLSGSAQHVEECSCYPRYPGVRCVCRDNWKGSNRPIVDINIKDHSIVSSYVCSGLVGDTPRKNDSSSSSHCLDPNNEEGGHGVKGWAFDDGNDVWMGRTINETSRLGYETFKVIEGWSNPKSKLQINRQVIVDRGDRSGYSGIFSVEGKSCINRCFYVELIRGRKEETEVLWTSNSIVVFCGTSGTYGTGSWPDGADLNLMPI

SEQ ID NO: 23070 - protein, 469 aa, synthetic construct; identical to SEQ ID NO: 20257
  REGION 1..469: note = neuraminidase__InfluenzaA__AFN19711

SEQ ID NO: 23071 - protein, 469 aa, synthetic construct
  REGION 1..469: note = neuraminidase__InfluenzaA__AFN19721
MNPNQKIITIGSVCMTIGMANLILQIGNIISIWISHSIQLGNQSQIETCNQSVITYENNTWVNQTYVNISNTNFAAGQSVVSVKLAGNSSLCPVSGWAIYSKDNSIRIGSKGDVFVIREPFISCSPMECRTFFLTQGALLNDKHSNGTIKDRSPYRTLMSCPIGEVPSPYNSRFESVAWSASACHDGINWLTIGISGPDNGAVAVLKYNGIITDTIKSWRNNILRTQESECACVNGSCFTIMTDGPSDGQASYKIFRIEKGKIVKSVEMNAPNYHYEECSCYPDSSEITCVCRDNWHGSNRPWVSFNQNLEYQIGYICSGIFGDNPRPNDKTGSCGPVSSNGANGVKGFSFKYGNGVWIGRTKSISSRKGFEMIWDPNGWTGTDNNFSIKQDIVGINEWSGYSGSFVQHPELTGLDCIRPCFWVELIRGRPKENTIWTSGSSISFCGVNSDTVGWSWPDGAELPFTIDK

SEQ ID NO: 23072 - protein, 469 aa, synthetic construct; identical to SEQ ID NO: 21078
  REGION 1..469: note = neuraminidase__InfluenzaA__AFN19731

SEQ ID NO: 23073 - protein, 469 aa, synthetic construct; identical to SEQ ID NO: 20257
  REGION 1..469: note = neuraminidase__InfluenzaA__AFN19737

SEQ ID NO: 23074 - protein, 469 aa, synthetic construct
  REGION 1..469: note = neuraminidase__InfluenzaA__AFN19747
MNPNQKIITIGSVCMTIGMANLILQIGNIISIWISHSIQLGNQNQIETCNQSVITHENNTWVNQTYVNISNTNFAAGQSVVSVKLAGNSSLCPVSGWAIYSKDNSIRIGSKGDVFVIREPFISCSPLECRTFFLTQGALLNDKHSNGTIKDRSPYRTLMSCPIGEVPSPYNSRFESVAWSASACHDGINWLTIGISGPDNGAVAVLKYNGIITDTIKSWRNNILRTQESECACVNGSCFTVMTDGPSDGQASYKIFRIEKGKIVKSVEMNAPNYHYEECSCYPDSSEITCVCRDNWHGANRPWVSFNQNLEYQIGYICSGIFGDNPRPNDKTGSCGPVSSNGANGVKGFSFKYGNGVWIGRTKSISSRNGFEMIWDPNGWTGTDNNFSIKQDIVGINEWSGYSGSFVQHPELTGLDCIRPCFWVELIRGRPKENTIWTSGSSISFCGVNSDTVGWSWPDGAELPFTIDK

SEQ ID NO: 23075 - protein, 469 aa, synthetic construct; identical to SEQ ID NO: 20257
  REGION 1..469: note = neuraminidase__InfluenzaA__AFN19749

SEQ ID NO: 23076 - protein, 469 aa, synthetic construct; identical to SEQ ID NO: 20257
  REGION 1..469: note = neuraminidase__InfluenzaA__AFN19759

SEQ ID NO: 23077 - protein, 469 aa, synthetic construct
  REGION 1..469: note = neuraminidase__InfluenzaA__AFN19769
MNPNQKIITIGSVCMTIGMANLILQIGNIISIWISHSIQLGNQSQIETCNQSVITYENNTWVNQTYVNISNTNFAAGQSVVSVKLAGNSSLCPVSGWAIYSKDNSIRIGSKGDVFVIREPFISCSPLECRTFFLTQGALLNDKHSNGTIKDRSPYRTLMSCPIGEVPSPYNSRFESVAWSASACHDGINWLTIGISGPDNRAVAVLKYNGIITDTIKSWRNNILRTQESECACVNGSCFTIMTDGPSDGQASYKIFRIEKGKIVKSVEMNAPNYHYEECSCYPDSSEITCVCRDNWHGSNRPWVSFNQNLEYQIGYICSGIFGDNPRPNDKTGSCGPVSSNGANGVKGFSFKYGNGVWIGRTKSISSRKGFEMIWDPNGWTGTDNNFSIKQDIVGINEWSGYSGSFVQHPELTGLDCIRPCFWVELIRGRPKENTIWTSGSSISFCGVNSDTVGWSWPDGAELPFTIDK

SEQ ID NO: 23078 - protein, 469 aa, synthetic construct; identical to SEQ ID NO: 20257
  REGION 1..469: note = neuraminidase__InfluenzaA__AFN19783

SEQ ID NO: 23079 - protein, 469 aa, synthetic construct; identical to SEQ ID NO: 20958
  REGION 1..469: note = neuraminidase__InfluenzaA__AFN19793

SEQ ID NO: 23080 - protein, 469 aa, synthetic construct; identical to SEQ ID NO: 20257
  REGION 1..469: note = neuraminidase__InfluenzaA__AFN19807

SEQ ID NO: 23081 - protein, 469 aa, synthetic construct
  REGION 1..469: note = neuraminidase__InfluenzaA__AFN19809
MNPNQKIITIGSVCMIIGMANLMLQIGNIISIWISHSIQLGNQNQIETCNQSVITYENNTWVNQTYVNISNTNFAAGQSVISVKLAGNSSLCPVSGWAIYSKDNSIRIGSKGDVFVIREPFISCSPLECRTFFLTQGALLNDKHSNGTIKDRSPYRTLMSCPIGEVPSPYNSRFESVAWSASACHDGINWLTIGISGPDNGAVAVLKYNGIITDTIKSWRNNILRTQESECACVNGSCFTVMTDGPSDGQASYKIFRIEKGKIVKSVEMNAPNYHYEECSCYPDSSEITCVCRDNWHGSNRPWVSFNQNLEYQIGYICSGIFGDNPRPNDKTGSCGPVSTNGANGVKGFSFKYGNGVWIGRTKSISSRNGFEMIWDPNGWTGTDNKFSIKQDIVGINEWSGYSGSFVQHPELTGLDCIRPCFWVELIRGRPKENTIWTSGSSISFCGVNSDTVGWSWPDGAELPFTIDK

SEQ ID NO: 23082 - protein, 469 aa, synthetic construct; identical to SEQ ID NO: 21080
  REGION 1..469: note = neuraminidase__InfluenzaA__AFN19815

SEQ ID NO: 23083 - protein, 469 aa, synthetic construct
  REGION 1..469: note = neuraminidase__InfluenzaA__AFN19833
MNPNQKIITIGSVCMTIGMANLILQIGNIISIWISHSIQLGNQSQIETCNQSVITYENNTWVNQTYVNISNTNFAAGQSVVSVKLAGNSSLCPVSGWAIYSKDNSIRIGSKGDVFVIREPFISCSPLECRTFFLTQGALLNDKHSNGTIKDRSPYRTLMSCPIGEVPSPYNSRFESVAWSASACHDGINWLTIGISGPDNGAVAVLKYNGIITDTIKSWKNNILRTQESECACVNGSCFTIMTDGPSDGQASYKIFRIEKGKIVKSVEMNAPNYHYEECSCYPDSSEITCVCRDNWHGSNRPWVSFNQNLEYQIGYICSGIFGDNPRPNDKTGSCGPVSSNGANGVKGFSFKYGNGVWIGRTKSISSRKGFEMIWDPNGWTGTDNNFSIKQDIVGINEWSGYSGSFVQHPELTGLDCIRPCFWVELIRGRPKENTIWTSGSSISFCGVNSDTVGWSWPDGAELPFTIDK

SEQ ID NO: 23084 - protein, 469 aa, synthetic construct; identical to SEQ ID NO: 20716
  REGION 1..469: note = neuraminidase__InfluenzaA__AFN19851

SEQ ID NO: 23085 - protein, 469 aa, synthetic construct; identical to SEQ ID NO: 20257
  REGION 1..469: note = neuraminidase__InfluenzaA__AFN19857

SEQ ID NO: 23086 - protein, 469 aa, synthetic construct
  REGION 1..469: note = neuraminidase__InfluenzaA__AFN19867
MNPNQKIITIGSVCMTIGMANLILQIGNIISIWISHSIQIGNQNQIETCNQSVITYENNTWVNQTYVNISNTNFAAGQSVVSVKLAGNSSLCPVSGWAIYSKDNSIRIGSKGDVFVIREPFISCSPLECRTFFLTQGALLNDKHSNGTIKDRSPYRTLMSCPIGEVPSPYNSRFESVAWSASACHDGINWLTIGISGPDNGAVAVLKYNGIITDTIKSWRNNILRTQESECACVNGSCFTIITDGPSDGQASYKIFRIEKGKIVKSVEMNAPNYHYEECSCYPDSSEITCVCRDNWHGSNRPWVSFNQNLEYQIGYICSGIFGDNPRPNDKTGSCGPVSSNGANGVKGFSFKYGNGVWIGRTKSISSRKGFEMIWDPNGWTGTDNNFSIKQDIVGINEWSGYSGSFVQHPELTGLDCIRPCFWVELIRGRPKENTIWTSGSSISFCGVNSDTVGWSWPDGAELPFTIDK

SEQ ID NO: 23087 - protein, 469 aa, synthetic construct; identical to SEQ ID NO: 20709
  REGION 1..469: note = neuraminidase__InfluenzaA__AFN19877

SEQ ID NO: 23088 - protein, 469 aa, synthetic construct; identical to SEQ ID NO: 20257
  REGION 1..469: note = neuraminidase__InfluenzaA__AFN19887

SEQ ID NO: 23089 - protein, 469 aa, synthetic construct
  REGION 1..469: note = neuraminidase__InfluenzaA__AFN19897
MNPNQKIITIGSVCMTIGMANLILQIGNIISIWISHSIQLGNQSQIETCNQSVITYENNTWVNQTYVNISNTNFAAGQSVVSVKLAGNSSLCPVSGWAIYSKDNSIRIGSKGDVFVIREPFISCSPLECRTFFLTQGALLNDKHSNGTIKDRSPYRTLMSCPIGEVPSPCNSRFESVAWSASACHDGINWLTIGISGPDNGAVAVLKYNGIITDTIKSWRNNILRTQESECACVNGSCFTIMTDGPSDGQASYKIFRIEKGKIVKSVEMNAPNYHYEECSCYPDSSEITCVCRDNWHGSNRPWVSFNQNLEYQIGYICSGIFGDNPRPNDKTGSCGPVSSNGANGVKGFSFKYGNGVWIGRTKSISSRKGFEMIWDPNGWTGTDNNFSIKQDIVGINEWSGYSGSFVQHPELTGLDCIRPCFWVELIRGRPKENTIWTSGSSISFCGVNSDTVGWSWPDGAELPFTIDK

SEQ ID NO: 23090 - protein, 469 aa, synthetic construct; identical to SEQ ID NO: 20257
  REGION 1..469: note = neuraminidase__InfluenzaA__AFN19907

SEQ ID NO: 23091 - protein, 469 aa, synthetic construct; identical to SEQ ID NO: 20716
  REGION 1..469: note = neuraminidase__InfluenzaA__AFN19917

SEQ ID NO: 23092 - protein, 469 aa, synthetic construct
  REGION 1..469: note = neuraminidase__InfluenzaA__AFN19923
MNPNQKIITIGSVCMTIGMANLILQIGNIISIWISHSIQLGNQSQIETCNQNVITYENNTWVNQTYVNISNTNFAAGQSVVSVKLAGNSSLCPVSGWAIYSKDNSIRIGSKGDVFVIREPFISCSPLECRTFFLTQGALLNDKHSNGTIKDRSPYRTLMSCPIGEVPSPYNSRFESVAWSASACHDGINWLTIGISGPDNGAVAVLKYNGIITDTIKSWRNNILRTQESECACVNGSCFTIMTDGPSDGQASYKIFRIEKGKIVKSVEMNAPNYHYEECSCYPDSSEITCVCRDNWHGSNRPWVSFNQNLEYQIGYICSGIFGDNPRPNDKTGSCGPVSSNGANGVKGFSFKYGNGVWIGRTKSISSRKGFEMIWDPNGWTGTDNNFSIKQDIVGINEWSGYSGSFVQHPELTGLDCIRPCFWVELIRGRPKENTIWTSGSSISFCGVNSDTVGWSWPDGAELPFTIDK

SEQ ID NO: 23093 - protein, 469 aa, synthetic construct; identical to SEQ ID NO: 20257
  REGION 1..469: note = neuraminidase__InfluenzaA__AFN19933

SEQ ID NO: 23094 - protein, 469 aa, synthetic construct; identical to SEQ ID NO: 20716
  REGION 1..469: note = neuraminidase__InfluenzaA__AFN19943

SEQ ID NO: 23095 - protein, 469 aa, synthetic construct
  REGION 1..469: note = neuraminidase__InfluenzaA__AFN19953
MNPNQKIITIGSVCMTIGMANLILQIGNIISIWISHSIQLGNQSQIETCNQRVITYENNTWVNQTYVNISNTNFAAGQSVVSVKLAGNSSLCPVSGWAIYSKDNSIRIGSKGDVFVIREPFISCSPLECRTFFLTQGALLNDKHSNGTIKDRSPYRTLMSCPIGEVPSPYNSRFESVAWSASACHDGINWLTIGISGPDNGAVAVLKYNGIITDTIKSWRNNILRTQESECACVNGSCFTIMTDGPSDGQASYKIFRIEKGKIVKSVEMNAPNYHYEECSCYPDSSEITCVCRDNWHGSNRPWVSFNQNLEYQIGYICSGIFGDNPRPNDKTGSCGPVSSNGANGVKGFSFKYGNGVWIGRTKSISSRKGFEMIWDPNGWTGTDNNFSIKQDIVEINEWSGYSGSFVQHPELTGLDCIRPCFWVELIRGRPKENTIWTSGSSISFCGVNSDTVGWSWPDGAELPFTIDK

SEQ ID NO: 23096 - protein, 469 aa, synthetic construct
  REGION 1..469: note = neuraminidase__InfluenzaA__AFN19967
MNPNQKIITIGSVCMTIGMANLILQIGNIISIWISHSIQLGNQSQIETCNQSVITYENNTWVNQTYVNISNTNFAAGQSVVSVKLAGNSSLCPVSGWAIYSKDNSIRIGSKGDVFVIREPFISCSPLECRTFFLTQGALLNDKHSNGTIKDRSPYRTLMSCPIGEVPSPYNSRFESVAWSASACHDGINWLTIGISGPDNGAVAVLKYNGIITDTIKSWRSNILRTQESECACVNGSCFTIMTDGPSDGQASYKIFRIEKGKIVKSVEMNAPNYHYEECSCYPDSSEITCVCRDNWHGSNRPWVSFNQNLEYQIGYICSGIFGDNPRPNDKTGSCGPVSSNGANGVKGFSFKYGNGVWIGRTKSISSRKGFEMIWDPNGWTGTDNNFSIKQDIVGINEWSGYSGSFVQHPELTGLDCIRPCFWVELIRGRPKENTIWTSGSSISFCGVNSDTVGWSWPDGAELPFTIDK

SEQ ID NO: 23097 - protein, 469 aa, synthetic construct
  REGION 1..469: note = neuraminidase__InfluenzaA__AFN19973
MNPNQKIITIGSVCMTIGMANLILQIGNIISIWISHSIQLGNQSQIETCNQSVITYENNTWVNQTYVNISNTNFAAGQSVVSVKLAGNSSLCPVSGWAIYSKDNSIRIGSKGDVFVIREPFISCSPLECRTFFLTQGALLNDKHSNGTIKDRSPYRTLMSCPIGEVPSPYNSRFESVAWSASACHDGINWLTIGISGPDNGAVAVLKYNGIITDTIKSWRNNILRTQESECACVNGSCFTIMTDGSSDGQASYKIFRIEKGKIVKSVEMNAPNYHYEECSCYPDSSEITCVCRDNWHGSNRPWVSFNQNLEYQIGYICSGIFGDNPRPNDKTGSCGPVSSNGANGVKGFSFKYGNGVWIGRTKSISSRKGFEMIWDPNGWTGTDNNFSIKQDIVGINEWSGYSGSFVQHPELTGLDCIRPCFWVELIRGRPKENTIWTSGSSISFCGVNSDTVGWSWPDGAELPFTIDK

SEQ ID NO: 23098 - protein, 469 aa, synthetic construct; identical to SEQ ID NO: 20257
  REGION 1..469: note = neuraminidase__InfluenzaA__AFN19979

SEQ ID NO: 23099 - protein, 469 aa, synthetic construct
  REGION 1..469: note = neuraminidase__InfluenzaA__AFN19985
MNPNQKIITIGSVCMTIGMANLILQIGNIISIWISHSIQLGNQSQIETCNQSVITYENNTWVNQTYVNISNTNFAAGQSVVSVKLAGNSSLCPVSGWAIYSKDNSIRIGSKGDVFVIREPFISCSPLECRTFFLTQGALLNDKHSNGTIKDRSPYRTLMSCPIGEVPSPYNSRFESVAWSASACHDGINWLTIGISGPDNGAVAVLKYNGIITDTIKSWRNNILRTQESECACVNGSCFTIMTDGPSDGQASYKIFRIEKGKIVKSVEMNAPNYHYEECSCYPDSSEITCVCRDNWHGSNRPWVSFNQNLEYQIGYICSGIFGDNPRPNDKTGSCGPVSSNGANGVKGFSFKYGNGVWIGRTKSVSSRKGFEMIWDPNGWTGTDNNFSIKQDIVGINEWSGYSGSFVQHPELTGLDCIRPCFWVELIRGRPKENTIWTSGSSISFCGVNSDTVGWSWPDGAELPFTIDK

SEQ ID NO: 23100 - protein, 469 aa, synthetic construct
  REGION 1..469: note = neuraminidase__InfluenzaA__AFN19995
MNPNQKIITIGSVCMTIGMANLILQIGNIISIWISHSIQLGNQSQTETCNQSVITYENNTWVNQTYVNISNTNFAAGQSVVSVKLAGNSSLCPVSGWAIYSKDNSIRIGSKGDVFVIREPFISCSPLECRTFFLTQGALLNDKHSNGTIKDRSPYRTLMSCPIGEVPSPYNSRFESVAWSASACHDGINWLTIGISGPDNGAVAVLKYNGIITDTIKSWRNNILRTQESECACVNGSCFTIMTDGPSDGQASYKIFRIEKGKIVKSVEMNAPNYHYEECSCYPDSSEITCVCRDNWHGSNRPWVSFNQNLEYQIGYICSGIFGDNPRPNDKTGSCGPVSSNGANGVKGFSFKYGNGVWIGRTKSISSRKGFEMIWDPNGWTGTDNNFSIKQDIVGINEWSGYSGSFVQHPELTGLDCIRPCFWVELIRGRPKENTIWTSGSSISFCGVNSDTVGWSWPDGAELPFTIDK

SEQ ID NO: 23101 - protein, 469 aa, synthetic construct; identical to SEQ ID NO: 20257
  REGION 1..469: note = neuraminidase__InfluenzaA__AFN20001

SEQ ID NO: 23102 - protein, 469 aa, synthetic construct
  REGION 1..469: note = neuraminidase__InfluenzaA__AFN20013
MNPNQKIITIGSVCMTIGMANLILQIGNIISIWISHSIQLGNQSQIETCNQSVITYENNTWVNQTYVNISNTNFAAGQSVVSVKLAGNSSLCPVSGWAIYSKDNSIRIGSKGDVFVIREPFISCSPLECRTFFLTQGALLNDKHSNGTIKDRSPYRTLMSCPIGEVPSPYNSRFESVAWSASACHDGINWLTIGISGPDNGAVAVLKYNGIITDTIKSWRNNILRTQESECACVNGSCFTIMTDGPSDGQASYKIFRIEKGKIVKSVEMNAPNYHYEECSCYPDSSEITCVCRDNWHGSNRPWVSFNQNLEYQIGYICSGIFGDNPRPNDKTGSCDPVSSNGANGVKGFSFKYGNGVWIGRTKSISSRKGFEMIWDPNGWTGTDNNFSIKQDIVGINEWSGYSGSFVQHPELTGLDCIRPCFWVELIRGRPKENTIWTSGSSISFCGVNSDTVGWSWPDGAELPFTIDK

SEQ ID NO: 23103 - protein, 469 aa, synthetic construct
  REGION 1..469: note = neuraminidase__InfluenzaA__AFN20020
MNPNQKIITIGSVCMTIGMANLILQIGNIISIWISHSIQLGNQSQIETCNQSVITYENNTWVNQTYVNISNTNFAAGQSVVSVKLAGNSSLCPVSGWAIYSKDNSIRIGSKGDVFVIREPFISCSPLECRTFFLTQGALLNDKHSNGTIKDRSPYRTLMSCPIGEVPSPYNSRFESVAWSASACHDGINWLTIGISGPDNGAVAVLKYNGIITDTIKSWRNNILRTQESECACVNGSCFTIMTDGPSDGQASYKIFRIEKGKIVKSVEMNAPNYHYEECSCYPDSSEITCVCRDNWHGSNRPWVSFNQNLEYQIGYICSGIFGDNPRPNDKTGSCGPVSSNGANGVKGFSFKYGNGVWIGRTKSISSRKGFEMIWDPNGWTGTDNNFSIKQDIVGLNEWSGYSGSFVQHPELTGLDCIRPCFWVELIRGRPKENTIWTSGSSISFCGVNSDTVGWSWPDGAELPFTIDK

SEQ ID NO: 23104 - protein, 469 aa, synthetic construct; identical to SEQ ID NO: 20257
  REGION 1..469: note = neuraminidase__InfluenzaA__AFN20022

SEQ ID NO: 23105 - protein, 469 aa, synthetic construct
  REGION 1..469: note = neuraminidase__InfluenzaA__AFN20035
MNPNQKIITIGSVCMTIGIANLILQIGNIISIWISHSIQLGNQSQIETCNQSVITYENNTWVNQTYVNISNTNFAAGQSVVSVKLAGNSSLCPVSGWAIYSKDNSIRIGSKGDVFVIREPFISCSPLECRTFFLTQGALLNDKHSNGTIKDRSPYRTLMSCPIGEVPSPYNSRFESVAWSASACHDGINWLTIGISGPDNGAVAVLKYNGIITDTIKSWRNNILRTQESECACVNGSCFTIMTDGPSDGQASYKIFRIEKGKIVKSVEMNAPNYHYEECSCYPDSSEITCVCRDNWHGSNRPWVSFNQNLEYQIGYICSGIFGDNPRPNDKTGSCGPVSSNGANGVKGFSFKYGNGVWIGRTKSISSRKGFEMIWDPNGWTGTDNNFSIKQDIVGINEWSGYSGSFVQHPELTGLDCIRPCFWVELIRGRPKENTIWTSGSSISFCGVNSDTVGWSWPDGAELPFTIDK

SEQ ID NO: 23106 - protein, 469 aa, synthetic construct; identical to SEQ ID NO: 20257
  REGION 1..469: note = neuraminidase__InfluenzaA__AFN20041

SEQ ID NO: 23107 - protein, 469 aa, synthetic construct; identical to SEQ ID NO: 20257
  REGION 1..469: note = neuraminidase__InfluenzaA__AFN20047

SEQ ID NO: 23108 - protein, 469 aa, synthetic construct; identical to SEQ ID NO: 21080
  REGION 1..469: note = neuraminidase__InfluenzaA__AFN20063

SEQ ID NO: 23109 - protein, 469 aa, synthetic construct
  REGION 1..469: note = neuraminidase__InfluenzaA__AFN20077
MNPNQKIITIGSVCMTIGMANLILQIGNIISIWISHSIQLGNQSQIETCNQSVITYENNTWVNQTYVNISNTNFAAGQSVVSVKLAGNSSLCPVSGWAIYSKDNSIRIGSKGDVFVIREPFISCSPLECRTFFLTQGALLNDKHSNGTIKDRSPYRTLMSCPIGEVPSPYNSRFESVAWSASACHDGINWLTIGISGPDNGAVAVLKYNGIITDTIKSWRNNILRTQESECACVNGSCFTIMTDGPSDGQASYKIFKIEKGKIVKSVEMNAPNYHYEECSCYPDSSEITCVCRDNWHGSNRPWVSFNQNLEYQIGYICSGIFGDNPRPNDKTGSCGPVSSNGANGVKGFSFKYGNGVWIGRTKSISSRKGFEMIWDPNGWTGTDNNFSIKQDIVGINEWSGYSGSFVQHPELTGLDCIRPCFWVELIRGRPKENTIWTSGSSISFCGVNSDTVGWSWPDGAELPFTIDK

SEQ ID NO: 23110 - protein, 469 aa, synthetic construct; identical to SEQ ID NO: 20257
  REGION 1..469: note = neuraminidase__InfluenzaA__AFN20083

SEQ ID NO: 23111 - protein, 469 aa, synthetic construct
  REGION 1..469: note = neuraminidase__InfluenzaA__AFN20094
MNPNQKIITIGSVCMTIGMANLILQIGNIISIWISHSIQLGNQSQIETCNQSVIIYENNTWVNQTYVNISNTNFAAGQSVVSVKLAGNSSLCPVSGWAIYSKDNSIRIGSKGDVFVIREPFISCSPLECRTFFLTQGALLNDKHSNGTIKDRSPYRTLMSCPIGEVPSPYNSRFESVAWSASACHDGINWLTIGISGPDNGAVAVLKYNGIITDTIKSWRNNILRTQESECACVNGSCFTIMTDGPSDGQASYKIFRIEKGKIVKSVEMNAPNYHYEECSCYPDSSEITCVCRDNWHGSNRPWVSFNQNLEYQIGYICSGIFGDNPRPNDKAGSCGPVSSNGANGVKGFSFKYGNGVWIGRTKSISSRKGFEMIWDPNGWTGTDNNFSIKQDIVGINEWSGYSGSFVQHPELTGLDCIRPCFWVELIRGRPKENTIWTSGSSISFCGVNSDTMGWSWPDGAELPFTIDK

SEQ ID NO: 23112 - protein, 469 aa, synthetic construct; identical to SEQ ID NO: 20716
  REGION 1..469: note = neuraminidase__InfluenzaA__AFN20100

SEQ ID NO: 23113 - protein, 469 aa, synthetic construct
  REGION 1..469: note = neuraminidase__InfluenzaA__AFN20114
MNPNQKIITIGSVCMTIGMANLILQIGNIISIWISHSIQLGNQNQIETCNQSVITYENNTWVNQTYVNISNTNFAAGQSVVSVKLAGNSSLCPVSGWAIYSKDNSIRIGSKGDVFVIREPFISCSPLECRTFFLTQGALLNDKHSNGTIKDRSPYRTLMSCPIGEVPSPYNSRFESVAWSASACHDGINWLTIGISGPDNGAVAVLKYNGIITDTIKSWRNNILRTQESECACVNGSCFTVMTDGPSDGQASYKIFKIEKGKIVKSVEMNAPNYHYEECSCYPDSSEITCVCRDNWHGSNRPWVSFNQNLEYQIGYICSGIFGDNPRPNDKTGSCSPVSSNGANGVKGFSFKYGNGVWIGRTKSTSSRNGFEMIWDPNGWTGTDNSFSMKQDIVGINEWSGYSGSFVQHPELTGLDCIRPCFWVELIRGRPKENTVWTSGSSISFCGVNSDTVGWSWPDGAELPFTIDK

SEQ ID NO: 23114 - protein, 469 aa, synthetic construct
  REGION 1..469: note = neuraminidase__InfluenzaA__AFN20128
MNPNQKIITIGSVCMTIGMANLILQIGNIISIWISHSIQLGNQSQIETCNQSVITYENNTWVNQTYVNISNTNFAAGQSVVSVKLAGNSSLCPVSGWAIYSKDNSIRIGSKGDVFVIREPFISCSPLECRTFFLTQGALLNDKHSNGTIKDRSPYRTLMSCPIGEVPSPYNSRFESVAWSASACHDGINWLTIGISGPDNGAVAVLKYNGIITDTIRSWRNNILRTQESECACVNGSCFTIMTDGPSDGQASYKIFRIEKGKIIKSVEMNAPNYHYEECSCYPDSSEITCVCRDNWHGSNRPWVSFNQNLEYQIGYICSGIFGDNPRSNDKTGSCGPVSSNGANGVKGFSFKYGNGVWIGRTKSISSRKGFEMIWDPNGWTGTDNNFSIKQDIVGINEWSGYSGSFVQHPELTGLDCIRPCFWVELIRGRPKENTIWTSGSSISFCGVNSDTVGWSWPDGAELPFTIDK

SEQ ID NO: 23115 - protein, 469 aa, synthetic construct; identical to SEQ ID NO: 20257
  REGION 1..469: note = neuraminidase__InfluenzaA__AFN87935

SEQ ID NO: 23116 - protein, 469 aa, synthetic construct
  REGION 1..469: note = neuraminidase__InfluenzaA__AFN87937
MNPNQKIITIGSVCMTIGMANLILQIGNIISIWISHSIQLGNQNQIETCNQSVITYENNTWVNQTYVNISNTNFAAGQSVVSVKLAGNSSLCPVSGWAIYSKDNSIRIGSKGDVFVIREPFISCSPLECRTFFLTQGALLNDKHSNGTIKDRSPYRTLMSCPIGEVPSPYNSRFESVAWSASACHDGINWLTIGISGPDNGAVAVLKYNGIITDTIKSWRNNILRTQESECACVNGSCFTVMTDGPSDGQASYKIFKIEKGKIVKSVEMNAPNYHYEECSCYPDSSEITCVCRDNWHGSNRPWVSFNQNLEYQIGYICSGIFGDNPRPNDKTGSCGPVSSNGANGVKGFSFKYGNGVWIGRTKSTSSRNGFEMIWDPNGWTGTDNSFSMKQDIVGINEWSGYSGSFVQHPELTGLDCIRPCFWVELIRGRPKENTVWTSGSSISFCGVNSDTVGWSWPDGAELPFTIDK

SEQ ID NO: 23117 - protein, 469 aa, synthetic construct
  REGION 1..469: note = neuraminidase__InfluenzaA__AFN87940
MNPNQKIITIGSVCMTIGMANLILQIGNIISIWISHSIQLGNQNQIETCNQSVITYENNTWVNQTYVNISNTNFAAGQSVVSVKLAGNSSLCPVSGWAIYSKDNSIRIGSKGDVFVIREPFISCSPLECRTFFLTQGALLNDKHSNGTIKDRSPYRTLMSCPIGEVPSPYNSRFESVAWSASACHDGINWLTIGISGPDNGAVAVLKYNGIITDTIKSWRNNILRTQESECACVNGSCFTVMTDGPSDGQASYKIFKIEKGKIVKSVEMNAPNYHYEECSCYPDSSEITCVCRDNWHGSNRPWVSFNQNLEYQIGYICSGIFGDNPRPNDKTGSCGPVSSNGANGVKGFSFKYGNGVWIGRTKSTSSRNGFEMIWDPNGWTGTDNSFSIKQDIVGINEWSGYSGSFVQHPELTGLDCIRPCFWVELIRGRPKENTIWTSGSSISFCGVNSDTVGWSWPDGAELPFTIDK

SEQ ID NO: 23118 - protein, 469 aa, synthetic construct; identical to SEQ ID NO: 16738
  REGION 1..469: note = neuraminidase__InfluenzaA__AFN87942

SEQ ID NO: 23119 - protein, 469 aa, synthetic construct; identical to SEQ ID NO: 23116
  REGION 1..469: note = neuraminidase__InfluenzaA__AFN87944

SEQ ID NO: 23120 - protein, 469 aa, synthetic construct
  REGION 1..469: note = neuraminidase__InfluenzaA__AFN87946
MNPNQKIITIGSVCMTIGMANLTLQIGNIISIWISHSIQLGNQNQIETCNQSVINYENNTWVNQTYVNISNTNFAAGQSVVSVKLAGNSSLCPVSGWAIYSKDNSIRIGSKGDVFVIREPFVSCSPLECRTFFLTQGALLNDKHSNGTIKDRSPYRTLMSCPIGEVPSPYNSRFESVAWSASACHDGINWLTIGISGPDNGAVAVLKYNGIITDTIKSWRNNILRTQESECACVNGSCFTVMTDGPSDGQASYKIFRIEKGKIVKSVEMNAPNYHYEECSCYPDSSEVTCVCRDNWHGSNRPWVSFNQNLEYQIGYICSGIFGDNPRPNDKTGSCGPVSSNGANGVKGFSFKYGNGVWIGRTKSISSRNGFEMIWDPNGWTGTDNNFSIKQDIVGINEWSGYSGSFVQHPELTGLDCIRPCFWVELIRGRPKENTIWTSGSSISFCGVNSDTVGWSWPDGAELPFTIDK

SEQ ID NO: 23121 - protein, 469 aa, synthetic construct
  REGION 1..469: note = neuraminidase__InfluenzaA__AFN87948
MNPNQKIITIGSVCMTIGMANLILQIGNIISIWISHSIQLGNQNQIETCNQSVITYENNTWVNQTYVNISNTNFAAGQSVVSVKLAGNSSLCPVSGWAIYSKDNSIRIGSKGDVFVIREPFISCSPLECRTFFLTQGALLNDKHSNGTIKDRSPYRTLMSCPIGEVPSPYNSRFESVAWSASACHDGINWLTIGISGPDNGAVAVLKYNGIITDTIKSWRNNILRTQESECACVNGSCFTVMTDGPSDGQASYKIFKIEKGKIVKSVEMNAPNYHYEECSCYPDSSEITCVCRDNWHGSNRPWVSFNQNLEYQIGYICSGIFGDNPRPNDKTGSCGPVSSNGANGVKGFSFKYGNGVWIGRTKSTSSRNGFEMIWDPNGWTGTDNSFSIKQDIVGINEWSGYSGSFVQHPELTGLDCIRPCFWVELIRGRPKENTIWTSGSSISFCGVNSDIVGWSWPDGAELPFTIDK

SEQ ID NO: 23122 - protein, 469 aa, synthetic construct
  REGION 1..469: note = neuraminidase__InfluenzaA__AFN87950
MNPNQKIITIGSVCMTIGMANLILQIGNIISIWISHSIQLGNQSQIETCNQSVITYENNTWVNQTYVNISNTNFAAGQSVVSVKLAGNSSLCPVSGWAIYSKDNSIRIGSKGDVFVIREPFISCSPLECRTFFLTQGALLNDKHSNGTIKDRSPYRTLMSCPIGEVPSPYNSRFESVAWSASACHDGINWLTIGISGPDNGAVAVLKYNGIITDTIKSWRNNILRTQESECACVNGSCFTVMTDGPSDGQASYKIFRIEKGKIVKSVEMNAPNYHYEECSCYPDSSEITCVCRDNWHGSNRPWVSFNQNLKYQIGYICSGIFGDNPRPNDKTGSCGPVSSNGANGVKGFSFKYGNGVWIGRTKSISSRKGFEMIWDPNGWTGTDNNFSIKQDIIGINEWSGYSGSFVQHPELTGLDCIRPCFWVELIRGRPKENTIWTSGSSISFCGVNSDTVGWSWPDGAELPFTIDK

SEQ ID NO: 23123 - protein, 469 aa, synthetic construct; identical to SEQ ID NO: 20709
  REGION 1..469: note = neuraminidase__InfluenzaA__AFN87952

SEQ ID NO: 23124 - protein, 469 aa, synthetic construct
  REGION 1..469: note = neuraminidase__InfluenzaA__AFN87954
MNPNQKIITIGSVCMTIGMANLILQIGNIISIWISHSIQLGNQNQIETCNQSVITYENNTWVNQTYVNISNTNFAAGQSVVSVKLAGNSSLCPVSGWAIYSKDNSIRIGSKGDVFVIREPFISCSPLECRTFFLTQGALLNDKHSNGTIKDRSPYRTLMSCPIGEVPSPYNSRFESVAWSASACHDGINWLTIGISGPDNGAVAVLKYNGIITDTIKSWRNNILRTQESECACVNGSCFTVMTDGPSDGQASYKIFRIEKGKIVKSVEMNAPNYHYEECSCYPDSSEITCVCRDNWHGSNRPWVSFNQNLEYQIGYICSGIFGDNPRPNDKTGSCGPVSSNGANGVKGFSFKYGNGVWIGRTKSISSRKGFEMIWDPNGWTGTDNNFSIKQDIVGINEWSGYSGSFVQHPELTGLDCIRPCFWVELIRGRPKENTIWTSGSSISFCGVNSDTMGWSWPDGAELPFTIDK

SEQ ID NO: 23125 - protein, 469 aa, synthetic construct
  REGION 1..469: note = neuraminidase__InfluenzaA__AFN87956
MNPNQKIITIGSVCMTIGMANLILQIGNIISIWISHSIQLGNQSQIETCNQSVITYENNTWVNQTYVNISNTNFAAGQSVVSVKLVGNSSLCPVSGWAIYSKDNSIRIGSKGDVFVIREPFISCSPLECRTFFLTQGALLNDKHSNGTIKDRSPYRTLMSCPIGEVPSPYNSRFESVAWSASACHDGINWLTIGISGPDNGAVAVLKYNGIITDTIKSWRNNILRTQESECACVNGSCFTIMTDGPSDGQASYKIFRIEKGKIVKSVEMNAPNYHYEECSCYPDSSEITCVCRDNWHGSNRPWVSFNQNLEYQIGYICSGIFGDNPRPNDKTGSCGPVSSNGANGVKGFSFKYGNGVWIGRTKSISSRKGFEMIWDPNGWTGTDNNFSIKQDIVGTNEWSGYSGSFVQHPELTGLDCIRPCFWVELIRGRPKENTIWTSGSSISFCGVNSDTVGWSWPDGAELPFTIDN

SEQ ID NO: 23126 - protein, 469 aa, synthetic construct
  REGION 1..469: note = neuraminidase__InfluenzaA__AFN87958
MNPNQKIITIGSVCMTIGMANLILQIGNIISIWISHSIQLGNQNQIETCNQSVITYENNTWVNQTYVNISNTNFAAGQSVVSVKLAGNSSLCPVSGWAIYSKDNSIRIGSKGDVFVIREPFISCSPLECRTFFLTQGALLNDKHSNGTIKDRSPYRTLMSCPIGEVPSPYNSRFESVAWSASACHDGINWLTIGISGPDNGAVAVLKYNGIITDTIKSWRNNILRTQESECACVNGSCFTVMTDGPSDGQASYKIFKIEKGKIVKSVEMNAPNYHYEECSCYPDSSEITCVCRDNWHGSNRPWVSFNQNLEYQIGYICSGIFGDNPRPNDKTGSCGPASSNGANGVKGFSFKYGNGVWIGRTKSTSSRNGFEMIWDPNGWTGTDNSFSMKQDIVGINEWSGYSGSFVQHPELTGLDCIRPCFWVELIRGRPKENTVWTSGSSISFCGVNSDTVGWSWPDGAELPFTIDK

SEQ ID NO: 23127 - protein, 469 aa, synthetic construct
  REGION 1..469: note = neuraminidase__InfluenzaA__AFN87960
MNPNQKIITIGSVCMTIGMANLILQIGNIISIWISHSIQLGNQSQIETCNQSVITYENNTWVNQTYVNISNTNFAAGQSVVSVKLAGNSSLCPVSGWAIYSKDNSIRIGSKGDVFVIREPFISCSPLECRTFFLTQGALLNDKHSNGTIKDRSPYRTLMSCPIGEVPSPYNSRFESVAWSASACHDGINWLTIGISGPDNGAVAVLKYNGIITDTIKSWRNNILRTQESECACVNGSCFTIMTDGPSDGQASYKIFRIEKGKIVKSVEMNAPNYHYEECSCYPDSSEITCVCRDNWHGSNRPWVSFNQNLEYQIGYICSGIFGDNPRPNDKTGSCGPVSSNGANGVKGFSFKYGNGVWIGRTKSISSRKGFEMIWDPNGWTGTDNNFSIKQDIVGINEWSGYSGSFVQHPELTGLDCIRPCFWIELIRGRPKENTIWTSGSSISFCGVNSDTVGWSWPDGAELPFTIDK

SEQ ID NO: 23128 - protein, 470 aa, synthetic construct
  REGION 1..470: note = neuraminidase__InfluenzaA__AFO64805
MNPNQKIITIGSISIAIGIISLMLQIGNIISIWASHSIQTGSQNHTGICNQRIITYENSTWVNHTYVNINNTNVVAGKDKTSVTLAGNSSLCSISGWAIYTKDNSIRIGSKGDVFVIREPFISCSHLECRTFFLTQGALLNDKHSNGTVKDRSPYRALMSCPLGEAPSPYNSKFESVAWSASACHDGMGWLTIGISGPDNGAVAVLKYNGIITETIKSWKKRILRTQESECVCVNGSCFTIMTDGPNNGAASYKIFKIEKGKVTKSIELNAPNSHYEECSCYPDTGTVMCVCRDNWHGSNRPWVSFNQNLDYQIGYICSGVFGDNPRPKDGEGSCNPVTVDGADGVKGFSYKYGNGVWIGRTKSNRLRKGFEMIWDPNGWTDTDSDFSVKQDVVAITDWSGYSGSFVQHPELTGLDCIRPCFWVELVRGLPRENTTIWTSGSSISFCGVNSDTANWSWPDGAELPFTIDK

SEQ ID NO: 23129 - protein, 470 aa, synthetic construct
  REGION 1..470: note = neuraminidase__InfluenzaA__AFO64816
MNPNQKIITIGSICMAIGIISLILQIGNIVSIWISHSIQTGSQNYTGICNQRIITYENSTWVNQTYVNINNTNVVAGQDTTSVALAGNSSLCPISGWAIYSKDNSIRIGSKGDVFVIREPFISCSHLECRTFFLTQGALLNDKHSNGTVKDRSPYRALMSCPIGEAPSPYNSRFESVAWSASACHDGMGWLTIGISGPDDGAVAVLKYNGIITETIKSWRRRILRTQESECVCVNGSCFTIMTDGPNNGPASYKIFKIEKGKVTKSIELDAPNSHYEECSCYPDAGTVMCVCRDNWHGSNRPWVSFNQNLDYQIGYICSGVFGDNPRPKDGKGSCDPVTVDGADGVKGFSYRYGNGVWIGRTKSNSSRRGFEMIWDPNGWTDTDSKFLVKQDVVAMTDWSGYSGSFVQHPELTGLDCMRPCFWVELIRGRPRENTTIWTSGSSISFCGVNGDTANWSWPDGAELPFTIDK

SEQ ID NO: 23130 - protein, 470 aa, synthetic construct
  REGION 1..470: note = neuraminidase__InfluenzaA__AFO64827
MNPNQKIITIGSISMAIGIISLILQIGNIISIWVSHSIQTGSQNHTGICNQRIITYENSTWVNQTYVNINNTNVIAGKDKTSVTLAGNSSLCPIRGWAIYTKDNSIRIGSKGDVFVIREPFISCSHLECRTFFLTQGALLNDKHSNGTVKDRSPYRALMSCPLGEAPSPYNSRFESVAWSASACHDGMGWLTIGISGPDDGAVAVLKYNGIITETIKSWKKRILRTQESECVCVNGSCFTIMTDGPSNGAASYRIFKIEKGKVTKSIELDAPNSHYEECSCYPDTGTVMCVCRDNWHGSNRPWVSFNQNLDYQIGYICSGVFGDNPRPKDGKGSCDPVTVDGADGVKGFSYRYGNGVWIGRTKSNRFRKGFEMIWDPNGWTDTDSDFLVKQDVVAMTDWSGYSGSFVQHPELTGLDCMRPCFWVELVRGRPRENTTIWTSGSSISFCGVNSDTANWSWPDGAELPFTIDK

SEQ ID NO: 23131 - protein, 470 aa, synthetic construct
  REGION 1..470: note = neuraminidase__InfluenzaA__AFO64838
MNPNQKIITIGSISMAIGIISLILQIGNIISIWASHSIQTGSQNHTGICNQRIITYENSTWVNQTYVNINNTNVVAGKDKTSVTLAGNSSLCPIRGWAIYTKDNSIRIGSKGDVFVIREPFISCSHLECRTFFLTQGALLNDKHSNGTVKDRSPYRALMSCPLGEAPSPYNSRFESVAWSASACHDGMGWLTIGISGPDNGAVAVLKYNGIITETIKSWKKRILRTQESECVCVNGSCFTIMTDGPSNGAASYRIFKIEKGRVTKSIELDAPNYHYEECSCYPDTGTVMCVCRDNWHGSNRPWVSFNQNLDYQIGYICSGVFGDNPRPKDGEGSCNPVTVDGADGVKGFSYRYGNGVWIGRTKSNRLRKGFEMIWDPNGWTDTDSDFSMKQDVVAMTDWSGYSGSFVQHPELTGLDCMRPCFWVELVRGLPRENTTIWTSGSSISFCGVNSDTANWSWPDGAELPFTIDK

SEQ ID NO: 23132 - protein, 470 aa, synthetic construct
  REGION 1..470: note = neuraminidase__InfluenzaA__AFO64849
MNPNQKIITIGSISMAIGIISLILQIGNIISIWASHSIQTGSQNHTGICNQRIITYENSTWVNQTYVNINNTNVVAGKDKTSVTLAGNSSLCPIRGWAIYTKDNSIRIGSKGDVFVIREPFISCSHLECRTFFLTQGALLNDKHSNGTVKDRSPYRALMSCPLGEAPSPYNSRFESVAWSASACHDGMGWLTIGISGPDNGAVAVLKYNGIITETIKSWKKQILRTQESECVCVNGSCFTIMTDGPSNGAASYRIFKIEKGKITKSIELDAPNSHYEECSCYPDTGTVMCVCRDNWHGSNRPWVSFNQNLDYQIGYICSGVFGDNPRPKDGEGSCNPVTVDGADGVKGFSYRYGNGVWIGRTKSNRLRKGFEMIWDPNGWTDTDSDFSVKQDVVAMTDWSGYSGSFVQHPELTGLDCMRPCFWVELVRGRPRENATIWTSGSSISFCGVNSDTANWSWPDGAELPFTIDK

SEQ ID NO: 23133 - protein, 470 aa, synthetic construct; identical to SEQ ID NO: 14968
  REGION 1..470: note = neuraminidase__InfluenzaA__AFO64860

SEQ ID NO: 23134 - protein, 470 aa, synthetic construct
  REGION 1..470: note = neuraminidase__InfluenzaA__AFO64871
MNPNQKIITIGSISIAIGIISLILQIGNIISIWASHSIQTGSQNHTGVCNQRIITYENSTWVNQTYVNINNTNVVAGKDKTSMTLAGNSSLCPIRGWAIYTKDNSIRIGSKGDVFVIREPFISCSHLECRTFFLTQGALLNDKHSNGTVKDRSPYRALMSCPLGEAPSPYNSRFESVAWSASACHDGLGWLTIGISGPDNGAVAVLKYNGIITETIKSWKKRILRTQESECVCMNGSCFTIMTDGPSNGAASYRIFKIEKGRVTKSIELDAPNYHYEECSCYPDTGTVMCVCRDNWHGSNRPWVSFNQNLDYQIGYICSGVFGDNPRPKDGEGSCNPVTVDGADGVKGFSYRYGNGVWIGRTKSNRLRKGFEMIWDPNGWTDTDSDFSMRQDIVAMTDWSGYSGSFVQHPELTGLDCMRPCFWVELVRGLPRENTTIWTSGSSISFCGVNSDTANWSWPDGAELPFTIDK

SEQ ID NO: 23135 - protein, 470 aa, synthetic construct
  REGION 1..470: note = neuraminidase__InfluenzaA__AFO64882
MNPNQKIITIGSISIAIGIISLMLQIGNIISIWASHSIQTGSQNHTGICNQRIITYENSTWVNHTYVNINNTNVVAGKDKTSVTLAGNSSLCSISGWAIYTKDNSIRIGSKGDVFVIREPFISCSHLECRTFFLTQGALLNDKHSNGTVKDRSPYRALMSCPLGEAPSPYNSKFESVAWSASACHDGMGWLTIGISGPDNGAVAVLKYNGIITETIKSWKKRILRTQESECVCVNGSCFTIMTDGPSNGAASYKIFKIEKGKVTKSIELNAPNSHYEECSCYPDTGTVMCVCRDNWHGSNRPWVSFNQNLDYQIGYICSGVFGDNPRPKDGEGSCNPVTVDGADGVKGFSYKYGNGVWIGRTKSNRLRKGFEMIWDPNGWTDTDSDFSVKQDVVAITDWSGYSGSFVQHPELTGLDCIRPCFWVELVRGRPRENTTIWTSGSSISFCGVNSDTANWSWPDGAELPFTIDK

SEQ ID NO: 23136 - protein, 470 aa, synthetic construct
  REGION 1..470: note = neuraminidase__InfluenzaA__AFO64893
MNPNQKIITIGSISVAIGIISLMLQIGNIISIWASHSIQTGSQNHTGICNQRIITYENSTWVNHTYVNINNTNVVAGKDKTSVTLAGNSSLCSISGWAIYTKDNSIRIGSKGDVFVIREPFISCSHLECRTFFLTQGALLNDKHSNGTVKDRSPYRALMSCPLGEAPSPYNSKFESVAWSASACHDGMGWLTIGISGPDNGAVAVLKYNGIITETIKSWKKRILRTQESECVCVNGSCFTIMTDGPSDGAASYKIFKIEKGKVTKSIELNAPNSHYEECSCYPDTGTVMCVCRDNWHGSNRPWVSFNQNLDYQIGYICSGVFGDNPRPKDGEGSCNPVTVDGADGVKGFSYKYGNGVWIGRTKSNRFRKGFEMIWDPNGWTDTDSDFSVKQDVVAITDWSGYSGSFVQHPELTGLDCIRPCFWVELVRGRPRENTTIWTSGSSISFCGVNSDTANWSWPDGAELPFTIDK

SEQ ID NO: 23137 - protein, 470 aa, synthetic construct
  REGION 1..470: note = neuraminidase__InfluenzaA__AFO64904
MNPNQKIITIGSISVAIGIISLILQIGNIISMWASHSIQTGSQNYTGICNQRIITYENNTWVNQTYVNINNTNVVAGKDKISMTLAGNSSLCPIRGWAIYTKDNSIRIGSKGDVFVIREPFISCSHLECRTFFLTQGALLNDKHSNGTVKDRSPYRALMSCPLGEAPSPYNSRFESVAWSASACHDGLGWLTIGISGPDNGAVAVLKYNGIITETIKSWKKQILRTQESECVCVNGSCFTIMTDGPSNRAASYRIFKIEKGRVTKSIELDAPNYHYEECSCYPDTGTVMCVCRDNWHGSNRPWVSFNQNLDYQIGYICSGVFGDNPRPKDGEGSCNPVTVDGADGVKGFSYKYGNGVWIGRTKSNRLRKGFEMIWDPNGWTDTDSDFSMKQDVVAMTDWSGYSGSFVQHPELTGLDCMRPCFWVELVRGLPRENTTIWTSGSSISFCGVNSETANWSWPDGAELPFTIDK

SEQ ID NO: 23138 - protein, 470 aa, synthetic construct
  REGION 1..470: note = neuraminidase__InfluenzaA__AFO65019
MNPNQKIITIGSISIAIGIISLMLQIGNIISIWASHSIQTGSQNHTGICNQRIITYENSTWVNHTYVNINNTNVVAGKDKTSVTLAGNSSLCSISGWAIYTKDNSIRIGSKGDVFVIREPFISCSHLECRTFFLTQGALLNDKHSNGTVKDRSPYRALMSCPLGEAPSPYNSKFESVAWSASACHDGMGWLTIGISGPDNGAVAVLKYNGIITETIKSWKKRILRTQESECVCVNGSCFTIMTDGPSNGAASYKIFKIEKGKVTKSIELNAPNSHYEECSCYPDTGTVMCVCRDNWHGSNRPWVSFNQNLDYQIGYICSGVFGDNPRPKDGEGSCNPVTADGADGVKGFSYKYGNGVWIGRTKSNRLRKGFEMIWDPNGWTDTDSDFSVKQDVVAITDWSGYSGSFVQHPELTGLDCIRPCFWVELVRGRPRENTTIWTSGSSISFCGVNSDTANWSWPDGAELPFTIDK

SEQ ID NO: 23139 - protein, 470 aa, synthetic construct; identical to SEQ ID NO: 16453
  REGION 1..470: note = neuraminidase__InfluenzaA__AFO65030

SEQ ID NO: 23140 - protein, 470 aa, synthetic construct
  REGION 1..470: note = neuraminidase__InfluenzaA__AFO65041
MNPNQKIITIGSISIAIGIISLMLQIGNIISIWASHSIQTGSQNHTGVCNQRIITYENSTWVNHTYVNINNTNVVAGKDKTSVTLAGNSSLCSISGWAIYTKDNSIRIGSKGDVFVIREPFISCSHLECRTFFLTQGALLNDKHSNGTVKDRSPYRALMSCPLGEAPSPYNSKFESVAWSASACHDGMGWLTIGISGPDNGAVAVLKYNGIITETIKSWKKQILRTQESECVCVNGSCFTIMTDGPSNGAASYKIFKIEKGKVTKSIELNAPNFHYEECSCYPDTGTVMCVCRDNWHGSNRPWVSFNQNLDYQIGYICSGVFGDNPRPKDGEGSCNPVTVDGANGVKGFSYKYGNGVWIGRTKSNRLRKGFEMIWDPNGWTDTDSDFSVKQDVVAITDWSGYSGSFVQHPELTGLDCIRPCFWVELVRGLPRENTTIWTSGSSISFCGVNSDTANWSWPDGAELPFTIDK

SEQ ID NO: 23141 - protein, 470 aa, synthetic construct
  REGION 1..470: note = neuraminidase__InfluenzaA__AFO65052
MNPNQKIITIGSISIAIGIISLMLQIGNIISIWASHSIQTGSQNHTGVCNQRIITYENSTWVNHTYVNINNTNVIAGKDKTSMTLAGNSSLCSISGWAIYTKDNSIRIGSKGDVFVIREPFISCSHLECRTFFLTQGALLNDKHSNGTVKDRSPYRALMSCPLGEAPSPYNSKFESVAWSASACNDGMGWLTIGISGPDNGAVAVLKYNGIITETIKSWKKQILRTQESECVCVNGSCFTIMTDGPSNGAASYKIFKIEKGKVTKSIELNAPNFHYEECSCYPDTGTVMCVCRDNWHGSNRPWVSFNQNLDYQIGYICSGVFGDNPRPKDGEGSCNPVTVDGANGVKGFSYKYGNGVWIGRTKSNRLRKGFEMIWDPNGWTDTDSDFSVKQDVVAITDWSGYSGSFVQHPELTGLDCIRPCFWVELVRGLPRENTTIWTSGSSISFCGVNSDTANWSWPDGAELPFTIDK

SEQ ID NO: 23142 - protein, 470 aa, synthetic construct; identical to SEQ ID NO: 14828
  REGION 1..470: note = neuraminidase__InfluenzaA__AFO66139

SEQ ID NO: 23143 - protein, 470 aa, synthetic construct
  REGION 1..470: note = neuraminidase__InfluenzaA__AFO66150
MNPNQKIITIGSISVAIGIISLILQIGNIISIWASHSIQTGSQNYTGICNQRIITYENRTWVNQTYVNINNTNVVAGKDKTSMTLAGNSSLCPIRGWAIYTKDNSIRIGSKGDVFVIREPFISCSHLECRTFFLTQGALLNDKHSNGTIKDRSPFRALMSCPLGEAPSPYNSRFESVAWSASACHDGLGWLTIGISGPDNGAVAVLKYNGIITETIKSWKKQILRTQESECVCVNGSCFTIMTDGPSNRAASYRIFKIEKGRVTKSIELDAPNYHYEECSCYPDTGTVMCVCRDNWHGSNRPWVSFNQNLDYQIGYICSGVFGDNPRPKDGEGSCNPVTVDGADGVKGFSYRYGNGVWIGRTKSNRIRKGFEMIWDPNGWTDTDSDFSMKQDVVAMTDWSGYSGSFVQHPELTGLDCMRPCFWVELVRGLPRENTTIWTSGSSISFCGVNSETANWSWPDGAELPFTIDK

SEQ ID NO: 23144 - protein, 470 aa, synthetic construct
  REGION 1..470: note = neuraminidase__InfluenzaA__AFO66161
MNPNQKIITIGSISIAIGIISLMLQIGNIISIWASHSIQTGSQNHTGVCNQRIITYENSTWVNHTYVNINNTNVIAGKDKTSVTLAGNSSLCSISGWAIYTKDNSIRIGSKGDVFVIREPFISCSHLECRTFFLTQGALLNDKHSNGTVKDRSPYRALMSCPLGEAPSPYNSKFESVAWSASACHDGMGWLTIGISGPDNGAVAVLKYNGIITETIKSWKKQILRTQESECVCVNGSCFTIMTDGPSNGAASYKIFKIEKGKVTKSIELNAPNFHYEECSCYPDTGTVICVCRDNWHGSNRPWVSFNQNLDYQIGYICSGVFGDNPRPKDGEGSCNPVTVDGANGVKGFSYKYGNGVWIGRTKSNRLRKGFEMIWDPNGWTDTDSDFSVKQDVVAITDWSGYSGSFVQHPELTGLDCIRPCFWVELVRGLPKENTTIWTSGSSISFCGVNSDTANWSWPDGAELPFTIDK

SEQ ID NO: 23145 - protein, 470 aa, synthetic construct
  REGION 1..470: note = neuraminidase__InfluenzaA__AFO66172
MNPNQKIITIGSISIAIGIISLMLQIGNIISIWASHSIQTGSQNHTGICNQRIITYENSTWVNHTYVNINNTNVVAGKDKTSVTLAGNSSLCSISGWAIYTKDNSIRIGSKGDVFVIREPFISCSHLECRTFFLTQGALLNDKHSNGTVKDRSPYRALMSCPLGEAPSPYNSKFESVAWSASACHDGMGWLTIGISGPDNGAVAVLKYNGIITETIKSWKKRILRTQESECVCMNGSCFTIMTDGPSNGAASYKIFKIEKGKVTKSIELNAPNFHYEECSCYPDTGTVMCVCRDNWHGSNRPWVSFNQNLDYQIGYICSGVFGDNPRPKDGEGSCNPVTVDGADGVKGFSYKYGNGVWIGRTKSNRLRKGFEMIWDPNGWTDTDSDFSVKQDVVAITDWSGYSGSFVQHPELTGLDCIRPCFWVELVRGLPRENTTIWTSGSSISFCGVNSDTANWSWPDGAELPFTIDK

SEQ ID NO: 23146 - protein, 470 aa, synthetic construct; identical to SEQ ID NO: 14930
  REGION 1..470: note = neuraminidase__InfluenzaA__AFO66183

SEQ ID NO: 23147 - protein, 470 aa, synthetic construct
  REGION 1..470: note = neuraminidase__InfluenzaA__AFO66194
MNPNQKIITIGSISIAIGIISLMLQIGNIISIWASHSIQTGSQNHTGVCNQRIITYENSTWVNHTYVNINNTNVIAGKDKTSVTLAGNSSLCSISGWAIYTKDNSIRIGSKGDVFVIREPFISCSHLECRTFFLTQGALLNDKHSNGTVKDRSPYRALMSCPLGEAPSPYNSKFESVAWSASACHDGMGWLTIGISGPDNGAVAVLKYNGIITETIKSWKKQILRTQESECVCVNGSCFTIMTDGPSNGAASYKIFKIEKGKVTKSIELNAPNFHYEECSCYPDTGTVMCVCRDNWHGSNRPWVSFNQNLDYQIGYICSGVFGDNPRPKDGEGSCNPVTVDGANGVKGFSYKYGNGVWIGRTKSNRLRKGFEMIWDPNGWTDTDSDFSVKQDIVAITDWSGYSGSFVQHPELTGLDCIRPCFWVELVRGLPKENTTIWTSGSSISFCGVNSDTANWSWPDGAELPFTIDK

SEQ ID NO: 23148 - protein, 469 aa, synthetic construct; identical to SEQ ID NO: 16555
  REGION 1..469: note = neuraminidase__InfluenzaA__AFO66205

SEQ ID NO: 23149 - protein, 470 aa, synthetic construct; identical to SEQ ID NO: 14415
  REGION 1..470: note = neuraminidase__InfluenzaA__AFO66216

SEQ ID NO: 23150 - protein, 470 aa, synthetic construct; identical to SEQ ID NO: 14386
  REGION 1..470: note = neuraminidase__InfluenzaA__AFO66227

SEQ ID NO: 23151 - protein, 470 aa, synthetic construct
  REGION 1..470: note = neuraminidase__InfluenzaA__AFO66238
MNPNQKIITIGSISIAIGIISLMLQIGNIISIWASHSIQTGSQNHTGICNQRIITYENSTWVNHTYVNINNTNVVAGKDKTSVTLAGNSSLCSISGWAIYTKDNSIRIGSKGDVFVIREPFISCSHLECRTFFLTQGALLNDKHSNGTVKDRSPYRALMSCPLGEAPSPYNSKFESVAWSASACHDGMGWLTIGISGPDNGAVAVLKYNGIITETIKSWKKQILRTQESECVCMNGSCFTIMTDGPSNGAASYKIFKIEKGKVTKSIELNAPNFHYEECSCYPDTGTVMCVCRDNWHGSNRPWVSFNQNLDYQIGYICSGVFGDNPRPKDGEGSCNPVTVDGADGVKGFSYKYGNGVWIGRTKSNRLRKGFEMIWDPNGWTNTDSDFSVKQDVVAITDWSGYSGSFVQHPELTGLDCIRPCFWVELVRGLPRENTTIWTSGSSISFCGVNSDTANWSWPDGAELPFTIDK

SEQ ID NO: 23152 - protein, 470 aa, synthetic construct
  REGION 1..470: note = neuraminidase__InfluenzaA__AFO66249
MNPNQKIITIGSISIAIGIISLMLQIGNIISIWASHSIQTGSQNHTGICNQRIITYENSTWVNHTYVNINNTNVVAGKDKTSVTLAGNSSLCSISGWAIYTKDNSIRIGSKGDVFVIREPFISCSHLECRTFFLTQGALLNDKHSNGTVKDRSPYRALMSCPLGEAPSPYNSKFESVAWSASACHDGMGWLTIGISGPDNGAVAVLKYNGIITGTIKSWKKQILRTQESECVCMNGSCFTIMTDGPSNGAASYKIFKIEKGKVTKSIELNAPNFHYEECSCYPDTGTVMCVCRDNWHGSNRPWVSFNQNLDYQIGYICSGVFGDNPRPKDGEGSCNPVTVDGADGVKGFSYKYGNGVWIGRTKSNRLRKGFEMIWDPNGWTNTDSDFSVKQDVVAITDWSGYSGSFVQHPELTGLDCIRPCFWVELVRGLPRENTTIWTSGSSISFCGVNSDTANWSWPDGAELPFTIDK

SEQ ID NO: 23153 - protein, 470 aa, synthetic construct
  REGION 1..470: note = neuraminidase__InfluenzaA__AFP33330
MNPNQKIITIGSISVAIGIISLILQIGNIISIWASHSIQAGSQNYTGICNQKIITYENRTWVNQTYVNINNTNVVAGKDKTSMTLAGNSSLCPIRGWAIYTKDNSIRIGSKGDVFVIREPFISCSHLECRTFFLTQGALLNDKHSNGTIKDRSPFRALMSCPLGEAPSPYNSRFESVAWSASACHDGLGWLTIGISGPDNGAVAVLKYNGIITETIKSWKKQILRTQESECVCVNGSCFTIMTDGPSNRAASYRIFKIEKGRVTKSIELDAPNYHYEECSCYPDTGTVMCVCRDNWHGSNRPWVSFNQNLDYQIGYICSGVFGDNPRPKDGEGSCNPVTVDGADGVKGFSYRYGNGVWIGRTKSNRLRKGFEMIWDPNGWTDTDSDFSMKQDVVAMTDWSGYSGSFVQHPELTGLDCMRPCFWVELVRGLPRENTTIWTSGSSISFCGVNSETANWSWPDGAELPFTIDK

SEQ ID NO: 23154 - protein, 470 aa, synthetic construct
  REGION 1..470: note = neuraminidase__InfluenzaA__AFP33331
MNPNQKIITIGSISIAIGIISLMLQIGNIISIWASHSIQTGSQNHTGICNQRIITYENSTWVNHTYVNINNTNVIAGKDKTSVTLAGNSSLCSISGWAIYTKDNSIRIGSKGDVFVIREPFISCSHLECRTFFLTQGALLNDKHSNGTVKDRSPYRALMSCPLGEAPSPYNSKFESVAWSASACHDGMGWLTIGISGPDNGAVAVLKYNGIITETIKSWKKRILRTQESECVCVNGSCFTIMTDGPSNGAASYKIFKIEKGKVTKSIELNAPNFHYEECSCYPDTGTVMCVCRDNWHGSNRPWVSFNQNLDYQIGYICSGVFGDNPRPKDGEGSCNPVTVDGADGVKGFSYKYGNGVWIGRTKSNRLRKGFEMIWDPNGWTDTDSDFSVKQDVVAITDWSGYSGSFVQHPELTGLDCIRPCFWVELVRGLPRENTTIWTSGSSISFCGVNSDTANWSWPDGAELPFTIDK

SEQ ID NO: 23155 - protein, 469 aa, synthetic construct; identical to SEQ ID NO: 21143
  REGION 1..469: note = neuraminidase__InfluenzaA__AFQ32576

SEQ ID NO: 23156 - protein, 469 aa, synthetic construct
  REGION 1..469: note = neuraminidase__InfluenzaA__AFQ37282
MNPNQKIITIGSVCMTIGMANLILQIGNIISIWISHSIQLGNQNQIETCNQSVITYENNTWVNQTYVNISNTNFAAGQSVVSVKLAGNSSLCPVSGWAIYSKDNSIRIGSKGDVFVIREPFISCSPLECRTFFLTQGALLNDKHSNGTIKDRSPYRTLMSCPIGEVPSPYNSRFESVAWSASACHDGINWLTIGISGPDNGAVAVLKYNGIITDTIKSWRNNILRTQESECACVNGSCFTVMTDGPSDGQASYKIFRIEKGKIVKSVEMNAPNYHYEECSCYPDSSEITCVCRDNWHGSNRPWVSFNQNLEYQIGYICSGIFGDNPRPNDKTGSCGPVSSNGANGVKGFSFKYGNGVWIGRTKSISSRNGFEMIWDPNGWTGTDNNFSIKQDIVGINEWSGYSGSFVQHPELTGLDCIRPCFWVELIRGRPKENTIWTGGSSISFCGVNSDTVGWSWPDGAELPFTIDK

SEQ ID NO: 23157 - protein, 469 aa, synthetic construct
  REGION 1..469: note = neuraminidase__InfluenzaA__AFQ55691
MNPNQKIITIGVVNTTLSTIALLIGVGNLVFNTVIHEKIGDHQTVTHPTTTTPAIPNCSDTIITYNNTIINNITTTIITEAERPFKSPLPLCPFRGFFPFHKDNAIRLGENKDVIVTREPYVSCDNDNCWSFALAQGALLGTKHSNGTIKDRTPYRSLIRFPIGTAPVLGNYKEICIAWSSSSCFDGKEWMHVCMTGNDNDASAQIIYAGKMTDSIKSWRKDILRTQESECQCIDGTCVVAVTDGPAASSADHRIYWIREGKIIKYEDVPKTKIQHLEECSCYVDVDVYCICRDNWKGSNRPWMRINNETILETGYVCSKFHSDTPRPADPSTVSCDSPSNVNGGPGVKGFGFKAGNDVWLGRTVSTSGRSGFEIIKVTEGWINSPNHAKSITQTLMSNNDWSGYSGSFIIKTKDCFQPCFYVELIRGRPNKNDDVSWTSNSIVTFCGLDNEPGSGNWPDGSNIGFMPK

SEQ ID NO: 23158 - protein, 469 aa, synthetic construct
  REGION 1..469: note = neuraminidase__InfluenzaA__AFR68156
MNPNQKIITIGSVCMTIGMANLILQIGNIISIWISHSIQLRNQSQIETCNQSVITYENNTWVNQTYVNISNTNFAAGQSVVSVKLAGNSSLCPVSGWAIYSKDNSIRIGSKGDVFVIREPFISCSPLECRTFFLTQGALLNDKHSNGTIKDRSPYRTLMSCPIGEVPSPYNSRFESVAWSASACHDGINWLTIGISGPDNGAVAVLKYNGIITDTIKSWRNNILRTQESECACVNGSCFTIMTDGPSDGQASYKIFRIEKGKIVKSVEMNAPNYHYEECSCYPDSSEITCVCRDNWHGSNRPWVSFNQNLEYQIGYICSGIFGDNPRPNDKTGSCGPVSSNGANGVKGFSFKYGNGVWIGRTKSISSRKGFEMIWDPNGWTGTDNNFSIKQDIVGINEWSGYSGSFVQHPELTGLDCIRPCFWVELIRGRPKENTIWTSGSSISFCGVNSDTVGWSWPDGAELPFTIDK

SEQ ID NO: 23159 - protein, 469 aa, synthetic construct; identical to SEQ ID NO: 23158
  REGION 1..469: note = neuraminidase__InfluenzaA__AFR68166

SEQ ID NO: 23160 - protein, 469 aa, synthetic construct
  REGION 1..469: note = neuraminidase__InfluenzaA__AFR68176
MNPNQKIITIGSVSLTISTICFFMQIAILITTVTLHFKQYEFNSPPNNQVMLCEPTIIERNITEIVYLTNTTIEKEICPKLAEYRNWSKPQCDITGFAPFSKDNSIRLSAGGDIWVTREPYVSCDPDKCYQFALGQGTTLNNVHSNNTVRDRTPYRTLLMNELGVPFHLGTKQVCIAWSSSSCHDGKAWLHVCITGDDKNATASFIYNGRLVDSVASWSKDILRTQESECVCINGTCAVVMTDGSASGKADTKILFIKEGKIVHTSTLSGSAQHVEECSCYPRYPGVRCVCRDNWKGSNRPIVDINIKDHSIVSSYVCSGLVGDTPRKNDSSSSGHCLDPNNEEGGHGVKGWAFDDGNDVWMGRTINETSRLGYETFKVIEGWSNPKSKLQINRQVIVDRGNRSGYSGIFSVEGKNCINRCFYVELIRGRKEETEVLWTSNSIVVFCGTSGTYGTGSWPDGADLNLMPI

SEQ ID NO: 23161 - protein, 469 aa, synthetic construct; identical to SEQ ID NO: 16738
  REGION 1..469: note = neuraminidase__InfluenzaA__AFR84677

SEQ ID NO: 23162 - protein, 469 aa, synthetic construct; identical to SEQ ID NO: 17625
  REGION 1..469: note = neuraminidase__InfluenzaA__AFR84687

SEQ ID NO: 23163 - protein, 469 aa, synthetic construct; identical to SEQ ID NO: 16728
  REGION 1..469: note = neuraminidase__InfluenzaA__AFR84696

SEQ ID NO: 23164 - protein, 469 aa, synthetic construct; identical to SEQ ID NO: 16738
  REGION 1..469: note = neuraminidase__InfluenzaA__AFR84706

SEQ ID NO: 23165 - protein, 469 aa, synthetic construct; identical to SEQ ID NO: 16728
  REGION 1..469: note = neuraminidase__InfluenzaA__AFR84716

SEQ ID NO: 23166 - protein, 469 aa, synthetic construct; identical to SEQ ID NO: 16728
  REGION 1..469: note = neuraminidase__InfluenzaA__AFR84726

SEQ ID NO: 23167 - protein, 469 aa, synthetic construct; identical to SEQ ID NO: 16728
  REGION 1..469: note = neuraminidase__InfluenzaA__AFR84736

SEQ ID NO: 23168 - protein, 469 aa, synthetic construct; identical to SEQ ID NO: 16728
  REGION 1..469: note = neuraminidase__InfluenzaA__AFR84746

SEQ ID NO: 23169 - protein, 469 aa, synthetic construct; identical to SEQ ID NO: 16728
  REGION 1..469: note = neuraminidase__InfluenzaA__AFR84756

SEQ ID NO: 23170 - protein, 469 aa, synthetic construct; identical to SEQ ID NO: 16728
  REGION 1..469: note = neuraminidase__InfluenzaA__AFR84766

SEQ ID NO: 23171 - protein, 469 aa, synthetic construct; identical to SEQ ID NO: 16728
  REGION 1..469: note = neuraminidase__InfluenzaA__AFR84776

SEQ ID NO: 23172 - protein, 469 aa, synthetic construct; identical to SEQ ID NO: 16728
  REGION 1..469: note = neuraminidase__InfluenzaA__AFR84786

SEQ ID NO: 23173 - protein, 469 aa, synthetic construct; identical to SEQ ID NO: 16728
  REGION 1..469: note = neuraminidase__InfluenzaA__AFR84796

SEQ ID NO: 23174 - protein, 469 aa, synthetic construct; identical to SEQ ID NO: 16738
  REGION 1..469: note = neuraminidase__InfluenzaA__AFR84806

SEQ ID NO: 23175 - protein, 469 aa, synthetic construct; identical to SEQ ID NO: 16728
  REGION 1..469: note = neuraminidase__InfluenzaA__AFR84816

SEQ ID NO: 23176 - protein, 469 aa, synthetic construct; identical to SEQ ID NO: 16738
  REGION 1..469: note = neuraminidase__InfluenzaA__AFR84826

SEQ ID NO: 23177 - protein, 469 aa, synthetic construct
  REGION 1..469: note = neuraminidase__InfluenzaA__AFR84836
MNPNQKIITIGSVCMTIGMANLILQIGNIISIWISHSIQLGNQNQIETCNQSVITYENNTWVNQTYVNISNTNFAAGQSVVSVKLAGNSSLCPVGGWAIYSKDNSVRIGSKGDVFVIREPFISCSPLECRTFFLTQGALLNDKHSNGTIKDRSPYRTLMSCPIGEVPSPYNSRFESVAWSASACHDGINWLTIGISGPDNGAVAVLKYNGIITDTIKSWRNNILRTQESECACVNGSCFTVMTDGPSNGQASYKIFRIEKGKIVKSVEMNAPNYHYEECSCYPDSSEITCVCRDNWHGSNRPWVSFNQNLEYQIGYICSGIFGDNPRPNDKTGSCGPVSSNGANGVKGFSFKYGNGVWIGRTKSISSRNGFEMIWDPNGWTETDNNFSIKQDIVGINEWSGYSGSFVQHPELTGLDCIRPCFWVELIRGRPKENTIWTSGSSISFCGVNSDTVGWSWPDGAELPFTIDK

SEQ ID NO: 23178 - protein, 469 aa, synthetic construct; identical to SEQ ID NO: 17542
  REGION 1..469: note = neuraminidase__InfluenzaA__AFR84846

SEQ ID NO: 23179 - protein, 469 aa, synthetic construct; identical to SEQ ID NO: 16738
  REGION 1..469: note = neuraminidase__InfluenzaA__AFR84856

SEQ ID NO: 23180 - protein, 469 aa, synthetic construct
  REGION 1..469: note = neuraminidase__InfluenzaA__AFR84866
MNPNQKIITIGSVCMTIGMANLILQIGNIISIWISHSIQLGNQNQIETCNQSVITYENNTWVNQTYVNISNTNFAAGQSVVSVKLAGNSSLCPVSGWAIYSKDNSIRIGSKGDVFVIREPFISCSPLECRTFFLTQGALLNDKHSNGTIKDRSPFRTLMSCPIGEVPSPYNSRFESVAWSASACHDGINWLTIGISGPDNGAVAVLKYNGIITDTIKSWRNNILRTQESECACVNGSCFTVMTDGPSDGQASYKIFRIEKGKIVKSVEMNAPNYHYEECSCYPDSSEITCVCRDNWHGSNRPWVSFNQNLEYQIGYICSGIFGDNPRPNDKTGSCGPVSSNGANGVKGFSFKYGNGVWIGRTKSISSRNGFEMIWDPNGWTGTDNNFSIKQDIVGINEWSGYSGSFVQHPELTGLDCIRPCFWVELIRGRPKENTIWTSGSSISFCGVNSDTVGWSWPDGAELPFTIDK

SEQ ID NO: 23181 - protein, 469 aa, synthetic construct; identical to SEQ ID NO: 17446
  REGION 1..469: note = neuraminidase__InfluenzaA__AFR84876

SEQ ID NO: 23182 - protein, 469 aa, synthetic construct; identical to SEQ ID NO: 17542
  REGION 1..469: note = neuraminidase__InfluenzaA__AFR84895

SEQ ID NO: 23183 - protein, 469 aa, synthetic construct; identical to SEQ ID NO: 17542
  REGION 1..469: note = neuraminidase__InfluenzaA__AFR84905

SEQ ID NO: 23184 - protein, 469 aa, synthetic construct; identical to SEQ ID NO: 17542
  REGION 1..469: note = neuraminidase__InfluenzaA__AFR84915

SEQ ID NO: 23185 - protein, 469 aa, synthetic construct; identical to SEQ ID NO: 17542
  REGION 1..469: note = neuraminidase__InfluenzaA__AFR84925

SEQ ID NO: 23186 - protein, 450 aa, synthetic construct
  REGION 1..450: note = neuraminidase__InfluenzaA__AFU83119
MNPNQKIITIGSVSLTIATVCFLMQIAILATTVTLHFKQNECSIPSSNQVVPCEPIIVERNVTEYRDWSKPQCQITGFAPFSKDNSIRLSAGGDIWVTREPYVSCSPDKCYQFALGQGTTLDNKHSNGTIHDRIPHRTLLMNELGVPFHLGTKQVCIAWSSSSCHDGRAWLHVCVTGDDRNATASFIYDGVLVDSIGSWSQNILRTQESECVCINGTCTVVMTDGSASGRADTRILFIKEGKIVHVSPLSGSAQHIEECSCYPRYPDVRCVCRDNWKGSNRPIIDISMADYGIDSSYVCSGLVGDTPRNDDSSSNSNCKDPNNERGNPGVKGWAFDYGNDVWMGRTISKDSRSGYETFRVIGGWTIANSKSQVNRQVIVDNNNWSGYSGIFSVEGKSCINRCFYVELIRGRPQETRVWWTSNSIVAFCGTSGTYGTGSWPDGANINFMPI

SEQ ID NO: 23187 - protein, 469 aa, synthetic construct
  REGION 1..469: note = neuraminidase__InfluenzaA__AFV53208
MNPNQKIITIGSVSLTIATVCFLIQIAILVTTVTLHFKQHECDSPASNQVMPCEPIIIERNITEIVYLNNTTIEKEICPKVVEYRNWSKPQCQITGFAPFSKDNSIRLSAGGDIWVTREPYVSCDPGKCYQFALGQGTTLDNKHSNDTIHDRIPHRTLLMNELGVPFHLGTRQVCIAWSSSSCHDGKAWLHVCITGDDKNATASFIYDGRLMDSIGSWSQNILRTQESECVCINGTCTVVMTDGSASGRADTRILFIEEGKIVHISPLSGSAQHVEECSCYPRYPGVRCICRDNWKGSNRPVIDINMEDYSIDSSYVCSGLVGDTPRNDDRSSNSNCRNPNNERGNQGVKGWAFDNGDDVWMGRTISKDLRSGYETFKVIGGWSTPNSKSQINRQVIVDSDNRSGYSGIFSVEGKSCINRCFYVELIRGRKQETRVWWTSNSIVVFCGTSGTYGTGSWPDGANINFMPI

SEQ ID NO: 23188 - protein, 469 aa, synthetic construct
  REGION 1..469: note = neuraminidase__InfluenzaA__AFV53219
MNPNQKTITIGSVSLTIATVCFLMQIAILATTVTLHFKQHECDSPASNQVMPCEPIIIERNITEIVYLNNTTIEKEICPEVVEYRNWSKPQCQITGFAPFSKDNSIRLSAGGDIWVTREPYVSCDPGKCYQFALGQGTTLDNKHSNGTIHDRIPHRTLLMNELGVPFHLGTKQVCVAWSSSSCHDGKAWLHVCVTGDDRNATASFIYDGRLVDSIGSWSQNILRTQESECVCINGTCTVVMTDGSASGRADTRILFIKEGKIVHISPLSGSAQHIEECSCYPRYPDVRCICRDNWKGSNRPVIDINMEDYSIDSSYVCSGLVGDTPRNDDSSSNSNCRDPNNERGNPGVKGWAFDNGDDVWMGRTINKESRSGYETFKVIGGWSTPNSKSQVNRQVIVDNNNWSGYSGIFSVEGKSCINRCFYVELIRGRPQETRVWWTSNSIVVFCGTSGTYGTGSWPDGANINFMPI

SEQ ID NO: 23189 - protein, 469 aa, synthetic construct
  REGION 1..469: note = neuraminidase__InfluenzaA__AFV53230
MNPNQKIITIGSVSLTIATVCFLMQIAILVTTVTLHFKQHECDSPASNQVMPCEPIIIERNITEIVYLNNTTIEKEICPKVVEYRNWSKPQCKITGFAPFSKDNSIRLSAGGDIWVTREPYVSCDPGKCYQFALGQGTTLDNKHSNDTIHDRIPHRTLLMNELGVPFHLGTRQVCIAWSSSSCHDGKAWLHVCVTGDDKNATASFIYDGRLVDSIGSWSQNILRTQESECVCINGTCTVVMTDGSASGRADTKILFIEEGKIVHISPLSGSAQHVEECSCYPRYPDVRCICRDNWKGSNRPVVDISMEDYSIDSSYVCSGLVGDTPRNDDRSSNSNCRNPNNERGNQGVKGWAFDNGDDVWMGRTISKDLRSGYETFKVIGGWSTPNSKSQINRQVIVDSDNRSGYSGIFSVEGKSCINRCFYVELIRGRKQETRVWWTSNSIVVFCGTSGTYGTGSWPDGANINLMPI

SEQ ID NO: 23190 - protein, 469 aa, synthetic construct; identical to SEQ ID NO: 16405
  REGION 1..469: note = neuraminidase__InfluenzaA__AFV53241

SEQ ID NO: 23191 - protein, 469 aa, synthetic construct; identical to SEQ ID NO: 14091
  REGION 1..469: note = neuraminidase__InfluenzaA__AFV53252

SEQ ID NO: 23192 - protein, 470 aa, synthetic construct
  REGION 1..470: note = neuraminidase__InfluenzaA__AFV53263
MNPNQKIITIGSICMAIGTISLILQIGNIISIWISHSIQTGSQNHTGICNQRIITYENNTWVNQTYVNISNTNVVAGKDTTSMILAGNSSLCPIRGWAIYSKDNSIRIGSKGDVFVIREPFISCSHLECRTFFLTQGALLNDKHSNGTVKDRSPYRALMSCPIGEAPSPYNSRFESVAWSASACHDGMGWLTIGISGPDDGAVAVLKYNGIITEIIKSWRKQILRTQESECVCVNGSCFTIMTDGPSNRPASYRIFKIEKGKITKSIELDAPNSHYEECSCYPDTGKVMCVCRDNWHGSNRPWVSFNQNLDYQIGYICSGVFGDNPRPKDGKGSCDPVNVDGADGVKGFSYRYGNGVWIGRTKSNSSRKGFEMIWDPNGWTNTDGNFSVKQDVVAMTDWSGYSGSFVQHPELTGLDCIRPCFWVELIRGRPREETTIWTSGSSISFCGVNSDTVNWSWPDGAELPFTIDK

SEQ ID NO: 23193 - protein, 469 aa, synthetic construct
  REGION 1..469: note = neuraminidase__InfluenzaA__AFV53274
MNPNQKIITIGSVSLIIATVCFLMQIAILVTTVTLHFKQHECDSPASNQVMPCEPIIIERNITEIVYLNNTTIEKEICPKVVEYRNWSKPQCQITGFAPFSKDNSIRLSAGGDIWVTREPYVSCDPGKCYQFALGQGTTLDNKHSNDTIHDRIPHRTLLMNELGVPFHLGTRQVCVAWSSSSCHDGKAWLHVCVTGDDKNATASFIYDGRLVDSIGSWSQNILRTQESECVCINGTCTVVMTDGSASGRADTRILFIEEGKIVHISPLSGSAQHVEECSCYPRYPDVRCICRDNWKGSNRPVIDINMEDYSIDSSYVCSGLVGDTPRNDDRSSNSNCRNPNNERGNPGVKGWAFDNGDDVWMGRTISKDLRSGYETFKVIGGWSTPNSKSQINRQVIVDSNNWSGYSGIFSVEGKSCINRCFYVELIRGRQQETRVWWTSNSIVVFCGTSGTYGTGSWPDGANINFMPI

SEQ ID NO: 23194 - protein, 469 aa, synthetic construct
  REGION 1..469: note = neuraminidase__InfluenzaA__AFV53285
MNPNQKIITIGSVSLTIATVCFLMQIAILATTVTLHFKQHECDSPASNQVMPCEPIIIERNITEIVYLNNTTIEKEICPEVVEYRNWSKPQCQITGFAPFSKDNSIRLSAGGDIWVTREPYVSCDPGKCYQFALGQGTTLDNKHSNGTIHDRIPHRTLLMNELGVPFHLGTKQVCVAWSSSSCHDGKAWLHVCVTGDDRNATASFIYDGRLVDSIGSWSQNILRTQESECVCINGTCTVVMTDGSASGRADTRILFIKEGKIVHISPLSGSAQHIEECSCYPRHPDVRCICRDNWKGSNRPVININMEDYSIDSSYVCSGLVGDTPRNDDSSSNSNCRDPNNERGNPGVKGWAFDNGDDVWMGRTINKDSRSGYETFKVIGGWSTPNSKSQVNRQVIVDNNNWSGYSGIFSVEGKSCINRCFYVELIRGRPQETRVWWTSNSIVVFCGTSGTYGTGSWPDGANINFMPI

SEQ ID NO: 23195 - protein, 469 aa, synthetic construct
  REGION 1..469: note = neuraminidase__InfluenzaA__AFV53296
MNPNQKIIIIGSVSLTIATVCFLMQIAILVTTVTLHFKQHECDSPASNQVMPCEPIIIERNITEIVYLNNTTIEKEICPEVVEYRNWSKPQCQITGFAPFSKDNSIRLSAGGDIWVTREPYVSCDPSKCYQFALGQGTTLDNKHSNDTIHDRIPHRTLLMNELGVPFHLGTRQVCVAWSSSSCHDGKAWLHVCVTGDDKNATASFIYDGRLVDSIGSWSQNILRTQESECVCINGTCTVVMTDGSASGRADTRILFIEEGKIVHISPLSGSAQHVEECSCYPRYPDVRCICRDNWKGSNRPVIDINMEDYSIDSSYVCSGLVGDTPRNDDRSSNSNCRDPNNERGNPGVKGWAFDNGDDVWMGRTISKDLRSGYETFKVIGGWSTPNSKSQINRQVIVDSNNWSGYSGIFSVEGKSCINRCFYVELIRGRQQETRVWWTSNSIVVFCGTSGTYGTGSWPDGANINFMPI

SEQ ID NO: 23196 - protein, 469 aa, synthetic construct
  REGION 1..469: note = neuraminidase__InfluenzaA__AFV53307
MNPNQKIITIGSVSLTIATVCFLMQIAILATTVTLHFKQHECDSPASNQVMPCEPIIIERNITEIVYLNNTTIEKEICPEVVEYRNWSKPQCQITGFAPFSKDNSIRLSAGGDIWVTREPYVSCDPGKCYQFALGQGTTLDNKHSNGTIHDRIPHRTLLMNELGVPFHLGTKQVCVAWSSSSCHDGKAWLHVCVTGDDRNATASFIYDGRLVDSIGSWSQNILRTQESECVCINGTCTVVMTDGSASGRADTRILFIKEGKIVHISPLSGSAQHVEECSCYPRYPDVRCICRDNWKGSNRPVIDINMEDYSIDSSYVCSGLVGDTPRNDDSSSNSNCRDPNNERGNPGVKGWAFDNGDDVWMGRTINKDSRSGYETFKVIGGWSTPNSKSQVNRQVIVDNNNWSGYSGIFSVEGKSCINRCFYVELIRGRPQETRVWWTSNSIVVFCGTSGTYGTGSWPDGANINFMPI

SEQ ID NO: 23197 - protein, 469 aa, synthetic construct
  REGION 1..469: note = neuraminidase__InfluenzaA__AFV53317
MNPNQKIITIGSVSLTIATVCFLMQIAILATTVTLHFKQHECDSPASNQVMPCEPIIIERNITEIVYLNNTTIEKEICPEVVEYRNWSKPQCQITGFAPFSKDNSIRLSAGGDIWVTREPYVSCDPGKCYQFALGQGTTLDNKHSNGTIHDRSPHRTLLMNELGVPFHLGTKQVCAAWSSSSCHDGKAWLHVCVTGDDRNATASFIYDGRLVDSIGSWSQNILRTQESECVCINGTCTVVMTDGSASGRADTRILFIKEGKIVHIGPLSGSAQHIEECSCYPRYPDVRCICRDNWKGSNRPVIDINMEDYSIDSSYVCSGLVGDTPRNDDSSSNSNCRDPNNERGNPGVKGWAFDNGDDVWMGRTISKDLRSGYETFKVIGGWSTPNSKSQVNRQVIVDNNNWSGYSGIFSVEGKSCINRCFYVELIRGRPQETRVWWTSNSIVVFCGTSGTYGTGSWPDGANINFMPI

SEQ ID NO: 23198 - protein, 469 aa, synthetic construct
  REGION 1..469: note = neuraminidase__InfluenzaA__AFV53328
MNPNQKIITIGSVSLTIATVCFLMHIAILATTVTLHFKQHECDSPASNQAMPCEPIIIERNITEIVYLNNTTIEKEICPEVVEYRNWSKPQCQITGFAPFSKDNSIRLSAGGDIWVTREPYVSCDPGKCYQFALGQGTTLDNKHSNGTIHDRIPHRTLLMNELGVPFHLGTKQVCVAWSSSSCHDGKAWLHVCITGDDRNATASFIYDGRLVDSIGSWSQNILRTQESECVCINGTCTVVMTDGSASGRADTRILFIKEGKIVHISPLSGSAQHIEECSCYPRYPDVRCICRDNWKGSNRPVIDINMEDYSIDSSYVCSGLVGDTPRNDDSSSNSNCRDPNNERGNPGVKGWAFDNGDDVWMGRTISKDLRSGYETFKVIGGWSTPNSKSQVNRQVIVDNNNWSGYSGIFSVEGKSCINRCFYVELIRGRPQETRVWWTSNSIVVFCGTSGTYGTGSWPDGANINFMPI

SEQ ID NO: 23199 - protein, 469 aa, synthetic construct
  REGION 1..469: note = neuraminidase__InfluenzaA__AFV53339
MNPNQKIITIGSASLTIATVCFLMQIAILVTTVTLHFKQHECDSPASNQVMPCEPIIIERNITEIVYLNNTTIEKEICPKVVEYRNWSKPQCKITGFAPFSKDNSIRLSAGGDIWVTREPYVSCDPGKCYQFALGQGTTLDNKHSNDTIHDRIPHRTLLMNELGVPFHLGTRQVCIAWSSSSCHDGKAWLHVCVTGDDKNATASFIYDGRLVDSIGSWSQNILRTQESECVCINGTCTVVMTDGSASGRADTRILFIEEGKIVHMSPLSGSAQHVEECSCYPRYPDVRCICRDNWKGSNRPVVDINMEDYSIDSSYVCSGLVGDTPRNDDRSSNSNCRNPNNEKGNQGVKGWAFDNGDDVWMGRTISKDLRSGYETFKVIGGWSTPNSKSQINRQVIVDSDNRSGYSGIFSVEGKSCINRCFYVELIRGRKQETRVWWTSNSIVVFCGTSGTYGTGSWPDGANINLMPI

SEQ ID NO: 23200 - protein, 469 aa, synthetic construct; identical to SEQ ID NO: 16738
  REGION 1..469: note = neuraminidase__InfluenzaA__AFX96367

SEQ ID NO: 23201 - protein, 469 aa, synthetic construct; identical to SEQ ID NO: 16738
  REGION 1..469: note = neuraminidase__InfluenzaA__AFX96386

SEQ ID NO: 23202 - protein, 469 aa, synthetic construct; identical to SEQ ID NO: 17092
  REGION 1..469: note = neuraminidase__InfluenzaA__AFX96401

SEQ ID NO: 23203 - protein, 469 aa, synthetic construct; identical to SEQ ID NO: 17092
  REGION 1..469: note = neuraminidase__InfluenzaA__AFX96411

SEQ ID NO: 23204 - protein, 469 aa, synthetic construct; identical to SEQ ID NO: 17092
  REGION 1..469: note = neuraminidase__InfluenzaA__AFX96421

SEQ ID NO: 23205 - protein, 469 aa, synthetic construct; identical to SEQ ID NO: 17092
  REGION 1..469: note = neuraminidase__InfluenzaA__AFX96431

SEQ ID NO: 23206 - protein, 469 aa, synthetic construct; identical to SEQ ID NO: 17092
  REGION 1..469: note = neuraminidase__InfluenzaA__AFX96441

SEQ ID NO: 23207 - protein, 469 aa, synthetic construct; identical to SEQ ID NO: 17092
  REGION 1..469: note = neuraminidase__InfluenzaA__AFX96451

SEQ ID NO: 23208 - protein, 469 aa, synthetic construct; identical to SEQ ID NO: 17092
  REGION 1..469: note = neuraminidase__InfluenzaA__AFX96461

SEQ ID NO: 23209 - protein, 469 aa, synthetic construct; identical to SEQ ID NO: 16738
  REGION 1..469: note = neuraminidase__InfluenzaA__AFX96471

SEQ ID NO: 23210 - protein, 469 aa, synthetic construct; identical to SEQ ID NO: 16738
  REGION 1..469: note = neuraminidase__InfluenzaA__AFX96481

SEQ ID NO: 23211 - protein, 469 aa, synthetic construct; identical to SEQ ID NO: 16738
  REGION 1..469: note = neuraminidase__InfluenzaA__AFX96491

SEQ ID NO: 23212 - protein, 469 aa, synthetic construct; identical to SEQ ID NO: 16738
  REGION 1..469: note = neuraminidase__InfluenzaA__AFX96501

SEQ ID NO: 23213 - protein, 469 aa, synthetic construct; identical to SEQ ID NO: 16738
  REGION 1..469: note = neuraminidase__InfluenzaA__AFX96511

SEQ ID NO: 23214 - protein, 469 aa, synthetic construct
  REGION 1..469: note = neuraminidase__InfluenzaA__AFX96521
MNPNQKIITIGSVCMTIGMANLILQIGNIISIWISHSIQLGNQNQIETCNQSVITYENNTWVNQTYVNISNTNFAARQSVVSVKLAGNSSLCPVSGWAIYSKDNSIRIGSKGDVFVIREPFISCSPLECRTFFLTQGALLNDKHSNGTIKDRSPYRTLMSCPIGEVPSPYNSRFESVAWSASACHDGINWLTIGISGPDNGAVAVLKYNGIITDTIKSWRNNILRTQESECACVNGSCFTVMTDGPSDGQASYKIFRIEKGKIVKSVEMNAPNYHYEECSCYPDSSEITCVCRDNWHGSNRPWVSFNQNLEYQIGYICSGIFGDNPRPNDKTGSCGPVSSNGANGVKGFSFKYGNGVWIGRTKSISSRNGFEMIWDPNGWTGTDNNFSIKQDIVGINEWSGYSGSFVQHPELTGLDCIRPCFWVELIRGRPKENTIWTSGSSISFCGVNSDTVGWSWPDGAELPFTIDK

SEQ ID NO: 23215 - protein, 469 aa, synthetic construct; identical to SEQ ID NO: 16738
  REGION 1..469: note = neuraminidase__InfluenzaA__AFX96531

SEQ ID NO: 23216 - protein, 469 aa, synthetic construct; identical to SEQ ID NO: 16738
  REGION 1..469: note = neuraminidase__InfluenzaA__AFX96541

SEQ ID NO: 23217 - protein, 469 aa, synthetic construct; identical to SEQ ID NO: 16738
  REGION 1..469: note = neuraminidase__InfluenzaA__AFX96551

SEQ ID NO: 23218 - protein, 469 aa, synthetic construct; identical to SEQ ID NO: 21262
  REGION 1..469: note = neuraminidase__InfluenzaA__AFX96561

SEQ ID NO: 23219 - protein, 469 aa, synthetic construct; identical to SEQ ID NO: 16738
  REGION 1..469: note = neuraminidase__InfluenzaA__AFX96571

SEQ ID NO: 23220 - protein, 469 aa, synthetic construct; identical to SEQ ID NO: 16738
  REGION 1..469: note = neuraminidase__InfluenzaA__AFX96581

SEQ ID NO: 23221 - protein, 469 aa, synthetic construct; identical to SEQ ID NO: 16738
  REGION 1..469: note = neuraminidase__InfluenzaA__AFX96591

SEQ ID NO: 23222 - protein, 469 aa, synthetic construct; identical to SEQ ID NO: 16738
  REGION 1..469: note = neuraminidase__InfluenzaA__AFX96601

SEQ ID NO: 23223 - protein, 469 aa, synthetic construct; identical to SEQ ID NO: 16738
  REGION 1..469: note = neuraminidase__InfluenzaA__AFX96611

SEQ ID NO: 23224 - protein, 469 aa, synthetic construct; identical to SEQ ID NO: 16738
  REGION 1..469: note = neuraminidase__InfluenzaA__AFX96621

SEQ ID NO: 23225 - protein, 469 aa, synthetic construct; identical to SEQ ID NO: 16738
  REGION 1..469: note = neuraminidase__InfluenzaA__AFX96631

SEQ ID NO: 23226 - protein, 469 aa, synthetic construct
  REGION 1..469: note = neuraminidase__InfluenzaA__AFX96641
MNPNQKIITIGSVCMTIGMANLILQIGNIISIWISHSIQLGNQNQIETCNQSVITYENNTWVNQTYVNISNTNFAAGQSVVSVKLAGNSSLCPVSGWAIYSKDNSIRIGSKGDVFVIREPFISCSPLECRTFFLTQGALLNDKHSNGTIKDRSPYRTLMSCPIGEVPSPYNSKFESVAWSASACHDGINWLTIGISGPDNGAVAVLKYNGIITDTIKSWRNNILRTQESECACVNGSCFTVMTDGPSDGQASYKIFRIEKGKIVKSVEMNAPNYHYEECSCYPDSSEITCVCRDNWHGSNRPWVSFNQNLEYQIGYICSGIFGDNPRPNDKTGSCGPVSSNGANGVKGFSFKYGNGVWIGRTKSISSRNGFEMIWDPNGWTGTDNNFSIKQDIVGINEWSGYSGSFVQHPELTGLDCIRPCFWVELIRGRPKENTIWTSGSSISFCGVNSDTVGWSWPDGAELPFTIDK

SEQ ID NO: 23227 - protein, 469 aa, synthetic construct; identical to SEQ ID NO: 16738
  REGION 1..469: note = neuraminidase__InfluenzaA__AFX96651

SEQ ID NO: 23228 - protein, 469 aa, synthetic construct; identical to SEQ ID NO: 16738
  REGION 1..469: note = neuraminidase__InfluenzaA__AFX96661

SEQ ID NO: 23229 - protein, 469 aa, synthetic construct; identical to SEQ ID NO: 16738
  REGION 1..469: note = neuraminidase__InfluenzaA__AFX96671

SEQ ID NO: 23230 - protein, 469 aa, synthetic construct; identical to SEQ ID NO: 16738
  REGION 1..469: note = neuraminidase__InfluenzaA__AFX96681

SEQ ID NO: 23231 - protein, 469 aa, synthetic construct; identical to SEQ ID NO: 16738
  REGION 1..469: note = neuraminidase__InfluenzaA__AFX96691

SEQ ID NO: 23232 - protein, 469 aa, synthetic construct
  REGION 1..469: note = neuraminidase__InfluenzaA__AFX96701
MNPNQKIITIGSVCMTIGMANLILQIGNIISIWISHSIQLGNQNQIETCNQSIITYENNTWVNQTYVNISNTNFAAGQSVVSVKLAGNSSLCPVSGWAIYSKDNSIRIGSKGDVFVIREPFISCSPLECRTFFLTQGALLNDKHSNGTIKDRSPYRTLMSCPIGEVPSPYNSRFESVAWSASACHDGINWLTIGISGPDNGAVAVLKYNGIITDTIKSWRNNILRTQESECACVNGSCFTVMTDGPSDGQASYKIFRIEKGKIVKSVEMNAPNYHYEECSCYPDSSEITCVCRDNWHGSNRPWVSFNQNLEYQIGYICSGIFGDNPRPNDKTGSCGPVSFNGANGVKGFSFKYGNGVWIGRTKSISSRNGFEMIWDPNGWTGTDNNFSIKQDIVGINEWSGYSGSFVQHPELTGLDCIRPCFWVELIRGRPKENTIWTSGSIISFCGVNSDTVGWSWPDGAELPFTIDK

SEQ ID NO: 23233 - protein, 469 aa, synthetic construct; identical to SEQ ID NO: 16738
  REGION 1..469: note = neuraminidase__InfluenzaA__AFX96711

SEQ ID NO: 23234 - protein, 469 aa, synthetic construct
  REGION 1..469: note = neuraminidase__InfluenzaA__AFX96721
MNPNQKIITIGSVCMTIGMANLILQIGNIISIWISHSIQLGNQNQIETCNQSVITYENNTWVNQTYVNISNTNFAAGQSVVSVKLAGNSSLCPVSGWAIYSKDNSIRIGSKGDVFVIREPFISCSPLECRTFFLTQGALLNDKHSNGTIKDRSPYRTLMSCPIGEVPSPYNSRFESVAWSASACHDGINWLTIGISGPDNGAVAVLKYNGIITDTIKSWRNNILRTQESECACVNGSCFTVMTDGPSDGQASYKIFRIEKGKIVKSVEMNAPNYHYEECSCYPDSSEITCVCRDNWHGSNRPWVSFNQNLEYQIGYICSGIFGDNPRPNDKTGSCGPVSSNGANGVKGFSFKYGNGVWIGRTKSISSRNGFEMIWDPNGWTGTDNNFSIKQDIVGINEWSGYSGSFVQHPELTGLDCIRPCFWVELIRGRPKENTVWTSGSSISFCGVNSDTVGWSWPDGAELPFTIDK

SEQ ID NO: 23235 - protein, 469 aa, synthetic construct; identical to SEQ ID NO: 23234
  REGION 1..469: note = neuraminidase__InfluenzaA__AFX96731

SEQ ID NO: 23236 - protein, 469 aa, synthetic construct; identical to SEQ ID NO: 16738
  REGION 1..469: note = neuraminidase__InfluenzaA__AFX96741

SEQ ID NO: 23237 - protein, 469 aa, synthetic construct; identical to SEQ ID NO: 16738
  REGION 1..469: note = neuraminidase__InfluenzaA__AFX96751

SEQ ID NO: 23238 - protein, 469 aa, synthetic construct; identical to SEQ ID NO: 17756
  REGION 1..469: note = neuraminidase__InfluenzaA__AFX96761

SEQ ID NO: 23239 - protein, 469 aa, synthetic construct; identical to SEQ ID NO: 16738
  REGION 1..469: note = neuraminidase__InfluenzaA__AFX96771

SEQ ID NO: 23240 - protein, 469 aa, synthetic construct
  REGION 1..469: note = neuraminidase__InfluenzaA__AFX96791
MNPNQKIITIGSVCMTIGMANLILQVGNIISIWISHSIQLGNQNQIETCNQSVITYENNTWVNQTYVNISNTNFAAGQSVVSVKLAGNSSLCPVSGWAIYSKDNSIRIGSKGDVFVIREPFISCSPLECRTFFLTQGALLNDKHSNGTIKDRSPYRTLMSCPIGEVPSPYNSRFESVAWSASACHDGINWLTIGISGPDNGAVAVLKYNGIITDTIKSWRNNILRTQESECACINGSCFTVMTDGPSDGQASYKIFRIEKGKIVKSVEMNAPNYHYEECSCYPDSSEITCVCRDNWHGSNRPWVSFNQNLEYQIGYICSGIFGDNPRPNDKTGSCGPVSSNGANGVKGFSFKYGNGVWIGRTKSISSRNGFEMIWDPNGWTGTDNNFSIKQDIVGINEWSGYSGSFVQHPELTGLDCIRPCFWVELIRGRPKENTIWTSGSSISFCGVNSDTVGWSWPDGAELPFTIDK

SEQ ID NO: 23241 - protein, 469 aa, synthetic construct; identical to SEQ ID NO: 23240
  REGION 1..469: note = neuraminidase__InfluenzaA__AFX96801

SEQ ID NO: 23242 - protein, 469 aa, synthetic construct
  REGION 1..469: note = neuraminidase__InfluenzaA__AFX96811
MNPNQKIITIGSVCMTIGMANLILQIGNIISIWISHSIQLGNQNQIETCNQSVITYENNTWVNQTYVNISNTNFAAGQSVVSVRLAGNSSLCPVSGWAIYSKDNSIRIGSKGDVFVIREPFISCSPLECRTFFLTQGALLNDKHSNGTIKDRSPYRTLMSCPIGEVPSPYNSRFESVAWSASACHDGINWLTIGISGPDNGAVAVLKYNGIITDTIKSWRNNILRTQESECACVNGSCFTVMTDGPSDGQASYKIFRIEKGKIVKSVEMNAPNYHYEECSCYPDSSEITCVCRDNWHGSNRPWVSFNQNLEYQIGYICSGIFGDNPRPNDKTGSCGPVSSNGANGVKGFSFKYGNGVWIGRTKSISSRNGFEMIWDPNGWTGTDNNFSIKQDIVGINEWSGYSGSFVQHPELTGLDCIRPCFWVELIRGRPKENTIWTSGSSISFCGVNSDTVGWSWPDGAELPFTIDK

SEQ ID NO: 23243 - protein, 469 aa, synthetic construct; identical to SEQ ID NO: 16738
  REGION 1..469: note = neuraminidase__InfluenzaA__AFX96821

SEQ ID NO: 23244 - protein, 469 aa, synthetic construct; identical to SEQ ID NO: 23240
  REGION 1..469: note = neuraminidase__InfluenzaA__AFX96831

SEQ ID NO: 23245 - protein, 469 aa, synthetic construct
  REGION 1..469: note = neuraminidase__InfluenzaA__AFX96841
MNPNQKIITIGSVCMTIGMANLILQIGNIISIWISHSIQLGNQNQIETCNQSVITYENNTWVNQTYVNISNTNFAAGQSVVSVRLAGNSSLCPVSGWAIYSKDNSIRIGSKGDVFVIREPFISCSPLECRTFFLTQGALLNDKHSNGTIKDRSPYRTLMSCPIGEVPSPYNSRFESVAWSASACHDGINWLTIGISGPDNGAVAVLKYNGIITDTIKSWRNNILRTQESECACVNGSCFTVMTDGPSDGQASYKIFRIEKGKIVKSVEMNAPNYYYEECSCYPDSSEITCVCRDNWHGSNRPWVSFNQNLEYQIGYICSGIFGDNPRPNDKTGSCGPVSSNGANGVKGFSFKYGNGVWIGRTKSISSRNGFEMIWDPNGWTGTDNNFSIKQDIVGINEWSGYSGSFVQHPELTGLDCIRPCFWVELIRGRPKENTIWTSGSSISFCGVNSDTVGWSWPDGAELPFTIDK

SEQ ID NO: 23246 - protein, 469 aa, synthetic construct; identical to SEQ ID NO: 16738
  REGION 1..469: note = neuraminidase__InfluenzaA__AFX96859

SEQ ID NO: 23247 - protein, 469 aa, synthetic construct; identical to SEQ ID NO: 16738
  REGION 1..469: note = neuraminidase__InfluenzaA__AFX96907

SEQ ID NO: 23248 - protein, 469 aa, synthetic construct; identical to SEQ ID NO: 16738
  REGION 1..469: note = neuraminidase__InfluenzaA__AFX96917

SEQ ID NO: 23249 - protein, 469 aa, synthetic construct; identical to SEQ ID NO: 16738
  REGION 1..469: note = neuraminidase__InfluenzaA__AFX96927

SEQ ID NO: 23250 - protein, 469 aa, synthetic construct
  REGION 1..469: note = neuraminidase__InfluenzaA__AFX96937
MNPNQKIITIGSVCMTIGMANLILQIGNIISIWISHSIQLGNQNQIETCNQSVITYENNTWVNQTYVNISSTNFAAGQSVVSVKLAGNSSLCPVSGWAIYSKDNSIRIGSKGDVFVIREPFISCSPLECRTFFLTQGALLNDKHSNGTIKDRSPYRTLMSCPIGEVPSPYNSRFESVAWSASACHDGINWLTIGISGPDNGAVAVLKYNGIITDTIKSWRNNILRTQESECACVNGSCFTVMTDGPSDGQASYKIFRIEKGKIVKSVEMNAPNYHYEECSCYPDSSEITCVCRDNWHGSNRPWVSFNQNLEYQIGYICSGIFGDNPRPNDKTGSCGPVSSNGANGVKGFSFKYGNGVWIGRTKSISSRNGFEMIWDPNGWTGTDNNFSIKQDIVGINEWSGYSGSFVQHPELTGLDCIRPCFWVELIRGRPKENTIWTSGSSISFCGVNSDTVGWSWPDGAELPFTIDK

SEQ ID NO: 23251 - protein, 469 aa, synthetic construct; identical to SEQ ID NO: 16728
  REGION 1..469: note = neuraminidase__InfluenzaA__AFY23991

SEQ ID NO: 23252 - protein, 469 aa, synthetic construct; identical to SEQ ID NO: 16738
  REGION 1..469: note = neuraminidase__InfluenzaA__AFY24001

SEQ ID NO: 23253 - protein, 469 aa, synthetic construct; identical to SEQ ID NO: 16738
  REGION 1..469: note = neuraminidase__InfluenzaA__AFY24022

SEQ ID NO: 23254 - protein, 469 aa, synthetic construct; identical to SEQ ID NO: 16738
  REGION 1..469: note = neuraminidase__InfluenzaA__AFY24043

SEQ ID NO: 23255 - protein, 469 aa, synthetic construct
  REGION 1..469: note = neuraminidase__InfluenzaA__AFY24153
MNPNQKIITIGSVSLTISTICFFMQIAILITTVTLHFKQYEFNSPPNNQVMLCEPTIIERNITEIVYLTNTTIEKEICPKLAEYRNWSKPQCNITGFAPFSKDNSIRLSAGGDIWVTREPYVSCDPDKCYQFALGQGTTLNNVHSNDTVHDRTPYRTLLMNELGVPFHLGTKQVCIAWSSSSCHDGKAWLHVCVTGDDKNATASFIYNGRLVDSIVSWSKEILRTQESECVCINGTCTVVMTDGSASGKADTKILFIEEGKIVHTSTLSGSAQHVEECSCYPRYPGVRCVCRDNWKGSNRPIVDINITDYSIVSSYVCSGLVGDTPRKNDSSSSSHCLDPNNEEGGHGVKGWAFDDGNDVWMGRTISEKLRSGYETFKVIEGWSNPNSKLQINRQVIVDRGNRSGYSGIFSVEGKSCINRCFYVELIRGRKEETEVLWTSNSIVVFCGTSGTYGTGSWPDGADINLMPI

SEQ ID NO: 23256 - protein, 469 aa, synthetic construct
  REGION 1..469: note = neuraminidase__InfluenzaA__AFY24208
MNPNQKIITIGSVSLTISTICFFMQIAILITTVTLHFKQYEFNSPPNNQVMLCEPTIIERNITEIVYLTNTTIEKEICPKLAEYRNWSKPQCNITGFAPFSKDNSIRLSAGGDIWVTREPYVSCDPDKCYQFALGQGTTLNNVHSNDTVHNRTPYRTLLMNELGVPFHLGTKQVCIAWSSSSCHDGKAWLHVCVTGDDENATASFIYNGRLVDSIVSWSKKILRTQESECVCINGTCTVVMTDGSASGKADTKILFIEEGKIVHTSTLSGSAQHVEECSCYPRYPGVRCVCRDNWKGSNRPIVDINIKDYSIVSSYVCSGLVGDTPRKNDSSSSSHCLDPNNEEGGHGVKGWAFDDGNDVWMGRTISERLRSGYETFKVIEGWSNPNSKLQINRQVIVDRGNRSGYSGIFSVEGKSCINRCFYVELIRGRKQETEVLWTSNSIVVFCGTSGTYGTGSWPDGADINLMPI

SEQ ID NO: 23257 - protein, 469 aa, synthetic construct; identical to SEQ ID NO: 15929
  REGION 1..469: note = neuraminidase__InfluenzaA__AFY24219

SEQ ID NO: 23258 - protein, 469 aa, synthetic construct
  REGION 1..469: note = neuraminidase__InfluenzaA__AGB12978
MNPNQRIITIGSVCMTIGMANLILQIGNIISIWISHSIQLGNQNQIETCNQSVITYENNTWVNQTYVNISNTNFAARQSVVSVKLAGNSSLCPVSGWAIYSKDNSIRIGSKGDVFVIREPFISCSPLECRTFFLTQGALLNDKHSNGTIKDRSPYRTLMSCPIGEVPSPYNSRFESVAWSASACHDGINWLTIGISGPDNGAVAVLKYNGIITDTIKSWRNNILRTQESECACVNGSCFTIMTDGPSDGQASYKIFRIEKGKIVKSVEMNAPNYHYEECSCYPDSSEITCVCRDNWHGSNRPWVSFNQNLEYQIGYICSGIFGDNPRPNDKTGSCGPVSSNGANGVKGFSFKYGNGVWIGRTKSISSRKGFEMIWDPNGWTGTDNNFSIKQDIVGINEWSGYSGSFVQHPELTGLDCIRPCFWVELIRGRPKENTIWTSGSSISFCGVNSDTVGWSWPDGAELPFTIDK

SEQ ID NO: 23259 - protein, 469 aa, synthetic construct; identical to SEQ ID NO: 20257
  REGION 1..469: note = neuraminidase__InfluenzaA__AGB12989

SEQ ID NO: 23260 - protein, 469 aa, synthetic construct; identical to SEQ ID NO: 20709
  REGION 1..469: note = neuraminidase__InfluenzaA__AGB13009

SEQ ID NO: 23261 - protein, 469 aa, synthetic construct; identical to SEQ ID NO: 20709
  REGION 1..469: note = neuraminidase__InfluenzaA__AGB13019

SEQ ID NO: 23262 - protein, 469 aa, synthetic construct; identical to SEQ ID NO: 20709
  REGION 1..469: note = neuraminidase__InfluenzaA__AGB13029

SEQ ID NO: 23263 - protein, 469 aa, synthetic construct; identical to SEQ ID NO: 20958
  REGION 1..469: note = neuraminidase__InfluenzaA__AGB13039

SEQ ID NO: 23264 - protein, 469 aa, synthetic construct; identical to SEQ ID NO: 20709
  REGION 1..469: note = neuraminidase__InfluenzaA__AGB13051

SEQ ID NO: 23265 - protein, 469 aa, synthetic construct
  REGION 1..469: note = neuraminidase__InfluenzaA__AGB13069
MNPNQKIITIGSICMTIGMANLILQIGNIISIWISHSIQLGNQNQIETCNQSVITYENNTWVNQTYVNISNTNFAAGQSVVSVKLAGNSSLCPVSGWAIYSKDNSIRIGSKGDVFVIREPFISCSPLECRTFFLTQGALLNDKHSNGTIKDRSPYRTLMSCPIGEVPSPYNSRFESVAWSASACHDGINWLTIGISGPDNGAVAVLKYNGIITDTIKSWRNNILRTQESECACVNGSCFTVMTDGPSDGQASYKIFRIEKGKIVKSVEMNAPNYHYEECSCYPDSSEITCVCRDNWHGSNRPWISFNQNLEYQIGYICSGIFGDNPRPNDKTGSCGPVSSNGANGVKGFSFKYGNGVWIGRTKSISSRNGFEMIWDPNGWTGTDNNFSIKQDIVGINEWSGYSGSFVQHPELTGLDCIRPCFWVELIRGRPKENTIWTSGSSISFCGVNSDTVGWSWPDGAELPFTIDK

SEQ ID NO: 23266 - protein, 469 aa, synthetic construct
  REGION 1..469: note = neuraminidase__InfluenzaA__AGB13074
MNPNQKIITIGSVCMTIGMANLILQIGNIISIWISHSIQLGNQNQIETCNQSVITYENNTWVNQTYVNISNTNFAAGQSVASVKLAGNSSLCPVSGWAIYSKDNSVRIGSKGDVFVIREPFISCSPLECRTFFLTQGALLNDKHSNGTIKDRSPYRTLMSCPIGEVPSPYNSRFESVAWSASACHDGINWLTIGISGPDNGAVAVLKYNGIITDTIKSWRNNILRTQESECACVNGSCFTVMTDGPSDGQASYKIFRIEKGKIVKSVEMNAPNYHYEECSCYPDSSEITCVCRDNWHGSNRPWVSFNQNLEYQIGYICSGIFGDNPRPNDKTGSCGPVSSNGANGVKGFSFKYGNGVWIGRTKSISSRNGFEMIWDPNGWTGTDNNFSIKQDIVGINEWSGYSGSFVQHPELTGLDCIRPCFWVELIRGRPKENTIWTSGSSISFCGVNSDTVGWSWPDGAELPFTIDK

SEQ ID NO: 23267 - protein, 469 aa, synthetic construct
  REGION 1..469: note = neuraminidase__InfluenzaA__AGB13115
MNPNQKIITIGSVCMTIGMANLILQIGNIISIWISHSIQLGNQNQIETCNQSVITYENNTWVNQTYVNISNTNFAAGQSVVSVKLAGNSSLCPVSGWAIYSKDNSIRIGSKGDVFVLREPFISCSPLECRTFFLTQGALLNDKHSNGTIKDRSPYRTLMSCPIGEVPSPYNSRFESVAWSASACHDGINWLTIGISGPDNGAVAVLKYNGIITDTIKSWRNNILRTQESECACVNGSCFTIMTDGPSDGQASYKIFRIEKGKIVKSVEMNAPNYHYEECSCYPDSSEITCVCRDNWRGSNRPWVSFNQNLEYQIGYICSGIFGDNPRPNDKTGSCGPVSSNGANGVKGFSFKYGNGVWIGRTKSISSRKGFEMIWDPNGWTGTDNNFSIKQDIVGINEWSGYSGSFVQHPELTGLDCIRPCFWVELIRGRPKENTIWTSGSSISFCGVNSDTVGWSWPDGAELPFTIDK

SEQ ID NO: 23268 - protein, 469 aa, synthetic construct; identical to SEQ ID NO: 20709
  REGION 1..469: note = neuraminidase__InfluenzaA__AGB13133

SEQ ID NO: 23269 - protein, 469 aa, synthetic construct; identical to SEQ ID NO: 20257
  REGION 1..469: note = neuraminidase__InfluenzaA__AGB13152

SEQ ID NO: 23270 - protein, 469 aa, synthetic construct; identical to SEQ ID NO: 20257
  REGION 1..469: note = neuraminidase__InfluenzaA__AGB13162

SEQ ID NO: 23271 - protein, 469 aa, synthetic construct; identical to SEQ ID NO: 21080
  REGION 1..469: note = neuraminidase__InfluenzaA__AGB13173

SEQ ID NO: 23272 - protein, 469 aa, synthetic construct
  REGION 1..469: note = neuraminidase__InfluenzaA__AGB13183
MNPNQKIITIGSVCMTIGMANLILQIGNIISIWISHSIQLGNQNQIETCNQSVITYENNTWVNQTYVNISNTNFAAGQSVVSVKLAGNSSLCPVSGWAIYSKDNSIRIGSKGDVFVIREPFISCSPLECRTFFLTQGALLNDKHSNGTIKDRSPYRTLMSCPIGEVPSPYNSRFESVAWSASACHDGINWLTIGISGQDNGAVAVLKYNGIITDTIKSWRNNILRTQESECACVNGSCFTIMTDGPSDGQASYKIFRIEKGKIVKSVEMNAPNYHYEECSCYPDSSEITCVCRDNWHGSNRPWVSFNQNLEYQIGYICSGIFGDNPRPNDKTGSCGPVSSNGANGVKGFSFKYGNGVWIGRTKSISSRKGFEMIWDPNGWTGTDNNFSIKQDIVGINEWSGYSGSFVQHPELTGLDCIRPCFWVELIRGRPKENTIWTSGSSISFCGVNSDTVGWSWPDGAELPFTIDK

SEQ ID NO: 23273 - protein, 469 aa, synthetic construct; identical to SEQ ID NO: 20709
  REGION 1..469: note = neuraminidase__InfluenzaA__AGB13193

SEQ ID NO: 23274 - protein, 469 aa, synthetic construct; identical to SEQ ID NO: 20776
  REGION 1..469: note = neuraminidase__InfluenzaA__AGB13203

SEQ ID NO: 23275 - protein, 469 aa, synthetic construct; identical to SEQ ID NO: 20709
  REGION 1..469: note = neuraminidase__InfluenzaA__AGB13213

SEQ ID NO: 23276 - protein, 469 aa, synthetic construct; identical to SEQ ID NO: 20709
  REGION 1..469: note = neuraminidase__InfluenzaA__AGB13223

SEQ ID NO: 23277 - protein, 469 aa, synthetic construct; identical to SEQ ID NO: 20709
  REGION 1..469: note = neuraminidase__InfluenzaA__AGB13233

SEQ ID NO: 23278 - protein, 469 aa, synthetic construct
  REGION 1..469: note = neuraminidase__InfluenzaA__AGB13243
MNPNQKIITIGSVCMTIGMANLILQIGNIISIWISHSIQLGNQNQIETCNQSVITYENNTWVNQTYVNISNTNFAAGQSVVSVKLAGNSSLCPVSGWAIYSKDNSIRIGSKGDVFVIREPFISCSPLECRTFFLTQGALLNDKHSNGTIKDRSPYRTLMSCPIGEVPSPYNSRFESVAWSASACHDGINWLTIGISGPDNGAVAVLKYNGIITDTIKSWRNNILRTQESECACVNGSCFTIMTDGPSDGQASYKIFRIERGKIVKSVEMNAPNYYYEECSCYPDSSEITCVCRDNWHGSNRPWVSFNQNLEYQIGYICSGVFGDNPRPNDKTGSCGPVSSNGANGVKGFSFKYGNGVWIGRTKSISSRKGFEMIWDPNGWTGTDNNFSIKQDIVGINEWSGYSGSFVQHPELTGLDCIRPCFWVELIRGRPKENTIWTSGSSISFCGVNSDTVGWSWPDGAELPFTIDK

SEQ ID NO: 23279 - protein, 469 aa, synthetic construct; identical to SEQ ID NO: 20776
  REGION 1..469: note = neuraminidase__InfluenzaA__AGB13253

SEQ ID NO: 23280 - protein, 469 aa, synthetic construct
  REGION 1..469: note = neuraminidase__InfluenzaA__AGB13263
MNPNQKIITIGSVCMTIGMANLILQIGNIISIWISHSIQLGNQNQTETCNQSVITYENNTWVNQTYVNISNTNFAAGQSVVSVKLAGNSSLCPVSGWAIYSKDNSIRIGSKGDVFVIREPFISCSPLECRTFFLTQGALLNDKHSNGTIKDRSPYRTLMSCPIGEVPSPYNSRFESVAWSASACHDGINWLTIGISGPDNGAVAVLKYNGIITDTIKSWRNNILRTQESECACVNGSCFTVMTDGPSDGQASYKIFRIEKGKIVKSVEMKAPNYHYEECSCYPDSSEITCVCRDNWHGSNRPWVSFNQNLEYRIGYICSGIFGDNPRPNDKTGSCGPVSSNGANGVKGFSFKYGNGVWIGRTKSISSRNGFEMIWDPNGWTGTDNNFSIKQDIIGINEWSGYSGSFVQHPELTGLDCIRPCFWVELIRGRPKENTIWTSGSSISFCGVNSDTVGWSWPDGAELPFTVDK

SEQ ID NO: 23281 - protein, 469 aa, synthetic construct; identical to SEQ ID NO: 20709
  REGION 1..469: note = neuraminidase__InfluenzaA__AGB13273

SEQ ID NO: 23282 - protein, 469 aa, synthetic construct
  REGION 1..469: note = neuraminidase__InfluenzaA__AGB13283
MNPNQKIITIGSVCMTIGMANLILQIGNIISIWISHSIQLGNQNQIETCNQSVITYENNTWVNQTYVNISNTNFAAGQSVVSVKLAGNSSLCPVSGWAIYSKDNSIRIGSKGDVFVIREPFISCSPLECRTFFLTQGALLNDKHSNGTIKDRSPYRTLMSCPIGEVPSPYNSRFESVAWSASACHDGINWLTIGISGPDNGAVAVLKYNGIITDTIKSWRNNILRTQESECACVNGSCFTIMTDGPSDGQASYKIFRIEKGKIVKSVEMNAPNYHYEECSCYPDSSEITCVCRDNWHGSNRPWVSFNQNLEYQIGYICSGIFGDNPRPNDKTGSCGPVSSNGANGVKGFSFKYGNGVWIGRTKSISSRRGFEMIWDPNGWTGTDNNFSIKQDIVGINEWSGYSGSFVQHPELTGLDCIRPCFWVELIRGRPKENTIWTSGSSISFCGVNSDTVGWSWPDGAELPFTIDK

SEQ ID NO: 23283 - protein, 469 aa, synthetic construct; identical to SEQ ID NO: 20709
  REGION 1..469: note = neuraminidase__InfluenzaA__AGB13293

SEQ ID NO: 23284 - protein, 469 aa, synthetic construct; identical to SEQ ID NO: 20709
  REGION 1..469: note = neuraminidase__InfluenzaA__AGB13303

SEQ ID NO: 23285 - protein, 469 aa, synthetic construct
  REGION 1..469: note = neuraminidase__InfluenzaA__AGB13313
MNPNQKIITIGSVCMTIGMANLILQIGNIISIWISHSIQLGNQNQIETCNQSVITYENNTWVNQTYVNISNTNFAAGQSVVSAKLAGNSSLCPVSGWAIYSKDNSIRIGSKGDVFVIREPFISCSPLECRTFFLTQGALLNDKHSNGTIKDRSPYRTLMSCPIGEVPSPYNSRFESVAWSASACHDGINWLTIGISGPDNGAVAVLKYNGIITDTIKSWRNNILRTQESECACVNGSCFTVMTDGPSDGQASYKIFRIEKGKIVKSVEMNAPNYHYEECSCYPDSSEITCVCRDNWHGSNRPWVSFNQNLEYQIGYICSGIFGDNPRPNDKKGSCGPVSSNGANGVKGFSFKYGNGVWIGRTKSISSRNGFEMIWDPNGWTGTDNNFSIKQDIVGINEWSGYSGSFVQHPELTGLDCIRPCFWVELIRGRPKENTIWTSGSSISFCGVNSDTVGWSWPDGAELPFTIDK

SEQ ID NO: 23286 - protein, 469 aa, synthetic construct; identical to SEQ ID NO: 20709
  REGION 1..469: note = neuraminidase__InfluenzaA__AGB13323

SEQ ID NO: 23287 - protein, 469 aa, synthetic construct
  REGION 1..469: note = neuraminidase__InfluenzaA__AGB13333
MNPNQKIITIGSVCMTIGMANLILQIGNIISIWISHSIQLGNQSQIETCNQSVITYENNTWVNQTYVNISNTNFAAGQSAVSVKLAGNSSLCPVSGWAIYSKDNSIRIGSKGDVFVIREPFISCSPLECRTFFLTQGALLNDKHSNGTIKDRSPYRTLMSCPIGEVPSPYNSRFESVAWSASACHDGINWLTIGISGPDNGAVAVLKYNGIITDTIKSWRNNILRTQESECACVNGSCFTIMTDGPSDGQASYKIFRIEKGKIVKSVEMNAPNYHYEECSCYPDSSEITCVCRDNWHGSNRPWVSFNQNLEYQIGYICSGIFGDNPRPNDKTGSCGPVSSNGANGVKGFSFKYGNGVWIGRTKSISSRKGFEMIWDPNGWTGTDNNFSIKQDIVGINEWSGYSGSFVQHPELTGLDCIRPCFWVELIRGRPKENTIWTSGSSISFCGVNSDTVGWSWPDGAELPFTIDK

SEQ ID NO: 23288 - protein, 469 aa, synthetic construct; identical to SEQ ID NO: 20709
  REGION 1..469: note = neuraminidase__InfluenzaA__AGB13343

SEQ ID NO: 23289 - protein, 469 aa, synthetic construct; identical to SEQ ID NO: 20958
  REGION 1..469: note = neuraminidase__InfluenzaA__AGB13353

SEQ ID NO: 23290 - protein, 469 aa, synthetic construct
  REGION 1..469: note = neuraminidase__InfluenzaA__AGB13363
MNPNQKIITIGSVCMTIGMANLILQIGNIISIWISHSIQLGNQNQIETCNQSVITYENNTWVNQTYVNISNTNFAAGQSVASVKLAGNSSLCSVSGWAIYSKDNSIRIGSKGDVFVIREPFISCSPLECRTFFLTQGALLNDKHSNGTIKDRSPYRTLMSCPIGEVPSPYNSRFESVAWSASACHDGINWLTIGISGPDNGAVAVLKYNGIITDTIKSWRNNILRTQESECACVNGSCFTIMTDGPSDGQASYKIFRIEKGKIVKSVEMNAPNYHYEECSCYPDSSEITCVCRDNWHGSNRPWVSFNQNLEYQIGYICSGIFGDNPRPNDKTGSCGPVSSNGANGVKGFSFKYGNGVWIGRTKSISSRKGFEMIWDPNGWTGTDNNFSIKQDIVGINEWSGYSGSFVQHPELTGLDCIRPCFWVELIRGRPKENTIWTSGSSISFCGVNSDTVGWSWPDGAELPFTIDK

SEQ ID NO: 23291 - protein, 469 aa, synthetic construct
  REGION 1..469: note = neuraminidase__InfluenzaA__AGB13383
MNPNQKIITIGSVCMTIGMANLILQIGNIISIWISHSIQLGNQNQIETCNQSVITYENNTWVNQTYVNISNTNFAAGQSVVSVKLAGNSSLCPVSGWAIYSKDNSIRIGSKGDVFVIREPFISCSPLECRTFFLTQGALLNDKHSNGTIKDRSPYRTLMSCPIGEVPSPYNSRFESVAWSASACHDGINWLTIGISGPDNGAVAVLKYNGIITDTIKSWRNNILRTQESECACVNGSCFTIMTDGPSDGQASYKIFRIEKGKIVKSVEMNAPNYHYEECSCYPDSSEITCVCRDNWHGSNRPWVSFNQNLEYQIGYICSGIFGDNPRPNDKTGSCGPVSSNGANGVKGFSFKYGSGVWIGRTKSISSRKGFEMIWDPNGWTGTDNNFSIKQDIVGINEWSGYSGSFVQHPELTGLDCIRPCFWVELIRGRPKENTIWTSGSSISFCGVNSDTVGWSWPDGAELPFTIDK

SEQ ID NO: 23292 - protein, 469 aa, synthetic construct; identical to SEQ ID NO: 20257
  REGION 1..469: note = neuraminidase__InfluenzaA__AGB13393

SEQ ID NO: 23293 - protein, 469 aa, synthetic construct; identical to SEQ ID NO: 20957
  REGION 1..469: note = neuraminidase__InfluenzaA__AGB13403

SEQ ID NO: 23294 - protein, 469 aa, synthetic construct; identical to SEQ ID NO: 20257
  REGION 1..469: note = neuraminidase__InfluenzaA__AGB13413

SEQ ID NO: 23295 - protein, 469 aa, synthetic construct; identical to SEQ ID NO: 20257
  REGION 1..469: note = neuraminidase__InfluenzaA__AGB13423

SEQ ID NO: 23296 - protein, 469 aa, synthetic construct; identical to SEQ ID NO: 20957
  REGION 1..469: note = neuraminidase__InfluenzaA__AGB13433

SEQ ID NO: 23297 - protein, 469 aa, synthetic construct; identical to SEQ ID NO: 20957
  REGION 1..469: note = neuraminidase__InfluenzaA__AGB13443

SEQ ID NO: 23298 - protein, 469 aa, synthetic construct
  REGION 1..469: note = neuraminidase__InfluenzaA__AGB13453
MNPNQKIITIGSVCMTIGMANLILQIGNIISIWISHSIQLGNQSQIETCNQSVITYENNTWVNQTYVNISNTNFAAGQSVVSVKLAGNSSLCPVSGWAIYSKDNSIRIGSKGDVFVIREPFISCSPLECRTFFLTQGALLNDKHSNGTIKDRSPYRTLMSCPIGEVPSPYNSRFESVAWSASACHDGINWLTIGISGPDNGAVAVLKYNGIITDTIKSWRNNILRTQESECACVNGSCFTIMTDGPSDGQASYKIFRIEKGKIVKSVEMNAPNYHYEECSCYPDSSEITCVCRDNWHGSNRPWVSFNQNLEYQIGYICSGIFGDNPRPNDKTGSCGPVSSNGANGVKGFSFKYGNGVWIGRTKSFSSRKGFEMIWDPNGWTGTDNNFSIKQDIVGINEWSGYSGSFVQHPELTGLDCIRPCFWVELIRGRPKENTIWTSGSSISFCGVNSDTVGWSWPDGAELPFTIDK

SEQ ID NO: 23299 - protein, 469 aa, synthetic construct; identical to SEQ ID NO: 20257
  REGION 1..469: note = neuraminidase__InfluenzaA__AGB13463

SEQ ID NO: 23300 - protein, 469 aa, synthetic construct; identical to SEQ ID NO: 20709
  REGION 1..469: note = neuraminidase__InfluenzaA__AGB13473

SEQ ID NO: 23301 - protein, 469 aa, synthetic construct
  REGION 1..469: note = neuraminidase__InfluenzaA__AGB13483
MNPNQKIITIGSVCMTIGMANLILQIGNIISIWISHSIQLGNQSQIETCNQSVITYENNTWVNQTYVNISNTNFAAGQSVVSVKLAGNSSLCPVSGWAIYSKDNSIRIGSKGDVFVIREPFISCSPLECRTFFLTQGALLNDKHSNGTIKDRSPYRTLMSCPIGEVPSPYNSRFESVAWSASACHDGINWLTIGISGPDNGAVAVLKYNGIITDTIKSWRNNILRTQESECACVNGSCFTIMTDGPSDGQASYKIFRIEKGKIVKSVEMNAPNYHYEECSCYPDSSEITCVCRDNWHGSNRPWVSFNQNLEYQIGYICSGIFGDNPRPNDKTGSCGPVSSNGANGVKGFSFKYGNGVWIGRTKSISSRKGFEMIWDPNGWTGTDNNFSIKQDIVGINEWSGYSGSFVQHPELTGLDCIRPCFWVELIRGQPKENTIWTSGSSISFCGVNSDTVGWSWPDGAELPFTIDK

SEQ ID NO: 23302 - protein, 469 aa, synthetic construct; identical to SEQ ID NO: 20994
  REGION 1..469: note = neuraminidase__InfluenzaA__AGB13493

SEQ ID NO: 23303 - protein, 469 aa, synthetic construct; identical to SEQ ID NO: 20786
  REGION 1..469: note = neuraminidase__InfluenzaA__AGB13503

SEQ ID NO: 23304 - protein, 469 aa, synthetic construct; identical to SEQ ID NO: 18200
  REGION 1..469: note = neuraminidase__InfluenzaA__AGB13513

SEQ ID NO: 23305 - protein, 469 aa, synthetic construct; identical to SEQ ID NO: 20992
  REGION 1..469: note = neuraminidase__InfluenzaA__AGB13523

SEQ ID NO: 23306 - protein, 469 aa, synthetic construct; identical to SEQ ID NO: 20992
  REGION 1..469: note = neuraminidase__InfluenzaA__AGB13533

SEQ ID NO: 23307 - protein, 469 aa, synthetic construct; identical to SEQ ID NO: 20709
  REGION 1..469: note = neuraminidase__InfluenzaA__AGB13543

SEQ ID NO: 23308 - protein, 469 aa, synthetic construct; identical to SEQ ID NO: 20709
  REGION 1..469: note = neuraminidase__InfluenzaA__AGB13553

SEQ ID NO: 23309 - protein, 469 aa, synthetic construct
  REGION 1..469: note = neuraminidase__InfluenzaA__AGB13563
MNPNQKIITIGSVCMTIGVANLILQIGNIISIWISHSIQLGNQNQIETCNQSVITYENNTWVNQTYVNISNTNFAAGQSVVSVNLAGNSSLCPVSGWAIYSKDNSIRIGSKGDVFVIREPFISCSPLECRTFFLTQGALLNDKHSNGTIKDRSPYRTLMSCPIGEVPSPYNSRFESVAWSASACHDGINWLTIGISGPDNGAVAVLKYNGIITDTIKSWRNNILRTQESECACVNGSCFTIMTDGPSDGQASYKIFRIEKGKIVKSVEMNAPNYHYEECSCYPDSSEITCVCRDNWHGSNRPWVSFNQNLEYQIGYICSGIFGDNPRPNDKTGSCGPVSSNGANGVKGFSFKYGNGVWIGRTKNISSRKGFEMIWDPNGWTGTDNNFSIKQDIVGINEWSGYSGSFVQHPELTGLDCIRPCFWVELIRGRPKENTIWTSGSSISFCGVNSDTVGWSWPDGAELPFTIDK

SEQ ID NO: 23310 - protein, 469 aa, synthetic construct; identical to SEQ ID NO: 20709
  REGION 1..469: note = neuraminidase__InfluenzaA__AGB13573

SEQ ID NO: 23311 - protein, 469 aa, synthetic construct
  REGION 1..469: note = neuraminidase__InfluenzaA__AGB13583
MNPNQKIITIGSVCMTIGMANLILQIGNIISIWISHSIQLGNQNQIETCNQSVITYENNTWVNQTYVNISNTNFAAGQSVGSVKLAGNSSLCPVSGWAIYSKDNSIRIGSKGDVFVIREPFISCSPLECRTFFLTQGALLNDKHSNGTIKDRSPYRTLMSCPIGEVPSPYNSRFESVAWSASACHDGINWLTIGISGPDNGAVAVLKYNGIITDTIKSWRNNILRTQESECACVNGSCFTIMTDGPSDGQASYKIFRIEKGKIVKSVEMNAPNYHYEECSCYPDSSEITCVCRDNWHGSNRPWVSFNQNLEYQIGYICSGIFGDNPRPNDKTGSCGPVSSNGANGVKGFSFKYGNGVWIGRTKSISSRKGFEMIWDPNGWTGTDNNFSIKQDIVGINEWSGYSGSFVQHPELTGLDCIRPCFWVELIRGRPKENTIWTSGSSISFCGVNSDTVGWSWPDGAELPFTIDK

SEQ ID NO: 23312 - protein, 469 aa, synthetic construct; identical to SEQ ID NO: 20709
  REGION 1..469: note = neuraminidase__InfluenzaA__AGB13593

SEQ ID NO: 23313 - protein, 469 aa, synthetic construct; identical to SEQ ID NO: 20709
  REGION 1..469: note = neuraminidase__InfluenzaA__AGB13603

SEQ ID NO: 23314 - protein, 469 aa, synthetic construct; identical to SEQ ID NO: 20709
  REGION 1..469: note = neuraminidase__InfluenzaA__AGB13613

SEQ ID NO: 23315 - protein, 469 aa, synthetic construct; identical to SEQ ID NO: 20709
  REGION 1..469: note = neuraminidase__InfluenzaA__AGB13623

SEQ ID NO: 23316 - protein, 469 aa, synthetic construct
  REGION 1..469: note = neuraminidase__InfluenzaA__AGB13633
MNPNQKIITIGSVCMTIGMANLILQIGNIISIWISHSIQLGNQSQIETCNQSVITYENNTWVNQTYVNISNTNFAAGQSVVSVKLAGNSSLCPVSGWAIYSKDNSIRIGSKGDVFVIREPFISCSPLECRTFFLTQGALLNDKHSNGTIKDRSPYRTLMSCPIGEVPSPYNSRFESVAWSASACHDGINWLTIGISGPDNGAVAVLKYNGIITDTIKSWRNNILRTQESECACVNGSCFTIMTDGPSDGQASYKIFRIEKGKIVKSVEMNAPNYHYEECSCYPDSSEITCVCRDNWHGSNRPWVSFNQNLEYQIGYICSGIFGDNPRPNDKTGSCGPVSSNGANGVKGFSFKYGNGVWIGRTKSISSRKGFEMIWDPNGWTGTDNNFSIKQDIVGINEWSGYSGSFVQHPELTGLDCIRPCFWVELIRGRPKENTIWTSGSIISFCGVNSDTVGWSWPDGAELPFTIDK

SEQ ID NO: 23317 - protein, 469 aa, synthetic construct
  REGION 1..469: note = neuraminidase__InfluenzaA__AGB13643
MNPNQKIITIGSVCMTIGMANLILQIGNIISIWISHSIQLGNQNQIETCNQSVITYENNTWVNQTYVNISNTNFAAGQSVVSVKLAGNSSLCPVSGWAIYSKDNGIRIGSKGDVFVIREPFISCSPLECRTFFLTQGALLNDKHSNGTIKDRSPYRTLMSCPIGEVPSPYNSRFESVAWSASACHDGINWLTIGISGPDNGAVAVLKYNGIITDTIKSWRNNILRTQESECVCVNGSCFTVMTDGPSDGQASYKIFRIEKGKIVKSVEMNAPNYHYEECSCYPDSSEITCVCRDNWHGSNRPWVSFNQNLEYQIGYICSGIFGDNPRPNDKTGSCGPVSSNGANGVKGFSFKYGNGVWIGRTKSISSRNGFEMIWDPNGWTGTDNNFSVKQDIIGINEWSGYSGSFVQHPELTGLDCIRPCFWVELIRGRPKENTIWTSGSSISFCGVNSDTVGWSWPDGAELPFTIDK

SEQ ID NO: 23318 - protein, 469 aa, synthetic construct
  REGION 1..469: note = neuraminidase__InfluenzaA__AGB13653
MNPNQKIITIGSVCMTIGMANLILQIGNIISIWISHSIQLGNQNQIETCNQSVITYENNTWVNQTYVNISNTNFAAGQSVVSVKLAGNSSLCPVSGWAIYSKDNSIRIGSKGDVFVIREPFISCSPLECRTFFLTQGALLNDKHSNGTIKDRSPYRTLMSCPIGEVPSPYNSRFESVAWSASACHDGINWLTIGISGPDNGAVAVLKYNGIITDTIKSWRNNILRTQESECVCVNGSCFTVMTDGPSDGQASYKIFRIEKGKIVKSVEMNAPNYHYEECSCYPDSSEITCVCRDNWHGSNRPWVSFNQNLEYQIGYICSGIFGDNPRPNDKTGSCGPVSSNGANGVKGFSFKYGNGVWIGRTKSISSRNGFEMIWDPNGWTGTDNNFSVKQDIIGINEWSGYSGSFVQHPELTGLDCIRPCFWVELIRGRPKENTIWTSGSSISFCGVNSDTVGWSWPDGAELPFTIDK

SEQ ID NO: 23319 - protein, 469 aa, synthetic construct; identical to SEQ ID NO: 20257
  REGION 1..469: note = neuraminidase__InfluenzaA__AGB13663

SEQ ID NO: 23320 - protein, 469 aa, synthetic construct; identical to SEQ ID NO: 20257
  REGION 1..469: note = neuraminidase__InfluenzaA__AGB13724

SEQ ID NO: 23321 - protein, 469 aa, synthetic construct; identical to SEQ ID NO: 20709
  REGION 1..469: note = neuraminidase__InfluenzaA__AGB13734

SEQ ID NO: 23322 - protein, 469 aa, synthetic construct; identical to SEQ ID NO: 17214
  REGION 1..469: note = neuraminidase__InfluenzaA__AGB51359

SEQ ID NO: 23323 - protein, 469 aa, synthetic construct
  REGION 1..469: note = neuraminidase__InfluenzaA__AGB97270
MNPNQKIITIGSVCMTIGMANLILQIGNIISIWISHSIQLRNQNQIETCNQSVITYENNTWVNQTYVNISNTNFAAGQSVVSVKLAGNSSLCPVSGWAIYSKDNSIRIGSKGDVFVIREPFISCSPLECRTFFLTQGALLNDKHSNGTIKDRSPYRTLMSCPIGEVPSPYNSRFESVAWSASACHDGINWLTIGISGPDNGAMAVLKYNGIITDTIKSWRNNILRTQESECACVNGSCFTIMTDGPSDGQASYKIFRIEKGKIVKSVEMNAPNYHYEECSCYPDSSEITCVCRDNWHGSNRPWVSFNQNLEYQIGYICSGIFGDNPRPNDKTGSCGPVSSNGANGVKGFSFKYGNGVWIGRTKSISSRKGFEMIWDPNGWTGTDNNFSIKQDIVGINEWSGYSGSFVQHPELTGLDCIRPCFWVELIRGRPKENTIWTSGSSISFCGVNSDTVGWSWPDGAELPFTIDK

SEQ ID NO: 23324 - protein, 469 aa, synthetic construct
  REGION 1..469: note = neuraminidase__InfluenzaA__AGB97274
MNPNQKIITIGSVCMTIGMANLILQIGNIISIWISHSIQLRNQNQIETCNQSVITYENNTWVNQTYVNISNTNFAAGQSVVSVKLAGNSSLCPVSGWAIYSKDNSIRIGSKGDVFVIREPFISCSPLECRTFFLTQGALLNDKHSNGTIKDRSPYRTLMSCPIGEVPSPYNSRFESVAWSASACHDGINWLTIGISGPDNGAVAVLKYNGIITDTIKSWRNNILRTQESECACVNGSCFTIMTDGPSDGQASYKIFRIEKGKIVKSVEMNAPNYHYEECSCYPDSSEITCVCRDNWHGSNRPWVSFNQNLEYQIGYICSGIFGDNPRPNDKTGSCGPVSSNGANGVKGFSFKYGNGVWIGRTKSISSRKGFEMIWDPNGWTGTDNNFSIKQDIVGINEWSGYSGSFVQHPELTGLDCIRPCFWVELIRGRPKENTIWTSGSSISFCGVNSDTVGWSWPDGAELPFTIDK

SEQ ID NO: 23325 - protein, 469 aa, synthetic construct; identical to SEQ ID NO: 22146
  REGION 1..469: note = neuraminidase__InfluenzaA__AGB97289

SEQ ID NO: 23326 - protein, 469 aa, synthetic construct
  REGION 1..469: note = neuraminidase__InfluenzaA__AGE15475
MNPNQKIITIGSVCMTIGMANLILQIGNIISIWISHSIQLGNQSQIETCNQSVITYENNTWVNQTYVNISNTNFAAGQSVVSVKLAGNSSLCPVSGWAIYSKDNSIRIGSKGDVFVIREPFISCSPLECRTFFLTQGSLLNDKHSNGTIKDRSPYRTLMSCPIGEVPSPYNSRFESVAWSASACHDGINWLTIGISGPDNGAVAVLKYNGIITDTIKSWRNNILRTQESECACVNGSCFTIMTDGPSDGQASYKIFRIEKGKIVKSVEMNAPNYHYEECSCYPDSSEITCVCRDNWHGSNRPWVSFNQNLEYQIGYICSGIFGDNPRPNDKTGSCGPVSSNGANGVKGFSFKYGNGVWIGRTKSISSRKGFEMIWDPNGWTGTDNYFSIKQDIVGINEWSGYSGSFVQHPELTGLDCIRPCFWVELIRGRPKENTIWTSGSSISFCGVNSDTVGWSWPDGAELPFSIDK

SEQ ID NO: 23327 - protein, 469 aa, synthetic construct
  REGION 1..469: note = neuraminidase__InfluenzaA__AGE15476
MNPNQKIITIGSVCMTIGMANLILQIGNIISIWISHSIQLGNQSQIETCNQSVITYENNTWVNQTYVNISNTNFAAGQSVVSVKLAGNSSLCPVSGWAIYSKDNSIRIGSKGDVFVIREPFISCSPLECRTFFLTQGSLLNDKHSNGTIKDRSPYRTLMSCPIGEVPSPYNSRFESVAWSASACHDGINWLTIGISGPDNGAVAVLKYNGIITDTIKSWRNNILRTQESECACVNGSCFTIMTDGPSDGQASYKIFRIEKGKIVKSVEMNAPNYHYEECSCYPDSSEITCVCRDNWHGSNRPWVSFNQNLEYQIGYICSGIFGDNPRPNDKTGSCGPVSSNGANGVKGFSFKYGNGVWIGRTKSISSRKGFEMIWDPNGWTGTDNYFSIKQDIVGINEWSGYSGSFVQHPELTGLDCIRPCFWVELIRGRPKENTIWTSGSSISFCGVNSDTVGWSWPDGAELPFTIDK

SEQ ID NO: 23328 - protein, 469 aa, synthetic construct; identical to SEQ ID NO: 23158
  REGION 1..469: note = neuraminidase__InfluenzaA__AGE15477

SEQ ID NO: 23329 - protein, 469 aa, synthetic construct
  REGION 1..469: note = neuraminidase__InfluenzaA__AGE15478
MNPNQKIITIGSVCMTIGMANLILQIGNIISIWISHSIQLGNQSQIETCNQSVITYENNTWVNQTYVNISNTNFAAGQSVVSVKLAGNSSLCPVSGWAIYSKDNSIRIGSKGDVFVIREPFISCSPLECRTFFLTQGSLLNDKHSNGTIKDRSPYRTLMSCPIGEVPSPYNSRFESVAWSASACHDGINWLTIGISGPDNGAVAVLKYNGIITDTIKSWRNNILRTQESECACVNGSCFTIMTDGPSDGQASYKIFRIEKGKIVKSVEMNAPNYHYEECSCYPDSSEITCVCRDNWHGSNRPWVSFNQNLEYQIGYICSGIFGDNPRPNDKTGSCGPVSSNGANGVKGFSFKYGNGVWIGRTKSISSRKGFEMIWDPNGWTGTDNYFSIKQDIVGINEWSGYSGSFVQHPELTGLDCIRPCFWVELIRGRPKENTIWTSGSSISFCGVKSDTVGWSWPDGAELPFTIDK

SEQ ID NO: 23330 - protein, 469 aa, synthetic construct
  REGION 1..469: note = neuraminidase__InfluenzaA__AGE15479
MNPNQKIITIGSVCMTIGMANLILQIGNIISIWISHSIQLGNQSQIETCNQSVITYENNTWVNQTYVNISNTNFAAGQSVVSVKLAGNSSLCPVSGWAIYSKDNSIRIGSKGDVFVIREPFISCSPLECRTFFLTQGSLLNDKHSNGTIKDRSPYRTLMSCPIGEVPSPYNSRFESVAWSASACHDGINWLTIGISGPDNGAVAVLKYNGIITDTIKSWRNNILRTQESECACVNGSCFTIMTDGPIDGQASYKIFRIEKGKIVKSVEMNAPNYHYEECSCYPDSSEITCVCRDNWHGSNRPWVSFNQNLEYQIGYICSGIFGDNPRPNDKTGSCGPVSSNGANGVKGFSFKYGNGVWIGRTKSISSRKGFEMIWDPNGWTGTDNYFSIKQDIVGINEWSGYSGSFVQHPELTGLDCIRPCFWVELIRGRPKENTIWTSGSSISFCGVNSDTVGWSWPDGAELPFTIDK

SEQ ID NO: 23331 - protein, 469 aa, synthetic construct; identical to SEQ ID NO: 23158
  REGION 1..469: note = neuraminidase__InfluenzaA__AGE15480

SEQ ID NO: 23332 - protein, 469 aa, synthetic construct; identical to SEQ ID NO: 18200
  REGION 1..469: note = neuraminidase__InfluenzaA__AGE89270

SEQ ID NO: 23333 - protein, 469 aa, synthetic construct; identical to SEQ ID NO: 18200
  REGION 1..469: note = neuraminidase__InfluenzaA__AGE89280

SEQ ID NO: 23334 - protein, 469 aa, synthetic construct
  REGION 1..469: note = neuraminidase__InfluenzaA__AGE89290
MNPNQKIITIGSVSLTISTICFFMQIAILITTVTLHFKQYEFNSPPNNQVMLCEPTIIERNITEIVYLTNTTIEKEICPKLAEYRNWSKPQCDITGFAPFSKDNSIRLSAGGDIWVTREPYVSCDPDKCYQFALGQGTTLNNVHSNNTVRDRTPYRTLLMNELGVPFHLGTKQVCIAWSSSSCHDGKAWLHVCITGDDKNATASFIYNGKLVDSVVSWSKEILRTQESECVCINGTCIVVMTDGSASGKADTKILFVEEGKIVHTSTLSGSAQHVEECSCYPRYPGVRCVCRDNWKGSNRPIVDINIKDHSIISSYVCSGLVGDTPRKNDSSSSSHCLDPNNEEGGHGVKGWAFDDGNDVWMGRTINETSRLGYETFKVIEGWSNPKSKLQINRQVIVDRGNRSGYSGIFSVEGKSCINRCFYVELIRGRKEETEVLWTSNSIVVFCGTSGTYGTGSWPDGADLNLMPI

SEQ ID NO: 23335 - protein, 469 aa, synthetic construct; identical to SEQ ID NO: 20257
  REGION 1..469: note = neuraminidase__InfluenzaA__AGE89301

SEQ ID NO: 23336 - protein, 469 aa, synthetic construct
  REGION 1..469: note = neuraminidase__InfluenzaA__AGE89311
MNPNQKIITIGSVCMTIGMANLILQIGNIISIWISHSIQLGNQNQIETCNQSVITYENNTWVNQTYVNISNTNFAAGQSVVSVKLAGNSSLCPVSGWAIYSKDNSIRIGSKGDVFVIREPFISCSPLECRTFFLTQGALLNDKHSNGTIKDRSPYRTLMSCPIGEVPSPYNSRFESVAWSASACHDGINWLTIGISGPDNGAVAVLKYNGIITDTIKSWKNNILRTQESECACVNGSCFTVMTDGPSDGQASYKIFRIEKGKIVKSVEMNAPNYHYEECSCYPDSSEITCVCRDNWHGSNRPWVSFNQNLEYRIGYICSGIFGDNPRPNDKTGSCGPVSSNGANGVKGFSFKYGNGVWIGRTKSISSRNGFEMIWDPNGWTGTDNNFSKKQDIIGINEWSGYSGSFVQHPELTGLDCIRPCFWVELIRGRPKENTIWTSGSSMSFCGVNSDTVGWSWPDGAELPFTIDK

SEQ ID NO: 23337 - protein, 469 aa, synthetic construct; identical to SEQ ID NO: 21787
  REGION 1..469: note = neuraminidase__InfluenzaA__AGE89321

SEQ ID NO: 23338 - protein, 469 aa, synthetic construct; identical to SEQ ID NO: 21143
  REGION 1..469: note = neuraminidase__InfluenzaA__AGE89332

SEQ ID NO: 23339 - protein, 469 aa, synthetic construct; identical to SEQ ID NO: 20257
  REGION 1..469: note = neuraminidase__InfluenzaA__AGE89343

SEQ ID NO: 23340 - protein, 469 aa, synthetic construct
  REGION 1..469: note = neuraminidase__InfluenzaA__AGE89353
MNPNQKIITIGSVSLTISTICFFMQIAILITTVTLHFKQYEFNSPPNNQVMLCEPTIIERNITEIVYLTNITIEKEICPKLAEYRNWSKPQCDITGFAPFSKDNSIRLSAGGDIWVTREPYVSCDPDKCYQFALGQGTTLNNVHSNNTVRDRTPYRTLLMNELGVPFHLGTKQVCIAWSSSSCHDGKAWLHVCITGDDKNATASFIYNGRLVDSVVSWSKEILRTQESECVCINGTCTVVMTDGSASGKADTKILFIEEGKIVHTSTLSGSAQHVEECSCYPRYPGVRCVCRDNWKGSNRPIVDINIKDHSIVSSYVCSGLVGDTPRKNDSSSSSHCLDPNNEEGGHGVKGWAFDDGNDVWMGRTINETSRLGYETFKVIEGWSNPKSKLQINRQVIVDKGNRSGYSGIFSVEGKSCINRCFYVELIRGRKEETEVLWTSNSIVVFCGTSGTYGTGSWPDGADLNLMPI

SEQ ID NO: 23341 - protein, 469 aa, synthetic construct; identical to SEQ ID NO: 20994
  REGION 1..469: note = neuraminidase__InfluenzaA__AGE89364

SEQ ID NO: 23342 - protein, 469 aa, synthetic construct; identical to SEQ ID NO: 21787
  REGION 1..469: note = neuraminidase__InfluenzaA__AGE89374

SEQ ID NO: 23343 - protein, 469 aa, synthetic construct
  REGION 1..469: note = neuraminidase__InfluenzaA__AGE89385
MNPNQKIITIGSVCMTIGMANLILQIGNIISIWISHSIQLGNQNQIETCNQSVITYENNTWVNQTYVNISNTNFAAGQSVASVKLAGNSSLCPVSGWAIYSKDNSIRIGSKGDVFVIREPFISCSPLECRTFFLTQGALLNDKHSNGTIKDRSPYRTLMSCPIGEVPSPYNSRFESVAWSASACHDGINWLTIGISGPDNGAVAVLKYNGIITDTIKSWRNNILRTQESECACVNGSCFTIMTDGPSDGQASYKIFRIEKGKIVKSVEMNAPNYHYEECSCYPDSSEITCVCRDNWHGSNRPWVSFNQNLEYQIGYICSGIFGDNPRPNDKTGSCGPVSSNGANGVKGFSFKYGNGVWIGRTKSISSRKGFEMIWDPNGWTGTDNNFSIKQDIVGINEWSGYSGSFVQHPELTGLDCIRPCFWVELIRGRPKENTIWTSGSSISFCGVNSDTVGWSWPDGAELPFTIDK

SEQ ID NO: 23344 - protein, 469 aa, synthetic construct
  REGION 1..469: note = neuraminidase__InfluenzaA__AGE89395
MNPNQKIITIGSVSLTISTICFFMQIAILITTVTLHFKQYEFNSPPNNQVMLCEPTIIERNITEIVYLTNTTIEKEICPKPAEYRNWSKPQCDITGFAPFSKDNSIRLSAGGDIWVTREPYVSCDPDKCYQFALGQGTTLNNVHSNNTVRDRTPYRTLLMNELGVPFHLGTKQVCIAWSSSSCHDGKAWLHVCITGDDKNATASFIYNGRLVDSVVSWSKEILRTQESECVCINGTCTVVMTDGSASGKADTKILFIEEGKIVHTSTLSGSAQHVEECSCYPRYPGVRCVCRDNWKGSNRPIVDINIKDHSIVSSYVCSGLVGDTPRKNDSSSSSHCLDPNNEEGGHGVKGWAFDDGNDVWMGRTINETSRLGYETFKVIEGWSNPKSKLQINRQVIVDRGNRSGYSGIFSVEGKSCINRCFYVELIRGRKEETEVLWTSNSIVVFCGTSGTYGTGSWPDGADLNLMPI

SEQ ID NO: 23345 - protein, 469 aa, synthetic construct; identical to SEQ ID NO: 18200
  REGION 1..469: note = neuraminidase__InfluenzaA__AGE89425

SEQ ID NO: 23346 - protein, 469 aa, synthetic construct; identical to SEQ ID NO: 19518
  REGION 1..469: note = neuraminidase__InfluenzaA__AGE89722

SEQ ID NO: 23347 - protein, 469 aa, synthetic construct
  REGION 1..469: note = neuraminidase__InfluenzaA__AGE89733
MNPNQKIITIGSVCMTIGMANLILQIGNIISIWISHSIQLGNQNQIETCNQSVITYENNTWVNQTYVNISNTNFAAGQSVVSVKLAGNSSLCPVSGWAIYSKDNSIRIGSKGDVFVIREPFISCSPLECRTFFLTQGALLNDKHSNGTIKDRSPYRTLMSCPIGEVPSPYNSRFESVAWSASACHDGINWLTIGISGPDNGAVAVLKYNGIITDTIKSWRNNILRTQESECACVNGSCFTIMTDGPNDGQASYKIFRIEKGKIVKSVEMNAPNYHYEECSCYPDSSEITCVCRDNWHGSNRPWVSFNQNLEYQIGYICSGIFGDNPRPNDKTGSCGPVSSNGANGVKGFSFKYGNGVWIGRTKSISSRKGFEMIWDPNGWTGTDNNFSIKQDIVGINEWSGYSGSFVQHPELTGLDCIRPCFWVELIRGRPKENTIWTSGSSISFCGVNSDTVGWSWPDGAELPFTIDK

SEQ ID NO: 23348 - protein, 469 aa, synthetic construct
  REGION 1..469: note = neuraminidase__InfluenzaA__AGE89743
MNPNQKIITIGSVSLTISTICFFMQIAILITTVTLHFKQYEFNSPPNNQVMLCEPTIIERNITEIVYLTNTTIEKEICPKLAEYRNWSKPQCDITGFAPFSKDNSIRLSAGGDIWVTREPYVSCDPDKCYQFALGQGTTLNNVHSNNTVRDRTPYRTLLMNELGVPFHLGTKQVCIAWSSSSCHDGKAWLHVCITGDDKNATASFIYNGRLVDSVVSWSKEILRTQESECVCINGTCTVVMTDGSASGKADTKILFIEEGKIVHTSTLSGSAQHVEECSCYPRYPGVRCVCRDNWKGSNRPIVDINIKDHSIVSSYVCSGLVGDTPRKNDSSSSSHCLDPNNEEGGHGVKGWAFDDGNDVWMGRTINETSRLGYETFKVIEGWSNPKSKLQINRQVIVDKDNRSGYSGIFSVEGKSCINRCFYVELIRGRKEETEVLWTSNSIVVFCGTSGTYGTGSWPDGADLNLMPI

SEQ ID NO: 23349 - protein, 469 aa, synthetic construct; identical to SEQ ID NO: 21787
  REGION 1..469: note = neuraminidase__InfluenzaA__AGE89754

SEQ ID NO: 23350 - protein, 469 aa, synthetic construct; identical to SEQ ID NO: 21787
  REGION 1..469: note = neuraminidase__InfluenzaA__AGE89765

SEQ ID NO: 23351 - protein, 469 aa, synthetic construct
  REGION 1..469: note = neuraminidase__InfluenzaA__AGG13414
MNPNQKIITIGSVSLTISTICFFMQIAILITTVTLHFKQYEFNSPPNNQVMLCEPTIIERNITEIVYLTNTTIEKEICPKPAEYRNWSKPQCDITGFAPFSKDNSIRLSAGGDIWVTREPYVSCDPDKCYQFALGQGTTLNSVHSNNTVRDRTPYRTLLMNELGVPFHLGTKQVCIAWSSSSCHDGKAWLHVCITGDDKNATASFIYNGRLVDSVVSWSKEILRTQESECVCINGTCTVVMTDGSASGKADTKILFIEEGKIVHTSTLSGSAQHVEECSCYPRYPGVRCVCRDNWKGSNRPIVDINIKDHSIVSRYVCSGLVGDTPRKNDSSSSSHCLDPNNEEGGHGVKGWAFDDGNDVWMGRTINETSRLGYETFKVIEGWSNPKSKLQINKQVIVDRGDRSGYSGIFSVEGKSCINRCFYVELIRGRKEETEVLWTSNSIVVFCGTSGTYGTGSWPDGADLNLMPI

SEQ ID NO: 23352 - protein, 469 aa, synthetic construct; identical to SEQ ID NO: 22146
  REGION 1..469: note = neuraminidase__InfluenzaA__AGG13426

SEQ ID NO: 23353 - protein, 469 aa, synthetic construct; identical to SEQ ID NO: 22146
  REGION 1..469: note = neuraminidase__InfluenzaA__AGG13438

SEQ ID NO: 23354 - protein, 469 aa, synthetic construct
  REGION 1..469: note = neuraminidase__InfluenzaA__AGG13498
MNPNQKIITIGSVSLTISTICFFMQIAILITTVTLHFKQYEFNSPPNNQVMLCEPTIIERNITEIVYLTNTTIEKEICPKLAEYRNWSKPQCDITGFAPFSKDNSIRLSAGGDIWVTREPYVSCDPDKCYQFALGQGTTLNNVHSNNTVRDRTPYRTLLMNELGVPFHLGTKQVCIAWSSSSCHDGKAWLHVCITGDDKNATASFIYNGRLVDSVVSWSKDILRTQESECVCINGTCAVVMTDGSASGKADTKILFIEEGKIVHTSTLSGSAQHVEECSCYPRYPGVRCVCRDNWKGSNRPIVDINIKDHSIVSSYVCSGLVGDTPRKNDSSSSGHCLDPNNEEGGHGVKGWAFDDGNDVWMGRTINETSRLGYETFKVIEGWSNPKSKLQINRQVIVDRGNRSGYSGIFSVEGKNCINRCFYVELIRGRKEETEVLWTSNSIVVFCGTSGTYGTGSWPDGADLNLMPI

SEQ ID NO: 23355 - protein, 469 aa, synthetic construct; identical to SEQ ID NO: 22146
  REGION 1..469: note = neuraminidase__InfluenzaA__AGG13510

SEQ ID NO: 23356 - protein, 469 aa, synthetic construct; identical to SEQ ID NO: 23354
  REGION 1..469: note = neuraminidase__InfluenzaA__AGG13522

SEQ ID NO: 23357 - protein, 469 aa, synthetic construct
  REGION 1..469: note = neuraminidase__InfluenzaA__AGG13534
MNPNQKIITIGSVSLTISTVCFFMQIAILITTVTLHFKQYEFNSPPNNQVMLCEPTIIERNITEIVYLTNTTIEKEICPKPAEYRNWSKPQCGITGFAPFSKDNSIRLSAGGDIWVTREPYVSCDPDKCYQFALGQGTTLNNVHSNNTVRDRTPYRTLLMNELGVPFHLGTKQVCIAWSSSSCHDGKAWLHVCITGDDKNATASFIYNGRLVDSVVSWSKEILRTQESECVCINGTCTVVMTDGSASGKADTKILFIEEGKIVHTSTLSGSAQHVEECSCYPRYPGVRCVCRDNWKGSNRPIVDINIKDHSIVSSYVCSGLVGDTPRKNDSSSSSHCLDPNNEEGGHGVKGWAFDDGNDVWMGRTINETSRLGYETFKVIEGWSNPKSKLQINRQVIVDRGDRSGYSGIFSVEGKSCINRCFYVELIRGRKEETEVLWTSNSIVVFCGTSGTYGTGSWPDGADLNLMPI

SEQ ID NO: 23358 - protein, 469 aa, synthetic construct
  REGION 1..469: note = neuraminidase__InfluenzaA__AGG13546
MNPNQKIITIGSVSLTISTICFFMQIAILITTVTLHFKQYEFNSPPNNQVMLCEPTIIERNITEIVYLTNTTIEKEICPKPAEYRNWSKPQCGITGFAPFSKDNSIRLSAGGDIWVTREPYVSCDPDKCYQFALGQGTTLNNVHSNNTVRDRTPYRTLLMNELGVPFHLGTKQVCIAWSSSSCHDGKAWLHVCITGDDKNATASFIYNGRLVDSVVSWSKEILRTQESECVCINGTCTVVMTDGSASGKADTKILFIEEGKIVHTSTLSGSAQHVEECSCYPRYPGVRCVCRDNWRGSNRPIVDINIKDHSIVSSYVCSGLVGDTPRKNDSSSSSHCLDPNNEEGGHGVKGWAFDDGNDVWMGRTINETSRLGYETFKVIEGWSNPKSKLQINRQVIVDRSDRSGYSGIFSVEGKSCINRCFYVELIRGRKEETEVLWTSNSIVVFCGTSGTYGTGSWPDGADLNLMPI

SEQ ID NO: 23359 - protein, 469 aa, synthetic construct; identical to SEQ ID NO: 22146
  REGION 1..469: note = neuraminidase__InfluenzaA__AGG13558

SEQ ID NO: 23360 - protein, 469 aa, synthetic construct; identical to SEQ ID NO: 22146
  REGION 1..469: note = neuraminidase__InfluenzaA__AGG13570

SEQ ID NO: 23361 - protein, 469 aa, synthetic construct
  REGION 1..469: note = neuraminidase__InfluenzaA__AGG13582
MNPNQKIITIGSVSLTISTICFFMQIAILITTVTLHFKQYEFNSPPNNQVMLCEPTIIERNITEIVYLTNTTIEKEICPKPAEYRNWSKPQCGITGFAPFSKDNSIRLSAGGDIWVTREPYVSCDPDKCYQFALGQGTTLNNVHSNNTVRDRTPYRTLLMNELGVPFHLGTKQVCIAWSSSSCHDGKAWLHVCITGEDKNATASFIYNGRLVDSVVSWSKETLRTQESECVCINGTCTVVMTDGSASGKADTKILFIEEGKIVHTSTLSGSAQHVEECSCYPRYPGVRCVCRDNWKGSNRPIVDINIKDHSIVSSYVCSGLVGDTPRKNDSSSSSHCLDPNNEEGGHGVKGWAFDDGNDVWMGRTINETSRLGYETFKVIEGWSNPKSKLQINRQVIVDRGDRSGYSGIFSVEGKSCINRCFYVELIRGRKEETEVLWTSNSIVVFCGTSGTYGTGSWPDGADLNLMPI

SEQ ID NO: 23362 - protein, 469 aa, synthetic construct; identical to SEQ ID NO: 22146
  REGION 1..469: note = neuraminidase__InfluenzaA__AGG13606

SEQ ID NO: 23363 - protein, 469 aa, synthetic construct
  REGION 1..469: note = neuraminidase__InfluenzaA__AGG13618
MNPNQKIITIGSVSLTISTICFFMQIAILITTVTLHFKQYEFNSPPNNQVMLCEPTIIERNITEIVYLTNTTIEKEICPKPAEYRNWSKPQCGITGFAPFSKDNSIRLSAGGDIWVTREPYVSCDPDKCYQFALGQGTTLNNVHSNNTVRDRTPYRTLLMNELGVPFHLGTKQVCIAWSSSSCHDGKAWLHVCITGDDKNATASFIYNGRLVDSVVSWSKEILRTQESECVCINGTCTVVMTDGSASGKADTKILFIEEGKIVHTSTLSGSAQHVEECSCYPRYPGVRCVCRDNWKGSNRPIVDINIKDHSIVSSYLCSGLVGDTPRKNDGSSSSHCLDPNNEEGGHGVKGWAFDDGNDVWMGRTINETSRLGYETFKVIEGWSNPKSKLQINRQIIVDRGDRSGYSGIFSVEGKSCINRCFYVELIRGRKEETEVLWTSNSIVVFCGTSGTYGTGSWPDGADLNLMPI

SEQ ID NO: 23364 - protein, 469 aa, synthetic construct
  REGION 1..469: note = neuraminidase__InfluenzaA__AGG13630
MNPNQKIITIGSVSLTISTICFFMQIAILITTVTLHFKQYEFNSPPNNQVMLCEPTIIERNITEIVYLTNTTIEKEICPKPAEYRNWSKPQCGITGFAPFSKDNSIRLSAGGDIWVTREPYVSCDPDKCYQFALGQGTTLNNVHSNNTVRDRTPYRTLLMNELGVPFHLGTKQVCIAWSSSSCHDGKAWLHVCITGEDKNATASFIYNGRLVDSVVSWSKEILRTQESECVCINGTCTVVMTDGSASGKADTKILFIEEGKIVHTSTLSGSAQHVEECSCYPRYPGVRCVCRDNWKGSNRPIVDINIKDHSIVSSYVCSGLVGDTPRKNDSSSSSHCLDPNNEEGGHGVKGWAFDDGNDVWMGRTINETSRLGYETFKVIEGWSNPKSKLQINRQVIVDRGDRSGYSGIFSVEGKSCINRCFYVELIRGRKEETEVLWTSNSIVVFCGTSGTYGTGSWPDGADLNLMPI

SEQ ID NO: 23365 - protein, 469 aa, synthetic construct; identical to SEQ ID NO: 22146
  REGION 1..469: note = neuraminidase__InfluenzaA__AGG13642

SEQ ID NO: 23366 - protein, 469 aa, synthetic construct
  REGION 1..469: note = neuraminidase__InfluenzaA__AGG13654
MNPNQKIITIGSVSLTISTICFFMQIAILITTVTLHFKQYEFNSPPNNQVMLCEPTIIERNITEIVYLTNTTIEKEICPKLAEYRNWSKPQCDITGFAPFSKDNSIRLSAGGDIWVTREPYVSCDPDKCYQFALGQGTTLNNVHSNNTVRDRTPYRTLLMNELGVPFHLGTKQVCIAWSSSSCHDGKAWLHVCITGDDKNATASFIYNGRLVDSVVSWSKDILRTQESECVCINGTCAVVMTDGSASGKADTKILFIEEGKIVQTSTLSGSAQHVEECSCYPRYPGVRCVCRDNWKGSNRPIVDINIKDHSIVSSYVCSGLVGDTPRKNDSSSSGHCLDPNNEEGGHGVKGWAFDDGNDVWMGRTINETSRLGYETFKVIEGWSNPKSKLQINRQVIVDRGNRSGYSGIFSVEGKNCINRCFYVELIRGRKEEIEVLWTSNSIVVFCGTSGTYGTGSWPDGADLNLMPI

SEQ ID NO: 23367 - protein, 469 aa, synthetic construct; identical to SEQ ID NO: 23357
  REGION 1..469: note = neuraminidase__InfluenzaA__AGG13666

SEQ ID NO: 23368 - protein, 469 aa, synthetic construct
  REGION 1..469: note = neuraminidase__InfluenzaA__AGG13678
MNPNQKIITIGSVSLTISTICFFMQIAILITTVTLHFKQYEFNSPPNNQVMLCEPTIIERNITEIVYLTNTTIEKEICPKPAEYRNWSKPQCGITGFAPLSKDNSIRLSAGGDIWVTREPYVSCDPDKCYQFALGQGTTLNNVHSNNTVRDRTPYRTLLMNELGVPFHLGTKQVCIAWSSSSCHDGKAWLHVCITGDDKNATASFIYNGRLVDSVVSWSKEILRTQESECVCINGTCTVVMTDGSASGKADTKILFIEEGKIVHTSTLSGSAQHVEECSCYPRYPGVRCVCRDNWKGSNRPIVDINIKDHSIVSSYVCSGLVGDTPRKNDSSSSSHCLGPNNEEGGHGVKGWAFDDGNDVWMGRTINETSRLGYETFKVIEGWSNPKSKLQINRQVIVDRGDRSGYSGIFSVEGKSCINRCFYVELIRGRKEETEVLWTSNSIVVFCGTAGTYGTGSWPDGADLNLMPI

SEQ ID NO: 23369 - protein, 469 aa, synthetic construct; identical to SEQ ID NO: 22146
  REGION 1..469: note = neuraminidase__InfluenzaA__AGG13690

SEQ ID NO: 23370 - protein, 469 aa, synthetic construct
  REGION 1..469: note = neuraminidase__InfluenzaA__AGG13702
MNPNQKIITIGSVSLTISTICFFMQIAILITTVTLHFKQYEFNSPPNNQVMLCEPTIIERNITEIVYLTNTTIEKEICPKPAEYRNWSKPQCDITGFAPFSKDNSIRLSAGGDIWVTREPYVSCDPDKCYQFALGQGTTLNNVHSNNTVRDRTPYRTLLMNELGVPFHLGTKQVCIAWSSSSCHDGKAWLHVCITGDDKNATASFIYNGRLVDSVVSWSKEILRTQESECVCINGTCTVVMTDGSASGKADTKILFIEEGKIVHTSTLSGNAQHVEECSCYPRYPGVRCVCRDNWKGSNRPIVDINIKDHSIVSRYVCSGLVGDTPRKNDSSSSSHCLDPNNEEGGHGVKGWAFDDGNDVWMGRTINETSRLGYETFKVIEGWSNPKSKLQINRQVIVDRGDRSGYSGIFSVEGKSCINRCFYVELIRGRKEETEVLWTSNSIVVFCGTSGTYGTGSWPDGADLNLMPI

SEQ ID NO: 23371 - protein, 469 aa, synthetic construct; identical to SEQ ID NO: 23354
  REGION 1..469: note = neuraminidase__InfluenzaA__AGG13714

SEQ ID NO: 23372 - protein, 469 aa, synthetic construct; identical to SEQ ID NO: 22146
  REGION 1..469: note = neuraminidase__InfluenzaA__AGG13726

SEQ ID NO: 23373 - protein, 469 aa, synthetic construct; identical to SEQ ID NO: 22146
  REGION 1..469: note = neuraminidase__InfluenzaA__AGG13738

SEQ ID NO: 23374 - protein, 469 aa, synthetic construct; identical to SEQ ID NO: 22146
  REGION 1..469: note = neuraminidase__InfluenzaA__AGG13750

SEQ ID NO: 23375 - protein, 469 aa, synthetic construct
  REGION 1..469: note = neuraminidase__InfluenzaA__AGG13762
MNPNQKIITIGSVSLTISTICFFMQIAILITTVTLHFKQYEFNSPPNNQVMLCEPTIIERNITEIVYLTNTTIEKEICPKPAEYRNWSKPQCDITGFAPFSKDNSIRLSAGGDIWVTREPYVSCDPDKCYQFALGQGTTLNNVHSNNTVRDRTPYRTLLMNELGVPFHLGTKQVCIAWSSSSCHDGKAWLHVCITGDDKNATASFIYNGRLVDSVVSWSKEILRTQESECVCINGTCTVVMTDGSASGKADTKILFIEEGKIVHTSTLSGSAQHVEECSCYPRYPGVRCVCRDNWKGSNRPIVDINIKDHSIVSRYVCSGLVGDTPRKNDSSSSSHCLDPNNEEGGHGVKGWAFDDGNDVWMGRTINETSRLGYETFKVIEGWSNPKSKLQINRQVIVDRGDRSGYSGIFSVEGKSCINRCFYVELIRGRKEETEVLWTSNSIVVFCGTSGTYGTGSWPDGADLNLMPI

SEQ ID NO: 23376 - protein, 469 aa, synthetic construct
  REGION 1..469: note = neuraminidase__InfluenzaA__AGG13774
MNPNQKIITIGSVSLTISTICFFMQIAILITTVTLHFKQYEFNSPPNNQVMLCEPTTIERNITEIVYLTNTTIEKEICPKLAEYRNWSKPQCDITGFAPFSKDNSIRLSAGGDIWVTREPYVSCDPDKCYQFALGQGTTLNNVHSNNTVRDRTPYRTLLMNELGVPFHLGTKQVCIAWSSSSCHDGKAWLHVCITGDDKNATASFIYNGRLVDSVVSWSKDILRTQESECVCINGTCAVVMTDGSASGKADTKILFIEEGKIVHTSTLSGSAQHVEECSCYPRYPGVRCVCRDNWKGSNRPIVDINIKDHSIVSSYVCSGLVGDTPRKNDSSSSGHCLDPNNEEGGHGVKGWAFDDGNDVWMGRTINETSRLGYETFKVIEGWSNPKSKLQINRQVIVDRGNRSGYSGIFSVEGKNCINRCFYVELIRGRKEETEVLWTSNSIVVFCGTSGTYGTGSWPDGADLNLMPI

SEQ ID NO: 23377 - protein, 469 aa, synthetic construct
  REGION 1..469: note = neuraminidase__InfluenzaA__AGG13786
MNPNQKIITIGSVSLTISTICFFMQIAILITTVTLHFKQYEFNSPPNNQVMLCEPTIIERNITEIVYLTNTTIEKEICPKPAEYRNWSKPQCGITGFAPFSKDNSIRLSAGGDIWVTREPYVSCDPDKCYQFALGQGTTLNNLHSNNTVRDRTPYRTLLMNELGVPFHLGTKQVCIAWSSSSCHDGKAWLHVCITGDDKNATASFIYNGRLVDSVVSWSKEILRTQESECVCINGTCTVVMTDGSASGKADTKILFIEEGKIVHTSTLSGSAQHVEECSCYPRYPGVRCVCRDNWKGSNRPIVDINIKDHSIVSSYVCSGLVGDTPRKNDSSSSSHCLDPNNEEGGHGVKGWAFDDGNDVWMGRTINETSRLGYETFKVIEGWSNPKSKLQINRQVIVDRGDRSGYSGIFSVEGKSCINRCFYVELIRGRKEETEVLWTSNSIVVFCGTSGTYGTGSWPDGADLNLMPI

SEQ ID NO: 23378 - protein, 469 aa, synthetic construct; identical to SEQ ID NO: 23354
  REGION 1..469: note = neuraminidase__InfluenzaA__AGG13798

SEQ ID NO: 23379 - protein, 469 aa, synthetic construct
  REGION 1..469: note = neuraminidase__InfluenzaA__AGG13810
MNPNQKIITIGSVSLTISTICFFMQIAILITTVTLHFKQYEFNSPPNNQVMLCEPTIIERNITEIVYLTNTTIEKEICPKPAEYRNWSKPQCDITGFAPFSKDNSIRLSAGGDIWVTREPYVSCDPDKCYQFALGQGTTLNNVHSNNTVRDRTPYRTLLMNELGVPFHLGTKQVCIAWSSSSCHDGKAWLHVCITGDDKNATASFIYNGRLVDSVVSWSKEILRTQESECVCINGTCTVVMTDGSASGKADTKILFIEEGKIVHTSTLSGSAQHVEECSCYPRYPGVRCVCRDNWKGSNRPIVDINIKDHSIVSRYVCSGLVGDTPRKNDSSSSSHCLGPNNEEGGHGVKGWAFDDGNDVWMGRTINETSRLGYETFKVIEGWSNPKSKLQINRQVIVDRGDRSGYSGIFSVEGKSCINRCFYVELIRGRKEETEVLWTSNSIVVFCGTSGTYGTGSWPDGADLNLMPI

SEQ ID NO: 23380 - protein, 469 aa, synthetic construct; identical to SEQ ID NO: 23354
  REGION 1..469: note = neuraminidase__InfluenzaA__AGG13822

SEQ ID NO: 23381 - protein, 469 aa, synthetic construct; identical to SEQ ID NO: 23354
  REGION 1..469: note = neuraminidase__InfluenzaA__AGG13834

SEQ ID NO: 23382 - protein, 469 aa, synthetic construct; identical to SEQ ID NO: 23375
  REGION 1..469: note = neuraminidase__InfluenzaA__AGG13846

SEQ ID NO: 23383 - protein, 469 aa, synthetic construct; identical to SEQ ID NO: 22146
  REGION 1..469: note = neuraminidase__InfluenzaA__AGG13858

SEQ ID NO: 23384 - protein, 469 aa, synthetic construct
  REGION 1..469: note = neuraminidase__InfluenzaA__AGG13870
MNPNQKIITIGSVSLTISTICFFMQIAILITTVTLHFKQYEFNSPPNNQVMLCEPTIIERNITEIVYLTNTTIEKEICPKPAEYRNWSKPQCGITGFAPFSKDNSIRLSAGGDIWVTREPYVSCDPDRCYQFALGQGTTLNNMHSNNTVRDRTPYRTLLMNELGVPFHLGTKQVCIAWSSSSCHDGKAWLHVCITGDDKNATASFIYNGRLVDSVVSWSKEILRTQESECVCINGTCTVVMTDGSASGKADTKILFIEEGKIVHTSTLSGSAQHVEECSCYPRYPGVRCVCRDNWKGSNRPIVDINIKDHSIVSSYVCSGLVGDTPRKNDSSSSSHCLDPNNEEGGHGVKGWAFDDGNDVWMGRTINETSRLGYETFKVIEGWSNPKSKLQINRQVIVDRGDRSGYSGIFSVEGTSCINRCFYVELIRGRKEETEVLWTSNSIVVFCGTSGTYGTGSWPDGADLNLMPI

SEQ ID NO: 23385 - protein, 469 aa, synthetic construct
  REGION 1..469: note = neuraminidase__InfluenzaA__AGG13894
MNPNQKIITIGSVSLTISTVCFFMQIAILITTVTLHFKQYEFNSPPNNQVMLCEPTIIERNVTEIVYLTNTTIEKEICPKPAEYRNWSKPQCGITGFAPFSKDNSIRLSAGGDIWVTREPYVSCDPDKCYQFALGQGTTLNNVHSNNTVRDRTPYRTLLMNELGVPFHLGTKQVCIAWSSSSCHDGKAWLHVCITGDDKNATASFIYNGRLVDSVVSWSKEILRTQESECVCINGTCTVVMTDGSASGKADTKILFIEEGKIVHTSTLSGSAQHVEECSCYPRYPGVRCVCRDNWKGSNRPIVDINIKDHSIVSSYVCSGLVGDTPRKNDSSSSSHCLDPNNEEGGHGVKGWAFDDGNDVWMGRTINETSRLGYETFKVIEGWSNPKSKLQINRQVIVDRGDRSGYSGIFSVEGKSCINRCFYVELIRGRKEETEVLWTSNSIVVFCGTSGTYGTGSWPDGADLNLMPI

SEQ ID NO: 23386 - protein, 469 aa, synthetic construct; identical to SEQ ID NO: 23354
  REGION 1..469: note = neuraminidase__InfluenzaA__AGG13906

SEQ ID NO: 23387 - protein, 469 aa, synthetic construct
  REGION 1..469: note = neuraminidase__InfluenzaA__AGG13930
MNPNQKIITIGSVSLTISTICFFMQIAILITTVTLHFKQYEFNSPPNNQVMLCEPTIIERNITEIVYLTNTTIEKEICPKPAEYRNWSKPQCGITGFAPFSKDNSIRLSAGGDIWVTREPYVSCDPDKCYQFALGQGTTLNNVHSNNTVRDRTPYRTLLMNELGVPFHLGTKQVCIAWSSSSCHDGKAWLHVCITGDDKNATASFIYNGRLVDSVVSWSKEILRTQESECVCINGTCTVVMTDGSASGKADTKILFIEEGKIVHTSTLSGSAQHVEECSCYPRYPGVRCVCRDNWKGSNRPIVDINIKDHSIVSSYVCSGLVGDTPRKNDRSSSSHCLDPNNEEGGHGVKGWAFDDGNDVWMGRTINETSRLGYETFKVIEGWSNPKSKLQINRQVIVDRGDRSGYSGIFSVEGKSCINRCFYVELIRGRKEETEVLWTSNSIVVFCGTSGTYGTGSWPDGADLNLMPI

SEQ ID NO: 23388 - protein, 469 aa, synthetic construct; identical to SEQ ID NO: 23364
  REGION 1..469: note = neuraminidase__InfluenzaA__AGG13942

SEQ ID NO: 23389 - protein, 469 aa, synthetic construct
  REGION 1..469: note = neuraminidase__InfluenzaA__AGG13965
MNPNQKIITIGSVCMTIGMANLILQIGNIISIWISHSIQLGNQSQIETCNQSVITYENNTWVNQTYVNISNTNFAAGQSVVSVKLAGNSSLCPVSGWAIYSKDNSVRIGSKGDVFVIREPFISCSPLECRTFFLTQGALLNDKHSNGTIKDRSPYRTLMSCPIGEVPSPYNSRFESVAWSASACHDGINWLTIGISGPDSGAVAVLKYNGIITDTIKSWRNNILRTQESECACVNGSCFTIMTDGPSDGQASYKIFRIEKGKIVKSVEMNAPNYHYEECSCYPDSSEITCVCRDNWHGSNRPWVSFNQNLEYQIGYICSGIFGDNPRPNDKTGSCGPVSSNGANGVKGFSFKYGNGVWIGRTKSISSRKGFEMIWDPNGWTGTDNNFSIKQDIVGINEWSGYSGSFVQHPELTGLDCIRPCFWVELIRGRPKENTIWTSGSSISFCGVNSDTVGWSWPDGAELPFTIDK

SEQ ID NO: 23390 - protein, 469 aa, synthetic construct; identical to SEQ ID NO: 23357
  REGION 1..469: note = neuraminidase__InfluenzaA__AGG13976

SEQ ID NO: 23391 - protein, 469 aa, synthetic construct; identical to SEQ ID NO: 23357
  REGION 1..469: note = neuraminidase__InfluenzaA__AGG13988

SEQ ID NO: 23392 - protein, 469 aa, synthetic construct; identical to SEQ ID NO: 23357
  REGION 1..469: note = neuraminidase__InfluenzaA__AGG14000

SEQ ID NO: 23393 - protein, 469 aa, synthetic construct; identical to SEQ ID NO: 23357
  REGION 1..469: note = neuraminidase__InfluenzaA__AGG14012

SEQ ID NO: 23394 - protein, 469 aa, synthetic construct; identical to SEQ ID NO: 23375
  REGION 1..469: note = neuraminidase__InfluenzaA__AGG14024

SEQ ID NO: 23395 - protein, 469 aa, synthetic construct
  REGION 1..469: note = neuraminidase__InfluenzaA__AGG14036
MNPNQKIITIGSVSLTISTICFFMQIAILITTVTLHFKQYEFNSPPNNQVMLCEPTIIERNITEIVYLTNTTIEKEICPKLAEYRNWSKPQCDITGFAPFSKDNSIRLSAGGDIWVTREPYVSCDPDKCYQFALGQGTTLNNVHSNNTVRDRTPYRTLLMNELGVPFHLGTKQVCIAWSSSSCHDGKAWLHVCITGDDKNATASFIYNGRLVDSVVSWSKDILRTQESECVCINGTCAVVMTDGSASGKADTKILFIEEGKIVHTSTLSGSAQHVEECSCYPRYPGVRCVCRDNWKGSNRPIVDINIKDHSIVSSYMCSGLVGDTPRKNDSSSSGHCLDPNNEEGGHGVKGWAFDDGNDVWMGRTINETSRLGYETFKVIEGWSNPKSKLQINRQVIVDRGNRSGYSGIFSVEGKNCINRCFYVELIRGRKEETEVLWTSNSIVVFCGTSGTYGTGSWPDGADLNLMPI

SEQ ID NO: 23396 - protein, 469 aa, synthetic construct; identical to SEQ ID NO: 23375
  REGION 1..469: note = neuraminidase__InfluenzaA__AGG14321

SEQ ID NO: 23397 - protein, 469 aa, synthetic construct; identical to SEQ ID NO: 22146
  REGION 1..469: note = neuraminidase__InfluenzaA__AGG14333

SEQ ID NO: 23398 - protein, 469 aa, synthetic construct; identical to SEQ ID NO: 21787
  REGION 1..469: note = neuraminidase__InfluenzaA__AGG84182

SEQ ID NO: 23399 - protein, 465 aa, synthetic construct
  REGION 1..465: note = neuraminidase__InfluenzaA__AGJ51955
MNPNQKILCTSATAIIIGAIAVLIGIANLGLNIGLHLKPGCNCSHSQPETTNTSQTIINNYYNETNITNIQMEERTSRNFNNLTKGLCTINSWHIYGKDNAVRIGESSDVLVTREPYVSCDPDECRFYALSQGTTIRGKHSNGTIHDRSQYRALISWPLSSPPTVYNSRVECIGWSSTSCHDGKSRMSICISGPNNNASAVVWYNRRPVAEINTWARNILRTQESECVCHNGVCPVVFTDGSATGPADTRIYYFKEGKILKWESLTGTAKHIEECSCYGERTGITCTCRDNWQGSNRPVIQIDPVAMTHTSQYICSPVLTDNPRPNDPNIGKCNDPYPGNNNNGVKGFSYLDGANTWLGRTISTASRSGYEMLKVPNALTDDRSKPIQGQTIVLNADWSGYSGSFMDYWAEGDCYRACFYVELIRGRPKEDKVLWTGDSIVSMCSSTEFLGQWNWPDGAKIEYFL

SEQ ID NO: 23400 - protein, 465 aa, synthetic construct
  REGION 1..465: note = neuraminidase__InfluenzaA__AGJ72863
MNPNQKILCTSATAIIIGAIAVLIGIANLGLNIGLHLKPGCNCSHSQPETTNTSQTIINNYYNETNITNIQMEERTSRNFNNLTKGLCTINSWHIYGKDNAVRIGESSDVLVTREPYVSCDPDECRFYALSQGTTIRGKHSNGTIHDRSQYRALISWPLSSPPTVYNSRVECIGWSSTSCHDGKSRMSICISGPNNNASAVVWYNRRPVAEINTWARNILRTQESECVCHNGVCPVVFTDGSATGPADTRIYYFKEGKILKWESLTGTAKHIEECSCYGERTGITCTCRDNWQGSNRPVIQIDPVAMTHTSQYICSPVLTDNPRPNDPNIGKCNDPYPGNNNNGVKGFSYLDGANTWLGRTISTASRSGYEMLKVPNALTDDRSKPIQGQTIVLNADWSGYSGSFMDYWAEGDCYRACFYVEVIRGRPKEDKVWWAGNSIVSMCSSTEFLGQWNWPDGAKIEYFL

SEQ ID NO: 23401 - protein, 469 aa, synthetic construct
  REGION 1..469: note = neuraminidase__InfluenzaA__AGJ73328
MNPNQKIITIGSVCMTIGMANLILQIGNIISIWISHSIQLGNQSQIETCNQSVITYENNTWVNQTYVNISNTNFAAGQSVVSVKLAGNSSLCPVSGWAIYSKDNSVRIGSKGDVFVIREPFISCSPLECRTFFLTQGALLNDKHSNGTIKDRSPYRTLMSCPIGEVPSPYNSRFESVAWSASACHDGINWLTIGISGPDSGAVAVLKYNGIITDTIKSWRNNILRTQESECACVNGSCFTIMTDGPSDGQASYKIFRIEKGKIVKSVEMNAPNYHYEECSCYPDSSEITCVCRDNWHGSNRPWVSFNQNLEYQIGYICSGIFGDNPRPNDKTGSCGPVSSNGANGVKGFSFKYGNGVWIGRTKSISSRKGFEMIWDPNGWNGTDNNFSIKQDIVGINEWSGYSGSFVQHPELTGLDCIRPCFWVELIRGRPKENTIWTSGSSISFCGVNSDTVGWSWPDGAELPFTIDK

SEQ ID NO: 23402 - protein, 469 aa, synthetic construct; identical to SEQ ID NO: 20257
  REGION 1..469: note = neuraminidase__InfluenzaA__AGJ73330

SEQ ID NO: 23403 - protein, 469 aa, synthetic construct
  REGION 1..469: note = neuraminidase__InfluenzaA__AGJ73332
MNPNQKIITIGSVCMTIGMANLILQIGNIISIWISHSIQLGNQNQIETCNQSVITYENNTWVNQTYVNISNTNFAAGQSVVSVKLAGNSSLCPVSGWAIYSKDNSIRIGSKGDVFVIREPFISCSPLECRTFFLTQGALLNDKHSNGTIKDRSPYRTLMSCPIGEVPSPYNSRFESVAWSASACHDGINWLTIGISGPDNGAVAVLKYNGIITDTIKSWRNNILRTQESECACVNGSCFTVMTDGPSDGQASYKIFRIEKGKIVKSVEMNAPNYHYEECSCYPDSSEITCVCRDNWHGSNRPWVSFNHNLEYQIGYICSGIFGDNPRPNDKTGSCGPVSSNGANGVKGFSFKYGNGVWIGRTKSISSRNGFEMIWDPNGWTGTDNNFSIKQDIIGINEWSGYSGSFVQHPELTGLDCIRPCFWVELIRGRPKENTIWTSGSSISFCGVNSDTVGWSWPDGAELPFTIDK

SEQ ID NO: 23404 - protein, 469 aa, synthetic construct; identical to SEQ ID NO: 20257
  REGION 1..469: note = neuraminidase__InfluenzaA__AGJ73334

SEQ ID NO: 23405 - protein, 469 aa, synthetic construct; identical to SEQ ID NO: 20257
  REGION 1..469: note = neuraminidase__InfluenzaA__AGJ73336

SEQ ID NO: 23406 - protein, 469 aa, synthetic construct; identical to SEQ ID NO: 20257
  REGION 1..469: note = neuraminidase__InfluenzaA__AGJ73338

SEQ ID NO: 23407 - protein, 469 aa, synthetic construct
  REGION 1..469: note = neuraminidase__InfluenzaA__AGJ73340
MNPNQKIITIGSVCMTIGMANLILQIGNIISIWISHSIQLGNQSQIETCNQSVITYENNTWVNQTYVNISNTNFAAGQSVVSVKLAGNSSLCPASGWAIYSKDNSIRIGSKGDVFVIREPFISCSPLECRTFFLTQGALLNDKHSNGTIKDRSPYRTLMSCPIGEVPSPYNSRFESVAWSASACHDGINWLTIGISGPDNGAVAVLKYNGIITDTIKSWRNNILRTQESECACVNGSCFTIMTDGPSDGQASYKIFRIEKGKIVKSVEMNAPNYHYEECSCYPDSSEITCVCRDNWHGSNRPWVSFNQNLEYQIGYICSGIFGDNPRPNDKTGSCGPVSSNGANGVKGFSFKYGNGVWIGRTKSISSRKGFEMIWDPNGWTGTDNNFSIKQDIVGINEWSGYSGSFVQHPELTGLDCIRPCFWVELIRGRPKENTIWTSGSSISFCGVNSDTVGWSWPDGAELPFTIDK

SEQ ID NO: 23408 - protein, 469 aa, synthetic construct
  REGION 1..469: note = neuraminidase__InfluenzaA__AGJ73342
MNPNQKIITIGSVCMTIGMANLILQIGNIISIWISHSIQLGNQSQIETCNQSVITYENNTWVNQTYVNISNTNFAAGQSVVSVKLAGNSSLCPVSGWAIYSKDNSIRIGSKGDVFVIREPFISCSPLECRTFFLTQGALLNDKHSNGTIKDRSPYRTLMSCPIGEVPSPYNSRFESVAWSASACHDGINWLTIGISGPDNGAVAVLKYNGIITDTIKSWRNNILRTQESECACVNGSCFTIMTDGPSDGQASYKIFRIEKGKIVKSVEMNAPNYHYEECSCYPDSSEITCVCRDNWHGSNRPWVSFNQNLEYQIGYICSGIFGDNPRPNDKTGSCGPVSSNGANGVKGFSFKYGNGVWIGRTKSISSRKGFEMIWDPNGWTGTDNNFSIKQDIVGINEWSGYSGSFVQHPELTGLDCIRPCFWVELIRGRPKENTIWTSGSSISFCGVNSGTVGWSWPDGAELPFTIDK

SEQ ID NO: 23409 - protein, 469 aa, synthetic construct; identical to SEQ ID NO: 20709
  REGION 1..469: note = neuraminidase__InfluenzaA__AGJ73344

SEQ ID NO: 23410 - protein, 469 aa, synthetic construct
  REGION 1..469: note = neuraminidase__InfluenzaA__AGJ73346
MNPNQKIITIGSVCMTIGMANLILQIGNIISIWISHSIQLGNQNQIEKCNQSVITYENNTWVNQTYVNISNTNFAAGQSVVSVKLAGNSSLCPVSGWAIYSKDNSIRIGSKGDVFVIREPFISCSPLECRTFFLTQGALLNDKHSNGTIKDRSPYRTLMSCPIGEVPSPYNSRFESVAWSASACHDGINWLTIGISGPDNGAVAVLKYNGIITDTIKSWRNNILRTQESECACVNGSCFTIMTDGPSDGQASYKIFRIEKGKIVKSVEMNAPNYHYEECSCYPDSSEITCVCRDNWHGSNRPWVSFNQNLEYQIGYICSGIFGDNPRPNDKTGSCGPVSSNGANGVKGFSFKYGNGVWIGRTKSISSRKGFEMIWDPNGWTGTDNNFSIKQDIVGINEWSGYSGSFVQHPELTGLDCIRPCFWVELIRGRPKESTIWTSGSSISFCGVNSDTVGWSWPDGAELPFTIDK

SEQ ID NO: 23411 - protein, 469 aa, synthetic construct
  REGION 1..469: note = neuraminidase__InfluenzaA__AGJ73348
MNPNQKIITIGSVCMTIGMANLILQIGNIISIWISHSIQLGNQNQIETCNQSVITYENNTWVNQTYVNISNTNFAAGQSVISVKLAGNSSLCPVSGWAIYSKDNSIRIGSKGDVFVIREPFISCSPLECRTFFLTQGALLNDKHSNGTIKDRSPYRTLMSCPIGEVPSPYNSRFESVAWSASACHDGINWLTIGISGPDNGAVAVLKYNGIITDTIKSWRNNILRTQESECACVNGSCFTIMTDGPSDGQASYKIFRIEKGKIVKSVEMNAPNYHYEECSCYPDSSEITCVCRDNWHGSNRPWVSFNQNLEYQIGYICSGIFGDNPRPNDKTGSCGPVSSNGANGVKGFSFKYGNGVWIGRTKSISSRKGFEMIWDPNGWTGTDNNFSIKQDIVGINEWSGYSGSFVQHPELTGLDCIRPCFWVELIRGRPKENTIWTSGSSISFCGVNSDTVGWSWPDGAELPFTIDK

SEQ ID NO: 23412 - protein, 469 aa, synthetic construct
  REGION 1..469: note = neuraminidase__InfluenzaA__AGJ73350
MNPNQKIITIGSVCMTIGMANLILQIGNIISIWISHSIQLGNQNQIETCNQSVITYENNTWVNQTYVNISNTNFAAGQSVVSVKLAGNSSLCPVSGWAIYSKDNSIRIGSKGDVFVIREPFISCSPLECRTFFLTQGALLNDEHSNGTIKDRSPYRTLMSCPIGEVPSPYNSRFESVAWSASACHDGINWLTIGISGPDNGAVAVLKYNGIITDTIKSWRNNILRTQESECACVNGSCFTIMTDGPSDGQASYKIFRIEKGKIVKSVVMNAPNYHYEECSCYPDSSEITCVCRDNWHGSNRPWVSFNQNLEYQIGYICSGIFGDNPRPNDKTGSCGPVSSNGANGVKGFSFKYGNGVWIGRTKSISSRKGFEMIWDPNGWTGTDNNFSIKQDIVGINEWSGYSGSFVQHPELTGLDCIRPCFWVELIRGRPKENTIWTSGSSISFCGVNSDTVGWSWPDGAELPFTIDK

SEQ ID NO: 23413 - protein, 469 aa, synthetic construct
  REGION 1..469: note = neuraminidase__InfluenzaA__AGJ73352
MNPNQKIITIGSVCMTIGMANLILQIGNIISIWISHSIQLGNQSQIETCNQSVITYENNTWVNQTYVNISNTNFAAGQSVVSVKLVGNSSLCPVSGWAIYSKDNSIRIGSKGDVFVIREPFISCSPLECRTFFLTQGALLNDKHSNGTIKDRSPYRTLMSCPIGEVPSPYNSRFESVAWSASACHDGINWLTIGISGPDNGAVAVLKYNGIITDTIKSWRNNILRTQESECACVNGSCFTIMTDGPSDGQASYKIFRIEKGKIVKSVEMNAPNYHYEECSCYPDSSEITCVCRDNWHGSNRPWVSFNQNLEYQIGYICSGIFGDSPRPNDKTGSCGPVSSNGANGVKGFSFKYGNGVWIGRTKSISSRKGFEMIWDPNGWTGTDNNFSIKQDIVGINEWSGYSGSFVQHPELTGLDCIRPCFWVELIRGRPKENTIWTSGSSISFCGVNSDTVGWSWPDGAELPFTIDK

SEQ ID NO: 23414 - protein, 469 aa, synthetic construct; identical to SEQ ID NO: 20709
  REGION 1..469: note = neuraminidase__InfluenzaA__AGJ73354

SEQ ID NO: 23415 - protein, 469 aa, synthetic construct
  REGION 1..469: note = neuraminidase__InfluenzaA__AGJ73356
MNPNQKIITIGSVCMTIGMANLILQIGNIISIWISHSIQLGNQSQIETCNQSVITYENNTWVNQTYFNISNTNFAAGQSVVSVKLAGNSSLCPVSGWAIYSKDNSIRIGSKGDVFVIREPFISCSPLECRTFFLTQGALLNDKHSNGTIKDRSPYRTLMSCPIGEVPSPYNSRFESVAWSASACHDGINWLTIGISGPDNGAVAVLKYNGIITDTIKSWRNNILRTQESECACVNGSCFTIMTDGPSDGQASYKIFRIEKGKIVKSVEMNAPNYHYEECSCYPDSSEITCVCRDNWHGSNRPWVSFNQNLEYQIGYICSGIFGDNPRPNDKTGSCGPVSSNGANGVKGFSFKYGNGVWIGRTKSISSRKGFEMIWDPNGWTGTDNNFSIKQDIVGINEWSGYSGSFVQHPELTGLDCIRPCFWVELIRGRPKENTIWTSGSSISFCGVNSDTVGWSWPDGAELPFTIDK

SEQ ID NO: 23416 - protein, 469 aa, synthetic construct; identical to SEQ ID NO: 20709
  REGION 1..469: note = neuraminidase__InfluenzaA__AGJ73358

SEQ ID NO: 23417 - protein, 469 aa, synthetic construct; identical to SEQ ID NO: 20709
  REGION 1..469: note = neuraminidase__InfluenzaA__AGJ73360

SEQ ID NO: 23418 - protein, 469 aa, synthetic construct
  REGION 1..469: note = neuraminidase__InfluenzaA__AGJ73362
MNPNQKIITIGSVCMTIGMANLILQIGNIISIWISHSIQLGNQSQIETCNQSVITYENNTWVNQTYVNISNTNFADGQSVVSVKLAGNSSLCPVSGWAIYSKDNSIRIGSKGDVFVIREPFISCSPLECRTFFLTQGALLNDKHSNGTIKDRSPYRTLMSCPIGEVPSPYNSRFESVAWSASACHDGINWLTIGISGPDNGAVAVLKYNGIITDTIKSWRNNILRTQESECACVNGSCFTIMTDGPSDGQASYKIFRIEKGKIVKSVEMNAPNYHYEECSCYPDSSEITCVCRDNWHGSNRPWVSFNQNLEYQIGYICSGIFGDNPRPNDKTGSCGPVSSNGANGVKGFSFKYGNGVWIGRTKSISSRKGFEMIWDPNGWTGTDNNFSIKQDIVGINEWSGYSGSFVQHPELTGLDCIRPCFWVELIRGRPKENTIWTSGSSISFCGVNSDTVGWSWPDGAELPFTIDK

SEQ ID NO: 23419 - protein, 469 aa, synthetic construct; identical to SEQ ID NO: 21832
  REGION 1..469: note = neuraminidase__InfluenzaA__AGJ73364

SEQ ID NO: 23420 - protein, 469 aa, synthetic construct; identical to SEQ ID NO: 20709
  REGION 1..469: note = neuraminidase__InfluenzaA__AGJ73366

SEQ ID NO: 23421 - protein, 469 aa, synthetic construct; identical to SEQ ID NO: 20257
  REGION 1..469: note = neuraminidase__InfluenzaA__AGJ73370

SEQ ID NO: 23422 - protein, 469 aa, synthetic construct
  REGION 1..469: note = neuraminidase__InfluenzaA__AGJ73372
MNPNQKIITIGSVCMTIGMANLILQIGNIISIWISHSIQLGNQNQIETCNQSVITYENNTWVNQTYVNISNTNFAAGQSVVSVKLAGNSSLCPVSGWAIYSKDNSIRIGSKGDVFVIREPFISCSPLECRTFFLTQGALLNDKHSNGTIKDRSPYRTLMSCPIGEVPSPYNSRFESVAWSASACHDGINWLTIGISGPDNGAVAVLKYNGIITDTIKSWRNNILRTQESECACVNGSCFTIMTDGPSDGQASYKIFRIEKGKIVKSVEMNAPNYHYEECSCYPDSSEITCVCRDNWHGSNRPWVSFNHNLEYQIGYICSGIFGDNPRPNDKTGSCGPVSSNGANGVKGFSFKYGNGVWIGRTKSISSRKGFEMIWDPNGWTGTDNNFSIKQDIVGINEWSGYSGSFVQHPELTGLDCIRPCFWVELIRGRPKENTIWTSGSSISFCGVNSDTVGWSWPDGAELPFTIDK

SEQ ID NO: 23423 - protein, 469 aa, synthetic construct; identical to SEQ ID NO: 20257
  REGION 1..469: note = neuraminidase__InfluenzaA__AGJ73374

SEQ ID NO: 23424 - protein, 469 aa, synthetic construct
  REGION 1..469: note = neuraminidase__InfluenzaA__AGJ73376
MNPNQKIITIGSVCMTIGMANLILQIGNIISIWISHSIQLGNQSQIETCNQSVITYENNTWVNQTYVNISNTNFAAGQSVVSVKLAGNSSLCPVSGWAIYSKDNSVRIGSKGDVFVIREPFISCSPLECRTFFLTQGALLNDKHSNGTIKDRSPYRTLMSCPIGEVPSPYNSRFESVAWSASACHDGINWLTIGISGPDSGAVAVLKYNGIITDTIKSWRNNILRTQESECACVNGSCFTIMTDGPSDGQASYKILRIEKGKIVKSVEMNAPNYHYEECSCYPDSSEITCVCRDNWHGSNRPWVSFNQNLEYQIGYICSGIFGDNPRPNDKTGSCGPVSSNGANGVKGFSFKYGNGVWIGRTKSISSRKGFEMIWDPNGWTGTDNNFSTKQDIVGINEWSGYSGSFVQHPELTGLDCIRPCFWVELIRGRPKENTIWTSGSSISFCGVNSDTVGWSWPDGAELPFTIDK

SEQ ID NO: 23425 - protein, 469 aa, synthetic construct
  REGION 1..469: note = neuraminidase__InfluenzaA__AGJ73379
MNPNQKIITIGSVCMTIGMANLILQIGNIISIWISHSIQLGNQSQIETCNQSVITYENNTWVNQTYVNISNTNFAAGQSVVSVKLAGNSSLCPVSGWAIYSKDNSVRIGSKGDVFVIREPFISCSPLECRTFFLTQGALLNDKHSNGTIKDRSPYRTLMSCPIGEVPSPYNSRFESVAWSASACHDGINWLTIGISGPDSGAVAVLKYNGIITDTIKSWRNNILRTQESECACVNGSCFTIMTDGPSDGQASYKIFRIEKGKIVKSVEMNAPNYHYEECSCYPDSSEITCVCRDNWHGSNRPWVSFNQNLEYQIGYICSGIFGDNPRPNDKTGSCGPVSSNGANGVKGFSFKYGNGVWIGRTKSISSRKGFEMIWDPNGWTGTDNNFSIKQDIIGINEWSGYSGSFVQHPELTGLDCIRPCFWVELIRGRPKENTIWTSGSSISFCGVNSDTVGWSWPDGAELPFTIDK

SEQ ID NO: 23426 - protein, 469 aa, synthetic construct
  REGION 1..469: note = neuraminidase__InfluenzaA__AGJ73381
MNPNQKIITIGSVCMTIGMANLILQIGNIISIWISHSIQLGNQSQIETCNQSVITYENNTWVNQTYVNISNTNFAAGQSVVSVKLAGNSSLCPVSGWAIYSKDNSVRIGSKGDVFVIREPFISCSPLECRTFFLTQGALLNDEHSNGTIKDRSPYRTLMSCPIGEVPSPYNSRFESVAWSASACHDGINWLTIGISGPDSGAVAVLKYNGIITDTIKSWRNNILRTQESECACVNGSCFTIMTDGPSDGQASYKIFRIEKGKIVKSVEMNAPNYHYEECSCYPDSSEITCVCRDNWHGSNRPWVSFNQNLEYQIGYICSGIFGDNPRPNDKTGSCGPVSSNGANGVKGFSFKYGNGVWIGRTKSISSRKGFEMIWDPNGWTGTDNNFSIKQDIVGINEWSGYSGSFVQHPELTGLDCIRPCFWVELIRGRPKENTIWTSGSSISFCGVNSDTVGWSWPDGAELPFTIDK

SEQ ID NO: 23427 - protein, 469 aa, synthetic construct
  REGION 1..469: note = neuraminidase__InfluenzaA__AGK62992
MNPNQKIITIGSVSLTISTICFFMQIAILITTVTLHFKQYEFNSPPNNQVMLCEPTIIERNITEIVYLTNTTIEKEICPKPAEYRNWSKPQCDITGFAPFSKDNSIRLSAGGDIWVTREPYVSCDPDKCYQFALGQGTTLNNVHSNNTVRDRTPYRTLLMNELGVPFHLGTKQVCIAWSSSSCHDGKAWLHVCITGDDKNATASFIYNGRLVDSVVSWSKEILRTQESECVCINGTCTVVMTDGSASGKADTKILFIEEGKIVHTSTLSGSAQHVEECSCYPRYPGVRCVCRDNWKGSNRPIVDINIKDHSIVSSYVCSGLVGDTPRKNDSSSSSHCLDPNNEEGGHGVKGWAFDDGNDVWMGRTINETSRLGYETFKVIEGWSNPKSKLQINRQVIVDRGDRSGYSGIFSVEVKSCINRCFYVELIRGRKEETEVLWTSNSIVVFCGTSGTYGTGSWPDGADINLMPI

SEQ ID NO: 23428 - protein, 469 aa, synthetic construct
  REGION 1..469: note = neuraminidase__InfluenzaA__AGK62996
MNPNQKIITIGSVSLIISTICFFMQIAILITTVTLHFKQYEFNSPPNNQVMLCEPTIIERNITEIVYLTNTTIEKEICPKPAEYRNWSKPQCDITGFAPFSKDNSIRLSAGGDIWVTREPYVSCDPDKCYQFALGQGTTLNNVHSNNTVRDRTPYRTLLMNELGVPFHLGTKQVCIAWSSSSCHDGKAWLHVCITGDDKNATASFIYNGRLVDSVVSWSKEILRTQESECVCINGTCTVVMTDGSASGKADTKILFIEEGKIVHTSTLSGSAQHVEECSCYPRYPGVRCVCRDNWKGSNRPIVDINIKDHSIVSSYVCSGLVGDTPRKNDSSSSSHCLDPNNEEGGHGVKGWAFDDGNDVWMGRTINETSRLGYETFKVIEGWSNPKSKLQINRQVIVDRGDRSGYSGIFSVESKSCINRCFYVELIRGRKEETEVLWTSNSIVVFCGTSGTYGTGSWPDGADINLMPI

SEQ ID NO: 23429 - protein, 469 aa, synthetic construct
  REGION 1..469: note = neuraminidase__InfluenzaA__AGK62998
MNPNQKIITIGSVSLTIATICFFMQIAILITTVTLHFKQCEFNSPPNNQVMLCEPTIIERNITEIVYLTNTTIEKEICPKLAEYRNWSKPQCDITGFAPFSKDNSIRLSAGGDIWVTREPYVSCDPDKCYQFALGQGTTLNNVHSNNTVRDRTPYRTLLMNELGVPFHLGTKQVCMAWSSSSCHDGKAWLHVCITGDDKNATASFIYNGRLVDSVVSWSKEILRTQESECVCINGTCTVVMTDGSASGKADTKILFIEEGKIVHTSTLSGSAQHVEECSCYPRYPGVRCVCRDNWKGSNRPIVDINIKDHSIVSSYVCSGLLGDTPRKNDSSSSSHCLDPNNEEGGHGVKGWAFDDGNDVWMGRTISEKSRLGYETFKVIEGWSNPKSKLQINRQVIVDRGDRSGYSGIFSVESKSCINRCFYVELIRGRKEETEVLWTSNSIVVFCGTSGTYGTGSWPDGADINLMPI

SEQ ID NO: 23430 - protein, 469 aa, synthetic construct
  REGION 1..469: note = neuraminidase__InfluenzaA__AGK63000
MNPNQKIITIGSVSLTIATICFFMQIAILITTVTLHFKQCDFNSPPNNQVMLCEPTIIERNITEIVYLTNTTIEKEICPKLAEYRNWSKPQCDITGFAPFSKDNSIRLSAGGDIWVTREPYVSCDPDKCYQFALGQGTTLNNVHSNNTVRDRTPYRTLLMNELGVPFHLGTKQVCMAWSSSSCHDGKAWLHVCITGDDKNATASFIYNGKLVDSVVSWSKEILRTQESECVCINGTCTVVMTDGSASGKADTKILFIEEGKIVHTSTLSGSAQHVEECSCYPRYPGVRCVCRDNWKGSNRPIVDINIKDHSIVSSYVCSGLVGDTPRKNDSSSSSHCLDPNNEEGGHGVKGWAFDDGNDVWMGRTINETSRLGYETFKVIEGWSNPKSKLQINRQVIVDRGDRSGYSGIFSVEGKSCINRCFYVELIRGRKEETEVLWTSNSIVVFCGTSGTYGTGSWPDGADINLMPI

SEQ ID NO: 23431 - protein, 469 aa, synthetic construct
  REGION 1..469: note = neuraminidase__InfluenzaA__AGK63002
MNPNQKIITIGSVSLTISTICFFMQIAILMTTVTLHFKQCEFNSPPNNQVMLCEPTIIERNITEIVYLTNTTIEKEICPKLAEYRNWSKPQCDITGFAPFSKDNSIRLSAGGDIWVTREPYVSCDPDKCYQFALGQGTTLNNVHSNNTVRDRTPYRTLLMNELGVPFHLGTKQVCMAWSSSSCHDGKAWLHVCITGNDKNATASFIYNGRLVDSVVSWSKEILRTQESECVCINGTCTVVMTDGSASGKADTKILFIEEGKIVHTSTLSGSAQHVEECSCYPRYPGVRCVCRDNWKGSNRPIVDINIKDHSIVSSYVCSGLVGDTPRKNDSSSSSHCLDPNNEEGGHGVKGWAFDDGNDVWMGRTITETSRLGYETFKVIEGWSNPKSKLQINRQVIVDRGDRSGYSGIFSVEGKSCINRCFYVELIRGRKEETEVLWTSNSIVVFCGTSGTYGTGSWPDGADINLMPI

SEQ ID NO: 23432 - protein, 469 aa, synthetic construct
  REGION 1..469: note = neuraminidase__InfluenzaA__AGK63004
MNPNQKIITIGSVSLTISTICFFMQIAILITTVTLHFKQYEFNSPPNNQVMLCEPTIIERNITEIVYLTNTTIEKEICPKPAEYRNWSKPQCDITGFAPFSKDNSIRLSAGGDIWVTREPYVSCDPDKCYQFALGQGTTLNNVHSNNTVRDRTPYRTLLMNELGVPFHLGTKQVCIAWSSSSCHDGKAWLHVCITGDDKNATASFIYNGRLVDSVVSWSKEILRTQESECVCINGTCTVVMTDGSASGKADTKILFIEEGKIVHTSTLSGSSQHVEECSCYPRYPGVRCVCRDNWKGSNRPIVDINIKDHSIVSSYVCSGLVGDTPRKNDSSSSSHCLDPNNEEGGHGVKGWAFDDGNDVWMGRTINETSRLGYETFKVIEGWSNPKSKLQINRQVIVDRGDRSGYSGIFSVEGKSCINRCFYVELIRGRKEETEVLWTSNSIVVFCGTSGTYGTGSWPDGADINLMPI

SEQ ID NO: 23433 - protein, 469 aa, synthetic construct
  REGION 1..469: note = neuraminidase__InfluenzaA__AGK63006
MNPNQKIITIGSVSLTIATICFFMQIAILITTVTLHFKQYEFNSPPNNQVMLCEPTIIERNITEIVYLTNTTIEKEICPKPAEYRNWSKPQCDITGFAPFSKDNSIRLSAGGDIWVTREPYVSCDPDKCYQFALGQGTTLNNVHSNNTVRDRTPYRTLLMNELGVPFHLGTKQVCIAWSSSSCHDGKAWLHVCITGDDKNATASFIYNGRLVDSVVSWSKEILRTQESECVCINGTCTVVMTDGSASAKADTKILFIEEGKIVHTSTLSGSAQHVEECSCYPRYSGVRCVCRDNWKGSNRPIVDINIKDHSIVSSYVCSGLVGDTPRKNDSSSSSHCLDPNNEEGGHGVKGWAFDDGNDVWMGRTINETSRLGYETFKVIEGWSNPKSQLQINRQVIVDRGDRSGYSGIFSVESKSCINRCFYVELIRGRKEETEVLWTSNSIVVFCGTSGTYGTGSWPDGADINLMPI

SEQ ID NO: 23434 - protein, 469 aa, synthetic construct
  REGION 1..469: note = neuraminidase__InfluenzaA__AGK63008
MNPNQKIITIGSVSLTIATICFFMQIAILITTVTLHFKQCEFNSPPNNQVMLCEPTIIERNITEIVYLTNTTIEKEICPKLAEYRNWSKPQCDITGFAPFSKDNSIRLSAGGDIWVTREPYVSCDPDKCYQFALGQGTTLNNVHSNNTVRDRTPYRTLLMNELGVPFHLGTKQVCMAWSSSSCHDGKAWLHVCITGDDKNATASFIYNGKLVDSVVSWSKEILRTQESECVCINGTCTVVMTDGSASGKADTKILFIEEGKIVHTSTLSGSAQHVEECSCYPRYPGVRCVCRDNWKGSNRPIVDINIKDHSIVSSYVCSGLVGDTPRKNDSSSSSHCLDPNNEEGGHGVKGWAFDDGNDVWMGRTINETSRLGYETFKVIEGWSNPKSKLQMNRQVIVDRGDRSGYSGIFSVEGKSCINRCFYVELIRGRKEETEVLWTSNSIVVFCGTSGTYGTGSWPDGADINLMPI

SEQ ID NO: 23435 - protein, 469 aa, synthetic construct
  REGION 1..469: note = neuraminidase__InfluenzaA__AGK63010
MNPNQKIITIGSVSLTIATICFFMQIAILITTVTLHFKQCEFNSPPNNQVMLCEPTIIERNITEIVYLTNTTIEKEICPKLAEYRNWSKPQCDITGFAPFSKDNSIRLSAGGDIWVTREPYVSCDPDKCYQFALGQGTTLNNVHSNNTVRDRTPYRTLLMNELGVPFHLGTKQVCMAWSSSSCHDGKAWLHVCITGDDKNATASFIYNGKLVDSVVSWSKEILRTQESECVCINGTCTVVMTDGSASGKADTKILFIEEGKIVHTSTLSGSAQHVEECSCYPRYPGVRCVCRDNWKGSNRPIVDINIKDHSIVSSYVCSGLVGDTPRKNDSSSSSHCLDPNNEEGGHGVKGWAFDDGNDVWMGRTINETSRLGYETFKVIEGWSDPKSKLQINRQVIVDRGDRSGYSGIFSVEGKSCINRCFYVELIRGRKEETEVLWTSNSIVVFCGTSGTYGTGSWPDGADINLMPI

SEQ ID NO: 23436 - protein, 469 aa, synthetic construct
  REGION 1..469: note = neuraminidase__InfluenzaA__AGK63012
MNPNQKIITIGSVSLTISTICFFMQIAILITTVTLHFKQYEFNSPPNNQVMLCEPTIIERNITEIVYLTNTTIEKEICPKPAEYRNWSKPQCDITGFAPFSKDNSIRLSAGGDIWVTREPYVSCDPDKCYQFALGQGTTLNNVHSNNTVRDRTPYRTLLMNELGVPFHLGTKQVCIAWSSSSCHDGKAWLHVCITGDDKNATASFIYNGRLVDSVVSWSKEILRTQESECVCINGTCTVVMTDGSASGKADTKILFIEEGKIVHTSTLSGSAQHVEECSCYPRYPGVRCVCRDNWKGSNRPIVDINIKDHSIVSSYVCSGLVGDTPRKNDSSSSSHCLDPNNEEGGHGVKGWAFDDGNDVWMGRTINETSRLGYETFKVIEGWSNPKSKLQINRQVIVDRGYRSGYSGIFSVEGKSCINRCFYVDLIRGRKEETEVLWTSNSIVVFCGTSGTYGTGSWPDGADINLMPI

SEQ ID NO: 23437 - protein, 469 aa, synthetic construct
  REGION 1..469: note = neuraminidase__InfluenzaA__AGK63014
MNPNQKIITIGSVSLTISTICFFMQIAILITTVTLHFKQYEFNSPPNNQVMLCEPTIIERNITEIVYLTNTTIEKEICPKPAEYRNWSKPQCDITGFAPFSKDNSIRLSAGGDIWVTREPYVSCDPDKCYQFALGQGTTLNNVHSNNTVRDRTPYRTLLMNELGVPFPLGTKQVCIAWSSSSCHDGKAWLHVCITGDDKNATASFIYNGRLVDSVVSWSKEIHRTQESECVCINGTCTVVMTDGSASGKADTKILFIEEGKIVHTSTLSGSAQHVEECSCYPRYPGVRCVCRDNWKGSNRPIVDINIKDHSIVSSYVCSGLVGDTPRKNDSSSSSHCLDPNNEEGGHGVKGWAFDDGNDVWMGRTISEKSRLGYETFKVIEGWSNPKSKLQINRQVIVDRGNRSGYSGIFSVEGKSCINRCFYVELIRGRKEETEVLWTSNSIVVFCGTSGTYGTGSWPDGADINLMPI

SEQ ID NO: 23438 - protein, 469 aa, synthetic construct
  REGION 1..469: note = neuraminidase__InfluenzaA__AGK63018
MNPNQKIITIGSVSLTISTICFFMQIAILITTVTLHFKQCEFNSPPNNQVMLCEPTIIERNITEIVYLTNTTIEKEICPKLAEYRNWSKPQCDITGFAPFSKDNSIRLSAGGDIWVTREPYVSCDPDKCYQFALGQGTTLNNVHSNNTVRDRTPYRTLLMNELGVPFHLGTKQVCMAWSSSSCHDGKAWLHVCITGDDKNATASFIYNGKLVDSVVSWSKEILRTQESECVCINGTCTVVMTDGSASGKADTKILFIEEGKIVHTSTLSGSAQHVEECSCYPRYPGVRCVCRDNWKGSNRPIVDINIKDHSIVSSYVCSGLVGDTPRKNDSSSSSHCLDPNNEEGGHGVKGWAFDDGNDVWMGRTINETSRLGYETFKVIEGWSNPKSKLQINRQVIVDRGDRSGYSGIFSVEGKSCINRCFYVELIRGRKEETEVLWTSNSIVVFCGTSGTYGTGSWPDGADINLMPI

SEQ ID NO: 23439 - protein, 469 aa, synthetic construct
  REGION 1..469: note = neuraminidase__InfluenzaA__AGK63020
MNPNQKIITIGSVSLTISTICFFMQIAILITTVTLHFKQYEFNSPPNNQVMLCEPTIIERNITEIVYLTNTTIEKEICPKPAEYRNWSKPQCDITGFAPFSKDNSIRLSAGGDIWVTREPYVSCDPDKCYQFALGQGTTLNNVHSNNTVRDRTPYRTLLMNELGVPFHLGTKQVCIAWSSSSCHDGKAWLHVCITGDDKNATASFIYNGRLVDSVVSWSKEILRTQESECVCINGTCTVVMTDGSASGKADTKILFIEEGKIVHTSTLSGSAQHVEECSCYPRYPGVRCVCRDNWKGSNRPIVDINIKDHSIVSSYVCSGLVGDTPRKNDSSSSSHCLDPNNEEGGHGVKGWAFDDGNDVWMGRTINETSRLGYETFKVIEGWSNPKSKLQINRQVIVDRGDRSGYSGIFSVEGKSCINRCFYVELIRGRKEETEVLWTSNSIVVFCGTSGTYGTGSWPDGADINLMPI

SEQ ID NO: 23440 - protein, 469 aa, synthetic construct
  REGION 1..469: note = neuraminidase__InfluenzaA__AGK63022
MNPNQKIITIGSVSLTISTICFFMQIAILITTVTLHFKQCEFNSPPNNQVMLCEPTIIERNITEIVYLTNTTIEKEICPKLAEYRNWSKPQCDITGFAPFSKDNSIRLSAGGDIWVTREPYVSCDPDKCYQFALGQGTTLNNVHSNNTVRDRTPYRTLLMNELGVPFHLGTKQVCMAWSSSSCHDGKAWLHVCITGDDKNATASFIYNGKLVDSVVSWSKEILRTQESECVCINGTCTVVMTDGSASGKADTKILFIEEGKIVHTSTLSGSAQHVEECSCYPRYPGVRCVCRDNWKGSNRPIVDINIKDHSIVSSYVCSGLVGDTPRKNDSSSSSHCLDPNNEEGGHGVKGWAFDDGNDVWMGRTINETSRLGYETFKVIEGWSNPKSKLQINRQVIVDRGDRSGYSGIFSVEGKSCINRCFYVDLIRGRKEETEVLWTSNSIVVFCGTSGTYGTGSWPDGADINLMPI

SEQ ID NO: 23441 - protein, 469 aa, synthetic construct; identical to SEQ ID NO: 23439
  REGION 1..469: note = neuraminidase__InfluenzaA__AGK63024

SEQ ID NO: 23442 - protein, 469 aa, synthetic construct; identical to SEQ ID NO: 23439
  REGION 1..469: note = neuraminidase__InfluenzaA__AGK63026

SEQ ID NO: 23443 - protein, 469 aa, synthetic construct
  REGION 1..469: note = neuraminidase__InfluenzaA__AGK63028
MNPNQKIITIGSVSLTISTICFFMQIAILITTVTLHFKQYEFNSPPNNQVMLCEPTIIERNKTEIVYLTNTTIEKEICPKPAEYRNWSKPQCDITGFAPFSKDNSIRLSAGGDIWVTREPYVSCDPDKCYQFALGQGTTLNNVHSNNTVRDRTPYRTLLMNELGVPFHLGTKQVCIAWSSSSCHDGKAWLHVCITGDDKNATASFIYNGRLVDSVVSWSKEILRTQESECVCINGTCTVVMTDGSASGKADTKILFIEEGKVVHTSTLSGSAQHVEECSCYPRYPGVRCVCRDNWKGSNRPIVDINIKDHSIVSSYVCSGLVGDTPRKNDSSSSSHCLDPNNEEGGHGVKGWAFDDGNDVWMGRTINETSRLGYETFKVIEGWSNPKSKLQINRQVIVDRGDRSGYSGIFSVEAKSCIIRCFYVELIRGRKEETEVLWTSNSIVVFCGTSGTYGTGSWPDGADINLMPI

SEQ ID NO: 23444 - protein, 469 aa, synthetic construct; identical to SEQ ID NO: 23438
  REGION 1..469: note = neuraminidase__InfluenzaA__AGK63030

SEQ ID NO: 23445 - protein, 469 aa, synthetic construct
  REGION 1..469: note = neuraminidase__InfluenzaA__AGK63032
MNPNQKIITIGSVSLTISTICFFMQIAILITTVTLHFKQYEFNSPPNNQVMLCEPTIIERNITEIVYLTNTTIEKEICPKLAEYRNWSKPQCDITGFAPFSKDNSIRLSAGGDIWVTREPYVSCDPDKCYQFALGQGTTLNNVHSNNTVRDRTPYRTLLMNELGVPFHLGTKQVCMAWSSSSCHDGKAWLHVCITGDDKNATASFIYNGKLVDSVVSWSKEILRTQESECVCINGTCTVVMTDGSASGKADTKILFIEEGKIVHTSTLSGSAQHVEECSCYPRYPGVRCVCRDNWKGSNRPIVDINIKDHSIVSSYVCSGLVGDTPRKNDSSSSSHCLDPNNEEGGHGVKGWAFDDGNDVWMGRTITETSRLGYETFKVIEGWSNPKSKLQINRQVIVDRGNRSGYSGIFSVEGKSCINRCFYVELIRGRKEETEVLWTSNSIVVFCGTSGTYGTGSWPDGADINLMPI

SEQ ID NO: 23446 - protein, 469 aa, synthetic construct
  REGION 1..469: note = neuraminidase__InfluenzaA__AGK63034
MNPNQKIITIGSVSLTISTICFFMQIAILITTVTLHFKQCEFNSPPNNQVMLCEPTIIERNITEIVYLTNTTIEKEICPKLAEYRNWSKPQCDITGFAPFSKDNSIRLSAGGDIWVTREPYVSCDPDKCYQFALGQGTTLNNVHSNNTVRDRTPYRTLLMNELGVPFHLGTKQVCMAWSSSSCHDGKAWLHVCITGDDKNATASFIYNGKLVDSVVSWSKEILRTQESECVCINGTCTVVMTDGSASGKADTKILFIEEGKIVHTSTLSGSAQHVEECSCYPRYPGVRCVCRDNWKGSNRPIVDINIKVHSIVSSYVCSGLVGDTPRKNDSSSSSHCLDPNNEEGGHGVKGWAFDDGNDVWMGRTINETSRLGYETFKVIEGWSNPKSKLQINRQVIVDRGDRSGYSGIFSVEGKSCINRCFYVELIRGRKKETEVLWTSNSIVVFCGTSGTYGTGSWPDGADINLMPI

SEQ ID NO: 23447 - protein, 469 aa, synthetic construct
  REGION 1..469: note = neuraminidase__InfluenzaA__AGK63036
MNPNQKIITIGSVSLTISTICFFMQIAILITTVTLHFKQYEFNSPPNNQVMLCEPTIIERNITEIVYLTNTTIEKEICPKPAEYRNWSKPQCDITGFAPFSKDNSIRLSAGGDIWVTREPYVSCDPDKCYQFALGQGTTLNNVHSNNTVRDRTPYRTLLMNELGVPFHLGTKQVCIAWSSSSCHDGKAWLHVCITGDDKNATASFIYNGRLVDSVVSWSKEILRTQESECVCINGTCTVVMTDGSASGKADTKILFIEEGKIVHTSTLSGSAQHVEECSCYPRYPGVRCVCRDNWKGSNRPIVDINIKDHSIVSSYVCSGLVGDTPRKNDSSSSSHCLDPNNEEGGHGVKGWAFDDGNDVWMGRTINETSRFGYETIKVIEGWSNPKSNLQINRQVIVDRGNRSGYSGIFSVEGKSCINRCFYVELIRGRKEETEVLWTSNSIVVFCGTSGTYGTGSWPDGADINLMPI

SEQ ID NO: 23448 - protein, 469 aa, synthetic construct
  REGION 1..469: note = neuraminidase__InfluenzaA__AGK63038
MNPNQKIITIGSVSLTISTICFFMQIAILITTVTLHFKQYEFNSPPNNQVMLCEPTIIERNITEIVYLTNTTIEKEICPKLAEYRNWSKPQCDITGFAPFSKDNSIRLSAGGDIWVTREPYVSCDPDKCYQFALGQGTTLNNVHSNNTVRDRTPYRTLLMNELGVPFHLGTKQVCMAWSSSSCHDGKAWLHVCITGDDKNATASFIYNGKLVDSVVSWSKEILRTQESECVCINGTCTVVMTDGSASGKADTKILFIEEGKIVHTSTLSGSAQHVEECSCYPRYPGVRCVCRDNWKGSNRPIVDINIKDHSIVSSYVCSGLVGDTPRKNDSSSSSHCLDPNNEEGDHGVKGWAFDDGNDVWMGRTINETSRLGYETFKVIEGWSNPKSKLQINRQVIVDRGNRSGYSGIFSVESKSCINRCFYVELIRGRKEETEVLWTSNSIVVFCGTSGTYGTGSWPDGADINLMPI

SEQ ID NO: 23449 - protein, 469 aa, synthetic construct
  REGION 1..469: note = neuraminidase__InfluenzaA__AGK63040
MNPNQKIITIGSVSLTISTICFFMQIAILITTVTLHFKQCEFNSPPNNQVMLCEPTIIERNITEIVYLTNTTIEKEICPKLAEYRNWSKPQCNITGFAPFSKDNSIRLSAGGDIWVTREPYVSCDPDKCYQFALGQGTTLNNVHSNNTVRDRTPYRTLLMNELGVPFHLGTKQVCMAWSSSSCHDGKAWLHVCITGDDKNATASFIYNGKLVDSVVSWSKEILRTQESECVCINGTCTVVMTDGSASGKADTKILFIEEGKIVHTSTLSGSAQHVEECSCYPRYPGVRCVCRDNWKGSNRPIVDINIKDHSIVSSYVCSGLVGDTPRKNDSSSSSHCLDPNNEEGGHGVKGWAFDDGNDVWMGRTINETSRLGYETFKVIEGWSNPKSKLQINRQVIVDRGDRSGYSGIFSVEGKSCINRCFYVELIRGRKEETEVLWTSNSIVVFCGTSGTYGTGSWPDGADINLMPI

SEQ ID NO: 23450 - protein, 469 aa, synthetic construct
  REGION 1..469: note = neuraminidase__InfluenzaA__AGK63042
MNPNQKIITIGSVSLTISTICFFMQIAILITTVTLHFKQCEFNPPPNNQVMLCEPTIIERNITEIVYLTNTTIEKEICPKLAEYRNWSKPQCDITGFAPFSKDNSIRLSAGGDIWVTREPYVSCDPDKCYQFALGQGTTLNNVHSNNTVRDRTPYRTLLMNELGVPFHLGTKQVCMAWSSSSCHDGKAWLHVCITGDDKNATASFIYNGKLVDSVVSWSKEILRTQESECVCINGTCTVVMTDGSASGKADTKILFIEEGKIVHTSTLSGSAQHVEECSCYPRYPGVRCVCRDNWKGSNRPIVDINIKDHSIVSSYVCSGLVGDTPRKNDSSSSSHCLDPNNEEGGHGVKGWAFDDGNDVWMGRTINETSRLGYETFKVIEGWSNPKSKLQINRQVIVDRGDRSGYSGIFSVEGKSCINRCFYVELIRGRKEETEVLWTSNSIVVFCGTSGTYGTGSWPDGADINLMPI

SEQ ID NO: 23451 - protein, 469 aa, synthetic construct
  REGION 1..469: note = neuraminidase__InfluenzaA__AGK63044
MNPNQKIITIGSVSLTISTICFFMQIAILITTVTLHFKQCEFNSPPNNQVMLCEPTIIERNITEIVYLTNTTIEKEICPKLAEYRNWSKPQCDITGFAPFSKDNSIRLSAGGDIWVTREPYVSCDPDKCYQFALGQGTTLNNVHSNNTVRDRTPYRTLLMNELGVPFHLGTKQVCMAWSSSSCHDGKAWLHVCITGDDKNATASFIYNGKLVDSVVSWSKEILRTQESECVCINGTCTVVMTDGSASGKADTKILFIEEGKIVHTSTLSGSAQHVEECSCYPRYPGVRCVCRDNWKGSNRPIVDINIKDHSIVSSYVCSGLVGDTPRKNDSSSSSHCLDPNNEEGGHGVKGWAFDDGNDVWMGRTINETSRLGYETFKVIEGWSNPKSKLQINRQVIVDRGYRSGYSGIFSVESKSCINRCFYVELLRGRKEETEVLWTSNSIVVFCGTSGTYGTGSWPDGADINLMPI

SEQ ID NO: 23452 - protein, 469 aa, synthetic construct
  REGION 1..469: note = neuraminidase__InfluenzaA__AGK63046
MNPNQKIITIGSVSLTISTICFFMQIAILITTVTLHFKHYEFNSPPNNQVMLCEPTIIERNITEIVYLTNTTIEKEICPKPAEYRNWSKPQCDITGFAPFSKDNSIRLSAGGDIWVTREPYVSCDPDKCYQFALGQGTTLNNVHSNNTVRDRTPYRTLLMNELGVPFHLGTKQVCIAWSSSSCHDGKAWLHVCITGDDKNATASFIYNGRLVDSVVSWSKEILRTQESECVCINGTCTVVMTDGSASGKADTKILFIEEGKIVHTSTLSGSAQHVEECSCYPRYPGVRCVCRDNWKGSNRPIVDINIKDHSIVSSYVCSGLVGDTPRKNDSSSSSHCLDPNNEEGGHGVKGWAFDDGNDVWMGRTINETSRLGYETFKVIEGWSNPKSKLQINRQVIVDRGDRSGYSGIFSVEGKSCINRCFYVDLIRGRKEETEVLWTSNSIVVFCGTSGTYGTGSWPDGADINLMPI

SEQ ID NO: 23453 - protein, 465 aa, synthetic construct
  REGION 1..465: note = neuraminidase__InfluenzaA__AGK82159
MNPNQKILCTSATAIIIGAIAVLIGIANLGLNIGLHLKPGCNCSHSQPETTNTSQTIINNYYNETNITNIQMEERTSRNFNNLTKGLCTINSWHIYGKDNAVRIGESSDVLVTREPYVSCDPDECRFYALSQGTTIRGKHSNETIHDRSQYRALISWPLSSPPTVYNSRVECIGWSSTSCHDGKSRMSICISGPNNNASAVVWYNRRPVAEINTWARNILRTQESECVCHNGVCPVVFTDGSATGPADTRIYYFKEGKILKWESLTGTAKHIEECSCYGERTGITCTCRDNWQGSNRPVIQIDPVAMTHTSQYICSPVLTDNPRPNDPNIGKCNDPYPGNNNNGVKGFSYLDGANTWLGRTISTASRSGYEMLKVPNALTDDRSKPIQGQTIVLNADWSGYSGSFMDYWAEGDCYRACFYVELIRGRPKEDKVWWTSNSIVSMCSSTEFLGQWNWPDGAKIEYFL

SEQ ID NO: 23454 - protein, 465 aa, synthetic construct
  REGION 1..465: note = neuraminidase__InfluenzaA__AGK84858
MNPNQKILCTSATAIIIGAIAVLIGIANLGLNIGLHLKPGCNCSHSQPETTNTSQTIINNYYNETNITNIQMEERTSRNFNNLTKGLCTINSWHIYGKDNAVRIGESSDVLVTREPYVSCDPDECRFYALSQGTTIRGKHSNGTIHDRSQYRALISWPLSSPPTVYNSRVECIGWSSTSCHDGKSRMSICISGPNNNASAVVWYNRRPVAEINTWARNILRTQESECVCHNGVCPVVFTDGSATGPADTRIYYFKEGKILKWESLTGTAKHIEECSCYGERTGITCTCRDNWQGSNRPVIQIDPVAMTHTSQYICSPVLTDNPRPNDPNIGKCNDPYPGNNNNGVKGFSYLDGANTWLGRTISTASRSGYEMLKVPNALTDDRSKPIQGQTIVLNADWSGYSGSFMDYWAEGDCYRACFYVELIRGRPKEDKVWWTSNSIVSMCSSTEFLGQWNWPDGAKIEYFL

SEQ ID NO: 23455 - protein, 465 aa, synthetic construct
  REGION 1..465: note = neuraminidase__InfluenzaA__AGK84861
MNPNQKILCTSATAIIIGAIAVLIGIANLGLNIGLHLKPSCNCSHSQPETTNTSQTIINNYYNETNITNIQMEERTSRNFNNLTKGLCTINSWHIYGKDNAVRIGESSDVLVTREPYVSCDPDECRFYALSQGTTIRGKHSNGTIHDRSQYRALISWPLSSPPTVYNSRVECIGWSSTSCHDGKSRMSICISGPNNNASAVVWYNRRPVAEINTWARNILRTQESECVCHNGVCPVVFTDGSATGPADTRIYYFKEGKILKWESLTGTAKHIEECSCYGERTGITCTCRDNWQGSNRPVVQIDPVAMTHTSQYICSPVLTDNPRPNDPNIGKCNDPYPGINNNGVKGFSYLDGANTWLGRTISTASRSGYEMLKVPNALTDDRSKPIQGQTIVLNADWSGYSGSFMDYWAEGDCYRACFYVELIRGRPKEDKVWWTSNSIVSMCSSTEFLGQWNWPDGAKIEYFL

SEQ ID NO: 23456 - protein, 465 aa, synthetic construct; identical to SEQ ID NO: 23454
  REGION 1..465: note = neuraminidase__InfluenzaA__AGK84864

SEQ ID NO: 23457 - protein, 465 aa, synthetic construct
  REGION 1..465: note = neuraminidase__InfluenzaA__AGL95090
MNPNQKILCTSATAIIIGAIAVLIGIANLGLNIGLHLKPGCNCSHSQPETTNTSQTIINNYYNETNINNIQMEERTSRNFNNLTKGLCTINSWHIYGKDNAVRIGESSDVLVTREPYVSCDPDECRFYALSQGTTIRGKHSNGTIHDRSQYRALISWPLSSPPTVYNSRVECIGWSSTSCHDGKSRMSICISGPNNNASAVVWYNRRPVAEINTWARNILRTQESECVCHNGVCPVVFTDGSATGPADTRIYYFKEGKILKWESLTGTAKHIEECSCYGERTGITCTCKDNWQGSNRPVIQIDPVAMTHTSQYICSPVLTDNPRPNDPNIGKCNDPYPGNNNNGVKGFSYLDGANTWLGRTISTASRSGYEMLKVPNALTDDRSKPIQGQTIVLNADWSGYSGSFMDYWAEGDCYRACFYVELIRGRPKEDKVWWTSNSIVSMCSSTEFLGQWNWPDGAKIEYFL

SEQ ID NO: 23458 - protein, 470 aa, synthetic construct; identical to SEQ ID NO: 16632
  REGION 1..470: note = neuraminidase__InfluenzaA__AGL96802

SEQ ID NO: 23459 - protein, 470 aa, synthetic construct; identical to SEQ ID NO: 16632
  REGION 1..470: note = neuraminidase__InfluenzaA__AGL96807

SEQ ID NO: 23460 - protein, 470 aa, synthetic construct
  REGION 1..470: note = neuraminidase__InfluenzaA__AGL96808
MNPNQKIITIGSISIAIGIISLMLQIGNIISIWASHSIQTGSQNNTGICNQRIITYENSTWVNHTYVNINNTNVVAGEDKTSVTLAGNSSLCSISGWAIYTKDNSIRIGSKGDVFVIREPFISCSHLECRTFFLTQGALLNDKHSNGTVKDRSPYRALMSCPLGEAPSPYNSKFESVAWSASACHDGMGWLTIGISGPDNGAVAVLKYNGIITGTIKSWKKQILRTQESECVCMNGSCFTIMTDGPSNKAASYKIFKIEKGKVTKSIELNAPNFHYEECSCYPDTGIVMCVCRDNWHGSNRPWVSFNQNLDYQIGYICSGVFGDNPRPEDGEGSCNPVTVDGANGVKGFSYKYDNGVWIGRTKSNRLRKGFEMIWDPNGWTNTDSFFSVKQDVVAITDWSGYSGSFVQHPELTGLDCIRPCFWVELVRGLPRENTTIWTSGSSISFCGVNSDTANWSWPDGAELPFTIDK

SEQ ID NO: 23461 - protein, 470 aa, synthetic construct
  REGION 1..470: note = neuraminidase__InfluenzaA__AGL96809
MNPNQKIITIGSISIAIGIISLMLQIGNIISIWASHSIQTGSQNNTGICNQRIITYENSTWVNHTYVNINNTNVVAGEDKTSVTLAGNSSLCSISGWAIYTKDNSIRIGSKGDVFVIREPFISCSHLECRTFFLTQGALLNDKHSNGTVKDRSPYRALMSCPLGEAPSPYNSKFESVAWSASACHDGMGWLTIGISGPDNGAVAVLKYNGIITGTIKSWKKQILRTQESECVCMNGSCFTIMTDGPSNKTASYKIFKIEKGKVTKSIELNAPNFHYEECSCYPDTGIVMCVCRDNWHGSNRPWVSFNQNLDYQIGYICSGVFGDNPRPEDGEGSCNPVTVDGANGVKGFSYKYDNGVWIGRTKSNRLRKGFEMIWDPNGWTNTDSDFSVKQDVVAITDWSGYSGSFVQHPELTGLDCIRPCFWVELVRGLPRENTTIWTSGSSISFCGVNSDTANWSWPDGAELPFTIDK

SEQ ID NO: 23462 - protein, 470 aa, synthetic construct; identical to SEQ ID NO: 16632
  REGION 1..470: note = neuraminidase__InfluenzaA__AGL96818

SEQ ID NO: 23463 - protein, 470 aa, synthetic construct
  REGION 1..470: note = neuraminidase__InfluenzaA__AGL96820
MNPNQKIITTGSISIAIGIISLMLQIGNIISIWASHSIQTGSQNNTGICNQRIITYENSTWVNHTYVNINNTNVVAGEDKTSVTLAGNSSLCSISGWAIYTKDNSIRIGSKGDVFVIREPFISCSHLECRTFFLTQGALLNDKHSNGTVKDRSPYRALMSCPLGEAPSPYNSKFESVAWSASACHDGMGWLTIGISGPDNGAVAVLKYNGIITGTIKSWKKQILRTQESECVCMNGSCFTIMTDGPSNKAASYKIFKIEKGKVTKSIELNAPNFHYEECSCYPDTGIVMCVCRDNWHGSNRPWVSFNQNLDYQIGYICSGVFGDNPRPEDGEGSCNPVTVDGANGVKGFSYKYDNGVWIGRTKSNRLRKGFEMIWDPNGWTNTDSDFSVKQDVVAITDWSGYSGSFVQHPELTGLDCIRPCFWVELVRGLPRENTTIWTSGSSISFCGVNSDTANWSWPDGAELPFTIDK

SEQ ID NO: 23464 - protein, 470 aa, synthetic construct
  REGION 1..470: note = neuraminidase__InfluenzaA__AGL96821
MNPNQKIITIGSISIAIGIISLMLQIGNIISIWASHSIQTGSQNNTGICNQRIITYENSTWVNHTYVNINNTNVVAGEDKTSVTLAGNSSLCSISGWAIYTKDNSIRIGSKGDVFVIREPFISCSHLECRTFFLTQGALLNDKHSNGTVKDRSPYRALMSCPLGEAPSPYNSKFESVAWSASACHDGMGWLTIGISGPDNGAVAVLKYNGIITGTIKSWKKQILRTQESECVCMNGSCFTIMTDGPSNKAASYKIFKIEKGKVTKSIELNAPNFHYEECSCYPDTGIVMCVCRDNWHGSNRPWVSFNQNLDYQIGYICSGVFGDNPRPEDGEGSCNPVSVDGANGVKGFSYKYDNGVWIGRTKSNRLRKGFEMIWDPNGWTNTDSDFSVKQDVVAITDWSGYSGSFVQHPELTGLDCIRPCFWVELVRGLPRENTTIWTSGSSISFCGVNSDTANWSWPDGAELPFTIDK

SEQ ID NO: 23465 - protein, 469 aa, synthetic construct
  REGION 1..469: note = neuraminidase__InfluenzaA__AGN69269
MITNQRIITIGTVCLIVGIVSLLLQIGNIVSLWISHSIQTGEKNHSEICNQNTITYENNTWVNQTYVNISNTNIADGQGVTSIILAGNSSLCPISGWAIYSKDNSIRIGSKGDIFVIREPFISCSHLECRTFFLTQGALLNDRHSNGTVKDRSPYRTLMSCPIGEAPSPYNSRFESVAWSASACHDGMGWITIGISGPDNGAVAVLKYNGIITDTIKSWRNKILRTQESECVCINGSCFTIMTDGPSNGQASYKIFKMEKGKIIKSVELDAPNYHYEECSCYPDTGKVVCVCRDNWHASNRPWVSFDQNLDYQIGYICSGVFGDNPRSNDGKGNCGPALSNGANGVKGFSFRYGNGVWIGRTKSISSRSGFEMIWDPNGWTETDSSFSMKQDIIALTDWSGYSGSFVQHPELTGMNCIRPCFWVELIRGQPKESTIWTSGSSISFCGVDSETASWSWPDGADLPFTIDK

SEQ ID NO: 23466 - protein, 469 aa, synthetic construct
  REGION 1..469: note = neuraminidase__InfluenzaA__AGN69280
MNTNQRIITIGTVCLIVGIVSLLLQIGNIVSLWISHSIQTGEKNHSEICNQNTITYENNTWVNQTYVNISNTNIADGQGVTSIILAGNSSLCPISGWAIYSKDNSIRIGSKGDIFVIREPFISCSHLECRTFFLTQGALLNDRHSNGTVKDRSPYRTLMSCPIGEAPSPYNSRFESVAWSASACHDGMGWLTIGISGPDNGAVAVLKYNGIITDTIKSWRNKILRTQESECVCINGSCFTIMTDGPSNGQASYKIFKMEKGKIIKSVELDAPNYHYEECSCYPDTGKVVCVCRDNWHASNRPWVSFDQNLDYQIGYICSGVFGDNPRSNDGKGNCGPVLSNGANGVKGFSFRYGNGVWIGRTKSISSRSGFEMIWDPNGWTETDSSFSMKQDIIALTDWSGYSGSFVQHPELTGMNCIRPCFWVELIRGQPKESTIWTGGSSISFCGVDSETASWSWPDGADLPFTIDK

SEQ ID NO: 23467 - protein, 469 aa, synthetic construct
  REGION 1..469: note = neuraminidase__InfluenzaA__AGN69292
MNPNQKIITIGSICMTIGIASLILQIGNIISIWISHSIQTENQNQPEICNQNVITYENNTWVNQTYVNISNTNFVAEQAVASVKLAGNSSLCPVSGWAIYSKDNSVRIGSKGDVFVIREPFISCSHLECRTFFLTQGALLNDKHSNGTIKDRSPYRTLMSCPIGEVPSPYNSRFESVAWSASACHDGTSWLTIGISGPDNGAVAVLKYNGIITDTIKSWRKNILRTQESECACVNGSCFTVMTDGPSNGQASYKVFKIEKGKVVKSVELNAPNYHYEECSCYPESGEITCVCRDNWHGSNRPWVSFNQNLEYQMGYICSGIFGDNPRPNDKTGSCGPVFSNGANGVKGFSFKYGNGVWIGRTKSISSRMGFEMIWDPDGWTKTDDKFSVKQDIIGINDWSGYSGSFVQHPELTGLDCMRPCFWVELIRGRPKENTIWTSGSSISFCGVNSDTVGWSWPDGAELPFTIDK

SEQ ID NO: 23468 - protein, 469 aa, synthetic construct
  REGION 1..469: note = neuraminidase__InfluenzaA__AGN69316
MNPNQKIITIGSICMTIGIASLILQIGNIISIWISHSIQTENQNQPEICNQNVITYENNTWVNQTYVNISNTNFVAEQAVASVKLAGNSSLCPVSGWAIYSKDNSVRIGSKGDVFVIREPFISCSHLECRTFFLTQGALLNDKHSNGTIKDRSPYRTLMSCPIGEVPSPYNSRFESVAWSASACHDGTSWLTIGISGPDNGAVAVLKYNGIITDTIKSWRKNILRTQESECACVNGSCFTVMTDGPSNGQASYKVFKIEKGKVVKTVELNAPNYHYEECSCYPESGEITCVCRDNWHGSNRPWVSFNQNLEYQMGYICSGIFGDNPRPNDKTGSCGPVFSNGANGVKGFSFKYGNGVWIGRTKSISSRMGFEMIWDPDGWTKTDDKFSVKQDIIGINDWSGYSGSFVQHPELTGLDCMRPCFWVELIRGRPKENTIWTSGSSISFCGVNSDTVGWSWPDGAELPFTIDK

SEQ ID NO: 23469 - protein, 469 aa, synthetic construct; identical to SEQ ID NO: 23468
  REGION 1..469: note = neuraminidase__InfluenzaA__AGN69328

SEQ ID NO: 23470 - protein, 469 aa, synthetic construct
  REGION 1..469: note = neuraminidase__InfluenzaA__AGN69340
MNPNQKIITIGLICMTIGIASLILQIGNIISIWISHSIQTENQNKPEICNQNVITYENNTWVNQTYVNVSNTNFVAEQAVASVKLVGNSSLCPVSGWAIYSKDNSVRIGSKGDVFVIREPFISCSHLECRTFFLTQGALLNDKHSNGTIKDRSPYRTLMSCPIGEVPSPYNSRFESVAWSASACHDGTSWLTIGISGPDNGAVAVLKYNGIITDTIKSWRKNILRTQESECACVNGSCFTVMTDGPSNGQASYKVFKIERGKVVKSVELNAPNYHYEECSCYPESSEITCVCRDNWHGSNRPWVSFNQNLEYQMGYICSGVFGDNPRPNDKTGSCGPVFSNGANGVKGFSFKYGNGVWIGRTKSTSSRMGFEMIWDPDGWTKTDDKFSVKQDIIGITDWSGYSGSFVQHPELTGLDCMRPCFWVELIRGRPKENTIWTSGSSISFCGVNSDTVGWSWPDGAELPFTIDK

SEQ ID NO: 23471 - protein, 469 aa, synthetic construct
  REGION 1..469: note = neuraminidase__InfluenzaA__AGO00268
MNPNQKIITIGSICMVVGIISLILQIGNIISIWISHSIQTGSQNHTGICNQSIITYKNSTWVNQTYVNISNTNVVAGKDTTSMILAGNSSLCPIRGWAIYSKDNGIRIGSKGDVFVIREPFISCSHLECRTFFLTQGALLNDKHSNGTVKDRSPYRALMSCPVGEAPSPYNSRFESVAWSASACHDGMGWLTIGISGPDDGAVAVLKYNGIITETIKSWKKKILRTQESECVCVNGSCFTIMTDGPSDGPASYKIFKIEKGKVTKSIELDAPNSHYEECSCYPDTGKVMCVCRDNWHGSNRPWVSFDQNLDYQIGYICSGVFGDNPRPKDGKGSCGPVYVDGANGVKGFSYRYGDGVWIGRTKSNSSRQGFEMIWDPNGWTETDSSFFVKQDVVAMTDWSGYSGSFVQHPELTGLNCMRPCFWVELIRGRPKEKTIWTSGSSISFCGVNSDTVDWSWPDGAELPFTIDK

SEQ ID NO: 23472 - protein, 469 aa, synthetic construct
  REGION 1..469: note = neuraminidase__InfluenzaA__AGO00280
MNPNQKIITIGSICMVVGIISLILQIGNIVSIWISHSIQTGNQNHTGTCNQSIITYKNSTWVNQTYVNISNTNVVAGKDTTSVILAGNSSLCPIRGWAIYSKDNGVRIGSKGDVFVIREPFISCSHLECRTFFLTQGALLNDKHSNGTVKDRSPYRALMSCPVGEAPSPYNSRFESVAWSASACHDGMGWLTIGISGPDDGAVAVLKYNGIITETIKSWRKEILRTQESECVCVNGSCFTIMTDGPSGGPASYKIFKIEKGKVTKSIELDAPNSHYEECSCYPDTSKVMCVCRDNWHGSNRPWVSFDQNLDYQMGYICSGVFGDNPRPKDGKGSCGPVYVDGANGVKGFSYRYGNGVWIGRTKSNSSRQGFEMIWDPNGWTETDSNFFMKQDVVAVTDWSGYSGSFVQHPELTGLDCMRPCFWVELIRGRPKENTIWTSGSSISFCGVNSDTVDWSWPDGAELPFTIDK

SEQ ID NO: 23473 - protein, 470 aa, synthetic construct
  REGION 1..470: note = neuraminidase__InfluenzaA__AGO00292
MNPNQKIITIGSICMTIGTISLILQIGNIISIWISHSIQTGSQNHTGICNQRIITYENNTWVNQTYVNISNTNVVAGKDTTSMILAGNSSLCPIRGWAIYSKDNSIRIGSKGDVFVIREPFISCSHLECRTFFLTQGALLNDKHSNGTVKDRSPYRALMSCPIGEAPSPYNSRFESVAWSASACHDGMGWLTIGISGPDDGAVAVLKYNGIITEIIKSWRKQILRTQESECVCVNGSCFTIMTDGPSDGPASYRIFKIEKGKITKSIELDAPNSHYEECSCYPDTGKVMCVCRDNWHGSNRPWVSFNQNLDYQIGYICSGVFGDNPRPKDGKGSCDPVNVDGADGVKGFSYRYGDGVWIGRTKSNSSRKGFEMIWDPNGWTDTDDNFLVKQDVVAMTDWSGYSGSFVQHPELTGLDCIRPCFWVELIRGRPREKTTIWTSGSSISFCGVNSDTVNWSWPDGAELPFTIDM

SEQ ID NO: 23474 - protein, 470 aa, synthetic construct
  REGION 1..470: note = neuraminidase__InfluenzaA__AGO00304
MNPNQKIITIGSICMAIGTISLILQIGNIISIWISHSIQTGSQNHTGICNQRIITYENNTWVNQTYVNISNTNVVAGKDTTSMILAGNTSLCPIRGWAIYSKDNSIRIGSKGDVFVIREPFISCSHLECRTFFLTQGALLNDKHSNGTVKDRSPYRALMSCPIGEAPSPYNSRFESVAWSASACHDGMGWLTIGISGPDDGAVAVLKYNGIITEIIKSWRKQILRTQESECVCVNGSCFTIMTDGPSNGPASYRIFKIEKGKITKSIELDAPNSHYEECSCYPDTGKVMCVCRDNWHGSNRPWVSFNQNLDYQIGYICSGVFGDNPRPKDGKGSCDPVNVDGADGVKGFSYRYGNGVWIGRTKSNSSRKGFEMIWDPNGWTNTDGNFSVKQDVVAMTDWSGYSGSFVQHPELTGLDCMRPCFWVELIRGRPREKTTIWTSGSSISFCGVNSDTVNWSWPDGAELPFTIDK

SEQ ID NO: 23475 - protein, 469 aa, synthetic construct; identical to SEQ ID NO: 22544
  REGION 1..469: note = neuraminidase__InfluenzaA__AGO00316

SEQ ID NO: 23476 - protein, 469 aa, synthetic construct; identical to SEQ ID NO: 21988
  REGION 1..469: note = neuraminidase__InfluenzaA__AGO00328

SEQ ID NO: 23477 - protein, 469 aa, synthetic construct; identical to SEQ ID NO: 14095
  REGION 1..469: note = neuraminidase__InfluenzaA__AGO00340

SEQ ID NO: 23478 - protein, 454 aa, synthetic construct; identical to SEQ ID NO: 15719
  REGION 1..454: note = neuraminidase__InfluenzaA__AGO00352

SEQ ID NO: 23479 - protein, 454 aa, synthetic construct; identical to SEQ ID NO: 15719
  REGION 1..454: note = neuraminidase__InfluenzaA__AGO00376

SEQ ID NO: 23480 - protein, 454 aa, synthetic construct; identical to SEQ ID NO: 15719
  REGION 1..454: note = neuraminidase__InfluenzaA__AGO00388

SEQ ID NO: 23481 - protein, 454 aa, synthetic construct; identical to SEQ ID NO: 15719
  REGION 1..454: note = neuraminidase__InfluenzaA__AGO00400

SEQ ID NO: 23482 - protein, 454 aa, synthetic construct; identical to SEQ ID NO: 15719
  REGION 1..454: note = neuraminidase__InfluenzaA__AGO00412

SEQ ID NO: 23483 - protein, 454 aa, synthetic construct; identical to SEQ ID NO: 15719
  REGION 1..454: note = neuraminidase__InfluenzaA__AGO00424

SEQ ID NO: 23484 - protein, 454 aa, synthetic construct
  REGION 1..454: note = neuraminidase__InfluenzaA__AGO00436
MNPNQKIITIGSICLVVGLISLILQIGNIISIWISHSIQTGSQNHTGICNQNIITYKNSTWVKDTTSVILTGNSSLCPIRGWAIYSKDNSIRIGSKGDVFVIREPFISCSHLECRTFFLTQGALLNDKHSSGTVKDRSPYRALMSCPVGEAPSPYNSRFESVAWSASACHDGMGWLTIGISGPDNGAVAVLKYNGIITETIKSWRKKILRTQESECACVNGSCFTIMTDGPSDGLASYKIFKIEKGKVTKSIELNAPNSNYEECSCYPDTGKVMCVCRDNWHGSNRPWVSFDQNLDYQIGYICSGVFGDNPRPEDGTGSCGPVYVDGANGVKGFSYRYGNGVWIGRTKSHSSRHGFEMIWDPNGWTETDSKFSVRQDVVAMTDWSGYSGSFVQHPELTGLDCMRPCFWVELIRGRPKEKTIWTSASSISFCGVNSDTVDWSWPDGAELPFSIDK

SEQ ID NO: 23485 - protein, 454 aa, synthetic construct
  REGION 1..454: note = neuraminidase__InfluenzaA__AGO00448
MNPNQKIITIGSICLVVGLISLILQIGNIISIWISHSIQTGSQNHTGICNQNIITYKNSTWVKDTTSVILTGNSSLCPIRGWAIYSKDNSIRIGSKGDVFVIREPFISCSHLECRTFFLTQGALLNDKHSSGTVKDRSPYRALMSCPVGEAPSPYNSRFESVAWSASACHDGMGWLTIGISGPDNGAVAVLKYNGIITETIKSWRKKILRTQESECACVNGSCFTIMTDGPSDGLASYRIFKIEKGKVTKSIELNAPNSHYEECSCYPDTGKVMCVCRDNWHGSNRPWVSFDQNLDYQIGYICSGVFGDNPRPEDGTGSCGPVYVDGANGVKGFSYRYGNGVWIGRTKSHSSRHGFEMIWDPNGWTETDSKFSVRQDVVAMTDWSGYSGSFVQHPELTGLDCMRPCFWVELIRGRPKEKTIWTSASSISFCGVNSDTVDWSWPDGAELPFSIDK

SEQ ID NO: 23486 - protein, 469 aa, synthetic construct
  REGION 1..469: note = neuraminidase__InfluenzaA__AGQ47722
MNTNQRIITIGTICLIVGIISLLLQIGNIISLWISHSIQTGEKSHPEICNQSVITYENNTWVNQTYVNISNTNIAAGQGVTPIILAGNSSLCPISGWAIYSKDNSIRIGSKGDIFVMREPFISCSHLECRTFFLTQGALLNDRHSNGTVKDRSPYRTLMSCPIGEAPSPYNSRFESVAWSASACHDGMGWLTIGISGPDNGAVAVLKYNGIITDTIKSWRNKILRTQESECVCINGSCFTIMTDGPSNGQASYKIFKMEKGKIIKSIELDAPNYHYEECSCYPDTGKVMCVCRDNWHASNRPWVSFDQNLDYQIGYICSGVFGDNPRSNDGKGNCGPVLSNGANGVKGFSFRYGNGVWIGRTKSISSRSGFEMVWDPNGWTETDSSFSMKQDIIALTDWSGYSGSFVQHPELTGMNCIRPCFWVELIRGQPKESTIWTSGSSISFCGVNSGTASWSWPDGADLPFTIDK

SEQ ID NO: 23487 - protein, 470 aa, synthetic construct; identical to SEQ ID NO: 16453
  REGION 1..470: note = neuraminidase__InfluenzaA__AGQ47731

SEQ ID NO: 23488 - protein, 458 aa, synthetic construct
  REGION 1..458: note = neuraminidase__InfluenzaA__AGQ47743
MNPNQKIITIGSICMVVGIISLILQIGNIISIWISHSIQTGNQNHKNSTWMNQTYINISNTNVVAGQDSTSVILTGNSSLCPIRGWAINSKDNGIRIGSKGDVFVIREPFISCSHLECRTFFLTQGALLNDKHSNGTVKDRSPYRALMSCPVGEAPSPYNSRFESVAWSASACHDGMGWLTIGISGPDNGAVAVLKYNGIITETIKSWRKKILRTQESECTCVNGSCFTIMTDGPSNGLASYKIFKIEKGKVTKSIELNAPNSHYEECSCYPDTGKVMCVCRDNWHGSNRPWVSFDQNLDYQIGYICSGVFGDNPRPKDGTGSCGPVSADGANGVKGFSYRYGNGVWIGRTKSNSSRHGFEMIWDPNGWTETDSRFSVRQDVVAMTDRSGYSGSFVQHPELTGLDCMRPCFWVELIRGRPEEETIWTSGSIISFCGVNSDTVDWSWPDGAELPFTIDK

SEQ ID NO: 23489 - protein, 470 aa, synthetic construct
  REGION 1..470: note = neuraminidase__InfluenzaA__AGQ47755
MNPNQKIITIGSICMAIGTISLILQIGNIISIWISHSIQTGSQNHTGICNRRIVTYENNTWVNQTYVNISNTNVVAEKDTTSMILAGNSSLCPIRGWAIYSKDNSIRIGSKGDVFVIREPFISCSHLECRTFFLTQGALLNDKHSNGTVKDRSPYRALMSCPIGEAPSPYNSRFESVAWSASACHDGMGWLTIGISGPDDGAVAVLKYNGIITEIIKSWRKQILRTQESECVCVNGSCFTIMTDGPSNGPASYRIFKIKKGKITKSIELDAPNSHYEECSCYPDTGKVMCVCRDNWHGSNRPWVSFNQNLDYQIGYICSGVFGDNPRPKDGKGSCDPVNVDGADGVKGFSYRYGNGVWIGRTKSTSSRKGFEMIWDPNGWTDTDGNFLVKQDVVAMTDWSGYSGSFVQHPELTGLDCMRPCFWVELIRGRPREKTTIWTSGSSISFCGVNSDTVNWSWPDGAELPFTIDK

SEQ ID NO: 23490 - protein, 469 aa, synthetic construct
  REGION 1..469: note = neuraminidase__InfluenzaA__AGQ47767
MNPNQKIITIGSICMVVGIISLILQIGNIVSIWISHSIQTGNQNHTGTCDQSIITYKNSTWVNQTYVNISNTNVVAGKDTTSVILAGNSSLCPIRGWAIYSKDNGVRIGSKGDVFVIREPFISCSHLECRTFFLTQGALLNDKHSNGTVKDRSPYRALMSCPVGEAPSPYNSRFESVAWSASACHDGMGWLTIGISGPDDGAVAVLKYNGIITETIKSWRKEILRTQESECVCVNGSCFTIMTDGPSGGPASYKIFKIEKGKVTKSIELDAPNSHYEECSCYPDTSKVMCVCRDNWHGSNRPWVSFDQNLDYQMGYICSGVFGDNPRPKDGKGSCGPVYVDGANGVKGFSYKYGNGVWIGRTKSNSSRQGFEMIWDPNGWTETDSNFFTKQDVVAVTDWSGYSGSFVQHPELTGLDCMRPCFWVELIRGRPKENTIWTSGSSISFCGVNSDTVDWSWPDGAELPFTIDK

SEQ ID NO: 23491 - protein, 469 aa, synthetic construct; identical to SEQ ID NO: 23472
  REGION 1..469: note = neuraminidase__InfluenzaA__AGQ47779

SEQ ID NO: 23492 - protein, 470 aa, synthetic construct
  REGION 1..470: note = neuraminidase__InfluenzaA__AGQ47791
MNPNQKIITIGSICMAIGIISLILQIGNIISIWVSHSIQTGSQNHTGICNQRIITYENNTWVNQTHVNISNTNVVAGKDTTSMILAGNSSLCPIRGWAIYSKDNSIRIGSKGDVFVIREPFISCSHLECRTFFLTQGALLNDKHSNGTVKDRSPYRALMSCPIGEAPSPYNSRFESVAWSASACHDGMGWLTIGISGPDDGAVAVLKYNGIITETIKSWKKQILRTQESECVCVNGSCFTIMTDGPSDGPASYRIFKIEKGKITKSIELDAPNSHYEECSCYPDTGTVMCVCRDNWHGSNRPWVSFNQNLDYQIGYICSGVFGDNPRPKDGKGSCDPVNVDGADGVKGFSYRYGNGVWIGRTKSNSSRKGFEMIWDPNGWTDTDGNFLVKQDVVAMTDWSGYSGSFVQHPELTGLDCMRPCFWVELIRGRPREKTTIWTSGSSISFCGVNSDTVNWSWPDGAELPFTIDK

SEQ ID NO: 23493 - protein, 469 aa, synthetic construct
  REGION 1..469: note = neuraminidase__InfluenzaA__AGQ47803
MNPNQKIITIGSICMVVGIISLILQIGNIISIWISHSIQTGSQNHTGICNQSIITYKNSTWVNQTYVNISNTNVVAGKGTTSVILAGNSSLCPIRGWAIYSKDNGIRIGSKGDVFVIREPFISCSHLECRTFFLTQGALLNDKHSNGTVKDRSPYRALMSCPVGEAPSPYNSRFESVAWSACACHDGMGWLTIGISGPDDEAVAVLKYNGIITETIKSWRKKILRTQESECVCVNGSCFTIMTDGPSDGPASYKIFKIEKGKVTKSIELDAPNSHYEECSCYPDTGKVMCVCRDNWHGSNRPWVSFDQNLDYQIGYICSGVFGDNPRPKDGKGSCGPVYVDGANGVKGFSYRYGNGVWIGRTKSDSSRQGFEMIWDPNGWTETDSNFFVKQDIVAMTDWSGYSGSFVQHPELTGLDCMRPCFWVELIRGRPKEKTIWTSGSSISFCGVNSDTVDWSWPDGAELPFTIDK

SEQ ID NO: 23494 - protein, 455 aa, synthetic construct
  REGION 1..455: note = neuraminidase__InfluenzaA__AGQ47814
MNPNQKIITIGSICMAIGIISLILQIGNIISIWVSHSIQTGSQNHTGICNQRIITYENNTWVKDTTSMTLAGNSSLCPIRGWAIYSKDNSIRIGSKGDVFVIREPFISCSHLECRTFFLTQGALLNDKHSNGTVKDRSPYRALMSCPIGEAPSPYNSRFESVAWSASACHDGMGWLTIGISGPDDGAVAVLKYNGIITETIKSWKKQILRTQESECVCVNGSCFTIMTDGPSDGPASYRIFKIEKGKITKSIELDAPNSHYEECSCYPDTGTVMCVCRDNWHGSNRPWVSFNQNLDYQIGYICSGVFGDNPRPKDGKGSCDPVNVDGADGVKGFSYRYGNGVWIGRTKSNSSRKGFEMIWDPNGWTDTDGNFLVKQDVVAMTDWSGYSGSFVQHPELTGLDCMRPCFWVELIRGRPREKTTIWTSGSSISFCGVNSDTVNWSWPDGAELPFTIDK

SEQ ID NO: 23495 - protein, 470 aa, synthetic construct; identical to SEQ ID NO: 16457
  REGION 1..470: note = neuraminidase__InfluenzaA__AGQ47826

SEQ ID NO: 23496 - protein, 469 aa, synthetic construct
  REGION 1..469: note = neuraminidase__InfluenzaA__AGQ47838
MNPNQKIITIGSVSLTIATICFLMQIAILVTTVTLHFKQYECDSPANNQVMPCEPIIIERNITEIVYLTNTTIEKEICPKLVGYRNWSKPQCKITGFAPFSKDNSIRLSAGGDIWVTREPYVSCDPGKCYQFALGQGTTLDNKHSNDTIHDRTPHRTLLMNELGVPFHLGTKQVCIAWSSSSCHDGKAWLHVCVTGYDKNATASFIYDGRLVDSIGSWSQNILRTQESECVCINGTCTVVMTDGSASGRADTKILFIEEGKIVHISPLSGSAQHVEECSCYPRYPGVRCICRDNWKGSNRPVVDINVKDYSIDSSYVCSGLVGDTPRNNDRSSSSYCRNPNNEKGNHGVKGWAFDDGNDVWMGRTISEDSRSGYETFKVIGGWSTPNSKLQINRQVIVDSDNRSGYSGIFSVEGKSCINRCFYVELIRGREQETRVWWTSNSIVVFCGTSGTYGTGSWPDGADINLMPI

SEQ ID NO: 23497 - protein, 453 aa, synthetic construct
  REGION 1..453: note = neuraminidase__InfluenzaA__AGQ47850
MNPNQKIITIGSICMVVGIISLILQIGNIISIWISHSIQAGSSTWVNQTYVNISNTNVVAGPDATSVILTGNSSLCPIRGWAIYSKDNGIRIGSKGDIFVIREPFISCSHLECRAFFLTQGALLNDKHSNGTVKDRSPYRALMSCPVGEAPSPYNSRFESVAWSASACHDGMGWLTIGISGPDNGAVAVLKYNGIITETIKSWRKKILRTQESECACVNGSCFTIMTDGPSDGPASYKIFKIEKGKVTKSIELDAPNSHYEECSCYPDTGKVMCVCRDNWHGSNRPWVSFDQNLDYQIGYICSGVFGDSPRPKDGTGSCGPVSVDGANGVKGFSYRYGNGVWIGRTKSKSSRHGFEMIWDPNGWTETDSRFSVRQDVVAMTDWSGYSGSFVQHPELTGLDCMRPCFWVELIRGQPKEKTIWTSGSSISFCGVNSDTVDWSWPDGAELPFTIDK

SEQ ID NO: 23498 - protein, 469 aa, synthetic construct
  REGION 1..469: note = neuraminidase__InfluenzaA__AGQ47873
MNTNQRTITIGTICLIVGIISLLLQIGNIILLWMSHSIQTGEKSHPKVCNQSVITYENNTWVNQTYVNISNTNIAAGQGVTPIILAGNSSLCPISGWAIYSKDNSIRIGSKGDIFVMREPFISCSHLECRTFFLTQGALLNDRHSNGTVKDRSPYRTLMSCPIGEAPSPYNSRFESVAWSASACHDGMGWLTIGISGPDNGAVAVLKYNGIITDTIKSWRNKILRTQESECVCINGSCFTIMTDGPSNGQASYKLFKMEKGKIIKSIELDAPNYHYEECSCYPDTGKVVCVCRDNWHASNRPWVSFDQNLDYQIGYICSGVFGDNPRSNDGKGNCGPVLSNGANGVKGFSFRYGNGVWIGRTKSISSRSGFEMIWDPNGWTETDSSFSMKQDIIALTDWSGYSGSFVQHPELTGMNCIRPCFWVELIRGQPKESTIWTSGSSISFCGVNSGTASWSWPDGADLPFTIDK

SEQ ID NO: 23499 - protein, 469 aa, synthetic construct; identical to SEQ ID NO: 17214
  REGION 1..469: note = neuraminidase__InfluenzaA__AGQ47885

SEQ ID NO: 23500 - protein, 469 aa, synthetic construct; identical to SEQ ID NO: 21980
  REGION 1..469: note = neuraminidase__InfluenzaA__AGQ47897

SEQ ID NO: 23501 - protein, 469 aa, synthetic construct; identical to SEQ ID NO: 14095
  REGION 1..469: note = neuraminidase__InfluenzaA__AGQ47909

SEQ ID NO: 23502 - protein, 469 aa, synthetic construct
  REGION 1..469: note = neuraminidase__InfluenzaA__AGQ47921
MNPNQKIITIGSVSLTIATVCFLMQTAILVTTVTLHFKQYECDSPASNQVMPCEPIIIERNITEIVYLNNTTIEKEICPKVVEYRNWSKPQCQITGFAPFSKDNSIRLSAGGDIWVTREPYVSCDHGKCYQFALGQGTTLDNKHSNDTIHDRIPHRTLLMNELGVPFHLGTRQVCIAWSSSSCHDGKAWLHVCITGDDKNATASFIYDGRLVDSIGSWSQNILRTQESECVCINGTCTVVMTDGSASGRADTRILFIEEGKIVHISPLSGSAQHVEECSCYPRYPGVRCICRDNWKGSNRPVVDINMEDYSIDSSYVCSGLVGDTPRNDDRSSNSNCRNPNNERGNQGVKGWAFDNGDDVWMGRTISKDLRSGYETFKVIGGWSTPNSKSQINRQVIVDSDNRSGYSGIFSVEGKSCINRCFYVELIRGRKQEARVWWTSNSIVVFCGTSGTYGTGSWPDGANINFMPI

SEQ ID NO: 23503 - protein, 454 aa, synthetic construct
  REGION 1..454: note = neuraminidase__InfluenzaA__AGQ47933
MNPNQKIITIGSICMVVGLISLILQIGNIISIWISHSIQTGSQNHTGICNQNIITYKNSTWVKDTTSVILTGNSSLCPIRGWAIYSKDNSIRIGSKGDVFVIREPFISCSHLECRTFFLTQGALLNDRHSNGTVKDRSPYRALMSCPVGEAPSPYNSRFESVAWSASACHDGMGWLTIGISGPDNGAVAVLKYNGIITETIKSWRKKILRTQESECACVNGSCFTIMTDGPSDGLASYKIFKIEKGKVTKSIELNAPNSHYEECSCYPDTGKVMCVCRDNWHGSNRPWVSFDQNLDYQIGYICSGVFGDNPRPKDGTGSCGPVYVDGANGVKGFSYRYGNGVWIGRTKSHSSRHGFEMIWDPNGWTETDSKFSVRQDVVAMTDWSGYSGSFVQHPELTGLDCIRPCFWVELIRGRPKEKTIWTSASSISFCGVNSDTVNWSWPDGAELPFTIDK

SEQ ID NO: 23504 - protein, 454 aa, synthetic construct; identical to SEQ ID NO: 15719
  REGION 1..454: note = neuraminidase__InfluenzaA__AGQ47945

SEQ ID NO: 23505 - protein, 454 aa, synthetic construct; identical to SEQ ID NO: 15719
  REGION 1..454: note = neuraminidase__InfluenzaA__AGQ47957

SEQ ID NO: 23506 - protein, 454 aa, synthetic construct; identical to SEQ ID NO: 15719
  REGION 1..454: note = neuraminidase__InfluenzaA__AGQ47969

SEQ ID NO: 23507 - protein, 454 aa, synthetic construct; identical to SEQ ID NO: 15719
  REGION 1..454: note = neuraminidase__InfluenzaA__AGQ47981

SEQ ID NO: 23508 - protein, 454 aa, synthetic construct
  REGION 1..454: note = neuraminidase__InfluenzaA__AGQ48005
MNPNQKIITIGSICLVVGLISLILQIGNIISIWISHSIQTGSQNHTGICNQNIITYKNSTWVKDTTSVILTGNSSLCPIRGWAIYSKDNSIRIGSKGDVFVIREPFISCSHLECRTFFLTQGALLNDKHSSGTVKDRSPYRALMSCPVGEAPSPYNSRFESVAWSASACHDGMGWLTIGISGPDNGAVAVLKYNGIITETIKSWRKKILRTQESECACVNGSCFTIMTDGPSDGLASYKIFKIEKGKVTKSIELNAPNSHYEECSCYPDTGKVMCVCRDNWHGSNRPWVSFDQNLDYQIGYICSGVFGDNPRPEDGTGSCGPVYVDGANGVKGFSYRYSNGVWIGRTKSHSSRHGFEMIWDPNGWTETDSKFSVRQDVVAMTDWSGYSGSFVQHPELTGLDCMRPCFWVELIRGRPKEKTIWTSASSISFCGVNSDTVDWSWPDGAELPFSIDK

SEQ ID NO: 23509 - protein, 454 aa, synthetic construct; identical to SEQ ID NO: 23508
  REGION 1..454: note = neuraminidase__InfluenzaA__AGQ48017

SEQ ID NO: 23510 - protein, 454 aa, synthetic construct; identical to SEQ ID NO: 15719
  REGION 1..454: note = neuraminidase__InfluenzaA__AGQ48029

SEQ ID NO: 23511 - protein, 454 aa, synthetic construct
  REGION 1..454: note = neuraminidase__InfluenzaA__AGQ48041
MNPNQKIITIGSICLVVGLISLILQIGNIISIWISHSIQTGSQNHTGICNQNIITYKNSTWIKDTTSVILTGNSSLCPIRGWAIYSKDNSIRIGSKGDVFVIREPFISCSHLECRTFFLTQGALLNDKHSSGTVKDRSPYRALMSCPVGEAPSPYNSRFESVAWSASACHDGMGWLTIGISGPDNGAVAVLKYNGIITETIKSWRKKILRTQESECACVNGSCFTIMTDGPSDGLASYKIFKIEKGKVTKSIELNAPNSHYEECSCYPDTGKVMCVCRDNWHGSNRPWVSFDQNLDYQIGYICSGVFGDNPRPEDGTGSCGPVYVDGANGVKGFSYRYGNGVWIGRTKSHSSRHGFEMIWDPNGWTETDSKFSVRQDVVAMTDWSGYSGSFVQHPELTGLDCMRPCFWVELIRGRPKEKTIWTSASSISFCGVNSDTVDWSWPDGAELPFSIDK

SEQ ID NO: 23512 - protein, 454 aa, synthetic construct
  REGION 1..454: note = neuraminidase__InfluenzaA__AGQ48053
MNPNQKIITIGSICLVVGLISLILQIGNIISIWISHSIQTGSQNHTGICNQNIITYKNSTWIKDTTSVILTGNSSLCPIRGWAIYSKDNSIRIGSKGDVFVIREPFISCSHLECRTFFLTQGALLNDKHSSGTVKDRSPYRALMSCPVGEAPSPYNSRFESVAWSASACHDGMGWLTIGISGPDNGAVAVLKYNGIITETIKSWRKKILRTQESECACVNGSCFTIMTDGPSDGLASYKIFKIEKGKVTKSIELNAPNSHYEECSCYPDTGKVMCVCRDNWHGSNRPWVSFDQNLDYQIGYICSGVFGDNPRPEDGTGSCGPVYVDGANGVKGFSYRYGNGVWIGRTKSHSSRHGFEMIWDPNGWTETDSKFSVRQDVVAMADWSGYSGSFVQHPELTGLDCMRPCFWVELIRGRPKEKTIWTSASSISFCGVNSDTVDWSWPDGAELPFSIDK

SEQ ID NO: 23513 - protein, 469 aa, synthetic construct
  REGION 1..469: note = neuraminidase__InfluenzaA__AGQ81707
MNPNQKIITIGSICMVIGIASLMLQIGNMISIWVSHSIQTGNQYQPEPCNQSIITYENNTWVNQTYVNISNTNFLTEQAVTSVALAGNSSLCPISGWAIYSKDNGIRIGSKGDVFVIREPFISCSHLECRTFFLTQGALLNDKHSNGTVKDRSPYRTLMSCPVGEAPSPYNSRFESVAWSASACHDGISWLTIGISGPDNGAVAVLKYNGIITDTIKSWRNNILRTQESECACVNGSCFTVMTDGPSNGQASYKIFKIEKGKVVKSVELNAPNYHYEECSCYPDAGKIMCVCRDNWHGSNRPWVSFNQNLEYQIGYICSGVFGDNPRPNDGTGSCGPVSSNGAYGVKGFSFKYGNGVWIGRTKSTSSRSGFEMIWDPNGWTETDSSFSVKQDIVAITDWSGYSGSFVQHPELTGLDCMRPCFWVELIRGRPKENTIWTSGSSISFCGVDSDTVGWSWPDGAELPFTIDK

SEQ ID NO: 23514 - protein, 469 aa, synthetic construct
  REGION 1..469: note = neuraminidase__InfluenzaA__AGQ81715
MNPNQKIIAIGSVSLTIATICLLMQIAILVTTMTLHFKHNECTNSSNNQAVPCGPIIIERNVTEIVHLNSTTLEKEICPKAAGYRDWSKPQCQITGFAPFSKDNSIRLSASGDIWVTREPYVSCGLGKCYQFALGQGTTLDNRHSNGTSHDRTPYRTLLMNELGVPFHLATKQVCIAWSSSSCHDGKAWLHVCVTGDDRNATASIIYDGILVDSIGSWSKNILRTQESECVCINGTCTVVMTDGSASGKADTRILFIREGKIVHISPLSGSAQHVEECSCYPQYPEVRCVCRDNWRGSNRPVLYINMADYSIDSGYVCSGLVGDTPRNDDISSSSNCKDPNNERGAPGVKGWAFDSGNDIWMGRTIEKDSRSGYETFRVIGGWNTANSKSQTSRQVIVDSGNSSGYSGIFSIEGKSCINRCFYVELIRGRPKETRVWWTSNSIIVFCGTSGTYGTGSWPDGANINFMAI

SEQ ID NO: 23515 - protein, 469 aa, synthetic construct
  REGION 1..469: note = neuraminidase__InfluenzaA__AGQ81717
MNPNQKIIAIGSVSLTIATICLLMQIAILVTTMTPHFKHDECTNSSNNQAVPCGPIIIERNVTEIVHINSTILEKEICPKAAGYRNWSKPQCQIIGFAPFSKDNSIRLSASGDIWVTREPYVSCGLGKCYQFALGQGTTLDNRHSNGTSHDRTPHRTLLMNELGVPFHLATKQVCIAWSSSSCHDGKAWLHVCVTGDDRNATASIIYDGMLVDSIGSWSKNILRTQESECVCINGTCTVVMTDGSASGKADTRILFIREGKIVHISPLSGSAQHVEECSCYPQYPEVRCVCRDNWRGSNRPVLYINMADYSIDSGYVCSGLVGDTPRNDDISSSSNCKDPNNERGAPGVKGWAFDSGNDIWMGRTIEKDSRSGYETFRVIGGWNTANSKSQTSRQVIVDSDNSSGYSGIFSVEGKSCINRCFYVELIRGRPKETRVWWTSNSIIVFCGTSGTYGTGSWPDGANINFMAI

SEQ ID NO: 23516 - protein, 469 aa, synthetic construct
  REGION 1..469: note = neuraminidase__InfluenzaA__AGQ81718
MNPNQKIIAIGSVSLTIATICLLMQIAILVTTMTLHFKHNECTNSSNNQAVPCGPIIIERNLTEIVHLNSTILEKEICPKAAGYRNWSKPQCQITGFAPFSKDNSIRLSASGDIWVTREPYVSCGLGKCYQFALGQGTTLDNRHSNGTSHDRTPHRTLLMNELGVPFHLSTKQVCIAWSSSSCHDGKAWLHVCVTGDDRNATASIIYDGILVDSIVSWSKNILRTQESECVCINGTCTVVMTDGSASGKADTRILFIREGKIVHISPLSGSAQHVEECSCYPRYPEVRCVCRDNWRGSNRPVLYINMADYSIDSGYVCSGLVGDTPRNDDTSSSSNCRDPNNERGAPGVKGWAFDSGNDIWMGRTIEKDSRSGYETFRVIGGWNTANSKSQTSRQVIVDSDNSSGYSGVFSVEGKSCINRCFYVELIRGRPKETRVWWTSNSIIVFCGTSGTYGTGSWPDGANINFMAI

SEQ ID NO: 23517 - protein, 469 aa, synthetic construct
  REGION 1..469: note = neuraminidase__InfluenzaA__AGQ81719
MNPNQKIIAIGSVSLTIATICLLMQIAILVTTMTLHFKHNECTNSSNNQAVPCGPIIIERNVTEIVHLNSTTLEKEICTKAAGYRDWSKPQCQITGFAPFSKDNSIRLSASGDIWVTREPYVSCGLGKCYQFALGQGTTLDNRHSNGTTHDRTPHRTLLMNELGVPFHLATKQVCIAWSSSSCHDGKAWLHVCVTGDDRNATASIIYDGILVDSIGSWSKNILRTQESECVCINGTCTVVMTDGSASGKADTRILFIREGKIVHISPLSGSAQHVEECSCYPQYPEVRCVCRDNWRGSNRPVLYINMADYSIDSGYVCSGLVGDTPRNDDISSNSNCKDPNNESGAPGVKGWAFDSGNDIWMGRTIEKDSRSGYETFRVIGGWNTANSKSQTSRQVIVDSDNSSGYSGIFSIEGKSCINRCFYVELIRGRPKETRVWWTSNSIIVFCGTSGTYGTGSWPDGANINFMAI

SEQ ID NO: 23518 - protein, 469 aa, synthetic construct
  REGION 1..469: note = neuraminidase__InfluenzaA__AGQ81722
MNPNQKIIAIGSVSLTIATICLLMQIAILVTTMTPHFKHDECTNSSNNQAVPCGPIIIERNVTEIVHINSTILEKGICPKAAGYRNWSKPQCQIIGFAPFSKDNSIRLSASGDIWVTREPYVSCGLGKCYQFALGQGTTLDNRHSNGTSHDRTPHRTLLMNELGVPFHLATKQVCIAWSSSSCHDGKAWLHVCVTGDDRNATASIIYDGMLVDSIGSWSKNILRTQESECVCINGTCTVVMTDGSASGKADTRILFIREGKIVHISPLSGSAQHVEECSCYPQYPEVRCVCRDNWRGSNRPVLYINMADYSIDSGYVCSGLVGDTPRNDDTSSSSNCKDPNNERGAPGVKGWAFDSGNDIWMGRTIEKDSRSGYETFRVIGGWNTANSKSQTSRQVIVDSDNSSGYSGIFSVEGKSCINRCFYVELIRGRPKETRVWWTSNSIIVFCGTSGTYGTGSWPDGANINFMAI

SEQ ID NO: 23519 - protein, 469 aa, synthetic construct
  REGION 1..469: note = neuraminidase__InfluenzaA__AGQ81724
MNPNQKIIAIGSVSLTIATICLLMQIAILVTTMTLHFKHNECSNSSNNQAVPCGPIIIERNVTEIVHLNSTTLEKEICPKAAGYRDWSKPQCQITGFAPFSKDNSIRLSASGDIWVTREPYVSCGLGKCYQFALGQGTTLDNRHSNGTSHDRTPHRTLLMNELGVPFHLATKQVCIAWSSSSCHDGKAWLHVCVTGDDRNATASIIYDGILVDSIGSWSKNILRTQESECVCINGTCTVVMTDGSASGKADTRILFIREGKIVHISPLSGSAQHVEECSCYPQYPEVRCVCRDNWRGSNRPVLYINMEDYSIDSGYVCSGLVGDTPRNDDISSSSNCKDPNNERGAPGVKGWAFDSGNDLWMGRTIEKDSRSGYETFRVIGGWNTANSKSQTSRQVIVDSDNSSGYSGIFSVEGKSCINRCFYVELIRGRPKETRVWWTSNSIIVFCGTSGTYGTGSWPDGANINFMAI

SEQ ID NO: 23520 - protein, 469 aa, synthetic construct
  REGION 1..469: note = neuraminidase__InfluenzaA__AGQ81726
MNPNQKIIAIGSVSLTIATICLLMQIAILVTTMTLHFKHNECSNSSNNQAVPCGPIIIERNITEIVHLNSTTLEKEICPKAAGYRDWSKPQCQITGFAPFSKDNSIRLSASGDIWVTREPYVSCGLGKCYQFALGQGTTLDNRHSNGTSHDRTPHRTLLMNELGVPFHLATKQVCIAWSSSSCHDGKAWLHVCVTGDDRNATASIIYDGILVDSIGSWSKNILRTQESECVCIKRTCTVVMTDGSASGKADTRILFIREGKIVHISPLSGSAQHVEECSCYPQYPEVRCVCRDNWRGSNRPVLYINMADYSIDSGYVCSGLVGDTPRNDDISSSSNCKDPNNERGAPGVKGWAFDSGNDLWMGRTIEKESRSGYETFRVIGGWNTANSKSQTSRQVIVDSDNSSGYSGIFSVEGKSCINRCFYVELIRGRPKETRVWWTSNSIIVFCGTSGTYGTGSWPDGANINFMAI

SEQ ID NO: 23521 - protein, 469 aa, synthetic construct
  REGION 1..469: note = neuraminidase__InfluenzaA__AGQ81727
MNPNQKIIAIGSVSLTIATICLLMQVAILVTTMTLHFKHNECSNSSNNQAVPCGPIIIERNITEIVHLNSTTLEKEICPKAAGYRDWSKPQCQITGFAPFSKDNSIRLSASGDIWVTREPYVSCGLGKCYQFALGQGTTLDNRHSNGTSHDRTPHRTLLMNELGVPFHLATKQVCIAWSSSSCHDGRAWLHVCVTGDDRNATASIIYDGILVDSIGSWSKNILRTQESECVCINGTCTVVMTDGSASGKADTRILFIREGKIVHISPLSGSAQHVEECSCYPQYPEVRCVCRDNWRGSNRPVLYINMADYSIDSGYVCSGLVGDTPRNDDISSSSNCKDPNNERGAPGVKGWAFDSGNDLWMGRTIEKESRSGYETFRVIGGWNTANSKSQTSRQVIVDSDNSSGYSGIFSVEGKSCINRCFYVELIRGRPKETRVWWTSNSIIVFCGTSGTYGTGSWPDGANINFMPI

SEQ ID NO: 23522 - protein, 469 aa, synthetic construct
  REGION 1..469: note = neuraminidase__InfluenzaA__AGQ81728
MNPNQKIVAIGSVSLTIATMCLLMQIALFATTMTLHFKQTGSTNSSDNQAVPCGPIIIERNITEIVHLNSTTLEKETCPKSAGYRNWSKPQCQITGFAPFSKDNSIRLSAGGDIWVTREPYVSCGLGKCYQFALGQGTTLDNKHSNGTTYDRTPHRTLLMNELGVPFHLATKQVCIAWSSSSCHDGKAWLHVCVTGDDKNATASIIYDGILVDSIASWSKNILRTQESECVCINGTCTVVMTDGSASGRADTRILFIREGKIVHISPLSGSAQHVEECSCYPRYPEVRCVCRDNWKGSNRPVLYINMADYSIDSSYVCSGIVGDTPRNDDRSSSSNCRDPNNEIGAPGVKGWAFDSGNDIWMGRTIEKDSRSGYETFRVIGGWSTANSKSQINRQVIVDRDNSSGYSGIFSVEGKSCINRCFYVELIRGRPKENRVWWTSNSIIVFCGTSGTYGTGSWPDGANINLMPI

SEQ ID NO: 23523 - protein, 469 aa, synthetic construct
  REGION 1..469: note = neuraminidase__InfluenzaA__AGQ81729
MNPNQKIIAIGSVSLTIATICLLMQIAILVATMTLHSKHGECTNSSNNQAVPCGPIIIERNVTEIVHLNSTTLEKEICPKAAGYRDWSKPQCQITGFAPFSKDNSIRLSASGDIWVTREPYVSCGLGKCYQFALGQGTTLDNRHSNGTSHDRTPHRTLLMNELGIPFHLATKQVCIAWSSSSCHDGKAWLHVCVTGDDRNATASIIYDGMLVDSIGSWSKNILRTQESECVCINGTCTVVMTDGSASGKADTRILFIREGKIVHISPLLGSAQHVEECSCYPQYPEVRCVCRDNWRGSNRPVLYINMADYSVDSGYVCSGLVGDTPRNDDTSSSSNCKDPNNERGAPGVKGWAFDSGNDIWMGRTIEKDSRSGYETFRVIGGWNTANSKSQTSRQVIVDSDNSSGYSGIFSVEGKSCINRCFYVELIRGRPKETRVWWTSNSIIVFCGTSGTYGTGSWPDGANINFMPI

SEQ ID NO: 23524 - protein, 469 aa, synthetic construct
  REGION 1..469: note = neuraminidase__InfluenzaA__AGQ81730
MNPNQKIIAIGSVSLTIATICLLMQIAILVTTMTLHFKHNECINSSNNQSVPCGPIIIERNVTEIVHLNSTTLEKEICPKAAGYRDWSKPQCQITGFAPFSKDNSIRLSASGDIWVTREPYVSCGLGKCYQFALGQGTTLDNRHSNGTSHDRTPHRTLLMNELGVPFHLASKQVCIAWSSSSCHDGKAWLHVCVTGDDRNATASIIYDGMLVDSIGSWSKNILRTQESECVCINGTCTVVMTDGSASGEADTRILFIREGKIVHISPLSGSAQHVEECSCYPQYPEVRCVCRDNWRGSNRPVLYINMADYSIDSGYVCSGLVGDTPRNDDISSSSNCKDPNNERGAPGVKGWAFDSGNDIWMGRTIEKDSRSGYETFRVIGGWNTANSKSQTSRQVIVDSDNSSGYSGIFSVEGKSCINRCFYVELIRGRPKETRVWWTSNSIIVFCGTSGTYGTGSWPDGANINFMAI

SEQ ID NO: 23525 - protein, 469 aa, synthetic construct
  REGION 1..469: note = neuraminidase__InfluenzaA__AGQ81731
MNPNQKIIAIGSVSLTIATICLLMQIAILVTTMTLHFKHNECSNSSNNQAVPCGPIIIERNITEIVHLNSTTLEKEICPKTAGYRDWSKPQCQITGFAPFSKDNSIRLSASGDIWVTREPYVSCGFGKCYQFALGQGTTLDNRHSNGTSHDRTPHRTLLMNELGVPFHLATKQVCIAWSSSSCHDGKAWLHVCVTGDDRNATASIIYDGILVDSIGSWSKNILRTQESECVCINGTCTVVMTDGSASGKADTRILFIREGKIVHISPLSGSAQHVEECSCYPQYPEVRCVCRDNWRGSNRPVLYINMTDYSIDSGYVCSGLVGDTPRNDDISSSSNCKDPNNERGAPGVKGWAFDSGNDLWMGRTIEKESRSGYETFRVIGGWNTANSKSQTSRQVIVDSDNSSGYSGIFSVEGKSCINRCFYVELIRGRPKETRVWWTSNSIIVFCGTSGTYGTGSWPDGANINFMAI

SEQ ID NO: 23526 - protein, 469 aa, synthetic construct
  REGION 1..469: note = neuraminidase__InfluenzaA__AGQ81732
MNPNQKIIAIGSVSLTIATICLLMQVAILVTTMTLHFKHNECSNSSNNQAVPCGPIIIERNITEIVHLNSTTLEKEICPKAAGYRDWSKPQCQITGFAPFSKDNSIRLSASGDIWVTREPYVSCGLGKCYQFALGQGTTLDNRHSNGTSHDRTPHRTLLMNELGVPFHLATKQVCIAWSSSSCHDGKAWLHVCVTGDDRNATASIIYDGILVDSIGSWSKNILRTQESECVCINGTCTVVMTDGSASGKADTRILFIREGKIVHISPLSGSAQHVEECSCYPQYPEVRCVCRDNWRGSNRPVLYINMADYSIDSGYVCSGLVGDTPRNDDISSSSNCKDPNNERGAPGVKGWAFDSGNDLWMGRTIEKESRSGYETFRVIGGWNTANSKSQTSRQVIVDSDNSSGYSGIFSVEGKSCINRCFYVELIRGRPKETRVWWTSNSIIVFCGTSGTYGTGSWPDGANINFMPI

SEQ ID NO: 23527 - protein, 469 aa, synthetic construct
  REGION 1..469: note = neuraminidase__InfluenzaA__AGQ81733
MNPNQKIIAIGSVSLTIATICLLMQIAILVTTMTLHFKHNECSNSSNSQAVPCGPIIIERNVTEIVHLNSTTLEKEICPKAAEYRDWSKPQCQITGFAPFSKDNSIRLSASGDIWVTREPYVSCGLGKCYQFALGQGTTLDNRHSNGTSHDRTPHRTLLMNELGVPFHLATKQVCIAWSSSSCHDGKAWLHVCVTGDDRNATASIIYDGILVDSIGSWSKNILRTQESECVCINGTCTVVMTDGSASGKADTRILFIREGKIVHISPLSGSAQHVEECSCYPQYPEVRCVCRDNWRGSNRPVLYINMADYSIDSGYVCSGLVGDTPRNDDISSSSNCKDPNNERGAPGVKGWAFDSGNDLWMGRTIEKDSRSGYETFRVIGGWNTANSKSQTSRQVIVDSDNSSGYSGIFSVEGKSCINRCFYVELIRGRPKETRVWWTSNSIIVFCGTSGTYGTGSWPDGANINFMPI

SEQ ID NO: 23528 - protein, 469 aa, synthetic construct
  REGION 1..469: note = neuraminidase__InfluenzaA__AGQ81734
MNPNQKIIAIGSVSLTIATICLLMQIAILVTTMTLHFKHNEYSNSSNNQAVPCGPIIIERNITEIVHLNSTTLEKEICPKAAGYRDWSKPQCQITGFAPFSKDNSIRLSASGDIWVTREPYVSCGLGKCYQFALGQGTTLDNRHSNGTSHDRTPHRTLLMNELGVPFHLATKQVCIAWSSSSCHDGKAWLHVCVTGDDRNATASIIYDGILVDSIGSWSKNILRTQESKCVCIKRTCTVVKTDGSASGKADTRILFIREGKIVHISPLSGSAQHVEECSCYPQYPEVRCVCRDNWRGSNRPVLYINMADYSIDSGYVCSGLVGDTPRNDDISSSSNCKDPNNERGAPGVKGWAFDSGNDLWMGRTIEKESRSGYETFRVIGGWNTANSKSQTSRQVIVDSDNSSGYSGIFSVEGKSCINRCFYVELIRGRPKETRVWWTSNSIIVFCGTSGTYGTGSWPDGANINFMAI

SEQ ID NO: 23529 - protein, 469 aa, synthetic construct; identical to SEQ ID NO: 23527
  REGION 1..469: note = neuraminidase__InfluenzaA__AGQ81735

SEQ ID NO: 23530 - protein, 469 aa, synthetic construct
  REGION 1..469: note = neuraminidase__InfluenzaA__AGQ81736
MNPNQKIIAIGSVSLTIATICLLMQIAILVATMTLHSKHGECTDSSNNQAVPCGPIIIERNVTEIVHLNSTTLEKEICPKAAGYKDWSKPQCQITGFAPFSKDNSIRLSASGDIWVTREPYVSCGLGKCYQFALGQGTTLDNRHSNGTSHDRTPHRTLLMNELGVPFHLATKQVCIAWSSSSCHDGKAWLHVCVTGDDRNATASIIYDGMLVDSIGSWSKNILRTQESECVCINGTCTVVMTDGSASGKADTRILFIREGKIAHISPLSGSAQHVEECSCYPQYPEVRCVCRDNWRGSNRPVLYINMADYSVDSGYVCSGLVGDTPRNDDTSSSSNCKDPNNERGAPGVKGWAFDSGNDIWMGRTIEKDSRSGYETFRVIGGWNTANSKSQTSRQVIVDSDNSSGYSGIFSVEGKSCINRCFYVELIRGRPKETRVWWTSNSIIVFCGTSGTYGTGSWPDGANINFMPI

SEQ ID NO: 23531 - protein, 469 aa, synthetic construct
  REGION 1..469: note = neuraminidase__InfluenzaA__AGQ81737
MNPNQKIIAIGSVSLTIATICLLMQIAILVTTMTLHFKHNECSNSSNNQAVPCGPIIIERNITEIVHLNSTTLEKEICPKAAGYRDWSKPQCQITGFAPFSKDNSIRLSASGDIWVTREPYVSCGLGKCYQFALGQGTTLDNRHSNGTSHDRTPHRTLLMNELGVPFHLATKQVCIAWSSSSCHDGKAWLHVCVTGDDRNATASIIYDGILVDSIGSWSKNILRTQESECVCINGTCTVVMTDGSASGKADTRILFIREGKIVHISPLSGSAQHVEECSCYPQYPEVRCVCRDNWRGSNRPVLYINMADYSIDSGYVCSGLVGDTPRNDDISSSSNCKDPNNERGAPGVKGWAFDSGNDLWMGRTIEKESRSGYETFRVIGGWNTANSKSQTSRQVIVDSDNSSGYSGIFSVEGKSCINRCFYVELIRGRPKETRVWWTSNSIIVFCGTSGTYGTGSWPDGANINFMAI

SEQ ID NO: 23532 - protein, 469 aa, synthetic construct
  REGION 1..469: note = neuraminidase__InfluenzaA__AGQ81738
MNPNQKIIAIGSVSLTIATICLLMQVAILVTTMTLHFKHNECSNSSNNQAVPCGPIIIERNITEIVHLNSTTLEKEICPKAAGYRDWSKPQCQITGFAPFSKDNSIRLSASGDIWVTREPYVSCGLGKCYQFALGQGTTLDNRHSNGTSHDRTPHRTLLMNELGVPFHLATKQVCIAWSSSSCHDGKAWLHVCVTGDDRNATASIIYDGILVDSIGSWSKNILRTQESECVCINGTCTVVMTDGSASGKADTRILFIREGKIIHISPLSGSAQHVEECSCYPQYPEVRCVCRDNWRGSNRPVLYINMADYSIDSGYVCSGLVGDTPRNDDISSSSNCKDPNNERGAPGVKGWAFDSGNDLWMGRTIEKESRSGYETFRVIGGWNTANSKSQTSRQVIVDSDNSSGYSGIFSVEGKSCINRCFYVELIRGRPKETRVWWTSNSIIVFCGTSGTYGTGSWPDGANINFMPI

SEQ ID NO: 23533 - protein, 469 aa, synthetic construct
  REGION 1..469: note = neuraminidase__InfluenzaA__AGQ81739
MNPNQKIIAIGSVSLTIATICLLMQIAILVTTMTLHFKHDECTNSSNNQAVPCEPIIIERNVTEIVHINSTILEKEICPKAAGYRNWSKPQCQITGFAPFSKDNSIRLSASGDIWVTREPYVSCGLGKCYQFALGQGTTLDNRHSNGTLNDRTPHRTLLMNELGVPFHLATKQVCIAWSSSSCHDGKAWLHVCVTGDDRNATASIIYDDMLVDSIGSWSKNILRTQESECVCINGTCTVVMTDGSASGKADTRILFIREGKIVHISPLSGSAQHVEECSCYPQYPEVRCVCRDNWRGSNRPVLYINMADYSIDSGYVCSGLVGDTPRNDDISSSSNCKDPNNERGAPGVKGWAFDSGNDIWMGRTIEKDSRSGYETFRVIGGWNTANSKSQTSRQVIVDSDNSSGYSGIFSVEGKSCINRCFYVELIRGRPKETRVWWTSNSIIVFCGTSGTYGTGSWPDGANINFMAI

SEQ ID NO: 23534 - protein, 469 aa, synthetic construct
  REGION 1..469: note = neuraminidase__InfluenzaA__AGQ81740
MNPNQKIVAIGSVSLTIATICLLMQIAILVTTMTLHFKHGECTNSSNNQAVPCGPIIIERNITEIVHLNSTTLEKEICPKAAGYRDWSKPQCQITGFAPFSKDNSIRLSASGDIWVTREPYVSCGLGKCYQFALGQGTTLDNRHSNGTSHDRTPHRTLLMNELGVPFHLATKQVCIAWSSSSCHDGKAWLHVCVTGDDRNATASIIYNGILVDSIGSWSKNILRTQESECVCINGTCTVVMTDGSASGKADTRILFIREGKIVHISPLSGSAQHVEECSCYPQYPEVRCVCRDNWRGSNRPVLYINMADYSVDSGYVCSGLVGDTPRNDDTSSSSNCKDPNNERGAPGVKGWAFDSGNDIWMGRTIEKDLRSGYETFRVIGGWNTANSKSQTSRQVIVDSDNSSGYSGIFSVEGKSCINRCFYVELIRGRPKETRVWWTSNSIIVFCGTSGTYGTGSWPDGANINFMPI

SEQ ID NO: 23535 - protein, 469 aa, synthetic construct
  REGION 1..469: note = neuraminidase__InfluenzaA__AGQ81741
MNPNQKIVAIGSVSLTIATICLLMQIAILVTTMTLHFKHGECTNSSNNQAVPCGPIIIERNITEIVHLNSTTLDKEICPKAAGYRDWSKPQCQITGFAPFSKDNSIRLSASGDIWVTREPYVSCGLGKCYQFALGQGTTLDNRHSNGTSHDRTPHRTLLMNELGVPFHLATKQVCIAWSSSSCHDGKAWLHVCVTGDDRNATASIIYDGMLVDSIGSWSKNILRTQESECVCINGTCTVVMTDGSASGKADTRILFIREGKIVHISPLSGSAQHVEECSCYPQYPEVRCVCRDNWRGSNRPVLYINMADYSVDSGYVCSGLVGDTPRNDDTSSSSNCKDPNNERGAPGVKGWAFDSGNDIWMGRTIEKDLRSGYETFRVIGGWNTANSKSQTSRQVIVDSDNSSGYSGIFSVEGKSCINRCFYVELIRGRPKETRVWWTSNSIIVFCGTSGTYGTGSWPDGANINFMPI

SEQ ID NO: 23536 - protein, 469 aa, synthetic construct
  REGION 1..469: note = neuraminidase__InfluenzaA__AGQ81742
MNPNQKIVAIGSVSLTIATICLLMQIAILVTTMTLHFKHGECTNSSNNQAVPCGPIIIERNITEIVHLNSTTLEKEICPKAAEYRDWSKPQCQITGFAPFSKDNSIRLSASGDIWVTREPYVSCGLGKCYQFALGQGTTLDNRHSNGTSHDRTPHRTLLMNELGVPFHLATKQVCIAWSSSSCHDGKAWLHVCVTGDDRNATASIIYDGMLVDSIGSWSKNILRTQESECVCINGTCTVVMTDGSASGKADTRILFIREGKIVHISPLSGSAQHVEECSCYPQYPEVRCVCRDNWRGSNRPVLYINMADYSVDSGYVCSGLVGDTPRNDDTSSSSNCKDPNNERGAPGVKGWAFDSGNDIWMGRTIEKDLRSGYETFRVIGGWNTANSKSQTSRQVIVDSDNSSGYSGIFSVEGKSCINRCFYVELIRGRPKETRVWWTSNSIIVFCGTSGTYGTGSWPDGANINFMPI

SEQ ID NO: 23537 - protein, 469 aa, synthetic construct
  REGION 1..469: note = neuraminidase__InfluenzaA__AGQ81744
MNPNQKIIAIGSVSLTIATICLLMQIAILVTTMTLHFRHDECTNSSNNQAVPCGPIIIERNVTEIVHLNSTTLEKEICPKAAEYRDWSKPQCQITGFVPFSKDNSIRLSAGGDIWVTREPYVSCGLGKCYQFALGQGTTLDNRHSNGTSHDRTPHRTLLMNELGVPFHLATKQVCIAWSSSSCHDGKAWLHVCVTGDDRNATASIIYDGMLVDSIGSWSKNILRTQESECVCINGTCTVVMTDGSASGKADTRILFIREGKIVHISPLSGSAQHVEECSCYPQYPEVRCVCRDNWRGSNRPVLYINVADYSVDSGYVCSGLVGDTPRNDDISSSSNCKDPNNERGAPGVKGWAFDSGNDIWMGRTIEKDSRSGYETFRVIGGWNTANSKSQTSRQVIVDSDNPSGYSGIFSVEGKSCINRCFYVELIRGRPKETRVWWTSNSIIVFCGTSGTYGTGSWPDGANINFMPI

SEQ ID NO: 23538 - protein, 469 aa, synthetic construct
  REGION 1..469: note = neuraminidase__InfluenzaA__AGQ81746
MNPNQKIIAIGSVSLTIATICLLMQIAILVTTMTLHFKHNECSNSSNSQAVPCGPIIIERNVTEIVHLNSTTLEKEICPKAAEYRGWSKPQCQITGFAPFSKDNSIRLSASGDIWVTREPYVSCDLGKCYQFALGQGTTLDNRHSNGTSHDRTPHRTLLMNELGVPFHLATKQVCIAWSSSSCHDGKAWLHVCVTGDDRNATASIIYDGILVDSIGSWSKNILRTQESECVCINGTCTVVMTDGSASGKADTRILFIREGKIVHISPLSGSAQHVEECSCYPQYPEVRCVCRDNWRGSNRPVLYINMADYSIDSGYVCSGLVGDTPRNDDISSSSNCKDPNNERGAPGVKGWAFDSGNDLWMGRTIEKDSRSGYETFRVIGGWNTANSKSQTSRQVIVDSDNSSGYSGIFSVEGKSCINRCFYVELIRGRPKETRVWWTSNSIIVFCGTSGTYGTGSWPDGANINFMPI

SEQ ID NO: 23539 - protein, 469 aa, synthetic construct
  REGION 1..469: note = neuraminidase__InfluenzaA__AGQ81747
MNPNQKIVAIGSVSLTIATICLLMQIAILVTTMTLHFKHGECTNSSNNQAVPCGPIIIERNITEIVHLNSTTLEKEICPKAAGYRDWSKPQCQITGFAPFSKDNSIRLSASGDIWVTREPYVSCGLGKCYQFALGQGTTLDNRHSNGTSHDRTPHRTLLMNELGVPFHLATKQVCIAWSSSSCHDGKAWLHVCVTGDDRNATASIIYDGMLVDSIGSWSKNILRTQESECVCINGTCTVVMTDGSASGKADTRILFIREGKIVHISPLSGSAQHVEECSCYPQYPEVRCVCRDNWRGSNRPVLYINMADYSVDSGYVCSGLVGDTPRNDDTSSSSNCKDPNNERGAPGVKGWAFDSGNDIWMGRTIEKDLRSGYETFRVIGGWNTANSKSQTSRQVIVDSDNSSGYSGIFSVEGKSCINRCFYVELIRGRPKETRVWWTSNSIIVFCGTSGTYGTGSWPDGANINFMPI

SEQ ID NO: 23540 - protein, 466 aa, synthetic construct
  REGION 1..466: note = neuraminidase__InfluenzaA__AGQ81749
MNPNQKIIAIGSVSLTTAIICFLMQIAILTTTMTLHFKQNECSNPSNNQVVPCEPIIIERNTVHLNSTTIEKEICSKVAEYKNWSKPQCQITGFAPFSKDNSIRLSAGGDIWVTREPYVSCSLGKCYQFALGQGTTLKNKHSNGTTHDRIPHRTLLMNELGVPFHLGTKQVCIAWSSSSCYDGKAWLHICVTGDDKNATASIIYDGMLADSIGSWSKNILRTQESECVCINGTCAVVMTDGSASGKADTRILFIREGRIINISPLSGSAQHVEECSCYPRYPEVRCVCRDNWKGSNRPVLYINMADYSVESSYVCSGLVGDTPRNDDSSSSSNCRDPNNERGAPGVKGWAFDDGNDVWMGRTIKKDSRSGYETFRVINGWTTANSKSQINRQVIVDSDNWSGYSGIFSVEGKNCINRCFYVELIRGRPQEPKVWWTSNSIIAFCGTSGTYGTGSWPDGANINFMPI

SEQ ID NO: 23541 - protein, 466 aa, synthetic construct; identical to SEQ ID NO: 23540
  REGION 1..466: note = neuraminidase__InfluenzaA__AGQ81750

SEQ ID NO: 23542 - protein, 469 aa, synthetic construct
  REGION 1..469: note = neuraminidase__InfluenzaA__AGQ81751
MNPNQKIIAIGSVSLTIATICLLMQIAILVTTMTLYFKHNECSNSSNNQAVPCGPIIIERNITEIVHLNSTTLEKEICPKAAGYRDWSKPQCQITGFAPFSKDNSIRLSASGDIWVTREPYVSCGLGKCYQFALGQGTTLDNRHSNGTSHDRTPHRTLLMNELGVPFHLATKQVCIAWSSSSCHDGKAWLHVCVTGDDRNATASIIYDGILVDSIGSWSKNILRTQESECVCINGTCTVVMTDGSASGKADTRILFIREGKIVHISPLSGSAQHVEECSCYPQYPEVRCVCRDNWRGSNRPVLYINMADYSIDSGYVCSGLVGDTPRNDDISSSSNCKDPNNERGAPGVKGWAFDSGNDLWMGRTIEKESRSGYETFRVIGGWNTANSKSQTSRQVIVDSDNSSGYSGIFSVEGKSCINRCFYVELIRGRPKETRVWWTSNSIIVFCGTSGTYGTGSWPDGANINFMPI

SEQ ID NO: 23543 - protein, 469 aa, synthetic construct
  REGION 1..469: note = neuraminidase__InfluenzaA__AGQ81753
MNPNQKIVAIGSVSLTIATICLLMQIAILVTTMTLHFKHGECTNSSNNQAVPCGPIIIERNITGIVHLNSTTLEKEICPKAAGYRDWSKPQCQITGFAPFSKDNSIRLSASGDIWVTREPYVSCGLGKCYQFALGQGTTLDNRHSNGTSHDRTPHRTLLMNELGVPFHLATKQVCIAWSSSSCHDGKAWLHICVTGDDRNATASIIYDGMLVDSIGSWSKNILRTQESECVCINGTCTVVMTDGSASGKADTRILFIREGKIVHISPLSGSAQHVEECSCYPQYPEVRCVCRDNWRGSNRPVLYINMADYSVDSGYVCSGLVGDTPRNDDTSSSSNCKDPNNERGAPGVKGWAFDSGNDIWMGRTIEKDLRSGYETFRVIGGWNTANSKSQTNRQVIVDSDNSSGYSGIFSVEGKSCINRCFYVELIRGRPKETRVWWTSNSIIVFCGTSGTYGTGSWPDGANINFMPI

SEQ ID NO: 23544 - protein, 469 aa, synthetic construct; identical to SEQ ID NO: 23543
  REGION 1..469: note = neuraminidase__InfluenzaA__AGQ81754

SEQ ID NO: 23545 - protein, 469 aa, synthetic construct
  REGION 1..469: note = neuraminidase__InfluenzaA__AGQ81756
MNPNQKIIAIGSISLTIATICLLIQIAILVTTMTLHFKHGECTNSSNNQAVPCGPIIIERNVTEIVHLNSTTLEKEICPKAAGYRDWSKPQCQITGFAPFSKDNSIRLSASGDIWVTREPYVSCGLGKCYQFALGQGTTLDNRHSNGTSHDRTPHRTLLMNELGVPFHLATKQVCIAWSSSSCHDGKAWLHVCVTGDDRNATASIIYDGLLVDSIGSWSKNILRTQESECVCINGTCTVVMTDGSASGKADTRILFIREGKIIHISPLSGSAQHVEECSCYPQYPEVRCVCRDNWRGSNRPVLYINMADYSVDSGYVCSGLVGDTPRNDDTSSSSNCKDPNNERGAPGVKGWAFDSGNDIWMGRTIEKDSRSGYETFRVIGGWNTANSKSQTSRQVIVDSDNSSGYSGIFSVEGKSCINRCFYVELIRGRPKETRVWWTSNSIIVFCGTSGTYGTGSWPDGANINFMPI

SEQ ID NO: 23546 - protein, 469 aa, synthetic construct
  REGION 1..469: note = neuraminidase__InfluenzaA__AGQ81757
MNPNQKIIAIGSVSLTIATICLLIQIAILVTTMTLHFKHGECTNSSNNQAVPCGPIIIERNVTEIVHLNSTTLEKEICPKAAGYRDWSKPQCQITGFAPFSKDNSIRLSASGDIWVTREPYVSCGLGKCYQFALGQGTTLDNRHSNGTSHDRTPHRTLLMNELGVPFHLATKQVCIAWSSSSCHDGKAWLHVCVTGDDRNATASIIYDGLLVDSIGSWSKNILRTQESECVCINGTCTVVMTDGSASGKADTRILFIREGKIIHISPLSGSAQHVEECSCYPQYPEVRCVCRDNWRGSNRPVLYINMADYSVDSGYVCSGLVGDTPRNDDTSSSSNCKDPNNERGAPGVKGWAFDSGNDIWMGRTIEKDSRSGYETFRVIGGWNTANSKSQTSRQVIVDSDNSSGYSGIFSVEGKSCINRCFYVELIRGRPKETRVWWTSNSIIVFCGTSGTYGTGSWPDGANINFMPI

SEQ ID NO: 23547 - protein, 466 aa, synthetic construct
  REGION 1..466: note = neuraminidase__InfluenzaA__AGQ81758
MNPNQKIIAIGSVSLIIAIICLLMQIAILTTTMTLHFRQNECSNPSNNQVVPCEPTIIERNTVHLNSTTIEREICPKVAEYKNWSKPQCQITGFAPFSKDNSIRLSAGGDIWVTREPYVSCSLGKCYQFALGQGTTLKNKHSNGTTHDRTPHRTLLMNELGVPFHLGTKQVCIAWSSSSCYDGKAWLHICVTGDDENATASIIYDGMLVDSIGSWSKNILRTQESECVCINGTCAVVMTDGSASGKADTRVLFIREGKIINISPLSGSAQHVEECSCYPRYPEVRCVCRDNWKGSNRPVLYINMADYSIESSYVCSGLVGDTPRNDDSSSSSNCRDPNNERGAPGVKGWAFDDGNDVWMGRTIKNDSRSGYETFRVVNGWTMANSKSQINRQVIVDSDNWSGYSGIFSVEGKKCINRCFYVELIRGRPQEPRVWWTSNSIIVFCGTSGTYGTGSWPDGANINFMPI

SEQ ID NO: 23548 - protein, 466 aa, synthetic construct
  REGION 1..466: note = neuraminidase__InfluenzaA__AGQ81759
MNPNQKIIAIGSVSLTIAIICFLIQIAILTTTMTLHFRQSECSNPSNNQVVPCEPIIIERNTVHLNSTIIEKEICPKVAEYKNWSKPQCQITGFAPFSKDNSIRLSAGGDIWVTREPYVSCSLGKCYQFALGQGTTLKNKHSNGTTHDRIPHRTLLMNELGVPFHLGTKQVCIAWSSSSCHDGKAWLHICVTGDDKNATASIIYDGMLVDSIGSWSKNILRTQESECVCINGTCAVVMTDGSASGKADTRILFIREGKIINISPLSGSAQHVEECSCYPRYPEVRCVCRDNWKGSNRPVLYINMADYSIESSYVCSGLVGDTPRDDDSSSSSNCRDPNNERGAPGVKGWAFDDGNDIWMGRTIKSDSRSGYETFRVINGWTTANSKSQINRQVIVDSDSWSGYSGIFSVEGKNCINRCFYVELIRGRPRETRVWWTSNSIIVFCGTSGTYGTGSWPDGANINFMPI

SEQ ID NO: 23549 - protein, 466 aa, synthetic construct
  REGION 1..466: note = neuraminidase__InfluenzaA__AGQ81760
MNPNQKIIAIGSVSLTIAIICFLMQIAILTTTMTLHFRQNECSNPSNNQVVPCEPIIIERNTVHLNSTTIEKEICPKVAEYKNWSKPQCQITGFAPFSKDNSIRLSAGGDIWVTREPYVSCSLGKCYQFALGQGTTLKNKHSNGTTHDRIPHRTLLMNELGVPFHLGTKQVCIAWSSSSCHDGKAWLHICVTGDDKNATASIIYDGMLVDSIGSWSKNILRTQESECVCINGTCAVVMTDGSASGKADTRVLFIREGKIINISPLSGSAQHVEECSCYPRYPEVRCVCRDNWKGSNRPVLYINMADYSIESSYVCSGLVGDTPRDDDSSSSSNCRDPNNERGAPGVKGWAFDDGNDIWMGRTIKSDSRSGYETFRVVNGWITANSKSQINRQVIVDSDSWSGYSGIFSVEGKNCINRCFYVELIRGRPQETRVWWTSNSIIVFCGTSGTYGTGSWPDGANINFMPI

SEQ ID NO: 23550 - protein, 466 aa, synthetic construct
  REGION 1..466: note = neuraminidase__InfluenzaA__AGQ81761
MNPNQKIIAIGSVSLTIAIICFLMQIAILTTTMTLHFRQNECSNPSNNQVVPCEPIIIERNTVHLNSTTIEKEICPKVAEYKNWSKPQCQITGFAPFSKDNSIRLSAGGDIWVTREPYVSCSLGKCYQFALGQGTTLKNKHSNGTTHDRIPHRTLLMNELGVPFHLGTKQVCIAWSSSSCHDGKAWLHICVTGDDKNATASIIYDGMLVDSIGSWSKNILRTQESECVCINGTCAVVMTDGSASGKADTRILFIKEGKIINISPLSGSAQHVEECSCYPRYPEVRCVCRDNWKGSNRPVLYINMADYSIESSYVCSGLVGDTPRDDDSSSSSNCRDPNNERGAPGVKGWAFDDGNDIWMGRTIKSDSRSGYETFRVVNGWTTANSKSQINRQVIVDSDSWSGYSGIFSVEGKNCINRCFYVELIRGRPQETRVWWTSNSIIVFCGTSGTYGTGSWPDGANINFMPI

SEQ ID NO: 23551 - protein, 466 aa, synthetic construct
  REGION 1..466: note = neuraminidase__InfluenzaA__AGQ81763
MNPNQKIIAIGSVSLIIAIICLLMQIAILTTTMTLHFRQNECSNPSNNQVVPCEPIIIERNTVHLNSTTIEREICPKVAEYKNWSKPQCQITGFAPFSKDNSIRLSAGGDIWVTREPYVSCSLGKCYQFALGQGTTLKNKHSNGTTHDRTPHRTLLMNELGVPFHLGTKQVCIAWSSSSCYDGKAWLHICVTGDDKNATASIIYDGMLVDSIGSWSKNILRTQESECVCINGTCAVVMTDGSASGKADTRVLFIREGKIINISPLSGSAQHVEECSCYPRYPEVRCVCRDNWKGSNRPVLYINMADYSIESSYVCSGLVGDTPRNDDSSSSSNCRDPNNERGAPGVKGWAFDDGNDVWMGRTIKNGSRSGYETFRVVNGWTMANSKSQINRQVIVDSDNWSGYSGIFSVEGKKCINRCFYVELIRGRPQEPRVWWTSNSIIVFCGTSGTYGTGSWPDGANINFMPI

SEQ ID NO: 23552 - protein, 466 aa, synthetic construct
  REGION 1..466: note = neuraminidase__InfluenzaA__AGQ81766
MNPNQKIIAIGSVSLTIAIICFLMQIAILTTTMTLHFRQNECSNPSNNQVVPCEPIIIERNTVHLNSTTIEKEICPKVAEYKNWSKPQCQITGFAPFSKDNSIRLSAGGDIWVTREPYVSCSLGKCYQFALGQGTTLKNKHSNGTTHDRIPHRTLLMNELGVPFHLGTKQVCIAWSSSSCHDGKAWLHICVTGDDKNATASIIYDGMLVDSIGSWSKNILRTQESECVCINGTCAVVMTDGSASGKADTRILFIREGKIINISPLSGSAQHVEECSCYPRYPEVRCVCRDNWKGSNRPVLYINMADYSIESSYVCSGLVGDTPRDDDSFSSSNCRDPNNERGAPGVKGWAFDDGNDIWMGRTIKSDSRSGYETFRVVNGWTTANSKSQINRQVIVDSDSWSGYSGIFSVEGKNCINRCFYVELIRGRPQETIVWWTSNSIIVFCGTSGTYGTGSWPDGANINFMPI

SEQ ID NO: 23553 - protein, 466 aa, synthetic construct; identical to SEQ ID NO: 23552
  REGION 1..466: note = neuraminidase__InfluenzaA__AGQ81767

SEQ ID NO: 23554 - protein, 469 aa, synthetic construct
  REGION 1..469: note = neuraminidase__InfluenzaA__AGQ81768
MNPNQKIVAIGSVSLTIATICLLMQIAILVTTMTLHFKHGECTNSSNNQAVPCGPIIIERNITEIVHLNSTTLEKEICPKAAGYRDWSKPQCQITGFAPFSKDNSIRLSASGDIWVTREPYVSCGLGKCYQFALGQGTTLDNRHSNGTSHDRTPHRTLLMSELGVPFHLATKQVCIAWSSSSCHDGEAWLHICVTGDDRNATASIIYDGMLVDSIGSWSKNILRTQESECVCINGTCTVVMTDGSASGKADTRILFIREGKIVHISPLSGSAQHVEECSCYPQYPEVRCVCRDNWRGSNRPVLYINMADYSVDSGYVCSGLVGDTPRNDDTSSSSNCKDPNNERGAPGVKGWAFDSGNDIWMGRTIEKDLRSGYETFRVIGGWNTANSKSQTNRQVIVDSDNSSGYSGIFSVEGKSCINRCFYVELIRGRPKETRVWWTSNSIIVFCGTSGTYGTGSWPDGANINFMPI

SEQ ID NO: 23555 - protein, 469 aa, synthetic construct
  REGION 1..469: note = neuraminidase__InfluenzaA__AGQ81769
MNPNQKIVAIGSVSLTIATICLLMQIAILVTTMTLHFKHGECTNSSNNQAVPCGPIIIERNITEIVHLNSTTLEKEICPKAAGYRDWSKPQCQITGFAPFSKDNSIRLSASGDIWVTREPYVSCGLGKCYQFALGQGTTLDNRHSNGTSHDRTPHRTLLMSELGVPFHLATKQVCIAWSSSSCHDGEAWLHICVTGDDRNATASIIYGGMLVDSIGSWSKNILRTQESECVCINGTCTVVMTDGSASGKADTRILFIREGKIVHISPLSGSAQHVEECSCYPQYPEVRCVCRDNWRGSNRPVLYINMADYSVDSGYVCSGLVGDTPRNDDTSSSSNCKDPNNERGAPGVKGWAFDSGNDIWMGRTIEKDLRSGYETFRVIGGWNTANSKSQTNRQVIVDSDNSSGYSGIFSVEGKSCINRCFYVELIRGRPKETRVWWTSNSIIVFCGTSGTYGTGSWPDGANINFMPI

SEQ ID NO: 23556 - protein, 466 aa, synthetic construct
  REGION 1..466: note = neuraminidase__InfluenzaA__AGQ81770
MNPNQKIIAIGSVSITIAIICFIMQIAILTTTMTLHFRQNECSNPSNNQVVPCEPIIIERNTVHLNSTTIEKETCPKVAEYKNWSKPQCQITGFAPFSKDNSIRLSAGGDIWVTREPYVSCSLGKCYQFALGQGTTLKNKHSNGTTHDRIPHRTLLMNELGVPFHLGTKQVCIAWSSSSCHDGKAWLHICVTGDDKNATASIIYDGMLVDSIGSWSKNILRTQESECVCINGTCAVVMTDGSASGKADTRVLFIREGKIINISPLSGSAQHVEECSCYPRYPEVRCVCRDNWKGSNRPVLYINMADYSVESSYVCSGLVGDTPRDDDSSSSSNCRDPNNERGAPGVKGWAFDDGNDIWMGRTIKSDSRSGYETFRVVNGWTTANSKSQINRQVIVDSDSWSGYSGIFSVEGKNCINRCFYVELIRGRPQETRVWWTSNSIIVFCGTSGTYGTGSWPDGANINFMPI

SEQ ID NO: 23557 - protein, 469 aa, synthetic construct
  REGION 1..469: note = neuraminidase__InfluenzaA__AGQ81772
MNPNQKIVAIGSASLTIATMCLLLQIALFATTMTLHFKQTGCTNSSDNQAVPCGPIIIERNITEIVHLNSTTLEKETCPKSAGYRNWSKPQCQITGFAPFSKDNSIRLAAAGDIWVTREPYVSCGLGKCYQFALGQGTTLDNKHSNGTTHDRTPHRTLLMSELGVPFHLATKQVCIAWSSSSCHDGKAWLHVCVTGDDKNATASIIYDGILVDSIASWSKNILRTQESECVCINGTCTVVMTDGSASGRADTRILFIREGKIVHISPLSGSAQHVEECSCYPRYPEVRCVCRDNWKGSNRPVLFINMADYSIDSSYVCPGLVGDTPRNDDRSSSSNCRDPNNERGAPGVKGWAFDSGNDIWMGRTIEKDSRSGYETFRVISGWSTANSKSQINRQVIVDRDNSSGYSGIFSVEGKSCINRCFYVELIRGRPKENRVWWTSNSIIVFCGTSGTYGTGSWPDGANINLMPI

SEQ ID NO: 23558 - protein, 466 aa, synthetic construct
  REGION 1..466: note = neuraminidase__InfluenzaA__AGQ81773
MNPNQKIIAIGSVSLTIAIICFLMQIAILTTTMTLHFRQNECSNPSNNQVVPCEPIIIERKTVHLNSTTIEKEICPKVAEYKNWSKPQCQITGFAPFSKDNSIRLSAGGDIWVTREPYVSCSLGKCYQFALGQGTTLKNKHSNGTTHDRIPHRTLLMNELGVPLHWGTKQVCIAWSSSSCHDGKAWLHICVTGDDKNATASIIYDGMLVDSIGSWSKNILRTQESECVCINGTCAVVMTDGSASGKADTRVLFIREGKIINISPLSGSAQHVEECSCYPRYPEVRCVCRDNWKGSNRPVLYINMADYSIESSYVCSGLVGDTPRDDDSSSSSNCRDPNNERGAPGVKGWGFDDGNDIWMGRTIKSDSRSGYETFRVVNGWTTANSKSQINRQVIVDSDSWSGYSGIFSVEGKNCINRCFYVELIRGRPQETRVWWTSNSIIVFCGTSGTYGTGSWPDGANINFMPI

SEQ ID NO: 23559 - protein, 466 aa, synthetic construct
  REGION 1..466: note = neuraminidase__InfluenzaA__AGQ81774
MNPNQKIIAIGSVSLIIAIICLLMQIAILTTTMTLHFRQNECSNPSNNQVMPCEPIIIERNTVHLNSTTIEREICPKVAEYKNWSKPQCQITGFAPFSKDNSIRLSAGGDIWVTREPYVSCSLDKCYQFALGQGTTLKNKHSNGTTHDRTPHRTLLMNELGVPFHLGTKQVCIAWSSSSCYDGKAWLHICVTGDDKNATASIIYDGMLVDSIGSWSKNILRTQESECVCINGTCAVVMTDGSASGKADTRVLFIREGKIINISPLSGSAQHVEECSCYPRYPEVRCVCRDNWKGSNRPILYINMADYSIESSYVCSGLVGDTPRNDDSSSSSNCRDPNNERGAPGVKGWAFDDGNDVWMGRTIKNGSRSGYETFRVVNGWTIANSKSQINRQVIVDSDDWSGYSGIFSVEGKKCINRCFYVELIRGRPQEPRVWWTSNSIIVFCGTSGTYGTGSWPDGANINFMPI

SEQ ID NO: 23560 - protein, 466 aa, synthetic construct
  REGION 1..466: note = neuraminidase__InfluenzaA__AGQ81776
MNPNQKIIAIGSVSLTIAIICFLMQIAILTTTMTLHFRQNECSNPSNNQVVPCEPIIIERNTVHLNSTTIEKEICPKVAEYKNWSKPQCQITGFAPFSKDNSIRLSAGGDIWVTREPYVSCSLGKCYQFALGQGTTLKNKHSNGTTHDRIPHRTLLMNELGVPFHLGTKQVCIAWSSSSCHDGKAWLHICVTGDDKNATASIIYDGMLVDSIGSWSKNILRTQESECVCINGTCAVVMTDGSASGKADTRVLFIREGKIINISPLSGSAQHVEECSCYPRYPEVRCVCRDNWKGSNRPVLYINMADYSIESSYVCSGLVGDTPRDDDSSSSSNCRDPNNERGAPGVKGWAFDDGNDIWMGRTIKSDSRSGYETFRVIDGWTTADSKSQINRQVIVDSDSWSGYSGIFSVEGKNCINRCFYVELIRGRPQETRVWWTSNSIIVFCGTSGTYGTGSWPDGANINFMPI

SEQ ID NO: 23561 - protein, 469 aa, synthetic construct
  REGION 1..469: note = neuraminidase__InfluenzaA__AGQ81777
MNPNQKIVTIGSASLTIATMCLLLQIALFATTMTLHFKQTGCTNSSDNQAVPCGPIIIERNITEIVHLNSTTLEKETCPKSAGYRNWSKPQCQITGFAPFSKDNSIRLAAAGDIWVTREPYVSCGLGKCYQFALGQGTTLDNKHSNGTTHDRTPHRTLLMNELGVPFHLATKQVCIAWSSSSCHDGKAWLHVCVTGDDKNATASIIYDGILVDSIASWSKNILRTQESECVCINGTCTVVMTDGSASGRADTRILFIREGKIVHISPLSGSAQHVEECSCYPRYPEVRCVCRDNWNGSNRPVLFINMADYSIDSSYVCSGLVGDTPRNDDRSSSSNCRDPNNERGAPGVKGWAFDSGNDIWMGRTIEKDSRSGYETFRVISGWSTANSKSQINRQVIVDRDNSSGYSGIFSVEGKSCINRCFYVELIRGRPKENRVWWTSNSIIVFCGTSGTYGTGSWPDGANINLMPI

SEQ ID NO: 23562 - protein, 469 aa, synthetic construct
  REGION 1..469: note = neuraminidase__InfluenzaA__AGQ81778
MNPNQKIVTIGSASLTIATMCLLLQIALFATTMTLHFKQTGCTNSSDNQAVPCGPIIIERNITEIVHLNSTTLEKETCPKSAGYRNWSKPQCQITGFAPFSKDNSIRLAAAGDIWVTREPYVSCGLGKCYQFALGQGTTLDNKHSNGTTHDRTPHRTLLMNELGVPFHLATKQVCIAWSSSSCHDGKAWLHVCVTGDDKNATASIIYDGILVDSIASWSKNILRTQESECVCINGTCTVVMTDGSASGRADTRILFIREGKIVHISPLSGSAQHVEECSCYPRYPEVRCVCRDNWKGSNRPVLFINMADYSIDSSYVCSGLVGDTPRNDDRSSSSNCRDPNNERGAPGVKGWAFDSGNDIWMGRTIEKDSRSGYETFRVISGWSTANSKSQINRQVIVDRDNSSGYSGIFSVEGKSCINRCFYVELIRGRPKENRVWWTSNSIIVFCGTSGTYGTGSWPDGANINLMPI

SEQ ID NO: 23563 - protein, 469 aa, synthetic construct
  REGION 1..469: note = neuraminidase__InfluenzaA__AGQ81779
MNPNQKIVAIGSASLTIATMCLLLQIALFATTMTLHFKQTGCTNSSDNQAVPCGPIIIERNITEIVHLNSTTLEKETCPKSAGYRNWSKPQCQITGFAPFSKDNSIRLAAAGDIWVTREPYVSCGLGKCYQFALGQGTTLDNKHSNGTTHDRTPHRTLLMNELGVPFHLATKQVCIAWSSSSCHDGKAWLHVCVTGDDKNATASIIYDGILVDSIASWSKNILRTQESECVCINGTCTVVMTDGSASGRADTRILFIREGKIVHISPLSGSAQHVEECSCYPRYPEIRCVCRDNWKGSNRPVLFINMADYSIDSSYVCSGLVGDTPRNDDRSSSSNCRDPNNERGAPGVKGWAFDSGNDIWMGRTIEKDSRSGYETFRVISGWSTANSKSQINRQVIVDRDNSSGYSGIFSVEGKSCINRCFYVELIRGRPKENRVWWTSNSIIVFCGTSGTYGTGSWPDGANINLMPI

SEQ ID NO: 23564 - protein, 469 aa, synthetic construct
  REGION 1..469: note = neuraminidase__InfluenzaA__AGQ81780
MNPNQKIVAIGSASLTIATMCLLLQIALFATTMTLHFKQTGCTNSSDNQAVPCGPIIIERNITEIVHLNSTTLEKETCPKSAGYRNWSKPQCQITGFAPFSKDNSIRLAAAGDIWVTREPYVSCGLGKCYQFALGQGTTLDNKHSNGTTHDRTPHRTLLMNELGVPFHLATKQVCIAWSSSSCHDGKAWLHVCVTGDDKNATASIIYDGILVDSIASWSKNILRTQESECVCINGTCTVVMTDGSASGRADTRILFIREGKIVHISPLSGSAQHVEECSCYPRYPEVRCVCRDNWKGSNRPVLFINMADYSIDSSYVCSGLVGDTPRNDDRSSSSNCRDPNNERGASGVKGWAFDSGNDIWMGRTIEKDSRSGYETFRVISGWSTANSKSQINRQVIVDRDNSSGYSGIFSVEGKSCINRCFYVELIRGRPKENRVWWTSNSIIVFCGTSGTYGTGSWPDGANINLMPI

SEQ ID NO: 23565 - protein, 466 aa, synthetic construct
  REGION 1..466: note = neuraminidase__InfluenzaA__AGQ81781
MNPNQKIIAIGSVSLTIAIICFLMQIAILTTTMTPHFRQNECSNPSNNQVVPCEPIIIERNTVHLNSTTIEKEICPKVAEYKNWSKPQCQITGFAPFSKDNSIRLSAGGDIWVTREPYVSCSLGKCYQFALGQGTTLKNKHSNGTTHDRIPHRTLLMNELGVPFHLGTKQVCIAWSSSSCHDGKAWLHICVTGDDKNATASIIYDGMLVDSIGSWSKNILRTQESECVCINGTCAVVMTDGSASGKADTRILFIREGKIINISPLSGSAQHVEECSCYPRYPEVRCVCRDNWKGSNRPVLYINMADYSIESSYVCSGLVGDTPRDDDSSSSSNCRDPNNERGAPGVKGWAFDDGNDIWMGRTIKSDSRSGYETFRVVNGWTTANSKSQINRQVIVDSDSWSGYSGIFSVEGKNCINRCFYVELIRGRPQETRVWWTSNSIIVFCGTSGTYGTGSWPDGADINLMPI

SEQ ID NO: 23566 - protein, 469 aa, synthetic construct
  REGION 1..469: note = neuraminidase__InfluenzaA__AGQ81783
MNPNQKIVTIGSASLTIATMCLLLQIALFATTMTLHFKQTGCTNSSDNQAVPCGPIIIERNITEIVHLNSTTLEKETCPKSAGYRNWSKPQCQITGFAPFSKDNSIRLAAAGDIWVTREPYVSCGLGKCYQFALGQGTTLDNKHSNGTTHDRTPHRTLLMNELGVPFHLATKQVCIAWSSSSCHDGKAWLHVCVTGDDKNATASIIYNGILVDSIASWSKNILRTQESECVCINGTCTVVMTDGSASGRADTRILFIREGKIVHISPLSGSAQHVEECSCYPRYPEVRCVCRDNWKGSNRPVLFINMADYSIDSSYVCSGLVGDTPRNDDRSSSSNCRDPNNERGAPGVKGWAFDSGNDIWMGRTIEKDSRSGYETFRVISGWSTANSKSQINRQVIVDRDNSSGYSGIFSVEGKSCINRCFYVELIRGRPKENRVWWTSNSIIVFCGTSGTYGTGSWPDGANINLMPI

SEQ ID NO: 23567 - protein, 466 aa, synthetic construct
  REGION 1..466: note = neuraminidase__InfluenzaA__AGQ81784
MNPNQKIIAIGSVSLTIAIICFLMQIAILTTTMTLHFRQNECSNPSNNQVVPCEPIIIERNTVHLNSTTIEKEICPKVAEYKNWSKPQCQITGFAPFSKDNSIRLSAGGDIWVTREPYVSCSLGKCYQFALGQGTTLRNKHSNGTTHDRIPHRTLLMNELGVPFHLGTKQVCIAWSSSSCHDGKAWLHICVTGDDKNATASIIYDGMLVDSIGSWSKNILRTQESECVCINGTCAVVMTDGNASGKADTRVLFIREGKIINISPLSGSAQHVEECSCYPRYPEVRCVCRDNWKGSNRPVLYINMADYSIESSYVCSGLVGDTPRDDDSSSSSNCRDPNNERGAPGVKGWAFDDGNDIWMGRTIKSDSRSGYETFRVVNGWTTANSKSQINRQVIVDSDSWSGYSGIFSVEGKNCINRCFYVELIRGRPQETRVWWTSNSIIVFCGTSGTYGTGSWPDGADINFMPI

SEQ ID NO: 23568 - protein, 466 aa, synthetic construct
  REGION 1..466: note = neuraminidase__InfluenzaA__AGQ81785
MNPNQKIIAIGSVSLTIAIICFIMQIAILTTTMTPHFRQNECSNPSNNQVVPCEPIIIERNTVHLNSTTIEKEICPKVAEYKNWSKPQCQITGFAPFSKDNSIRLSAGGDIWVTREPYVSCSLGKCYQFALGQGTTLKNKHSNGTTHDRIPHRTLLMNELGVPFHLGTKQVCIAWSSSSCHDGKAWLHICVTGDDKNATASIIYDGMLVDSIGSWSKNILRTQESECVCINGTCAVVMTDGSASGKADTRILFIREGKIINISPLSGSAQHVEECSCYPRYPEVRCVCRDNWKGSNRPVLYINMADYSIESSYVCSGLVGDTPRDDDSSSSSNCRDPNNERGAPGVKGWAFDDGNDIWMGRTIKSDSRSGYETFRVVNGWTTANSKSQINRQVIVDSDSWSGYSGIFSVEGKNCINRCFYVELIRGRPQETRVWWTSNSIIVFCGTSGTYGTGSWPDGADINLMPI

SEQ ID NO: 23569 - protein, 466 aa, synthetic construct
  REGION 1..466: note = neuraminidase__InfluenzaA__AGQ81787
MNPNQKIIAIGSVSLIIAIICLLMQIAILTTTMTLHFRQNECSNPSNNQVVPCEPIIIERNTVHLNSTTIEREICPKVAEYKNWSKPQCQITGFAPFSKDNSIRLSAGGDIWVTREPYVSCSLDKCYQFALGQGTTLKNKHSNGTTHDRTPHRTLLMNELGVPFHLGTKQVCIAWSSSSCYDGKAWLHICVTGDDKNATASIIYDGMLVDSIGSWSKNILRTQESECVCINGTCAVVMTDGSASGKADTRVLFIREGKIINISPLSGSAQHVEECSCYPRYPEVRCVCRDNWKGSNRPILYINMADYSIESSYVCSGLVGDTPRNDDSSSSSNCRDPNNERGAPGVKGWAFDDGNDVWMGRTIKNGSRSGYETFRVVNGWTMANSKSQINRQVIVDSDDWSGYSGIFSVEGKKCINRCFYVELIRGRPQEPRVWWTSNSIIVFCGTSGTYGTGSWPDGANINFMPI

SEQ ID NO: 23570 - protein, 466 aa, synthetic construct
  REGION 1..466: note = neuraminidase__InfluenzaA__AGQ81789
MNPNQKIIAIGSVSLTIAIICLLMQIAILTTTMTPHFRQNECSNPSNNQVVPCEPIIIERNTVHLNSTTIEKEICPKVAEYKNWSKPQCQITGFAPFSKDNSIRLSAGGDIWVTREPYVSCSLGKCYQFALGQGTTLKNKHSNGTTHDRIPHRTLLMNELGVPFHLGTKQVCIAWSSSSCHDGKAWLHICVTGDDKNATASIIYDGMLVDSIGSWSKNILRTQESECVCINGTCAVVMTDGSASGKADTRILFIREGKIINISPLSGSAQHVEECSCYPRYPEVRCVCRDNWKGSNRPVLYINMADYSIESSYVCSGLVGDTPRDDDSSSSSNCRDPNNERGAPGVKGWAFDDGNDIWMGRTIKSDSRSGYETFRVVNGWTTANSKSQINRQVIVDSDSWSGYSGIFSVEGKNCINRCFYVELIRGRPQETRVWWTSNSIIVFCGTSGTYGTGSWPDGADINLMPI

SEQ ID NO: 23571 - protein, 466 aa, synthetic construct
  REGION 1..466: note = neuraminidase__InfluenzaA__AGQ81790
MNPNQKIIAIGSVSLIIAIICLLMQIAILTTTMTLHFRQNECSNPSNNQAMPCEPIIIERNTVHLNSTTIEREICPKVTEYKNWSKPQCQITGFAPFSKDNSIRLSAGGDIWVTREPYVSCSLDKCYQFALGQGTTLKNKHSNGTTHDRTPHRTLLMNELGVPFHLGTKQVCIAWSSSSCYDGKAWLHICVTGDDKNATASIIYDGMLVDSIGSWSKNILRTQESECVCINGTCAVVMTDGSASGRADTRVLFIREGKIINISPLSGNAQHVEECSCYPRYPEVRCVCRDNWKGSNRPILYINMADYSIESSYVCSGLVGDTPRNDDSSSSSNCRDPNNERGAPGVKGWAFDDGNDVWMGRTIKNGSRSGYETFRVVNGWTMANSKSQINRQVIVDSDEWSGYSGIFSVEGKKCINRCFYVELIRGRPQEPRVWWTSNSIIVFCGTSGTYGTGSWPDGANINFMPI

SEQ ID NO: 23572 - protein, 466 aa, synthetic construct
  REGION 1..466: note = neuraminidase__InfluenzaA__AGQ81792
MNPNQKIIAIGSVSLIIAIICLLMQIAILTTTMTLHFRQNECSNPSNNQVMPCEPIIIERNTVHLNSTTIEREICPKVAEYKNWSKPQCQITGFAPFSKDNSIRLSAGGDIWVTREPYVSCSLNKCYQFALGQGTTLENKHSNGTTHDRTPHRTLLMNELGVPFHLGTKQVCMAWSSSSCYDGKAWLHICVTGDDKNATASVIYDGMLVDSIGSWSQNILRTQESECVCINGTCAVVMTDGSASGKADTRVLFIREGKIINISPLSGSAQHVEECSCYPRYPEVRCVCRDNWKGSNRPILYINMADYSIESSYVCSGLVGDTPRNDDSSSSSNCRDPNNERGAPGVKGWAFDDGNDVWMGRTIKNGSRSGYETFRVVNGWTMANSKSQINRQVIVDSDDWSGYSGIFSVEGKKCINRCFYVELIRGRPQEPRVWWTSNSIIVFCGTSGTYGTGSWPDGANINFMPI

SEQ ID NO: 23573 - protein, 466 aa, synthetic construct
  REGION 1..466: note = neuraminidase__InfluenzaA__AGQ81793
MNPNQKIIAIGSVSLIIAIICLLMQIAILTTTMTLHFRQNECSNPSNNQVMPCEPIIIERNTVHLNSTTIEREICPKVAEYKNWSKPQCQITGFAPFSKDNSIRLSAGGDIWVTREPYVSCSLNKCYQFALGQGTTLENKHSNGTTHDRTPHRTLLMNELGVPFHLGTKQVCMAWSSSSCYDGKAWLHICVTGDDKNATASVIYDGMLVDSIGSWSKNILRTQESECVCINGTCAVVMTDGSASGKADTRVLFIREGKIINISPLSGSAQHVEECSCYPRYPEVRCVCRDNWKGSNRPILYINMADYSIESSYVCSGLVGDTPRNDDSSSSSNCRDPNNERGAPGVKGWAFDDGNDVWMGRTIKNGSRSGYETFRVVNGWTMANSKSQINRQVIVDSDDWSGYSGIFSVEGKKCINRCFYVELIRGRPQEPRVWWTSNSIIVFCGTSGTYGTGSWPDGANINFMPI

SEQ ID NO: 23574 - protein, 466 aa, synthetic construct; identical to SEQ ID NO: 23573
  REGION 1..466: note = neuraminidase__InfluenzaA__AGQ81794

SEQ ID NO: 23575 - protein, 466 aa, synthetic construct
  REGION 1..466: note = neuraminidase__InfluenzaA__AGQ81795
MNPNQKIIAIGSVSLIIAIICLLMQIAILTTTMTLHFRQNECNNPSNNQVMPCEPIIIERNTVHLNSTTIEREICPKVAEYKNWSKPQCQITGFAPFSKDNSIRLSAGGDIWVTREPYVSCSLDKCYQFALGQGTTLKNKHSNGTTHDRTPHRTLLMNELGVPFHLGTKQVCIAWSSSSCYDGKAWLHICVTGDDKNATASIIYDGMLVDSIGSWSKNILRTQESECVCINGTCAVVMTDGSASGKADTRVLFIREGKIINISPLSGSAQHVEECSCYPRYPEVRCVCRDNWKGSNRPILYINMADYSIESSYVCSGLVGDTPRNDDSSSSSNCRDPNNERGAPGVKGWAFDDGNDVWMGRTIKNGSRSGYETFRVVNGWTIANSKSQINRQIIVDSDDWSGYSGIFSVEGKKCINRCFYVELIRGRPQEPRVWWTSNSIIVFCGTSGTYGTGSWPDGANINFMPI

SEQ ID NO: 23576 - protein, 466 aa, synthetic construct
  REGION 1..466: note = neuraminidase__InfluenzaA__AGQ81796
MNPNQKIIAIGSVSLIIAIICLLMQIAILTTTMTLHFRQNECSNPSNNQVMPCEPIIIERNTVHLNSTTIEREICPKVAEYKNWSKPQCQITGFAPFSKDNSIRLSAGGDIWVTREPYVSCSLDKCYQFALGQGTTLKNKHSNGTTHDRTPHRTLLMNELGVPFHLGTKQVCIAWSSSSCYDGKAWLHICVTGDDKNATASIIYDGMLVDSIGSWSKNILRTQESECVCINGTCAVVMTDGSASGKADTRVLFIREGKIINISPLSGSAQHVEECSCYPRYPEVRCVCRDNWKGSNRPILYINMADYSIESSYVCSGLVGDTPRNDDSSSSSNCRDPNNERGAPGVKGWAFDDGNDIWMGRTIKNGSRSGYETFRVVNGWTMANSKSQINRQVIVDSDDWSGYSGIFSVEGKKCINRCFYVELIRGRPQEPRVWWTSNSIIVFCGTSGTYGTGSWPDGANINFMPI

SEQ ID NO: 23577 - protein, 466 aa, synthetic construct
  REGION 1..466: note = neuraminidase__InfluenzaA__AGQ81798
MNPNQKIISIGSVSLIIAIICLLMQIAILTTTMTLHFRQNECSNPSNNQVMPCEPIIIERNTVHLNSTTIEREICPKVAEYKNWSKPQCQITGFAPFSKDNSIRLSAGGDIWVTREPYVSCSLDKCYQFALGQGTTLKNKHSNGTTHDRTPHRTLLMNELGVPFHLGTKQVCIAWSSSSCYDGKAWLHICVTGDDKNATASIIYDGMLVDSIGSWSKNILRTQESECVCINGTCAVVMTDGSASGKADTRVLFIREGKIINISPLSGSAQHVEECSCYPRYPEVRCVCRDNWKGSNRPILYINMADYSIESSYVCSGLVGDTPRNDDSSSSSNCRDPNNERGAPGVKGWAFDDGNDVWMGRTIKNGSRSGYETFRVVNGWTMANSKSQINRQVIVDSDDWSGYSGIFSVEGKKCINRCFYVELIRGRPQEPRVWWTSNSIIVFCGTSGTYGTGSWPDGANINFMPI

SEQ ID NO: 23578 - protein, 466 aa, synthetic construct
  REGION 1..466: note = neuraminidase__InfluenzaA__AGQ81799
MNPNQKIIAIGSVSLIIAIICLLMQIAILTTTMTLHFRQNECSNPSNNQVMPCEPIIIERNTVHLNSTTIEREICPKVAEYKNWSKPQCQITGFAPFSKDNSIRLSAGGDIWVTREPYVSCSLDKCYQFALGQGTTLKNKHSNGTTHDRTPHRTLLMNELGVPFHLGTKQVCIAWSSSSCYDGKAWLHICVTGDDKNATASIIYDGMLVDSIGSWSKNILRTQESECVCINGTCAVVMTDGSASGKADTRVLFIREGKIINISPLSGSAQHVEECSCYPRYPEVRCVCRDNWKGSNRPILYINMADYSIESSYVCSGLVGDTPRNDDSSSSSNCRDPNNERGAPGVKGWAFDDGNDVWMGRTIKNGSRSGYETFRVVNGWTMANSKSQINRQVIVDSDDWSGYSGIFSVEGKKCINRCFYVELIRGRPQEPRVWWTSNSIIVFCGTSGTYGTGSWPDGANINFMPI

SEQ ID NO: 23579 - protein, 466 aa, synthetic construct; identical to SEQ ID NO: 23578
  REGION 1..466: note = neuraminidase__InfluenzaA__AGQ81800

SEQ ID NO: 23580 - protein, 466 aa, synthetic construct
  REGION 1..466: note = neuraminidase__InfluenzaA__AGQ81801
MNPNQKIIAIGSVSLIIAIICLLMQIAILTTTMTLHFRQNECSNPSNNQVMPCEPIIIERNTVHLNSTTIEREICPKVAEYKNWSKPQCQITGFAPFSKDNSIRLSASGDIWVTREPYVSCSLDKCYQFALGQGTTLKNKHSNGTTHDRTPHRTLLMNELGVPFHLGTKQVCIAWSSSSCYDGKAWLHICVTGDDKNATASIIYDGMLVDSIGSWSKNILRTQESECVCINGTCAVVMTDGSASGKADTRVLFIREGKIINISPLSGSAQHVEECSCYPRYPEVRCVCRDNWKGSNRPILYINMADYSIESSYVCSGLVGDTPRNDDSSSSSNCRDPNNERGAPGVKGWAFDDGNDVWMGRTIKNGSRSGYETFRVVNGWTMANSKSQINRQVIVDSDDWSGYSGIFSVEGKKCINRCFYVELIRGRPQEPRVWWTSNSIIVFCGTSGTYGTGSWPDGANINFMPI

SEQ ID NO: 23581 - protein, 466 aa, synthetic construct
  REGION 1..466: note = neuraminidase__InfluenzaA__AGQ81802
MNPNQKIIAIGSVSLIIAIICLLMQIALLTTTMTLHFRQNECSNPSNNQVMPCEPIIIERNTVHLNSTTIEREICPKVAEYKNWSKPQCQITGFAPFSKDNSIRLSAGGDIWVTREPYVSCSLDKCYQFALGQGTTLKNKHSNGTTHDRTPHRTLLMNELGVPFHLGTKQVCIAWSSSSCYDGKAWLHICVTGDDKNATASIIYNGMLVDSIGSWSKNILRTQESECVCINGTCAVVMTDGSASGKADTRVLFIREGEIINISPLSGSAQHVEECSCYPRYPEVRCVCRDNWKGSNRPILYINMADYSIESSYVCSGLVGDTPRNDDSSSSSNCRDPNNERGAPGVKGWAFDDGNDVWMGRTIKNGSRSGYETFRVVNGWTMANSKSQINRQVIVDSDDWSGYSGIFSVEGKKCINRCFYVELIRGRPQEPRVWWTSNSIIVFCGTSGTYGTGSWPDGANINFMPI

SEQ ID NO: 23582 - protein, 466 aa, synthetic construct
  REGION 1..466: note = neuraminidase__InfluenzaA__AGQ81803
MNPNQKIIAIGSVSLIIAIICLLMQIAILTTTMTLHFRQNECSNPSNNQVMPCEPIIIERNTVHLNSTTIEREICPKVAEYKNWSKPQCQITGFAPFSKDNSIRLSASGDIWVTREPYVSCSLDKCYQFALGQGTTLKNEHSNGTTHDRTPHRTLLMNELGVPFHLGTKQVCIAWSSSSCYDGKAWLHICVTGDDKNATASIIYDGMLVDSIGSWSKNILRTQESECVCINGTCAVVMTDGSASGKADTRVLFIREGKIINISPLSGSAQHVEECSCYPRYPEVRCVCRDNWKGSNRPILYINMADYSIESSYVCSGLVGDTPRNDDSSSSSNCRDPNNERGAPGVKGWAFDDGNDVWMGRTIKNGSRSGYETFRVVNGWIMANSKSQINRQVIVDSDDWSGYSGIFSVEGKKCINRCFYVELIRGRPQEPRVWWTSNSIIVFCGTSGTYGTGSWPDGANINFMPI

SEQ ID NO: 23583 - protein, 469 aa, synthetic construct
  REGION 1..469: note = neuraminidase__InfluenzaA__AGQ81804
MNPNQKMIAIGAVSLTIAIICLLMQTAILVTTMTLHFKHNECTNSSNNQAAPCGPIIIERNVTEVVHLNSTTLEKEICPKAAGYRNWSKPQCQITGFAPFSKDNSIRLSAGGDIWVTREPYVSCGLGKCYQFALGQGTTLDNSHSNGTSHDRTPHRTLLMNELGVPFHLMTKQVCIAWSSSSCHDGKAWLHVCVTGDDRNATASIIYGGILVDSIGSWSKNILRTQESECVCINGTCAVVMTDGSASGKADTRILFIREGKIVHISPLSGSAQHVEECSCYPQYPEVRCVCRDNWRGSNRPVLYINMADYSIDSGYVCSGLVGDTPRNDDVSSSSNCKDPNNERGAPGVKGWAFDNGNDIWMGRTIDKDSRSGYETFRVIDGWNTANSKSQTSRQVIVGSDNSSGYSGIFSVEGKSCINRCFYVELIRGRPKETRVWWTSNSIIVFCGTSGTYGTGSWPDGANINFMPI

SEQ ID NO: 23584 - protein, 466 aa, synthetic construct
  REGION 1..466: note = neuraminidase__InfluenzaA__AGQ81805
MNPNQKIIAIGSVSLIIAIICLLMQIALLTTTMTLHFRQNECSNPSNNQVMPCEPIIIERNTVHLNSTTIEREICPKVAEYKNWSKPQCQITGFAPFSKDNSIRLSAGGDIWVTREPYVSCSLDKCYQFALGQGTTMKNKHSNGTTHDRTPHRTLLMNELGVPFHLGTKQVCIAWSSSSCYDGKAWLHICVTGDDKNATASIIYDGMLVDSIGSWSKNILRTQESECVCINGTCAVVMTDGSASGKADTRVLFIREGKIINISPLSGSAQHVEECSCYPRYPEVRCVCRDNWKGSNRPILYINMADYSIESSYVCSGLVGDTPRNDDSSSSSNCRGPNNERGAPGVKGWAFDDGNDVWMGRTIKNGSRSGYETFRVVNGWTMANSKSQINRQVIVDSDDWSGYSGIFSVEGKKCINRCFYVELIRGRPQEPRVWWTSNSIIVFCGTSGTYGTGSWPDGANINFMPI

SEQ ID NO: 23585 - protein, 466 aa, synthetic construct
  REGION 1..466: note = neuraminidase__InfluenzaA__AGQ81807
MNPNQKITAIGSISLIIAIICLLMQIAILTTTMTLHFRQNECRNPSNNQVMPCEPVIIERNTVHLNSTTIEREICPKVAEYKNWSKPQCQITGFAPFSKDNSIRLSASGDIWVTREPYVSCSLNKCYQFALGQGTTLKNKHSNGTTHDRTPHRTLLMNELGVPFHLGTKQVCIAWSSSSCYDGKAWLHICVTGDDKNATASIIYDGMLVDSIGSWSKNILRTQESECVCINGTCAVVMTDGSASGKADTRVLFIKEGKIINISPLSGSAQHVEECSCYPRYPEVRCVCRDNWKGSNRPILYINMADYSIESSYVCSGLVGDTPRNDDSSSSSNCRDPNNERGAPGVKGWAFDDGNDVWMGRTIKNGSRSGYETFRVVNGWIMANSKSQINRQVIVDSDDWSGYSGIFSVEGKKCINRCFYVELIRGRPQEPRVWWTSNSIIVFCGTSGTYGTGSWPDGANINFMPI

SEQ ID NO: 23586 - protein, 466 aa, synthetic construct
  REGION 1..466: note = neuraminidase__InfluenzaA__AGQ81808
MNPNQKIIAIGSVSLTIAIICFLMQIAILTTTMTLHFKQNECSNPSNNQVVPCEPILIERNTVHLNSTTIEKEVCPKVAEYKNWSKPQCQITGFAPFSKDNSIRLSAGGDIWVTREPYVSCSLGKCYQFALGQGTTLKNNHSNGTTHDRTPHRTLLMNELGVPFHLGTKQVCIAWSSSSCYDGKAWLHICVTGDDKNATASIIYDGMLVDSIGSWSKNILRTQESECVCINGTCAVVMTDGSASGKADTRILFIREGKIINISPLSGSAQHVEECSCYPRYPEVRCVCRDNWKGSNRPVLYINMADYSVESSYVCSGLVGDTPRNDDSSSSSNCRDPNNERGAPGVKGWAFDDGNDVWMGRTIRNNSRSGYETFRVVNGWTTANSKSQINRQIIVDSENWSGYSGIFSVEGKNCINRCFYVELIRGRPQEPRVWWTSNSIIVFCGTSGTYGTGSWPDGANINFMPI

SEQ ID NO: 23587 - protein, 466 aa, synthetic construct
  REGION 1..466: note = neuraminidase__InfluenzaA__AGQ81809
MNPNQKITAIGSVSLIIAIICLLMQIAILTTTMTLHFRQNECSNPSNNQVMPCEPIIIERNTVHLNSTTIEREICPKVAEYKNWSKPQCQITGFAPFSKDNSIRLSAGGDIWVTREPYVSCSPDKCYQFALGQGTTLKNKHSNGTTHDRTPHRTLLMNELGVPFHLGTKQVCIAWSSSSCYDGKAWLHICVTGDDKNATASIIYDGMLVDSIGSWSKNILRTQESECVCINGTCAVVMTDGSASGEADTRILFIREGKIINISPLSGSAQHVEECSCYPRYPEVRCVCRDNWKGSNRPIIYINMVDYSIGSRYVCSGLVGDTPRNDDSTSSSNCRDPNNERGAPGVKGWAFDDGNDVWMGRTIKNGSRSGYETFRVINGWTMANSKSQINRQVIVDSDNWSGYSGIFSVEGKKCINRCFYVELIRGRPQEPRVWWTSNSIIVFCGTSGTYGTGSWPDGADINFMPI

SEQ ID NO: 23588 - protein, 466 aa, synthetic construct
  REGION 1..466: note = neuraminidase__InfluenzaA__AGQ81810
MNPNQKILAIGSVSLTIAIICFLMQIAILTTTMTLHFKQNECSNPSNNQVVPCEPILIERNTVHLNSTTIEKEVCPKVAEYKNWSKPQCQITGFAPFSKDNSIRLSAGGDIWVTREPYVSCSLGKCYQFALGQGTTLKNNHSNGTTHDRTPHRTLLMNELGVPFHLGTKQVCIAWSSSSCYDGKAWLHICVTGDDKNATASIIYDGMLVDSIGSWSKNILRTQESECVCINGTCAVVMTDGSASGKADTRILFIREGKIINISPLSGSAQHVEECSCYPRYPEVRCVCRDNWKGSNRPVLYINMADYSIESSYVCSGLVGDTPRNDDSSSSSNCRDPNNERGAPGVKGWAFDDGNDVWMGRTIRNNSRSGYETFRVVNGWTTANSKSQINRQVIVDSENWSGYSGIFSVEGKNCINRCFYVELIRGRPQEPRVWWTSNSIIVFCGTSGTYGTGSWPDGANINFMPI

SEQ ID NO: 23589 - protein, 466 aa, synthetic construct
  REGION 1..466: note = neuraminidase__InfluenzaA__AGQ81811
MNPNQKIIAIGSVSLTIAIICFLMQIAILTTTMTLHFKQNECSNPSNNQVVPCEPILIERNTVHLNSTTIEKEVCPKVAEYKNWSKPQCQITGFAPFSKDNSIRLSAGGDIWVTREPYVSCSLGKCYQFALGQGTTLKNKHSNGTTHDRTPHRTLLMNELGVPFHLGTKQVCIAWSSSSCYDGKAWLHICVTGDDKNATASIIYDGMLVDSIGSWSKNILRTQESECVCINGTCAVVMTDGSASGKADTRILFIREGKIVNISPLSGSAQHVEECSCYPRYPEVRCVCRDNWKGSNRPVLYINMADYSVESSYVCSGLVGDTPRNDDSFSSSNCRDPNNERGAPGVKGWAFDDGNDVWMGRTIRNDSRSGYETFRVVNGWTTANSKSQINRQVIVDSESWSGYSGIFSVEGKNCINRCFYVELIRGRPQEPRVWWTSNSIIVFCGTSGTYGTGSWPDGANINFMPI

SEQ ID NO: 23590 - protein, 469 aa, synthetic construct
  REGION 1..469: note = neuraminidase__InfluenzaA__AGQ81812
MNPNQKIITIGSVSLTIATICFLMQIAILVTTITLHFKQNECSIPSNNQVVPCEPIIVERNITEIVYLNNTTIEKELCPKLTEYRDWSKPQCQITGFAPFSKDNSIRLSAGGDIWVTREPYVSCSPNKCYQFALGQGTTLDNKHSNGTIHDRIPHRTLLMNELGVPFHLGTKQVCIAWSSSSCHDGKAWLHVCVTGDDRNATASFIYDGMLVDSIGSWSQNILRTQESECVCINGTCTVVMTDGSASGRADTRILFIKEGKIVHVSPLSGSAQHIEECSCYPRYPDVRCVCRDNWKGSNRPIIDINVADYSIDSSYVCSGLVGDTPRNDDSSSNSNCKDPNNERGNPGVKGWAFDYGNDVWMGRTISKDSRSGYETFRVIGGWTTANSKSQVNRQVIVDNNNWSGYSGIFSVEGKSCINRCFYVELIRGRPQETRVWWTSNSIVVFCGTSGTYGTGSWPDGANINFMPI

SEQ ID NO: 23591 - protein, 466 aa, synthetic construct
  REGION 1..466: note = neuraminidase__InfluenzaA__AGQ81814
MNPNQKIIAIGSVSLTIAIMCFLMQIAILTTTMTLHFKQNECSNPSNNQVVPCEPILIERNTVHLNSTTIEKEVCPKVAEYKNWSKPQCQITGFAPFSKDNSIRLSAGGDIWVTREPYVSCSLGKCYQFALGQGTTLKNNHSNGTTHDRTPHRTLLMNELGVPFHLGTKQVCIAWSSSSCYDGKAWLHICVTGDDKNATASIIYDGMLVDSIGSWSKNILRTQESECVCINGTCAVVMTDGSASGKADTRILFIREGKIINISPLSGSAQHVEECSCYPRYPEVRCVCRDNWKGSNRPVLYINMADYSVESSYVCSGLVGDTPRNDDSSSSSNCRDPNNERGAPGVKGWAFDDGNDVWMGRTIRNNSRSGYETFRVVNGWTTANSKSQINRQVIVDSENWSGYSGIFSVEGKNCINRCFYVELIRGRPQEPRVWWTSNSIIVFCGTSGTYGTGSWPDGANINFMPI

SEQ ID NO: 23592 - protein, 466 aa, synthetic construct
  REGION 1..466: note = neuraminidase__InfluenzaA__AGQ81815
MNPNQKIIAIGSVSLTIAIICFLMQIAILTTTMTLHFKQNECSNPSNNQVVPCEPILIERNTVHLNSTTIEKEVCPKVAEYKNWSKPQCQITGFAPFSKDNSIRLSAGGDIWVTREPYVSCSLGKCYQFALGQGTTLKNKHSNGTTHDRTPHRTLLMNELGVPFHLGTKQVCIAWSSSSCYDGKAWLHICVTGDDKNATASIIYDGMLVDSIGSWSKNILRTQESECVCINGTCAVVMTDGSASGKADTRILFIREGKIINISPLSGSAQHVEECSCYPRYPEVRCVCRDNWKGSNRPVLYINMADYSVESSYVCSGLVGDTPRNDDSSSSSNCRDPNNERGTPGVKGWAFDDGNDVWMGRTIRNDSRSGYETFRVINGWTTANSKSQINRQVIVDSENWSGYSGIFSVEGKNCINRCFYVELIRGRPQEPRVWWTSNSIIVFCGTSGTYGTGSWPDGANINYMPI

SEQ ID NO: 23593 - protein, 466 aa, synthetic construct
  REGION 1..466: note = neuraminidase__InfluenzaA__AGQ81816
MNPNQKIIAIGSVSLTIAIICFLMQIAILTTTMTLHFKQNGCSNPSNNQVVPCEPILIERNTVHLNSTTIEKEVCPKVAEYKNWSKPQCQITGFAPFSKDNSIRLSAGGDIWVTREPYVSCSLGKCYQFALGQGTTLKNKHSNGTTHDRTPHRTLLMNELGVPFHLGTKQVCIAWSSSSCYDGKAWLHICVTGDDKNATASIIYDGMLVDSIGSWSKNILRTQESECVCINGTCAVVMTDGSASGKADTRILFIREGKIINISPLSGSAQHVEECSCYPRYPEVRCVCRDNWKGSNRPVLYINMADYSVESSYVCSGLVGDTPRNDDSSSSSNCRDPNNERGTPGVKGWAFDDGNDVWMGRTIRNDSRSGYETFRVINGWTTANSKSQINRQVIVDSENWSGYSGIFSVEGKNCINRCFYVELIRGRPQEPRVWWTSNSIIVFCGTSGTYGTGSWPDGANINYMPI

SEQ ID NO: 23594 - protein, 466 aa, synthetic construct; identical to SEQ ID NO: 23592
  REGION 1..466: note = neuraminidase__InfluenzaA__AGQ81817

SEQ ID NO: 23595 - protein, 466 aa, synthetic construct; identical to SEQ ID NO: 23592
  REGION 1..466: note = neuraminidase__InfluenzaA__AGQ81818

SEQ ID NO: 23596 - protein, 466 aa, synthetic construct; identical to SEQ ID NO: 23592
  REGION 1..466: note = neuraminidase__InfluenzaA__AGQ81819

SEQ ID NO: 23597 - protein, 466 aa, synthetic construct
  REGION 1..466: note = neuraminidase__InfluenzaA__AGQ81820
MNPNQKIIAIGSVSLTIAIICFLMQIAILTTTMTLHFKQNECSNPSNNQVVPCEPILIERNTVHLNSTTIEKEVCPKVAEYKNWSKPQCQITGFAPFSKDNSIRLSAGGDIWVTREPYVSCSLGKCYQFALGQGTTLKNKHSNGTTHDRTPHRTLLMNELGVPFHLGTKQVCIAWSSSSCYDGKAWLHICVTGDDKNATASIIYDGMLVDSIGSWSKNILRTQESECVCINGTCAVVMTDGSASGKADTRILFIREGKIINISPLSGSAQHVEECSCYPRYPEVRCVCRDNWKGSNRPVLYINMADYSIESSYVCSGLVGDTPRNDDSSSSSNCRDPNNERGTPGVKGWAFDDGNDVWMGRTIRNDSRSGYETFRVINGWTTANSKSQINRQVIVDSENWSGYSGIFSVEGKNCINRCFYVELIRGRPQEPKVWWTSNSIIVFCGTSGTYGTGSWPDGANINFMPI

SEQ ID NO: 23598 - protein, 466 aa, synthetic construct
  REGION 1..466: note = neuraminidase__InfluenzaA__AGQ81822
MNPNQKIIAIGSVSLTIAIICFLMQIAILTTTMTLHFKQNECSNPSNNQVVPCEPILIERNTVHLNSTTIEKKVCPKVAEYKNWSKPQCQITGFAPFSKDNSIRLSAGGDIWVTREPYVSCSLGKCYQFALGQGTTLKNKHSNGTTHDRTPHRTLLMNELGVPFHLGTKQVCIAWSSSSCYDGKAWLHICVTGDDKNATASIIYDGMLVDSIGSWSKNILRTQESECVCINGTCAVVMTDGSASGKADTRILFIREGKIINISPLSGSAQHVEECSCYPRYPEVRCVCRDNWKGSNRPVLYINMADYSVESSYVCSGLVGDTPRNDDSSSSSNCRDPNNERGTPGVKGWAFDDGNDVWMGRTIRNDSRSGYETFRVINGWTTANSKSQINRQVIVDSENWSGYSGIFSVEGKNCINRCFYVELIRGRPQEPRVWWTSNSIIVFCGTSGTYGTGSWPDGANINYMPI

SEQ ID NO: 23599 - protein, 466 aa, synthetic construct
  REGION 1..466: note = neuraminidase__InfluenzaA__AGQ81823
MNPNQKIIAIGSVSLTIAIICFLMQIAILTTTMTLHFKQNECSNPSNNQVVPCEPILIERNTVHLNSTTIEKEVCPKVAEYKNWSKPQCQITGFAPFSKDNSIRLSAGGDIWVTREPYVSCSLGKCYQFALGQGTTLKNKHSNGTTHDRTPHRTLLMNELGVPFHLGTKQVCIAWSSSSCYDGKAWLHICVTGDDKNATASIIYDGMLVDSIGSWSKNILRTQESECVCINGTCAVVMTDGSASGKADTRILFIREGKIINISPLSGSAQHVEECSCYPRYPEVRCVCRDNWKGSNRPVLYINMADYSVESSYVCSGLVGDTPRNDDSSSSSNCRDPNNERGAPGVKGWAFDDGNDVWMGRTIRNDSRSGYETFRVVNGWTTANSKSQINRQVIVDSENWSGYSGIFSVEGKNCINRCFYVELIRGRPQEPRVWWTSNSIIVFCGTSGTYGTGSWPDGANINFMPI

SEQ ID NO: 23600 - protein, 466 aa, synthetic construct; identical to SEQ ID NO: 23599
  REGION 1..466: note = neuraminidase__InfluenzaA__AGQ81824

SEQ ID NO: 23601 - protein, 466 aa, synthetic construct; identical to SEQ ID NO: 23599
  REGION 1..466: note = neuraminidase__InfluenzaA__AGQ81825

SEQ ID NO: 23602 - protein, 466 aa, synthetic construct
  REGION 1..466: note = neuraminidase__InfluenzaA__AGQ81831
MNPNQKILAIGSVSLTIAIICFLMQIAILTTTMTLHFKQNECSNPSNNQVVPCEPILIERNTVHLNSTTIEKEVCPKVAEYKNWSKPQCQITGFAPFSKDNSIRLSAGGDIWVTREPYVSCSLGKCYQFALGQGTTLKNKHSNGTTHDRTPHRTLLMNELGVPFHLGTKQVCIAWSSSSCYDGKAWLHICVTGDDKNATASIIYDGMLVDSIGSWSKNILRTQESECVCINGTCAVVMTDGSASGKADTRILFIREGKIVNISPLSGSAQHVEECSCYPRYPEVRCVCRDNWKGSNRPVLYINMADYSVESSYVCSGLVGDTPRNDDSFSSSNCRDPNNERGAPGVKGWAFDDGNDVWMGRTIRNDSRSGYETFRVVNGWTTANSKSQINRQVIVDSESWSGYSGIFSVEGKNCINRCFYVELIRGRPQEPRVWWTSNSIIVFCGTSGTYGTGSWPDGANINFMPI

SEQ ID NO: 23603 - protein, 466 aa, synthetic construct; identical to SEQ ID NO: 23592
  REGION 1..466: note = neuraminidase__InfluenzaA__AGQ81837

SEQ ID NO: 23604 - protein, 466 aa, synthetic construct; identical to SEQ ID NO: 23592
  REGION 1..466: note = neuraminidase__InfluenzaA__AGQ81838

SEQ ID NO: 23605 - protein, 466 aa, synthetic construct; identical to SEQ ID NO: 23599
  REGION 1..466: note = neuraminidase__InfluenzaA__AGQ81839

SEQ ID NO: 23606 - protein, 466 aa, synthetic construct; identical to SEQ ID NO: 23599
  REGION 1..466: note = neuraminidase__InfluenzaA__AGQ81840

SEQ ID NO: 23607 - protein, 466 aa, synthetic construct; identical to SEQ ID NO: 23592
  REGION 1..466: note = neuraminidase__InfluenzaA__AGQ81841

SEQ ID NO: 23608 - protein, 469 aa, synthetic construct
  REGION 1..469: note = neuraminidase__InfluenzaA__AGQ81843
MNPNQKIITIGVVNTTLSTIALLIGIGNLIFNTVIHEKIGVHQTVVYPTITPPVIPNCSDTTITYNNTVVNNITTTIINKAEKQFKPSLPLCPFRGFFPFHKDNAIRLGENKDVIVTREPYVSCDNDDCWSFALAQGALLGTKHSNGTIKDRTPYRSLIRFPIGTAPVLGNYKEICVAWSSSSCFDGKEWMHVCMTGNDNDASGQIIYAGKMTDSIKSWRRDILRTQESECQCIDGTCIVAVTDGPAASSADHRIYWIREGKIIKYEDIPKTKIQHLEECSCYVDTDVYCICRDNWKGSNRPWMRINNETILETGYVCSKFHSDTPRPADPSTVSCDSPSNINGGPGVKGFGFRAGNDVWLGRTVSTTGRSGFEVIKVTEGWINSLNHAKSVTQTLVSNNDWSGYSGSFIVENNGCFQPCFYIELIRGRPNRNDDVSWTSNSIVTFCGLDNEPGSGNWPDGSNIGFMPK

SEQ ID NO: 23609 - protein, 469 aa, synthetic construct
  REGION 1..469: note = neuraminidase__InfluenzaA__AGQ81845
MNPNQKIITIGVVNTTLSTIALLIGIGNLIFNTVIHEKIGVHQTVIYPTITSPVVPNCSDTTITYNNTVVNNITTTVINKAEKHFKPSLPLCPFKGFFPFHKDNAIRLGENKDVIVTREPYVSCDNDDCWSFALAQGALLGTKHSNGTIKDRTPYRSLIRFPIGTAPVLGNYKEICVAWSSSSCFDGKEWMHVCMTGNDNDASGQIIYAGKMTDSIKSWRRDILRTQESECQCIDGTCIVAVTDGPAANSADHRIYWIREGKIIKYENIPKTKIQHLEECSCYVDTDVYCICRDNWKGSNRPWMRINNETILETGYVCSKFHSDTPRPADPSTVSCDSPSNINGGPGVKGFGFRTGNDVWLGRTVSTTGRSGFEVIKVTEGWINSLNHAKSVTQTLVSNSDWSGYSGSFIVENNGCFQPCFYIELIRGRPNKNDDVSWTSNSIVTFCGLDNEPGSGNWPDGSNIGFMPK

SEQ ID NO: 23610 - protein, 469 aa, synthetic construct; identical to SEQ ID NO: 23609
  REGION 1..469: note = neuraminidase__InfluenzaA__AGQ81846

SEQ ID NO: 23611 - protein, 469 aa, synthetic construct; identical to SEQ ID NO: 23609
  REGION 1..469: note = neuraminidase__InfluenzaA__AGQ81847

SEQ ID NO: 23612 - protein, 469 aa, synthetic construct
  REGION 1..469: note = neuraminidase__InfluenzaA__AGQ81848
MNPNQKIITIGVVNTTLSTIALLIGIGNLIFNTVIHEKIGVHQTVIYPTITSPVVPNCSDTTITYNNTVVNNITTTVINKAEKHFKPSLPLCPFKGFFPFHKDNAIRLGENKDVIVTREPYVSCDNDDCWSFALAQGALLGTKHSNGTIKDRTPYRSLIRFPIGTAPVLGNYKEICVAWSSSSCFDGKEWMHVCMTGNDNDASGQIIYAGKMTDSIKSWRRDILRTQESECQCIDGICIVAVTDGPAANSADHRIYWIREGKIIKYENIPKTKIQHLEECSCYVDTDVYCICRDNWKGSNRPWMRINNETILETGYVCSKFHSDTPRPADPSTVSCDSPSNINGGPGVKGFGFRTGNDVWLGRTVSTTGRSGFEVIKVTEGWINSLNHAKSVTQTLVSNSDWSGYSGSFIVENNGCFQPCFYIELIRGRPNKNDDVSWTSNSIVTFCGLDNEPGSGNWPDGSNIGFMPK

SEQ ID NO: 23613 - protein, 469 aa, synthetic construct
  REGION 1..469: note = neuraminidase__InfluenzaA__AGQ81850
MNPNQKIITIGVVNTTLSTIALLIGIGNLIFNTVIHEKIGVHQTVIYPTITSPVVPNCSDTTITYNNTVVNNITTTVINKAEKHFKPSLPLCPFKGFFPFHKDNAIRLGENKDVIVTREPYVSCDNDDCWSFALAQGALLGTKHSNGTIKDRTPYRSLIRFPIGTAPVLGNYKEICVAWSSSSCFDGKEWMHVCMTGNDNDATGQIIYAGKMTDSIKSWRRDILRTQESECQCIDGTCIVAVTDGPAANSADHRIYWIREGKIIKYENIPKTKIQHLEECSCYVDTDVYCICRDNWKGSNRPWMRINNETILETGYVCSKFHSDTPRPADPSTVSCDSPSNINGGPGVKGFGFRTGNDVWLGRTVSTTGRSGFEVIKVTEGWINSLNHAKSVTQTLVSNSDWSGYSGSFIVENNGCFQPCFYIELIRGRPNKNDDVSWTSNSIVTFCGLDNEPGSGNWPDGSNIGFMPK

SEQ ID NO: 23614 - protein, 469 aa, synthetic construct
  REGION 1..469: note = neuraminidase__InfluenzaA__AGQ81852
MNPNQKIITIGVVNTTLSTIALLIGIGNLIFNTVIHEKIGVHQTVTYPTITSPVVPNCSDTTITYNNTVVNNITTTVINKAEKHFKPSLPLCPFKGFFPFHKDNAIRLGENKDVIVTREPYVSCDNDDCWSFALAQGALLGTKHSNGTIKDRTPYRSLIRFPIGTAPVLGNYKEICVAWSSSSCFDGKEWMHVCMTGNDNDATGQIIYAGKMTDSIKSWRRDILRTQESECQCIDGTCIVAVTDGPAANSADHRIYWIREGKIIKYENIPKTKIQHLEECSCYVDTDVYCICRDNWKGSNRPWMRINNETILETGYVCSKFHSDTPRPADPSTVSCDSPSNINGGPGVKGFGFRTGNDVWLGRTVSTTGRSGFEVIKVTEGWINSLNHAKSVTQTLVSNSDWSGYSGSFIVENNGCFQPCFYIELIRGRPNRNDDVSWTSNSIVTFCGLDNEPGSGNWPDGSNIGFMPK

SEQ ID NO: 23615 - protein, 469 aa, synthetic construct
  REGION 1..469: note = neuraminidase__InfluenzaA__AGQ81853
MNPNQKIITIGVVNTTLSTIALLIGIGNLIFNTVIHEKIGVHQTVTYPTITSPVVPNCSDTTITYNNTVVNNITTTVINKAEKHFKPSLPLCPFKGFFPFHKDNAIRLGENKDVIVTREPYVSCDNDDCWSFALAQGALLGTKHSNGTIKDRTPYRSLIRFPIGTAPVLGNYKEICVAWSSSSCFDGKEWMHVCMTGNDNDATGQIIYAGKMTDSIKSWRRDILRTQESECQCIDGTCIVAVTDGPAANSADHRIYWIREGKIIKYENIPKTKIQHLEECSCYVDTDVYCICRDNWKGSNRPWMRINNETILETGYVCSKFHSDTPRPADPSTVSCDSPSNINGGPGVKGFGFRTGNDVWLGRTVSTTGRSGFEVIKVTEGWINSLNHAKSVTQTLVSNSDWSGYSGSFIVENNGCFQPCFYIELIRGRPNKNDDVSWTSNSIVTFCGLDNEPGSGNWPDGSNIGFMPK

SEQ ID NO: 23616 - protein, 469 aa, synthetic construct; identical to SEQ ID NO: 23615
  REGION 1..469: note = neuraminidase__InfluenzaA__AGQ81854

SEQ ID NO: 23617 - protein, 469 aa, synthetic construct; identical to SEQ ID NO: 23615
  REGION 1..469: note = neuraminidase__InfluenzaA__AGQ81855

SEQ ID NO: 23618 - protein, 469 aa, synthetic construct; identical to SEQ ID NO: 23608
  REGION 1..469: note = neuraminidase__InfluenzaA__AGQ81856

SEQ ID NO: 23619 - protein, 469 aa, synthetic construct
  REGION 1..469: note = neuraminidase__InfluenzaA__AGQ81857
MNPNQKIITIGVVNTTLSTIALLIGIGNLIFNTVIHEKIGVHQTVVYPTITPPVIPNCSDTTITYNNTVVNNITTTIINKAEKQFKPSLPLCPFRGFFPFHKDNAIRLGENKDVIVTREPYVSCDNDDCWSFALAQGALLGTKHSNGTIKDRTPYRSLIRFPIGTAPVLGNYKEICVAWSSSSCFDGKEWMHVCMTGNDNDASGQIIYAGKMTDSIKSWRRDILRTQESECQCIDGTCIVAVTDGPAASSADHRIYWIREGKIIKYEDIPKTKIQHLEECSCYVDTDVYCICRDNWKGSNRPWMRINNETILETGYVCSKFHSDTPRPADPSTVSCDSPSNINGGPGVKGFGFRAGNDVWLGRTVSTTGRSGFEVIKVTEGWINSLNHAKSVTQTLVSNNDWSGYSGSFIVESNGCFQPCFYIELIRGRPNRNDDVSWTSNSIVTFCGLDNEPGSGNWPDGSNIGFMPK

SEQ ID NO: 23620 - protein, 469 aa, synthetic construct
  REGION 1..469: note = neuraminidase__InfluenzaA__AGQ81858
MNPNQKIITIGVVNTTLSTIALLIGVGNLIFNTVIHEKIGDHQIVVYPTTTASVVPNCSDTIITYNNTVVNNITTTIITKEETHFKSSLPLCPFRGFFPFHKDNAIRLGENKDVIVTREPYVSCDNDDCWSFALAQGALLGTKHSNGTIKDRTPYRSLIRFPIGTAPVLGNYKEICVAWSSSSCFDGKEWMHVCMTGNDNDASGQIMYAGKMTDSIKSWRKDILRTQESECQCIDGTCIVAVTDGPATNSADHRIYWIREGKIIKYENIPKTKIQHLEECSCYVDIDVYCVCRDNWKGSNRPWMRINNETILETGYVCSKFHSDTPRPADPSTVSCDSPSNVNGGPGVKGFGFKTGNDVWLGRTVSTSGRSGFEIIKVTEGWINSPNHAKSVTQTLVSNNDWSGYSGSFIVENNGCFQPCFYIELIRGRPNKNDDVSWTSNSIVTFCGLDNEPGSGNWPDGSNIGFMPK

SEQ ID NO: 23621 - protein, 469 aa, synthetic construct
  REGION 1..469: note = neuraminidase__InfluenzaA__AGQ81859
MNPNQKIITIGVVNTTLSTIALLIGIGNLIFNTVIHEKIGVHQTVVCPTITPPVVPNCSDTTITYNNTVVNNITTTIINKAEKQFKSSLPLCPFRGFFPFHKDNAIRLGENKDVIVTREPYVSCDNDDCWSFALAQGALLGTKHSNGTIKDRTPYRSLIRFPIGTAPVLGNYKEICVAWSSSSCFDGKEWMHICMTGNDNDASGQIIYAGKMTDSIKSWRRDILRTQESECQCIDGTCIVAITDGPAASSADHRIYWIREGKIIKYENIPKTKIQHLEECSCYVDIDVYCICRDNWKGSNRPWMRINNETILETGYVCSKFHSDTPRPADPSTVSCDSPSNINGGPGVKGFGFRAGNDVWLGRTVSTTGRSGFEVIKVTEGWINSLNHAKSVTQTLVSNSDWSGYSGSFIVENNGCFQPCFYIELIRGRPNRNDDVSWTSNSIVTFCGLDNEPGSGNWPDGSNIGFMPK

SEQ ID NO: 23622 - protein, 470 aa, synthetic construct
  REGION 1..470: note = neuraminidase__InfluenzaA__AGQ81860
MNPNQKIICISATGMTLSVVSLLIGIANLGLNIGLHYKVGDTPDVSIPNMNETNSTTTIINNNTQNNFTNITNIIVNKNEEKTFLNLTKPLCEVNSWHILSKDNAIRIGEDAHILVTREPYLSCDPQGCRMFALSQGTTLRGRHANGTIHDRSPFRALVSWEMGQAPSPYNVKVECVGWSSTSCHDGISRMSICMSGPNNNASAVVWYGGRPVTEIPSWAGNILRTQESECVCHKGICPVVMTDGPANNRAATKIIYFKEGKIQKIEELAGSAQHIEECSCYGAVEVIKCICRDNWKGANRPVITINPEMMTHTSKYLCSKVLTDTSRPNDPTNGNCDAPITGGSPDPGVKGFAFLDGENSWLGRTISKDSRSGYEMLKVPNAETDTQSGPTSHQVIVNNQNWSGYSGAFIDYWANKECFNPCFYVELIRGRPKESSVLWTSNSIVALCGSKERLGSWSWHDGAEIIYFK

SEQ ID NO: 23623 - protein, 470 aa, synthetic construct
  REGION 1..470: note = neuraminidase__InfluenzaA__AGQ81861
MNPNQKIICISATGMTLSVVSLLIGIANLGLNIGLHYKVGDTPDVSIPNMNETNSTTTIINNNTQNNFTNTTNIIVNKNEEKTFLNLTKPLCEVNSWHILSKDNAIRIGEDAHILVTREPYLSCDPQGCRMFALSQGTTLRGRHANGTIHDRSPFRALVSWEMGQAPSPYNVKVECVGWSSTSCHDGISRMSICMSGPNNNASAVVWYGGRPVTEIPSWAGNILRTQESECVCHKGICPVVMTDGPANNRAATKIIYFKEGKIQKIEELAGSAQHIEECSCYGAVEVIKCICRDNWKGANRPVITINPEMMTHTSKYLCSKVLTDTSRPNDPTNGNCDAPITGGSPDPGVKGFAFLDGENSWLGRTISKDSRSGYEMLKVPNAETDTQSGPTSHQVIVNNQNWSGYSGAFIDYWANKECFNPCFYVELIRGRPKESSVLWTSNSIVALCGSKERLGSWSWHDGAEIIYFK

SEQ ID NO: 23624 - protein, 470 aa, synthetic construct
  REGION 1..470: note = neuraminidase__InfluenzaA__AGQ81862
MNPNQKIICISATGMTLSVVSLLIGIANLGLNIGLHYKVGDTPDVNIPSMNETNSTTTIINNNTQNNFTNITNIIVNKEEGRTFLNLTKPLCEVNSWHILSKDNAIRIGEDAHILVTREPYLSCDPQGCRMFALSQGTTLRGRHANGTIHDRSPFRALVSWEMGQAPSPYNVRVECIGWSSTSCHDGISRMSICMSGPNNNASAVVWYGGRPVTEIPSWAGNILRTQESECVCHKGICPVVMTDGPANNRAATKIIYFKEGKIQKIEELEGNAQHIEECSCYGAAGVIKCICRDNWKGANRPVIIIDPEMMTHTSKYLCSRVLTDTSRPNDPTSGNCDAPITGGSPDPGVKGFAFLDGENSWLGRTISKDSRSGYEMLKVPNAETDTQSGPTSHQVIVNNQNWSGYSGAFIDYWANKECFNPCFYVELIRGRPKESSVLWTSNSIVALCGSKERLGSWSWHDGAEIIYFK

SEQ ID NO: 23625 - protein, 470 aa, synthetic construct
  REGION 1..470: note = neuraminidase__InfluenzaA__AGQ81863
MNPNQKIICISATGMTLSVVSLLIGIANLGLNIGLHYKVGDTPDVNIPSMNETNSTTTIINNNTQNNFTNITNIIVNKEEERTFLNLTKPLCEVNSWHILSKDNAIRIGEDAHILVTREPYLSCDPQGCRMFALSQGTTLRGRHANGTIHDRSPFRALVSWEMGQAPSPYNVRVECIGWSSTSCHDGISRMSICMSGPNNNASAVVWYGGRPVTEIPSWAGNILRTQESECVCHKGICPVVMTDGPANNRAATKIIYFKEGKIQKIEELEGNAQHIEECSCYGAAGVIKCICRDNWKGANRPVIIIDPEMMTHTSKYLCSRVLTDTSRPNDPISGNCDAPITGGSPDPGVKGFAFLDGENSWLGRTISKDSRSGYEMLKVPNAETDTQSGPTSHQVIVNNQNWSGYSGAFIDYWANKECFNPCFYVELIRGRPKESSVLWTSNSIVALCGSKERLGSWSWHDGAEIIYFK

SEQ ID NO: 23626 - protein, 471 aa, synthetic construct
  REGION 1..471: note = neuraminidase__InfluenzaA__AGQ81864
MNPNQKLFALSGVAIALSVLNLLIGISNVGLNVSLHLKEKGPKQEENSTCTTINQNNTTIVENTYVNNTTIISKETELKPPNYLLLNKSLCNVEGWVVIAKDNAVRFGESEQIIVTREPYVSCDPTGCKMYALHQGTTIRNKHSNGTIHDRTAFRGLISTPLGTPPTVSNSDFICVGWSSTTCHDGIGRMTICIQGNNDNATATVYYNRRLTTTIKTWARNILRTQESECVCHNGTCAVVMTDGSASSQAYTKVMYFHKGLVIKEEALKGSARHIEECSCYGHSQKATCVCRDNWQGANRPIIEIDMNTLEHTSRYVCTGILTDTSRPGDKSSGDCSNPITGSPGAPGVKGFGFLNGDNTWLGRTISPKSRSGFEMLKIPNAGTDPNSRIAERQEIVDNNNWSGYSGSFIDYWDNDSECYNPCFYVELIRGRPEEAKYVWWTSNSLIALCGSPFPVGSGSFPDGAQIQYFS

SEQ ID NO: 23627 - protein, 471 aa, synthetic construct
  REGION 1..471: note = neuraminidase__InfluenzaA__AGQ81865
MNPNQKLFALSGVAIALSVLNLLIGLSNVGLNVSLHLKETGPKQEGNLTCMTINQNNTTVVENTYVNNTTIITKETESETPNYLLLNKSLCNVEGWVVIAKDNAVRFGESEQIIVTREPYVSCDPNGCKMYALHQGTTIRNKHSNGTIHDRTAFRGLISTPLGTPPTVSNSDFICVGWSSTTCHDGIGRMTICIQGNNDNATATVYYNRRLTTTIKTWARNILRTQESECVCHNGTCAVVMTDGSASSQAHTKVMYFHKGLVVKEEALKGSARHIEECSCYGHNQKVTCVCRDNWQGANRPIIEIDMNTLEHTSRYVCTGILTDTSRPGDKPTGDCSNPITGSPGAPGVKGFGFLNGGNTWLGRTISPRSRSGFEMLKIPNAGTDPNSRIAERQEIVDNSNWSGYSGSFIDYWNDNSECYNPCFYVELIRGRPEEAKYVWWTSNSLIALCGSPFPVGSGSFPDGAQIQYFS

SEQ ID NO: 23628 - protein, 471 aa, synthetic construct
  REGION 1..471: note = neuraminidase__InfluenzaA__AGQ81868
MNPNQKLFALSGVAIALSVLNLLIGISNVGLNVSLHLKEKGPKQEENSTCTTINQNNTTVVENTYVNNTTIITKETELKTPSYLLLNKSLCNVEGWVVIAKDNAVRFGESEQIIVTREPYVSCDPTGCKMYALHQGTTIRNKHSNGTIHDRTAFRGLISTSLGTPPTISNSDFMCVGWSSTTCHDGIGRMTICIQGNNDNATATVYYNRRLTTTIKTWARNILRTQESECVCHNGICAVVMTDGSASSQAYTKVMYFHKGLVVKEEALKGSARHIEECSCYGHSQKVTCVCRDNWQGANRPIIEIDMNTLEHTSRYVCTGILTDTSRPGDKSSGDCSNPIAGSPGAPGVKGFGFLNGDNTWLGRTISPRSRSGFEMLKIPNAGTDPNSRIAGRQEIVDNNNWSGYSGSFIDYWNDNSECYNPCFYVELIRGRPEEAKYVWWTSNSLIALCGSPFPVGSGSFPDGAQIQYFS

SEQ ID NO: 23629 - protein, 471 aa, synthetic construct
  REGION 1..471: note = neuraminidase__InfluenzaA__AGQ81869
MNPNQKLFALSGVAIALSVLNLLIGISNVGLNVSLHLKEKGPKQEENSTCTTINQNNTTIVENTYVNNTTIISKETELKTPSYLLLNKSLCNVEGWVVIAKDNAVRFGESEQIIVTREPYVSCDPTGCKMYALHQGTTIRNKHSNGTIHDRTAFRGLISTPLGTPPTVSNSDFICVGWSSTTCHDGIGRMTICIQGNNDNATATVYYNRRLTTTIRTWARNILRTQESECVCHNGTCAVVMTDGSASSQAYTKVMYFHKGLVIKEEALKGSARHIEECSCYGHSQKATCVCRDNWQGANRPIIEIDMNTLEHTSRYVCTGILTDTSRPGDKSSGDCSNPITGSPGAPGVKGFGFLNGDNTWLGRTISPRSRSGFEMLKIPNAGTDPNSRIAERQEIVDNNNWSGYSGSFIDYWNNDSECYNPCFYVELIRGRPEEAKYVWWTSNSLIALCGSPFPVGSGSFPDGAQIQYFS

SEQ ID NO: 23630 - protein, 471 aa, synthetic construct
  REGION 1..471: note = neuraminidase__InfluenzaA__AGQ81870
MNPNQKLFALSGVAIALSVLNLLIGISNVGLNVSLHLKEKGPKQEENSTCTTINQNNTTIVENTYVNNTTIISKETELKPPSYLLLNKSLCNVEGWVVIAKDNAVRFGESEQIIVTREPYVSCDPTGCKMYALHQGTTIRNKHSNGTIHDRTAFRGLISTPLGTPPTVSNSDFICVGWSSTTCHDGIGRMTICIQGNNDNATATVYYNRRLTTTIRTWARNILRTQESECVCHNGTCAVVMTDGSASSQAYTKVMYFHKGLVIKEEALKGSARHIEECSCYGHSQKATCVCRDNWQGANRPIIEIDMNTLEHTSRYVCTGILTDTSRPGDKSSGDCSNPITGSPGAPGVKGFGFLNGDNTWLGRTISPRSRSGFEMLKIPNAGTDPNSRIAERQEIVDNNNWSGYSGSFIDYWNNDSECYNPCFYVELIRGRPEEAKYVWWTSNSLIALCGSPFPVGSGSFPDGAQIQYFS

SEQ ID NO: 23631 - protein, 471 aa, synthetic construct
  REGION 1..471: note = neuraminidase__InfluenzaA__AGQ81871
MNPNQKLFALSGVAIALSVLNLLIGISNVGLNVSLHLKEKGPKQEENSTCTTINQNNTTIVENTYVNNTTIISKETELKTPSYLLLNKSLCNVEGWVVIAKDNAVRFGESEQIIVTREPYVSCDPTGCKMYALHQGTTIRNKHSNGTIHDRTAFRGLISTPLGTPPTVSNSDFICIGWSSTTCHDGIGRMTICIQGNNDNATATVYYNRRLTTTIRTWARNILRTQESECVCHNGTCAVVMTDGSASSQAYTKVMYFHKGLVIKEEALKGSARHIEECSCYGHSQKATCVCRDNWQGANRPIIEIDMNTLEHTSRYVCTGILTDTSRPGDKSSGDCSNPITGSPGAPGVKGFGFLNGDNTWLGRTISPRSRSGFEMLKIPNAGTDPNSRIAERQEIVDNNNWSGYSGSFIDYWNNDSECYNPCFYVELIRGRPEEAKYVWWTSNSLIALCGSPFPVGSGSFPDGAQIQYFS

SEQ ID NO: 23632 - protein, 471 aa, synthetic construct
  REGION 1..471: note = neuraminidase__InfluenzaA__AGQ81872
MNPNQKLFALSGVAIALSVLNLLIGISNVGLNVSLHLKEKGPKQEENSTCTTINQNNTTIVENTYVNNTTIISKETELKTPSYLLLNKSLCNVEGWVVIAKDNAVRFGESEQIIVTREPYVSCDPTGCKMYALHQGTTIRNKHSNGTIHDRTAFRGLISTPLGTPPSVSNSDFICVGWSSTTCHDGIGRMTICIQGNNDNATATVYYNRRLTTTIRTWARNILRTQESECVCHNGTCAVVMTDGSASSQAYTKVMYFHKGLVIKEEALKGSARHIEECSCYGHSQKATCVCRDNWQGANRPIIEIDMNTLEHTSRYVCTGILTDTSRPGDKSSGDCSNPITGSPGAPGVKGFGFLNGDNTWLGRTISPRSRSGFEMLKIPNAGTDPNSRIAERQEIVDNNNWSGYSGSFIDYWNNDSECYNPCFYVELIRGRPEEAKYVWWTSNSLIALCGSPFPVGSGSFPDGAQIQYFS

SEQ ID NO: 23633 - protein, 471 aa, synthetic construct
  REGION 1..471: note = neuraminidase__InfluenzaA__AGQ81875
MNPNQKLFALSGVAIALSVLNLLIGISNVGLNVSLHLKEKGPKQEENSTCMTINQNNTTVVENTYVNNTTIITKETELETPSYLLLNKGLCNVEGWVVIAKDNAVRFGETEQIIVTREPYVSCDPNGCKMYALHQGTTIRNKHSNGTIHDRTAFRGLISTPLGTPPTVSNSDFICVGWSSTTCHDGIGRMTICIQGNNDNATATVYYNRRLTTTIKTWARNILRTQESECVCHNGTCAVVMTDGSASSQAHTKVIYFHKGLIVKEEALKGSARHIEECSCYGHSQKVTCVCRDNWQGANRPIIEIDMNTLEHTSRYVCTGILTDTSRPGDKSTGDCSNPITGSPGAPGVKGFGYLNGDNTWLGRTISPRSRSGFEMLKIPNAGTDPNSRITERQEIVDNNNWSGYSGSFVDYWNDNSECYNPCFYVELIRGRPEEAKYVWWTSNSIIALCGSPFPVGSGSFPDGAQIQYFS

SEQ ID NO: 23634 - protein, 471 aa, synthetic construct
  REGION 1..471: note = neuraminidase__InfluenzaA__AGQ81876
MNPNQKLFALSGVAIALSVLNLLIGISNVGLNVSLHLKEKGPKQEENSTCMTINQNNTTVVENTYVNNTTIITKETELETPSYLLLNKGLCNVEGWVVIAKDNAVRFGETEQIIVTREPYVSCDPNGCKMYALHQGTTIRNKHSNGTIHDRTAFRGLISTPLGTPPTVSNSDFICVGWSSTTCHDGIGRMTICIQGDNDNATATVYYNRRLTTTIKTWARNILRTQESECVCHNGTCAVVMTDGSASSQAHTKVIYFHKGLIVKEEALKGSARHIEECSCYGHSQKVTCVCRDNWQGANRPIIEIDMNTLEHTSRYVCTGILTDTSRPGDKSTGDCSNPITGSPGAPGVKGFGYLNGDNTWLGRTISPRSRSGFEMLKIPNAGTDPNSRITERQEIVDNNNWSGYSGSFVDYWNDNSECYNPCFYVELIRGRPEEAKYVWWTSNSIIALCGSPFPVGSGSFPDGAQIQYFS

SEQ ID NO: 23635 - protein, 471 aa, synthetic construct
  REGION 1..471: note = neuraminidase__InfluenzaA__AGQ81877
MNPNQKLFALSGVAIALSVLNLLIGISNVGLNVSLHLKEKGPKQEENSTCTTINQNNTTVVENTYVNNTTIITKETELKTPSYLLLNKSLCNVEGWVVIAKDNAVRFGESEQIIVTREPYVSCDPTGCKMYALHQGTTIRNKHSNGTIHDRTAFRGLISTSLGTPPTISNSDFMCVGWSSTTCHDGIGRMTICIQGNNDNATATVYYNRRLTTTIKTWARNILRTQESECVCHNGICAVVMTDGSASSQAYTKVMYFHKGLVVKEEALKGSARHIEECSCYGHSQKVTCVCRDNWQGANRPIIEIDMNTLEHTSRYVCTGILTDTSRPGDKSSGDCSNPITGSPGAPGVKGFGFLNGDNTWLGRTISPRSRSGFEMLKIPNAGTDPNSRIAGRQEIVDNNNWSGYSGSFIDYWNDNSECYNPCFYVELIRGRPEEAKYVWWTSNSLIALCGSPFPVGSGSFPDGAQIQYFS

SEQ ID NO: 23636 - protein, 471 aa, synthetic construct
  REGION 1..471: note = neuraminidase__InfluenzaA__AGQ81878
MNPNQKLFALSGVAIALSVLNLLIGISNVGLNVSLHLKEKGPKQEENLTCTTINQNNTTVVENTYVNNTTIITKETDLKAPSYLLLNKSLCNVEGWVVIAKDNAVRFGESEQIIVTREPYVSCDPTGCKMYALHQGTTIRNKHSNGTIHDRTAFRGLISTPLGTPPTVSNSDFMCVGWSSTTCHDGIGRMTICIQGNNDNATATVYYNRRLTTTIKTWARNILRTQESECVCHNGTCAVVMTDGSASSQAYTKVMYFHKGLVVKEEALKGSARHIEECSCYGHSQKVTCVCRDNWQGANRPIIEIDMNTLEHTSRYVCTGILTDTSRPGDKSSGDCSNPITGSPGAPGVKGFGFLNGDNTWLGRTISPRSRSGFEMLKIPNAGTDPNSRIAERQEIVDNNNWSGYSGSFIDYWNDNSECYNPCFYVELIRGRPEEAKYVWWTSNSLIALCGSPFPIGSGSFPDGAQIQYFS

SEQ ID NO: 23637 - protein, 471 aa, synthetic construct
  REGION 1..471: note = neuraminidase__InfluenzaA__AGQ81882
MNPNQKLFALSGVAIALSVLNLLIGISNVGLNVSLHLKEKGAKQEENLTCTTINQNNTTVVENTYVNNTTVITKEADWKTPSYLLLNKSLCNVEGWVVIAKDNAIRFGESEQIIVTREPYVSCDPTGCKMYALHQGTTIRNKHSNGTIHDRTAFRGLISTPLGTPPTVSNSDFMCVGWSSTTCHDGIGRMTICIQGNNDNATATVYYNGRLTTTIKTWARNILRTQESECVCHNGTCAVVMTDGSASSQAYTKVMYFHKGLVIKEEALKGSARHIEECSCYGHSQKVTCVCRDNWQGANRPIIEIDMNTLEHTSRYVCTGILTDTSRPGDKSSGDCSNPITGSPGAPGVKGFGFLNGDNTWLGRTISPRSRSGFEMLKIPNAGIDPNSRIAERQEIVDNNNWSGYSGSFIDYWNDNSECYNPCFYVELIRGRPEEAKYVWWTSNSLIALCGSPFPVGSGSFPDGAQIQYFS

SEQ ID NO: 23638 - protein, 471 aa, synthetic construct
  REGION 1..471: note = neuraminidase__InfluenzaA__AGQ81883
MNPNQKLFALSGVAIALSVLNLLIGISNVGLNVSLHLKEKGPKQEENLTCTTINQNNTTVVENTYVNNTTVITKEADWKTPSYLLLNKSLCNVEGWVVIAKDNAIRFGESEQIIVTREPYVSCDPTGCKMYALHQGTTIRNKHSNGTIHDRTAFRGLISTPLGTPPTVSNSDFMCVGWSSTTCHDGIGRMTICIQGNNDNATATVYYNGRLTTTIKTWARNILRTQESECVCHNGTCAVVMTDGSASSQAYTKVMYFHKGLVIKEEALKGSARHIEECSCYGHSQKVTCVCRDNWQGANRPIIEIDMNTLEHTSRYVCTGILTDTSRPGDKSSGDCSNPITGSPGAPGVKGFGFLNGDNTWLGRTISPRSRSGFEMLKIPNAGIDPNSRIAERQEIVDNNNWSGYSGSFIDYWNDNSECYNPCFYVELIRGRPEEAKYVWWTSNSLIALCGSPFPVGSGSFPDGAQIQYFS

SEQ ID NO: 23639 - protein, 471 aa, synthetic construct; identical to SEQ ID NO: 23638
  REGION 1..471: note = neuraminidase__InfluenzaA__AGQ81884

SEQ ID NO: 23640 - protein, 471 aa, synthetic construct; identical to SEQ ID NO: 23638
  REGION 1..471: note = neuraminidase__InfluenzaA__AGQ81885

SEQ ID NO: 23641 - protein, 471 aa, synthetic construct; identical to SEQ ID NO: 23638
  REGION 1..471: note = neuraminidase__InfluenzaA__AGQ81886

SEQ ID NO: 23642 - protein, 451 aa, synthetic construct
  REGION 1..451: note = neuraminidase__InfluenzaA__AGQ81888
MNPNQKLFALSGVAIALSVLNLLIGLSNVGLNVSLHLKEAGPKQEENLTCMTTKETELGTPSYLLLNKSLCNVEGWVVIAKDNAVRFGESEQIIITREPYVSCDPNGCKMYALHQGTTIRNKHSNGTIHDRTAFRGLISTPLGTPPTVSNSDFICVGWSSTTCHDGIGRMTICIQGNNDNATATVYYNRRLTTTIKTWARNILRTQESECVCHNGTCAVVMTDGSASSQAHTKVMYFHKGLVVKEEALKGSAKHIEECSCYGHNQKVTCVCRDNWQGANRPIIEIDMNTLEHTSRYVCTGILTDTSRPGDKPTGDCSNPITGSPGAPGVKGFGFLNGDNTWLGRTISPRSRSGFEMLKIPNAGIDPNSRIAERQEIVDNSNWSGYSGSFIDYWNDNSECYNPCFYVELIRGRPEEAKYVWWTSNSLIALCGSPFPVGSGSFPDGAQIQYFS

SEQ ID NO: 23643 - protein, 451 aa, synthetic construct
  REGION 1..451: note = neuraminidase__InfluenzaA__AGQ81889
MNPNQKLFALSGVAIALSVLNLLIGLSNVGLNVSLHLKETGPKQEENLTCMTTKETELGTPSYLLLNKSLCNVEGWVVIAKDNAVRFGESEQIIITREPYVSCDPNGCKMYALHQGTTIRNKHSNGTIHDRTAFRGLISTPLGTPPTVSNSDFICVGWSSTTCHDGIGRMTICIQGNNDNATATVYYNRRLTTTIKTWARNILRTQESECVCHNGTCAVVMTDGSASSQAHTKVMYFHKGLVVKEEALKGSAKHIEECSCYGHNQKVTCVCRDNWQGANRPIIEIDMNTLEHTSRYVCTGILTDTSRPGDKPTGDCSNPITGSPGAPGVKGFGFLNGDNTWLGRTISPRSRSGFEMLKIPNAGIDPNSRIAERQEIVDNSNWSGYSGSFIDYWNDNSECYNPCFYVELIRGRPEEAKYVWWTSNSLIALCGSPFPVGSGSFPDGAQIQYFS

SEQ ID NO: 23644 - protein, 451 aa, synthetic construct; identical to SEQ ID NO: 23643
  REGION 1..451: note = neuraminidase__InfluenzaA__AGQ81890

SEQ ID NO: 23645 - protein, 451 aa, synthetic construct; identical to SEQ ID NO: 23643
  REGION 1..451: note = neuraminidase__InfluenzaA__AGQ81891

SEQ ID NO: 23646 - protein, 451 aa, synthetic construct
  REGION 1..451: note = neuraminidase__InfluenzaA__AGQ81893
MNPNQKLFALSGVAIALSVLNLLIGLSNVGLNVSLHLKETGPKQEENLTCMTTKETELGTPSYLLLNKSLCNVEGWVVIAKDNAVRFGESEQIIITREPYVSCDPNGCKMYALHQGTTIRNKHSNGTIHDRTAFRGLISTPLGTPPTVSNSDFICVGWSSTTCHDGIGRMTICIQGNNDNATATVYYNRRLTTTIKTWARNILRTQESECVCHNGTCAVVMTDGSASSQAHTKVMYFHKGLVVKEEALKGSAKHIEECSCYGHNQKVTCVCRDNWQGANRPIIEIDMNTLEHTSRYVCTGILTDTSRPGDKPTGDCSNPITGSPGAPGVKGFGFLNGDNTWLGRTISPRSRSGFEMLKIPNAGIDPNSRIAERQEIVDNSNWSGYSGSFIDYWNDNSECYNPCFYVELIRGRPEEAEYVWWTSNSLIALCGSPFPVGSGSFPDGAQIQYFS

SEQ ID NO: 23647 - protein, 451 aa, synthetic construct; identical to SEQ ID NO: 23643
  REGION 1..451: note = neuraminidase__InfluenzaA__AGQ81894

SEQ ID NO: 23648 - protein, 451 aa, synthetic construct; identical to SEQ ID NO: 23643
  REGION 1..451: note = neuraminidase__InfluenzaA__AGQ81895

SEQ ID NO: 23649 - protein, 451 aa, synthetic construct; identical to SEQ ID NO: 23643
  REGION 1..451: note = neuraminidase__InfluenzaA__AGQ81896

SEQ ID NO: 23650 - protein, 451 aa, synthetic construct; identical to SEQ ID NO: 23643
  REGION 1..451: note = neuraminidase__InfluenzaA__AGQ81897

SEQ ID NO: 23651 - protein, 451 aa, synthetic construct; identical to SEQ ID NO: 23643
  REGION 1..451: note = neuraminidase__InfluenzaA__AGQ81898

SEQ ID NO: 23652 - protein, 451 aa, synthetic construct; identical to SEQ ID NO: 23643
  REGION 1..451: note = neuraminidase__InfluenzaA__AGQ81899

SEQ ID NO: 23653 - protein, 451 aa, synthetic construct; identical to SEQ ID NO: 23643
  REGION 1..451: note = neuraminidase__InfluenzaA__AGQ81900

SEQ ID NO: 23654 - protein, 451 aa, synthetic construct; identical to SEQ ID NO: 23643
  REGION 1..451: note = neuraminidase__InfluenzaA__AGQ81901

SEQ ID NO: 23655 - protein, 451 aa, synthetic construct; identical to SEQ ID NO: 23643
  REGION 1..451: note = neuraminidase__InfluenzaA__AGQ81902

SEQ ID NO: 23656 - protein, 451 aa, synthetic construct; identical to SEQ ID NO: 23643
  REGION 1..451: note = neuraminidase__InfluenzaA__AGQ81903

SEQ ID NO: 23657 - protein, 451 aa, synthetic construct
  REGION 1..451: note = neuraminidase__InfluenzaA__AGQ81904
MNPNQKLFALSGVAIALSVLNLLIGLSNVGLNVSLHLKETGPKQEENLTCMTTKETELGTPSYLLLNKSLCNVEGWVVIAKDNAVRFGESEQIIITREPYVSCDPNGCKMYALHQGTTIRNKHSNGTIHDRTAFRGLISTPLGTPPTVSNSDFICVGWSSTTCHDGIGRMTICIQGNNDNATATVYYNRRLTTTIKTWARNILRTQESECVCHNGTCAVVMTDGSASSQAHTKVMYFHKGLVVKEEALKGSAKHIEECSCYGHNQKVTCVCRDNWQGANRPIIEIDMNTLEHTSRYVCTGILTDTSRPGDKPTGDCSNPITGSPGAPGVKGFGFLNGDNTWLGRTISPRSRSGFEMLKIPNAGIDPNSRITERQEIVDNSNWSGYSGSFIDYWNDNSECYNPCFYVELIRGRPEEAKYVWWTSNSLIALCGSPFPVGSGSFPDGAQIQYFS

SEQ ID NO: 23658 - protein, 451 aa, synthetic construct; identical to SEQ ID NO: 23643
  REGION 1..451: note = neuraminidase__InfluenzaA__AGQ81905

SEQ ID NO: 23659 - protein, 451 aa, synthetic construct
  REGION 1..451: note = neuraminidase__InfluenzaA__AGQ81906
MNPNQKLFALSGVAIALSVLNLLIGLSNVGLNVSLHLKETGPKQEENLTCMTTKETELGTPSYLLLNKSLCNVEGWVVIAKDNAVRFGESEQIIITREPYVSCDPNGCKMYALHQGTTIRNKHSNGTIHDRTAFRGLISTPLGTPPTVSNSDFICVGWSSTTCHDGIGRMTICIQGNNDNATATVYYNRRLTTTIKTWARNILRTQESECVCHNGTCAVVMTDGSASSQAHTKVMYFHKGLVVKEEALKGSARHIEECSCYGHNQKVTCVCRDNWQGANRPIIEIDMNTLEHTSRYVCTGILTDTSRPGDKPTGDCSNPITGSPGAPGVKGFGFLNGDNTWLGRTISPRSRSGFEMLKIPNAGIDPNSRIAERQEIVDNSNWSGYSGSFIDYWNDNSECYNPCFYVELIRGRPEEAKYVWWTSNSLIALCGSPFPVGSGSFPDGAQIQYFS

SEQ ID NO: 23660 - protein, 451 aa, synthetic construct; identical to SEQ ID NO: 23643
  REGION 1..451: note = neuraminidase__InfluenzaA__AGQ81907

SEQ ID NO: 23661 - protein, 451 aa, synthetic construct
  REGION 1..451: note = neuraminidase__InfluenzaA__AGQ81908
MNPNQKLFALSGVAIALSVLNLLIGLSNVGLNVSLHLKETGPKQEENLTCMTTKETELGTPSYLLLNKSLCNVEGWVVIAKDNAVRFGESEQIIITREPYVSCDPNGCKMYALHQGTTIRNKHSNGTIHDRTAFRGLISTPLGTPPTVSNSDFICVGWSSTTCHDGIGRMTICIQGNNDNATATVYYNRRLTTTIKTWARNILRTQESECVCHNGTCAVVMTDGSASNQAHTKVMYFHKGLVVKEEALKGSAKHIEECSCYGHNQKVTCVCRDNWQGANRPIIEIDMNTLEHTSRYVCTGILTDTSRPGDKPTGDCSNPITGSPGAPGVKGFGFLNGDNTWLGRTISPRSRSGFEMLKIPNAGIDPNSRITERQEIVDNSNWSGYSGSFIDYWNDNSECYNPCFYVELIRGRPEEAKYVWWTSNSLIALCGSPFPVGSGSFPDGAQIQYFS

SEQ ID NO: 23662 - protein, 451 aa, synthetic construct; identical to SEQ ID NO: 23643
  REGION 1..451: note = neuraminidase__InfluenzaA__AGQ81909

SEQ ID NO: 23663 - protein, 451 aa, synthetic construct
  REGION 1..451: note = neuraminidase__InfluenzaA__AGQ81910
MNPNQKLFALSGVAIALSVLNLLIGLSNVGLNVSLHLKETGPKQEENLTCMTTKETELGTPSYLLLNKSLCNVEGWVVIAKDNAVRFGESEQIIITREPYVSCDPNGCKMYALHQGTTIRNKHSNGTIHDRTAFRGLISTPLGTPPTVSNSDFICVGWSSTTCHDGIGRMTICIQGNNDNATATVYYNRRLTTTIKTWARNILRTQESECVCHNGTCAVVMTDGSASGQAHTKVMYFHKGLVVKEEALKGSAKHIEECSCYGHNQKVTCVCRDNWQGANRPIIEIDMNTLEHTSSYVCTGILTDTSRPGDKPTGDCSNPITGSPGAPGVKGFGFLNGDNTWLGRTISPRSRSGFEMLKIPNAGIDPNSRIAERQEIVDNSNWSGYSGSFIDYWNDNSECYNPCFYVELIRGRPEEAKYVWWTSNSLIALCGSPFPVGSGSFPDGAQIQYFS

SEQ ID NO: 23664 - protein, 451 aa, synthetic construct
  REGION 1..451: note = neuraminidase__InfluenzaA__AGQ81911
MNPNQKLFALSGVAIALSVLNLLIGLSNVGLNVSLHLKETGPKQEENLTCMTTKETELGTPSYLLLNKSLCNVEGWVVIAKDNAVRFGESEQIIITREPYVSCDPNGCKMYALHQGTTIRNKHSNGTIHDRTAFRGLISTPLGTPPTVSNSDFICVGWSSTTCHDGIGRMTICIQGNNDNATATVYYNRRLTTTIKTWARNILRTQESECVCHNGTCAVVMTDGSASGQAHTKVMYFHKGLVVKEEALKGSAKHIEECSCYGHNQNVTCVCRDNWQGANRPIIEIDMNTLEHTSRYVCTGILTDTSRPGDKPTGDCSNPITGSPGAPGVKGFGFLNGDNTWLGRTISPRSRSGFEMLKIPNAGIDPNSRIAERQEIVDNSNWSGYSGSFIDYWNDNSECYNPCFYVELIRGRPEEAKYVWWTSNSLIALCGSPFPVGSGSFPDGAQIQYFS

SEQ ID NO: 23665 - protein, 451 aa, synthetic construct; identical to SEQ ID NO: 23643
  REGION 1..451: note = neuraminidase__InfluenzaA__AGQ81912

SEQ ID NO: 23666 - protein, 451 aa, synthetic construct
  REGION 1..451: note = neuraminidase__InfluenzaA__AGQ81913
MNPNQKLFALSGVAITLSVLNLLIGLSNVGLNVSLHLKETGPKQEENLTCMTTKETELGTPSYLLLNKSLCNVEGWVVIAKDNAVRFGESEQIIITREPYVSCDPNGCKMYALHQGTTIRNKHSNGTIHDRTAFRGLISTPLGTPPTVSNSDFICVGWSSTTCHDGIGRMTICIQGNNDNATATVYYNRRLTTTIKTWARNILRTQESECVCHNGTCAVVMTDGSASGQAHTKVMYFHKGLVVKEEALKGSAKHIEECSCYGHNQKVTCVCRDNWQGANRPIIEIDMNTLEHTSRYVCTGILTDTSRPGDKPTGDCSNPITGSPGAPGVKGFGFLNGDNTWLGRTISPRSRSGFEMLKIPNAGIDPNSRIAERQEIVDNSNWSGYSGSFIDYWNDNSECYNPCFYVELIRGRPEEAKYVWWTSNSLIALCGSPFPVGSGSFPDGAQIQYFS

SEQ ID NO: 23667 - protein, 451 aa, synthetic construct; identical to SEQ ID NO: 23643
  REGION 1..451: note = neuraminidase__InfluenzaA__AGQ81914

SEQ ID NO: 23668 - protein, 451 aa, synthetic construct; identical to SEQ ID NO: 23643
  REGION 1..451: note = neuraminidase__InfluenzaA__AGQ81915

SEQ ID NO: 23669 - protein, 471 aa, synthetic construct
  REGION 1..471: note = neuraminidase__InfluenzaA__AGQ81917
MNPNQKLFALSGVAIALSVLNLLIGLSNVGLNVSLHLKETGPKQEENLTCMTINQNNTTVVENTYVNNTTIITKETELETPNYLLLNKSLCNVEGWVVVAKDNAVRFGESEQIIVTREPYVSCDPNGCKMYALHQGTTIRNKHSNGTIHDRTAFRGLISTPLGTPPTVSNSDFICVGWSSTTCHDGIGRMTICIQGNNDNATATVYYNRRLTTTIKTWARNILRTQESECVCHNGTCAVVMTDGSASSQAHTKVMYFHKGLVIKEEALKGSAKHIEECSCYGHNQKVTCVCRDNWQGANRPIIEIDMNTLEHTSRYVCTGILTDTSRPGDKPTGDCSNPITGSPGAPGVKGFGFLNGDNTWLGRTISPRSRSGFEMLKIPNAGIDPNSRIAERQEIVDNSNWSGYSGSFIDYWNDNSECYNPCFYVELIRGRPEEAKYVWWTSNSLIALCGSPFPVGSGSFPDGAQIQYFS

SEQ ID NO: 23670 - protein, 451 aa, synthetic construct
  REGION 1..451: note = neuraminidase__InfluenzaA__AGQ81918
MNPNQKLFALSGVAIALSVLNLLIGLSNVGLNVSLHLKETGPKQEENLTCMTTKETELGTPSYLLLNKGLCNVEGWVVIAKDNAVRFGESEQIIITREPYVSCDPNGCKMYALHQGTTIRNKHSNGTIHDRTAFRGLISTPLGTPPTVSNSDFICVGWSSTTCHDGIGRMTICIQGNNDNATATVYYNRRLTTTIKTWARNILRTQESECVCHNGTCAVVMTDGSASSQAHTKVMYFHKGLVVKEEALKGSAKHIEECSCYGHNQKVTCVCRDNWQGANRPIIEIDMNTLEHTSRYVCTGILTDTSRPGDKPTGDCSNPITGSPGAPGVKGFGFLNGDNTWLGRTISPRSRSGFEMLKIPNAGIDPNSRIAERQEIVDNSNWSGYSGSFIDYWNDNSECYNPCFYVELIRGRPEEAKYVWWTSNSLIALCGSPFPVGSGSFPDGAQIQYFS

SEQ ID NO: 23671 - protein, 451 aa, synthetic construct; identical to SEQ ID NO: 23643
  REGION 1..451: note = neuraminidase__InfluenzaA__AGQ81919

SEQ ID NO: 23672 - protein, 451 aa, synthetic construct; identical to SEQ ID NO: 23643
  REGION 1..451: note = neuraminidase__InfluenzaA__AGQ81920

SEQ ID NO: 23673 - protein, 451 aa, synthetic construct
  REGION 1..451: note = neuraminidase__InfluenzaA__AGQ81921
MNPNQKLFALSGVAIALSVLNLLIGLSNVGLNVSLHLKETGPKQEENLTCMTTKETELGTPSYLLLNKSLCNVEGWVVIAKDNAVRFGESEQIIITREPYVSCDPNGCKMYALHQGTTIRNKHSNGTIHDRTAFRGLISTPLGTPPTVSNSDFICVGWSSTTCHDGIGRMTICIQGNNDNATATVYYNRRLTTTIKTWARNILRTQESECVCHNGTCAVVMTDGSASGQAHTKVMYFHKGLVVKEEALKGSAKHIEECSCYGHNQKVTCVCRDNWQGANRPIIEIDMNTLEHTSRYVCTGILTDTSRPGDKPTGDCSNPITGSPGAPGVKGFGFLNGDNTWLGRTISPRSRSGFEMLKIPNAGIDPNSRIAERQEIVDNSNWSGYSGSFIDYWNDNSECYNPCFYVELIRGRPEEAKYVWWTSNSLIALCGSPFPVGSGSFPDGAQIQYFS

SEQ ID NO: 23674 - protein, 451 aa, synthetic construct; identical to SEQ ID NO: 23643
  REGION 1..451: note = neuraminidase__InfluenzaA__AGQ81922

SEQ ID NO: 23675 - protein, 451 aa, synthetic construct; identical to SEQ ID NO: 23673
  REGION 1..451: note = neuraminidase__InfluenzaA__AGQ81923

SEQ ID NO: 23676 - protein, 451 aa, synthetic construct
  REGION 1..451: note = neuraminidase__InfluenzaA__AGQ81924
MNPNQKLFALSGVAIALSVLNLLIGLSNVGLNVSLHLKETGPKQEENLTCMTTKETELGTPSYLLLNKSLCNVEGWVVIAKDNAVRFGESEQIIITREPYVSCDPNGCKMYALHQGTTIRNKHSNGTIHDRTAFRGLISTPLGTPPTVSNSDFICVGWSSTTCHDGIGRMTICIQGNNDNATATVYYNRRLTTTIKTWARNILRTQESECVCHNGTCAVVMTDGSANSQAHTKVMYFHKGLVVKEEALKGSAKHIEECSCYGHNQKVTCVCRDNWQGANRPIIEIDMNTLEHTSRYVCTGILTDTSRPGDKPTGDCSNPITGSPGAPGVKGFGFLNGDNTWLGRTISPRSRSGFEMLKIPNAGIDPNSRIAERQEIVDNSNWSGYSGSFIDYWNDNSECYNPCFYVELIRGRPEEAKYVWWTSNSLIALCGSPFPVGSGSFPDGAQIQYFS

SEQ ID NO: 23677 - protein, 451 aa, synthetic construct; identical to SEQ ID NO: 23643
  REGION 1..451: note = neuraminidase__InfluenzaA__AGQ81925

SEQ ID NO: 23678 - protein, 451 aa, synthetic construct; identical to SEQ ID NO: 23643
  REGION 1..451: note = neuraminidase__InfluenzaA__AGQ81926

SEQ ID NO: 23679 - protein, 451 aa, synthetic construct; identical to SEQ ID NO: 23643
  REGION 1..451: note = neuraminidase__InfluenzaA__AGQ81927

SEQ ID NO: 23680 - protein, 451 aa, synthetic construct; identical to SEQ ID NO: 23643
  REGION 1..451: note = neuraminidase__InfluenzaA__AGQ81928

SEQ ID NO: 23681 - protein, 451 aa, synthetic construct; identical to SEQ ID NO: 23643
  REGION 1..451: note = neuraminidase__InfluenzaA__AGQ81929

SEQ ID NO: 23682 - protein, 470 aa, synthetic construct
  REGION 1..470: note = neuraminidase__InfluenzaA__AGQ81930
MNPNQKIITIGSISLGLVVFNVLLHVVSIIVTVLVLGRGGNSGICNETVVREYNETVRIEKITQWHNTSVVEYVPYWSEGNYMNNTEAICDVKGFAPFSKDNGIRIGSRGHVFVIREPFVSCSPTECRTFFLTQGSLLNDKHSNGTVKDRSPFRTLMSVEVGQSPNVYQARFEAVAWSATACHDGKKWMTIGVTGPDSKAVAVVHYGGVPTDVVNSWAGDILRTQESSCTCIQGNCYWVMTDGPANRQAQYRIYKANQGKIVGQTDISFNGGHIEECSCYPNDGKVECVCRDNWTGTNRPVLVISPDLSYRVGYLCAGLPSDTPRGEDAQFTGSCTSPMGNQGYGVKGFGFRQGTDVWMGRTISRTSRSGFEILRIKNGWTQTSKEQVRKQVVVDNLNWSGYSGSFTLPVELSGKDCLVPCFWVEMIRGKPEEKTIWTSSSSIVMCGVDYEVADWSWHDGAILPFDIDKM

SEQ ID NO: 23683 - protein, 470 aa, synthetic construct
  REGION 1..470: note = neuraminidase__InfluenzaA__AGQ81931
MNPNQKIITIGSLSLGLVVLNILLHIISITITVLVIPRNGNTGSCNETVIREYNETVRIEKITQWHNTNIIEYIEKPENDLFMNNTGPLCDAKGFAPFSKDNGIRIGSKGHVFVIREPFVSCSPTECRTFFLTQGSLLNDKHSNGTVKDRSPYRTLMSVEIGQSPNVYQARFEAVAWSATACHDGKKWMTIGVTGPDAKAVAVVHYGGIPTDVINSWAGDILRTQESSCTCIQGECYWVMTDGPANRQAQYRAFKAKQGKIIGQTEISFNGGHIEECSCYPNEGKVECVCRDNWTGTNRPVLVISSDLSYRVGYLCAGLPSDTPRGEDSQFTGSCTSPMGNQGYGVKGFGFRQGNDVWMGRTISRTSRSGFEILKIRNGWIQNSKEQIKRQVVVDNSNWSGYSGSFTLPVELTRRNCLVPCFWVEMIRGKPEEKTIWTSSSSIVMCGVDHEIANWSWHDGAILPFDIDKM

SEQ ID NO: 23684 - protein, 470 aa, synthetic construct
  REGION 1..470: note = neuraminidase__InfluenzaA__AGQ81932
MNPNQKIITIGSISLGLVVFNVLLHVVSIIVTVLILGRGGNNGICNETVVREYNETVRIEKITQWHNTSVVEYVPYWNEGTYMNNTEAICDVKGFAPFSKDNGIRIGSRGHVFVIREPFVSCSPTECRTFFLTQGSLLNDKHSNGTVKDRSPFRTLMSVEVGQSPNVYQARFEAVAWSATACHDGKKWMTIGVTGSDSKAVAVVHYGGVPTDVVNSWAGDILRTQESSCTCIQGNCYWVMTDGPANRQAQYRIYKANQGKVIGQTDISFNGGHIEECSCYPNDGKVECVCRDNWTGTNRPVLVISPDLSYRVGYLCAGLPSDTPRGEDAQFTGSCTSPMGNQGYGVKGFGFRQGTDVWMGRTISQTSRSGFEILRVKNGWTQTSKEQVRKQVVVDNLNWSGYSGSFTLPIELSGKDCLVPCFWVEMIRGKPEEKSIWTSSSSIVMCGVDYEVADWSWHDGAILPFDIDKM

SEQ ID NO: 23685 - protein, 470 aa, synthetic construct
  REGION 1..470: note = neuraminidase__InfluenzaA__AGQ81934
MNPNQKILCTSATAIVIGTIAVLIGIANLGLNIGLHLKPSCNCSHSQPETTNTSQTIINNYYNETNITQISNTNIQMEERASRDFNNLTKGLCTINSWHIYGKDNAVRIGENSDVLVTREPYVSCDPDECRFYALSQGTTIRGKHSNGTIHDRSQYRALISWPLSSPPTVYNSRVECIGWSSTSCHDGKSRMSICISGPNNNASAVVWYNRRPVAEINTWARNILRTQESECVCHNGVCPVVFTDGSATGPADTRIYYFKEGRILKWESLTGTAKHIEECSCYGERTGITCTCRDNWQGSNRPVIRIDPVAMTHTSQYICSPVLTDNPRPNDPNVGKCNDPYPGNNNNGVKGFSYLDGVNTWLGRTISTASRSGYEMLKVPNALTDDRSKPIQGQTIVLNTDWSGYSGSFMDYWAEGDCYRACFYVELIRGRPKEDKVWWTSNSIVSMCSSTEFLGQWDWPDGAKIEYFL

SEQ ID NO: 23686 - protein, 470 aa, synthetic construct; identical to SEQ ID NO: 23685
  REGION 1..470: note = neuraminidase__InfluenzaA__AGQ81935

SEQ ID NO: 23687 - protein, 470 aa, synthetic construct; identical to SEQ ID NO: 23685
  REGION 1..470: note = neuraminidase__InfluenzaA__AGQ81936

SEQ ID NO: 23688 - protein, 470 aa, synthetic construct; identical to SEQ ID NO: 23685
  REGION 1..470: note = neuraminidase__InfluenzaA__AGQ81937

SEQ ID NO: 23689 - protein, 470 aa, synthetic construct; identical to SEQ ID NO: 23685
  REGION 1..470: note = neuraminidase__InfluenzaA__AGQ81938

SEQ ID NO: 23690 - protein, 470 aa, synthetic construct; identical to SEQ ID NO: 23685
  REGION 1..470: note = neuraminidase__InfluenzaA__AGQ81939

SEQ ID NO: 23691 - protein, 470 aa, synthetic construct
  REGION 1..470: note = neuraminidase__InfluenzaA__AGQ81940
MNPNQKILCTSATAIIIGAIAVLIGIANLGLNIGLHLKPSCNCSHSQPETTNTSQTIINNYYNETNITQISNTNIQMEERASKGFNNLTKGLCTINSWHIYGKDNAVRIGESSDVLVTREPYVSCDPDECRFYALSQGTTIRGKHSNGTIHDRSQYRALISWPLSSPPTVYNSRVECIGWSSTSCHDGKSRMSICISGPNNNASAVVWYNRRPVAEINTWARNILRTQESECVCHNGVCPVVFTDGSATGPADTRIYYFKEGKILKWESLAGTAKHIEECSCYGERTGITCTCRDNWQGSNRPVIQIDPVAMTHTSQYICSPVLTDNPRPNDPNIGKCNDPYPGNNNNGVKGFSYLDGANTWLGRTISTASRSGYEMLKVPNALTDDRSKPIQGQTIVLNTDWSGYSGSFMDYWAEGDCYRACFYVELIRGRPKEDKVWWTSNSIVSMCSSTEFLGQWNWPDGAKIEYFL

SEQ ID NO: 23692 - protein, 470 aa, synthetic construct
  REGION 1..470: note = neuraminidase__InfluenzaA__AGQ81941
MNPNQKILCTSATAIIIGTIAVLIGVANLGLNIGLHLKPGCNCSHSQPEATNTSQTIINNYYNETNITQISNTNIQMEERPNRGFNNLTKGLCTINSWHIYGKDNAVRIGENSDVLVTREPYVSCDPDECRFYALSQGTTIRGKHSNGTIHDRSQYRALISWPLSSPPTVYNSRVECIGWSSTSCHDGKSRMSICISGPNNNASAVVWYNRRPVAEINTWARNILRTQESECVCHNGVCPVVFTDGSATGPADTRVYYFREGKILKWESLTGTARHIEECSCYGERTGITCTCRDNWQGSNRPVIQIDPVAMTHTSQYICSPVLTDNPRPNDPNVGKCNDPYPGNNNNGVKGFSYLDGVNTWLGRTISTASRSGYEMLKVPNALTDDRSKPIQGQTIVLNTDWSGYSGSFMDYWAEGDCYRACFYVELIRGRPKEDKVWWTSNSIVSMCSSTEFLGQWDWPDGAKIEYFL

SEQ ID NO: 23693 - protein, 470 aa, synthetic construct
  REGION 1..470: note = neuraminidase__InfluenzaA__AGQ81942
MNPNQKILCTSATAIIIGTIAVLIGVANLGLNIGLHLKPGCNCSHSQPEATNTSQTIINNYYNETNITQISNTNIQMEERPSRGFNNLTKGLCTINSWHIYGKDNAVRIGENSDVLVTREPYVSCDPDECRFYALSQGTTIRGKHSNGTIHDRSQYRALISWPLSSPPTVYNSRVECIGWSSTSCHDGKSRMSICISGPNNNASAIVWYNRRPVAEINTWARNILRTQESECVCHNGVCPVVFTDGSATGPADTRVYYFREGKILKWESLTGTARHIEECSCYGERTGITCTCRDNWQGSNRPVIQIDPVAMTHTSQYICSPVLTDNPRPNDPNVGKCNDPYPGNNNNGVKGFSYLDGVNTWLGRTISTASRSGYEMLKVPNALTDDRSKPIQGQTIILNTDWSGYSGSFMDYWAEGDCYRACFYVELIRGRPKEDKVWWTSNSIVSMCSSTEFLGQWDWPDGAKIEYFL

SEQ ID NO: 23694 - protein, 470 aa, synthetic construct
  REGION 1..470: note = neuraminidase__InfluenzaA__AGQ81943
MNPNQKILCTSATAIIIGAIAVLIGIANLGLNIGLHLKPSCNCSHSQPETTNTSQTIINNYYNETNITQISNTNIQMEERTSRGFNNLTKGLCTINSWHIYGKDNAIRIGESSDVLVTREPYVSCDPDECRFYALSQGTTIRGKHSNGTIHDRSQYRALISWPLSSPPTVYNSRVECIGWSSTSCHDGKSRMSICISGPNNNASAVVWYNRRPVAEINTWARNILRTQESECVCHNGVCPVVFTDGSATGPADTRIYYFKEGRILKWESLTGTAKHIEECSCYGERTGITCTCRDNWQGSNRPVIQIDPVAMTHTSQYICSPVLTDNPRPNDPNIGKCNDPYPGNNNNGVKGFSYLDGANTWLGRTISTASRSGYEMLKVPNALTDDRSKPIQGQTIVLNTDWSGYSGSFMDYWAEGDCYRACFYVELIRGRPKEDKVWWTSNSIVSMCSSTEFLGQWNWPDGAKIEYFL

SEQ ID NO: 23695 - protein, 470 aa, synthetic construct; identical to SEQ ID NO: 23685
  REGION 1..470: note = neuraminidase__InfluenzaA__AGQ81944

SEQ ID NO: 23696 - protein, 470 aa, synthetic construct
  REGION 1..470: note = neuraminidase__InfluenzaA__AGQ81947
MNPNQKILCTSATALVIGTIAVLIGIANLGLNIGLHLKPSCNCSHSQPEATNTSQTIINNYYNETNITQISNTNIQMEERASRSFNNLTKGLCTINSWHIYGKDNAIRIGENSDVLVTREPYVSCDPDECRFYALSQGTTIRGKHSNGTIHDRSQYRALISWPLSSPPTVYNSRVECIGWSSTSCHDGKSRMSICISGPNNNASAVVWYNRRPVAEINTWARNILRTQESECVCHNGVCPVVFTDGSATGPADTRIYYFKEGKILKWESLTGTAKHIEECSCYGERTGITCTCRDNWQGSNRPVIQIDPVAMTHTSQYICSPVLTDNPRPNDPNVGKCNDPYPGNNNNGVKGFSYLDGVNTWLGRTISTASRSGYEMLKVPNALTDDRSKPIQGQTIVLNTDWSGYSGSFMDYWAEGDCYRACFYVELIRGRPKEDKVWWTSNSIVSMCSSTEFLGQWNWPDGAKIEYFL

SEQ ID NO: 23697 - protein, 470 aa, synthetic construct
  REGION 1..470: note = neuraminidase__InfluenzaA__AGQ81948
MNPNQKILCTSATAIIIGAIAVLIGIANLGLNIGLHLKPSCNCSHSQPETTNTSQTIINNYYNETNITQISNTNIQMEERTSRGFNNLTKGLCTINSWHIYGKDNAIRIGESSDVLVTREPYVSCDPDECRFYALSQGTTIRGKHSNGTIHDRSQYRALISWPLSSPPTVYNSRVECIGWSSTSCHDGKSRMSICISGPNNNASAVVWYNRRPVAEINTWARNILRTQESECVCHNGVCPVVFTDGSATGPADTRIYYFKEGRILKWESLTGTAKHIEECSCYGERTGITCTCRDNWQGSNRPVIQIDPVAMTHTSQYICSPVLTDNPRPNDPNIGKCNDPYPGNNNNGVKGFSYLDGANTWLGRTISTASRSGYEMLKVPNALTDDRSKPIQGQTIVLNTDWSGYSGSFMDYWAEGECYRACFYVELIRGRPKEDKVWWTSNSIVSMCSSTEFLGQWNWPDGAKIEYFL

SEQ ID NO: 23698 - protein, 470 aa, synthetic construct
  REGION 1..470: note = neuraminidase__InfluenzaA__AGQ81951
MNPNQKILCTSATAIVIGTIAVLIGVANLGLNIGLHLKPGCNCSQSQPEATNTSQTIINNYYNETNITQISNTNIQMEERANRGFNNLTKGLCTINSWHIYGKDNAVRIGENSDVLVTREPYVSCDPDECRFYALSQGTTIRGKHSNGTIHDRSQYRALISWPLSSPPTVYNSRVECIGWSSTSCHDGKSRMSICISGPNNNASAVVWYNRRPVAEINTWARNILRTQESECVCHNGVCPVVFTDGSATGPADTRVYYFREGKILKWESLTGTAKHIEECSCYGERTGITCTCRDNWQGSNRPVIQIDPVAMTHTSQYICSPVLTDNPRPNDPNVGKCNDPYPGNNNNGVKGFSYLDGVNTWLGRTISTASRSGYEMLKVPNALTDDRSKPIQGQTIVLNTDWSGYSGSFMDYWAEGDCYRACFYVELIRGRPKEDKVWWTSNSIVSMCSSTEFLGQWNWPDGAKIEYFL

SEQ ID NO: 23699 - protein, 470 aa, synthetic construct
  REGION 1..470: note = neuraminidase__InfluenzaA__AGQ81952
MNPNQKILCTSATAIVIGTIAVLIGVANLGLNIGLHLKPGCNCSHSQPEATNTSQTIINNYYNETNITQISNTNIQMEERANRGFNNLTKGLCTINSWHIYGKDNAVRIGENSDVLVTREPYVSCDPDECRFYALSQGTTIRGKHSNGTIHDRSQYRALISWPLSSPPTVYNSRVECIGWSSTSCHDGKSRMSICISGPNNNASAVVWYNRRPVAEINTWARNILRTQESECVCHNGVCPVVFTDGSATGPADTRVYYFREGKILKWESLTGTAKHIEECSCYGERTGITCTCRDNWQGSNRPVIQIDPVAMTHTSQYICSPVLTDNPRPNDPNVGKCNDPYPGNNNNGVKGFSYLDGVNTWLGRTISTASRSGYEMLKVPNALTDDRSKPIQGQTIVLNTDWSGYSGSFMDYWAEGDCYRACFYVELIRGRPKEDKVWWTSNSIVSMCSSTEFLGQWNWPDGAKIEYFL

SEQ ID NO: 23700 - protein, 470 aa, synthetic construct
  REGION 1..470: note = neuraminidase__InfluenzaA__AGQ81954
MNPNQKILCTSATAIVIGTIAVLIGVANLGLNIGLHLKPSCNCSHSQPEATNTSQTIINNYYNETNITQISNTNIQMEERASRGFNNLTKGLCTINSWHIYGKDNAVRIGENSDVLVTREPYVSCDPDECRFYALSQGTTIRGKHSNGTIHDRSQYRALISWPLSSPPTVYNSRVECIGWSSTSCHDGKSRMSICISGPNNNASAVVWYNRRPVAEINTWARNILRTQESECVCHNGVCPVVFTDGSATGPADTRVYYFKEGKILKWESLTGTAKHIEECSCYGERTGITCTCRDNWQGSNRPVIQIDPVAMTHTSQYICSPVLTDNPRPNDPNVGKCNDPYPGNNNNGVKGFSYLDGVNTWLGRTISTASRSGYEMLKVPNALTDDRSKPIQGQTIVLNTDWSGYSGSFMDYWAEGDCYRACFYVELIRGRPKEDKVWWTSNSIVSMCSSTEFLGQWNWPDGAKIEYFL

SEQ ID NO: 23701 - protein, 470 aa, synthetic construct
  REGION 1..470: note = neuraminidase__InfluenzaA__AGQ81956
MNPNQKILCTSATAIVIGTIAVLIGVANLGLNIGLHLKPSCNCSHSQPEATNTSQTIINNYYNETNITQISNTNIQMEERASRGFNNLTKGLCTINSWHIYGKDNAVRIGENSDVLVTREPYVSCDPDECRFYALSQGTTIRGKHSNGTIHDRSQYRALISWPLSSPPTVYNSRVECIGWSSTSCHDGKSRMSICISGPNNNASAIVWYNRRPVAEINTWARNILRTQESECVCHNGVCPVVFTDGSATGPADTRVYYFKEGKILKWESLTGTAKHIEECSCYGERTGITCTCRDNWQGSNRPVIQIDPVAMTHTSQYICSPVLTDNPRPNDPNVGKCNDPYPGNNNNGVKGFSYLDGVNTWLGRTISTASRSGYEMLKVPNALTDDRSKPIQGQTIVLNTDWSGYSGSFMDYWAEGDCYRACFYVELIRGRPKEDKVWWTSNSIVSMCSSTEFLGQWNWPDGAKIEYFL

SEQ ID NO: 23702 - protein, 470 aa, synthetic construct
  REGION 1..470: note = neuraminidase__InfluenzaA__AGQ81957
MNPNQKILCTSATAIVIGTIAVLIGIANLGLNIGLHLKPSCNCSHSQPEATNTSQIIINNYYNETNITQVSNTNIQMEERASRGFNNLTKGLCTINSWHIYGKDNAVRIGENSDVLVTREPYVSCDPDECRFYALSQGTTIRGKHSNGTIHDRSQYRALISWPLSSPPTVYNSRVECIGWSSTSCHDGKSRMSICISGPNNNASAVVWYNRRPVAEINTWARNILRTQESECVCHNGVCPVVFTDGSATGPADTRIYYFKEGKILKWESLTGTAKHIEECSCYGERTGITCTCRDNWQGSNRPVIQIDPVAMTHTSQYICSPVLTDNPRPNDPNVGKCNDPYPGNNNNGVKGFSYLDGVNTWLGRTISTASRSGYEMLKVPNALTDDRSKPVQGQTIVLNTDWSGYSGSFMDYWAEGDCYRACFYVELIRGRPKEDKVWWTSNSIVSMCSSTEFLGQWNWPDGAKIEYFL

SEQ ID NO: 23703 - protein, 470 aa, synthetic construct; identical to SEQ ID NO: 23685
  REGION 1..470: note = neuraminidase__InfluenzaA__AGQ81958

SEQ ID NO: 23704 - protein, 470 aa, synthetic construct; identical to SEQ ID NO: 23685
  REGION 1..470: note = neuraminidase__InfluenzaA__AGQ81959

SEQ ID NO: 23705 - protein, 470 aa, synthetic construct
  REGION 1..470: note = neuraminidase__InfluenzaA__AGQ81960
MNPNQKILCTSATAIVIGTIAVLIGIANLGLNIGLHLKPNCNCSRSQPETTNTSQTIINNYYNETNITQISNTNIQMEERASRDFNNLTKGLCTINSWHIYGKDNAVRIGENSDVLVTREPYVSCDPNECRFYALSQGTTIRGKHSNGTIHDRSQYRALISWPLSSPPTVYNSRVECIGWSSTSCHDGKSRMSICISGPNNNASAVVWYNRRPVAEINTWARNILRTQESECVCHNGVCPVVFTDGSATGPADTRIYYFKEGKILKWESLTGTAKHIEECSCYGERTEITCTCRDNWQGSNRPVIQIDPVAMTHTSQYICSPVLTDNPRPNDPNVGKCNDPYPGNNNNGVKGFSYLDGVNTWLGRTISTASRSGYEMLKVPNALTDDRSKPIQGQTIVLNTDWSGYSGSFMDYWAEGDCYRACFYVELIRGRPKEDKVWWTSNSIVSMCSSTEFLGQWDWPDGAKIEYFL

SEQ ID NO: 23706 - protein, 470 aa, synthetic construct; identical to SEQ ID NO: 23698
  REGION 1..470: note = neuraminidase__InfluenzaA__AGQ81961

SEQ ID NO: 23707 - protein, 470 aa, synthetic construct; identical to SEQ ID NO: 23698
  REGION 1..470: note = neuraminidase__InfluenzaA__AGQ81962

SEQ ID NO: 23708 - protein, 470 aa, synthetic construct
  REGION 1..470: note = neuraminidase__InfluenzaA__AGQ81963
MNPNQKILCTSATAIVIGTIAVLIGIANLGLNIGLHLKPSCNCSHSQPEETNTSQTIINNYYNETNITQISNTNIQMEERASRGFNNLTKGLCTINSWHIYGKDNAVRIGENSDVLVTREPYVSCDPNECRFYALSQGTTIRGKHSNGTIHDRSQYRALISWPLSSPPTVYNSRVECIGWSSTSCHDGKSRMSVCISGPNDNASAVVWYNRRPVAEINTWARNILRTQESECVCHNGVCPVVFTDGSATGPAHTRIYYFKEGKILKWESLTGTAKHIEECSCYGERTGITCTCRDNWQGSNRPVIQIDPVAMTHTSQYICSPVLTDNPRPNDPNVGKCNDPYPGNNNNGVKGFSYLDGVNTWLGRTISTASRSGYEMLKVPNALTDDRSKPIQGQTIVLNTDWSGYSGSFMDYWTEGDCYRACFYVELIRGRPKEDKVWWTSNSIVSMCSSTEFLGQWDWPDGAKIEYFL

SEQ ID NO: 23709 - protein, 470 aa, synthetic construct
  REGION 1..470: note = neuraminidase__InfluenzaA__AGQ81964
MNPNQKILCTSATAIVIGTIAVLIGIANLGLNIGLHLKPSCNCSHSKPEETNASQTIINNYYNETNITQISNTNIQMEERASRGFNNLTKGLCTINSWHIYGKDNAVRIGESSDVLVTREPYVSCDPDECRFYALSQGTTIRGKHSNGTIHDRSQYRALISWPLSSPPTVYNSRVECIGWSSTSCHDGKSRMSICISGPNNNASAVVWYNRRPVAEINTWARNILRTQESECVCHNGVCPVVFTDGSATGPADTRIYYFKEGKILKWESLTGTAKHIEECSCYGERTGITCTCRDNWQGSNRPVIQIDPVAMTHTSQYICSPVLTDNPRPNDPNVGKCNDPYPGNNNNGVKGFSYLDGVNTWLGRTTSTTSRSGYEMLKVPNALTDDRSKPIQGQTIVLNTDWSGYSGSFMDYWAEGDCYRACFYVELIRGRPKEDKVWWTSNSIVSMCSSTEFLGQWNWPDGAKIEYFL

SEQ ID NO: 23710 - protein, 470 aa, synthetic construct
  REGION 1..470: note = neuraminidase__InfluenzaA__AGQ81966
MNPNQRILCTSATAIVIGTIAVLIGVANLGLNIGLHLKPGCNCSHSQPEATNTSQTIINNYYNETNITQISNTNIQMEERANRGFNNLTKGLCTINSWHIYGKDNAVRIGENSDVLVTREPYVSCDPDECRFYALSQGTTIRGKHSNGTIHDRSQYRALISWPLSSPPTVYNSRVECIGWSSTSCHDGKSRMSICISGPNNNASAVVWYNRRPVAEINTWARNILRTQESECVCHNGVCPVVFTDGSATGPADTRVYYFREGKILKWESLTGTAKHIEECSCYGERTGITCTCRDNWQGSNRPVIQIDPVAMTHTSQYICSPVLTDNPRPNDPNVGKCNDPYPGNNNNGVKGFSYLDGVNTWLGRTISTASRSGYEMLKVPNALTDDRSKPIQGQTIVLNTDWSGYSGSFMDYWAEGDCYRACFYVELIRGRPKEDKVWWTSNSIVSMCSSTEFLGQWNWPDGAKIEYFL

SEQ ID NO: 23711 - protein, 470 aa, synthetic construct
  REGION 1..470: note = neuraminidase__InfluenzaA__AGQ81967
MNPNQKILCTSATAIVIGIIAVLIGIANLGLNIGLHLKPSCNCSHSQPEATNASQTIINNYYNETNITQISNTNIQMEERASRGFNNLTKGLCTINSWHIYGKDNAVRIGENSDVLVTREPYVSCDPDECRFYALSQGTTIRGKHSNGTIHDRSQYRALISWPLSSPPTVYNSRVECIGWSSTSCHDGKSRMSICISGPNNNASAVVWYNRRPVAEINTWARNILRTQESECVCHNGVCPVVFTDGSATGPAETRIYYFKEGKILKWESLTGTAKHIEECSCYGERTGITCTCRDNWQGSNRPVIQIDPVAMTHTSQYICSPVLTDNPRPNDPNVGKCNDPYPGNNNNGVKGFSYLDGVNTWLGRTISTASRSGYEMLKVPNALTDDRSKPIQGQIIVLNTDWSGYSGSFMDYWAEGDCYRACFYVELIRGRPKEDKVWWTSNSIVSMCSSTEFLGQWNWPDGAKIEYFL

SEQ ID NO: 23712 - protein, 470 aa, synthetic construct
  REGION 1..470: note = neuraminidase__InfluenzaA__AGQ81968
MNPNQKILCTSATAIVIGIIAVLIGIANLGLNIGLHLKPSCNCSHSQPEATNASQTIINNYYNETNITQISNTNIQMEERASRGFNNLTKGLCTINSWHIYGKDNAVRIGENSDILVTREPYVSCDPDECRFYALSQGTTIRGKHSNGTIHDRSQYRSLISWPLSSPPTVYNSRVECIGWSSTSCHDGKSRMSICISGPNNNASAVVWYNRRPVAEINTWARNILRTQESECVCHNGVCPVVFTDGSATGPAETRIYYFKEGKILKWESLTGTAKHIEECSCYGERTGITCTCRDNWQGSNRPVIQIDPVAMTHTSQYICSPVLTDNPRPNDPNVGKCNDPYPGNNNNGVKGFSYLDGVNTWLGRTISTASRSGYEMLKVPNALTDDRSKPIQGQTIVLNTDWSGYSGSFIDYWAEGDCYRACFYVELIRGRPKEDKVWWTSNSIVSMCSSTEFLGQWNWPDGAKIEYFL

SEQ ID NO: 23713 - protein, 470 aa, synthetic construct
  REGION 1..470: note = neuraminidase__InfluenzaA__AGQ81969
MNPNQKILCTSATAIVIGIIAVLIGIANLGLNIGLHLKPSCNCSHSQPEETNASQTIINNYYNETNITQISNTNIQMEERASRGFNNLTKGLCTINSWHIYGKDNAVRIGENSDVLVTREPYVSCDPDECRFYALSQGTTIRGKHSNGTIHDRSQYRALISWPLSSPPTVYNSRVECIGWSSTSCHDGKSRMSICISGPNNNASAVVWYNRRPVAEINTWARNILRTQESECVCHNGVCPVVFTDGSATGPAETRIYYFKEGKILKWESLTGTAKHIEECSCYGERTGITCTCRDNWQGSNRPVIQIDPVAMTHTSQYICSPVLTDNPRPNDPNVGKCNDPYPGNNNNGVKGFSYLDGVNTWLGRTISTASRSGYEMLKVPNALTDDRSKPIQGQIIVLNTDWSGYSGSFMDYWAEGDCYRACFYVELIRGRPKEDKVWWTSNSIVSMCSSTEFLGQWNWPDGAKIEYFL

SEQ ID NO: 23714 - protein, 470 aa, synthetic construct
  REGION 1..470: note = neuraminidase__InfluenzaA__AGQ81970
MNPNQKILCTSATAIVIGTIAVLIGIANLGLNIGLHLKPSCNCSHSQPEETNASQTIINNYYNETNITQISNTNIQMEERASRGFNNLTKGLCTINSWHIYGKDNAVRIGENSDVLVTREPYVSCDPDECRFYALSQGTTIRGKHSNGTIHDRSQYRALISWPLSSPPTVYNSRVECIGWSSTSCHDGKSRMSICISGPNNNASAVVWYNKRPVAEINTWARNILRTQESECVCHNGVCPVVFTDGSATGPADTRIYYFKEGKILKWEPLTGTAKHIEECSCYGERTGITCTCRDNWQGSNRPVIQIDPVAMTHTSQYICSPVLTDNPRPNDPNVGKCNDPYPGNSNNGVKGFSYLDGVNTWLGRTISTASRSGYEMLKVPNALTDDRSKPIQGQTIVLNTDWSGYSGSFMDYWAEGDCYRACFYVELIRGRPKEDKVWWTSNSIVSMCSSTEFLGQWNWPDGAKIEYFL

SEQ ID NO: 23715 - protein, 470 aa, synthetic construct
  REGION 1..470: note = neuraminidase__InfluenzaA__AGQ81971
MNPNQKILCTSATAIIIGAIAVLIGIANLGLNIGLHLKPSCNCSHSQPETTNTSQTIINNYYNETNITQISNTNIQMEERTSRGFNNLTKGLCTINSWHIYGKDNAVRIGESSDVLVTREPYVSCDPDECRFYALSQGTTIRGKHSNGTIHDRSQYRALISWPLSSPPTVYSSRVECIGWSSTSCHDGKSRMSICISGPNNNASAVVWYNRRPVAEINTWARNILRTQESECVCHNGVCPVVFTDGSATGPADTRIYYFKEGKILKWESLTGTAKHIEECSCYGERTGITCTCRDNWQGSNRPVIQIDPVAMTHTSQYICSPVLTDNPRPNDPNIGKCNDPYPGNNNNGVKGFSYLDGANTWLGRTISTASRSGYEMLKVPNALTDDRSKPIQGQTIVLNTDWSGYSGSFMDYWAEGDCYRACFYVELIRGRPKEDKVWWTSNSIVSMCSSTEFLGQWNWPDGAKIEYFL

SEQ ID NO: 23716 - protein, 470 aa, synthetic construct
  REGION 1..470: note = neuraminidase__InfluenzaA__AGQ81972
MNPNQKILCTSATAIIIGAIAVLIGIANLGLNIGLHLKPSCNCSHSQPETTNTSQTIINNYYNETNITQISNTNIQMEERASRGFNNLTKGLCTINSWHIYGKDNAVRIGESSDVLVTREPYVSCDPDECRFYALSQGTTIRGKHSNGTIHDRSQYRALISWPLSSPPTVYNSRVECIGWSSTSCHDGKSRMSICISGPNNNASAVVWYNRRPVAEINTWARNILRTQESECVCHNGVCPVVFTDGSATGPADTRIYYFKEGKILKWESLTGTAKHIEECSCYGERTGITCTCRDNWQGSNRPVIQIDPVAMTHTSQYICSPVLTDNPRPNDPNIGKCNDPYPGNNNNGVKGFSYLDGANTWLGRTISTASRSGYEMLKVPNALTDDRSKPIQGQTIVLNTDWSGYSGSFMDYWAEGDCYRACFYVELIRGRPKEDKVWWTSNSIVSMCSSTEFLGQWNWPDGAKIEYFL

SEQ ID NO: 23717 - protein, 470 aa, synthetic construct
  REGION 1..470: note = neuraminidase__InfluenzaA__AGQ81973
MNPNQKILCTSATAIIIGAIAVLIGIANLGLNIGLHLKPSCNCSHSQPETTNTSQTIINNYYNETNITQISNTNIQMEERTSRGFNNLTKGLCTINSWHIYGKDNAVRIGESSDVLVTREPYVSCDPDECRFYALSQGTTIRGKHSNGTIHDRSQYRALISWPLSSPPTVYNSRVECIGWSSTSCHDGKSRMSICISGPNNNASAVVWYNRRPVAEINTWARNILRTQESECVCHNGVCPVVFTDGSATGPADTRIYYFKEGKILKWESLTGTAKHIEECSCYGERTGITCTCRDNWQGSNRPVIQIDPVAMTHTSQYICSPVLTDNPRPNDPNIGKCNDPYPGNNNNGVKGFSYLDGANTWLGRTISTASRSGYEMLKVPNALTDDRSKPIQGQTIVLNTDWSGYSGSFMDYWAEGDCYRACFYVELIRGRPKEDKVWWTSNSIVSMCSSTEFLGQWNWPDGAKIEYFL

SEQ ID NO: 23718 - protein, 470 aa, synthetic construct; identical to SEQ ID NO: 23698
  REGION 1..470: note = neuraminidase__InfluenzaA__AGQ81974

SEQ ID NO: 23719 - protein, 465 aa, synthetic construct
  REGION 1..465: note = neuraminidase__InfluenzaA__AGQ81975
MNPNQKILCTSATAIIIGAIAVLIGIANLGLNIGLHLKPGCNCSHSQPETTNTSQTIINNYYNETNITNIQMEERTSRNFNNLTKWLCTINSWHIYGKDNAVRIGENSDVLVTREPYVSCDPDECRFYALSQGTTIRGKHSNGTIHDRSQYRALISWPLSSPPTVYNSRVECIGWSSTSCHDGKSRMSICISGPNNNASAVVWYNRRPVAEINTWARNILRTQESECVCHNGVCPVVFTDGSATGPADTRIYYFKEGKILKWESLTGTAKHIEECSCYGERTGITCTCRDNWQGSNRPVIQIDPVAMTHTSQYICSPVLTDNPRPDDPNIGKCNDPYPGNNNNGVKGFSYLDGANTWLGRTISTASRSGYEMLKVPNALTDDRSKPIQGQTIVLNADWSGYSGSFMDYWADGDCYRACFYVELIRGRPKEDKVWWTSNSIVSMCSSTEFLGQWNWPDGAKIEYFL

SEQ ID NO: 23720 - protein, 465 aa, synthetic construct
  REGION 1..465: note = neuraminidase__InfluenzaA__AGQ81977
MNPNQKILCTSATAIIIGAIAVLIGIANLGLNIGLHLKPGCNCSHSQPETTNTSQTIINNYYNETNITNIQMEERTSRNFNNLTKGLCTINSWHIYGKDNAVRIGESSDVLVTREPYVSCDPDECRFYALSQGTTIRGKHSNGTIHDRSQYRALISWPLSSPPTVYNSRVECIGWSSTSCHDGKSRMSICISGPNNNASAVVWYNRRPVAEINTWARNILRTQESECVCHNGVCPVVFTDGSATGPADTRIYYFKEGKILKWESLTGTAKHIEECSCYGERTGITCTCRDNWQGSNRPVIQIDPVAMTHTSQYICSPVLTDNPRPDDPNIGKCNDPYPGNNNNGVKGFSYLDGANTWLGRTISTASRSGYEMLKVPNALTDDRSKPIQGQTIVLNADWSGYSGSFMDYWADGDCYRACFYVELIRGRPKEDKVWWTSNSIVSMCSSTEFLGQWNWPDGAKIEYFL

SEQ ID NO: 23721 - protein, 465 aa, synthetic construct
  REGION 1..465: note = neuraminidase__InfluenzaA__AGQ81979
MNPNQKILCTSATAIIIGAIAALIGIANLGLNIGLHLKPGCNCSHSQPETTNTSQTIINNYYNETNITNIQMEERTSRNFNNLTKGLCTINSWHIYGKDNAVRIGESSDVLVTREPYVSCDPDECRFYALSQGTTIRGKHSNGTIHDRSQYRALISWPLSSPPTVYNSRVECIGWSSTSCHDGKSRMSICISGPNNNASAVVWYNRRPVAEINTWARNILRTQESECVCHNGVCPVVFTDGSATGPADTRIYYFKEGKILKWESLTGTAKHIEECSCYGERTGITCTCRDNWQGSNRPVIQIDPVAMTHTSQYICSPVLTDNPRPDDPNIGKCNDPYPGNNNNGVKGFSYLDGANTWLGRTISTASRSGYEMLKVPNALTDDRSKPIQGQTIVLNADWSGYSGSFMDYWADGDCYRACFYVELIRGRPKEDKVWWTSNSIVSMCSSTEFLGQWNWPDGAKIEYFL

SEQ ID NO: 23722 - protein, 465 aa, synthetic construct; identical to SEQ ID NO: 23720
  REGION 1..465: note = neuraminidase__InfluenzaA__AGQ81980

SEQ ID NO: 23723 - protein, 449 aa, synthetic construct
  REGION 1..449: note = neuraminidase__InfluenzaA__AGQ88501
MNPNQKIVTIGSICMVIGIVSLMLQIGNMISIWVSHSIQTGNQHQTEPIRNTNFLTENAVASVALSGNSSLCPIRGWAVHSKDNSIRIGSKGDVFVIREPFISCSNLECRTFFLTQGALLNDKHSNGTVKDRSPHRTLMSCPIGEAPSPYNSRFESVAWSASACHDGISWLTIGISGPDNGAVAVLKYNGIITDTIKSWRNNILRTQESECTCVNGSCFTVMTDGPSNGQASYKIFKIEKGKVVKSVELNAPNYHYEECSCYPDAGEIICVCRDNWHGSNRPWVSFNQNLEYQIGYICSGVFGDNPRPNDGEGSCGPVSPNGAYGVKGFSFKYGNGVWIGRTKSTHSRSGFEMIWDPNGWTGTDSEFSMKQDIVAITDWSGYSGSFVQHPELTGLDCIRPCFWVELIRGRPKESTIWTSGSSISFCGVNSDTVSWSWPDGAELPFTIDK

SEQ ID NO: 23724 - protein, 466 aa, synthetic construct; identical to SEQ ID NO: 23602
  REGION 1..466: note = neuraminidase__InfluenzaA__AGR33906

SEQ ID NO: 23725 - protein, 466 aa, synthetic construct
  REGION 1..466: note = neuraminidase__InfluenzaA__AGR33908
MNPNQKITAIGSVSLIIAIICLLMQIAILTTTMTLHFRQNECSNPSNNQVMPCEPIIIERNTVHLNSTTIEREICPKVAEYKNWSKPQCQITGFAPFSKDNSIRLSAGGDIWVTREPYVSCSPDKCYQFALGQGTTLKNKHSNGTTHDRTPHRTLLMNELGVPFHLGTKQVCIAWSSSSCYDGKAWLHICVTGDDKNATASIIYDGMLVDSIGSWSKNILRTQESECVCINGTCAVVMTDGSASGEADTRILFIREGKIINISPLSGSAQHVEECSCYPRYPEVRCVCRDNWKGSNRPIIYINMVDYSIESRYVCSGLVGDTPRNDDSTSSSNCRDPNNERGAPGVKGWAFDDGNDVWMGRTIKNGSRSGYETFRVINGWTMANSKSQINRQVIVDSDNWSGYSGIFSVEGKKCINRCFYVELIRGRPQEPRVWWTSNSIIVFCGTSGTYGTGSWPDGADINFMPI

SEQ ID NO: 23726 - protein, 466 aa, synthetic construct
  REGION 1..466: note = neuraminidase__InfluenzaA__AGR33910
MNPNQKIIAIGSVSLTIAIICFLMQIAILTTTMTLHFKQNECSKPSNNQVVPCEPILIERNTVHLNSTTIEKEVCPKVAEYKNWSKPQCQITGFAPFSKDNSIRLSAGGDIWVTREPYVSCSFGKCYQFALGQGTTLKNKHSNGTTHDRTPHRTLLMNELGVPFHLGTKQVCIAWSSSSCYDGKAWLHICVTGDDKNATASIIYDGMLVDSIGSWSKNILRTQESECVCINGTCAVVMTDGSASGKADTRILFIREGKIINIRPLSGSAQHVEECSCYPRYPEVRCVCRDNWKGSNRPVLYINMADYSVESSYVCSGLVGDTPRNDDSSSSSNCRDPNNERGAPGVKGWAFDDGNDVWMGRTIRNDSRSGYETFRVVNGWTTANSKSQINRQVIVDSENWSGYSGIFSVEGKNCINRCFYVELIRGRPQEPRVWWTSNSIIVFCGTSGTYGTGSWPDGANINFMPI

SEQ ID NO: 23727 - protein, 466 aa, synthetic construct
  REGION 1..466: note = neuraminidase__InfluenzaA__AGR33911
MNPNQKIIAIGSVSLTIAIICFLMQIAILTTTMTLHFKQNECSNPSNNQVVPCEPILIERNTVHLNSTTIEKEVCPKVAEYKNWSKPQCQITGFAPFSKDNSIRLSAGGDIWVTREPYVSCSLGKCYQFALGQGTTLKNNHSNGTTHDRTPHRTLLMNELGVPFHLGTKQVCIAWSSSSCYDGKAWLHICVTGDDKNATASIIYDGMLVDSIGSWSKNILRTQESECVCINGTCAVVMTDGSASGKADTRILFIREGKIINISPLSGSAQHVEECSCYPRYPEVRCVCRDNWKGSNRPVLYINMADYSIESSYVCSGLVGDTPRNDDSSSSSNCRDPNNERGAPGVKGWAFDDGNDVWMGRTIRNNSRSGYETFRVVNGWTTANSKSQINRQVIVDSENWSGYSGIFSVEGKNCINRCFYVELIRGRPQEPRVWWTSNSIIVFCGTSGTYGTGSWPDGANINFMPI

SEQ ID NO: 23728 - protein, 451 aa, synthetic construct; identical to SEQ ID NO: 23643
  REGION 1..451: note = neuraminidase__InfluenzaA__AGR33912

SEQ ID NO: 23729 - protein, 451 aa, synthetic construct; identical to SEQ ID NO: 23673
  REGION 1..451: note = neuraminidase__InfluenzaA__AGR33913

SEQ ID NO: 23730 - protein, 451 aa, synthetic construct; identical to SEQ ID NO: 23643
  REGION 1..451: note = neuraminidase__InfluenzaA__AGR33915

SEQ ID NO: 23731 - protein, 451 aa, synthetic construct
  REGION 1..451: note = neuraminidase__InfluenzaA__AGR33916
MNPNQKLFASSGVAIALSVLNLLIGLSNVGLNVSLHLKETGPKQEENLTCMTTKETELGTPSYLLLNKSLCNVEGWVVIAKDNAVRFGESEQIIITREPYVSCDPNGCKMYALHQGTTIRNKHSNGTIHDRTAFRGLISTPLGTPPTVSNSDFICVGWSSTTCHDGIGRMTICIQGNNDNATATVYYNRRLTTTIKTWARNILRTQESECVCHNGTCAVVMTDGSASSQAHTKVMYFHKGLVVKEEALKGSAKHIEECSCYGHNQKVTCVCRDNWQGANRPIIEIDMNTLEHTSRYVCTGILTDTSRPGDKPTGDCSNPITGSPGAPGVKGFGFLNGDNTWLGRTISPRSRSGFEMLKIPNAGIDPNSRIAERQEIVDNSNWSGYSGSFIDYWNDNSECYNPCFYVELIRGRPEEAKYVWWTSNSLIALCGSPFPVGSGSFPDGAQIQYFS

SEQ ID NO: 23732 - protein, 451 aa, synthetic construct; identical to SEQ ID NO: 23673
  REGION 1..451: note = neuraminidase__InfluenzaA__AGR33917

SEQ ID NO: 23733 - protein, 451 aa, synthetic construct; identical to SEQ ID NO: 23643
  REGION 1..451: note = neuraminidase__InfluenzaA__AGR33918

SEQ ID NO: 23734 - protein, 465 aa, synthetic construct; identical to SEQ ID NO: 23720
  REGION 1..465: note = neuraminidase__InfluenzaA__AGR33919

SEQ ID NO: 23735 - protein, 470 aa, synthetic construct
  REGION 1..470: note = neuraminidase__InfluenzaA__AGR45094
MNPNQKIITIGSISMAIGIISLILQIGNIISIWASHSIQTGSQNHTGICNQRIITYENSTWVNQTYVNINNTNVVAGKDKTSVTLAGNSSLCPIRGWAIYTKDNSIRIGSKGDVFVIREPFISCSHLECRTFFLTQGALLNDKHSNGTVKDRSPYRALMSCPLGEAPSPYNSRFESVAWSASACHDGMGWLTIGISGPDNGAVAVLKYNGIITETIKSWKKRILRTQESECVCVNGSCFTIMTDGPSNGPASYRIFKIEKGKITKSIELDAPNYHYEECSCYPDTGTVMCVCRDNWHGSNRPWVSFNQNLDYQIGYICSGVFGDNPRPKDGEGSCNPVTVDGADGVKGFSYRYGNGVWIGRTKSNSSRKGFEMIWDPNGWTDTDSDFSVKQDVVPMTDWSGYSGSFVQHPELTGLDCMRPCFWVELIRGRPRENTTIWTSGSSISFCGVNSDTANWSWPDDAELPLTIDK

SEQ ID NO: 23736 - protein, 470 aa, synthetic construct; identical to SEQ ID NO: 18930
  REGION 1..470: note = neuraminidase__InfluenzaA__AGR49780

SEQ ID NO: 23737 - protein, 469 aa, synthetic construct
  REGION 1..469: note = neuraminidase__InfluenzaA__AGR49804
MNPNQKIITIGSVCMTIGMANLILQIGNIISIWISHSIQLGNQNQIETCNQSVITYENNTWVNQTYVNISNTNFAAGQSVVSVKLTGNSSLCPVSGWAIYSKDNSVRIGSKGDVFVIREPFISCSPLECRTFFLTQGALLNDKHSNGTIKDRSPYRTLMSCPIGEVPSPYNSRFESVAWSASACHDGINWLTIGISGPDNGAVAVLKYNGIITDTIKSWRNNILRTQESECACVNGSCFTVMTDGPSNGQASYKIFRIEKGKIVKSVEMNAPNYHYEECSCYPDSSEITCVCRDNWHGSNRPWVSFNQNLEYQIGYICSGIFGDNPRPNDKTGSCGPVSSNGANGVKGFSFKYGNGVWIGRTKSISSRNGFEMIWDPNGWTGTDNNFSIKQDIVGINEWSGYSGSFVQHPELTGLDCIRPCFWVELIRGRPKENTIWTSGSSISFCGVNSDTVGWSWPDGAELPFTIDK

SEQ ID NO: 23738 - protein, 470 aa, synthetic construct; identical to SEQ ID NO: 18930
  REGION 1..470: note = neuraminidase__InfluenzaA__AGR49820

SEQ ID NO: 23739 - protein, 469 aa, synthetic construct; identical to SEQ ID NO: 16090
  REGION 1..469: note = neuraminidase__InfluenzaA__AGR49832

SEQ ID NO: 23740 - protein, 470 aa, synthetic construct; identical to SEQ ID NO: 18930
  REGION 1..470: note = neuraminidase__InfluenzaA__AGR49844

SEQ ID NO: 23741 - protein, 470 aa, synthetic construct; identical to SEQ ID NO: 18930
  REGION 1..470: note = neuraminidase__InfluenzaA__AGR49856

SEQ ID NO: 23742 - protein, 470 aa, synthetic construct; identical to SEQ ID NO: 18930
  REGION 1..470: note = neuraminidase__InfluenzaA__AGR49868

SEQ ID NO: 23743 - protein, 469 aa, synthetic construct; identical to SEQ ID NO: 16728
  REGION 1..469: note = neuraminidase__InfluenzaA__AGR49880

SEQ ID NO: 23744 - protein, 469 aa, synthetic construct; identical to SEQ ID NO: 18484
  REGION 1..469: note = neuraminidase__InfluenzaA__AGR49891

SEQ ID NO: 23745 - protein, 469 aa, synthetic construct
  REGION 1..469: note = neuraminidase__InfluenzaA__AGR49903
MNPNQKIITIGSVSLTISTICFFMQIAILITTVTLHFKQYEFNSPPNNQVMLCEPTIIERNITEIVYLTNTTIEKEICPKLAEYRNWSKPQCDITGFAPFSKDNSIRLSAGGDIWVTREPYVSCDPDKCYQFALGQGTTLNNVHSNDTVHDRTPYRTLLMNELGVPFHLGTKQVCIAWSSSSCHDGKAWLHVCITGDDKNATASFIYNGRLVDSIVSWSKEILRTQESECVCINGTCTVVMTDGSASGKADTKILFIEEGKIVHTSTLSGSAQHVEECSCYPRYPGVRCVCRDNWKGSNRPIVDINIKDHSIVSSYVCSGLVGDTPRKNDSSSSGHCLDPNNEEGGHGVKGWAFDDGNDVWMGRTISEKSRLGYETFKVIEGWSNPKSKLQINRQVIVDRGNRSGYSGIFSVEGKSCINRCFYVELIRGRKEETEVLWTSNSIVVFCGTSGTYGTGSWPDGADINLMPI

SEQ ID NO: 23746 - protein, 469 aa, synthetic construct; identical to SEQ ID NO: 16090
  REGION 1..469: note = neuraminidase__InfluenzaA__AGR49915

SEQ ID NO: 23747 - protein, 469 aa, synthetic construct; identical to SEQ ID NO: 16090
  REGION 1..469: note = neuraminidase__InfluenzaA__AGR49927

SEQ ID NO: 23748 - protein, 469 aa, synthetic construct
  REGION 1..469: note = neuraminidase__InfluenzaA__AGR49939
MNPNKKIITIGSVSLTISTICFFMQIAILITTVTLHFKQYEFNSPPNNQVMLCEPTIIERNITEIVYLTNTTIEKEICPKLAEYRNWSKPQCDITGFAPFSKDNSIRLSAGGDIWVTREPYVSCDPDKCYQFALGQGTTLNNVHSNDTVRDRTPYRTLLMNELGVPFHLGTKQVCIAWSSSSCHDGKAWLHVCITGDDKNATASFIYNGRLVDSIVSWSKEILRTQESECVCINGTCTVVMTDGSASGKADTKILFIEEGKIVHTSTLSGSAQHVEECSCYPRYPGVRCVCRDNWKGSNRPIVDINIKDHSIVSSYVCSGLVGDTPRKNDSSSSGHCLDPNNEEGGHGVKGWAFDDGNDVWMGRTISEKSRLGYETFKVIEGWSNPKSKLQINRQVIVDRGNRSGYSGIFSVEGKSCINRCFYVELIRGRKEETEVLWTSNSIVVFCGTSGTYGTGSWPDGADINLMPI

SEQ ID NO: 23749 - protein, 469 aa, synthetic construct; identical to SEQ ID NO: 16685
  REGION 1..469: note = neuraminidase__InfluenzaA__AGR49951

SEQ ID NO: 23750 - protein, 469 aa, synthetic construct
  REGION 1..469: note = neuraminidase__InfluenzaA__AGR49963
MNPNKKIITIGSVSLTISTICFFMQIAILITTVTLHFKQYEFNSPPNNQVMLCEPTIIERNITEIVYLTNTTIEKEICPKLAEYRNWSKPQCDITGFAPFSKDNSIRLSAGGDIWVTREPYVSCDPDKCYQFALGQGTTLNNVHSNDTVRDRTPYRTLLMNELGVPFHLGTKQVCIAWSSSSCHDGKAWLHVCITGDDKNATASFIYNGRLVDSIVSWSKEILRTQESECVCINGTCTVVMTDGSASGKADTKILFIEEGKIVHTSTLSGSAQHVEECSCYPRYPGVRCVCRDNWKGSNRPIVDINIKDHSIVSSYVCSGLVGDTPRKNDSSSSGHCLDPNNEEGGHGVKGWAFDDGNDVWMGRTISKKSRLGYETFKVIEGWSNPKSKLQINRQVIVDRGNRSGYSGIFSVEGKSCINRCFYVELIRGRKEETEVLWTSNSIVVFCGTSGTYGTGSWPDGADINLMPI

SEQ ID NO: 23751 - protein, 469 aa, synthetic construct; identical to SEQ ID NO: 16728
  REGION 1..469: note = neuraminidase__InfluenzaA__AGR49975

SEQ ID NO: 23752 - protein, 470 aa, synthetic construct; identical to SEQ ID NO: 18930
  REGION 1..470: note = neuraminidase__InfluenzaA__AGR49986

SEQ ID NO: 23753 - protein, 470 aa, synthetic construct; identical to SEQ ID NO: 18930
  REGION 1..470: note = neuraminidase__InfluenzaA__AGR49998

SEQ ID NO: 23754 - protein, 469 aa, synthetic construct; identical to SEQ ID NO: 16728
  REGION 1..469: note = neuraminidase__InfluenzaA__AGR50010

SEQ ID NO: 23755 - protein, 469 aa, synthetic construct; identical to SEQ ID NO: 16728
  REGION 1..469: note = neuraminidase__InfluenzaA__AGR50021

SEQ ID NO: 23756 - protein, 469 aa, synthetic construct; identical to SEQ ID NO: 16738
  REGION 1..469: note = neuraminidase__InfluenzaA__AGR50032

SEQ ID NO: 23757 - protein, 469 aa, synthetic construct
  REGION 1..469: note = neuraminidase__InfluenzaA__AGR50043
MNPNQKIITIGSVSLTISTICFFMQIAILITTVTLHFKQYEFNSPPNNQVMLCEPTIIERNITEIVYLTNTTIEKEICPKLAEYRNWSKPQCDITGFAPFSKDNSIRLSAGGDIWVTREPYVSCDPDKCYQFALGQGTTLNNVHSNNTVRDRTPYRTLLMNELGVPFHLGTKQVCIAWSSSSCHDGKAWLHVCITGDDKNATASFIYNGRLVDSVVSWSKDILRTQESECVCINGTCTVVMTDGSASGKADTKILFIEEGKIVHTSTLSGSAQHVEECSCYPRYPGVRCVCRDNWKGSNRPIVDINIKDHSIVSSYVCSGLVGDTPRKNDSSSSSHCLDPNNEEGGHGVKGWAFDDGNDVWMGRTISEKSRLGYETFKVIEGWSNPKSKLQINRQVIVDRGNRSGYSGIFSVEGKSCINRCFYVELIRGRKEETEVLWTSNSIVVFCGTSGTYGTGSWPDGADLNLMPI

SEQ ID NO: 23758 - protein, 469 aa, synthetic construct; identical to SEQ ID NO: 16728
  REGION 1..469: note = neuraminidase__InfluenzaA__AGR50055

SEQ ID NO: 23759 - protein, 469 aa, synthetic construct
  REGION 1..469: note = neuraminidase__InfluenzaA__AGR50066
MNPNQKIITIGSVCMTIGMANLILQIGNIISIWISHSIQLGNQNQIETCNQSVITYENNTWVNQTYVNISNTNFAAGQSVVSVKLAGNSSLCPVSGWAIYSKDNSVRIGSKGDVFVIREPFISCSPLECRTFFLTQGALLNDKHSNGTIKDRSPYRTLMSCPIGEVPSPYNSRFESVAWSASACHDGINWLTIGISGPDNGAVAVLKYNGIITDTIKSWRNNILRTQESECACVNGSCFTVMTDGPSNGQASYKIFKIEKGKIVKSVEMNAPNYHYEECSCYPDSSEITCVCRDNWHGSNRPWVSFNQNLEYQIGYICSGIFGDNPRPNDKTGSCGPVSSNGANGVKGFSFKYGNGVWIGRTKSISSRNGFEMIWDPNGWTGTDNNFSIKQDIVGINEWSGYSGSFVQHPELTGLDCIRPCFWVELIRGRPKENTIWTSGSSISFCGVNSDTVGWSWPDGAELPFTIDK

SEQ ID NO: 23760 - protein, 469 aa, synthetic construct; identical to SEQ ID NO: 16728
  REGION 1..469: note = neuraminidase__InfluenzaA__AGR50077

SEQ ID NO: 23761 - protein, 469 aa, synthetic construct; identical to SEQ ID NO: 16728
  REGION 1..469: note = neuraminidase__InfluenzaA__AGR50088

SEQ ID NO: 23762 - protein, 469 aa, synthetic construct; identical to SEQ ID NO: 16728
  REGION 1..469: note = neuraminidase__InfluenzaA__AGR50099

SEQ ID NO: 23763 - protein, 469 aa, synthetic construct; identical to SEQ ID NO: 16728
  REGION 1..469: note = neuraminidase__InfluenzaA__AGR50110

SEQ ID NO: 23764 - protein, 469 aa, synthetic construct
  REGION 1..469: note = neuraminidase__InfluenzaA__AGR50121
MNPNQKIITIGSVCMTIGMANLILQIGNIISIWISHSIQLGNQNQIETCNQSVITYENNTWVNQTYVNISNTNFAAGQSVVSVKLAGNSSLCPVSGWAIYSKDNSVRIGSKGDVFVIREPFISCSPLECRTFFLTQGALLNDKHSNGTIKDRSPYRTLMSCPIGEVPSPYNSRFESVAWSASACHDGINWLTIGISGPDNGAVAVLKYNGIITDTIKSWRNNILRTQESECACVNGSCFTVMTDGPSNGQASYKIFRIEKGKIVKSVEMNAPNYHYEECSCYPDSSEITCVCRDNWHGSNRPWVSFNQNLEYQIGYICSGIFGDNPRPNDKTGSCGPVPSNGANGVKGFSFKYGNGVWIGRTKSISSRNGFEMIWDPNGWTGTDNNFSIKQDIVGINEWSGYSGSFVQHPELTGLDCIRPCFWVELIRGRPKENTIWTSGSSISFCGVNSDTVGWSWPDGAELPFTIDK

SEQ ID NO: 23765 - protein, 469 aa, synthetic construct
  REGION 1..469: note = neuraminidase__InfluenzaA__AGR50132
MNPNQKIITIGSVCMTIGMANLILQIGNIISIWISHSIQLGNQNQIETCNQSVITYENNTWVNQTYVNISNTNFAAGQSVVSVKLAGNSSLCPVSGWAIYSKDNSVRIGSKGDVFVIREPFISCSPLECRTFFLTQGALLNDKHSNGTIKDRSPYRTLMSCPIGEVPSPYNSRFESVAWSASACHDGINWLTIGISGPDNGAVAVLKYNGIITDTIKSWRNNILRTQESECACANGSCFTVMTDGPSNGQASYKIFRIEKGKIVKSVEMNAPNYHYEECSCYPDSSEITCVCRDNWHGSNRPWVSFNQNLEYQIGYICSGIFGDNPRPNDKTGSCGPVSSNGANGVKGFSFKYGNGVWIGRTKSISSRNGFEMIWDPNGWTGTDNNFSIKQDIVGINEWSGYSGSFVQHPELTGLDCIRPCFWVELIRGRPKENTIWTSGSSISFCGVNSDTVGWSWPDGAELPFTIDK

SEQ ID NO: 23766 - protein, 469 aa, synthetic construct; identical to SEQ ID NO: 16728
  REGION 1..469: note = neuraminidase__InfluenzaA__AGR50143

SEQ ID NO: 23767 - protein, 469 aa, synthetic construct; identical to SEQ ID NO: 16728
  REGION 1..469: note = neuraminidase__InfluenzaA__AGR50154

SEQ ID NO: 23768 - protein, 470 aa, synthetic construct; identical to SEQ ID NO: 18930
  REGION 1..470: note = neuraminidase__InfluenzaA__AGR50165

SEQ ID NO: 23769 - protein, 469 aa, synthetic construct; identical to SEQ ID NO: 16728
  REGION 1..469: note = neuraminidase__InfluenzaA__AGR50177

SEQ ID NO: 23770 - protein, 469 aa, synthetic construct; identical to SEQ ID NO: 16728
  REGION 1..469: note = neuraminidase__InfluenzaA__AGR50188

SEQ ID NO: 23771 - protein, 469 aa, synthetic construct; identical to SEQ ID NO: 16728
  REGION 1..469: note = neuraminidase__InfluenzaA__AGR50199

SEQ ID NO: 23772 - protein, 469 aa, synthetic construct; identical to SEQ ID NO: 16728
  REGION 1..469: note = neuraminidase__InfluenzaA__AGR50210

SEQ ID NO: 23773 - protein, 469 aa, synthetic construct; identical to SEQ ID NO: 16728
  REGION 1..469: note = neuraminidase__InfluenzaA__AGR50221

SEQ ID NO: 23774 - protein, 469 aa, synthetic construct
  REGION 1..469: note = neuraminidase__InfluenzaA__AGR50232
MNPNQKIITIGSVCMTIGMANLILQIGNIISIWISHSIQLGNQNQIETCNQSVITYENNTWVNQTYVNISNTNFAAGQSVVSVKLAGNSSLCPVSGWAIYSKDNSVRIGSKGDVFVIREPFISCSPLECRTFFLTQGALLNDKHSNGTIKDRSPYRTLMSCPIGEVPSPYNSRFESVAWSASACHDGINWLTIGISGPDNGAVAVLKYNGIITDTIKSWRNNILRTQESECACVNGSCFTVMTDGPNNGQASYKIFRIEKGKIVKSVEMNAPNYHYEECSCYPDSSEITCVCRDNWHGSNRPWVSFNQNLEYQIGYICSGIFGDNPRPNDKTGSCGPVSSNGANGVKGFSFKYGNGVWIGRTKSISSRNGFEMIWDPNGWTGTDNNFSIKQDIVGINEWSGYSGSFVQHPELTGLDCIRPCFWVELIRGRPKENTIWTSGSSISFCGVNSDTVGWSWPDGAELPFTIDK

SEQ ID NO: 23775 - protein, 469 aa, synthetic construct; identical to SEQ ID NO: 16728
  REGION 1..469: note = neuraminidase__InfluenzaA__AGR50243

SEQ ID NO: 23776 - protein, 469 aa, synthetic construct; identical to SEQ ID NO: 16728
  REGION 1..469: note = neuraminidase__InfluenzaA__AGR50254

SEQ ID NO: 23777 - protein, 469 aa, synthetic construct; identical to SEQ ID NO: 16728
  REGION 1..469: note = neuraminidase__InfluenzaA__AGR50265

SEQ ID NO: 23778 - protein, 469 aa, synthetic construct
  REGION 1..469: note = neuraminidase__InfluenzaA__AGR50276
MNPNQKIITIGSVCMTIGMANLILQIGNIISIWISHSIQLGNQNQIETCNQSVITYENNTWVNQTYVNISNTNFAAEQSVVSVKLAGNSSLCPVSGWAIYSKDNSVRIGSKGDVFVIREPFISCSPLECRTFFLTQGALLNDKHSNGTIKDRSPYRTLMSCPIGEVPSPYNSRFESVAWSASACHDGINWLTIGISGPDNGAVAVLKYNGIITDTIKSWRNNILRTQESECACVNGSCFTVMTDGPSNGQASYKIFRIEKGKIVKSVEMNAPNYHYEECSCYPDSSEITCVCRDNWHGSNRPWVSFNQNLEYQIGYICSGIFGDNPRPNDKTGSCGPVSSNGANGVKGFSFKYGNGVWIGRTKSISSRNGFEMIWDPNGWTGTDNNFSIKQDIVGINEWSGYSGSFVQHPELTGLDCIRPCFWVELIRGRPKENTIWTSGSSISFCGVNSDTVGWSWPDGAELPFTIDK

SEQ ID NO: 23779 - protein, 469 aa, synthetic construct; identical to SEQ ID NO: 16728
  REGION 1..469: note = neuraminidase__InfluenzaA__AGR50287

SEQ ID NO: 23780 - protein, 469 aa, synthetic construct
  REGION 1..469: note = neuraminidase__InfluenzaA__AGR50298
MNPNQKIITIGSVCMTIGMANLILQIGNTISIWISHSIQPGNQNQIETCNQSVITYENNTWVNQTYVNISNTNFAAGQSVVSVKLAGNSSLCPVSGWAIYSKDNSIRIGSKGDVFVIREPFISCSPLECRTFFLTQGALLNDKHSNGTIKDRSPYRTLMSCPIGEVPSPYNSRFESVAWSASACHDGINWLTIGISGPDNGAVAVLKYNGIITDTIKSWRNNILRTQESECACVNGSCFTVMTDGPSDGQASYKIFRIEKGKIVKSVEMNAPNYHYEECSCYPDSSEITCVCRDNWHGSNRPWVSFNQNLEYQIGYICSGIFGDNPRPNDKTGSCGPVSSNGANGVKGFSFKYGNGVWIGRTKSISSRNGFEMIWDPNGWTGTDNNFSIKQDIVGINEWSGYSGSFVQHPELTGLDCIRPCFWVELIRGRPKENTIWTSGSSISFCGVNSDTVGWSWPDGAELPFTIDK

SEQ ID NO: 23781 - protein, 469 aa, synthetic construct; identical to SEQ ID NO: 16728
  REGION 1..469: note = neuraminidase__InfluenzaA__AGR50309

SEQ ID NO: 23782 - protein, 469 aa, synthetic construct; identical to SEQ ID NO: 16728
  REGION 1..469: note = neuraminidase__InfluenzaA__AGR50320

SEQ ID NO: 23783 - protein, 469 aa, synthetic construct; identical to SEQ ID NO: 16728
  REGION 1..469: note = neuraminidase__InfluenzaA__AGR50331

SEQ ID NO: 23784 - protein, 469 aa, synthetic construct
  REGION 1..469: note = neuraminidase__InfluenzaA__AGR50342
MNPNQKIITIGSVCMTIGMANLILQIGNIISIWISHSIQLGNQNQIETCNQSVITYENNTWVNQTYVNISNTNFAAGQSVISVKLAGNSSLCPVSGWAIYSKDNSVRIGSKGDVFVIREPFISCSPLECRTFFLTQGALLNDKHSNGTIKDRSPYRTLMSCPIGEVPSPYNSRFESVAWSASACHDGINWLTIGISGPDNGAVAVLKYNGIITDTIKSWRNNILRTQESECACVNGSCFTVMTDGPSNGQASYKIFRIEKGKIVKSVEMNAPNYHYEECSCYPDSSEITCVCRDNWHGSNRPWVSFNQNLEYQIGYICSGIFGDNPRPNDKTGSCGPVSSNGANGVKGFSFKYGNGVWIGRTKSISSRNGFEMIWDPNGWTGTDNNFSIKQDIVGINEWSGYSGSFVQHPELTGLDCIRPCFWVELIRGRPKENTIWTSGSSISFCGVNSDTVGWSWPDGAELPFTIDK

SEQ ID NO: 23785 - protein, 469 aa, synthetic construct; identical to SEQ ID NO: 16728
  REGION 1..469: note = neuraminidase__InfluenzaA__AGR50353

SEQ ID NO: 23786 - protein, 470 aa, synthetic construct; identical to SEQ ID NO: 18930
  REGION 1..470: note = neuraminidase__InfluenzaA__AGR50364

SEQ ID NO: 23787 - protein, 469 aa, synthetic construct
  REGION 1..469: note = neuraminidase__InfluenzaA__AGR55170
MNPNQKIITIGSVSLTISTICFFMQIAILITTVTLHFKQYEFNSPPNNQVMLCEPTIIERNITEIVYLTNTTIEKEICPKLAEYRNWSKPQCDITGFAPFSKDNSIRLSAGGDIWVTREPYVSCDPDKCYQFALGQGTTLNNVHSNDTVRDRTPYRTLLMNELGVPFHLGTKQVCIAWSSSSCHDGKAWLHVCITGDDKNATASFIYNGRLVDSIVSWSKEILRTQESECVCINGTCTVVMTDGSASGKADTKILFIEEGKIVHTSTLSGSAQHVEECSCYPRYPGVRCVCRDNWKGSNRPIVDINIKDHSIVSSYVCSGLVGDTPRKNDSSSSSHCLDPNNEEGGHGVKGWAFDDGNDVWMGRTISEKSRLGYETFKVIEGWSNPNSKLQINRQIIVDRGNRSGYSGIFSVEGKSCINRCFYVELIRGRKEETEVLWTSNSIVVFCGTSGTYGTGSWPDGADINLMPI

SEQ ID NO: 23788 - protein, 469 aa, synthetic construct; identical to SEQ ID NO: 14145
  REGION 1..469: note = neuraminidase__InfluenzaA__AGR55180

SEQ ID NO: 23789 - protein, 469 aa, synthetic construct; identical to SEQ ID NO: 14145
  REGION 1..469: note = neuraminidase__InfluenzaA__AGR55181

SEQ ID NO: 23790 - protein, 469 aa, synthetic construct; identical to SEQ ID NO: 14145
  REGION 1..469: note = neuraminidase__InfluenzaA__AGR55183

SEQ ID NO: 23791 - protein, 469 aa, synthetic construct
  REGION 1..469: note = neuraminidase__InfluenzaA__AGR55184
MNPNQKIITIGSVSLTIATICFLMQIAILVTTVTLHFKQHECNSPPKNQVMLCEPTIIERNITEIVYLTNTTIEKEICPKLAEYRNWSKPQCNITGFAPFSKDNSIRLSAGGDIWVTREPYVSCDPDKCYQFALGQGTTLNNGHSNDTVHDRTPYRTLLMNELGVPFHLGTRQVCIAWSSSSCHDGKAWLHVCVTGDDKNATASFIYNGRLVDSIGSWSKKILRTQESECVCINGTCTVVMTDGSASGKADTKILFIEEGKIVHISTLSGSAQHVEECSCYPRYPGVRCVCRDNWKGSNRPIVDINVKDYSIVSSYVCSGLVGDTPRKNDSFSSSHCLDPNNEEGGHGVKGWAFDDGNDVWMGRTISEKLRSGYETFKVIEGWSKPNSKLQINRQVIVERGNRSGYSGIFSVEGKSCINRCFYVELIRGRKEETEVWWTSNSIVVFCGTSGTYGTGSWPDGADINLMPI

SEQ ID NO: 23792 - protein, 469 aa, synthetic construct
  REGION 1..469: note = neuraminidase__InfluenzaA__AGR55185
MNPNQKIITIGSVSLTIATICFLMQIAILVTTVTLHFKQHECNSPPKNQVMLCEPTIIERNITEIVYLTNTTIEKEICPKLAEYRNWSKPQCNITGFAPFSKDNSIRLSAGGDIWVTREPYVSCDPDKCYQFALGQGTTLNNGHSNDTVHDRTPYRTLLMNELGVPFHLGTRQVCIAWSSSSCHDGKAWLHVCVTGDDKNATASFIYNGRLVDSIGSWSKKILRTQESECVCINGTCTVVMTDGSASGKADTKILFIEEGKIVHISTLSGSAQHVEECSCYPRYPGVRCVCRDNWKGSNRPIVDINVKDYSIVSSYVCSGLVGDTPRKNDSFSSSHCLDPNNEEGGHGVKGWAFDDGNDVWMGRTISEKLRSGYETFKVIEGWSKPNSKLQINRQVIVERGNRSGYSGIFSVEGKSCINRCFYVELIRGRKEETEVWWTSNSIVVFCGTSRTYGTGSWPDGADINLMPI

SEQ ID NO: 23793 - protein, 469 aa, synthetic construct
  REGION 1..469: note = neuraminidase__InfluenzaA__AGR55186
MNPNQKIITIGSVSLTISTICFFMQIAILITTVTLHFKQYEFNSPPNNQVMLCEPTIIERNITEIVYLTNTTIEKEICPKLAEYRNWSKPQCDITGFAPFSKDNSIRLSAGGDIWVTREPYVSCDPDKCYQFALGQGTTLNNVHSNDTVHDRTPYRTLLMNELGVPFHLGTKQVCIAWSSSSCHDGKAWLHVCVTGDDKNATASFIYNGRLVDSIVSWSKKILRTQESECVCINGTCTVVMTDGSASGKADTKILFIEEGKIVHTSTLSGSAQHVEECSCYPRYPGVRCVCRDNWKGSNRPIVDINIKDYSIVSSYVCSGLVGDTPRKNDSSSSSHCLEPNNEEGGHGVKGWAFDDGNDVWMGRTISEKLRSGYETFKVIEGWSNPNSKLQINRQVIVDRGNRSGYSGIFSVEGKSCINRCFYVELIRGRKQETEVLWTSNSIVVFCGTSGTYGTGSWPDGADINLMPI

SEQ ID NO: 23794 - protein, 469 aa, synthetic construct; identical to SEQ ID NO: 14145
  REGION 1..469: note = neuraminidase__InfluenzaA__AGR55187

SEQ ID NO: 23795 - protein, 469 aa, synthetic construct; identical to SEQ ID NO: 14714
  REGION 1..469: note = neuraminidase__InfluenzaA__AGR55192

SEQ ID NO: 23796 - protein, 469 aa, synthetic construct
  REGION 1..469: note = neuraminidase__InfluenzaA__AGR55195
MNPNQKIITIGSVSLTISTICFFMQIAILITTVTLHFKQYEFNSPPNNQVMLCEPTIIERNITEIVYLTNTTIEKEICPKLAEYRNWSKPQCDITGFAPFSKDNSIRLSAGGDIWVTREPYVSCDPDKCYQFALGQGTTLNNVHSNDTVHDRTPYRTLLMNELGVPFHLGTKQVCIAWSSSSCHDGKAWLHVCVTGDDKNATASFIYNGRLVDSIVSWSKEILRTQESECVCINGTCTVVMTDGSASGKADTKILFIEEGKIVHTSTLSGSAQHVEECSCYPRYPGVRCVCRDHWKGSNRPIVDINIKDYSIVSSYVCSGLVGDTPRKNDSSSSSHCLDPNNEEGGHGVKGWAFDDGNDVWMGRTISEKLRLGYETFKVIEGWSNPNSKLQINRQVIVDRGNRSGYSGIFSVEGKSCINRCFYVELIRGRKEETEVLWTSNSIVVFCGTSGTYGTGSWPDGADINLMPI

SEQ ID NO: 23797 - protein, 469 aa, synthetic construct
  REGION 1..469: note = neuraminidase__InfluenzaA__AGR55204
MNPNQKIITIGSVSLTISTICFFMQIAILITTVTLHFKQYEFNSPPNNQVMLCEPTIIERNITEIVYLTNTTIEKEICPKLAEYRNWSKPQCDITGFAPFSKDNSIRLSAGGDIWVTREPYVSCDPDKCYQFALGQGTTLNNVHSNDTVRDRTPYRTLLMNELGVPFHLGTKQVCIAWSSSSCHDGKAWLHVCITGDDKNATASFIYNGRLVDSIVSWSKEILRTQESECVCINGTCTVVMTDGSASGEADTKILFIEEGKIVHTSTLSGSAQHVEECSCYPRYPGVRCVCRDNWKGSNRPIVDINIKDHSIVSSYVCSGLVGDTPRKNDSSSSSHCLDPNNEEGGHGVKGWAFDDGNDVWMGRTISEKSRLGYETFKVIEGWSNPKSKLQINRQVIVDRGNRSGYSGIFSVEGKSCINRCFYVELIRGRKEETEVLWTSNSIVVFCGTSRTYGTGSWPDGADINLMPI

SEQ ID NO: 23798 - protein, 469 aa, synthetic construct
  REGION 1..469: note = neuraminidase__InfluenzaA__AGR55218
MNPNQKIITIGSVSLTISTICFFMQIAILITTVTLHFKQYEFNSPPNNQVVLCEPTIIERNITEIVYLTNTTIEKEICPKLAEYRNWSKPQCDITGFAPFSKDNSIRLSAGGDIWVTREPYVSCDPDKCYQFALGQGTTLNNVHSNNTVRDRTPYRTLLMNELGVPFHLGTKQVCIAWSSSSCHDGKAWLHVCITGDDKNATASFIYNGRLVDSIVSWSKEILRTQESECVCINGTCTVVMTDGSASGKADTKILFIEEGKIVHTSTLSGSAQHVEECSCYPRYPGVRCVCRDNWKGSNRPIVDINIKDHSIVSSYVCSGLVGDTPRKNDSSSSSHCLDPNNEEGGHGVKGWAFDDGNDVWMGRTISEKSRLGYETFKVIEGWSNPKSKLQINRQVIVDRGNRSGYSGIFSVEGKSCINRCFYVELIRGRKEETEVLWTSNSIVVFCGTSGTYGTGSWPDGADINLMPI

SEQ ID NO: 23799 - protein, 469 aa, synthetic construct; identical to SEQ ID NO: 23389
  REGION 1..469: note = neuraminidase__InfluenzaA__AGT18726

SEQ ID NO: 23800 - protein, 469 aa, synthetic construct
  REGION 1..469: note = neuraminidase__InfluenzaA__AGT18727
MNPNQKIITIGSVCMTIGMANLILQIGNIISIWISHSIQLGSQNQIETCNQSVITYENNTWVNQTYVNISNTNFAAGQSVVSVKLAGNSSLCPVSGWAIYSKDNSVRIGSKGDVFVIREPFISCSPLECRTFFLTQGALLNDKHSNGTIKDRSPYRTLMSCPIGEVPSPYNSRFESVAWSASACHDGINWLTIGISGPDSGAVAVLKYNGIITDTIKSWRNNILRTQESECACVNGSCFTIMTDGPSDGQASYKIFRIEKGKIVKSVEMNAPNYHYEECSCYPDSSEITCVCRDNWHGSNRPWVSFNQNLEYQIGYICSGIFGDNPRPNDKTGSCGPVSSNGANGVKGFSFKYGNGVWIGRTKSISSRKGFEMIWDPNGWSGTDNNFSIKQDIVGINEWSGYSGSFVQHPELTGLDCIRPCFWVELIRGRPKENTIWTSGSSISFCGVNSDTVGWSWPDGAELPFTIDK

SEQ ID NO: 23801 - protein, 469 aa, synthetic construct; identical to SEQ ID NO: 23389
  REGION 1..469: note = neuraminidase__InfluenzaA__AGT18728

SEQ ID NO: 23802 - protein, 469 aa, synthetic construct
  REGION 1..469: note = neuraminidase__InfluenzaA__AGT18729
MNPNQKIITIGQVCMTIGMANLILQIGNIISIWISHSIQLGSQNQIETCNQSVITYENNTWVNQTYVNISNTNFAAGQSVVSVKLAGNSSLCPVSGWAIYSKDNSVRIGSKGDVFVIREPFISCSPLECRTFFLTQGALLNDKHSNGTIKDRSPYRTLMSCPIGEVPSPYNSRFESVAWSASACHDGINWLTIGISGPDSGAVAVLKYNGIITDTIKSWRNNILRTQESECACVNGSCFTIMTDGPSDGQASYKIFRIEKGKIVKSVEMNAPNYHYEECSCYPDSSEITCVCRDNWHGSNRPWVSFNQNLEYQIGYICSGIFGDNPRPNDKTGSCGPVSSNGANGVKGFSFKYGNGVWIGRTKSISSRKGFEMIWDPNGWTGTDNNFSIKQDIVGINEWSGYSGSFVQHPELTGLDCIRPCFWVELIRGRPKENTIWTSGSSISFCGVNSDTVGWSWPDGAELPFTIDK

SEQ ID NO: 23803 - protein, 469 aa, synthetic construct
  REGION 1..469: note = neuraminidase__InfluenzaA__AGT18730
MNPNQKIITIGSVCMTIGMANLILQIGNIISIWISHSIQLGNQSQIETCNQSVITYENNTWVNQTYVNISNTNFAAGQSVVSVKLAGNSSLCPVSGWAIYSKDNSVRIGSKGDVFVIREPFISCSPLECRTFFLTQGALLNDKHSNGTIKDRSPYRTLMSCPIGEVPSPYNSRFESVAWSASACHDGINWLTIGISGPDSGAVAVLKYNGIITDTIKSWRNNILRTQESECACVNGSCFTIMTDGPSDGQASYKIFRIEKGKIVKSVEINAPNYHYEECSCYPDSSEITCVCRDNWHGSNRPWVSFNQNLEYQIGYICSGIFGDNPRPNDKTGSCGPVSSNGANGVKGFSFKYGNGVWIGRTKSISSRKGFEMIWDPNGWTGTDNNFSIKQDIVGINEWSGYSGSFVQHPELTGLDCIRPCFWVELIRGRPKENTIWTSGSSISFCGVNSDTVGWSWPDGAELPFTIDK

SEQ ID NO: 23804 - protein, 469 aa, synthetic construct; identical to SEQ ID NO: 23389
  REGION 1..469: note = neuraminidase__InfluenzaA__AGT18731

SEQ ID NO: 23805 - protein, 469 aa, synthetic construct
  REGION 1..469: note = neuraminidase__InfluenzaA__AGT18732
MNPNQKIITIGSVCMTIGMANLILQIGNIISIWISHSIQLGNQSQIETCNQSVITYENNTWVNQTYVNISNTNFAAGQSVVSVKLAGNSSLCPVSGWAIYSKDNSVRIGSKGDVFVIREPFISCSPLECRTFFLTQGALLNDKHSNGTIKDRSPYRTLMSCPIGEVPSPYNSRFESVAWSASACHDGINWLTIGISGPDSGAVAVLKYNGIITDTIKSWRNNILRTQESECACVNGSCFTIMTDGPSDGQASYKIFRIEKGKIVKSVEMNAPNYHYEECSCYPDSSEITCVCRDNWHGSNRPWVSFNQNLEYQIGYICSGIFGDNPRPNDKTGSCGPVSSNGANGVKGFSFKYGNGVWIGRTKSISSRKGFEMIWDPNGWTGTDNNFSIKQDIVGINEWSGYSGSFVQHPELTGLDCIRPCFWVELIRGRPKENTIWTRGSSISFCGVNSDTVGWSWPDGAELPFTIDK

SEQ ID NO: 23806 - protein, 469 aa, synthetic construct
  REGION 1..469: note = neuraminidase__InfluenzaA__AGT18733
MNPNQKIITIGSVCMTIGMANLILQIGNIISIWISHSIQLGNQSQIETCNQSVITYENNTWVNQTYVNISNTNFAAGQSVVSVKLAGNSSLCPVSGWAIYSKDNSVRIGSKGDVFVIREPFISCSPLECRTFFLTQGALLNDKHSNGTIKDRSPYRTLMSCPIGEVPSPYNSRFESVAWSASACHDGINWLTIGISGPDSGAVAVLKYNGIITDTIKSWRNNILRTQESECACVNGSCFTIMTDGPSDGQASYKIFRIEKGKIVKSVEMNAPNYHYEECSCYPDSSESTCVCRDNWHGSNRPWVSFNQNLEYQIGYICSGIFGDNPRPNDKTGSCGPVSSNGANGVKGFSFKYGNGVWIGRTKSISSRKGFEMIWDPNGWTGTDNNFSIKQDIVGINEWSGYSGSFVQHPELTGLDCIRPCFWVELIRGRPKENTIWTSGSSRSFCGVNSDTVGWSWPDGAELPFTIDK

SEQ ID NO: 23807 - protein, 469 aa, synthetic construct
  REGION 1..469: note = neuraminidase__InfluenzaA__AGT18762
MNPNQKIITIGSVSLTISTICFFMQIAILITTVTLHFKQYEFNSPPNNQVTLCEPIIIERNITEIVYLTNTTIEKEICPKPAEYRNWSKPQCGITGFAPFSKDNSIRLSAGGDIWVTREPYVSCDPDKCYQFALGQGTTLNNVHSNNTVRDRTPYRTLLMNELGVPFHLGTKQVCIAWSSSSCHDGKAWLHVCITGDDKNATASFIYNGRLVDSVVSWSKEILRTQESECVCINGTCTVVMTDGSASGKADTKILFIEEGKIVHTSTLSGSAQHVEECSCYPRYPGVRCVCRDNWKGSNRPIVDINIKDHSIVSSYVCSGLVGDTPRKNDSSSSSHCLDPNNEEGGHGVKGWAFDDGNDVWMGRTINETSRLGYETFKVIEGWSNPKSKLQINRQVIVDRGDRSGYSGIFSVEGKSCINRCFYVELIRGRKEETEVLWTSNSIVVFCGTSGTYGTGSWPDGADLNLMPI

SEQ ID NO: 23808 - protein, 469 aa, synthetic construct
  REGION 1..469: note = neuraminidase__InfluenzaA__AGT18764
MNPNQMIITIGSVSLTSSTICFFMQTASFITTVTLHIKQHEFHSPPNNQVMLCEPTIIERNITEIVYLTNTTIEKEICPKLAEYRNWSKPQCDITGFAPFSKDNSIRLSAGGDIWVTREPYVSCDPDKCYQFALGQGTTLNNVHSNNTVRDRTPYRTLLMNELGVPFHLGTKQVCIAWSSSSCHDGKAWLHVCITGDDKNATASFIYNGKLVDSVVSWSKEILRTQESECVCINGTCTVVMTDGSASGKADTKILFIEEGKIVHTSTLSGSAQHVEECSCYPRYPGVRCVCRDNWKGSNRPIVDINMKDHSIVSSYVCSGLVGDTPRKNDRSSNSHCLDPNNEEGGHGVKGWAFDDGNDVWMGRTINETSRLGYETFKVIEGWSNPKSKLQINRQVIVDRGNRSGYSGIFSVEGKSCINRCFYVELIRGRKEETEVLWTSNSIVVFCGTSGTYGTGSWPDGADLNLMPI

SEQ ID NO: 23809 - protein, 469 aa, synthetic construct
  REGION 1..469: note = neuraminidase__InfluenzaA__AGT18765
MNPNQKIITIGSVSLTISTICFFMQIAILITTVTLHFKQHEFHSPPNNQVMLCEPTIIERNITEIVYLTNTTIEKEICPKLAEYRNWSKPQCDITGFAPFSKDNSIRLSAGGDIWVTREPYVSCDPDKCYQFALGQGTTLNNVHSNNTVRDRTPYRTLLMNELGVPFHLGTKQVCIAWSSSSCHDGKAWLHVCITGDDKNATASFIYNGRLVDSVVSWSKEILRTQESECVCINGTCTVVMTDGSASGKADTKILFIEEGKIVHTSTLSGSAQHVEECSCYPRYPGVRCVCRDNWKGSNRPIVDINMKDHSIVSSYVCSGLVGDTPRKNDRSSNSHCLDPNNEEGGHGVKGWAFDDGNDVWMGRTINETSRLGYETFKVIEGWSNPKSKLQINRQVIVDRGNRSGYSGIFSVEGKSCINRCFYVELIRGRKEETEVLWTSNSIVVFCGTSGTYGTGSWPDGADLNLMPI

SEQ ID NO: 23810 - protein, 469 aa, synthetic construct
  REGION 1..469: note = neuraminidase__InfluenzaA__AGT18766
MNPNQKIITIGSVSLTISTICLFMQIAILITTVTLHFKQHEFHSPPNNQVMLCEPTIIERNITEIVYLTNTTIEKEICPKLAEYRNWSKPQCDITGFAPFSKDNSIRLSAGGDIWVTREPYVSCDPDKCYQFALGQGTTLNNVHSNNTVRDRTPYRTLLMNELGVPFHLGTKQVCIAWSSSSCHDGKAWLHVCITGDDKNATASFIYNGRLVDSVVSWSKEILRTQESECVCINGTCTVVMTDGSASGKADTKILFIEEGKIVHTSTLSGSAQHVEECSCYPRYPGVRCVCRDNWKGSNRPIVDINMKDHSIVSSYVCSGLVGDTPRKNDRSSNSHCLDPNNEEGGHGVKGWAFDDGNDVWMGRTINETSRLGYETFKVIEGWSNPKSKLQINRQVIVDRGNRSGYSGIFSVEGKSCINRCFYVELIRGRKEETEVLWTSNSIVVFCGTSGTYGTGSWPDGADLNLKPI

SEQ ID NO: 23811 - protein, 469 aa, synthetic construct
  REGION 1..469: note = neuraminidase__InfluenzaA__AGT18767
MNPNQKIITIGSVSLTISTICFFMQTASLITTVTLHFKQHEFHSPPNNQVMLCEPTIIERNITEIVYLTNTTIEKEICPKLAEYRNWSKPQCDITGFAPFSKDNSIRLSAGGDIWVTREPYVSCDPDKCYQFALGQGTTLNNVHSNNTVRDRTPYRTLLMNELGVPFHLGTKQVCIAWSSSSCHDGKAWLHVCITGDDKNATASFIYNGRLVDSVVSWSKEILRTQESECVCINGTCTVVMTDGSASGKADTKILFIEEGKIVHTSTLSGSAQHVEECSCYPRYPGVRCVCRDNWKGSNRPIVDINMKDHSIVSSYVCSGLVGDTPRKNDRSSNSHCLDPNNEEGGHGVKGWAFDDGNDVWMGRTINETSRLGYETFKVIEGWSNPKSKLQINRQVIVDRGNRSGYSGIFSVEGKSCINRCFYVELIRGRKEETEVLWTSNSIVVFCGTSGTYGTGSWPDGADLNLMPI

SEQ ID NO: 23812 - protein, 469 aa, synthetic construct
  REGION 1..469: note = neuraminidase__InfluenzaA__AGT18768
MNPNQKIITIGSVSLTISTICFFMQTASFITTVTLHFKQYEFNSPPNNQVMLCEPTIIERNITEIVYLTNTTIEKEICPKLAEYRNWSKPQCDITGFAPFSKDNSIRLSAGGDIWVTREPYVSCDPDKCYQFALGQGTTLNNVHSNNTVRDRTPYRTLLMNELGVPFHLGTKQVCIAWSSSSCHDGKAWLHVCITGDDKNATASFIYNGRLVDSVVSWSKEILRTQESECVCINGTCTVVMTDGSASGKADTKILFIEEGKIVHTSTLSGSAQHVEECSCYPRYPGVRCVCRDNWKGSNRPIVDINMKDHSIVSSYVCSGLVGDTPRKNDRSSNSHCLDPNNEEGGHGVKGWAFDDGNDVWMGRTINETSRLGYETFKVIEGWSNPKSKLQINRQVIVDRGNRSGYSGIFSVEGKSCINRCFYVELIRGRKEETEVLWTSNSIVVFCGTSGTYGTGSWPDGADLNLMPI

SEQ ID NO: 23813 - protein, 469 aa, synthetic construct; identical to SEQ ID NO: 22146
  REGION 1..469: note = neuraminidase__InfluenzaA__AGT18769

SEQ ID NO: 23814 - protein, 469 aa, synthetic construct
  REGION 1..469: note = neuraminidase__InfluenzaA__AGT18770
MNPNQKIITIGSVSLTISTICFFMQIAILITTVTLHFKQYEFNSPPNNKVMLCEPTIIERNITEIVYLTNTTIEKEICPKPAEYRNWSKPQCGITGFAPFSKDNSIRLSAGGDIWVTREPYVSCDPDKCYQFALGQGTTLNNVHSNNTVRDRTPYRTLLMNELGVPFHLGTKQVCIAWSSSSCHDGKAWLHVCITGDDKNATASFIYNGRLVDSVVSWSKEILRTQESECVCINGTCTVVMTDGSASGKADTKILFIEEGKIVHTSTLSGSAQHVEECSCYPRYPGVRCVCRDNWKGSNRPIVDINIKDHSIVSSYVCSGLVGDTPRKNDSSSSSHCLDPNNEEGGHGVKGWAFDDGNDVWMGRTINETSRLGYETFKVIEGWSNPKSKLQINRQVIVDRGDRSGYSGIFSVEGKSCINRCFYVELIRGRKEETEVLWTSNSIVVFCGTSGTYGTGSWPDGADLNLMPI

SEQ ID NO: 23815 - protein, 469 aa, synthetic construct
  REGION 1..469: note = neuraminidase__InfluenzaA__AGT18771
MNPNQKIITIGSVSLTISTICFFMQIAILITTVTLHFKQYKFNSPPNNQVMLCEPTIIERNITEIVYLTNTTIEKEICPKPAEYRNWSKPQCGITGFAPFSKDNSIRLSAGGDIWVTREPYVSCDPDKCYQFALGQGTTLNNVHSNNTVRDRTPYRTLLMNELGVPFHLGTKQVCIAWSSSSCHDGKAWLHVCITGDDKNATASFIYNGRLVDSVVSWSKEILRTQESECVCINGTCTVVMTDGSASGKADTKILFIEEGKIVHTSTLSGSAQHVEECSCYPRYPGVRCVCRDNWKGSNRPIVDINIKDHSIVSSYVCSGLVGDTPRKNDSSSSSHCLDPNNEEGGHGVKGWAFDDGNDVWMGRTINETSRLGYETFKVIEGWSNPKSKLQINRQVIVDRGDRSGYSGIFSVEGKSCINRCFYVELIRGRKEETEVLWTSNSIVVFCGTSGTYGTGSWPDGADLNLMPI

SEQ ID NO: 23816 - protein, 469 aa, synthetic construct; identical to SEQ ID NO: 22146
  REGION 1..469: note = neuraminidase__InfluenzaA__AGT18772

SEQ ID NO: 23817 - protein, 469 aa, synthetic construct
  REGION 1..469: note = neuraminidase__InfluenzaA__AGT37104
MNPNQKIITIGSVSLTIATICLLMQIAILVTTVTLHFKQYECSSPPNNQVMPCEPTIIERNITKIVYLTNTTIEREACPELAEYRHWSKPQCKIRGFAPFSKDNSIRLSAGGDIWVTREPYVSCDPGKCYQFALGQGTTLNNRHSNDTVHDRTPYRTLLMNELGVPFHLGTKQVCIAWSSSSCHDGKAWLHVCITGHDKNATASFIYDGRLVDSIGSWSQNILRTQESECVCINGTCTVVMTDGSASGRADTKIMFVEEGKIVHISPLAGSAQHVEECSCYPKYPGVRCVCRDNWKGSNRPIVDINMKDYSIVSSYVCSGLVGDTPRRNDSSSTSYCLNPNNEEGGHGVKGWAFDDGDDVWMGRTISEKLRLGYETFKVIGGWSKPNSKLQINRQVVVDISNRSGYSGIFSVEGKSCINRCFYVELIRGRKQENEVWWTSNSIVVFCGTSGTYGTGSWPDGADINLMPI

SEQ ID NO: 23818 - protein, 469 aa, synthetic construct
  REGION 1..469: note = neuraminidase__InfluenzaA__AGU69973
MNPNQKIITIGSVSLTIATICFLMQIAILVTTVTLHFKQYECNSPPNNQVMLCEPTIIERNITEIVYLTNTTIEKEICPKLAEYRNWSKPQCNITGFAPFSKDNSIRLSAGGDIWVTREPYVSCDPDKCYQFALGQGTTLNNGHSNDTVHDRTPYRTLLMNELGVPFHLGTKQVCIAWSSSSCHDGKAWLHVCVTGDDENATASFIYNGRLVDSIGSWSKKILRTQESECVCINGTCTVVMTDGSASGKADTKILFIEEGKIVHTSPLSGSAQHVEECSCYPRYPGVRCVCRDNWKGSNRPIVDINVKDYSIVSSYVRSGLVGDTPRKNDSSSSSHCLDPNNEEGGHGVKGWAFDDGNDVWMGRTISEKSRSGYETFKVIEGWSKPNSKLQINRQVIVDRGNRSGYSGIFSVEGKSCINRCFYVELIRGGKQETEVLWTSNSIVVFCGTSGTYGTGSWPDGADLNLMPI

SEQ ID NO: 23819 - protein, 469 aa, synthetic construct
  REGION 1..469: note = neuraminidase__InfluenzaA__AGU92648
MNPNQKIITIGSVCMTIGMANLILQIGNIISIWISHSIQLRNQSQIETCNQSVITYENNTWVNQTYVNISNTNFAAGQSVVSVKLAGNSSLCPVSGWAIYSKDNSIRIGSKGDVFVIREPFISCSPLECRTFFLTQGALLNDKHSNGTIKDRSPYRTLMSCPIGEVPSPYNSRFESVAWSASACHDGINWLTIGISGPDNGAVAVLKYNGIITDTIKSWRNNILRTQESECACVNGSCFTIMTDGPSDGQASYKIFRIEKGKIVKSVEMNAPNYHYEECSCYPDSSEIICVCRDNWHGSNRPWVSFNQNLEYQIGYICSGIFGDNPRPNDKTGSCGPVSSNGANGVKGFSFKYGNGVWIGRTKSISSRKGFEMIWDPNGWTGTDNNFSIKQDIVGINEWSGYSGSFVQHPELTGLDCIRPCFWVELIRGRPKENTIWTSGSSISFCGVNSDTVGWSWPDGAELPFTIDK

SEQ ID NO: 23820 - protein, 469 aa, synthetic construct
  REGION 1..469: note = neuraminidase__InfluenzaA__AGU92670
MNPNQKIITIGSVCMTIGMANLILQIGNIISIWISHSIQLRNQSQIETCNQSVITYENNTWVNQTYVNISNTNFAAGQSVVSVKLAGNSSLCPVSGWAIYSKDNSIRIGSKGDVFVIREPFISCSPLECRTFFLTQGALLNDKHSNGTIKDRSPYRTLMSCPIGEVPSPYNSRFESVAWSASACHDGINWLTIGISGPDNGAVAVLKYNGIITDTIKSWRNNILRTQESECACVNGSCFTIMTDGPSDGQASYKIFRIEKGKIVKSVEMNAPNYHYEECSCYPDSSEIICVCRDNWHGSNRPWVSFNQNLEYQIGYICSGIFGDNPRPDDKTGSCGPVSSNGANGVKGFSFKYGNGVWIGRTKSISSRKGFEMIWDPNGWTGTDNNFSIKQDIVGINEWSGYSGSFVQHPELTGLDCIRPCFWVELIRGRPKENTIWTSGSSISFCGVNSDTVGWSWPDGAELPFTIDK

SEQ ID NO: 23821 - protein, 469 aa, synthetic construct
  REGION 1..469: note = neuraminidase__InfluenzaA__AGU92681
MNPNQKIITIGSVCMTIGMANLILQIGNIISIWISHSIQLRNQSQIETCNQSVITYENNTWVNQTYVNISNTNFAAGQSVVSVKLAGNSSLCPVSGWATYSKDNSIRIGSKGDVFVIREPFISCSPLECRTFFLTQGALLNDKHSNGTIKDRSPYRTLMSCPIGEVPSPYNSRFESVAWSASACHDGINWLTIGISGPDNGAVAVLKYNGIITDTIKSWRNNILRTQESECACVNGSCFTIMTDGPSDGQASYKIFRIEKGKIVKSVEMNAPNYHYEECSCYPDSSEIICVCRDNWHGSNRPWVSFNQNLEYQIGYICSGIFGDNPRPNDKTGSCGPVSSNGANGVKGFSFKYGNGVWIGRTKSISSRKGFEMIWDPNGWTGTDNNFSIKQDIVGINEWSGYSGSFVQHPELTGLDCIRPCFWVELIRGRPKENTIWTSGSSISFCGVNSDTVGWSWPDGAELPFTIDK

SEQ ID NO: 23822 - protein, 469 aa, synthetic construct
  REGION 1..469: note = neuraminidase__InfluenzaA__AGU92692
MNPNQKIITIGSVCMTIGMANLILQIGNIISIWISHSIQLGNQNQIETCNQSVITYENNTWVNQTYVNISNTNFAAGQSVVSVKLAGNSSLCPVSGWAIYSKDNSVRVGSKGDVFVIREPFISCSPLECRTFFLTQGALLNDKHSNGTIKDRSPYRTLMSCPIGEVPSPYNSRFESVAWSASACHDGINWLTIGISGPDNGAVAVLKYNGIITDTIKSWRNNILRTQESECACVNGSCFTVMTDGPSNGQASYKIFRIEKGKIVKSVEMNAPNYHYEECSCYPDSSEITCVCRDNWHGSNRPWVSFNQNLEYQIGYICSGIFGDNPRPNDKTGSCGPVSSNGANGVKGFSFKYGNGVWIGRTKSISSRNGFEMIWDPNGWTGTDNNFSIKQDIVGINEWSGYSGSFIQHPELTGLDCIRPCFWVELIRGRPKENTIWTSGSSISFCGVNSDTVGWSWPDGAELPFTIDK

SEQ ID NO: 23823 - protein, 469 aa, synthetic construct; identical to SEQ ID NO: 23822
  REGION 1..469: note = neuraminidase__InfluenzaA__AGU92703

SEQ ID NO: 23824 - protein, 469 aa, synthetic construct; identical to SEQ ID NO: 23822
  REGION 1..469: note = neuraminidase__InfluenzaA__AGU92714

SEQ ID NO: 23825 - protein, 469 aa, synthetic construct; identical to SEQ ID NO: 23822
  REGION 1..469: note = neuraminidase__InfluenzaA__AGU92725

SEQ ID NO: 23826 - protein, 469 aa, synthetic construct; identical to SEQ ID NO: 23822
  REGION 1..469: note = neuraminidase__InfluenzaA__AGU92736

SEQ ID NO: 23827 - protein, 469 aa, synthetic construct; identical to SEQ ID NO: 23822
  REGION 1..469: note = neuraminidase__InfluenzaA__AGU92747

SEQ ID NO: 23828 - protein, 469 aa, synthetic construct; identical to SEQ ID NO: 23822
  REGION 1..469: note = neuraminidase__InfluenzaA__AGU92758

SEQ ID NO: 23829 - protein, 469 aa, synthetic construct; identical to SEQ ID NO: 23819
  REGION 1..469: note = neuraminidase__InfluenzaA__AGU92769

SEQ ID NO: 23830 - protein, 469 aa, synthetic construct; identical to SEQ ID NO: 23819
  REGION 1..469: note = neuraminidase__InfluenzaA__AGU92780

SEQ ID NO: 23831 - protein, 469 aa, synthetic construct
  REGION 1..469: note = neuraminidase__InfluenzaA__AGU92791
MNPNQKIITIGSVCMTIGMANLILQIGNIISIWISHSIQLRNQSQIETCNQSVITYENNTWVNQTYVNISNTNFAAGQSVVSVKLAGNSSLCPVSGWAIYSKDNSIRIGSKGDVFVIREPFISCSPLECRIFFLTQGALLNDKHSNGTIKDRSPYRTLMSCPIGEVPSPYNSRFESVAWSASACHDGINWLTIGISGPDNGAVAVLKYNGIITDTIKSWRNNILRTQESECACVNGSCFTIMTDGPSDGQASYKIFRIEKGKIVKSVEMNAPNYHYEECSCYPDSSEIICVCRDNWHGSNRPWVSFNQNLEYQIGYICSGIFGDNPRPNDKTGSCGPVSSNGANGVKGFSFKYGNGVWIGRTKSISSRKGFEMIWDPNGWTGTDNNFSIKQDIVGINEWSGYSGSFVQHPELTGLDCIRPCFWVELIRGRPKENTIWTSGSSISFCGVNSDTVGWSWPDGAELPFTIDK

SEQ ID NO: 23832 - protein, 469 aa, synthetic construct; identical to SEQ ID NO: 23819
  REGION 1..469: note = neuraminidase__InfluenzaA__AGU92802

SEQ ID NO: 23833 - protein, 469 aa, synthetic construct; identical to SEQ ID NO: 23819
  REGION 1..469: note = neuraminidase__InfluenzaA__AGU92813

SEQ ID NO: 23834 - protein, 469 aa, synthetic construct; identical to SEQ ID NO: 23819
  REGION 1..469: note = neuraminidase__InfluenzaA__AGU92824

SEQ ID NO: 23835 - protein, 469 aa, synthetic construct
  REGION 1..469: note = neuraminidase__InfluenzaA__AGU92846
MNPNQKIITIGSVCMTIGMANLILQIGNIISIWISHSIQLGNQNQIETCNQSVITYENNTWVNQTYVNISNTNFAAGQSVVSVKLAGNSSLCPVSGWAIYSKDNSVRVGSKGDVFVIREPFISCSPLECRTFFLTQGALLNDKHSNGTIKDRSPYRTLMSCPIGEVPSPYNSRFESVAWSASACHDGINWLTIGISGPDNGAVAVLKYNGIITDTIKSWRNNILRTQESECACVNGSCFTVMTDGPSNGQASYKIFRIEKGKIVKSVEMNAPNYHYEECSCYPDSSEITCVCRDNWHGSNRPWVSFNQNLEYQIGYICSGIFGDNPRPNDKTGSCGPVSSNGANGVKGFAFKYGNGVWIGRTKSISSRNGFEMIWDPNGWTGTDNNFSIKQDIVGINEWSGYSGSFIQHPELTGLDCIRPCFWVELIRGRPKENTIWTSGSSISFCGVNSDTVGWSWPDGAELPFTIDK

SEQ ID NO: 23836 - protein, 469 aa, synthetic construct
  REGION 1..469: note = neuraminidase__InfluenzaA__AGU92868
MNPNQKIITIGSVCMTIGMANLILQIGNIISIWISHSIQLGNQNQIETCNQSVITYENNTWVNQTYVNISNTNFAAGQSVVSVKFAGNSSLCPVSGWAIYSKDNSVRVGSKGDVFVIREPFISCSPLECRTFFLTQGALLNDKHSNGTIKDRSPYRTLMSCPIGEVPSPYNSRFESVAWSASACHDGINWLTIGISGPDNGAVAVLKYNGIITDTIKSWRNNILRTQESECACVNGSCFTVMTDGPSNGQASYKIFRIEKGKIVKSVEMNAPNYHYEECSCYPDSSEITCVCRDNWHGSNRPWVSFNQNLEYQIGYICSGIFGDNPRPNDKTGSCGPVSSNGANGVKGFSFKYGNGVWIGRTKSISSRNGFEMIWDPNGWTGTDNNFSIKQDIVGINEWSGYSGSFIQHPELTGLDCIRPCFWVELIRGRPKENTIWTSGSSISFCGVNSDTVGWSWPDGAELPFTIDK

SEQ ID NO: 23837 - protein, 469 aa, synthetic construct
  REGION 1..469: note = neuraminidase__InfluenzaA__AGU92890
MNPNQKIITIGSVCMTIGMANLILQIGNIISIWISHSIQLGNQNQIETCNQSVITYENNTWVNQTYVNISNTNFAAGQSVVSVKLAGNSSLCPVSGWAIYSKDNSVRVGSKGDVFVIREPFISCSPLECRTFFLTQGALLNDKHSNGTIKDRSPYRTLMSCPIGEVPSPYNSRFESVAWSASACHDGINWLTIGISGPDNGAVAVLKYNGIITDTIKSWRNNILRTQESECACVNGSCFTVMTDGPSNGQASYKIFRIEKGKIVKSVEMNAPNYHYEECSCYPDSSEITCVCRDNWHGSNRPWVSFNQNLEYQIGYICSGIFGDNPRPNDKTGSCGPVSSNGANGVKGFSFKYGNGVWIGRTKSISSRNGFEMIWDPNGWTETDNNFSIKQDIVGINEWSGYSGSFIQHPELTGLDCIRPCFWVELIRGRPKENTIWTSGSSISFCGVNSDTVGWSWPDGAELPFTIDK

SEQ ID NO: 23838 - protein, 469 aa, synthetic construct; identical to SEQ ID NO: 23819
  REGION 1..469: note = neuraminidase__InfluenzaA__AGU92901

SEQ ID NO: 23839 - protein, 469 aa, synthetic construct; identical to SEQ ID NO: 23819
  REGION 1..469: note = neuraminidase__InfluenzaA__AGU92912

SEQ ID NO: 23840 - protein, 469 aa, synthetic construct; identical to SEQ ID NO: 23819
  REGION 1..469: note = neuraminidase__InfluenzaA__AGU92923

SEQ ID NO: 23841 - protein, 469 aa, synthetic construct; identical to SEQ ID NO: 23822
  REGION 1..469: note = neuraminidase__InfluenzaA__AGU92934

SEQ ID NO: 23842 - protein, 469 aa, synthetic construct; identical to SEQ ID NO: 23822
  REGION 1..469: note = neuraminidase__InfluenzaA__AGU92945

SEQ ID NO: 23843 - protein, 469 aa, synthetic construct; identical to SEQ ID NO: 23822
  REGION 1..469: note = neuraminidase__InfluenzaA__AGU92956

SEQ ID NO: 23844 - protein, 469 aa, synthetic construct; identical to SEQ ID NO: 23819
  REGION 1..469: note = neuraminidase__InfluenzaA__AGU92967

SEQ ID NO: 23845 - protein, 469 aa, synthetic construct; identical to SEQ ID NO: 23819
  REGION 1..469: note = neuraminidase__InfluenzaA__AGU92978

SEQ ID NO: 23846 - protein, 469 aa, synthetic construct
  REGION 1..469: note = neuraminidase__InfluenzaA__AGU92989
MNPNQKIITIGSVCMTIGMANLILQIGNIISIWISHSIQLGNQNQIETCNQSVITYENNTWVNQTYVNISNTNFAAGQSVVSVKLAGNSSLCPVSGWAIYSKDNSVRVGSKGDVFVIREPFISCSPLECRTFFLTQGALLNDKHSNGTIKDRSPYRTLMSCPIGEVPSPYNSRFESVAWSASACHDGINWLTIGISGPDNGAVAVLKYNGIITDTIKSWRNNILRTQESECACVNGSCFTVMTDGPSNGQASYKIFRIEKGKIVKSVEMNAPNYHYEECSCYPDSSEITCVCRDNWHGSNRPWVSFNQNLEYQIGYICSGIFGDNPRPNDKTGSCGPVSSNGANGVKGFSFKYGNGVWIGRTKSISSRNGFEMIWDPNGWTGTDNNFSIKQDIVGINEWSGYSGSFVQHPELTGLDCIRPCFWVELIRGRPKENTIWTSGSSISFCGVNSDTVGWSWPDGAELPFTIDK

SEQ ID NO: 23847 - protein, 469 aa, synthetic construct; identical to SEQ ID NO: 23836
  REGION 1..469: note = neuraminidase__InfluenzaA__AGU93000

SEQ ID NO: 23848 - protein, 469 aa, synthetic construct; identical to SEQ ID NO: 23837
  REGION 1..469: note = neuraminidase__InfluenzaA__AGU93011

SEQ ID NO: 23849 - protein, 454 aa, synthetic construct; identical to SEQ ID NO: 20390
  REGION 1..454: note = neuraminidase__InfluenzaA__AGU93022

SEQ ID NO: 23850 - protein, 469 aa, synthetic construct
  REGION 1..469: note = neuraminidase__InfluenzaA__AGU93034
MNPTQKIITIGSVCMTIGMANLILQIGNIISIWISHSIQLGNQNQIETCNQSVITYENNTWVNQTYVNISNTNFAAGQSVASVKLAGNSSLCPVSGWAIYSKDNSIRIGSKGDVFVIREPFISCSPLECRTFFLTQGALLNDKHSNGTIKDRSPYRTLMSCPIGEVPSPYNSRFESVAWSASACHDGINWLTIGISGPDNGAVAVLKYNGIITDTIKSWRNNILRTQESECACVNGSCFTIMTDGPSDGQASYKIFRIEKGKIVKSVEMNAPNYHYEECSCYPDSSEITCVCRDNWHGSNRPWVSFNQNLEYQIGYICSGIFGDNPRPNDKTGSCGPVSSNGANGVKGFSFKYGNGVWIGRTKSISSRKGFEMIWDPNGWTGTDNNFSIKQDIVGINEWSGYSGSFVQHPELTGLDCIRPCFWVELIRGRPKENTIWTSGSSISFCGVNSDTVGWSWPDGAELPFTIDK

SEQ ID NO: 23851 - protein, 469 aa, synthetic construct; identical to SEQ ID NO: 23158
  REGION 1..469: note = neuraminidase__InfluenzaA__AGU93045

SEQ ID NO: 23852 - protein, 469 aa, synthetic construct; identical to SEQ ID NO: 23819
  REGION 1..469: note = neuraminidase__InfluenzaA__AGU93056

SEQ ID NO: 23853 - protein, 469 aa, synthetic construct; identical to SEQ ID NO: 22146
  REGION 1..469: note = neuraminidase__InfluenzaA__AGV98980

SEQ ID NO: 23854 - protein, 469 aa, synthetic construct; identical to SEQ ID NO: 22146
  REGION 1..469: note = neuraminidase__InfluenzaA__AGV98993

SEQ ID NO: 23855 - protein, 469 aa, synthetic construct; identical to SEQ ID NO: 22146
  REGION 1..469: note = neuraminidase__InfluenzaA__AGV99005

SEQ ID NO: 23856 - protein, 469 aa, synthetic construct; identical to SEQ ID NO: 22146
  REGION 1..469: note = neuraminidase__InfluenzaA__AGV99017

SEQ ID NO: 23857 - protein, 469 aa, synthetic construct; identical to SEQ ID NO: 22146
  REGION 1..469: note = neuraminidase__InfluenzaA__AGV99040

SEQ ID NO: 23858 - protein, 469 aa, synthetic construct
  REGION 1..469: note = neuraminidase__InfluenzaA__AGV99052
MNPNQKIITIGSVSLTISTICFFMQIAILITTVTLHFKQYEFNSPPNNQVMLCEPTIIERNITEIVYLTNTTIEKEICPKPAEYRNWSKPQCGITGFAPFSKDNSIRLSAGGDIWVTREPYVSCDPDKCYQFALGQGTTLNNVHSNNTVRDRTPYRTLLMNELGVPFHLGTKQVCIAWSSSSCHDGKAWLHVCITGDDKNATASFIYNGRLVDSVVSWSKEILRTQESECVCINGTCTVVMTDGSASGKADTKILFIEEGKIVHTSTLSGSAQHVEECSCYPRYPGVRCVCRDNWKGSNRPIVDINIKDHSVISSYVCSGLVGDTPRKNDSSSSSHCLDPNNEEGGHGVKGWAFDDGNDVWMGRTINETSRLGYETFKVIEGWSNPKSKLQINRQVIVDRGDRSGYSGIFSVEGKSCINRCFYVELIRGRKEETEVLWTSNSIVVFCGTSGTYGTGSWPDGADLNLMPI

SEQ ID NO: 23859 - protein, 469 aa, synthetic construct
  REGION 1..469: note = neuraminidase__InfluenzaA__AGV99100
MNPNQKIITIGSVSLTISTICFFMQIAILITTVTLHFKQYEFNSPPNNQVMLCEPTIIERNITEIVYLTNTTIEKEICPKPAEYRNWSKPQCGITGFAPFSKDNSIRLSAGGDIWVTREPYVSCDPDKCYQFALGQGTTLNNVHSNNTVRDRTPYRTLLMNELGVPFHLGTKQVCIAWSSSSCHDGKAWLHVCITGDDKNATASFIYNGRLVDSVVSWSKEILRTQESECVCINGTCTVVMTDGSASGKADTKILFIEEGKIVHTSTLSGSAQHVEECSCYPRYPGVRCVCRDNWKGSNRPIVDINIKDHSIVSSYVCSGLVGDTPRKNDSSSSSHCLDPNNEEGGHGVKGWAFDDGNDVWMGRTINETSRLGYETFKVIEGWSNPKSKLQINRQVIVDRGDRSGYSGIFSVEGKSCVNRCFYVELIRGRKEETEVLWTSNSIVVFCGTSGTYGTGSWPDGADLNLMPI

SEQ ID NO: 23860 - protein, 469 aa, synthetic construct; identical to SEQ ID NO: 22146
  REGION 1..469: note = neuraminidase__InfluenzaA__AGV99112

SEQ ID NO: 23861 - protein, 469 aa, synthetic construct; identical to SEQ ID NO: 22146
  REGION 1..469: note = neuraminidase__InfluenzaA__AGV99124

SEQ ID NO: 23862 - protein, 469 aa, synthetic construct; identical to SEQ ID NO: 22146
  REGION 1..469: note = neuraminidase__InfluenzaA__AGV99136

SEQ ID NO: 23863 - protein, 469 aa, synthetic construct; identical to SEQ ID NO: 22146
  REGION 1..469: note = neuraminidase__InfluenzaA__AGV99148

SEQ ID NO: 23864 - protein, 469 aa, synthetic construct; identical to SEQ ID NO: 22146
  REGION 1..469: note = neuraminidase__InfluenzaA__AGV99160

SEQ ID NO: 23865 - protein, 469 aa, synthetic construct; identical to SEQ ID NO: 22146
  REGION 1..469: note = neuraminidase__InfluenzaA__AGV99172

SEQ ID NO: 23866 - protein, 469 aa, synthetic construct; identical to SEQ ID NO: 22146
  REGION 1..469: note = neuraminidase__InfluenzaA__AGV99196

SEQ ID NO: 23867 - protein, 469 aa, synthetic construct; identical to SEQ ID NO: 22146
  REGION 1..469: note = neuraminidase__InfluenzaA__AGV99208

SEQ ID NO: 23868 - protein, 469 aa, synthetic construct; identical to SEQ ID NO: 22146
  REGION 1..469: note = neuraminidase__InfluenzaA__AGV99959

SEQ ID NO: 23869 - protein, 469 aa, synthetic construct; identical to SEQ ID NO: 23357
  REGION 1..469: note = neuraminidase__InfluenzaA__AGW00005

SEQ ID NO: 23870 - protein, 469 aa, synthetic construct; identical to SEQ ID NO: 22146
  REGION 1..469: note = neuraminidase__InfluenzaA__AGW00068

SEQ ID NO: 23871 - protein, 469 aa, synthetic construct
  REGION 1..469: note = neuraminidase__InfluenzaA__AGW00080
MNPNQKIITIGSVSLTISTICFFMQIAILITTVTLHFKQYEFDSPPNNQVMLCEPTIIERNITEIVYLTNTTIEKEICPKPAEYRNWSKPQCGITGFAPFSKDNSIRLSAGGDIWVTREPYVSCDPDKCYQFALGQGTTLNNVHSNNTVRDRTPYRTLLMNELGVPFHLGTKQVCIAWSSSSCHDGKAWLHVCITGDDKNATASFIYNGRLVDSVVSWSKEILRTQESECVCINGTCTVVMTDGSASGKADTKILFIEEGKIVHTSTLSGSAQHVEECSCYPRYPGVRCVCRDNWKGSNRPIVDINIKDHSIVSSYVCSGLVGDTPRKNDSSSSSHCLDPNNEEGGHGVKGWAFDDGNDVWMGRTINETSRLGYETFKVIEGWSNPKSKLQINRQVIVDRGDRSGYSGIFSVEGKSCINRCFYVELIRGRKEETEVLWTSNSIVVFCGTSGTYGTGSWPDGADLNLMPI

SEQ ID NO: 23872 - protein, 469 aa, synthetic construct
  REGION 1..469: note = neuraminidase__InfluenzaA__AGW00104
MNPNQKIITIGSVSLTISTICFFMQIAILITTVTLHFKQYEFNSPPNNQVMLCEPTIIERNITEIVYLTNTTIEKEICPKPAEYRNWSKPQCGITGFAPFSKDNSIRLSAGGDIWVTREPYVSCDPDKCYQFALGQGTTLNNVHSNNTVRDRTPYRTLLMNELGVPFHLGTKQVCIAWSSSSCHDGKAWLHVCITGDDKNATASFIYNGRLVDSVVSWSKEILRTQESECVCINGTCTVVMTDGSASGEADTKILFIEEGKIVHTSTLSGSAQHVEECSCYPRYPGVRCVCRDNWKGSNRPIVDINIKDHSIVSSYVCSGLVGDTPRKNDSSSSSHCLDPNNEEGGHGVKGWAFDDGNDVWMGRTINETSRLGYETFKVIEGWSNPKSKLQINRQVIVDRGDRSGYSGIFSVEGKSCINRCFYVELIRGRKEETEVLWTSNSIVVFCGTSGTYGTGSWPDGADLNLMPI

SEQ ID NO: 23873 - protein, 469 aa, synthetic construct; identical to SEQ ID NO: 23871
  REGION 1..469: note = neuraminidase__InfluenzaA__AGW00116

SEQ ID NO: 23874 - protein, 469 aa, synthetic construct; identical to SEQ ID NO: 23871
  REGION 1..469: note = neuraminidase__InfluenzaA__AGW00128

SEQ ID NO: 23875 - protein, 469 aa, synthetic construct; identical to SEQ ID NO: 22146
  REGION 1..469: note = neuraminidase__InfluenzaA__AGW00140

SEQ ID NO: 23876 - protein, 469 aa, synthetic construct; identical to SEQ ID NO: 22146
  REGION 1..469: note = neuraminidase__InfluenzaA__AGW00152

SEQ ID NO: 23877 - protein, 469 aa, synthetic construct; identical to SEQ ID NO: 23871
  REGION 1..469: note = neuraminidase__InfluenzaA__AGW00164

SEQ ID NO: 23878 - protein, 469 aa, synthetic construct; identical to SEQ ID NO: 22146
  REGION 1..469: note = neuraminidase__InfluenzaA__AGW00176

SEQ ID NO: 23879 - protein, 469 aa, synthetic construct; identical to SEQ ID NO: 22146
  REGION 1..469: note = neuraminidase__InfluenzaA__AGW00188

SEQ ID NO: 23880 - protein, 469 aa, synthetic construct; identical to SEQ ID NO: 22146
  REGION 1..469: note = neuraminidase__InfluenzaA__AGW00712

SEQ ID NO: 23881 - protein, 469 aa, synthetic construct; identical to SEQ ID NO: 22146
  REGION 1..469: note = neuraminidase__InfluenzaA__AGW00724

SEQ ID NO: 23882 - protein, 469 aa, synthetic construct
  REGION 1..469: note = neuraminidase__InfluenzaA__AGW00736
MNPNQKIITIGSVSLTISTICFFMQIAILITTVTLHFKQYEFNSPPNNQMMLCEPTIIERNITEIVYLTNTTIEKEICPKPAEYRNWSKPQCGITGFAPFSKDNSIRLSAGGDIWVTREPYVSCDPDKCYQFALGQGTTLNNVHSNNTVRDRTPYRTLLMNELGVPFHLGTKQVCIAWSSSSCHDGKAWLHVCITGDDKNATASFIYNGRLVDSVVSWSKEILRTQESECVCINGTCTVVMTDGSASGKADTKILFIEEGKIVHTSTLSGSAQHVEECSCYPRYPGVRCVCRDNWKGSNRPIVDINIKDHSIVSSYVCSGLVGDTPRKNDSSSSSHCLDPNNEEGGHGVKGWAFDDGNDVWMGRTINETSRLGYETFKVIEGWSDPKSKLQINRQVIVDRGDRSGYSGIFSVEGKSCINRCFYVELIRGRKEETEVLWTSNSIVVFCGTSGTYGTGSWPDGADLNLMPI

SEQ ID NO: 23883 - protein, 469 aa, synthetic construct
  REGION 1..469: note = neuraminidase__InfluenzaA__AGW00748
MNPNQKIITIGSVSLTISTICFFMQIAILITTVTLHFKQYEFNSPPNNQVMLCEPTIIERNITEIVYLTNTTIEKEICPKPAEYRNWSKPQCGITGFAPFSKDNSIRLSAGGDIWVTREPYVSCDPDKCYQFALGQGTTLNNMHSNNTVRDRTPYRTLLMNELGVPFHLGTKQVCIAWSSSSCHDGKAWLHVCITGDDKNATASFIYNGRLVDSVVSWSKEILRTQESECVCINGTCTVVMTDGSASGKADTKILFIEEGKIVHTSTLSGSAQHVEECSCYPRYPGVRCVCRDNWKGSNRPIVDINIKDHSIVSSYVCSGLVGDTPRKNDSSSSSHCLDPNNEEGGHGVKGWAFDDGNDVWMGRTINETSRLGYETFKVIEGWSNPKSKLQINRQVIVDRGDRSGYSGIFSVEGKSCINRCFYVELIRGRKEETEVLWTSNSIVVFCGTSGTYGTGSWPDGADLNLMPI

SEQ ID NO: 23884 - protein, 469 aa, synthetic construct
  REGION 1..469: note = neuraminidase__InfluenzaA__AGW00760
MNPNQKIITIGSVSLTISTICFFMQIAILITTVTLHFKQYEFNSPPNNQVMLCEPTIIERNITEIVYLTNTTIEKEICPKPAEYRNWSKPQCGITGFAPFSKDNSIRLSAGGDIWVTREPYVSCDPDKCYQFALGQGTTLNNVHSNNTVRDRTPYRTLLMNELGVPFHLGTKQVCIAWSSSSCHDGKAWLHVCITGDDKNATASFIYNGRLVDSVVSWSKEILRTQESECVCINGTCTVVMTDGSASGKADTKILFIEEGKIVHTSTLSGSAQHVEECSCYPRYPGVRCVCRDNWKGSNRPIVDINIKDHSIVSSYVCSGLVGDTPRKNDSSSSSHCLDPNNEEGGHGVKGWAFDDGNDVWMGRTINETSRLGYETFKVIEGWSNPKSKLQVNRQVIVDRGDRSGYSGIFSVEGKSCINRCFYVELIRGRKEETEVLWTSNSIVVFCGTSGTYGTGSWPDGADLNLMPI

SEQ ID NO: 23885 - protein, 469 aa, synthetic construct; identical to SEQ ID NO: 22146
  REGION 1..469: note = neuraminidase__InfluenzaA__AGW00784

SEQ ID NO: 23886 - protein, 469 aa, synthetic construct; identical to SEQ ID NO: 22146
  REGION 1..469: note = neuraminidase__InfluenzaA__AGW00796

SEQ ID NO: 23887 - protein, 469 aa, synthetic construct; identical to SEQ ID NO: 23871
  REGION 1..469: note = neuraminidase__InfluenzaA__AGW00808

SEQ ID NO: 23888 - protein, 469 aa, synthetic construct; identical to SEQ ID NO: 23375
  REGION 1..469: note = neuraminidase__InfluenzaA__AGW00820

SEQ ID NO: 23889 - protein, 469 aa, synthetic construct; identical to SEQ ID NO: 22146
  REGION 1..469: note = neuraminidase__InfluenzaA__AGW00832

SEQ ID NO: 23890 - protein, 469 aa, synthetic construct
  REGION 1..469: note = neuraminidase__InfluenzaA__AGW00844
MNPNQKIITIGSVSLTISTICFFMQIAILITTVTLHFKQYEFNFPPNNQVMLCEPTIIERNITEIVYLTNTTIEKEICPKPAEYRNWSKPQCGITGFAPFSKDNSIRLSAGGDIWVTREPYVSCDPDKCYQFALGQGTTLNNVHSNNTVRDRTPYRTLLMNELGVPFHLGTKQVCIAWSSSSCHDGKAWLHVCITGDDKNATASFIYNGRLVDSVVSWSKEILRTQESECVCINGTCTVVMTDGSASGKADTKILFIEEGKIVHTSTLSGSAQHVEECSCYPRYPGVRCVCRDNWKGSNRPIVDINIKDHSIVSSYVCSGLVGDTPRKNDSSSSSHCLDPNNEEGGHGVKGWAFDDGNDVWMGRTINETSRLGYETFKVIEGWSNPKSKLQINRQVIVDRGDRSGYSGIFSVEGKSCINRCFYVELIRGRKEETEVLWTSNSIVVFCGTSGTYGTGSWPDGADLNLMPI

SEQ ID NO: 23891 - protein, 469 aa, synthetic construct; identical to SEQ ID NO: 23883
  REGION 1..469: note = neuraminidase__InfluenzaA__AGW00868

SEQ ID NO: 23892 - protein, 469 aa, synthetic construct
  REGION 1..469: note = neuraminidase__InfluenzaA__AGW00880
MNPNQKIITIGSVSLTISTICFFMQIAILITTVTLHFKQYEFNSPPNNQVMLCEPTIIERNITEIVYLTNTTIEKEICPKPAEYRNWSKPQCDITGFAPFSKDNSIRLSAGGDVWVTREPYVSCDPDKCYQFALGQGTTLNNVHSNNTVRDRTPYRTLLMNELGVPFHLGTKQVCIAWSSSSCHDGKAWLHVCITGDDKNATASFIYNGKLVDSVVSWSKEILRTQESECVCINGTCTVVMTDGSASGKADTKILFIEEGKIVHTSTLSGSAQHVEECSCYPRYPDVRCVCRDNWKGSNRPIVDINIKDHSIVSRYVCSGLVGDTPRKNDSSSSSHCLDPNNEEGGHGVKGWAFDDGNDVWMGRTINETSRLGYETFKVIEGWSNPKSKLQINRQVIVDRGDRSGYSGIFSVEGKSCINRCFYVELIRGRKEETEVLWTSNSIVVFCGTSGTYGTGSWPDGADLNLMPI

SEQ ID NO: 23893 - protein, 469 aa, synthetic construct
  REGION 1..469: note = neuraminidase__InfluenzaA__AGW00892
MNPNQKIITIGSVSLTISTICFFMQIAILITTVTLHFKQYEFNPPPNNQVMLCEPTIIERNITEIVYLTNTTIEKEICPKPAEYRNWSKPQCGITGFAPFSKDNSIRLSAGGDIWVTREPYVSCDPDKCYQFALGQGTTLNNVHSNNTVRDRTPYRTLLMNELGVPFHLGTKQVCIAWSSSSCHDGKAWLHVCITGDDKNATASFIYNGRLVDSVVSWSKEILRTQESECVCINGTCTVVMTDGSASGKADTKILFIEEGKIVHTSTLSGSAQHVEECSCYPRYPGVRCVCRDNWKGSNRPIVDINIKDHSIVSSYVCSGLVGDTPRKNDSSSSSHCLDPNNEEGGHGVKGWAFDDGNDVWMGRTINETSRLGYETFKVIEGWSNPKSKLQMNRQVIVDRGDRSGYSGIFSVEGKSCINRCFYVELIRGRKEETEVLWTSNSIVVFCGTSGTYGTGSWPDGADLNLMPI

SEQ ID NO: 23894 - protein, 469 aa, synthetic construct
  REGION 1..469: note = neuraminidase__InfluenzaA__AGW00904
MNPNQKIITIGSVSLTISTICFFMQIAILITTVTLHFKQYEFNSPPNNQVMLCEPTIIERNITEIVYLTNTTIEKEICPKPAEYRNWSKPQCGITGFAPFSKDNSIRLSAGGDIWVTREPYVSCGPDKCYQFALGQGTTLNNMHSNNTVRDRTPYRTLLMNELGVPFHLGTKQVCIAWSSSSCHDGKAWLHVCITGDDKNATASFIYNGRLVDSVVSWSKEILRTQESECVCINGTCTVVMTDGSASGKADTKILFIEEGKIVHTSTLSGSAQHVEECSCYPRYPGVRCVCRDNWKGSNRPIVDINIKDHSIVSSYVCSGLVGDTPRKNDSSSSSHCLDPNNEEGGHGVKGWAFDDGNDVWMGRTINETSRLGYETFKVIEGWSNPKSKLQINRQVIVDRGDRSGYSGIFSVEGKSCINRCFYVELIRGRKEETEVLWTSNSIVVFCGTSGTYGTGSWPDGADLNLMPI

SEQ ID NO: 23895 - protein, 469 aa, synthetic construct
  REGION 1..469: note = neuraminidase__InfluenzaA__AGW00916
MNPNQKIITIGSVSLTISTICFFMQIAILITTVTLHFKQYEFNSPPNNQVMLCEPTIIERNITEIVYLTNTTIEKEICPKPAEYRNWSKPQCGITGFAPFSKDNSIRLSAGGDIWVTREPYVSCDPDKCYQFALGQGTTLNNMHSNNTVCDRTPYRTLLMNELGVPFHLGTKQVCIAWSSSSCHDGKAWLHVCITGDDKNATASFIYNGRLVDSVVSWSKEILRTQESECVCINGTCTVVMTDGSASGKADTKILFIEEGKIVHTSTLSGSAQHVEECSCYPRYPGVRCVCRDNWKGSNRPIVDINIKDHSIVSSYVCSGLVGDTPRKNDSSSSSHCLDPNNEEGGHGVKGWAFDDGNDVWMGRTINETSRLGYETFKVIEGWSNPKSKLQINRQVIVDRGDRSGYSGIFSVEGKSCINRCFYVELIRGRKEETEVLWTSNSIVVFCGTSGTYGTGSWPDGADLNLMPI

SEQ ID NO: 23896 - protein, 469 aa, synthetic construct; identical to SEQ ID NO: 23871
  REGION 1..469: note = neuraminidase__InfluenzaA__AGW00934

SEQ ID NO: 23897 - protein, 469 aa, synthetic construct
  REGION 1..469: note = neuraminidase__InfluenzaA__AGW01247
MNPNQKIITIGSVSLTISTICFFMQIAILITTVTLHFKQYEFNSPPNNQVMLCEPTIIERNITEIVYLTNTTIEKEICPKPAEYRNWSKPQCGITGFAPFSKDNSIRLSAGGDIWVTREPYVSCDPDKCYQFALGQGTTLNNVHSNNTVRDRTPYRTLLMNELGVPFHLGTKQVCIAWSSSSCHDGKAWLHVCITGDDKNATASFIYNGRLVDSVVSWSKEILRTQESECVCINGTCTVVMTDGSASGKADTKILFIEEGKIVHTSTLSGSAQHVEECSCYPRYPGVRCVCRDNWKGSNRPIVDINIKDHSIVSSYVCSGLVGDTPRKKDSSSSSHCLDPNNEEGGHGVKGWAFDDGNDVWMGRTINETSRLGYETFKVIEGWSNPKSKLQINRQVIVDRGDRSGYSGIFSVEGKSCINRCFYVELIRGRKEETEVLWTSNSIVVFCGTSGTYGTGSWPDGADLNLMPI

SEQ ID NO: 23898 - protein, 469 aa, synthetic construct; identical to SEQ ID NO: 22146
  REGION 1..469: note = neuraminidase__InfluenzaA__AGW01259

SEQ ID NO: 23899 - protein, 469 aa, synthetic construct; identical to SEQ ID NO: 23883
  REGION 1..469: note = neuraminidase__InfluenzaA__AGW01298

SEQ ID NO: 23900 - protein, 469 aa, synthetic construct; identical to SEQ ID NO: 23375
  REGION 1..469: note = neuraminidase__InfluenzaA__AGW01322

SEQ ID NO: 23901 - protein, 469 aa, synthetic construct
  REGION 1..469: note = neuraminidase__InfluenzaA__AGW01334
MNPNQKIITIGSVSLTISTICFFMQIAILITTVTLHFKQYEFNSPPNNQVMLCEPTIIERNITEIVYLTNTTIEKEICPKPAEYRNWSKPQCGITGFAPFSKDNSIRLSAGGDIWVTREPYVSCDPDKCYQFALGQGTTLNNVHSNNTVRDRTPYRTLLMNELGVPFHLGTKQVCIAWSSSSCHDGKAWLHVCITGDDKNATASFIYNGRLVDSVVSWSKEILRTQESECVCINGTCTVVMTDGSASGKADTKILFIEEGKIVHTSTLSGSAQHVEECSCYPRYPGVRCVCRDNWKGSNRPIVDINIKDHSIVSSYVCSGLVGDTPRKNDSSSSSHCLDPNNEEGGHGVKGWAFDDGNDVWMGRTINETSRLGYETFKVIEGWSNPKSKLQINRQVIVDRGDRSGYSGIFSVEGKSCINRCFYVELIRGRKEEAEVLWTSNSIVVFCGTSGTYGTGSWPDGADLNLMPI

SEQ ID NO: 23902 - protein, 469 aa, synthetic construct; identical to SEQ ID NO: 22146
  REGION 1..469: note = neuraminidase__InfluenzaA__AGW01346

SEQ ID NO: 23903 - protein, 469 aa, synthetic construct
  REGION 1..469: note = neuraminidase__InfluenzaA__AGW01358
MNPNQKIITIGSVSLTISTICFFMQIAILITTVTLHFKQYEFNSPPNNQVMLCEPTIIERNITEIVYLTNTTIEKEICPKPTEYRNWSKPQCGITGFAPFSKDNSIRLSAGGDIWVTREPYVSCDPDKCYQFALGQGTTLNNVHSNNTVRDRTPYRTLLMNELGVPFHLGTKQVCIAWSSSSCHDGKAWLHVCITGDDKNATASFIYNGRLVDSVVSWSKEILRTQESECVCINGTCTVVMTDGSASGKADTKILFIEEGKIVHTSTLSGSAQHVEECSCYPRYPGVRCVCRDNWKGSNRPIVDINIKDHSIVSSYVCSGLVGDTPRKNDSSSSSHCLDPNNEEGGHGVKGWAFDDGNDVWMGRTINETSRLGYETFKVIEGWSNPKSKLQINRQVIVDRGDRSGYSGIFSVEGKSCINRCFYVELIRGRKEETEVLWTSNSIVVFCGTSGTYGTGSWPDGADLNLMPI

SEQ ID NO: 23904 - protein, 469 aa, synthetic construct; identical to SEQ ID NO: 22146
  REGION 1..469: note = neuraminidase__InfluenzaA__AGW01370

SEQ ID NO: 23905 - protein, 469 aa, synthetic construct; identical to SEQ ID NO: 22146
  REGION 1..469: note = neuraminidase__InfluenzaA__AGW01382

SEQ ID NO: 23906 - protein, 469 aa, synthetic construct
  REGION 1..469: note = neuraminidase__InfluenzaA__AGW01394
MNPNQKIITIGSVSLTISTICFFMQIAILITTVTLHFKQYEFDSPPNNQVMLCEPTIIERNITEIVYLTNTTIEKEICPKPAEYRNWSKPQCGITGFAPFSKDNSIRLSAGGDIWVTREPYVSCDPDKCYQFALGQGTTLNNVHSNNTVRDRTPYRTLLMNELGVPFHLGTKQVCIAWSSSSCHDGKAWLHVCITGDDKNATASFIYNGRLVDSIVSWSKDILRTQESECVCINGTCTVVMTDGSASGKADTKILFIEEGKIVHTSTLSGSAQHVEECSCYPRYPGVRCVCRDNWKGSNRPIVDINIKDHSIVSSYVCSGLVGDTPRKNDSSSSSHCLDPNNEEGGHGVKGWAFDDGNDVWMGRTINETSRLGYETFKVIEGWSNPKSKLQINRQVIVDRGDRSGYSGIFSVEGKSCINRCFYVELIRGRKEETEVLWTSNSIVVFCGTSGTYGTGSWPDGADLNLMPI

SEQ ID NO: 23907 - protein, 469 aa, synthetic construct
  REGION 1..469: note = neuraminidase__InfluenzaA__AGW01406
MNPNQKIITIGSVSLTISTICFFMQIAILITTVTLHFKQYEFNSPPNNQVMLCEPTIIERNITEIVYLTNTTIEKEICPKPAEYRNWSKPQCDITGFAPFSKDNSIRLSAGGDIWVTREPYVSCDPDKCYQFALGQGTTLNNMHSNNTVRDRTPYRTLLMNELGVPFHLGTKQVCIAWSSSSCHDGKAWLHVCITGDDKNATASFIYNGRLVDSVVSWSKEILRTQESECVCINGTCTVVITDGSASGKADTKILFIEEGKIVHTSTLSGSAQHVEECSCYPRYPGVRCVCRDNWKGSNRPIVDINIKDHSIVSSYVCSGLVGDTPRKNDSSSSSHCLDPNNEEGGHGVKGWAFDDGNDVWMGRTINETSRLGYETFKVIEGWSNPKSKLQINRQVIVDRGDRSGYSGIFSVEGKSCINRCFYVELIRGRKEETEVLWTSNSIVVFCGTSGTYGTGSWPDGADLNLMPI

SEQ ID NO: 23908 - protein, 469 aa, synthetic construct
  REGION 1..469: note = neuraminidase__InfluenzaA__AGW01418
MNPNQKIITIGSVSLTISTICFFMQIAILITTVTLHFKQYEFNSPPNNQVMLCEPTIIERNITEIVYLTNTTIEKEICPKPAEYRNWSKPQCGITGFAPFSKDNSIRLSAGGDIWVTREPYVSCDPDKCYQFALGQGTTLNNMHSNNTVRDRTPYRTLLMNELGVPFHLGTKQVCIAWSSSSCHDGKAWLHVCITGDDKNATASFIYNGRLVDSVVSWSKEILRTQESECVCINGTCTVVMTDGSASGKADTKILFIEEGKIVHTSTLSGSAQHVEECSCYPRYPGVRCVCRDNWKGSNRPIVDINIKDHSIVSSYVCSGLVGDTPRKNDSSSSSHCLDPNNEEGGHGVKGWAFDDGNDVWMGRTINETSRLGYETFKVIEGWSNPKSKLQINRQVIVDRGDRSGYSGIFSVEGKSCINRCFYVELIRGRKEETGVLWTSNSIVVFCGTSGTYGTGSWPDGADLNLMPI

SEQ ID NO: 23909 - protein, 469 aa, synthetic construct; identical to SEQ ID NO: 22146
  REGION 1..469: note = neuraminidase__InfluenzaA__AGW01430

SEQ ID NO: 23910 - protein, 469 aa, synthetic construct; identical to SEQ ID NO: 22146
  REGION 1..469: note = neuraminidase__InfluenzaA__AGW01442

SEQ ID NO: 23911 - protein, 469 aa, synthetic construct; identical to SEQ ID NO: 22146
  REGION 1..469: note = neuraminidase__InfluenzaA__AGW01454

SEQ ID NO: 23912 - protein, 469 aa, synthetic construct; identical to SEQ ID NO: 23871
  REGION 1..469: note = neuraminidase__InfluenzaA__AGW01466

SEQ ID NO: 23913 - protein, 469 aa, synthetic construct; identical to SEQ ID NO: 22146
  REGION 1..469: note = neuraminidase__InfluenzaA__AGW01478

SEQ ID NO: 23914 - protein, 469 aa, synthetic construct
  REGION 1..469: note = neuraminidase__InfluenzaA__AGW01490
MNPNQKIITISSVSLTISTICFFMQIAILITTVTLHFKQYEFNSPPNNQVMLCEPTIIERNITEIVYLTNTTIEKEICPKPAEYRNWSKPQCGITGFAPFSKDNSIRLSAGGDIWVTREPYVSCDPDKCYQFALGQGTTLNNVHSNNTVRDRTPYRTLLMNELGVPFHLGTKQVCIAWSSSSCHDGKAWLHVCITGDDKNATASFIYNGRLVDSVVSWSKEILRTQESECVCINGTCTVVMTDGSASGKADTKILFIEEGKIVHTSTLSGSAQHVEECSCYPRYPGVRCVCRDNWKGSNRPIVDINIKDHSIVSSYVCSGLVGDTPRKNDSSSSSHCLDPNNEEGGHGVKGWAFDDGNDVWMGRTINETSRLGYETFKVIEGWSNSKSKLQINRQVIVDRGDRSGYSGIFSVEGKSCINRCFYVELIRGRKEETEVLWTSNSIVVFCGTSGTYGTGSWPDGADLNLMPI

SEQ ID NO: 23915 - protein, 469 aa, synthetic construct; identical to SEQ ID NO: 22146
  REGION 1..469: note = neuraminidase__InfluenzaA__AGW01538

SEQ ID NO: 23916 - protein, 469 aa, synthetic construct; identical to SEQ ID NO: 23871
  REGION 1..469: note = neuraminidase__InfluenzaA__AGW01562

SEQ ID NO: 23917 - protein, 469 aa, synthetic construct; identical to SEQ ID NO: 22146
  REGION 1..469: note = neuraminidase__InfluenzaA__AGW01574

SEQ ID NO: 23918 - protein, 469 aa, synthetic construct; identical to SEQ ID NO: 22146
  REGION 1..469: note = neuraminidase__InfluenzaA__AGW01586

SEQ ID NO: 23919 - protein, 469 aa, synthetic construct; identical to SEQ ID NO: 22146
  REGION 1..469: note = neuraminidase__InfluenzaA__AGW01598

SEQ ID NO: 23920 - protein, 469 aa, synthetic construct; identical to SEQ ID NO: 23871
  REGION 1..469: note = neuraminidase__InfluenzaA__AGW01610

SEQ ID NO: 23921 - protein, 469 aa, synthetic construct; identical to SEQ ID NO: 22146
  REGION 1..469: note = neuraminidase__InfluenzaA__AGW01622

SEQ ID NO: 23922 - protein, 469 aa, synthetic construct; identical to SEQ ID NO: 22146
  REGION 1..469: note = neuraminidase__InfluenzaA__AGW01634

SEQ ID NO: 23923 - protein, 469 aa, synthetic construct
  REGION 1..469: note = neuraminidase__InfluenzaA__AGW01646
MNPNQKIITIGSVSLTISTICFFMQIAILITTVTLHFKQYEFNSPPNNQVMLCEPTIIERNITEIVYLTNTTIEKEICPKPAEYRNWSKPQCGITGFAPFSKDNSIRLSAGGDIWVTREPYVSCDPDKCYQFALGQGTTLNNVHSNNTVRDRTPYRTLLMNELGVPFHLGTKQVCIAWSSSSCHDGKAWLHVCITGDDKNATASFIYNGRLVDSVVSWSKEILRTQESECVCIDGTCTVVMTDGSASGKADTKILFIEEGKIVHTSTLSGSAQHVEECSCYPRYPGVRCVCRDNWKGSNRPIVDINIKDHSIVSSYVCSGLVGDTPRKNDSSSSSHCLDPNNEEGGHGVKGWAFDDGNDVWMGRTINETSRLGYETFKVIEGWSNPKSKLQINRQVIVDRGDRSGYSGIFSVEGKSCINRCFYVELIRGRKEETEVLWTSNSIVVFCGTSGTYGTGSWPDGADLNLMPI

SEQ ID NO: 23924 - protein, 469 aa, synthetic construct; identical to SEQ ID NO: 22146
  REGION 1..469: note = neuraminidase__InfluenzaA__AGW01670

SEQ ID NO: 23925 - protein, 469 aa, synthetic construct; identical to SEQ ID NO: 22146
  REGION 1..469: note = neuraminidase__InfluenzaA__AGW01682

SEQ ID NO: 23926 - protein, 469 aa, synthetic construct; identical to SEQ ID NO: 23883
  REGION 1..469: note = neuraminidase__InfluenzaA__AGW01704

SEQ ID NO: 23927 - protein, 469 aa, synthetic construct
  REGION 1..469: note = neuraminidase__InfluenzaA__AGW01716
MNPNQKIITIGSVSLTISTICFFMQIAILITTVTLHFKQYEFNSPPNNQVMLCEPTIIERNITEIVYLTNTTIEKEICPKPAEYRNWSKPQCGITGFAPFSKDNSIRLSAGGDIWVTREPYVSCDPDKCYQFALGQGTTLNNMHSNNTVRDRTPYRTLLMNELGVPFHLGTKQVCIAWSSSSCHDGKAWLHVCITGDDKNATASFIYNGRLVDSVVSWSKEILRTQESECVCINGTCTVVMTDGSASGKADTKILFIEEGKIVHTSTLSGSAQHVEECSCYPRYPGVRCVCRDNWKGSNRPIVDINIKDHSIVSSYVCSGLVGDTPRKNDSSSSSHCLDPNNEEGGHGVKGWAFDDGNDVWMGRTINETSRLGYETFKVIEGWSNPKSKLQINRQVIVDRGDRSGYSGIFSVEGRSCINRCFYVELIRGRKEETEVLWTSNSIVVFCGTSGTYGTGSWPDGADLNLMPI

SEQ ID NO: 23928 - protein, 469 aa, synthetic construct
  REGION 1..469: note = neuraminidase__InfluenzaA__AGW01728
MNPNQKIITIGSVSLTISTICFFMQIAILITTVTLHFKQYEFNSPPNNQVMLCEPTIIERNITEIVYLTNTTIEKEICPKPAEYRNWSKPQCGITGFAPFSKDNSIRLSAGGDIWVTREPYVSCDPDKCYQFALGQGTTLNNMHSNNTVRDRTPYRTLLMNELGVPFHLGTKQVCIAWSSSSCHDGKAWLHVCITGDDKNATASFIYNGRLVDSVVSWSKEILRTQESECVCINGTCTVVMTDGSASGKADTKILFIEEGKIVHTSTLSGSAQHVEECSCYPRYPGVRCVCRDNWKGSNRPIVDINIKDHSIVSSYVCSGLVGDTPRKNDSSSSSHCLDPNNEEGGHGVKGWAFDDGNDVWMGRTINETSRLGYETFKVIEGWSNPKSKLQINRQVIVDRGDRSGYSGIFSVEGKSCINRCFYVELIRGRKEETEVLWTSNSVVVFCGTSGTYGTGSWPDGADLNLMPI

SEQ ID NO: 23929 - protein, 469 aa, synthetic construct; identical to SEQ ID NO: 22146
  REGION 1..469: note = neuraminidase__InfluenzaA__AGW01740

SEQ ID NO: 23930 - protein, 469 aa, synthetic construct
  REGION 1..469: note = neuraminidase__InfluenzaA__AGW01752
MNPNQKIITIGSVSLTISTICFFMQIAILITTVTLHFKQYEFNSPPNNQVMLCEPTIIERNITEIVYLTNTTIEKEICPKPAEYRNWSKPQCGITGFAPFSKDNSIRLSAGGDIWVTREPYVSCDPDKCYQFALGQGTTLNNVHSNNTVRDRTPYRTLLMNELGVPFHLGTKQVCIAWSSSSCHDGKAWLHVCITGDDKNATASFIYNGRLVDSVVSWSKEILRTQESECVCINGTCTVVMTDGSASGKADTKILFIEEGKIVHTSTLSGSAQHVEECSCYPRYPGVRCVCRDNWKGSNRPIVDINIKDHSIVSSYVCSGLVGDTPRKNDSSSSSHCLDPNNEEGGHGVKGWAFDDGNDVWMGRTINETSRLGYETFKVIGGWSNPKSKLQINRQVIVDRGDRSGYSGIFSVEGKSCINRCFYVELIRGRKEETEVLWTSNSIVVFCGTSGTYGTGSWPDGADLNLMPI

SEQ ID NO: 23931 - protein, 469 aa, synthetic construct; identical to SEQ ID NO: 22146
  REGION 1..469: note = neuraminidase__InfluenzaA__AGW01764

SEQ ID NO: 23932 - protein, 469 aa, synthetic construct; identical to SEQ ID NO: 23883
  REGION 1..469: note = neuraminidase__InfluenzaA__AGW01776

SEQ ID NO: 23933 - protein, 469 aa, synthetic construct; identical to SEQ ID NO: 23871
  REGION 1..469: note = neuraminidase__InfluenzaA__AGW01788

SEQ ID NO: 23934 - protein, 469 aa, synthetic construct; identical to SEQ ID NO: 23883
  REGION 1..469: note = neuraminidase__InfluenzaA__AGW01800

SEQ ID NO: 23935 - protein, 469 aa, synthetic construct; identical to SEQ ID NO: 23871
  REGION 1..469: note = neuraminidase__InfluenzaA__AGW01812

SEQ ID NO: 23936 - protein, 469 aa, synthetic construct; identical to SEQ ID NO: 23871
  REGION 1..469: note = neuraminidase__InfluenzaA__AGW01824

SEQ ID NO: 23937 - protein, 469 aa, synthetic construct; identical to SEQ ID NO: 23894
  REGION 1..469: note = neuraminidase__InfluenzaA__AGW01848

SEQ ID NO: 23938 - protein, 469 aa, synthetic construct
  REGION 1..469: note = neuraminidase__InfluenzaA__AGW01860
MNPNQKIITIGSVSLTISTICFFMQIAILITTVTLHFKQYEFNSLPNNQVMLCEPTIIERNITEIVYLTNTTIEKEICPKPAEYRNWSKPQCGITGFAPFSKDNSIRLSAGGDIWVTREPYVSCDPDKCYQFALGQGTTLNNVHSNNTVRDRTPYRTLLMNELGVPFHLGTKQVCIAWSSSSCHDGKAWLHVCITGDDKNATASFIYNGRLVDSVVSWSKEILRTQESECVCINGTCTVVMTDGSASGKADTKILFIEEGKIVHTSTLSGSAQHVEECSCYPRYPGVRCVCRDNWKGSNRPIVDINIKDHSIVSSYVCSGLVGDTPRKNDSSSSSHCFDPNNEEGGHGVKGWAFDDGNDVWMGRTINETSRLGYETFKVIGGWSNPKSKLQINRQVIVDRGDRSGYSGIFSVEGKSCINRCFYVELIRGRKEETEVLWTSNSIIVFCGTSGTYGTGSWPDGADLNLMPI

SEQ ID NO: 23939 - protein, 469 aa, synthetic construct
  REGION 1..469: note = neuraminidase__InfluenzaA__AGW01884
MNPNQKIITIGSVSLTISTICFFMQIAILITTVTLHFKQYEFNSPPNNQVMLCEPTIIERNITKIVYLTNTTIEKEICPKPAEYRNWSKPQCGITGFAPFSKDNSIRLSAGGDIWVTREPYVSCDPDKCYQFALGQGTTLNNVHSNNTVRDRTPYRTLLMNELGVPFHLGTKQVCIAWSSSSCHDGKAWLHVCITGDDKNATASFIYNGRLVDSVVSWSKEILRTQESECVCINGTCTVVMTDGSASGKADTKILFIEEGKIVHTSTLSGSAQHVEECSCYPRYPGVRCVCRDNWKGSNRPIVDINIKDHSIVSSYVCSGLVGDTPRKNDSSSSSHCLDPNNEEGGHGVKGWAFDDGNDVWMGRTINETSRLGYETFKVIEGWSNPKSKLQINRQVIVDRGDRSGYSGIFSVEGKSCINRCFYVELIRGRKEETEVLWTSNSIVVFCGTSGTYGTGSWPDGADLNLMPI

SEQ ID NO: 23940 - protein, 469 aa, synthetic construct; identical to SEQ ID NO: 22146
  REGION 1..469: note = neuraminidase__InfluenzaA__AGW01896

SEQ ID NO: 23941 - protein, 469 aa, synthetic construct; identical to SEQ ID NO: 22146
  REGION 1..469: note = neuraminidase__InfluenzaA__AGW01908

SEQ ID NO: 23942 - protein, 469 aa, synthetic construct; identical to SEQ ID NO: 22146
  REGION 1..469: note = neuraminidase__InfluenzaA__AGW01920

SEQ ID NO: 23943 - protein, 469 aa, synthetic construct; identical to SEQ ID NO: 22146
  REGION 1..469: note = neuraminidase__InfluenzaA__AGW01932

SEQ ID NO: 23944 - protein, 469 aa, synthetic construct
  REGION 1..469: note = neuraminidase__InfluenzaA__AGW01944
MNPNQKIITIGSVSLTISTICFFMQIAILITTVTLHFKQYEFNFPPNNQVMLCEPTIIERNITEIVYLTNTTIEKEICPKPAEYRNWSKPQCGITGFAPFSKDNSIRLSAGGDIWVTREPYVSCDPDKCYQFALGQGTTLNNVHSNNTVRDRTPYRTLLMNELGVPFHLGTKQVCIAWSSSSCHDGKAWLHVCITGDDKNATASFIYNGRLVDSVVSWSKEILRTQESECVCINGTCTVVMTDGSASGKADTKILFIEEGKIVHTSTLSGSAQHVEECSCYPRYPGVRCVCRDNWKGSNRPIVDINIKDHSIVSSYVCSGLVGDTPRKNDSSSSSHCLAPNNEEGGHGVKGWAFDDGNDVWMGRTINETSRLGYETFKVIEGWSNPKSKLQINRQVIVDRGDRSGYSGIFSVEGKSCINRCFYVELIRGRKEETEVLWTSNSIVVFCGTSGTYGTGSWPDGADLNLMPI

SEQ ID NO: 23945 - protein, 469 aa, synthetic construct; identical to SEQ ID NO: 22146
  REGION 1..469: note = neuraminidase__InfluenzaA__AGW01956

SEQ ID NO: 23946 - protein, 469 aa, synthetic construct
  REGION 1..469: note = neuraminidase__InfluenzaA__AGW01968
MNPNQKIITIGSVSLTISTICFFMQIAILITTVTLHFKQYEFNSPPNNQVMLCEPTIIERNITEIVYLTNTTIEKEICPKPAEYRNWSKPQCDITGFAPFSKDNSIRLSAGGDIWVTREPYVSCDPDKCYQFALGQGTTLNNVHSNNTIRDRTPYRTLLMNELGVPFHLGTKQVCIAWSSSSCHDGKAWLHVCITGDDENATASFIYNGRLVDSVVSWSKEILRTQESECVCINGTCTVVMTDGSASGKADTKILFIEEGKIVHTSTLSGSAQHVEECSCYPRYPGVRCVCRDNWKGSNRPIVDINIKDHSIVSRYVCSGLVGDTPRKNDSSSSSHCLDPNNEEGGHGVKGWAFDDGNDVWMGRTINETSRLGYETFKVIEGWSNPKSKLQINRQVIVDRGDRSGYSGIFSVEGKSCINRCFYVELIRGRKEETEVLWTSNSIVVFCGTSGTYGTGSWPDGADLNLMPI

SEQ ID NO: 23947 - protein, 469 aa, synthetic construct; identical to SEQ ID NO: 23871
  REGION 1..469: note = neuraminidase__InfluenzaA__AGW01980

SEQ ID NO: 23948 - protein, 469 aa, synthetic construct; identical to SEQ ID NO: 22146
  REGION 1..469: note = neuraminidase__InfluenzaA__AGW01992

SEQ ID NO: 23949 - protein, 469 aa, synthetic construct; identical to SEQ ID NO: 22146
  REGION 1..469: note = neuraminidase__InfluenzaA__AGW02004

SEQ ID NO: 23950 - protein, 469 aa, synthetic construct; identical to SEQ ID NO: 22146
  REGION 1..469: note = neuraminidase__InfluenzaA__AGW02016

SEQ ID NO: 23951 - protein, 469 aa, synthetic construct; identical to SEQ ID NO: 22146
  REGION 1..469: note = neuraminidase__InfluenzaA__AGW02040

SEQ ID NO: 23952 - protein, 469 aa, synthetic construct
  REGION 1..469: note = neuraminidase__InfluenzaA__AGW02064
MNPNQKIITIGSVSLTISTICFFMQIAILITTVTLHFKQYEFDSPPNNQVMLCEPTIIERNITEIVYLTNTTIEKEICPKPAEYRNWSKPQCGITGFAPFSKDNSIRLSAGGDIWVTREPYVSCDPDKCYQFALGQGTTLNNVHSNNTVRDRTPYRTLLMNELGVPFHLGTKQVCIAWSSSSCHDGKAWLHVCITGDDKNATASFIYNGRLVDSVVSWSKEILRTQESECVCINGTCTVVMTDGSASGKADTKILFIEEGKIVHTSTLSGSAQHVEECSCYPRYPGVRCVCRDNWKGSNRPIVDINIKDHSIVSSYVCSGLVGDTPRKNDSSSSGHCLDPNNEEGGHGVKGWAFDDGNDVWMGRTINETSRLGYETFKVIEGWSNPKSKLQINRQVIVDRGDRSGYSGIFSVEGKSCINRCFYVELIRGRKEETEVLWTSNSIVVFCGTSGTYGTGSWPDGADLNLMPI

SEQ ID NO: 23953 - protein, 469 aa, synthetic construct; identical to SEQ ID NO: 22146
  REGION 1..469: note = neuraminidase__InfluenzaA__AGW02076

SEQ ID NO: 23954 - protein, 469 aa, synthetic construct; identical to SEQ ID NO: 22146
  REGION 1..469: note = neuraminidase__InfluenzaA__AGW02088

SEQ ID NO: 23955 - protein, 469 aa, synthetic construct
  REGION 1..469: note = neuraminidase__InfluenzaA__AGW02100
MNPNQKIITIGSVSLTISTICFFMQIAILITTVTLHFKQYESNSPPNNQVMLCEPTIIERNITEIVYLTNTTIEKEICPKPAEYRNWSKPQCGITGFAPFSKDNSIRLSAGGDIWVTREPYVSCDPDKCYQFALGQGTTLNNVHSNNTVRDRTPYRTLLMNELGVPFHLGTKQVCIAWSSSSCHDGKAWLHVCITGDDKNATASFIYNGRLVDSVVSWSKEILRTQESECVCINGTCTVVMTDGSASGKADTKILFIEEGKIVHTSTLSGSAQHVEECSCYPRYPGVRCVCRDNWKGSNRPIVDINIKDHSIVSSYVCSGLVGDTPRKNDSSSSSHCLDPNNEEGGHGVKGWAFDDGNDVWMGRTINETSRLGYETFKVIEGWSNPKSKLQINRQVIVDRGDRSGYSGIFSVEGKSCINRCFYVELIRGRKEETEVLWTSNSIVVFCGTSGTYGTGSWPDGADLNLMPI

SEQ ID NO: 23956 - protein, 469 aa, synthetic construct; identical to SEQ ID NO: 23883
  REGION 1..469: note = neuraminidase__InfluenzaA__AGW02112

SEQ ID NO: 23957 - protein, 469 aa, synthetic construct
  REGION 1..469: note = neuraminidase__InfluenzaA__AGW02124
MNPNQKIITIGSVSLTISTICFFMQIAILITTVTLHFKQYEFNSPPNNQVMLCEPTIIERNITEIVYLTNTTIEKEICPKPAEYRNWSKPQCGITGFAPFSKDNSIRLSAGGDIWVTREPYVSCDPDKCYQFALGQGTTLNNVHSNNTVSDRTPYRTLLMNELGVPFHLGTKQVCIAWSSSSCHDGKAWLHVCITGDDKNATASFIYNGRLVDSVVSWSKEILRTQESECVCINGTCTVVMTDGSASGKADTKILFIEEGKIVHTSTLSGSAQHVEECSCYPRYPGVRCVCRDNWKGSNRPIVDINIKDHSIVSSYVCSGLVGDTPRKNDSSSSSHCLDPNNEEGGHGVKGWAFDDGNDVWMGRTINETSRLGYETFKVIEGWSNPKSKLQINRQVIVDRGDRSGYSGIFSVEGKSCINRCFYVELIRGRKEETEVLWTSNSIVVFCGTSGTYGTGSWPDGADLNLMPI

SEQ ID NO: 23958 - protein, 469 aa, synthetic construct; identical to SEQ ID NO: 23871
  REGION 1..469: note = neuraminidase__InfluenzaA__AGW02136

SEQ ID NO: 23959 - protein, 469 aa, synthetic construct; identical to SEQ ID NO: 23883
  REGION 1..469: note = neuraminidase__InfluenzaA__AGW02148

SEQ ID NO: 23960 - protein, 469 aa, synthetic construct
  REGION 1..469: note = neuraminidase__InfluenzaA__AGW02160
MNPNQKIITIGSVSLTISTICFFMQIAILITTVTLHFKQYEFDSPPNNQVMLCEPTIIERNITEIVYLTNTTIEKEICPKPAEYRNWSKPQCGITGFAPFSKDNSIRLSAGGDIWVTREPYVSCDPDKCYQFALGQGTTLNNVHSNNTVRDRTPYRTLLMNELGVPFHLGTKQVCIAWSSSSCHDGKAWLHVCITGDDKNATASFIYNGRLVDSVVSWSKEILRTQESECVCINGTCTVVMTDGSASGKADTKILFIEEGKIVHTSTLSGSAQHVEECSCYPRYPGVRCVCRDNWKGSNRPIVDINIKDHSIVSSYVCSGLVGDTPRKNDSSSSSHCLDPNNEEGGHGVKGWAFDDGNDVWMGRTINETSRLGYETFKVIEGWSNPKSKLQINRQVIVDRSDRSGYSGIFSVEGKSCINRCFYVELIRGRKEETEVLWTSNSIVVFCGTSGTYGTGSWPDGADLNLMPI

SEQ ID NO: 23961 - protein, 469 aa, synthetic construct; identical to SEQ ID NO: 22146
  REGION 1..469: note = neuraminidase__InfluenzaA__AGW02172

SEQ ID NO: 23962 - protein, 469 aa, synthetic construct; identical to SEQ ID NO: 22146
  REGION 1..469: note = neuraminidase__InfluenzaA__AGW02184

SEQ ID NO: 23963 - protein, 469 aa, synthetic construct
  REGION 1..469: note = neuraminidase__InfluenzaA__AGW02196
MNPNQKIITIGSVSLTISTICFFMQIAILITTVTLHFKQYEFNSPPNNQVMLCEPTIIERNITEIVYLINTTIEKEICPKPAEYRNWSKPQCGITGFAPFSKDNSIRLSAGGDIWVTREPYVSCDPYKCYQFALGQGTTLNNVHSNNTVRDRTPYRTLLMNELGVPFHLGTKQVCIAWSSSSCHDGKAWLHVCITGDDKNATASFIYNGRLVDSVVSWSKEILRTQESECVCINGTCTVVMTDGSASGKADTKILFIEEGKIVHTSTLSGSAQHVEECSCYPRYPGVRCVCRDNWKGSNRPIVDINIKDHSIVSSYVCSGLVGDTPRKNDSSSSSHCLDPNNEEGGHGVKGWAFDDGNDVWMGRTINETSRLGYETFKVIEGWSNPKSKLQINRQVIVDRGDRSGYSGIFSVEGKSCINRCFYVELIRGRKEETEVLWTSNSIVVFCGTSGTYGTGSWPDGADLNLMPI

SEQ ID NO: 23964 - protein, 469 aa, synthetic construct; identical to SEQ ID NO: 23375
  REGION 1..469: note = neuraminidase__InfluenzaA__AGW04174

SEQ ID NO: 23965 - protein, 469 aa, synthetic construct
  REGION 1..469: note = neuraminidase__InfluenzaA__AGW25784
MNPNQKIITIGSVSLIIATICFLMQIAILVTTVTLHFKQYGYNSLPNNQVMLCEPTIIERNITEIVYLTNTTIEKEICPKLAEYRNWSKPQCKITGFAPFSKDNSIRLSAGGDIWVTREPYVSCDPYKCYQFALGQGTTLNNKHSNDTVHDRTPYRTLLMNELGVPFHLGTKQVCIAWSSSSCHDGKAWLHICVTGHDENATASFIYDGKLVDSIGSWSKKILRTQESECVCINGTCTVVMTDGSASGRADTKILFIEEGKIIHISQLSGSAQHVEECSCYPRYPGIRCVCRDNWKGSNRPIVDINVKDYSITSSYVCSGLVGDTPRKTDNSSSSHCLNPNNEEGGHGVKGWAFDDGNDVWMGRTISEKFRSGYETFKVIKGWSKPNSKLQINRQVIVDRDNRSGYSGIFSVEGKSCINRCFYVELIRGRKREAEVWWTSNSIVVFCGTSGTYGTGSWPDGADINLMPI

SEQ ID NO: 23966 - protein, 449 aa, synthetic construct
  REGION 1..449: note = neuraminidase__InfluenzaA__AGW27062
MNPNQKIVTIGSICMVIGTISLMLQIGNIISIWVSHSIQTGNQHQTEPIRNTNFLTENAVASVTLAGNSSLCPIRGWAVHSKDNSIRIGSKGDVFVIREPFISCSHLECRTFFLTQGALLNDKHSNGTVKDRSPHRTLMSCPIGEAPSPYNSRFESVAWSASACHDGTSWLVIGISGPDNGAVAVLKYNGIITDTIRSWRNNILRTQESECACVNGSCFTVMTDGPSNGQASYKIFKIEKGKVVKSVELNAPNYHYEECSCYPDAGEITCVCRDNWHGSNRPWVSFNQNLEYQIGYICSGVFGDNPRPNDGTGSCGPVSSNGAYGVKGFSFKYGNGVWIGRTKSTHSRSGFEMIWDPNGWTGTDSEFSMKQDIVAITDWSGYSGSFVQHPELTGLDCIRPCFWVELIRGRPKESTIWTSGSSISFCGVNSDTVSWSWPDGAELPFTIDK

SEQ ID NO: 23967 - protein, 469 aa, synthetic construct
  REGION 1..469: note = neuraminidase__InfluenzaA__AGY14472
MNPNQKIITIGSVSLTLATICFLMQIAILVTTVTLHFKQYECNSTPNNQVMLCEPTVIERNITKIVYLTNTTVEKEICPKPAEYRNWSKPQCKITGFAPFSKDNSIRLSAGGDIWVTREPYVSCDPNKCYQFALGQGTTLNNRHSNDTVHDRTPYRTLLMNELGIPFHLGTKQVCIAWSSSSCHDGKAWLHVCVTGHDKNATASFIYDGKLVDSIGSWSKKILRTQESECVCINGTCTVVMTDGSASGRADTKILFIEEGKIIHISQLSGSAQHVEECSCYPRYPGIRCVCRDNWKGSNRPIVDINVKDYSITSSYVCSGLVGDTPRKTDNSSSSHCLNPNNEEGGHGVKGWAFDDGNDVWMGRTISEKFRSGYETFKVIKGWSKPNSKLQINRQVIVDRDNRSGYSGIFSVEGKSCINRCFYVELIRGRKREAEVWWTSNSIVVFCGTSGTYGTGSWPDGADINLMPI

SEQ ID NO: 23968 - protein, 465 aa, synthetic construct
  REGION 1..465: note = neuraminidase__InfluenzaA__AHA11501
MNPNQKILCTSATAIIIGAIAVLIGIANLGLNIGLHLKPGCNCSHSQPETTNTSQTIINNYYNETNITNIQMEERTSRNFNNLTKGLCTINSWHIYGKDNAVRIGESSDVLVTREPYVSCDPDECRFYALSQGTTIRGKHSNGTIHDRSQYRALISWPLSSPPTVYNSRVECIGWSSTSCHDGKSRMSICISGPNNNASAVVWYNRRPVAEINTWARNILRTQESECVCHNGVCPIVFTDGSATGPADTRIYYFKEGKILEWESLTGTAKHIEECSCYGERTGITCTCRDNWQGSNRPVIQIDPVAMTHTSQYICSPVLTDTPRPNDPNIGKCNDPYPGNDNNGVKGFSYLDGANTWLGRTISTASRSGYEMLKVPNALTDDRSKPIQGQTIVLNADWSGYSGSFMDYWAEGDCYRACFYVELIRGRPKEDKVWWTSNSIVSMCSSTEFLGQWNWPDGARIEYFL

SEQ ID NO: 23969 - protein, 469 aa, synthetic construct
  REGION 1..469: note = neuraminidase__InfluenzaA__AHC57462
MNPNQKIITIGSVSLTISTICFFMQIAILITTVTLHFKQYEFNSPPNNQVMLCEPTIIERNITEIVYLTNTTIEKEICPKLAEYRNWSKPQCDITGFAPFSKDNSIRLSAGGDIWVTREPYVSCDPDKCYQFALGQGTTLNNVHSNNTVRDRTPYRTLLMNELGVPFHLGTKQVCIAWSSSSCHDGKAWLHVCITGDDKNATASFIYNGRLVDSVVSWSKEILRTQESECVCINGTCTVVMTDGSASGKADTKILFIEEGKIVHTSTLSGSAQHVEECSCYPRYPGVRCVCRDNWKGSNRPIVDINIKDHSIVSSYVCSGLVGDTPRKNDSSSSSHCWDPNNEEGGHGVKGWAFDDGNDVWMGRTINETSRLGYETFKVIEGWSNPKSKLQVNRQVIVDRGDRSGYSGIFSVEGKSCINRCFYVELIRGRKEETEVLWTSNSIVVFCGTSGTYGTGSWPDGADLNLMPI

SEQ ID NO: 23970 - protein, 469 aa, synthetic construct; identical to SEQ ID NO: 19518
  REGION 1..469: note = neuraminidase__InfluenzaA__AHC57490

SEQ ID NO: 23971 - protein, 469 aa, synthetic construct
  REGION 1..469: note = neuraminidase__InfluenzaA__AHC57514
MNPNQKIITIGSVSLTISTICFFMQIAILITTVTLHFKQYEFYSPPNNQVMLCEPTIIERNITEIVYLTNTTIEKEICPKLAEYRNWSKPQCDITGFAPFSKDNSIRLSAGGDIWVTREPYVSCDPDKCYQFALGQGTTLNNVHSNNTVRDRTPYRTLLMNELGVPFHLGTKQVCIAWSSSSCHDGKAWLHVCITGDDKNATASFIYNGRLVDSVVSWSKEILRTQESECVCINGTCTVVMTDGSASGKADTKILFIEEGKIVHTSTLSGSAQHVEECSCYPRYPGVRCVCRDNWKGSNRPIVDINIKDHSIVSSYVCSGLVGDTPRKNDSSSSSHCLDPNNEEGGHGVKGWAFDDGNDVWMGRTINETSRLGYETFKVIEGWSNPKSKLQINRQVIVDRGNRSGYSGIFSVEGKSCINRCFYVELIRGRKEETEVLWTSNSIVVFCGTSGTYGTGSWPDGADLNLMPI

SEQ ID NO: 23972 - protein, 469 aa, synthetic construct; identical to SEQ ID NO: 23971
  REGION 1..469: note = neuraminidase__InfluenzaA__AHC57526

SEQ ID NO: 23973 - protein, 469 aa, synthetic construct; identical to SEQ ID NO: 23971
  REGION 1..469: note = neuraminidase__InfluenzaA__AHC57806

SEQ ID NO: 23974 - protein, 469 aa, synthetic construct; identical to SEQ ID NO: 23971
  REGION 1..469: note = neuraminidase__InfluenzaA__AHC57818

SEQ ID NO: 23975 - protein, 469 aa, synthetic construct
  REGION 1..469: note = neuraminidase__InfluenzaA__AHC57830
MNPNQKIITIGSVSLTISTICFFMQIAILITTVTLHFKQYEFNSPPNNQVMLCEPTIIERNITEIVYLTNTTIEKEICPKLAEYRNWSKPQCDITGFAPFSKDNSIRLSAGGDIWVTREPYVSCDPNKCYQFALGQGTTLNNVHSNNTVRDRTPYRTLLMNELGVPFHLGTKQVCIAWSSSSCHDGKAWLHVCITGDDKNATASFIYNGKLVDSVVSWSKEILRTQESECVCINGTCTVVMTDGSASGKADTKILFIEEGKIVHTSTLSGSAQHVEECSCYPRYPGVRCVCRDNWKGSNRPIVDINIKDHSIVSSYVCSGLVGDTPRKNDSSSSSHCLDPNNEEGGHGVKGWAFDDGNDVWMGRTINETSRLGYETFKVIEGWSNPKSKLQINRQVIVDRGNRSGYSGIFSVEGKSCINRCFYVELIRGRKEETEVLWTSNSIVVFCGTSGTYGTGSWPDGADLNLMPI

SEQ ID NO: 23976 - protein, 469 aa, synthetic construct; identical to SEQ ID NO: 23975
  REGION 1..469: note = neuraminidase__InfluenzaA__AHC57971

SEQ ID NO: 23977 - protein, 469 aa, synthetic construct; identical to SEQ ID NO: 23971
  REGION 1..469: note = neuraminidase__InfluenzaA__AHC57984

SEQ ID NO: 23978 - protein, 469 aa, synthetic construct
  REGION 1..469: note = neuraminidase__InfluenzaA__AHC57996
MNPNQKIITIGSVSLTISTICFFMQIAILITTVTLHFKQYEFYSPPNNQVMLCEPTIIERNITEIVYLTNTTIEKEICPKLAEYRNWSKPQCDITGFAPFSKDNSIRLSAGGDIWVTREPYVSCDPDKCYQFALGQGTTLNNVHSNNTVRDRTPHRTLLMNELGVPFHLGTKQVCIAWSSSSCHDGKAWLHVCITGDDKNATASFIYNGRLVDSVVSWSKEILRTQESECVCINGTCTVVMTDGSASGKADTKILFIEEGKIVHTSTLSGSAQHVEECSCYPRYPGVRCVCRDNWKGSNRPIVDINIKDHSIVSSYVCSGLVGDTPRKNDSSSSSHCLDPNNEEGGHGVKGWAFDDGNDVWMGRTINETSRLGYETFKVIEGWSNPKSKLQINRQVIVDRGNRSGYSGIFSVEGKSCINRCFYVELIRGRKEETEVLWTSNSIVVFCGTSGTYGTGSWPDGADLNLMPI

SEQ ID NO: 23979 - protein, 469 aa, synthetic construct; identical to SEQ ID NO: 22922
  REGION 1..469: note = neuraminidase__InfluenzaA__AHC58008

SEQ ID NO: 23980 - protein, 469 aa, synthetic construct; identical to SEQ ID NO: 19518
  REGION 1..469: note = neuraminidase__InfluenzaA__AHC58020

SEQ ID NO: 23981 - protein, 469 aa, synthetic construct
  REGION 1..469: note = neuraminidase__InfluenzaA__AHC58032
MNPNQKIITIGSVSLTISTICFFMQIAILITTVTLHFKQYEFNSPPNNQVMLCEPTIIERNITEIVYLTNTTIEKEICPKLAEYRNWSKPQCDITGFAPFSKDNSIRLSAGGDIWVTREPYVSCDPNKCYQFALGQGTTLNNVHSNNTVRDRTPYRTLLMNELGVPFHLGTKQVCIAWSSSSCHDGKAWLHVCITGDDKNATASFIYNGKLVDSVVSWSKEILRTQESECVCINGTCTVVMTDGSASGKADTKILFIEEGKIVHTSTLSGSAQHVEECSCYPRYPGVRCVCRDNWKGSNRPIVDINIKDHSIVSSYVCSGLVGDTPRKNDSSSSSHCLNPNNEEGGHGVKGWAFDDGNDVWMGRTINETSRLGYETFKVIEGWSNPKSKLQINRQVIVDRGNRSGYSGIFSVEGKSCINRCFYVELIRGRKEETEVLWTSNSIVVFCGTSGTYGTGSWPDGADLNLMPI

SEQ ID NO: 23982 - protein, 469 aa, synthetic construct; identical to SEQ ID NO: 22922
  REGION 1..469: note = neuraminidase__InfluenzaA__AHC58053

SEQ ID NO: 23983 - protein, 469 aa, synthetic construct
  REGION 1..469: note = neuraminidase__InfluenzaA__AHC58077
MNPNQKIITIGSVSLTISTICFFMQIAILITTVTLHFKQYEFYSPPNNQVMLREPTIIERNITEIVYLTNTTTEKEICPKLAEYRNWSKPQCDITGFAPFSKDNSIRLSAGGDIWVTREPYVSCDPDKCYQFALGQGTTLNNVHSNNTVRDRTPYRTLLMNELGVPFHLGTKQVCIAWSSSSCHDGKAWLHVCITGDDKNATASFIYNGRLVDSVVSWSKEILRTQESECVCINGTCTVVMTDGSASGKADTKILFIEEGKIVHTSTLSGSAQHVEECSCYPRYPGVRCVCRDNWKGSNRPIVDINIKDHSIVSSYVCSGLVGDTPRKNDSSSSSHCLDPNNEEGGHGVKGWAFDDGNDVWMGRTINETSRLGYETFKVIEGWSNPKSKLQINRQVIVDRGNRSGYSGIFSVEGKSCINRCFYVELIRGRKEETEVLWTSNSIVVFCGTSGTYGTGSWPDGADLNLMPI

SEQ ID NO: 23984 - protein, 469 aa, synthetic construct; identical to SEQ ID NO: 23975
  REGION 1..469: note = neuraminidase__InfluenzaA__AHC58089

SEQ ID NO: 23985 - protein, 469 aa, synthetic construct; identical to SEQ ID NO: 23971
  REGION 1..469: note = neuraminidase__InfluenzaA__AHC58101

SEQ ID NO: 23986 - protein, 469 aa, synthetic construct
  REGION 1..469: note = neuraminidase__InfluenzaA__AHC58113
MNPNQKIITIGSVSLTISTICFFMQIAILITTVTLHFKQYEFYSPPNNQVMLCEPTIIERNITEIVYLTNTTIEKEICPKLAEYRNWSKPQCDITGFAPFSKDNSIRLSAGGDIWVTREPYVSCDPDKCYQFALGQGTTLNNVHSNNTVRDRTPYRTLLMNELGVPFHLGTKQVCIAWSSSSCHDGKAWLHVCITGDDKNATASFIYNGRLVDSVVSWSKKILRTQESECVCINGTCTVVMTDGSASGKADTKILFIEEGKIVHTSTLSGSAQHVEECSCYPRYPGVRCVCRDNWKGSNRPIVDINIKDHSIVSSYVCSGLVGDTPRKNDSSSSSHCLDPNNEEGGHGVKGWAFDDGNDVWMGRTINETSRLGYETFKVIEGWSNPKSKLQINRQVIVDRGNRSGYSGIFSVEGKSCINRCFYVELIRGRKEETEVLWTSNSIVVFCGTSGTYGTGSWPDGADLNLMPI

SEQ ID NO: 23987 - protein, 469 aa, synthetic construct; identical to SEQ ID NO: 23971
  REGION 1..469: note = neuraminidase__InfluenzaA__AHC58129

SEQ ID NO: 23988 - protein, 469 aa, synthetic construct; identical to SEQ ID NO: 23971
  REGION 1..469: note = neuraminidase__InfluenzaA__AHC58153

SEQ ID NO: 23989 - protein, 469 aa, synthetic construct; identical to SEQ ID NO: 23971
  REGION 1..469: note = neuraminidase__InfluenzaA__AHC58165

SEQ ID NO: 23990 - protein, 469 aa, synthetic construct; identical to SEQ ID NO: 23975
  REGION 1..469: note = neuraminidase__InfluenzaA__AHC58177

SEQ ID NO: 23991 - protein, 469 aa, synthetic construct
  REGION 1..469: note = neuraminidase__InfluenzaA__AHC58189
MNPNQKIITIGSVSLTISTICFFMQIAILITTVTLHFKQYEFNSPPNNQVMLCEPTIIERNITEIVYLTNTTIEKEICPKPAEYRNWSKPQCDITGFAPFSKDNSIRLSAGGDIWVTREPYVSCDPDKCYQFALGQGTTLNNVHSNNTVRDRTPYRTLLMNELGVPFHLGTKQVCIAWSSSSCHDGKAWLHVCITGDDKNATASFIYNGRLVDSVVSWSKEILRTQESECVCINGTCTVVMTDGSASGKADTKILFIEEGKIVHTSTLSGSAQHVEECSCYPRYPGVRCVCRDNWKGSNRPIVDINIKDHSIVSSYVCSGLVGDTPRKNDSSSSSHCLDPNNEEGGHGVKGWAFDDGNDVWMGRTINEMSRLGYETFKVIEGWSNPKSKLQINRQVIVDRGDRSGYSGIFSVEGKSCINRCFYVELIRGRKEETEVLWTSNSIVVFCGTSGTYGTGSWPDGADLNLMPI

SEQ ID NO: 23992 - protein, 469 aa, synthetic construct; identical to SEQ ID NO: 23971
  REGION 1..469: note = neuraminidase__InfluenzaA__AHC58201

SEQ ID NO: 23993 - protein, 469 aa, synthetic construct
  REGION 1..469: note = neuraminidase__InfluenzaA__AHC58225
MNPNQKIITIGSVSLTISTICFFMQIAILITTVTLHFKQYEFNSPPNNQVMLCEPTIIERNITEIVYLTNTTIEKEICPKPAEYRNWSKPQCDITGFAPFSKDNSIRLSAGGDIWVTREPYVSCDPDKCYQFALGQGTTLNNVHSNNTVRDRTPYRTLLMNELGVPFHLGTKQVCIAWSSSSCHDGKAWLHVCITGDDKNATASFIYNGRLVDSVVSWSKEILRTQESECVCINGTCTVVMTDGSASGKADTKILFIEEGKIVHTSTLSGSAQHVEECSCYPRYPGVRCVCRDNWKGSNRPIVDINIKDHSIVSSYVCSGLVGDTPRKNDSSSSSHCLDPNNEEGGHGVKGWAFDDGNDVWMGRTINETSRLGYETFKVIEGWSNPKSKLQINRQVIVNRGDRSGYSGIFSVEGKSCINRCFYVELIRGRKEETEVLWTSNSIVVFCGTSGTYGTGSWPDGADLNLMPI

SEQ ID NO: 23994 - protein, 469 aa, synthetic construct; identical to SEQ ID NO: 23975
  REGION 1..469: note = neuraminidase__InfluenzaA__AHC58237

SEQ ID NO: 23995 - protein, 469 aa, synthetic construct; identical to SEQ ID NO: 23971
  REGION 1..469: note = neuraminidase__InfluenzaA__AHC58249

SEQ ID NO: 23996 - protein, 469 aa, synthetic construct; identical to SEQ ID NO: 19518
  REGION 1..469: note = neuraminidase__InfluenzaA__AHC58273

SEQ ID NO: 23997 - protein, 469 aa, synthetic construct; identical to SEQ ID NO: 23975
  REGION 1..469: note = neuraminidase__InfluenzaA__AHC58363

SEQ ID NO: 23998 - protein, 469 aa, synthetic construct; identical to SEQ ID NO: 22922
  REGION 1..469: note = neuraminidase__InfluenzaA__AHC58375

SEQ ID NO: 23999 - protein, 469 aa, synthetic construct; identical to SEQ ID NO: 23975
  REGION 1..469: note = neuraminidase__InfluenzaA__AHC58387

SEQ ID NO: 24000 - protein, 469 aa, synthetic construct; identical to SEQ ID NO: 23975
  REGION 1..469: note = neuraminidase__InfluenzaA__AHC58399

SEQ ID NO: 24001 - protein, 469 aa, synthetic construct; identical to SEQ ID NO: 23971
  REGION 1..469: note = neuraminidase__InfluenzaA__AHC58411

SEQ ID NO: 24002 - protein, 469 aa, synthetic construct; identical to SEQ ID NO: 22922
  REGION 1..469: note = neuraminidase__InfluenzaA__AHC58423

SEQ ID NO: 24003 - protein, 469 aa, synthetic construct; identical to SEQ ID NO: 23975
  REGION 1..469: note = neuraminidase__InfluenzaA__AHC58459

SEQ ID NO: 24004 - protein, 469 aa, synthetic construct
  REGION 1..469: note = neuraminidase__InfluenzaA__AHC58471
MNPNQKIITIGSVCMTIGMANLILQIGNIISIWISHSIQLGNQNQIETCNQSVITYENNTWVNQTYVNISNTNFAAGQPVVSVKLAGNSSLCPVSGWAIYSKDNSIRIGSKGDVFVIREPFISCSPLECRTFFLTQGALLNDKHSNGTIKDRSPYRTLMSCPIGEVPSPYNSRFESVAWSASACHDGINWLTIGISGPDNGAVAVLKYNGIITDTIKSWRNNILRTQESECACVNGSCFTVMTDGPSDGQASYKIFRIEKGKIVKSVEMNAPNYHYEECSCYPDSSEITCVCRDNWHGANRPWVSFNQNLEYQIGYICSGVFGDNPRPNDKTGSCGPVSSNGANGVKGFSFKYGNGVWIGRTKSISSRNGFEMIWDPNGWTGTDNNFSIKQDIVGINEWSGYSGSFVQHPELTGLDCIRPCFWVELIRGRPKENTIWTSGSSISFCGVNSDTVGWSWPDGAELPFTIDK

SEQ ID NO: 24005 - protein, 469 aa, synthetic construct; identical to SEQ ID NO: 23971
  REGION 1..469: note = neuraminidase__InfluenzaA__AHC58482

SEQ ID NO: 24006 - protein, 469 aa, synthetic construct; identical to SEQ ID NO: 23975
  REGION 1..469: note = neuraminidase__InfluenzaA__AHC58494

SEQ ID NO: 24007 - protein, 469 aa, synthetic construct
  REGION 1..469: note = neuraminidase__InfluenzaA__AHC58518
MNPNQKIITIGSVSLTISTICFFMQVAILITTVTLHFKQYEFNSPPNNQVMLCEPTIIERNITEIVYLTNTTIEKEICPKLAEYRNWSKPQCDITGFAPFSKDNSIRLSAGGDIWVTREPYVSCDPDKCYQFALGQGTTLNNVHSNNTVRDRTPYRTLLMNELGVPFHLGTKQVCIAWSSSSCHDGKAWLHVCITGDDKNATASFIYNGKLVDSVVSWSKEILRTQESECVCINGTCTVVMTDGSASGKADTKILFIEEGKIVHTSTLSGSAQHVEECSCYPRYPGVRCVCRDNWKGSNRPIVDINIKDHSIVSSYVCSGLVGDTPRKNDSSSSSHCLDPNNEEGGHGVKGWAFDDGNDVWMGRTINETSRLGYETFKVIEGWSNPKSKLQINRQVIVDRGNRSGYSGIFSVEGKSCINRCFYVELIRGRKEETEVLWTSNSIVVFCGTSGTYGTGSWPDGADLNLMPI

SEQ ID NO: 24008 - protein, 469 aa, synthetic construct; identical to SEQ ID NO: 23971
  REGION 1..469: note = neuraminidase__InfluenzaA__AHC58530

SEQ ID NO: 24009 - protein, 469 aa, synthetic construct; identical to SEQ ID NO: 23971
  REGION 1..469: note = neuraminidase__InfluenzaA__AHC58554

SEQ ID NO: 24010 - protein, 469 aa, synthetic construct; identical to SEQ ID NO: 23971
  REGION 1..469: note = neuraminidase__InfluenzaA__AHC58566

SEQ ID NO: 24011 - protein, 469 aa, synthetic construct
  REGION 1..469: note = neuraminidase__InfluenzaA__AHC58578
MNPNQKIITIGSVSLTVSTICFFMQIAILITTVTLHFKQYEFYSPPNNQVMLCEPTIIERNITEIVYLTNTTIEKEICPKLAEYRNWSKPQCDITGFAPFSKDNSIRLSAGGDIWVTREPYVSCDPDKCYQFALGQGTTLNNVHSNNTVRDRTPYRTLLMNELGVPFHLGTKQVCIAWSSSSCHDGKAWLHVCITGDDKNATASFIYNGRLVDSVVSWSKEILRTQESECVCINGTCTVVMTDGSASGKADTKILFIEEGKIVHTSTLSGSAQHVEECSCYPRYPGVRCVCRDNWKGSNRPIVDINIKDHSIVSSYVCSGLVGDTPRKNDSSSSSHCLDPNNEEGGHGVKGWAFDDGNDVWMGRTINETSRLGYETFKVIEGWSNPKSKLQINRQVIVDRGNRSGYSGIFSVEGKSCINRCFYVELIRGRKEETEVLWTSNSIVVFCGTSGTYGTGSWPDGADLNLMPI

SEQ ID NO: 24012 - protein, 469 aa, synthetic construct; identical to SEQ ID NO: 19518
  REGION 1..469: note = neuraminidase__InfluenzaA__AHC58590

SEQ ID NO: 24013 - protein, 469 aa, synthetic construct; identical to SEQ ID NO: 24007
  REGION 1..469: note = neuraminidase__InfluenzaA__AHC58602

SEQ ID NO: 24014 - protein, 469 aa, synthetic construct; identical to SEQ ID NO: 23971
  REGION 1..469: note = neuraminidase__InfluenzaA__AHC58614

SEQ ID NO: 24015 - protein, 469 aa, synthetic construct; identical to SEQ ID NO: 23971
  REGION 1..469: note = neuraminidase__InfluenzaA__AHC58626

SEQ ID NO: 24016 - protein, 469 aa, synthetic construct; identical to SEQ ID NO: 23971
  REGION 1..469: note = neuraminidase__InfluenzaA__AHC58638

SEQ ID NO: 24017 - protein, 469 aa, synthetic construct; identical to SEQ ID NO: 23971
  REGION 1..469: note = neuraminidase__InfluenzaA__AHC58650

SEQ ID NO: 24018 - protein, 469 aa, synthetic construct
  REGION 1..469: note = neuraminidase__InfluenzaA__AHC58662
MNPNQKIITIGSVSLTISTICFFMQTAILITTVTLHFKQYEFNSPPNNQVMLCEPTIIERNITEIVYLTNTTIEKEICPKLAEYRNWSKPQCDITGFAPFSKDNSIRLSAGGDIWVTREPYVSCDPDKCYQFALGQGTTLNNVHSNNTVRDRTPYRTLLMNELGVPFHLGTKQVCIAWSSSSCHDGKAWLHVCITGDDKNATASFIYNGKLVDSVVSWSKEILRTQESECVCINGTCTVVMTDGSASGKADTKILFIEEGKIVHTSTLSGSAQHVEECSCYPRYPGVRCVCRDNWKGSNRPIVDINIKDHSIVSSYVCSGLVGDTPRKNDSSSSSHCLDPNNEEGGHGVKGWAFDDGNDVWMGRTINETSRLGYETFKVIEGWSNPKSKLQINRQVIVDRGNRSGYSGIFSVEGKSCINRCFYVELIRGRKEETEVLWTSNSIVVFCGTSGTYGTGSWPDGADLNLMPI

SEQ ID NO: 24019 - protein, 469 aa, synthetic construct
  REGION 1..469: note = neuraminidase__InfluenzaA__AHC58686
MNPNQKIITIGSVSLTISTICFFMQIAILITTVTLHFKQYEFNSPPNNQVVLCEPTIIERNITEIVYLTNTTIEKEICPKPAEYRNWSKPQCDITGFAPFSKDNSIRLSAGGDIWVTREPYVSCDPDKCYQFALGQGTTLNNVHSNNTVRDRTPYRTLLMNELGVPFHLGTKQVCIAWSSSSCHDGKAWLHVCITGDDKNATASFIYNGRLVDSVVSWSKEILRTQESECVCINGTCTVVMTDGSASGKADTKILFIEEGKIVHTSTLSGSAQHVEECSCYPRYPGVRCVCRDNWKGSNRPIVDINIKDHSIVSSYVCSGLVGDTPRKNDSSSSSHCLDPNNEEGGHGVKGWAFDDGNDVWMGRTINETSRLGYETFKVIEGWSNPKSKLQINRQVIVDRGDRSGYSGIFSVEGKSCINRCFYVELIRGRKEETEVLWTSNSIVVFCGTSGTYGTGSWPDGADLNLMPI

SEQ ID NO: 24020 - protein, 469 aa, synthetic construct
  REGION 1..469: note = neuraminidase__InfluenzaA__AHC58698
MNPNQKIITIGSVSLTISTICFFMQIAILITTVTLHFKQYEFNSPPNNQVMLCEPTIIERNITEIVYLTNTTIEKEICPKLAEYRNWSKPQCDITGFAPFSKDNSIRLSAGGDIWVTREPYVSCDPDKCYQFALGQGTTLNNVHSNNTVRDRTPYRTLLMNELGVPFHLGTKQVCIAWSSSSCHDGKAWLHVCITGDDKNATASFIYNGRLVDSVVSWSKEILRTQESECVCINGTCAVVMTDGSASGKADTKILFIEEGKIVHTSTLSGSAQHVEECSCYPRYPGVRCVCRDNWKGSNRPIVDINIKDHSIVSSYVCSGLVGDTPRKNDSSSSSHCLDPNNEEGGHGVKGWAFDDGNDVWMGRTINETSRLGYETFKVIEGWSNPKSKLQINRQVIVDRGNRSGYSGIFSVEGKSCINRCFYVELIRGRKEETEVLWTSNSIVVFCGTSGTYGTGSWPDGADLNLMPI

SEQ ID NO: 24021 - protein, 469 aa, synthetic construct; identical to SEQ ID NO: 22922
  REGION 1..469: note = neuraminidase__InfluenzaA__AHC58710

SEQ ID NO: 24022 - protein, 469 aa, synthetic construct; identical to SEQ ID NO: 22922
  REGION 1..469: note = neuraminidase__InfluenzaA__AHC58722

SEQ ID NO: 24023 - protein, 469 aa, synthetic construct
  REGION 1..469: note = neuraminidase__InfluenzaA__AHC58734
MNPNQKIITIGSVSLTISTICFFMQIAILITTVTLHFKQYEFNSPPNNQVMLCEPTIIERNITEIVYLTNTTIEKEICPKLAEYRNWSKPQCDITGFAPFSKDNSIRLSAGGDIWVTREPYVSCDPNKCYQFALGQGTTLNNVHSNNTVRDRTPYRTLLMNELGVPFHLGTKQVCIAWSSSSCHDGKAWLHVCITGDDKNATASFIYNGKLVDSVVSWSKEILRTQESECVCINGTCTVVMTDGSASGKADTKILFIEEGKIVHTSTLSGSAQHVEECSCYPRYPGIRCVCRDNWKGSNRPIVDINIKDHSIVSSYVCSGLVGDTPRKNDSSSSSHCLDPNNEEGGHGVKGWAFDDGNDVWMGRTINETSRLGYETFKVIEGWSNPKSKLQINRQVIVDRGNRSGYSGIFSVEGKSCINRCFYVELIRGRKEETEVLWTSNSIVVFCGTSGTYGTGSWPDGADLNLMPI

SEQ ID NO: 24024 - protein, 469 aa, synthetic construct; identical to SEQ ID NO: 23971
  REGION 1..469: note = neuraminidase__InfluenzaA__AHC58746

SEQ ID NO: 24025 - protein, 469 aa, synthetic construct; identical to SEQ ID NO: 23975
  REGION 1..469: note = neuraminidase__InfluenzaA__AHC58758

SEQ ID NO: 24026 - protein, 469 aa, synthetic construct; identical to SEQ ID NO: 23971
  REGION 1..469: note = neuraminidase__InfluenzaA__AHC58770

SEQ ID NO: 24027 - protein, 469 aa, synthetic construct; identical to SEQ ID NO: 19518
  REGION 1..469: note = neuraminidase__InfluenzaA__AHC58782

SEQ ID NO: 24028 - protein, 469 aa, synthetic construct; identical to SEQ ID NO: 23971
  REGION 1..469: note = neuraminidase__InfluenzaA__AHC58806

SEQ ID NO: 24029 - protein, 469 aa, synthetic construct
  REGION 1..469: note = neuraminidase__InfluenzaA__AHC58818
MNPNQKIITIGSVSLTISTICFFIQIAILITTVTLHFKQYEFNSPPNNQVMLCEPTIIERNITEIVYLTNTTIEKEICPKLAEYRNWSKPQCDITGFAPFSKDNSIRLSAGGDIWVTREPYVSCDPDKCYQFALGQGTTLNNVHSNNTVRDRTPYRTLLMNELGVPFHLGTKQVCIAWSSSSCHDGKAWLHVCITGDDKNATASFIYNGRLVDSVVSWSKEILRTQESECVCINGTCTVVMTDGSASGKADTKILFIEEGKIVHTSTLSGSAQHVEECSCYPRYPGVRCVCRDNWKGSNRPIVDINIKDHSIVSSYVCSGLVGDTPRKNDSSSSSHCLDPNNEEGGHGVKGWAFDDGNDVWMGRTINETSRLGYETFKVIEGWSNPKSKLQINRQVIVDRGNRSGYSGIFSVEGKSCINRCFYVELIRGRKEETEVLWTSNSIVVFCGTSGTYGTGSWPDGADLNLMPI

SEQ ID NO: 24030 - protein, 469 aa, synthetic construct; identical to SEQ ID NO: 24020
  REGION 1..469: note = neuraminidase__InfluenzaA__AHC58830

SEQ ID NO: 24031 - protein, 469 aa, synthetic construct; identical to SEQ ID NO: 23971
  REGION 1..469: note = neuraminidase__InfluenzaA__AHC58842

SEQ ID NO: 24032 - protein, 469 aa, synthetic construct
  REGION 1..469: note = neuraminidase__InfluenzaA__AHC58866
MNPNQKIITIGSVSLTISTICFFMQIAILITTVTLHFKQCEFNSPPNNRVMLCEPTIIERNITEIVYLTNTTIEKEICPKLAEYRNWSKPQCDITGFAPFSKDNSIRLSAGGDIWVTREPYVSCDPNKCYQFALGQGTTLNNVHSNNTVRDRTPYRTLLMNELGVPFHLGTKQVCIAWSSSSCHDGKAWLHVCITGDDKNATASFIYNGKLVDSVVSWSKEILRTQESECVCINGTCTVVMTDGSASGKADTKILFIEEGKIVHTSTLSGSAQHVEECSCYPRYPGVRCVCRDNWKGSNRPIVDINIKDHSIVSSYVCSGLVGDTPRKNDSSSSSHCLDPNNEEGGHGVKGWAFDDGNDVWMGRTINETSRLGYETFKVIEGWSNPKSKLQINRQVIVDRGNRSGYSGIFSVEGKSCINRCFYVELIRGRKEETGVLWTSNSIVVFCGTSGTYGTGSWPDGADLNLMPI

SEQ ID NO: 24033 - protein, 469 aa, synthetic construct; identical to SEQ ID NO: 24020
  REGION 1..469: note = neuraminidase__InfluenzaA__AHC58878

SEQ ID NO: 24034 - protein, 469 aa, synthetic construct; identical to SEQ ID NO: 23971
  REGION 1..469: note = neuraminidase__InfluenzaA__AHC58890

SEQ ID NO: 24035 - protein, 469 aa, synthetic construct; identical to SEQ ID NO: 23975
  REGION 1..469: note = neuraminidase__InfluenzaA__AHC58902

SEQ ID NO: 24036 - protein, 469 aa, synthetic construct; identical to SEQ ID NO: 23971
  REGION 1..469: note = neuraminidase__InfluenzaA__AHC58996

SEQ ID NO: 24037 - protein, 469 aa, synthetic construct; identical to SEQ ID NO: 23971
  REGION 1..469: note = neuraminidase__InfluenzaA__AHC59008

SEQ ID NO: 24038 - protein, 469 aa, synthetic construct; identical to SEQ ID NO: 23975
  REGION 1..469: note = neuraminidase__InfluenzaA__AHC59020

SEQ ID NO: 24039 - protein, 469 aa, synthetic construct
  REGION 1..469: note = neuraminidase__InfluenzaA__AHC59032
MNPNQKIITIGSVSLTISTICFFMQIAILITTVTLHFKQYEFNSPPNNQVMLCEPTIIERNITEIVYLTNTTIEKEICPKLAEYRNWSKPQCDITGFAPFSKDNSIRLSAGGDIWVTREPYVSCDPNKCYQFALGQGTTLNNVHSNNTVRDRTPYRTLLMNELGVPFHLGTKQVCIAWSSSSCHDGKAWLHVCITGDDKNATASFIYNGKLVDSVVSWSKEILRTQESECVCINGTCTVVMTDGSASGKADTKILFIEEGKIVHTSTLSGSAQHVEECSCYPRYPSVRCVCRDNWKGSNRPIVDINIKDHSIVSSYVCSGLVGDTPRKNDSSSSSHCLDPNNEEGGHGVKGWAFDDGNDVWMGRTINETSRLGYETFKVIEGWSNPKSKLQINRQVIVDRGNRSGYSGIFSVEGKSCINRCFYVELIRGRKEETEVLWTSNSIVVFCGTSGTYGTGSWPDGADLNLMPI

SEQ ID NO: 24040 - protein, 469 aa, synthetic construct; identical to SEQ ID NO: 24007
  REGION 1..469: note = neuraminidase__InfluenzaA__AHC59044

SEQ ID NO: 24041 - protein, 469 aa, synthetic construct; identical to SEQ ID NO: 19518
  REGION 1..469: note = neuraminidase__InfluenzaA__AHC59056

SEQ ID NO: 24042 - protein, 469 aa, synthetic construct; identical to SEQ ID NO: 23971
  REGION 1..469: note = neuraminidase__InfluenzaA__AHC59068

SEQ ID NO: 24043 - protein, 469 aa, synthetic construct; identical to SEQ ID NO: 23971
  REGION 1..469: note = neuraminidase__InfluenzaA__AHC59080

SEQ ID NO: 24044 - protein, 469 aa, synthetic construct
  REGION 1..469: note = neuraminidase__InfluenzaA__AHC59092
MNPNQKIITIGSVSLTISTICFFMQIAILVTTVTLHFKQYEFNSPPNNQVMLCEPTIIERNITEIVYLTNTTIEKEICPKPAEYRNWSKPQCDITGFAPFSKDNSIRLSAGGDIWVTREPYVSCDPDKCYQFALGQGTTLNNVHSNNTVRDRTPYRTLLMNELGVPFHLGTKQVCIAWSSSSCHDGKAWLHVCITGDDKNATASFIYNGRLVDSVVSWSKEILRTQESECVCINGTCTVVMTDGSASGKADTKILFIEEGKIVHTSTLSGSAQHVEECSCYPRYPGVRCVCRDNWKGSNRPIVDINIKDHSIVSSYVCSGLVGDTPRKNDSSSSGHCLDPNNEEGGHGVKGWAFDDGNDVWMGRTINETSRLGYETFKVIEGWSNPKSKLQINRQVIVDRGDRSGYSGIFSVEGKSCINRCFYVELIRGRKEETEVLWTSNSIVVFCGTSGTYGTGSWPDGADLNLMPI

SEQ ID NO: 24045 - protein, 469 aa, synthetic construct
  REGION 1..469: note = neuraminidase__InfluenzaA__AHC59104
MNPNQKIITIGSVSLTISTICFFMQIAILITTVTLHFKQYEFYSPPNNQVMLCEPTIIKRNITEIVYLTNTTIEKEICPKLAEYRNWSKPQCDITGFAPFSKDNSIRLSAGGDIWVTREPYVSCDPDKCYQFALGQGTTLNNVHSNNTVRDRTPYRTLLMNELGVPFHLGTKQVCIAWSSSSCHDGKAWLHVCITGDDKNATASFIYNGRLVDSVVSWSKEILRTQESECVCINGTCTVVMTDGSASGKADTKILFIEEGKIVHTSTLSGSAQHVEECSCYPRYPGVRCVCRDNWKGSNRPIVDINIKDHSIVSSYVCSGLVGDTPRKNDSSSSSHCLDPNNEEGGHGVKGWAFDDGNDVWMGRTINETSRLGYETFKVIEGWSNPKSKLQINRQVIVDRGNRSGYSGIFSVEGKSCINRCFYVELIRGRKEETEVLWTSNSIVVFCGTSGTYGTGSWPDGADLNLMPI

SEQ ID NO: 24046 - protein, 469 aa, synthetic construct
  REGION 1..469: note = neuraminidase__InfluenzaA__AHC59116
MNPNQKIITIGSVSLTISTICFFMQIAILITTVTLHFKQYEFNSPPNNQVMLCEPTIIERNITEIVYLTNTTIEKEICPKLAEYRNWSKPQCDITGFAPFSKDNSIRLSAGGDIWVTREPYVSCDPNKCYQFALGQGTTLNNVHSNNTVRDRTPYRTLLMNELGVPFHLGTKQVCIAWSSSSCHDGKAWLHVCITGDDKNATASFIYNGKLVDSVVSWSKEILRTQESECVCINGTCTVVMTDGSASGKADTKILFIEEGKIVHTSTLSGSAQHVEECSCYPRYPGVRCVCRDNWKGSNRPIVDINIKDHSIVSSYVCSGLVGDTPRKNDSSSSSHCLDPNNEEGGHGVKGWAFDDGNDVWMGRTINETSRLGYETFKVIEGWSNPKSKLQINRQVIVDRGNRSGYSGIFSVEGKSCINRCFYVELIRGREEETEVLWTSNSIVVFCGTSGTYGTGSWPDGADLNLMPI

SEQ ID NO: 24047 - protein, 469 aa, synthetic construct
  REGION 1..469: note = neuraminidase__InfluenzaA__AHC59128
MNPNQKIITIGSVSLTISTICFFMQIAILITTVTLHFKQYEFYSPPNNQVMLCEPTIMERNITEIVYLTNTTIEKEICPKLAEYRNWSKPQCDITGFAPFSKDNSIRLSAGGDIWVTREPYVSCDPDKCYQFALGQGTTLNNVHSNNTVRDRTPYRTLLMNELGVPFHLGTKQVCIAWSSSSCHDGKAWLHVCVTGDDKNATASFIYNGRLVDSVVSWSKEILRTQESECVCINGTCTVVMTDGSASGKADTKILFIEEGKIVHTSTLSGSAQHVEECSCYPRYPGVRCVCRDNWKGSNRPIVDINIKDHSIVSSYVCSGLVGDTPRKNDSSSSSHCLDPNNEEGGHGVKGWAFDDGNDVWMGRTINETSRLGYETFKVIEGWSNPKSKLQINRQVIVDRGNRSGYSGIFSVEGKSCINRCFYVELIRGRKEETEVLWTSNSIVVFCGTSGTYGTGSWPDGADLNLMPI

SEQ ID NO: 24048 - protein, 469 aa, synthetic construct
  REGION 1..469: note = neuraminidase__InfluenzaA__AHC59152
MNPNQKIITIGSVSLTISTICFFMQVAILITTVTLHFKQYEFNSPPNNQVMLCEPTIIERNITEILYLTNTTIEKEICPKLAEYRNWSKPQCDITGFAPFSKDNSIRLSAGGDIWVTREPYVSCDPDKCYQFALGQGTTLNNVHSNNTVRDRTPYRTLLMNELGVPFHLGTKQVCIAWSSSSCHDGKAWLHVCITGDDKNATASFIYNGKLVDSVVSWSKEILRTQESECVCINGTCTVVMTDGSASGKADTKILFIEEGKIVHTSTLSGSAQHVEECSCYPRYPGVRCVCRDNWKGSNRPIVDINIKDHSIVSSYVCSGLVGDTPRKNDSSSSSHCLDPNNEEGGHGVKGWAFDDGNDVWMGRTINETSRLGYETFKVIEGWSNPKSKLQINRQVIVDRGNRSGYSGIFSVEGKSCINRCFYVELIRGRKEETEVLWTSNSIVVFCGTSGTYGTGSWPDGADLNLMPI

SEQ ID NO: 24049 - protein, 469 aa, synthetic construct
  REGION 1..469: note = neuraminidase__InfluenzaA__AHC59188
MNPNQKIITIGSVSLTISTICFFMQIAILITTVTLHFKQYEFNPPPNNQVVLCEPTIIERNITEIVYLTNTTIEKEICPKLAEYRNWSKPQCDITGFAPFSKDNSIRLSAGGDIWVTREPYVSCDPDKCYQFALGQGTTLNNVHSNNTVRDRTPYRTLLMNELGVPFHLGTKQVCIAWSSSSCHDGKAWLHVCITGDDKNATASFIYNGRLVDSVVSWSKEILRTQESECVCINGTCTVVMTDGSASGKADTKILFIEEGKIVHTSTLSGSAQHVEECSCYPRYPGVRCVCRDNWKGSNRPIVDINIKDHSIVSSYVCSGLVGDTPRKNDSSSSSHCLDPNNEEGGHGVKGWAFDDGNDVWMGRTINETSRLGYETFKVIEGWSNPKSKLQINRQVIVDRGDRSGYSGIFSVEGKSCINRCFYVELIRGRKEETEVLWTSNSIVVFCGTSGTYGTGSWPDGADLNLMPI

SEQ ID NO: 24050 - protein, 469 aa, synthetic construct; identical to SEQ ID NO: 19518
  REGION 1..469: note = neuraminidase__InfluenzaA__AHC59200

SEQ ID NO: 24051 - protein, 469 aa, synthetic construct
  REGION 1..469: note = neuraminidase__InfluenzaA__AHC59212
MNPNQKIITIGSVSLTISTICFFMQIATLITTVTLHFKQYEFNSPPNNQVMLCEPTIIERNITEIVYLTNTTIEKEICPKLAEYRNWSKPQCDITGFAPFSKDNSIRLSAGGDIWVTREPYVSCDPDKCYQFALGQGTTLNNVHSNNTVRDRTPYRTLLMNELGVPFHLGTKQVCIAWSSSSCHDGKAWLHVCITGDDKNATASFIYNGRLVDSVVSWSKEILRTQESECVCINGTCTVVMTDGSASGKADTKILFIEEGKIVHTSTLSGSAQHVEECSCYPRYPGVRCVCRDNWKGSNRPIVDINIKDHSIVSSYVCSGLVGDTPRKNDSSSSSHCLDPNNEEGGHGVKGWAFDDGNDVWMGRTINETSRLGYETFKVIEGWSNPKSKLQINRQVIVDRGDRSGYSGIFSVEGKSCINRCFYVELIRGRKEETEVLWTSNSIVVFCGTSGTYGTGSWPDGADLNLMPI

SEQ ID NO: 24052 - protein, 469 aa, synthetic construct; identical to SEQ ID NO: 23975
  REGION 1..469: note = neuraminidase__InfluenzaA__AHC59224

SEQ ID NO: 24053 - protein, 469 aa, synthetic construct
  REGION 1..469: note = neuraminidase__InfluenzaA__AHC59236
MNPNQKIITIGSVSLTISTICFFMQIAILITTVTLHFKQYEFYSPPNNQVMLCEPTIIERNITEIVYLTNTTIEKEICPKLAEYRNWSKPQCDITGFAPFSKDNSIRLSAGGDIWVTREPYVSCDPDKCYQFALGQGTTLNNVHSNNTVHDRTPYRTLLMNELGVPFHLGTKQVCIAWSSSSCHDGKAWLHVCITGDDKNATASFIYNGRLVDSVVSWSKEILRTQESECVCINGTCTVVMTDGSASGKADTKILFIEEGKIVHTSTLSGSAQHVEECSCYPRYPGVRCVCRDNWKGSNRPIVDINIKDHSIVSSYVCSGLVGDTPRKNDSSSSSHCLDPNNEEGGHGVKGWAFDDGNDVWMGRTINETSRLGYETFKVIEGWSNPKSKLQINRQVIVDRGNRSGYSGIFSVEGKSCINRCFYVELIRGRKEETEVLWTSNSIVVFCGTSGTYGTGSWPDGADLNLMPI

SEQ ID NO: 24054 - protein, 469 aa, synthetic construct; identical to SEQ ID NO: 23975
  REGION 1..469: note = neuraminidase__InfluenzaA__AHC59260

SEQ ID NO: 24055 - protein, 469 aa, synthetic construct; identical to SEQ ID NO: 23971
  REGION 1..469: note = neuraminidase__InfluenzaA__AHC59272

SEQ ID NO: 24056 - protein, 469 aa, synthetic construct; identical to SEQ ID NO: 23975
  REGION 1..469: note = neuraminidase__InfluenzaA__AHC59284

SEQ ID NO: 24057 - protein, 469 aa, synthetic construct
  REGION 1..469: note = neuraminidase__InfluenzaA__AHC59296
MNPNQKIITIGSVSLTISTICFFMQIAILITTVTLHFKQYEFNSPPNNQVMLCEPTIIERNITEIVYLTNTTIEKEICPKLAEYRNWSKPQCDITGFAPFSKDNSIRLSAGGDIWVTREPYVSCDPNKCYQFALGQGTTLNNVHSNNTVRDRTPYRTLLMNELGVPFHLGTKQVCIAWSSSSCHDGKAWLHVCITGDDKNATASFIYNGKLVDSVVSWSKEILRTQESECVCINGTCTVVMTDGSASGKADTKILFIEEGKIVHTSTLSGSAQHVEECSCYPRYPGVRCVCRDNWKGSNRPIVDIKIKDHSIVSSYVCSGLVGDTPRKNDSSSSSHCLDPNNEEGGHGVKGWAFDDGNDVWMGRTINETSRLGYETFKVIEGWSNPKSKLQINRQVIVDRGNRSGYSGIFSVEGKSCINRCFYVELIRGRKEETEVLWTSNSIVVFCGTSGTYGTGSWPDGADLNLMPI

SEQ ID NO: 24058 - protein, 469 aa, synthetic construct
  REGION 1..469: note = neuraminidase__InfluenzaA__AHC59308
MNPNQKIITIGSVSLTISTICFFMQIAILITTVTLHFKQYEFNPPPNNQVMLCEPTIIERNITEIVYLTNTTIEKEICPKLAEYRNWSKPQCDITGFAPFSKDNSIRLSAGGDIWVTREPYVSCDPNKCYQFALGQGTTLNNVHSNNTVRDRTPYRTLLMNELGVPFHLGTKQVCIAWSSSSCHDGKAWLHVCITGDDKNATASFIYNGKLVDSVVSWSKEILRTQESECVCINGTCTVVMTDGSASGKADTKILFIEEGKIVHTSTLSGSAQHVEECSCYPRYPGVRCVCRDNWKGSNRPIVDINIKDHSIVSSYVCSGLVGDTPRKNDSSSSSHCLDPNNEEGGHGVKGWAFDDGNDVWMGRTINETSRLGYETFKVIEGWSNPKSKLQINRQVMVDRGNRSGYSGIFSVEGKSCINRCFYVELIRGRKEETEVLWTSNSIVVFCGTSGTYGTGSWPDGADLNLMPI

SEQ ID NO: 24059 - protein, 469 aa, synthetic construct; identical to SEQ ID NO: 23883
  REGION 1..469: note = neuraminidase__InfluenzaA__AHC59320

SEQ ID NO: 24060 - protein, 469 aa, synthetic construct; identical to SEQ ID NO: 22146
  REGION 1..469: note = neuraminidase__InfluenzaA__AHC59332

SEQ ID NO: 24061 - protein, 469 aa, synthetic construct; identical to SEQ ID NO: 24019
  REGION 1..469: note = neuraminidase__InfluenzaA__AHC59344

SEQ ID NO: 24062 - protein, 469 aa, synthetic construct
  REGION 1..469: note = neuraminidase__InfluenzaA__AHC59368
MNPNQKIITIGSVSLTISTICFFMQIAILITTVTLHFKQYEFNSPPNNQVMLCEPTIIERNITEIVYLTNTTIEKEICPKLAEYRNWSKPQCDITGFAPFSKDNSIRLSAGGDIWVTREPYVSCDPNKCYQFALGQGTTLNNVHSNNTVRDRTPYRTLLMNELGVPFHLGTKQVCIAWSSSSCHDGKAWLHVCITGDDKNATASFIYNGKLVDSVVSWSKEILRTQESECVCINGTCTVVMTDGSASGKADTKILFIEEGKIVHTSTLSGSAQHVEECSCYPRYPGVRCVCRDNWKGSNRPIVDINIKDHSIVSSYVCSGLVGDTPRKNDSSSSSHCLDPNNEEGGHGVKGWAFDDGNDVWMGRTIDETSRLGYETFKVIEGWSNPKSKLQINRQVIVDRGNRSGYSGIFSVEGKSCINRCFYVELIRGRKEETEVLWTSNSIVVFCGTSGTYGTGSWPDGADLNLMPI

SEQ ID NO: 24063 - protein, 469 aa, synthetic construct; identical to SEQ ID NO: 23971
  REGION 1..469: note = neuraminidase__InfluenzaA__AHC59380

SEQ ID NO: 24064 - protein, 469 aa, synthetic construct; identical to SEQ ID NO: 22922
  REGION 1..469: note = neuraminidase__InfluenzaA__AHC59392

SEQ ID NO: 24065 - protein, 469 aa, synthetic construct; identical to SEQ ID NO: 24007
  REGION 1..469: note = neuraminidase__InfluenzaA__AHC59404

SEQ ID NO: 24066 - protein, 469 aa, synthetic construct; identical to SEQ ID NO: 23975
  REGION 1..469: note = neuraminidase__InfluenzaA__AHC59416

SEQ ID NO: 24067 - protein, 469 aa, synthetic construct
  REGION 1..469: note = neuraminidase__InfluenzaA__AHC59428
MNPNQKIITIGSVSLTISTICFFMQIAILITTVTLHFKQYEFYSPPNNQVMLCEPTIIERNITEIVYLTNTTIEKEICPKLAEYRNWSKPQCDITGFAPFSKDNSIRLSAGGDIWVTREPYVSCDPDRCYQFALGQGTTLNNVHSNNTVRDRTPYRTLLMNELGVPFHLGTKQVCIAWSSSSCHDGKAWLHVCITGDDKNATASFIYNGRLVDSVVSWSKEILRTQESECVCINGTCTVVMTDGSASGKADTKILFIEEGKIVHTSTLSGSAQHVEECSCYPRYPGVRCVCRDNWKGSNRPIVDINIKDHSIVSSYVCSGLVGDTPRKNDSSSSSHCLDPNNEEGGHGVKGWAFDDGNDVWMGRTINETSRLGYETFKVIEGWSNPKSKLQINRQVIVDRGNRSGYSGIFSVEGKSCINRCFYVELIRGRKEETEVLWTSNSIVVFCGTSGTYGTGSWPDGADLNLMPI

SEQ ID NO: 24068 - protein, 469 aa, synthetic construct
  REGION 1..469: note = neuraminidase__InfluenzaA__AHC59440
MNPNQKIITIGSVSLTISTICFFMQIAILITTVTLHFKQYEFNSPPNNQVMLCEPTIIERNITEIVYLTNTTIEKEICPKPAEYRNWSKPQCDITGFAPFSKDNSIRLSAGGDIWVTREPYVSCDPDKCYQFALGQGTTLNNVHSNNTVRDRTPYRTLLMNELGVPFHLGTKQVCIAWSSSSCHDGKAWLHVCITGDDKNATASFIYNGRLVDSVVSWSKEILRTQESECVCINGTCTVVMTDGSASGKADTKILFIEEGKIVQTSTLSGSAQHVEECSCYPRYPGVRCVCRDNWKGSNRPIVDINIKDHSIVSSYVCSGLVGDTPRKNDSSSSSHCLDPNNEEGGHGVKGWAFDDGNDVWMGRTINETSRLGYETFKVIEGWSNPKSKLQINRQVIVDRGDRSGYSGIFSVEGKSCINRCFYVELIRGRKEETEVLWTSNSIVVFCGTSGTYGTGSWPDGADLNLMPI

SEQ ID NO: 24069 - protein, 469 aa, synthetic construct; identical to SEQ ID NO: 23975
  REGION 1..469: note = neuraminidase__InfluenzaA__AHC59452

SEQ ID NO: 24070 - protein, 469 aa, synthetic construct; identical to SEQ ID NO: 19518
  REGION 1..469: note = neuraminidase__InfluenzaA__AHC59464

SEQ ID NO: 24071 - protein, 469 aa, synthetic construct; identical to SEQ ID NO: 23883
  REGION 1..469: note = neuraminidase__InfluenzaA__AHC59476

SEQ ID NO: 24072 - protein, 469 aa, synthetic construct; identical to SEQ ID NO: 23975
  REGION 1..469: note = neuraminidase__InfluenzaA__AHC59488

SEQ ID NO: 24073 - protein, 469 aa, synthetic construct; identical to SEQ ID NO: 23975
  REGION 1..469: note = neuraminidase__InfluenzaA__AHC59500

SEQ ID NO: 24074 - protein, 469 aa, synthetic construct; identical to SEQ ID NO: 24020
  REGION 1..469: note = neuraminidase__InfluenzaA__AHC59512

SEQ ID NO: 24075 - protein, 469 aa, synthetic construct; identical to SEQ ID NO: 24020
  REGION 1..469: note = neuraminidase__InfluenzaA__AHC59524

SEQ ID NO: 24076 - protein, 469 aa, synthetic construct; identical to SEQ ID NO: 24007
  REGION 1..469: note = neuraminidase__InfluenzaA__AHC59536

SEQ ID NO: 24077 - protein, 469 aa, synthetic construct; identical to SEQ ID NO: 23975
  REGION 1..469: note = neuraminidase__InfluenzaA__AHC59548

SEQ ID NO: 24078 - protein, 469 aa, synthetic construct; identical to SEQ ID NO: 23975
  REGION 1..469: note = neuraminidase__InfluenzaA__AHC59560

SEQ ID NO: 24079 - protein, 469 aa, synthetic construct; identical to SEQ ID NO: 24053
  REGION 1..469: note = neuraminidase__InfluenzaA__AHC59572

SEQ ID NO: 24080 - protein, 469 aa, synthetic construct; identical to SEQ ID NO: 24048
  REGION 1..469: note = neuraminidase__InfluenzaA__AHC59584

SEQ ID NO: 24081 - protein, 469 aa, synthetic construct; identical to SEQ ID NO: 24020
  REGION 1..469: note = neuraminidase__InfluenzaA__AHC59596

SEQ ID NO: 24082 - protein, 469 aa, synthetic construct; identical to SEQ ID NO: 22922
  REGION 1..469: note = neuraminidase__InfluenzaA__AHC59608

SEQ ID NO: 24083 - protein, 469 aa, synthetic construct; identical to SEQ ID NO: 24007
  REGION 1..469: note = neuraminidase__InfluenzaA__AHC59620

SEQ ID NO: 24084 - protein, 469 aa, synthetic construct; identical to SEQ ID NO: 23975
  REGION 1..469: note = neuraminidase__InfluenzaA__AHC59632

SEQ ID NO: 24085 - protein, 469 aa, synthetic construct; identical to SEQ ID NO: 23975
  REGION 1..469: note = neuraminidase__InfluenzaA__AHC59644

SEQ ID NO: 24086 - protein, 469 aa, synthetic construct
  REGION 1..469: note = neuraminidase__InfluenzaA__AHC59656
MNPNQKIITIGSVSLTISTICFFMQIAILITTVTMHFKQYEFNSPPNNQVMLCEPTIIERNITEIVYLTNTTIEKEICPKLAEYRNWSKPQCDITGFAPFSKDNSIRLSAGGDIWVTREPYVSCDPVKCYQFALGQGTTLNNVHSNNTVRDRTPYRTLLMNELGVPFHLGTKQVCIAWSSSSCHDGKAWLHVCITGDDKNATASFIYNGKLVDSVVSWSKEILRTQESECVCINGTCTVVMTDGSASGKADTKILFIEEGKIVHTSTLSGSAQHVEECSCYPRYPGVRCVCRDNWKGSNRPIVDINIKDHSIVSSYVCSGLVGDTPRKNDSSSSSHCLDPNNEEGGHGVKGWAFDDGNDVWMGRTINETSRLGYETFKVIEGWSNPKSKLQINRQVIVDRGNRSGYSGIFSVEGKSCINRCFYVELIRGRKEETEVLWTSNSIVVFCGTSGTYGTGSWPDGADLNLMPI

SEQ ID NO: 24087 - protein, 469 aa, synthetic construct; identical to SEQ ID NO: 24020
  REGION 1..469: note = neuraminidase__InfluenzaA__AHC59668

SEQ ID NO: 24088 - protein, 469 aa, synthetic construct; identical to SEQ ID NO: 24048
  REGION 1..469: note = neuraminidase__InfluenzaA__AHC59680

SEQ ID NO: 24089 - protein, 469 aa, synthetic construct; identical to SEQ ID NO: 23975
  REGION 1..469: note = neuraminidase__InfluenzaA__AHC59704

SEQ ID NO: 24090 - protein, 469 aa, synthetic construct; identical to SEQ ID NO: 19518
  REGION 1..469: note = neuraminidase__InfluenzaA__AHC59716

SEQ ID NO: 24091 - protein, 469 aa, synthetic construct; identical to SEQ ID NO: 19518
  REGION 1..469: note = neuraminidase__InfluenzaA__AHC59728

SEQ ID NO: 24092 - protein, 469 aa, synthetic construct; identical to SEQ ID NO: 24020
  REGION 1..469: note = neuraminidase__InfluenzaA__AHC59752

SEQ ID NO: 24093 - protein, 469 aa, synthetic construct; identical to SEQ ID NO: 24007
  REGION 1..469: note = neuraminidase__InfluenzaA__AHC59764

SEQ ID NO: 24094 - protein, 469 aa, synthetic construct
  REGION 1..469: note = neuraminidase__InfluenzaA__AHC59776
MNPNQKIITIGSVSLTISTICFFMQIAILITTVTLHFKQYEFYSPPNNQVMLCEPTIIERNITEIVYLTNTTIEKEICPKLAEYRNWSKPQCDITGFAPFSKDNSIRLSAGGDIWVTREPYVSCDPDKCYQFALGQGTTLNNVHSNNTVRDRTPYRTLLMNELGVPFHLGTKQVCIAWSSSSCHDGKAWLHVCITGDDKNATASFIYNGKLVDSVVSWSKEILRTQESECVCINGTCTVVMTDGSASGKADTKILFIEEGKIVHTSTLSGSAQHVEECSCYPRYPGVRCVCRDNWKGSNRPIVDINIKDHSIVSSYVCSGLVGDTPRKNDSSSSSHCLDPNNEEGGHGVKGWAFDDGNDVWMGRTINETSRLGYETFKVIEGWSNPKSKLQINRQVIVDRGNRSGYSGIFSVEGKSCINRCFYVELIRGRKEETEVLWTSNSIVVFCGTSGTYGTGSWPDGADLNLMPI

SEQ ID NO: 24095 - protein, 469 aa, synthetic construct; identical to SEQ ID NO: 23971
  REGION 1..469: note = neuraminidase__InfluenzaA__AHC59788

SEQ ID NO: 24096 - protein, 469 aa, synthetic construct; identical to SEQ ID NO: 24048
  REGION 1..469: note = neuraminidase__InfluenzaA__AHC59800

SEQ ID NO: 24097 - protein, 469 aa, synthetic construct
  REGION 1..469: note = neuraminidase__InfluenzaA__AHC59812
MNPNQKIITIGSVSLTISTICFFMQIAILITTVTLHFKQYEFNSPPNNQVVLCEPTIIERNITEIVYLTNTTIEKEICPKPAEYRNWSKPQCDITGFAPFSKDNSIRLSAGGDIWVTREPYVSCDPDKCYQFALGQGTTLNNVHSNNTVRDRTPYRTLLMNELGVPFHLGTKQVCIAWSSSSCHDGKAWLHVCITGDDKNATASFIYNGRLVDSVVSWSKEILRTQESECVCINGTCTVVMTDGSASGKADTKILFIEEGKIVYTSTLSGSAQHVEECSCYPRYPGVRCVCRDNWKGSNRPIVDINIKDHSIVSSYVCSGLVGDTPRKNDSSSSSHCLDPNNEEGGHGVKGWAFDDGNDVWMGRTINETSRLGYETFKVIEGWSNPKSKLQINRQVIVDRGDRSGYSGIFSVEGKSCINRCFYVELIRGRKEETEVLWTSNSIVVFCGTSGTYGTGSWPDGADLNLMPI

SEQ ID NO: 24098 - protein, 469 aa, synthetic construct
  REGION 1..469: note = neuraminidase__InfluenzaA__AHC59824
MNPNQKIITIGSVSLTISTICFFMQIAILITTVTLHFKQYEFYSPPNNQVMLCEPTIIERNITEIVYLTNTTIEKEICPKLAEYRKWSKPQCDITGFAPFSKDNSIRLSAGGDIWVTREPYVSCDPDKCYQFALGQGTTLNNVHSNNTVRDRTPYRTLLMNELGVPFHLGTKQVCIAWSSSSCHDGKAWLHVCITGDDKNATASFIYNGRLVDSVVSWSKEILRTQESECVCINGTCTVVMTDGSASGKADTKILFIEEGKIVHTSTLSGSAQHVEECSCYPRYPGVRCVCRDNWKGSNRPIVDINIKDHSIVSSYVCSGLVGDTPRKNDSSSSSHCLDPNNEEGGHGVKGWAFDDGNDVWMGRTINETSRLGYETFKVIEGWSNPKSKLQINRQVIVDRGNRSGYSGIFSVEGKSCINRCFYVELIRGRKEETEVLWTSNSIVVFCGTSGTYGTGSWPDGADLNLMPI

SEQ ID NO: 24099 - protein, 469 aa, synthetic construct; identical to SEQ ID NO: 23975
  REGION 1..469: note = neuraminidase__InfluenzaA__AHC59836

SEQ ID NO: 24100 - protein, 469 aa, synthetic construct; identical to SEQ ID NO: 22922
  REGION 1..469: note = neuraminidase__InfluenzaA__AHC59848

SEQ ID NO: 24101 - protein, 469 aa, synthetic construct; identical to SEQ ID NO: 23971
  REGION 1..469: note = neuraminidase__InfluenzaA__AHC59860

SEQ ID NO: 24102 - protein, 469 aa, synthetic construct; identical to SEQ ID NO: 24018
  REGION 1..469: note = neuraminidase__InfluenzaA__AHC59872

SEQ ID NO: 24103 - protein, 469 aa, synthetic construct; identical to SEQ ID NO: 24007
  REGION 1..469: note = neuraminidase__InfluenzaA__AHC59884

SEQ ID NO: 24104 - protein, 469 aa, synthetic construct
  REGION 1..469: note = neuraminidase__InfluenzaA__AHC59895
MNPNQKIITIGSVSLTISTICFFMQIAILITTVTLHFKQYEFNSPPNNQVMLCEPTIIERNITEIVYLTNTTIEKEICPKLAEYRNWSKPQCDITGFAPFSKDNSIRLSAGGDIWVTREPYVSCDPDKCYQFALGQGTTLNNVHSNNTVRDRTPYRTLLMNELGVPFHLGTKQVCIAWSSSSCHDGKAWLHVCITGDDKNATASFIYNGRLVDSVVSWSKEILRTQESECVCINGTCTVVMTDGSASGKADTKILFIKEGKIVHTSTLSGSAQHVEECSCYPRYPGVRCVCRDNWKGSNRPIVDINIKDHSIVSSYVCSGLVGDTPRKNDSSSSSHCLDPNNEEGGHGVKGWAFDDGNDVWMGRTINETSRLGYETFKVIEGWSNPKSKLQINRQVIVDRGNRSGYSGIFSVEGKSCINRCFYVELIRGRKEETEVLWTSNSIVVFCGTSGTYGTGSWPDGADLNLMPI

SEQ ID NO: 24105 - protein, 469 aa, synthetic construct; identical to SEQ ID NO: 23975
  REGION 1..469: note = neuraminidase__InfluenzaA__AHC59907

SEQ ID NO: 24106 - protein, 469 aa, synthetic construct
  REGION 1..469: note = neuraminidase__InfluenzaA__AHC59918
MNPNQKIITIGSVSLTISTICFFIQIAILITTVTLHFKQYEFNSPPNNQVMLCEPTIIERNITEIVYLTNTTIEKEICPKLAEYRNWSKPQCDITGFAPFSKDNSIRLSAGGDIWVTREPYVSCDPDKCYQFALGQGTTLNNVHSNNTVRDRTPYRTLLMNELGVPFHLGTKQVCIAWSSSSCHDGKAWLHVCITGDDKNATASFIYNGRLVDSVVSWSKEILRTQESECVCINGTCTVVMTDGSASGKADTKILFIEEGKIVHTSTLSGSAQHVEECSCYPRYPGVRCVCRDNWKGSNRPIVDINIKDHSIVSSYVCSGLVGDTPRKNDSSSSSHCLDPNNEEGGHGVKGWAFDDGNDVWMGRTINETSRLGYETFKVIEGWSNPKSKLQMNRQVIVDRGNRSGYSGIFSVEGKSCINRCFYVELIRGRKEETEVLWTSNSIVVFCGTSGTYGTGSWPDGADLNLMPI

SEQ ID NO: 24107 - protein, 469 aa, synthetic construct; identical to SEQ ID NO: 24106
  REGION 1..469: note = neuraminidase__InfluenzaA__AHC59930

SEQ ID NO: 24108 - protein, 469 aa, synthetic construct; identical to SEQ ID NO: 23975
  REGION 1..469: note = neuraminidase__InfluenzaA__AHC59942

SEQ ID NO: 24109 - protein, 469 aa, synthetic construct; identical to SEQ ID NO: 24020
  REGION 1..469: note = neuraminidase__InfluenzaA__AHC59954

SEQ ID NO: 24110 - protein, 469 aa, synthetic construct
  REGION 1..469: note = neuraminidase__InfluenzaA__AHC59966
MNPNQKIITIGSVSLTISTICFFMQIAILITTVTLHFKQYEFNSSPNNQVMLCEPTIIERNITEIVYLTNTTIEKEICPKPAEYRNWSKPQCDITGFAPFSKDNSIRLSAGGDIWVTREPYVSCDPDKCYQFALGQGTTLNNVHSNNTVRDRTPYRTLLMNELGVPFHLGTKQVCIAWSSSSCHDGKAWLHVCITGDDKNATASFIYNGRLVDSVVSWSKEILRTQESECVCINGTCTVVMTDGSASGKADTKILFIEEGKIVHTSTLSGSAQHVEECSCYPRYPGVRCVCRDNWKGSNRPIVDINIKDHSIVSSYVCSGLVGDTPRKNDSSSSSHCLDPNNEEGGHGVKGWAFDDGNDVWMGRTINETSRLGYETFKVIEGWSNPKSKLQINRQVIVDRGDGSGYSGIFSVEGKSCINRCFYVELIRGRKEETEVLWTSNSIVVFCGTSGTYGTGSWPDGADLNLMPI

SEQ ID NO: 24111 - protein, 469 aa, synthetic construct; identical to SEQ ID NO: 22922
  REGION 1..469: note = neuraminidase__InfluenzaA__AHC59978

SEQ ID NO: 24112 - protein, 469 aa, synthetic construct; identical to SEQ ID NO: 20884
  REGION 1..469: note = neuraminidase__InfluenzaA__AHC59990

SEQ ID NO: 24113 - protein, 469 aa, synthetic construct; identical to SEQ ID NO: 24020
  REGION 1..469: note = neuraminidase__InfluenzaA__AHC60002

SEQ ID NO: 24114 - protein, 469 aa, synthetic construct; identical to SEQ ID NO: 23975
  REGION 1..469: note = neuraminidase__InfluenzaA__AHC60014

SEQ ID NO: 24115 - protein, 469 aa, synthetic construct; identical to SEQ ID NO: 19518
  REGION 1..469: note = neuraminidase__InfluenzaA__AHC60026

SEQ ID NO: 24116 - protein, 469 aa, synthetic construct; identical to SEQ ID NO: 23971
  REGION 1..469: note = neuraminidase__InfluenzaA__AHC60038

SEQ ID NO: 24117 - protein, 469 aa, synthetic construct; identical to SEQ ID NO: 23971
  REGION 1..469: note = neuraminidase__InfluenzaA__AHC60050

SEQ ID NO: 24118 - protein, 469 aa, synthetic construct
  REGION 1..469: note = neuraminidase__InfluenzaA__AHC60062
MNPNQKIITIGSVSLTISTICFFMQIAILITTVTMHFKQYEFNSPPNNQVMLCEPTIIERNITEIVYLTNTTIEKEICPKLAEYRNWSKPQCDITGFAPFSKDNSIRLSAGGDIWVTREPYVSCDPDKCYQFALGQGTTLNNVHSNNTVRDRTPYRTLLMNELGVPFHLGTKQVCIAWSSSSCHDGKAWLHVCITGDDKNATASFIYNGKLVDSVVSWSKEILRTQESECVCINGTCTVVMTDGSASGKADTKILFIEEGKIVHTSTLSGSAQHVEECSCYPRYPGVRCVCRDNWKGSNRPIVDINIKDHSIVSSYVCSGLVGDTPRKNDSSSSSHCLDPNNEEGGHGVKGWAFDDGNDVWMGRTINETSRLGYETFKVIEGWSNPKSKLQINRQVIVDRGNRSGYSGIFSVEGKSCINRCFYVELIRGRKEETEVLWTSNSIVVFCGTSGTYGTGSWPDGADLNLMPI

SEQ ID NO: 24119 - protein, 469 aa, synthetic construct; identical to SEQ ID NO: 22922
  REGION 1..469: note = neuraminidase__InfluenzaA__AHC60074

SEQ ID NO: 24120 - protein, 469 aa, synthetic construct; identical to SEQ ID NO: 23975
  REGION 1..469: note = neuraminidase__InfluenzaA__AHC60086

SEQ ID NO: 24121 - protein, 469 aa, synthetic construct
  REGION 1..469: note = neuraminidase__InfluenzaA__AHC60098
MNPNQKIITIGSVSLTISTICFFMQIAILITTVTLHFKQYEFYSPPNNQVMLCEPTIIERNITEIVYLTNTTIEKEICPKLAEYRNWSKPQCDITGFAPFSKDNSIRLSAGGDIWVTREPYVSCDPDKCYQFALGQGTTLNNVHSNNTVRDRTPYRTLLMNELGVPFHLGTKQVCIAWSSSSCHDGKAWLHVCITGDDKNATASFIYNGRLVDSVVSWSKEILRTQESECVCINGTCTVVMTDGSASGKADTKILFIEEGKIVHTSTLSGSAQHVEECSCYPRYPGVRCVCRDNWKGSNRPIVDINIKDHSIVSSYVCSGLVGDTPRKNDSSSSSHCLDPNNEEGGHGVKGWAFDDGNDVWMGRTIDETSRLGYETFKVIEGWSNPKSKLQINRQVIVDRGNRSGYSGIFSVEGKSCINRCFYVELIRGRKEETEVLWTSNSIVVFCGTSGTYGTGSWPDGADLNLMPI

SEQ ID NO: 24122 - protein, 469 aa, synthetic construct; identical to SEQ ID NO: 23971
  REGION 1..469: note = neuraminidase__InfluenzaA__AHC60110

SEQ ID NO: 24123 - protein, 469 aa, synthetic construct; identical to SEQ ID NO: 24048
  REGION 1..469: note = neuraminidase__InfluenzaA__AHC60122

SEQ ID NO: 24124 - protein, 469 aa, synthetic construct; identical to SEQ ID NO: 23975
  REGION 1..469: note = neuraminidase__InfluenzaA__AHC60134

SEQ ID NO: 24125 - protein, 469 aa, synthetic construct; identical to SEQ ID NO: 24029
  REGION 1..469: note = neuraminidase__InfluenzaA__AHC60146

SEQ ID NO: 24126 - protein, 469 aa, synthetic construct; identical to SEQ ID NO: 24106
  REGION 1..469: note = neuraminidase__InfluenzaA__AHC60158

SEQ ID NO: 24127 - protein, 469 aa, synthetic construct; identical to SEQ ID NO: 23971
  REGION 1..469: note = neuraminidase__InfluenzaA__AHC60182

SEQ ID NO: 24128 - protein, 469 aa, synthetic construct
  REGION 1..469: note = neuraminidase__InfluenzaA__AHC60206
MNPNQKIITIGSVSLTISIICFFMQVAILITTVTLHFKQYEFNSPPNNQVMLCEPTIIERNITEIVYLTNTTIEKEICPKLAEYRNWSKPQCDITGFAPFSKDNSIRLSAGGDIWVTREPYVSCDPDKCYQFALGQGTTLNNVHSNNTVRDRTPYRTLLMNELGVPFHLGTKQVCIAWSSSSCHDGKAWLHVCITGDDKNATASFIYNGKLVDSVVSWSKEILRTQESECVCINGTCTVVMTDGSASGKADTKILFIEEGKIVHTSTLSGSAQHVEECSCYPRYPGVRCVCRDNWKGSNRPIVDINIKDHSIVSSYVCSGLVGDTPRKNDSSSSSHCLDPNNEEGGHGVKGWAFDDGNDVWMGRTINETSRLGYETFKVIEGWSNPKSKLQINRQVIVDRGNRSGYSGIFSVEGKSCINRCFYVELIRGRKEETEVLWTSNSIVVFCGTSGTYGTGSWPDGADLNLMPI

SEQ ID NO: 24129 - protein, 469 aa, synthetic construct; identical to SEQ ID NO: 22922
  REGION 1..469: note = neuraminidase__InfluenzaA__AHC60218

SEQ ID NO: 24130 - protein, 469 aa, synthetic construct; identical to SEQ ID NO: 19518
  REGION 1..469: note = neuraminidase__InfluenzaA__AHC60230

SEQ ID NO: 24131 - protein, 469 aa, synthetic construct; identical to SEQ ID NO: 23971
  REGION 1..469: note = neuraminidase__InfluenzaA__AHC60242

SEQ ID NO: 24132 - protein, 469 aa, synthetic construct; identical to SEQ ID NO: 23971
  REGION 1..469: note = neuraminidase__InfluenzaA__AHC60254

SEQ ID NO: 24133 - protein, 469 aa, synthetic construct; identical to SEQ ID NO: 23971
  REGION 1..469: note = neuraminidase__InfluenzaA__AHC60266

SEQ ID NO: 24134 - protein, 469 aa, synthetic construct; identical to SEQ ID NO: 24020
  REGION 1..469: note = neuraminidase__InfluenzaA__AHC60278

SEQ ID NO: 24135 - protein, 469 aa, synthetic construct; identical to SEQ ID NO: 23971
  REGION 1..469: note = neuraminidase__InfluenzaA__AHC60290

SEQ ID NO: 24136 - protein, 469 aa, synthetic construct
  REGION 1..469: note = neuraminidase__InfluenzaA__AHC60302
MNPNQKIITIGSVSLTISTICFFMQIAILITTVTLHFKQYEFNSPPNNQVMLCEPTIIERNITEIVYLTNTTIEKEICPKLAEYRNWSKPQCDITGFAPFSKDNSIRLSAGGDIWVTREPYVSCDPNKCYQFALGQGTTLNNVHSNNTVRDRTPYRTLLMNELGVPFHLGTKQVCIAWSSSSCHDGKAWLHVCITGDDKNATASFIYNGKLVDSVVSWSKEILRTQESECVCINGTCTVVMTDGSASGKADTKILFIEEGKIIHTSTLSGSAQHVEECSCYPRYPGVRCVCRDNWKGSNRPIVDINIKDHSIVSSYVCSGLVGDTPRKNDSSSSSHCLDPNNEEGGHGVKGWAFDDGNDVWMGRTINETSRLGYETFKVIEGWSNPKSKLQINRQVIVDRGNRSGYSGIFSVEGKSCINRCFYVELIRGRKEETEVLWTSNSIVVFCGTSGTYGTGSWPDGADLNLMPI

SEQ ID NO: 24137 - protein, 469 aa, synthetic construct; identical to SEQ ID NO: 23971
  REGION 1..469: note = neuraminidase__InfluenzaA__AHC60314

SEQ ID NO: 24138 - protein, 469 aa, synthetic construct; identical to SEQ ID NO: 23971
  REGION 1..469: note = neuraminidase__InfluenzaA__AHC60326

SEQ ID NO: 24139 - protein, 469 aa, synthetic construct
  REGION 1..469: note = neuraminidase__InfluenzaA__AHC60338
MNPNQKIITIGSVSLTISTICFFMQIAILITTVTLHFKQYEFNSPPNNQVMLCEPTIIERNITEIVYLTNTTIEKEICPKPAEYRNWSKPQCDITGFAPFSKDNSIRLSAGGDIWVTREPYVSCDPDKCYQFALGQGTTLNNVHSNNTVRDRTPYRTLLMNELGVPFHLGTKQVCIAWSSSSCHDGKAWLHVCITGDDKNATASFIYNGRLVDSVVSWSKEILRTQESECVCINGTCTVVMTDGSASGKADTKILFIEEGKIVHTSTLSGSAQHVEECSCYPRYPGVRCVCRDNWKGSNRPIVDINIKDHSIVSSYVCSGLVGDTPRKNDSSSSSHCLDPNNEEGGHGVKGWAFDDGDDVWMGRTINETSRLGYETFKVIEGWSNPKSKLQINRQVIVDRGDRSGYSGIFSVEGKSCINRCFYVELIRGRKEETEVLWTSNSIVVFCGTSGTYGTGSWPDGADLNLMPI

SEQ ID NO: 24140 - protein, 469 aa, synthetic construct; identical to SEQ ID NO: 20884
  REGION 1..469: note = neuraminidase__InfluenzaA__AHC60350

SEQ ID NO: 24141 - protein, 469 aa, synthetic construct
  REGION 1..469: note = neuraminidase__InfluenzaA__AHC60362
MNPNQKIITIGSVSLTISTICFFMQVAILITTVTLHFKQYEFNSPPNNQVMLCKPTIIERNITEIVYLTNTTIEKEICPKLAEYRNWSKPQCDITGFAPFSKDNSIRLSAGGDIWVTREPYVSCDPDKCYQFALGQGTTLNNVHSNNTVRDRTPYRTLLMNELGVPFHLGTKQVCIAWSSSSCHDGKAWLHVCITGDDKNATASFIYNGKLVDSVVSWSKEILRTQESECVCINGTCTVVMTDGSASGKADTKILFIEEGKIVHTSTLSGSAQHVEECSCYPRYPGVRCVCRDNWKGSNRPIVDINIKDHSIVSSYVCSGLVGDTPRKNDSSSSSHCLDPNNEEGGHGVKGWAFDDGNDVWMGRTINETSRLGYETFKVIEGWSNPKSKLQINRQVIVDRGNRSGYSGIFSVEGKSCINRCFYVELIRGRKEETEVLWTSNSIVVFCGTSGTYGTGSWPDGADLNLMPI

SEQ ID NO: 24142 - protein, 469 aa, synthetic construct; identical to SEQ ID NO: 23883
  REGION 1..469: note = neuraminidase__InfluenzaA__AHC60374

SEQ ID NO: 24143 - protein, 469 aa, synthetic construct; identical to SEQ ID NO: 19518
  REGION 1..469: note = neuraminidase__InfluenzaA__AHC60386

SEQ ID NO: 24144 - protein, 469 aa, synthetic construct; identical to SEQ ID NO: 23975
  REGION 1..469: note = neuraminidase__InfluenzaA__AHC60398

SEQ ID NO: 24145 - protein, 469 aa, synthetic construct; identical to SEQ ID NO: 24007
  REGION 1..469: note = neuraminidase__InfluenzaA__AHC60410

SEQ ID NO: 24146 - protein, 469 aa, synthetic construct; identical to SEQ ID NO: 19518
  REGION 1..469: note = neuraminidase__InfluenzaA__AHC60422

SEQ ID NO: 24147 - protein, 469 aa, synthetic construct; identical to SEQ ID NO: 24007
  REGION 1..469: note = neuraminidase__InfluenzaA__AHC60434

SEQ ID NO: 24148 - protein, 469 aa, synthetic construct; identical to SEQ ID NO: 23975
  REGION 1..469: note = neuraminidase__InfluenzaA__AHC60446

SEQ ID NO: 24149 - protein, 469 aa, synthetic construct
  REGION 1..469: note = neuraminidase__InfluenzaA__AHC60458
MNPNQKIITIGSVSLTISTICFFMQIAILITTVTLHFKQYEFNSPPNNQVMLCEPTIIERNITEIVYLTNTTIEKEICPKLAEYRNWSKPQCDITGFAPFSKDNSIRLSAGGDIWVTREPYVSCDPDKCYQFALGQGTTLNNVHSNNTVRDRTPYRTLLMNELGVPFHLGTKQVCIAWSSSSCHDGKAWLHVCITGDDKNATASFIYNGRLVDSVVSWSKEILRTQESECVCINGTCAVVMTDGSASGKADTKILFIEEGKIVHTSTLSGSAQHVEECSCYPRYPGVRCVCRDNWKGSNRPIVDINIKDHSIVSSYVCSGLVGDTPRKNDGSSSSHCLDPNNEEGGHGVKGWAFDDGNDVWMGRTINETSRLGYETFKVIEGWSNPKSKLQINRQVIVDRGNRSGYSGIFSVEGKSCINRCFYVELIRGRKEETEVLWTSNSIVVFCGTSGTYGTGSWPDGADLNLMPI

SEQ ID NO: 24150 - protein, 469 aa, synthetic construct; identical to SEQ ID NO: 24020
  REGION 1..469: note = neuraminidase__InfluenzaA__AHC60470

SEQ ID NO: 24151 - protein, 469 aa, synthetic construct
  REGION 1..469: note = neuraminidase__InfluenzaA__AHC60482
MNPNQKIITIGSVSLTISTICFFMQIAILTTTVTLHFKQYEFNSPPNNQVMLCEPTIIERNITEIVYLTNTTIEKEICPKPAEYRNWSKPQCDITGFAPFSKDNSIRLSAGGDIWVTREPYVSCDPDKCYQFALGQGTTLNNVHSNNTVRDRTPYRTLLMNELGVPFHLGTKQVCIAWSSSSCHDGKAWLHVCITGDDKNATASFIYNGRLVDSVVSWSKEILRTQESECVCINGTCTVVMTDGSASGKADTKILFIEEGKIVHTSTLSGSAQHVEECSCYPRYPGVRCVCRDNWKGSNRPIVDINIKDHSIVSSYVCSGLVGDTPRKNDSSSSSHCLDPNNEEGGHGVKGWAFDDGNDVWMGRTINETSRLGYETFKVIEGWSNPKSKLQINRQVIVDRGDRSGYSGIFSVEGKSCINRCFYVELIRGRKEETEVLWTSNSIVVFCGTSGTYGTGSWPDGADLNLMPI

SEQ ID NO: 24152 - protein, 469 aa, synthetic construct; identical to SEQ ID NO: 23971
  REGION 1..469: note = neuraminidase__InfluenzaA__AHC60494

SEQ ID NO: 24153 - protein, 469 aa, synthetic construct; identical to SEQ ID NO: 23971
  REGION 1..469: note = neuraminidase__InfluenzaA__AHC60506

SEQ ID NO: 24154 - protein, 469 aa, synthetic construct; identical to SEQ ID NO: 23975
  REGION 1..469: note = neuraminidase__InfluenzaA__AHC60518

SEQ ID NO: 24155 - protein, 469 aa, synthetic construct; identical to SEQ ID NO: 23975
  REGION 1..469: note = neuraminidase__InfluenzaA__AHC60542

SEQ ID NO: 24156 - protein, 469 aa, synthetic construct
  REGION 1..469: note = neuraminidase__InfluenzaA__AHC60554
MNPNQKIITIGSVSLTISTICFFMQIAILITTVTLHFKQYEFYSPPNNQVMLCEPTMIERNITEIVYLTNTTIEKEICPKLAEYRNWSKPQCDITGFAPFSKDNSIRLSAGGDIWVTREPYVSCDPDKCYQFALGQGTTLNNVHSNNTVRDRTPYRTLLMNELGVPFHLGTKQVCIAWSSSSCHDGKAWLHVCITGDDKNATASFIYNGRLVDSVVSWSKEILRTQESECVCINGTCTVVMTDGSASGKADTKILFIEEGKIVHTSTLSGSAQHVEECSCYPRYPGVRCVCRDNWKGSNRPIVDINIKDHSIVSSYVCSGLVGDTPRKNDSSSSSHCLDPNNEEGGHGVKGWAFDDGNDVWMGRTINETSRLGYETFKVIEGWSNPKSKLQINRQVIVDRGNRSGYSGIFSVEGKSCINRCFYVELIRGRKEETEVLWTSNSIVVFCGTSGTYGTGTWPDGADLNLMPI

SEQ ID NO: 24157 - protein, 469 aa, synthetic construct
  REGION 1..469: note = neuraminidase__InfluenzaA__AHC60566
MNPNQKIITIGSVSLTISTICFFMQIAILITTVTLHFKQYEFNSPPNNQVMLCEPTIIERNITEIVYLTNTTIEKEICPKPAEYRNWSKPQCDITGFAPFSKDNSIRLSAGGDIWVTREPYVSCDPDKCYQFALGQGTTLNNVHSNNTVRDRTPYRTLLMNELGVPFHLGTKQVCIAWSSSSCHDGKAWLHVCITGDDKNATASFIYNGRLVDSVVSWSKEILRTQESECVCINGTCTVVMTDGSASGKADTKILFIEEGKIVHTSTLSGSAQHVEECSCYPRYPGVRCVCRDNWKGSNRPIVDINIKDHSIVSSYVCSGLVGDTPRKNDSSSSSHCLDPNNEEGGHGVKGWAFDDGNDVWMGRTINETSRLGYETFKVIEGWSNPKSKLQVNRQVIVDRGDRSGYSGIFSVEGKSCINRCFYVELIRGRKEETEVLWTSNSIVVFCGTSGTYGTGSWPDGADLNLMPI

SEQ ID NO: 24158 - protein, 469 aa, synthetic construct; identical to SEQ ID NO: 22922
  REGION 1..469: note = neuraminidase__InfluenzaA__AHC60578

SEQ ID NO: 24159 - protein, 469 aa, synthetic construct; identical to SEQ ID NO: 23971
  REGION 1..469: note = neuraminidase__InfluenzaA__AHC60590

SEQ ID NO: 24160 - protein, 469 aa, synthetic construct
  REGION 1..469: note = neuraminidase__InfluenzaA__AHC60602
MNPNQKIITIGSVSLTISTICFFMQIAILITTVTLHFKQYEFNPPPNNQVVLCEPTIIERNITEIVYLTNTTIEKEICPKPAEYRNWSKPQCDITGFAPFSKDNSIRLSAGGDIWVTREPYVSCDPDKCYQFALGQGTTLNNVHSNNTVRDRTPYRTLLMNELGVPFHLGTKQVCIAWSSSSCHDGKAWLHVCITGDDKNATASFIYNGRLVDSVVSWSKEILRTQESECVCINGTCTVVMTDGSASGKADTKILFIEEGKIVHTSTLSGSAQHVEECSCYPRYPGVRCVCRDNWKGSNRPIVDINIKDHSIVSSYVCSGLVGDTPRKNDSSSSSHCLDPNNEEGGHGVKGWAFDDGNDVWMGRTINETSRLGYETFKVIEGWSNPKSKLQINRQVIVDRGDRSGYSGIFSVEGKSCINRCFYVELIRGRKEETEVLWTSNSIVVFCGTSGTYGTGSWPDGADLNLMPI

SEQ ID NO: 24161 - protein, 469 aa, synthetic construct; identical to SEQ ID NO: 19518
  REGION 1..469: note = neuraminidase__InfluenzaA__AHC60614

SEQ ID NO: 24162 - protein, 469 aa, synthetic construct; identical to SEQ ID NO: 22922
  REGION 1..469: note = neuraminidase__InfluenzaA__AHC60626

SEQ ID NO: 24163 - protein, 469 aa, synthetic construct
  REGION 1..469: note = neuraminidase__InfluenzaA__AHC60650
MNPNQKIITIGSVSLTISTICFFMQIAILITTVTLHFKQYEFYSPPNNQVMLCEPTIIERNITEIVYLTNTTIEKEICPKLAEYRNWSKPQCDITGFAPFSKDNSIRLSAGGDIWVTREPYVSCDPDKCYQFALGQGTTLNNVHSNNTVRDRTPYRTLLMNELGVPFHLGTKQVCIAWSSSSCHDGKAWLHVCITGDDENATASFIYNGRLVDSVVSWSKEILRTQESECVCINGTCTVVMTDGSASGKADTKILFIEEGKIVHTSTLSGSAQHVEECSCYPRYPGVRCVCRDNWKGSNRPIVDINIKDHSIVSSYVCSGLVGDTPRKNDSSSSSHCLDPNNEEGGHGVKGWAFDDGNDVWMGRTINETSRLGYETFKVIEGWSNPKSKLQINRQVIVDRGNRSGYSGIFSVEGKSCINRCFYVELIRGRKEETEVLWTSNSIVVFCGTSGTYGTGSWPDGADLNLMPI

SEQ ID NO: 24164 - protein, 469 aa, synthetic construct; identical to SEQ ID NO: 24020
  REGION 1..469: note = neuraminidase__InfluenzaA__AHC60662

SEQ ID NO: 24165 - protein, 469 aa, synthetic construct; identical to SEQ ID NO: 23975
  REGION 1..469: note = neuraminidase__InfluenzaA__AHC60674

SEQ ID NO: 24166 - protein, 469 aa, synthetic construct; identical to SEQ ID NO: 19518
  REGION 1..469: note = neuraminidase__InfluenzaA__AHC60686

SEQ ID NO: 24167 - protein, 469 aa, synthetic construct; identical to SEQ ID NO: 23975
  REGION 1..469: note = neuraminidase__InfluenzaA__AHC60698

SEQ ID NO: 24168 - protein, 469 aa, synthetic construct; identical to SEQ ID NO: 23971
  REGION 1..469: note = neuraminidase__InfluenzaA__AHC60710

SEQ ID NO: 24169 - protein, 469 aa, synthetic construct; identical to SEQ ID NO: 24020
  REGION 1..469: note = neuraminidase__InfluenzaA__AHC60722

SEQ ID NO: 24170 - protein, 469 aa, synthetic construct
  REGION 1..469: note = neuraminidase__InfluenzaA__AHC60734
MNPNQKIITIGSVSLTISTICFFMQIAILITTVTLHFKQYEFNSPPNNQVMLCEPTIIERNITEIVYLINTTIEKEICPKLAEYRNWSKPQCDITGFAPFSKDNSIRLSAGGDIWVTREPYVSCDPNKCYQFALGQGTTLNNVHSNNTVRDRTPYRTLLMNELGVPFHLGTKQVCIAWSSSSCHDGKAWLHVCITGDDKNATASFIYNGKLVDSVVSWSKEILRTQESECVCINGTCTVVMTDGSASGKADTKILFIEEGKIVHTSTLSGSAQHVEECSCYPRYPGVRCVCRDNWKGSNRPIVDINIKDHSIVSSYVCSGLVGDTPRKNDSSSSSHCLDPNNEEGGHGVKGWAFDDGNDVWMGRTINETSRLGYETFKVIEGWSNPKSKLQINRQVIVDRGNRSGYSGIFSVEGKSCINRCFYVELIRGRKEETEVLWTSNSIVVFCGTSGTYGTGSWPDGADLNLMPI

SEQ ID NO: 24171 - protein, 469 aa, synthetic construct; identical to SEQ ID NO: 24007
  REGION 1..469: note = neuraminidase__InfluenzaA__AHC60746

SEQ ID NO: 24172 - protein, 469 aa, synthetic construct; identical to SEQ ID NO: 24106
  REGION 1..469: note = neuraminidase__InfluenzaA__AHC60770

SEQ ID NO: 24173 - protein, 469 aa, synthetic construct
  REGION 1..469: note = neuraminidase__InfluenzaA__AHC60782
MNPNQKIITIGSVSLTISTICFFMQIAILITTVTLHFKQYEFNSPPNNQVMLCEPTIIERNITEIVYLTNTTIEKEICPKLAEYRNWSKPQCDITGFAPFSKDNSIRLSAGGDIWVTREPYVSCDPDKCYQFALGQGTTLNNVHSNNTVRDRTPYRTLLMNELGVPFHLGTKQVCIAWSSSSCHDGKAWLHVCITGDDKNATASFIYNGRLVDSVVSWSKEILRTQESECVCINGTCTVVMTDGSASGKADTKILFIEEGKIVHTSTLSGSAQHVEECSCYPRYPGVRCVCRDNWKGSNRPIVDINIKDHSIVSGYVCSGLVGDTPRKNDSSSSSHCLDPNNEEGGHGVKGWAFDDGNDVWMGRTINETSRLGYETFKVIEGWSNPKSKLQINRQVIVDRGNRSGYSGIFSVEGKSCINRCFYVELIRGRKEETEVLWTSNSIVVFCGTSGTYGTGSWPDGADLNLMPI

SEQ ID NO: 24174 - protein, 469 aa, synthetic construct; identical to SEQ ID NO: 24018
  REGION 1..469: note = neuraminidase__InfluenzaA__AHC60794

SEQ ID NO: 24175 - protein, 469 aa, synthetic construct
  REGION 1..469: note = neuraminidase__InfluenzaA__AHC60806
MNPNQKIITIGSVSLTISTICFFMQIAILITTVTLHFKQCEFNSPPNNQVMLCEPTIIERNITEIVYLTNTTIEKEICPKLAEYRNWSKPQCDITGFAPFSKDNSIRLSAGGDIWVTREPYVSCDPNKCYQFALGQGTTLNNVHSNNTVRDRTPYRTLLMNELGVPFHLGTKQVCIAWSSSSCHDGKAWLHVCITGDDKNATASFIYNGKLVDSVVSWSKEILRTQESECVCINGTCTVVMTDGSASGKADTKILFIEEGKIVHTSTLSGSAQHVEECSCYPRYPGVRCVCRDNWKGSNRPIVDINIKDHSIVSSYVCSGLVGDTPRKNDSSSSSHCLDPNNEEGGHGVKGWAFDDGNDVWMGRTINETSRLGYETFKVIEGWSNPKSKLQINRQVIVDRGNRSGYSGIFSVEGKSCINRCFYVELIRGRKEETGVLWTSNSIVVFCGTSGTYGTGSWPDGADLNLMPI

SEQ ID NO: 24176 - protein, 469 aa, synthetic construct; identical to SEQ ID NO: 20884
  REGION 1..469: note = neuraminidase__InfluenzaA__AHC60818

SEQ ID NO: 24177 - protein, 469 aa, synthetic construct; identical to SEQ ID NO: 23975
  REGION 1..469: note = neuraminidase__InfluenzaA__AHC60830

SEQ ID NO: 24178 - protein, 469 aa, synthetic construct; identical to SEQ ID NO: 24156
  REGION 1..469: note = neuraminidase__InfluenzaA__AHC60842

SEQ ID NO: 24179 - protein, 469 aa, synthetic construct; identical to SEQ ID NO: 23975
  REGION 1..469: note = neuraminidase__InfluenzaA__AHC60854

SEQ ID NO: 24180 - protein, 469 aa, synthetic construct; identical to SEQ ID NO: 24020
  REGION 1..469: note = neuraminidase__InfluenzaA__AHC60866

SEQ ID NO: 24181 - protein, 469 aa, synthetic construct; identical to SEQ ID NO: 24007
  REGION 1..469: note = neuraminidase__InfluenzaA__AHC60878

SEQ ID NO: 24182 - protein, 469 aa, synthetic construct; identical to SEQ ID NO: 24007
  REGION 1..469: note = neuraminidase__InfluenzaA__AHC60890

SEQ ID NO: 24183 - protein, 469 aa, synthetic construct; identical to SEQ ID NO: 24106
  REGION 1..469: note = neuraminidase__InfluenzaA__AHC60902

SEQ ID NO: 24184 - protein, 469 aa, synthetic construct; identical to SEQ ID NO: 23971
  REGION 1..469: note = neuraminidase__InfluenzaA__AHC60914

SEQ ID NO: 24185 - protein, 469 aa, synthetic construct; identical to SEQ ID NO: 23975
  REGION 1..469: note = neuraminidase__InfluenzaA__AHC60926

SEQ ID NO: 24186 - protein, 469 aa, synthetic construct; identical to SEQ ID NO: 23971
  REGION 1..469: note = neuraminidase__InfluenzaA__AHC60938

SEQ ID NO: 24187 - protein, 469 aa, synthetic construct; identical to SEQ ID NO: 23975
  REGION 1..469: note = neuraminidase__InfluenzaA__AHC60950

SEQ ID NO: 24188 - protein, 469 aa, synthetic construct
  REGION 1..469: note = neuraminidase__InfluenzaA__AHC60962
MNPNQKIITIGSVSLTISTICFFMQIAILITTVTLHFKQYEFYSPPNNQVMLCEPTIIERNITEIVYLTNTTIEKEICPKLAEYRNWSKPQCDITGFAPFSKDNSIRLSAGGDIWVTREPYVSCDPDKCYQFALGQGTTLNNVHSNNTVRDRTPYRTLLMNELGVPFHLGTKQVCIAWSSSSCHDGKAWLHVCVTGDDKNATASFIYNGRLVDSVVSWSKEILRTQESECVCINGTCTVVMTDGSASGKADTKILFIEEGKIVHTSTLSGSAQHVEECSCYPRYPGVRCVCRDNWKGSNRPIVDINIKDHSIVSSYVCSGLVGDTPRKNDSSSSSHCLDPNNEEGGHGVKGWAFDDGNDVWMGRTINETSRLGYETFKVIEGWSNPKSKLQINRQVIVDRGNRSGYSGIFSVEGKSCINRCFYVELIRGRKEETEVLWTSNSIVVFCGTSGTYGTGSWPDGADLNLMPI

SEQ ID NO: 24189 - protein, 469 aa, synthetic construct; identical to SEQ ID NO: 24020
  REGION 1..469: note = neuraminidase__InfluenzaA__AHC60974

SEQ ID NO: 24190 - protein, 469 aa, synthetic construct; identical to SEQ ID NO: 23971
  REGION 1..469: note = neuraminidase__InfluenzaA__AHC60986

SEQ ID NO: 24191 - protein, 469 aa, synthetic construct; identical to SEQ ID NO: 24118
  REGION 1..469: note = neuraminidase__InfluenzaA__AHC60998

SEQ ID NO: 24192 - protein, 469 aa, synthetic construct; identical to SEQ ID NO: 24018
  REGION 1..469: note = neuraminidase__InfluenzaA__AHC61010

SEQ ID NO: 24193 - protein, 469 aa, synthetic construct
  REGION 1..469: note = neuraminidase__InfluenzaA__AHC61022
MNPNQKIITIGSVSLTISTICFFMQIAILITTVTLHFKQYEFNSPPNNQVMLCEPTIIERNITEIVYLTNTTIEKEICPKLAEYRNWSKPQCDITGFAPFSKDNSIRLSAGGDIWVTREPYVSCDPDKCYQFALGQGTTLNNVHSNNTVRDRTPYRTLLMNELGVPFHLGTKQVCIAWSSSSCHDGKAWLHVCITGDDKNATASFIYNGRLVDSVVSWSKEILRTQESECVCINGTCTVVMTDGSASGKADTKILFIEEGKIVHTSTLSGSAQHVEECSCYPRYPGVRCVCRDNWKGSNRPIVDINIKDHSIVSSYVCSGLVGDTPRKNDSSSISHCLDPNNEEGGHGVKGWAFDDGNDVWMGRTINETSRLGYETFKVIEGWSNPKSKLQINRQVIVDRGNRSGYSGIFSVEGKSCINRCFYVELIRGRKEETEVLWTSNSIVVFCGTSGTYGTGSWPDGADLNLMPI

SEQ ID NO: 24194 - protein, 469 aa, synthetic construct; identical to SEQ ID NO: 19518
  REGION 1..469: note = neuraminidase__InfluenzaA__AHC61034

SEQ ID NO: 24195 - protein, 469 aa, synthetic construct; identical to SEQ ID NO: 23971
  REGION 1..469: note = neuraminidase__InfluenzaA__AHC61046

SEQ ID NO: 24196 - protein, 469 aa, synthetic construct; identical to SEQ ID NO: 24020
  REGION 1..469: note = neuraminidase__InfluenzaA__AHC61058

SEQ ID NO: 24197 - protein, 469 aa, synthetic construct; identical to SEQ ID NO: 23883
  REGION 1..469: note = neuraminidase__InfluenzaA__AHC61070

SEQ ID NO: 24198 - protein, 469 aa, synthetic construct
  REGION 1..469: note = neuraminidase__InfluenzaA__AHC61082
MNPNQKIITIGSVSLTISTICFFMQIAILITTVTLHFKQYEFNSPPNNQVVLCEPTIIERNITEIVYLTNTTIEKEICPKPAEYRNWSKPQCDITGFAPFSKDNSIRLSAGGDIWVTREPYVSCDPDKCYQFALGQGTTLNNVHSNNTVRDRTPYRTLLMNELGVPFHLGTKQVCIAWSSSSCHDGKAWLHVCITGDDKNATASFIYNGRLVDSVVSWSKEILRTQESECVCINGTCTVVMTDGSASGKADTKILFIEEGKIVHTSTLSGSAQHVEECSCYPRYPGVRCVCRDNWKGSNRPIVDINIKDHSIVSSYVCSGLVGDTPRKNDSSSSSHCLDPNNEEGGHGVKGWAFDDGNDVWMGRTINETSRLGYETFKVIEGWSNPKSKLQINRQVIVDRGDRSGYSGIFSVEGKSCINRCFYVELIRGRKEETGVLWTSNSIVVFCGTSGTYGTGSWPDGADLNLMPI

SEQ ID NO: 24199 - protein, 469 aa, synthetic construct; identical to SEQ ID NO: 19518
  REGION 1..469: note = neuraminidase__InfluenzaA__AHC61094

SEQ ID NO: 24200 - protein, 469 aa, synthetic construct; identical to SEQ ID NO: 24007
  REGION 1..469: note = neuraminidase__InfluenzaA__AHC61106

SEQ ID NO: 24201 - protein, 469 aa, synthetic construct; identical to SEQ ID NO: 24007
  REGION 1..469: note = neuraminidase__InfluenzaA__AHC61118

SEQ ID NO: 24202 - protein, 469 aa, synthetic construct; identical to SEQ ID NO: 23971
  REGION 1..469: note = neuraminidase__InfluenzaA__AHC61130

SEQ ID NO: 24203 - protein, 469 aa, synthetic construct; identical to SEQ ID NO: 24118
  REGION 1..469: note = neuraminidase__InfluenzaA__AHC61142

SEQ ID NO: 24204 - protein, 469 aa, synthetic construct; identical to SEQ ID NO: 24007
  REGION 1..469: note = neuraminidase__InfluenzaA__AHC61154

SEQ ID NO: 24205 - protein, 469 aa, synthetic construct
  REGION 1..469: note = neuraminidase__InfluenzaA__AHC61166
MNPNQKIITIGSVSLTISTICFFMQVAILITTVTLHFKQYEFNSPPNNQVMLCEPTIIERNITEIVYLTNTTIEKEICPKLAEYRNWSKPQCDITGFAPFSKDNSIRLSAGGDIWVTREPYVSCDPDKCYQFALGQGTTLNNVHSNNTVRDRTPYRTLLMNELGVPFHLGTKQVCIAWSSSSCHDGKAWLHVCITGDDKNATASFIYNGKLVDSVVSWSKEILRTQESECVCINGTCTVVMTDGSASGKADTKILFIEEGKIVHTSTLSGSAQHVEECSCYPRYPGVRCVCRDNWKGSNRPIVDINIKDHSIVSSYVCSGLVGDTPRKNDSSSSSHCLDPNNEEGGHGVKGWAFDDGNDVWMGRTINETSRLGYETFKVIEGWSNPKSKLQTNRQVIVDRGNRSGYSGIFSVEGKSCINRCFYVELIRGRKEETEVLWTSNSIVVFCGTSGTYGTGSWPDGADLNLMPI

SEQ ID NO: 24206 - protein, 469 aa, synthetic construct; identical to SEQ ID NO: 23971
  REGION 1..469: note = neuraminidase__InfluenzaA__AHC61178

SEQ ID NO: 24207 - protein, 469 aa, synthetic construct; identical to SEQ ID NO: 24007
  REGION 1..469: note = neuraminidase__InfluenzaA__AHC61190

SEQ ID NO: 24208 - protein, 469 aa, synthetic construct; identical to SEQ ID NO: 24020
  REGION 1..469: note = neuraminidase__InfluenzaA__AHC61202

SEQ ID NO: 24209 - protein, 469 aa, synthetic construct; identical to SEQ ID NO: 23975
  REGION 1..469: note = neuraminidase__InfluenzaA__AHC61214

SEQ ID NO: 24210 - protein, 469 aa, synthetic construct; identical to SEQ ID NO: 24020
  REGION 1..469: note = neuraminidase__InfluenzaA__AHC61226

SEQ ID NO: 24211 - protein, 469 aa, synthetic construct; identical to SEQ ID NO: 24007
  REGION 1..469: note = neuraminidase__InfluenzaA__AHC61238

SEQ ID NO: 24212 - protein, 469 aa, synthetic construct; identical to SEQ ID NO: 24188
  REGION 1..469: note = neuraminidase__InfluenzaA__AHC61250

SEQ ID NO: 24213 - protein, 469 aa, synthetic construct; identical to SEQ ID NO: 23971
  REGION 1..469: note = neuraminidase__InfluenzaA__AHC61262

SEQ ID NO: 24214 - protein, 469 aa, synthetic construct; identical to SEQ ID NO: 23975
  REGION 1..469: note = neuraminidase__InfluenzaA__AHC61274

SEQ ID NO: 24215 - protein, 469 aa, synthetic construct; identical to SEQ ID NO: 19518
  REGION 1..469: note = neuraminidase__InfluenzaA__AHC61286

SEQ ID NO: 24216 - protein, 469 aa, synthetic construct; identical to SEQ ID NO: 24019
  REGION 1..469: note = neuraminidase__InfluenzaA__AHC61298

SEQ ID NO: 24217 - protein, 469 aa, synthetic construct
  REGION 1..469: note = neuraminidase__InfluenzaA__AHC61310
MNPNQKIITIGSVSLTISTICFFMQIAILITTVTLHFKQYEFNSPPNNQVMLCEPTIIERNITEIVYLTNTTIEKEICPKLAEYRNWSKPQCDITGFAPFSKDNSIRLSAGGDIWVTREPYVSCDPNKCYQFALGQGTTLNNVHSNNTVRDRTPYRTLLMNELGVPFHLGTKQVCIAWSSSSCHDGKAWLHVCITGDDKNATASFIYNGKLVDSVVSWSKEILRTQESECVCINGTCTVVMTDGSASGKADTKILFIEEGKIVHTSTLSGSAQHVEECSCYPRYPGVRCVCRDNWKGSNRPIVDINIKDHSIVSSYVCSGLVGDTPRKNDSSSSSHCLDPNNEEGGHGVKGWAFDDGNDVWMGRTINETSRLGYETFKVIEGWSNPKSKLQINRQVIIDRGNRSGYSGIFSVEGKSCINRCFYVELIRGRKEETEVLWTSSSIVVFCGTSGTYGTGSWPDGADLNLMPI

SEQ ID NO: 24218 - protein, 469 aa, synthetic construct; identical to SEQ ID NO: 24048
  REGION 1..469: note = neuraminidase__InfluenzaA__AHC61322

SEQ ID NO: 24219 - protein, 469 aa, synthetic construct; identical to SEQ ID NO: 24007
  REGION 1..469: note = neuraminidase__InfluenzaA__AHC61334

SEQ ID NO: 24220 - protein, 469 aa, synthetic construct; identical to SEQ ID NO: 23975
  REGION 1..469: note = neuraminidase__InfluenzaA__AHC61346

SEQ ID NO: 24221 - protein, 469 aa, synthetic construct
  REGION 1..469: note = neuraminidase__InfluenzaA__AHC61358
MNPNQKIITIGSVSLTISTICFFMQIAILITTVTLHFKQYEFNSPPNNQVMLCEPTIIERNITEIVYLTNTTIEKEICPKLAEYRNWSKPQCDITGFAPFSKDNSIRLSAGGDIWVTREPYVSCDPDKCYQFALGQGTTLNNVHSNNTVRDRTPYRTLLMNELGVPFHLGTKQVCIAWSSSSCHDGKAWLHVCITGDDKNATASFIYNGRLVDSVVSWSKEILRTQESECVCINGTCTVVMTDGSASGKADTKILFIEEGKIVHTSTLSGSAQHVEECSCYPRYPGVRCVCRDNWKGSNRPIVDINIKDHSIVSSYVCSGLVGDTPRKNDISSSSHCLDPNNEEGGHGVKGWAFDDGNDVWMGRTINETSRLGYETFKVIKGWSNPKSKLQINRQVIVDRGNRSGYSGIFSVEGKSCINRCFYVELIRGRKEETEVLWTSNSIVVFCGTSGTYGTGSWPDGADLNLMPI

SEQ ID NO: 24222 - protein, 469 aa, synthetic construct; identical to SEQ ID NO: 24020
  REGION 1..469: note = neuraminidase__InfluenzaA__AHC61370

SEQ ID NO: 24223 - protein, 469 aa, synthetic construct; identical to SEQ ID NO: 24048
  REGION 1..469: note = neuraminidase__InfluenzaA__AHC61382

SEQ ID NO: 24224 - protein, 469 aa, synthetic construct; identical to SEQ ID NO: 24020
  REGION 1..469: note = neuraminidase__InfluenzaA__AHC61394

SEQ ID NO: 24225 - protein, 469 aa, synthetic construct; identical to SEQ ID NO: 24048
  REGION 1..469: note = neuraminidase__InfluenzaA__AHC61406

SEQ ID NO: 24226 - protein, 469 aa, synthetic construct; identical to SEQ ID NO: 24007
  REGION 1..469: note = neuraminidase__InfluenzaA__AHC61418

SEQ ID NO: 24227 - protein, 469 aa, synthetic construct; identical to SEQ ID NO: 19518
  REGION 1..469: note = neuraminidase__InfluenzaA__AHC61430

SEQ ID NO: 24228 - protein, 469 aa, synthetic construct; identical to SEQ ID NO: 24020
  REGION 1..469: note = neuraminidase__InfluenzaA__AHC61442

SEQ ID NO: 24229 - protein, 469 aa, synthetic construct; identical to SEQ ID NO: 24020
  REGION 1..469: note = neuraminidase__InfluenzaA__AHC61454

SEQ ID NO: 24230 - protein, 469 aa, synthetic construct
  REGION 1..469: note = neuraminidase__InfluenzaA__AHC61466
MNPNQKIITIGSVSLTISTICFFMQIAILITTVTLHFKQYEFNSPPNNQVMLCEPTIIERNTTEIVYLTNTTIEKEICPKLAEYRNWSKPQCDITGFAPFSKDNSIRLSAGGDIWVTREPYVSCDPDKCYQFALGQGTTLNNVHSNNTVRDRTPYRTLLMNELGVPFHLGTKQVCIAWSSSSCHDGKAWLHVCITGDDKNATASFIYNGRLVDSVVSWSKEILRTQESECVCINGTCTVVMTDGSASGKADTKILFIEEGKIVHTSTLSGSAQHVEECSCYPRYPGVRCVCRDNWKGSNRPIVDINIKDHSIVSSYVCSGLVGDTPRKNDSSSSSHCLDPNNEEGGHGVKGWAFDDGNDVWMGRTINETSRLGYETFKVIEGWSNPKSKLQINRQVIVDKGNRSGYSGIFSVEGKSCINRCFYVELIRGRKEETEVLWTSNSIVVFCGTSGTYGTGSWPDGADLNLMPI

SEQ ID NO: 24231 - protein, 469 aa, synthetic construct; identical to SEQ ID NO: 23971
  REGION 1..469: note = neuraminidase__InfluenzaA__AHC61478

SEQ ID NO: 24232 - protein, 469 aa, synthetic construct; identical to SEQ ID NO: 24007
  REGION 1..469: note = neuraminidase__InfluenzaA__AHC61490

SEQ ID NO: 24233 - protein, 469 aa, synthetic construct; identical to SEQ ID NO: 23971
  REGION 1..469: note = neuraminidase__InfluenzaA__AHC61502

SEQ ID NO: 24234 - protein, 469 aa, synthetic construct; identical to SEQ ID NO: 24020
  REGION 1..469: note = neuraminidase__InfluenzaA__AHC61514

SEQ ID NO: 24235 - protein, 469 aa, synthetic construct; identical to SEQ ID NO: 22922
  REGION 1..469: note = neuraminidase__InfluenzaA__AHC61526

SEQ ID NO: 24236 - protein, 469 aa, synthetic construct
  REGION 1..469: note = neuraminidase__InfluenzaA__AHC61538
MNPNQKIITIGSVSLTISTICFFMQIAILITTVTLHFKQYEFNSPPNNQVMLCEPTIIERNITEIVYLTNTTIEKEICPKLAEYRNWSKPQCDITGFAPFSKDNSIRLSAGGDIWVTREPYVSCDPNKCYQFALGQGTTLNNVHSNNTVRDRTPYRTLLMNELGVPFHLGTKQVCIAWSSSSCHDGKAWLHVCITGDDKNATASFIYNGKLVDSVVSWSKEILRTQESECVCINGTCTVVMTDGSASGKADTKILFIEEGKIVHTSTLSGSAQHVEECSCYPRYPGVRCVCRDNWKGSNRPIVDINIKDHSIVSSYVCSGLVGDTPRKNDSSSSSHCLDPNNEEGSHGVKGWAFDDGNDVWMGRTINETSRLGYETFKVIEGWSNPKSKLQINRQVIVDRGNRSGYSGIFSVEGKSCINRCFYVELIRGRKEETEVLWTSNSIVVFCGTSGTYGTGSWPDGADLNLMPI

SEQ ID NO: 24237 - protein, 469 aa, synthetic construct; identical to SEQ ID NO: 24020
  REGION 1..469: note = neuraminidase__InfluenzaA__AHC61550

SEQ ID NO: 24238 - protein, 469 aa, synthetic construct
  REGION 1..469: note = neuraminidase__InfluenzaA__AHC61562
MNPNQKIITIGSVSLTISTICFFMQIAILITTVTLHFKQYEFYSPPNNQVMLCEPTMIERNITEIVYLTNTTIEKEICPKLAEYRNWSKPQCDITGFAPFSKDNSIRLSAGGDIWVTREPYVSCDPDKCYQFALGQGTTLNNVHSNNTVRDRTPYRTLLMNELGVPFHLGTKQVCIAWSSSSCHDGKAWLHVCITGDDKNATASFIYNGRLVDSVVSWSKEILRTQESECVCINGTCTVVMTDGSASGKADTKILFIEEGKIVHTSTLSGSAQHVEECSCYPRYPGVRCVCRDNWKGSNRPIVDINIKDHSIVSSYVCSGLVGDTPRKNDSSSSSHCLDPNNEEGGHGVKGWAFDDGNDVWMGRTINETSRLGYETFKVIEGWSNPKSKLQINRQVIVDRGNRSGYSGIFSVESKSCINRCFYVELIRGRKEETEVLWTSNSIVVFCGTSGTYGTGTWPDGADLNLMPI

SEQ ID NO: 24239 - protein, 469 aa, synthetic construct; identical to SEQ ID NO: 24019
  REGION 1..469: note = neuraminidase__InfluenzaA__AHC61574

SEQ ID NO: 24240 - protein, 469 aa, synthetic construct; identical to SEQ ID NO: 24020
  REGION 1..469: note = neuraminidase__InfluenzaA__AHC61586

SEQ ID NO: 24241 - protein, 469 aa, synthetic construct; identical to SEQ ID NO: 22922
  REGION 1..469: note = neuraminidase__InfluenzaA__AHC61598

SEQ ID NO: 24242 - protein, 469 aa, synthetic construct; identical to SEQ ID NO: 23971
  REGION 1..469: note = neuraminidase__InfluenzaA__AHC61610

SEQ ID NO: 24243 - protein, 469 aa, synthetic construct; identical to SEQ ID NO: 24019
  REGION 1..469: note = neuraminidase__InfluenzaA__AHC61622

SEQ ID NO: 24244 - protein, 469 aa, synthetic construct; identical to SEQ ID NO: 19518
  REGION 1..469: note = neuraminidase__InfluenzaA__AHC61634

SEQ ID NO: 24245 - protein, 469 aa, synthetic construct; identical to SEQ ID NO: 19518
  REGION 1..469: note = neuraminidase__InfluenzaA__AHC61646

SEQ ID NO: 24246 - protein, 469 aa, synthetic construct; identical to SEQ ID NO: 19518
  REGION 1..469: note = neuraminidase__InfluenzaA__AHC61658

SEQ ID NO: 24247 - protein, 469 aa, synthetic construct; identical to SEQ ID NO: 22922
  REGION 1..469: note = neuraminidase__InfluenzaA__AHC61670

SEQ ID NO: 24248 - protein, 469 aa, synthetic construct; identical to SEQ ID NO: 23975
  REGION 1..469: note = neuraminidase__InfluenzaA__AHC61682

SEQ ID NO: 24249 - protein, 469 aa, synthetic construct; identical to SEQ ID NO: 22922
  REGION 1..469: note = neuraminidase__InfluenzaA__AHC61694

SEQ ID NO: 24250 - protein, 469 aa, synthetic construct
  REGION 1..469: note = neuraminidase__InfluenzaA__AHC61706
MNPNQKIITIGSVSLTISTICFFMQIAILITTVTLHFKQYEFNSPPNNQVMLCEPTIIERNITEIVYLTNTTIEKEICPKLAEYRNWSKPQCDITGFAPFSKDNSIRLSAGGDIWVTREPYVSCDPDKCYQFALGQGTTLNNVHSNNTVRDRTPYRTLLMNELGVPFHLGTKQVCIAWSSSSCHDGKAWLHVCITGDDKNATASFIYNGRLVDSVVSWSKEILRTQESECVCINGTCTVVMTDGSASGKADTKILFIEEGKIVHTSTLSGSAQHVEECSCYPRYPGVRCVCRDNWKGSNRPIVDINIKEHSIVSSYVCSGLVGDTPRKNDSSSSSHCLDPNNEEGGHGVKGWAFDDGNDVWMGRTINETSRLGYETFKVIEGWSNPKSKLQINRQVIVDRGNRSGYSGIFSVEGKSCINRCFYVELIRGRKEETEVLWTSNSIVVFCGTSGTYGTGSWPDGADLNLMPI

SEQ ID NO: 24251 - protein, 469 aa, synthetic construct
  REGION 1..469: note = neuraminidase__InfluenzaA__AHC61718
MNPNQKIITIGSVSLTISTICFFMQIAILITTVTLHFKQCEFNSPPNNQVMLCEPTIIERNITEIVYLTNTTIEKEICPKLTEYRNWSKPQCDITGFAPFSKDNSIRLSAGGDIWVTREPYVSCDPNKCYQFALGQGTTLNNVHSNNTVRDRTPYRTLLMNELGVPFHLGTKQVCIAWSSSSCHDGKAWLHVCITGDDKNATASFIYNGKLVDSVVSWSKEILRTQESECVCINGTCTVVMTDGSASGKADTKILFIEEGKIVHTSTLSGSAQHVEECSCYPRYPGVRCVCRDNWKGSNRPIVDINIKDHSIVSSYVCSGLVGDTPRKNDSSSSSHCLDPNNEEGGHGVKGWAFDDGNDVWMGRTINETSRLGYETFKVIEGWSNPKSKLQINRQVIVDRGNRSGYSGIFSVEGKSCINRCFYVELIRGRKEETGVLWTSNSIVVFCGTSGTYGTGSWPDGADLNLMPI

SEQ ID NO: 24252 - protein, 469 aa, synthetic construct; identical to SEQ ID NO: 23971
  REGION 1..469: note = neuraminidase__InfluenzaA__AHC61730

SEQ ID NO: 24253 - protein, 469 aa, synthetic construct; identical to SEQ ID NO: 24020
  REGION 1..469: note = neuraminidase__InfluenzaA__AHC61742

SEQ ID NO: 24254 - protein, 469 aa, synthetic construct; identical to SEQ ID NO: 23971
  REGION 1..469: note = neuraminidase__InfluenzaA__AHC61754

SEQ ID NO: 24255 - protein, 469 aa, synthetic construct; identical to SEQ ID NO: 19518
  REGION 1..469: note = neuraminidase__InfluenzaA__AHC61766

SEQ ID NO: 24256 - protein, 469 aa, synthetic construct; identical to SEQ ID NO: 24007
  REGION 1..469: note = neuraminidase__InfluenzaA__AHC61778

SEQ ID NO: 24257 - protein, 469 aa, synthetic construct; identical to SEQ ID NO: 24045
  REGION 1..469: note = neuraminidase__InfluenzaA__AHC61790

SEQ ID NO: 24258 - protein, 469 aa, synthetic construct; identical to SEQ ID NO: 23975
  REGION 1..469: note = neuraminidase__InfluenzaA__AHC61802

SEQ ID NO: 24259 - protein, 469 aa, synthetic construct; identical to SEQ ID NO: 23971
  REGION 1..469: note = neuraminidase__InfluenzaA__AHC61814

SEQ ID NO: 24260 - protein, 469 aa, synthetic construct
  REGION 1..469: note = neuraminidase__InfluenzaA__AHC61826
MNPNQKIITIGSVSLTISTICFFMQIAILITTVTLHFKQYEFNSPPNNQVVLCEPTIIERNITEIVYLTNTTIEKEICPKPAEYRNWSKPQCDITGFAPFSKDNSIRLSAGGDIWVTREPYVSCDPDKCYQFALGQGTTLNNVHSNNTVRDRTPYRTLLMNELGVPFHLGTKQVCIAWSSSSCHDGKAWLHVCITGDDKNATASFIYNGRLVDSVVSWSKEILRTQESECVCINGTCTVVMTDGSASGKADTKILFIEEGKIVHTSTLSGSAQHVEECSCYPRYPGVRCVCRDNWKGSNRPIVDINIKDHSIVSSYVCSGLVGDTPRKNDSSSSSHCLDPNNEEGGHGVKGWAFDDGNDVWMGRTINETSRLGYETFKVIEGWSNPKSKLQINRQVIVDRSDRSGYSGIFSVEGKSCINRCFYVELIRGRKEETEVLWTSNSIVVFCGTSGTYGTGSWPDGADLNLMPI

SEQ ID NO: 24261 - protein, 469 aa, synthetic construct; identical to SEQ ID NO: 23971
  REGION 1..469: note = neuraminidase__InfluenzaA__AHC61838

SEQ ID NO: 24262 - protein, 469 aa, synthetic construct; identical to SEQ ID NO: 24007
  REGION 1..469: note = neuraminidase__InfluenzaA__AHC61850

SEQ ID NO: 24263 - protein, 469 aa, synthetic construct; identical to SEQ ID NO: 24020
  REGION 1..469: note = neuraminidase__InfluenzaA__AHC61862

SEQ ID NO: 24264 - protein, 469 aa, synthetic construct; identical to SEQ ID NO: 23971
  REGION 1..469: note = neuraminidase__InfluenzaA__AHC61874

SEQ ID NO: 24265 - protein, 469 aa, synthetic construct
  REGION 1..469: note = neuraminidase__InfluenzaA__AHC61886
MNPNQKIITIGSVSLTISTICFFMQIAILITTVTLHFKQYEFNPPPNNQVVLCEPTIIERNITEIVYLTNTTIEKEICPKPAEYRHWSKPQCDITGFAPFSKDNSIRLSAGGDIWVTREPYVSCDPDKCYQFALGQGTTLNNVHSNNTVRDRTPYRTLLMNELGVPFHLGTKQVCIAWSSSSCHDGKAWLHVCITGDDKNATASFIYNGRLVDSVVSWSKEILRTQESECVCINGTCTVVMTDGSASGKADTKILFIEEGKIVHTSTLSGSAQHVEECSCYPRYPGVRCVCRDNWKGSNRPIVDINIKDHSIVSSYVCSGLVGDTPRKNDSSSSSHCLDPNNEEGGHGVKGWAFDDGNDVWMGRTINETSRLGYETFKVIEGWSNPKSKLQINRQVIVDRGDRSGYSGIFSVEGKSCINRCFYVELIRGRKEETEVLWTSNSIVVFCGTSGTYGTGSWPDGADLNLMPI

SEQ ID NO: 24266 - protein, 469 aa, synthetic construct; identical to SEQ ID NO: 23975
  REGION 1..469: note = neuraminidase__InfluenzaA__AHC61898

SEQ ID NO: 24267 - protein, 469 aa, synthetic construct; identical to SEQ ID NO: 24007
  REGION 1..469: note = neuraminidase__InfluenzaA__AHC61910

SEQ ID NO: 24268 - protein, 469 aa, synthetic construct; identical to SEQ ID NO: 19518
  REGION 1..469: note = neuraminidase__InfluenzaA__AHC61934

SEQ ID NO: 24269 - protein, 469 aa, synthetic construct
  REGION 1..469: note = neuraminidase__InfluenzaA__AHC61946
MNPNQKIITIGSVSLTISTICFFMQIAILITTVTLHFKQYESYSPPNNQVMLCEPTIIERNITEIVYLTNTTIEKEICPKLAEYRNWSKPQCDITGFAPFSKDNSIRLSAGGDIWVTREPYVSCDPDKCYQFALGQGTTLNNVHSNNTVRDRTPYRTLLMNELGVPFHLGTKQVCIAWSSSSCHDGKAWLHVCITGDDKNATASFIYNGRLVDSVVSWSKEILRTQESECVCINGTCTVVMTDGSASGKADTKILFIEEGKIVHTSTLSGSAQHVEECSCYPRNPGVRCVCRDNWKGSNRPIVDINIKDHSIVSSYVCSGLVGDTPRKNDSSSSSHCLDPNNEEGGHGVKGWAFDDGNDVWMGRTINETSRLGYETFKVIEGWSNPKSKLQINRQVIVDRGNRSGYSGIFSVEGKSCINRCFYVELIRGRKEETEVLWTSNSIVVFCGTSGTYGTGSWPDGADLNLMPI

SEQ ID NO: 24270 - protein, 469 aa, synthetic construct; identical to SEQ ID NO: 22922
  REGION 1..469: note = neuraminidase__InfluenzaA__AHC61958

SEQ ID NO: 24271 - protein, 469 aa, synthetic construct; identical to SEQ ID NO: 23971
  REGION 1..469: note = neuraminidase__InfluenzaA__AHC61970

SEQ ID NO: 24272 - protein, 469 aa, synthetic construct
  REGION 1..469: note = neuraminidase__InfluenzaA__AHC61982
MNPNQKIITIGSVSLTISTICFFMQIAILITTVTLHFKQYEFNSPPNNQVMLCEPTIIERNITEIVYLTNTTIEKEICPKLAEYRNWSKPQCDITGFAPFSKDNSIRLSAGGDIWVTREPYVSCDPDKCYQFALGQGTTLNNVHSNNTVRDRTPYRTLLMNELGVPFHLGTKQVCIAWSSSSCHDGKAWLHVCITGDDKNATASFIYNGRLVDSVVSWSKEILRTQESECVCINGTCAVVMTDGSASGKADTKILFIEEGKIVHTSTLSGSAQHVEECSCYPRYPGVRCVCRDNWKGSNRPIVDINIKDHGIVSSYVCSGLVGDTPRKNDSSSSSHCLDPNNEEGGHGVKGWAFDDGNDVWMGRTINETSRLGYETFKVIEGWSNPKSKLQINRQVIVDRGNRSGYSGIFSVEGKSCINRCFYVELIRGRKEETEVLWTSNSIVVFCGTSGTYGTGSWPDGADLNLMPI

SEQ ID NO: 24273 - protein, 469 aa, synthetic construct; identical to SEQ ID NO: 23975
  REGION 1..469: note = neuraminidase__InfluenzaA__AHC61994

SEQ ID NO: 24274 - protein, 469 aa, synthetic construct; identical to SEQ ID NO: 24007
  REGION 1..469: note = neuraminidase__InfluenzaA__AHC62006

SEQ ID NO: 24275 - protein, 469 aa, synthetic construct; identical to SEQ ID NO: 23971
  REGION 1..469: note = neuraminidase__InfluenzaA__AHC62018

SEQ ID NO: 24276 - protein, 469 aa, synthetic construct; identical to SEQ ID NO: 22922
  REGION 1..469: note = neuraminidase__InfluenzaA__AHC62030

SEQ ID NO: 24277 - protein, 469 aa, synthetic construct; identical to SEQ ID NO: 23975
  REGION 1..469: note = neuraminidase__InfluenzaA__AHC62042

SEQ ID NO: 24278 - protein, 469 aa, synthetic construct; identical to SEQ ID NO: 24048
  REGION 1..469: note = neuraminidase__InfluenzaA__AHC62053

SEQ ID NO: 24279 - protein, 469 aa, synthetic construct
  REGION 1..469: note = neuraminidase__InfluenzaA__AHC62065
MNPNQKIITIGSVSLTISTICFFMQIAILVTTVTLHFKQYEFNSPPNNQVMLCEPTIIERNITEIVYLTNTTIEKEICPKPAEYRNWSKPQCDITGFAPFSKDNSIRLSAGGDIWVTREPYVSCDPDKCYQFALGQGTTLNNVHSNNTVRDRTPYRTLLMNELGVPFHLGTKQVCIAWSSSSCHDGKAWLHVCITGDDKNATASFIYNGRLVDSVVSWSKEILRTQESECVCINGTCTVVMTDGSASGKADTKILFIEEGKIVHTSTLSGSAQHVEECSCYPRYPGVRCVCRDNWKGSNRPIVDINIKDHSIVSSYVCSGLVGDTPRKNDSSSSSHCLDPNNEEGGHGVKGWAFDDGNDVWMGRTINETSRLGYETFKVIEGWSNPKSKLQINRQVIVDRGDRSGYSGIFSVEGKSCINRCFYVELIRGRKEETEVLWTSNSIVVFCGTSGTYGTGSWPDGADLNLMPI

SEQ ID NO: 24280 - protein, 469 aa, synthetic construct; identical to SEQ ID NO: 24106
  REGION 1..469: note = neuraminidase__InfluenzaA__AHC62077

SEQ ID NO: 24281 - protein, 469 aa, synthetic construct; identical to SEQ ID NO: 24020
  REGION 1..469: note = neuraminidase__InfluenzaA__AHC62089

SEQ ID NO: 24282 - protein, 469 aa, synthetic construct; identical to SEQ ID NO: 23971
  REGION 1..469: note = neuraminidase__InfluenzaA__AHC62101

SEQ ID NO: 24283 - protein, 469 aa, synthetic construct; identical to SEQ ID NO: 24020
  REGION 1..469: note = neuraminidase__InfluenzaA__AHC62113

SEQ ID NO: 24284 - protein, 469 aa, synthetic construct
  REGION 1..469: note = neuraminidase__InfluenzaA__AHC62125
MNPNQKIITIGSVSLTISTICFFMQIAILITTVTLHFKQYEFNSPPNNQVMLCEPTIIERNITEIVYLTNTTIEKEICPKLAEYRNWSKPQCDITGFAPFSKDNSIRLSAGGDIWVTREPYVSCDPNKCYQFALGQGTTLNNVHSNNTVRDRTPYRTLLMNELGVPFHLGTKQVCIAWSSSSCHDGKAWLHVCITGDDKNATASFIYNGKLVDSVVSWSKEILRTQESECVCINGTCTVVMTDGSASGKADTKILFIEEGKIVHTSTLSGSAQHVEECSCYPRYPGVRCVCRDNWKGSNRPIVDINIKDHSIVSSYVCSGLVGDTPRKNDSSSSSHCLDPNNEEGGHGVKGWAFDDGNDVWMGRTINETSRLGYETFKVIEGWSNPKSKLQINRQVIVDRGNKSGYSGIFSVEGKSCINRCFYVELIRGRKEETEVLWTSNSIVVFCGTSGTYGTGSWPDGADLNLMPI

SEQ ID NO: 24285 - protein, 469 aa, synthetic construct
  REGION 1..469: note = neuraminidase__InfluenzaA__AHC62137
MNPNQKIITIGSVSLTISTICFFMQIAILITTVTLHFKQYEFNSPPNNQVMLCEPTIIERNITEIVYLTNTTIEKEICPKLAEYRNWSKPQCDITGFAPFSKDNSIRLSAGGDIWVTREPYVSCDPDKCYQFALGQGTTLNNVHSNNTVRDRTPYRTLLMNELGVPFHLGTKQVCIAWSSSSCHDGKAWLHVCITGDDKNATASFIYNGRLVDSVVSWSKEILRTQESECVCINGTCTVVMTDGSASGKADTKILFIEEGKIVHTSTLSGSAQHVEECSCYPRYPGVRCVCRDNWKGSNRPIVDINIKDHSIVSSYVCSGLVGDTPRKNDSSSSSHCLDPNNEEGGHGVKGWAFDDGNDVWMGRTINETSRLGYETFKVIEGWSNPKSKLQINRQVIVDRGDRSGYSGIFSVEGKSCINRCFYVELIRGRKEETEVLWTSNSIVVFCGTSGTYGTGSWPDGADLNLMPI

SEQ ID NO: 24286 - protein, 469 aa, synthetic construct
  REGION 1..469: note = neuraminidase__InfluenzaA__AHC62149
MNPNQKIITIGSVSLTISTICFFMQIAILITTVTLHFKQYEFNSPPNNQVMLCEPTIIERNITEIVYLTNTTIEKEICPKPAEYRNWSKPQCDITGFAPFSKDNSIRLSAGGDIWVTREPYVSCDPDKCYQFALGQGTTLNNVHSNNTVRDRTPYRTLLMNELGVPFHLGTKQVCIAWSSSSCHDGKAWLHVCITGDDKNATASFIYNGRLVDSVVSWSKEILRTQESECVCINGTCTVVMTDGSASGKADTKILFIEEGKIVHTSTLSGSAQHVEECSCYPRYPGVRCVCRDNWKGSNRPIVDINIRDHSIVSSYVCSGLVGDTPRKNDSSSSSHCLDPNNEEGGHGVKGWAFDDGNDVWMGRTINETSRLGYETFKVIEGWSNPKSKLQINRQVIVDRGDRSGYSGIFSVEGKSCINRCFYVELIRGRKEETEVLWTSNSIVVFCGTSGTYGTGSWPDGADLNLMPI

SEQ ID NO: 24287 - protein, 469 aa, synthetic construct; identical to SEQ ID NO: 24007
  REGION 1..469: note = neuraminidase__InfluenzaA__AHC62161

SEQ ID NO: 24288 - protein, 469 aa, synthetic construct
  REGION 1..469: note = neuraminidase__InfluenzaA__AHC62173
MNPNQKIITIGSVSLTISTICFFMQIAILITTVTLHFKQCEFNSPPNNQVMLCEPTIIERNITEIVYLTNTTIEKEICPKLAEYRNWSKPQCDITGFAPFSKDNSIRLSAGGDIWVTREPYVSCDPNKCYQFALGQGTTLNNVHSNNTVRDRTPYRTLLMNELGVPFHLGTKQVCIAWSSSSCHDGKAWLHVCITGDDKNATASFIYNGKLVDSVVSWSKEILRTQESECVCINGTCTVVMTDGSASGKADTKILFIEEGKIVHTSTLSGSAQHVEECSCYPRYPGVRCVCRDNWKGSNRPIVDINIKDHSIVSSYVCSGLVGDTPRKNDSSSSSHCLDPNNEEGGHGVKGWAFDDGNDVWMGRTINETSRLGYETFKVIEGWSNPKSKLQINRQVIVDRGNRSGYSGIFSVEGKSCINRCFYVELIRGRKEETEVLWTSNSIVVFCGTSGTYGTGSWPDGADLNLMPI

SEQ ID NO: 24289 - protein, 469 aa, synthetic construct; identical to SEQ ID NO: 24020
  REGION 1..469: note = neuraminidase__InfluenzaA__AHC62185

SEQ ID NO: 24290 - protein, 469 aa, synthetic construct; identical to SEQ ID NO: 22922
  REGION 1..469: note = neuraminidase__InfluenzaA__AHC62197

SEQ ID NO: 24291 - protein, 469 aa, synthetic construct
  REGION 1..469: note = neuraminidase__InfluenzaA__AHC62209
MNPNQKIITIGSVSLTISTICFFMQIAILITTVTLHFKQYEFNSPPNNQVMLCEPTIIERNITEIVYLTNTTIEKEICPKPAEYRNWSKPQCDITGFAPFSKDNSIRLSAGGDIWVTREPYVSCDPDKCYQFALGQGTTLNNVHSNNTVRDRTPYRTLLMNELGVPFHLGTKQVCIAWSSSSCHDGKAWLHVCITGDDKNATASFIYNGRLVDSVVSWSKEILRTQESECVCINGTCTVVMTDGSASGKADTKILFIEEGKIVHTSTLSGSAQHVEECSCYPRYPGVRCVCRDNWKGSNRPIVDINIKNHSIVSSYVCSGLVGDTPRKNDSSSSSHCLDPNNEEGGHGVKGWAFDDGNDVWMGRTINETSRLGYETFKVIEGWSNPKSKLQINRQVIVDRGDRSGYSGIFSVEGKSCINRCFYVELIRGRKEETEVLWTSNSIVVFCGTSGTYGTGSWPDGADLNLMPI

SEQ ID NO: 24292 - protein, 469 aa, synthetic construct; identical to SEQ ID NO: 23975
  REGION 1..469: note = neuraminidase__InfluenzaA__AHC62221

SEQ ID NO: 24293 - protein, 469 aa, synthetic construct; identical to SEQ ID NO: 19518
  REGION 1..469: note = neuraminidase__InfluenzaA__AHC62233

SEQ ID NO: 24294 - protein, 469 aa, synthetic construct; identical to SEQ ID NO: 23971
  REGION 1..469: note = neuraminidase__InfluenzaA__AHC62245

SEQ ID NO: 24295 - protein, 469 aa, synthetic construct
  REGION 1..469: note = neuraminidase__InfluenzaA__AHC62257
MNPNQKIITIGSVSLTISTICFFMQIAILITTVTLHFKQYEFNSPPNNQVMLCEPTIIERNITEIVYLTNTTIEKEICPKPAEYRNWSKPQCDITGFAPFSKDNSIRLSAGGDIWVTREPYVSCDPDKCYQFALGQGTTLNNVHSNNTVRDRTPYRTLLMNELGVPFHLGTKQVCIAWSSSSCHDGKAWLHVCITGDDKNATASFIYNGRLVDSVVSWSKEILRTQESECVCINGTCTVVMTDGSASGKADTKILFIEEGKIVHTSTLSGSAQHVEECSCYPRYPGVRCVCRDNWKGSNRPIVDINIKDHSIVSSYVCSGLVGDTPRKNDSSSSSHCLDPNNEEGGHGVKGWAFDDGNDVWMGRTINETSRLGYETFKVIEGWSNPKSKLQINRQVIVGRGDRSGYSGIFSVEGKSCINRCFYVELIRGRKEETEVLWTSNSIVVFCGTSGTYGTGSWPDGADLNLMPI

SEQ ID NO: 24296 - protein, 469 aa, synthetic construct; identical to SEQ ID NO: 24048
  REGION 1..469: note = neuraminidase__InfluenzaA__AHC62269

SEQ ID NO: 24297 - protein, 469 aa, synthetic construct; identical to SEQ ID NO: 24020
  REGION 1..469: note = neuraminidase__InfluenzaA__AHC62281

SEQ ID NO: 24298 - protein, 469 aa, synthetic construct; identical to SEQ ID NO: 23975
  REGION 1..469: note = neuraminidase__InfluenzaA__AHC62293

SEQ ID NO: 24299 - protein, 469 aa, synthetic construct; identical to SEQ ID NO: 19518
  REGION 1..469: note = neuraminidase__InfluenzaA__AHC62305

SEQ ID NO: 24300 - protein, 469 aa, synthetic construct; identical to SEQ ID NO: 23971
  REGION 1..469: note = neuraminidase__InfluenzaA__AHC62317

SEQ ID NO: 24301 - protein, 469 aa, synthetic construct
  REGION 1..469: note = neuraminidase__InfluenzaA__AHC62329
MNPNQKIITIGSVSLTISTICFFMQIAILITTVTLHFKQYEFNSPPNNQVMLCEPTIIERNITEIVYLTNTTIEKEICPKPAEYRNWSKPQCDITGFAPFSKDNSIRLSAGGDIWVTREPYVSCDPDKCYQFALGQGTTLNNVHSNNTVRDRTPYRTLLMNELGVPFHLGTKQVCIAWSSSSCHDGKAWLHVCITGDDKNATASFIYNGRLVDSVVSWSKEILRTQESECVCINGTCTVVMTDGSASGKADTKILFIEEGKIVHTSTLSGSAQHVEECSCYPRYPGVRCVCRDNWKGSNRPIVDINIKDHSIVSSYVCSGLVGDTPRKNDSSSSSHCLDPNNEEGGHGVKGWAFDDGNDVWMGRTINETSRLGYETFKVIEGWSNPKSKLQINRQVIADRGDRSGYSGIFSVEGKSCINRCFYVELIRGRKEETEVLWTSNSIVVFCGTSGTYGTGSWPDGADLNLMPI

SEQ ID NO: 24302 - protein, 469 aa, synthetic construct; identical to SEQ ID NO: 23971
  REGION 1..469: note = neuraminidase__InfluenzaA__AHC62341

SEQ ID NO: 24303 - protein, 469 aa, synthetic construct
  REGION 1..469: note = neuraminidase__InfluenzaA__AHC62353
MNPNQKIITIGSVSLTISTICFFMQIAILITTVTLHFKQYEFNSPPNNQVMLCEPTIIERNITEIVYLTNTTIEKEICPKLAEYRNWSKPQCDITGFAPFSKDNSIRLSAGGDIWVTREPYVSCDPDKCYQFALGQGTTLNNVHSNNTVRDRTPYRTLLMNELGVPFHLGTKQVCIAWSSSSCHDGKAWLHVCITGDDKNATASFIYNGRLVDSVVSWSKEILRTQESECVCINGTCTVVMTDGSASGKADTKILFIEEGKIVHTSTLSGSAQHVEECSCYPRYPGVRCVCRDNWKGSNRPIVDINIKDHSIVSSYVCSGLVGDTPRKTDSSSSSHCLDPNNEEGGHGVKGWAFDDGNDVWMGRTINETSRLGYETFKVIEGWSNPKSKLQINRQVIVDRGNRSGYSGIFSVEGKSCINRCFYVELIRGRKEETEVLWTSNSIVVFCGTSGTYGTGSWPDGADLNLMPI

SEQ ID NO: 24304 - protein, 469 aa, synthetic construct; identical to SEQ ID NO: 23971
  REGION 1..469: note = neuraminidase__InfluenzaA__AHC62365

SEQ ID NO: 24305 - protein, 469 aa, synthetic construct; identical to SEQ ID NO: 24188
  REGION 1..469: note = neuraminidase__InfluenzaA__AHC62377

SEQ ID NO: 24306 - protein, 469 aa, synthetic construct; identical to SEQ ID NO: 24020
  REGION 1..469: note = neuraminidase__InfluenzaA__AHC62389

SEQ ID NO: 24307 - protein, 469 aa, synthetic construct; identical to SEQ ID NO: 24020
  REGION 1..469: note = neuraminidase__InfluenzaA__AHC62401

SEQ ID NO: 24308 - protein, 469 aa, synthetic construct; identical to SEQ ID NO: 24048
  REGION 1..469: note = neuraminidase__InfluenzaA__AHC62413

SEQ ID NO: 24309 - protein, 469 aa, synthetic construct; identical to SEQ ID NO: 24106
  REGION 1..469: note = neuraminidase__InfluenzaA__AHC62425

SEQ ID NO: 24310 - protein, 469 aa, synthetic construct; identical to SEQ ID NO: 19518
  REGION 1..469: note = neuraminidase__InfluenzaA__AHC62437

SEQ ID NO: 24311 - protein, 469 aa, synthetic construct; identical to SEQ ID NO: 24020
  REGION 1..469: note = neuraminidase__InfluenzaA__AHC62449

SEQ ID NO: 24312 - protein, 469 aa, synthetic construct; identical to SEQ ID NO: 23975
  REGION 1..469: note = neuraminidase__InfluenzaA__AHC62461

SEQ ID NO: 24313 - protein, 469 aa, synthetic construct; identical to SEQ ID NO: 23971
  REGION 1..469: note = neuraminidase__InfluenzaA__AHC62473

SEQ ID NO: 24314 - protein, 469 aa, synthetic construct; identical to SEQ ID NO: 22146
  REGION 1..469: note = neuraminidase__InfluenzaA__AHC62485

SEQ ID NO: 24315 - protein, 469 aa, synthetic construct; identical to SEQ ID NO: 24020
  REGION 1..469: note = neuraminidase__InfluenzaA__AHC62509

SEQ ID NO: 24316 - protein, 469 aa, synthetic construct
  REGION 1..469: note = neuraminidase__InfluenzaA__AHC62521
MNPNQKIITIGSVSLTISTICFFMQIAILITTVTLHFKQYEFNSPPNNQVMLCEPTIIERNITEIVYLTNTTIEKEICPKLAEYRNWSKPQCDITGFAPFSKDNSIRLSAGGDIWVTREPYVSCDPNKCYQFALGQGTTLNNVHSNNTVRDRTPYRTLLMNELGVPFHLGTKQVCIAWSSSSCHDGKAWLHVCITGDDKNATASFIYNGKLVDSVVSWSKEILRTQESECVCINGTCTVVMTDGSASGKADTKILFIEEGKIVHTSTLSGSAQHVEECSCYPRYPGVRCVCRDNWKGSNRPIVDINIKDHSIVSSYVCSGLVGDTPRKNDSSSSSHCLDPNNEEGGHGVKGWAFDDGNDVWMGRTINETSRLGYETFKVIEGWSNPKSKLQINRQVIVDRGNRSGYSGIFSVEGKSCINRCFYVELIRGRKEETEVLWTSNSIIVFCGTSGTYGTGSWPDGADLNLMPI

SEQ ID NO: 24317 - protein, 469 aa, synthetic construct
  REGION 1..469: note = neuraminidase__InfluenzaA__AHC62533
MNPNQKIITIGSVSLTISTICFFMQVAILITTVTLHFKQYEFNSPPNNQVMLCEPTIIERNITEILYLTNTTIEKEICPKLAEYRNWSKPQCDITGFAPFSKDNSIRLSAGGDIWVTREPYVSCDPDKCYQFALGQGTTLNNVHSNNTVRDRTPYRTLLMNELGVPFHLGTKQVCIAWSSSSCHDGKAWLHVCITGDDKNATASFIYNGKLVDSVVSWSKEILRTQESECVCINGTCTVVMTDGSASGKADTKILFIEEGKIVHTSTLSGSAQHVEECSCYPRYPGVRCVCRDNWKGSNRPIVDINIKDHSIVSSYVCSGLVGDTPRKNDSSSSSHCLDPNNEEGGNGVKGWAFDDGNDVWMGRTINETSRLGYETFKVIEGWSNPKSKLQINRQVIVDRGNRSGYSGIFSVEGKSCINRCFYVELIRGRKEETEVLWTSNSIVVFCGTSGTYGTGSWPDGADLNLMPI

SEQ ID NO: 24318 - protein, 469 aa, synthetic construct; identical to SEQ ID NO: 24175
  REGION 1..469: note = neuraminidase__InfluenzaA__AHC62545

SEQ ID NO: 24319 - protein, 469 aa, synthetic construct; identical to SEQ ID NO: 24020
  REGION 1..469: note = neuraminidase__InfluenzaA__AHC62557

SEQ ID NO: 24320 - protein, 469 aa, synthetic construct; identical to SEQ ID NO: 23971
  REGION 1..469: note = neuraminidase__InfluenzaA__AHC62569

SEQ ID NO: 24321 - protein, 469 aa, synthetic construct; identical to SEQ ID NO: 24020
  REGION 1..469: note = neuraminidase__InfluenzaA__AHC62581

SEQ ID NO: 24322 - protein, 469 aa, synthetic construct
  REGION 1..469: note = neuraminidase__InfluenzaA__AHC62593
MNPNQKIITIGSVSLTISTICFFMQIAILITTVTLHFKQYEFNSPPNNQVMLCEPTIIERNITEIVYLTNTTIEKEICPKLAEYRNWSKPQCDITGFAPFSKDNSIRLSAGGNIWVTREPYVSCDPDKCYQFALGQGTTLNNVHSNNTVRDRTPYRTLLMNELGVPFHLGTKQVCIAWSSSSCHDGKAWLHVCITGDDKNATASFIYNGRLVDSVVSWSKEILRTQESECVCINGTCTVVMTDGSASGKADTKILFIEEGKIVHTSTLSGSAQHVEECSCYPRYPGVRCVCRDNWKGSNRPIVDINIKDHSIVSSYVCSGLVGDTPRKNDSSSSSHCLDPNNEEGGHGVKGWAFDDGNDVWMGRTINETSRLGYETFKVIEGWSNPKSKLQINRQVIVDRGNRSGYSGIFSVEGKSCINRCFYVELIRGRKEETEVLWTSNSIVVFCGTSGTYGTGSWPDGADLNLMPI

SEQ ID NO: 24323 - protein, 469 aa, synthetic construct; identical to SEQ ID NO: 24007
  REGION 1..469: note = neuraminidase__InfluenzaA__AHC62605

SEQ ID NO: 24324 - protein, 469 aa, synthetic construct
  REGION 1..469: note = neuraminidase__InfluenzaA__AHC62617
MNPNQKIITIGSVSLTISTICFFMQIAILITTVTLHFKQYEFNSPPNNQVMRCEPTIIERNITEIVYLTNTTIEKEICPKLAEYRNWSKPQCDITGFAPFSKDNSIRLSAGGDIWVTREPYVSCDPNKCYQFALGQGTTLNNVHSNNTVRDRTPYRTLLMNELGVPFHLGTKQVCIAWSSSSCHDGKAWLHVCITGDDKNATASFIYNGKLVDSVVSWSKEILRTQESECVCINGTCTVVMTDGSASGKADTKILFIEEGKIVHTSTLSGSAQHVEECSCYPRYPGVRCVCRDNWKGSNRPIVDINIKDHSIVSSYVCSGLVGDTPRKNDSSSSSHCLDPNNEEGGHGVKGWAFDDGNDVWMGRTINETSRLGYETFKVIEGWSNPKSKLQINRQVIVDRGNRSGYSGIFSVEGKSCINRCFYVELIRGRKEETEVLWTSNSIVVFCGTSGTYGTGSWPDGADLNLMPI

SEQ ID NO: 24325 - protein, 469 aa, synthetic construct; identical to SEQ ID NO: 23975
  REGION 1..469: note = neuraminidase__InfluenzaA__AHC62629

SEQ ID NO: 24326 - protein, 469 aa, synthetic construct
  REGION 1..469: note = neuraminidase__InfluenzaA__AHC62641
MNPNQKIITIGSVSLTISTVCFFMQVAILITTVTLHFKQYEFNSPPNNQVMLCEPTIIERNITEILYLTNTTIEKEICPKLAEYRNWSKPQCDITGFAPFSKDNSIRLSAGGDIWVTREPYVSCDPDKCYQFALGQGTTLNNVHSNNTVRDRTPYRTLLMNELGVPFHLGTKQVCIAWSSSSCHDGKAWLHVCITGDDKNATASFIYNGKLVDSVVSWSKEILRTQESECVCINGTCTVVMTDGSASGKADTKILFIEEGKIVHTSTLSGSAQHVEECSCYPRYPGVRCVCRDNWKGSNRPIVDINIKDHSIVSSYVCSGLVGDTPRKNDSSSSSHCLDPNNEEGGHGVKGWAFDDGNDVWMGRTINETSRLGYETFKVIEGWSNPKSKLQINRQVIVDRGNRSGYSGIFSVEGKSCINRCFYVELIRGRKEETEVLWTSNSIVVFCGTSGTYGTGSWPDGADLNLMPI

SEQ ID NO: 24327 - protein, 469 aa, synthetic construct; identical to SEQ ID NO: 23975
  REGION 1..469: note = neuraminidase__InfluenzaA__AHC62653

SEQ ID NO: 24328 - protein, 469 aa, synthetic construct; identical to SEQ ID NO: 23975
  REGION 1..469: note = neuraminidase__InfluenzaA__AHC62665

SEQ ID NO: 24329 - protein, 469 aa, synthetic construct
  REGION 1..469: note = neuraminidase__InfluenzaA__AHC62677
MNPNQKIITIGSVSLTISTICFFMQIAILITTVTLHFKQYEFNSPPNNQVMLCEPTIIERNITEIVYLTNTTIEKEICPKLAEYRNWSKPQCDITGFAPFSKDNSIRLSAGGDIWVTREPYVSCDPNKCYQFALGQGTTLNNVHSNNTVRDRTPYRTLLMNELGVPFHLGTKQVCIAWSSSSCHDGKAWLHVCITGDDKNATASFIYNGKLVDSVVSWSKEILRTQESECVCINGTCTVVMTDGSASGKADTKILFIEEGKIVHTSTLSGSAQHVEECSCYPRYPGVRCVCRDNWKGSNRPIVDINIKDHSIVSSYVCSGLVGDTPRKNDISSSSHCLDPNNEEGGHGVKGWAFDDGNDVWMGRTINETSRLGYETFKVIEGWSNPKSKLQINRQVIVDRGNRSGYSGIFSVEGKSCINRCFYVELIRGRKEETEVLWTSNSIVVFCGTSGTYGTGSWPDGADLNLMPI

SEQ ID NO: 24330 - protein, 465 aa, synthetic construct
  REGION 1..465: note = neuraminidase__InfluenzaA__AHF20560
MNPNQKILCTSATAIIIGAITVLIGIANLGLNIGLHLKPGCNCSHSQPETTNTSQTIINNYYNETNTTNIQMEERTSRNFNNLTKGLCTINSWHIYGKDNAVRIGESSDVLVTREPYVSCDPDECRFYALSQGTTIRGKHSNGTIHDRSQYRALISWPLSSPPTVYNSRVECIGWSSTSCHDGKSRMSICISGPNNNASAVVWYNRRPVAEINTWARNILRTQESECVCHNGVCPVVFTDGSATGPADTRIYYFKEGKILKWESLTGTAKHIEECSCYGERTGITCTCRDNWQGSNRPVIQIDPVAMTHTSQYICSPVLTDNPRPNDPNIGKCNDPYPGNNNNGVKGFSYLDGANTWLGRTISTASRSGYEMLKVPNALTDDRSKPIQGQTIVLNADWSGYSGSFMDYWAEGDCYRACFYVELIRGRPKEDKVWWTSNSIVSMCSSTEFLEQWNWPDGAKIEYFL

SEQ ID NO: 24331 - protein, 465 aa, synthetic construct; identical to SEQ ID NO: 23454
  REGION 1..465: note = neuraminidase__InfluenzaA__AHF20570

SEQ ID NO: 24332 - protein, 470 aa, synthetic construct; identical to SEQ ID NO: 16632
  REGION 1..470: note = neuraminidase__InfluenzaA__AHG96111

SEQ ID NO: 24333 - protein, 470 aa, synthetic construct; identical to SEQ ID NO: 16632
  REGION 1..470: note = neuraminidase__InfluenzaA__AHG96123

SEQ ID NO: 24334 - protein, 470 aa, synthetic construct; identical to SEQ ID NO: 16632
  REGION 1..470: note = neuraminidase__InfluenzaA__AHG96135

SEQ ID NO: 24335 - protein, 470 aa, synthetic construct; identical to SEQ ID NO: 16632
  REGION 1..470: note = neuraminidase__InfluenzaA__AHG96147

SEQ ID NO: 24336 - protein, 470 aa, synthetic construct; identical to SEQ ID NO: 16632
  REGION 1..470: note = neuraminidase__InfluenzaA__AHG96159

SEQ ID NO: 24337 - protein, 470 aa, synthetic construct; identical to SEQ ID NO: 16632
  REGION 1..470: note = neuraminidase__InfluenzaA__AHG96171

SEQ ID NO: 24338 - protein, 470 aa, synthetic construct; identical to SEQ ID NO: 16632
  REGION 1..470: note = neuraminidase__InfluenzaA__AHG96183

SEQ ID NO: 24339 - protein, 470 aa, synthetic construct; identical to SEQ ID NO: 16632
  REGION 1..470: note = neuraminidase__InfluenzaA__AHG96195

SEQ ID NO: 24340 - protein, 470 aa, synthetic construct; identical to SEQ ID NO: 16632
  REGION 1..470: note = neuraminidase__InfluenzaA__AHG96207

SEQ ID NO: 24341 - protein, 470 aa, synthetic construct; identical to SEQ ID NO: 16632
  REGION 1..470: note = neuraminidase__InfluenzaA__AHG96219

SEQ ID NO: 24342 - protein, 470 aa, synthetic construct; identical to SEQ ID NO: 16632
  REGION 1..470: note = neuraminidase__InfluenzaA__AHG96231

SEQ ID NO: 24343 - protein, 470 aa, synthetic construct; identical to SEQ ID NO: 16632
  REGION 1..470: note = neuraminidase__InfluenzaA__AHG96243

SEQ ID NO: 24344 - protein, 470 aa, synthetic construct; identical to SEQ ID NO: 16632
  REGION 1..470: note = neuraminidase__InfluenzaA__AHG96255

SEQ ID NO: 24345 - protein, 470 aa, synthetic construct; identical to SEQ ID NO: 16632
  REGION 1..470: note = neuraminidase__InfluenzaA__AHG96267

SEQ ID NO: 24346 - protein, 470 aa, synthetic construct; identical to SEQ ID NO: 16632
  REGION 1..470: note = neuraminidase__InfluenzaA__AHG96279

SEQ ID NO: 24347 - protein, 470 aa, synthetic construct; identical to SEQ ID NO: 16632
  REGION 1..470: note = neuraminidase__InfluenzaA__AHG96291

SEQ ID NO: 24348 - protein, 470 aa, synthetic construct; identical to SEQ ID NO: 16632
  REGION 1..470: note = neuraminidase__InfluenzaA__AHG96303

SEQ ID NO: 24349 - protein, 469 aa, synthetic construct; identical to SEQ ID NO: 16456
  REGION 1..469: note = neuraminidase__InfluenzaA__AHG96362

SEQ ID NO: 24350 - protein, 469 aa, synthetic construct; identical to SEQ ID NO: 16456
  REGION 1..469: note = neuraminidase__InfluenzaA__AHG96374

SEQ ID NO: 24351 - protein, 469 aa, synthetic construct; identical to SEQ ID NO: 16456
  REGION 1..469: note = neuraminidase__InfluenzaA__AHG96386

SEQ ID NO: 24352 - protein, 470 aa, synthetic construct; identical to SEQ ID NO: 16632
  REGION 1..470: note = neuraminidase__InfluenzaA__AHG96398

SEQ ID NO: 24353 - protein, 469 aa, synthetic construct; identical to SEQ ID NO: 16456
  REGION 1..469: note = neuraminidase__InfluenzaA__AHG96410

SEQ ID NO: 24354 - protein, 469 aa, synthetic construct; identical to SEQ ID NO: 16456
  REGION 1..469: note = neuraminidase__InfluenzaA__AHG96422

SEQ ID NO: 24355 - protein, 469 aa, synthetic construct; identical to SEQ ID NO: 16456
  REGION 1..469: note = neuraminidase__InfluenzaA__AHG96434

SEQ ID NO: 24356 - protein, 469 aa, synthetic construct; identical to SEQ ID NO: 16456
  REGION 1..469: note = neuraminidase__InfluenzaA__AHG96446

SEQ ID NO: 24357 - protein, 469 aa, synthetic construct; identical to SEQ ID NO: 16456
  REGION 1..469: note = neuraminidase__InfluenzaA__AHG96458

SEQ ID NO: 24358 - protein, 469 aa, synthetic construct; identical to SEQ ID NO: 16456
  REGION 1..469: note = neuraminidase__InfluenzaA__AHG96470

SEQ ID NO: 24359 - protein, 469 aa, synthetic construct; identical to SEQ ID NO: 16456
  REGION 1..469: note = neuraminidase__InfluenzaA__AHG96482

SEQ ID NO: 24360 - protein, 469 aa, synthetic construct; identical to SEQ ID NO: 16456
  REGION 1..469: note = neuraminidase__InfluenzaA__AHG96494

SEQ ID NO: 24361 - protein, 469 aa, synthetic construct; identical to SEQ ID NO: 16456
  REGION 1..469: note = neuraminidase__InfluenzaA__AHG96506

SEQ ID NO: 24362 - protein, 470 aa, synthetic construct; identical to SEQ ID NO: 16632
  REGION 1..470: note = neuraminidase__InfluenzaA__AHG96518

SEQ ID NO: 24363 - protein, 470 aa, synthetic construct; identical to SEQ ID NO: 16632
  REGION 1..470: note = neuraminidase__InfluenzaA__AHG96530

SEQ ID NO: 24364 - protein, 470 aa, synthetic construct; identical to SEQ ID NO: 16632
  REGION 1..470: note = neuraminidase__InfluenzaA__AHG96542

SEQ ID NO: 24365 - protein, 470 aa, synthetic construct; identical to SEQ ID NO: 16632
  REGION 1..470: note = neuraminidase__InfluenzaA__AHG96554

SEQ ID NO: 24366 - protein, 470 aa, synthetic construct; identical to SEQ ID NO: 16632
  REGION 1..470: note = neuraminidase__InfluenzaA__AHG96566

SEQ ID NO: 24367 - protein, 470 aa, synthetic construct; identical to SEQ ID NO: 16632
  REGION 1..470: note = neuraminidase__InfluenzaA__AHG96578

SEQ ID NO: 24368 - protein, 470 aa, synthetic construct; identical to SEQ ID NO: 16632
  REGION 1..470: note = neuraminidase__InfluenzaA__AHG96590

SEQ ID NO: 24369 - protein, 470 aa, synthetic construct; identical to SEQ ID NO: 16632
  REGION 1..470: note = neuraminidase__InfluenzaA__AHG96602

SEQ ID NO: 24370 - protein, 470 aa, synthetic construct; identical to SEQ ID NO: 16632
  REGION 1..470: note = neuraminidase__InfluenzaA__AHG96614

SEQ ID NO: 24371 - protein, 470 aa, synthetic construct; identical to SEQ ID NO: 16632
  REGION 1..470: note = neuraminidase__InfluenzaA__AHG96626

SEQ ID NO: 24372 - protein, 470 aa, synthetic construct; identical to SEQ ID NO: 16632
  REGION 1..470: note = neuraminidase__InfluenzaA__AHG96638

SEQ ID NO: 24373 - protein, 470 aa, synthetic construct; identical to SEQ ID NO: 16632
  REGION 1..470: note = neuraminidase__InfluenzaA__AHG96650

SEQ ID NO: 24374 - protein, 470 aa, synthetic construct; identical to SEQ ID NO: 16632
  REGION 1..470: note = neuraminidase__InfluenzaA__AHG96662

SEQ ID NO: 24375 - protein, 470 aa, synthetic construct; identical to SEQ ID NO: 16632
  REGION 1..470: note = neuraminidase__InfluenzaA__AHG96674

SEQ ID NO: 24376 - protein, 470 aa, synthetic construct; identical to SEQ ID NO: 16632
  REGION 1..470: note = neuraminidase__InfluenzaA__AHG96686

SEQ ID NO: 24377 - protein, 469 aa, synthetic construct; identical to SEQ ID NO: 16456
  REGION 1..469: note = neuraminidase__InfluenzaA__AHG96698

SEQ ID NO: 24378 - protein, 469 aa, synthetic construct; identical to SEQ ID NO: 16456
  REGION 1..469: note = neuraminidase__InfluenzaA__AHG96710

SEQ ID NO: 24379 - protein, 469 aa, synthetic construct; identical to SEQ ID NO: 16456
  REGION 1..469: note = neuraminidase__InfluenzaA__AHG96722

SEQ ID NO: 24380 - protein, 469 aa, synthetic construct; identical to SEQ ID NO: 16456
  REGION 1..469: note = neuraminidase__InfluenzaA__AHG96734

SEQ ID NO: 24381 - protein, 469 aa, synthetic construct; identical to SEQ ID NO: 16456
  REGION 1..469: note = neuraminidase__InfluenzaA__AHG96746

SEQ ID NO: 24382 - protein, 469 aa, synthetic construct; identical to SEQ ID NO: 16456
  REGION 1..469: note = neuraminidase__InfluenzaA__AHG96758

SEQ ID NO: 24383 - protein, 469 aa, synthetic construct; identical to SEQ ID NO: 16456
  REGION 1..469: note = neuraminidase__InfluenzaA__AHG96770

SEQ ID NO: 24384 - protein, 469 aa, synthetic construct; identical to SEQ ID NO: 16456
  REGION 1..469: note = neuraminidase__InfluenzaA__AHG96782

SEQ ID NO: 24385 - protein, 469 aa, synthetic construct; identical to SEQ ID NO: 16456
  REGION 1..469: note = neuraminidase__InfluenzaA__AHG96794

SEQ ID NO: 24386 - protein, 469 aa, synthetic construct; identical to SEQ ID NO: 16456
  REGION 1..469: note = neuraminidase__InfluenzaA__AHG96806

SEQ ID NO: 24387 - protein, 469 aa, synthetic construct; identical to SEQ ID NO: 16456
  REGION 1..469: note = neuraminidase__InfluenzaA__AHG96818

SEQ ID NO: 24388 - protein, 469 aa, synthetic construct; identical to SEQ ID NO: 16456
  REGION 1..469: note = neuraminidase__InfluenzaA__AHG96830

SEQ ID NO: 24389 - protein, 469 aa, synthetic construct; identical to SEQ ID NO: 16456
  REGION 1..469: note = neuraminidase__InfluenzaA__AHG96842

SEQ ID NO: 24390 - protein, 469 aa, synthetic construct; identical to SEQ ID NO: 16456
  REGION 1..469: note = neuraminidase__InfluenzaA__AHG96854

SEQ ID NO: 24391 - protein, 469 aa, synthetic construct; identical to SEQ ID NO: 16456
  REGION 1..469: note = neuraminidase__InfluenzaA__AHG96866

SEQ ID NO: 24392 - protein, 469 aa, synthetic construct; identical to SEQ ID NO: 16456
  REGION 1..469: note = neuraminidase__InfluenzaA__AHG96878

SEQ ID NO: 24393 - protein, 469 aa, synthetic construct; identical to SEQ ID NO: 16456
  REGION 1..469: note = neuraminidase__InfluenzaA__AHG96890

SEQ ID NO: 24394 - protein, 469 aa, synthetic construct; identical to SEQ ID NO: 16456
  REGION 1..469: note = neuraminidase__InfluenzaA__AHG96902

SEQ ID NO: 24395 - protein, 469 aa, synthetic construct; identical to SEQ ID NO: 16456
  REGION 1..469: note = neuraminidase__InfluenzaA__AHG96914

SEQ ID NO: 24396 - protein, 469 aa, synthetic construct; identical to SEQ ID NO: 16456
  REGION 1..469: note = neuraminidase__InfluenzaA__AHG96926

SEQ ID NO: 24397 - protein, 469 aa, synthetic construct; identical to SEQ ID NO: 16456
  REGION 1..469: note = neuraminidase__InfluenzaA__AHG96938

SEQ ID NO: 24398 - protein, 469 aa, synthetic construct; identical to SEQ ID NO: 16456
  REGION 1..469: note = neuraminidase__InfluenzaA__AHG96950

SEQ ID NO: 24399 - protein, 469 aa, synthetic construct; identical to SEQ ID NO: 16456
  REGION 1..469: note = neuraminidase__InfluenzaA__AHG96962

SEQ ID NO: 24400 - protein, 469 aa, synthetic construct; identical to SEQ ID NO: 16456
  REGION 1..469: note = neuraminidase__InfluenzaA__AHG96974

SEQ ID NO: 24401 - protein, 469 aa, synthetic construct; identical to SEQ ID NO: 16456
  REGION 1..469: note = neuraminidase__InfluenzaA__AHG96986

SEQ ID NO: 24402 - protein, 469 aa, synthetic construct; identical to SEQ ID NO: 16456
  REGION 1..469: note = neuraminidase__InfluenzaA__AHG96998

SEQ ID NO: 24403 - protein, 469 aa, synthetic construct; identical to SEQ ID NO: 16456
  REGION 1..469: note = neuraminidase__InfluenzaA__AHG97010

SEQ ID NO: 24404 - protein, 469 aa, synthetic construct; identical to SEQ ID NO: 16456
  REGION 1..469: note = neuraminidase__InfluenzaA__AHG97022

SEQ ID NO: 24405 - protein, 469 aa, synthetic construct; identical to SEQ ID NO: 16456
  REGION 1..469: note = neuraminidase__InfluenzaA__AHG97034

SEQ ID NO: 24406 - protein, 469 aa, synthetic construct; identical to SEQ ID NO: 16456
  REGION 1..469: note = neuraminidase__InfluenzaA__AHG97046

SEQ ID NO: 24407 - protein, 469 aa, synthetic construct
  REGION 1..469: note = neuraminidase__InfluenzaA__AHH00872
MNPNQKIITIGSVSLTIATICFLMQIAILVTTVTLHFKQYECNPPPNNQVMLCEPTIIERNITEIVYLTNTTIEKEICPKLAEYRNWSKPQCNITGFAPFSKDNSIRLSAGGDIWVTREPYVSCDPDKCYQFALGQGTTLNNGHSNDTVHDRTPYRTLLMNELGVPFHLGTKQVCIAWSSSSCHDGKAWLHVCVTGDDENATASFIYNGRLVDSIGSWSKKILRTQESECVCINGTCTVIMTDGSASGKADTKILFIEEGKIVHTSPLSGSAQHVEECSCYPRYPGVRCVCRDNWKGSNRPIVDINVKDYSIVSSYVCSGLVGDTPRKNDSSSSSHCLDPNNEEGGHGVKGWAFDDGNDVWMGRTISEKSRSGYETFKVIEGWSKPNSKLQINRQVIIDRGNRSGYSGIFSVEGKSCINRCFYVELIRGRKQETEVLWTSNSIVVFCGTSGTYGTGSWPDGADLNLMPI

SEQ ID NO: 24408 - protein, 471 aa, synthetic construct
  REGION 1..471: note = neuraminidase__InfluenzaA__AHI43497
MNPNQKLFALSGVAIALSILNLLIGISNVGLNISLHLKGKGPKQEENLTCTTINQNNTTVVENTYVNNTTIITKETDWNTPSYLLLNKSLCNVEGWVVIAKDNAIRFGESEQIIVTREPYVSCDPTGCKMYALHQGTTIRNKHSNGTIHDRTAFRGLISTPLGTPPTVSNSGFMCVGWSSTTCHDGIGRMTICIQGNNDNATATVYYNGRLTTTIKTWARNILRTQESECVCHNGTCAVVMTDGSASSQAYTKVMYFHKGLVIKEEALRGSARHIEECSCYGHSQRVTCVCRDNWQGANRPIIEIDMNTLEHTSRYVCTGILTDTSRPGDKSSGDCSNPITGSPGAQGVKGFGFLNGDNTWLGRTISPRSRSGFEMLKIPNAGTDPNSRIAERQEIVDNNNWSGYSGSFIDYWNNNSECYNPCFYVELIRGRPEEAKYVWWTSNSLIALCGSPFPVGSGSFPDGAQIQYFS

SEQ ID NO: 24409 - protein, 469 aa, synthetic construct
  REGION 1..469: note = neuraminidase__InfluenzaA__AHJ57439
MNPNQKIITIGSVSLIISTICFFMQVAILLTTVTLHFKQYEFNSPPNNQVMLCEPTIIERNITEIVYLTNTTIEKEICPKPAEYRNWSKPQCDITGFAPFSKDNSIRLSAGGDIWVTREPYVSCDPDKCYQFALGQGTTLNNVHSNNTVRDRTPYRTLLMNELGVPFHLGTKQVCIAWSSSSCHDGKAWLHVCITGDDKNATASFIYNGRLVDSVVSWSKDILRTQESECVCINGTCTVVMTDGSASGKADTKILFIEEGKIVHTSTLSGSAQHVEECSCYPRYPGVRCVCRDNWKGSNRPIVDINIKDHSIVSSYVCSGLVGDTPRKNDSSSSSHCLDPNNEEGGHGVKGWAFDDGNDVWMGRTINETSRLGYETFKVIEGWSNPKSKLQINRQVIVDRGNRSGYSGIFSVEGKSCINRCFYVELIRGRKEETEVLWTSNSIVVFCGTSGTYGTGSWPDGADINLMPI

SEQ ID NO: 24410 - protein, 469 aa, synthetic construct
  REGION 1..469: note = neuraminidase__InfluenzaA__AHJ57440
MNPNQKIITIGSVSLIISTICFFMQIAILITTVTLHFKQYEFNSPPNNQMMLCEPTIIERNITEIVYLTNTTIEKEICPKPAEYRNWSKPQCDITGFAPFSKDNSIRLSAGGDIWVTREPYVSCDPDKCYQFALGQGTTLNNGHSNNTVRDRTPYRTLLMNELGVPFHLGTKQVCIAWSSSSCHDGKAWLHVCITGDDKNATASFIYNGRLVDSVVSWSKEILRTQESECVCINGTCTVVMTDGSASGKADTKILFIEEGKIVHTSTLSGSAQHVEECSCYPRYPGVRCVCRDNWKGSNRPIVDINIKDHSIVSSYVCSGLVGDTPRKNDSSSSSHCLDPNNEEGGHGVKGWAFDDGNDVWMGRTINETSRLGYETFKVIEGWSNPKSKLQINRQVIVDRGDRSGYSGIFSVEGKSCINRCFYVELIRGRKEETEVLWTSNSIVVFCGTSGTYGTGSWPDGADINLMPI

SEQ ID NO: 24411 - protein, 469 aa, synthetic construct
  REGION 1..469: note = neuraminidase__InfluenzaA__AHJ57441
MNPNQKIITIGSVSLIISTICFFMQIAILITTVTLHFKQYEFNSPPNNQVMLCEPTIIERNKTEIVYLTNTTIEKEICPKPAEYRNWSKPQCDITGFAPFSKDNSIRLSAGGDIWVTREPYVSCDPDKCYQFALGQGTTLNNVHSNNTVHDRTPYRTLLMNELGVPFHLGTKQVCIAWSSSSCHDGKAWLHVCITGDDKNATASFIYNGRLVDSVVSWSKEILRTQESECVCINGTCTVVMTDGSASGKADTKILFIEEGKIVHTSTLSGSAQHVEECSCYPRYPGVRCVCRDNWKGSNRPIVDINIKDHSIVSSYVCSGLVGDTPRKNDSSSSSHCLDPNNEEGGHGVKGWAFDDGNDVWMGRTINETSRLGYETFKVIEGWSNPKSKLQINRQVIVDRGNRSGYSGIFSVEGKSCINRCFYVELIRGRKEETEVLWTSNSIVVFCGTSGTYGTGSWPDGADINLMPI

SEQ ID NO: 24412 - protein, 470 aa, synthetic construct
  REGION 1..470: note = neuraminidase__InfluenzaA__AHJ57654
MNPNQKITCISATGMTLSVVSLLIGIANLGLNIGLHYKVSDSTNINIPNMNETSPTTTIINNHPQNNFTNITNIIMNKNEEGNFLNLTKPLCEVNSWHILSKDNAIRIGENAHILVTREPYLSCDPQGCRMFALSQGTTLRGRHANGTIHDRSPFRALISWEMGQAPSPYNARVECIGWSSTSCHDGISRMSICISGPNNNASAVVWYGGRPVTEIPSWAGNILRTQESECVCHGGICPVVMTDGPANNRAETKIIYFKEGKVQKIEELKGNAQHIEECSCYGASGMIKCICRDNWKGANRPVITIDPEMMTHTSKYLCSKILTDTSRPNDPTNGNCDAPITGGSPDPGVKGFAFLDGENSWLGRTISKDSRSGYEMLKIPNAETDTQSGAISHQIIVNNQNWSGYSGAFIDYWANKECFNPCFYVELIRGRPKESSVLWTSNSIVALCGSRERLGSWSWHDGAEIIYFK

SEQ ID NO: 24413 - protein, 469 aa, synthetic construct
  REGION 1..469: note = neuraminidase__InfluenzaA__AHJ57666
MNPNQKIITIGSVSLTIATVSFLMQIAILTTTVTLHFKHNECNMPPKNQVMSCEPIIIERNITEIVYLNNTTVEKEICPKVVEYRNWSKPQCKITGFAPFSKDNSIRLSAGGDIWVTREPYVSCGLGKCYQFALGQGTTLDNSHSNGTIHDRIPHRTLLMNELGVPFHLGTKQVCIAWSSSSCHDGRAWLHICITGDDRNATASFIYDGMLVDSIGSWSKNILRTQESECVCINGTCAVVMTDGSASGVADTRILFIREGKIVHISPLSGSAQHIEECSCYPRYPDVRCVCRDNWKGSNRPVIDINMADYSIDSNYVCSGLVGDTPRNDDNSSSSNCRDPNNERGNPGVKGWAFDDGNDVWMGRTINRDSRSGYETFRVIGGWTTANSKSQINRQVIVDNNNWSGYSGVFSVEGKSCINRCFYVELIKGRPQEPRVWWTSNSIVVFCGTSGTYGTGSWPDGANINFMPI

SEQ ID NO: 24414 - protein, 470 aa, synthetic construct
  REGION 1..470: note = neuraminidase__InfluenzaA__AHJ57677
MNPNQKITCISATGMTLSVVSMLIGIANLGLNIGLHYKVSDSTNINIPNMNETSPTTTVINNHPQNNFTNITNIIVNKNEEENFLNLTKPLCEVNSWHILSKDNAIRIGENAHILVTREPYLSCDPQGCRMFALSQGTTLRGQHANGTIHDRSPFRALISWEMGQAPSPYNARVECIGWSSTSCHDGISRMSICISGPNNNASAVVWYGGRPVTEIPSWAGNILRTQESECVCHGGICPVVMTDGPANNRAETKIIYFKEGKIQKVEELKGNAQHIEECSCYGASGMIKCICRDNWKGANRPVITIDPEMMTHTSKYLCSKILTDTSRPNDPTNGNCDAPITGGSPDPGVKGFAFLDGENSWLGRTISKDSRSGYEMLKVPNAETDTQSGAISHQMIVNNQNWSGYSGAFIDYWAKKECFNPCFYVELIRGRPKESSVLWTSNSIVALCGSRERLGSWSWHDGAEIIYFK

SEQ ID NO: 24415 - protein, 470 aa, synthetic construct
  REGION 1..470: note = neuraminidase__InfluenzaA__AHJ57689
MNPNQKITCISATGMTLSVVSMLIGIANLGLNIGLHYKVSDSTNINIPKMNETSPTTTIINNHPQNNFTNITNIIVNKNEEENFLNLTKPLCEVNSWHILSKDNAIRIGENAHILVTREPYLSCDPQGCRMFALSQGTTLRGQHANGTIHDRSPFRALISWEMGQAPSPYNARVECIGWSSTSCHDGISRMSICISGPNNNASAVVWYGGRPVTEIPSWAGNILRTQESECVCHGGICPVVMTDGPANNRAETKIIYFKEGKIQKIEELKGNAQHIEECSCYGASGMIKCICRDNWKGANRPVITIDPEMMTHTSKYLCSKILTDTSRPNDPTNGNCDAPITGGSPDPGVKGFAFLDGENSWLGRTISKDSRSGYEMLKVPNAETDTQSGAISHQIIVNNQNWSGYSGAFIDYWANKECFNPCFYVELIRGRPKESSVLWTSNSIVALCGSRERLGSWSWHDGAEIIYFK

SEQ ID NO: 24416 - protein, 470 aa, synthetic construct
  REGION 1..470: note = neuraminidase__InfluenzaA__AHJ57700
MNPNQKITCISATGMTLSVVSLLIGIANLGLNIGLHYKVSDSTNINIPNMNETSPTTTIINNHPQNNFTNITNIIMNKNEEGNFLNLTKPLCEVNSWHILSKDNAIRIGENAHILVTREPYLSCDPQGCRMFALSQGTTLRGRHANGTIHDRSPFRALISWEMGQAPSPYNARVECIGWSSTSCHDGISRMSICISGPNNNASAVVWYGGRPVTEIPSWAGNILRTQESECVCHGGICPVVMTDGPANNRAETKIIYFKEGKVQKIEELKGNAQHIEECSCYGASGMIKCICRDNWKGANRPVITIDPEMMTHTSKYLCSKILTDTSRPNDPTNGNCDAPITGGSPDPGVKGFAFLDGENSWLGRTISKDSRSGYEMLKVPNAETDTQSGAISHQIIVNNQNWSGYSGAFIDYWANKECFNPCFYVELIRGRPKESSVLWTSNSIVALCGSRERLGSWSWHDGAEIIYFK

SEQ ID NO: 24417 - protein, 469 aa, synthetic construct
  REGION 1..469: note = neuraminidase__InfluenzaA__AHJ57710
MNPNQKIITIGSVSLTIATVSFLMQIAILTTTVTLHFKHNECNMPPKNQVMSCEPIIIERNITEIVYLNNTTVEKEICPKVVEYRNWSKPQCKITGFAPFSKDNSIRLSAGGDIWVTREPYVSCGLGKCYQFALGQGTTLDNSHSNGTIHDRIPHRTLLMNELGVPFHLGTKQVCIAWSSSSCHDGRAWLHICITGDDRNATASFIYDGMLVDSISSWSKNILRTQESECVCINGTCAVVMTDGSASGVADTRILFIREGKIVHISPLSGSAQHIEECSCYPRYPDVRCVCRDNWKGSNRPVININMADYSIDSNYVCSGLVGDTPRNDDNSSSSNCRDPNNERGNPGVKGWAFDDGNDVWMGRTINRDSRSGYETFRVIGGWTTANSKSQINRQVIVDNNNWSGYSGVFSVEGKSCINRCFYVELIRGRPQEPRVWWTSNSIVVFCGTSGTYGTGSWPDGANINFMPI

SEQ ID NO: 24418 - protein, 469 aa, synthetic construct
  REGION 1..469: note = neuraminidase__InfluenzaA__AHJ57734
MNPNQKIITIGSVSLTIATVSFLMQIAILTTTVTLHFKHNECNMPPKNQVMSCEPIIIERNITEIVYLNNTTVEKEICPKVAEYRNWSKPQCKITGFAPFSKDNSIRLSAGGDIWVTREPYVSCGLGKCYQFALGQGTTLDNSHSNGTIHDRIPHRTLLMNELGVPFHLGTKQVCIAWSSSSCHDGRAWLHICITGDDRNATASFIYDGMLVDSIGSWSKNILRTQESECVCINGTCAVVMTDGSASGVADTRILFIREGKIVHISPLSGSAQHIEECSCYPRYPDVRCVCRDNWKGSNRPVININMADYSIDSNYVCSGLVGDTPRNDDNSSSSNCRDPNNERGNPGVKGWAFDDGNDVWMGRTINRDSRSGYETFRVIGGWTTANSKSQINRQVIVDNNNWSGYSGVFSVEGKSCINRCFYVELIRGRPQEPRVWWTSNSIVVFCGTSGTYGTGSWPDGANINFMPI

SEQ ID NO: 24419 - protein, 459 aa, synthetic construct
  REGION 1..459: note = neuraminidase__InfluenzaA__AHJ57746
MNPNQKIITIGSVSITIAAVCFLMQIAILATTVTLHFKQNECNIPSKNHVIPCEPIIIERNITEVEIRPKVAEYRDWSKPQCQITGFAPFSKDNSIRLSAGGNIWVTREPYVSCGPDKCYQFALGQGTTLGNGHSNGTIHDKIPHRTLLMNELGVPFHLGTKQVCIAWSSSSCHDGRAWLHVCVTGDDRNATASFIYDGMLVDSIASWSQNILRTQESECVCINGTCTVVMTDGSASGVADTRILFIREGKIVHISPLSGSAQHIEECSCYPRHSDVRCVCRDNWKGSNRPVVDINMTDYSIDSSYVCSGLVGDTPRNDDSSSSSNCRDPNNERGNPGVKGWAFDDGDDVWMGRTISRDSRSGYETFRVIGGWTTANSKSQINRQVIVDNNNWSGYSGVFSVEGKSCINRCFYVELIRGRPQETRVWWTSNSIVVFCGTSGTYGTGSWPDGANINFMPI

SEQ ID NO: 24420 - protein, 469 aa, synthetic construct
  REGION 1..469: note = neuraminidase__InfluenzaA__AHJ57758
MNPNQKIITVGSVSLAIATICLLMQIAILATTVTLHFKQNECNIPSKNQVMPCEPIIIERNITEVVYLNNTIIEKEICPKVVEYRNWSKPQCQITGFAPFSKDNSIRLSAGGDIWVTREPYVSCSPSKCYQFALGQGTTLDNSHSNGTIHDRIPHRTLLMNELGVPFHLGTKQVCIAWSSSSCHDGRAWLHVCITGDDRNATASFIYNGMLVDSISSWSRNILRTQESECVCINGTCTVIMTDGSASGVADTRILFIREGNIVHVSPLSGSAQHIEECSCYPRYPDVRCVCRDNWKGSNRPVVDINMADYSIDSHYVCSGLVGDTPRNDDSSSSSNCKDPNNERGNPGVKGWAFDDGNDVWMGRTISRDSRSGYETFRVIGGWTTANSKSQINRQVIVDNNNWSGYSGVFSVEGKSCINRCFYVELIRGRPQETRVWWTSNSIVVFCGTSGTYGTGSWPDGANINFMPI

SEQ ID NO: 24421 - protein, 466 aa, synthetic construct
  REGION 1..466: note = neuraminidase__InfluenzaA__AHJ57770
MNPNQKIIAIGSVSLTIAIICFLMQIAILTTTMTLHFKQNECSNPSNNQVVPCEPIIIERNTVHLNSTTIEKEICPKVVEYKNWSKPQCQITGFAPFSKDNSIRLSAGGDIWVTREPYVSCSLGKCYQFALGQGTTLKNKHSNGTTHDRIPHRTLLMNELGVPFHLGTKQVCIAWSSSSCYDGKAWLHICVTGDDKNATASIIYDGMLVDSIGSWSKNILRTQESECVCINGTCAVVMTDGSASGKADTRILFIREGKIINISPLSGSAQHVEECSCYPRYPEVRCVCRDNWKGSNRPVLYINMADYSVESSYVCSGLVGDTPRNDDSSSSSNCRDPNNERGAPGVKGWAFDDGNDVWMGRTIKNDSRSGYETFRVVNGWTTANSKSQINRQVIVDSENWSGYSGIFSVEGKNCINRCFYVELIRGRPQEPRVWWTSNSIIVFCGTSGTYGTGSWPDGANINFLPI

SEQ ID NO: 24422 - protein, 469 aa, synthetic construct
  REGION 1..469: note = neuraminidase__InfluenzaA__AHJ57782
MNPNQKIIIIGSVSLTIATVCFLMQIAILATTVTLHFKQNECNIPSKNQVVPCEPIIIERNITEVVYLNNTTIEKEICPAVVEYRNWSKPQCQIKGFAPFSKDNSIRLSAGGDMWVTREPYVSCSPSKCYQFALGQGTTLDNNHSNGTIHDRIPHRTLLMNELGVPFHLGTKQVCIAWSSSSCHDGKAWLHVCVTGDDRNATASFIYDGMLVDSIGSWSQNILRTQESECVCINGTCTVVMTDGSASGIADTRILFVREGKIVHISPLSGSAQHIEECSCYPRYPDVRCVCRDNWKGSNRPIVDINMADYSIGSSYVCSGLVGDTPRNDDRFSSSNCRDPNSERGNPGVKGWAFDDGDDVWMGRTISRDSRSGYETFRVIGGWTTANSKSQINRQVIVDNNNWSGYSGVFSVEGKSCINRCFYVELIRGRPQETRVWWTSNSIVVFCGTSGTYGTGSWPDGANINFMPI

SEQ ID NO: 24423 - protein, 469 aa, synthetic construct
  REGION 1..469: note = neuraminidase__InfluenzaA__AHJ57794
MNPNQKIITVGSVSLAIATICFLMQIAILATTVTLHFKQNECNIPSKNQVMPCEPIIIERNITEVVYLNNTIIEKEICPKVVEYRNWSKPQCQITGFAPFSKDNSIRLSAGGDIWVTREPYVSCSPSKCYQFALGQGTTLDNSHSNGTIHDRIPHRTLLMNELGVPFHLGTKQVCIAWSSSSCHDGRAWLHVCITGDDRNATASFIYNGMLVDSISSWSRNILRTQESECVCINGTCTVIMTDGSASGVADTRILFIREGNIVHVSPLSGSAQHIEECSCYPRYPDVRCVCRDNWKGSNRPVVDINMADYSIDSHYVCSGLVGDTPRNDDSSSSSNCKDPNNERGNPGVKGWASDDGHDVWMGRTIGRDSRSGYETFRVIGGWTTANSKSQINRQVIVDNNNWSGYSGVFSVEGKSCINRCFYVELIRGRPQETRVWWTSNSIVVFCGTSGTYGTGSWPDGANINFMPI

SEQ ID NO: 24424 - protein, 470 aa, synthetic construct
  REGION 1..470: note = neuraminidase__InfluenzaA__AHJ57806
MNPNQKITCISATGMTLSVVSLLTGIANLGLNIGLHYKVSDSTNISIPNMNEASPTTTIINNHPQNNFTNITNIIMNKNEEGNFLNLTKPLCEVNSWHILSKDNAIRIGENAHILVTREPYLSCDPQGCRMFALSQGTTLRGRHANGTIHDRSPFRALISWEMGQAPSPYNARVECIGWSSTSCHDGISRMSICISGPNNNASAVVWYGGRPVTEIPSWAGNILRTQESECVCHGGICPVVMTDGPANNRAETKIIYFKEGKIQKIEELKGNAQHIEECSCYGASGMIKCICRDNWKGANRPVITIDPEMMTHTSKYLCSKILTDTSRPNDPTNGNCDAPITGGSPDPGVKGFAFLDGKNSWLGRTISKDSRSGYEMLKVPNAETDTQSGAISHQIIVNNQNWSGYSGAFIDYWANKECFNPCFYVELIRGRPKESSVLWTSNSIVALCGSRERLGSWSWHDGAEIIYFK

SEQ ID NO: 24425 - protein, 459 aa, synthetic construct
  REGION 1..459: note = neuraminidase__InfluenzaA__AHJ57818
MNPNQKITCISATGVTLSVVSLLIGIANLGLNIGLHYKVSDSPTINIPNMNETNPITTNITNIIVNKNEEGTFLNLTKPLCEVNSWHILSKDNAIRIGEDAHILVTREPYLSCDPQGCRMFALSQGTTLRGRHANGTIHDRSPFRALISWEMGQAPSPYNTRVECIGWSSTSCHDGISRMSICISGPNNNASAVVWYRGRPVTEIPSWAGNILRTQESECVCHKGICPVVMTDGPANNKAATKIIYFKEGKIQKIEELQGNAQHIEECSCYGAAGMIKCVCRDNWKGANRPIITIDPEMMTHTSKYLCSKILTDTSRPNDPTDGNCDAPITGGSPDPGVKGFAFLEGENSWLGRTISKDSRSGYEMLKVPNAETDTQSGAISHQMIVNNQNWSGYSGAFIDYWANKECFNPCFYVELIRGRPKESSVLWTSNSIVALCGSRERLGSWSWHDGAEIIYFK

SEQ ID NO: 24426 - protein, 469 aa, synthetic construct
  REGION 1..469: note = neuraminidase__InfluenzaA__AHJ57830
MNPNQKIITIGSVSLTIATVSFLMQIAILTTTVTLHFKHNECNMPPKNQVMSCEPIIIERNITEIVYLNNTTIEKEICPKVVEYRNWSKPQCKITGFAPFSKDNSIRLSAGGDIWVTREPYVSCGLGKCYQFALGQGTTLDNSHSNGTIHDRIPHRTLLMNELGVPFHLGTKQVCIAWSSSSCHDGRAWLHICITGDDRNATASFIYDGMLVDSIGSWSKNILRTQESECVCINGTCAVVMTDGSASGVADTRILFIREGKIVHISPLSGSAQHIEECSCYPRYPDVRCVCRDNWKGSNRPVIDINMADYSIDSNYVCSGLVGDTPRNDDNSSSSNCRDPNNERGNPGVKGWAFDDGNDVWMGRTINRDSRSGYETFRVIGGWTTANSKSQINRQVIVDNNNWSGYSGVFSVEGKSCINRCFYVELIRGRPQEPRVWWTSNSIVVFCGTSGTYGTGSWPDGANINFMPI

SEQ ID NO: 24427 - protein, 470 aa, synthetic construct
  REGION 1..470: note = neuraminidase__InfluenzaA__AHJ57842
MNPNQKITCISATGMTLSVVSMLIGIANLGLNIGLHYKVSDSTNINIPKMNETNPTTTIINNHPQNNFTNITNIIVNKNEEENFLNLTKPLCEVNSWHILSKDNAIRIGENAHILVTREPYLSCDPQGCRMFALSQGTTIRGQHANGTIHDRSPFRALISWEMGQAPSPYNARVECIGWSSTSCHDGISRMSICISGPNNNASAVVWYGGRPVTEIPSWAGNILRTQESECVCHGGICPVVMTDGPANNRAETKIIYFKEGKIQKIEELKGNAQHIEECSCYGASGMIKCICRDNWKGANRPVITIDPEMMTHTSKYLCSKILTDTSRPNDPTNGNCDAPITGGSSDPGVKGFAFLDGENSWLGRTISKDSRSGYEMLKVPNAETDTQSGAISHQIIVNNQNWSGYSGAFIDYWANKECFNPCFYVELIRGRPKESSVLWTSNSIVALCGSRERLGSWSWHDGAEIIYFK

SEQ ID NO: 24428 - protein, 470 aa, synthetic construct
  REGION 1..470: note = neuraminidase__InfluenzaA__AHJ57853
MNPNQKITCISATGMTLSVVSLLIGIANLGLNVGLHYKVNDPTNINIPNMNETSPTTTIINNHPQNNFTNITNIIVNKNEEENFLNLTKPLCEVNSWHILSKDNAIRIGENAHILVTREPYLSCDPQGCRMFALSQGTTLRGQHANGTIHDRSPFRALISWEMGQAPSPYNARVECIGWSSTSCHDGISRMSICISGPNNNASAVVWYGGRPVTEIPSWAGNILRTQESECVCHGGICPVVMTDGPANNRAETKIIYFKEGKIQKIEELKGNAQHIEECSCYGASGMIKCICRDNWKGANRPVITIDPEMMTHTSKYLCSKILTDTSRPNDPTNGNCDAPITGGSPDPGVKGFAFLDGENSWLGRTISKDSRSGYEMLKVPNAETDTQSGAISHQMIVNNQNWSGYSGAFIDYWANKECFNPCFYVELIRGRPKESSVLWTSNSIVALCGSRERLGSWSWHDGAEIIYFK

SEQ ID NO: 24429 - protein, 470 aa, synthetic construct
  REGION 1..470: note = neuraminidase__InfluenzaA__AHJ57865
MNPNQKITCISATGMTLSVVSMLIGIANLGLNIGLHYKVSDSTNINIPKMNETNPTTTIINNHPQNNFTNITNIIVNKNEEENFLNLTKPLCEVNSWHILSKDNAIRIGENAHILVTREPYLSCDPQGCRMFALSQGTTLRGRHANGTIHDRSPFRALISWEMGQAPSPYNARVECIGWSSTSCHDGISRMSICISGPNNNASAVVWYGGRPVTEIPSWAGNILRTQESECVCHGGICPVVMTDGPANNRAETKIIYFKEGKIQKIEELKGNAQHIEECSCYGASGMIKCICRDNWKGANRPVITIDPEMMTHTSKYLCSKILTDTSRPNDPTNGNCDAPITGGSPDPGVKGFAFLDGENSWLGRTISKDSRSGYEMLKVPNAETDTQSGAISHQMIVNNQNWSGYSGAFIDYWANKECFNPCFYVELIRGRPKESSVLWTSNSIVALCGSRERLGSWSWHDGAEIIYFK

SEQ ID NO: 24430 - protein, 470 aa, synthetic construct
  REGION 1..470: note = neuraminidase__InfluenzaA__AHJ57876
MNPNQKITCISATGMTLSVVSLLIGIANLGLNIGLHYKVSDSTNINIPNMNETSPTTTIINNHPQNNFTNITNIIMNKNEEGNFLNLTKPLCEVNSWHILSKDNAIRIGENAHILVTREPYLSCDPQGCRMFALSQGTTLRGRHANGTIHDRSPFRALISWEMGQAPSPYNARVECIGWSSTSCHDGKSRMSICISGPNNNASAVVWYGGRPITEIPSWAGNILRTQESECVCHGGICPVVMTDGPANNRAETKIIYFKEGKVQKIEELKGNAQHIEECSCYGASGMIKCICRDNWKGANRPVITIDPEMMTHTSKYLCSKILTDTSRPNDPTNGNCDAPITGGSPDPGVKGFAFLDGENSWLGRTISKDSRSGYEMLKVPNAETDTQSGAISHQIIVNNQNWSGYSGAFIDYWANKECFNPCFYVELIRGRPKESSVLWTSNSIVALCGSRERLGSWSWHDGAEIIYFK

SEQ ID NO: 24431 - protein, 470 aa, synthetic construct
  REGION 1..470: note = neuraminidase__InfluenzaA__AHJ57888
MNPNQKITCISATGMTLSVVSMLIGIANLGLNIGLHYKVSDSTNINIPNMNETSPTTTITNNHPQNNFTNITNIIVSKNEEENFLNLTKPLCEVNSWHILSKDNAIRIGENAHILVTREPYLSCDPQGCRMFALSQGTTLRGQHANGTIHDRSPFRALISWEMGQAPSPYNARVECIGWSSTSCHDGISRMSICISGPNNNASAVVWYGGRPVTEIPSWAGNILRTQESECVCHGGICPVVMTDGPANNRAETKIIYFKEGKIQKIEELKGNAQHIEECSCYGASGMIKCICRDNWKGANRPVITIDPEMMTHTSKYLCSKILTDTSRPNDPTNGNCDAPITGGSPDPGVKGFAFLDGENSWLGRTISKDSRSGYEMLKVPNAETDTQSGAISHQMIVNNQNWSGYSGAFIDYWANKECFNPCFYVELIRGRPKESSVLWTSNSIVALCGSRERLGSWSWHDGAEIIYFK

SEQ ID NO: 24432 - protein, 470 aa, synthetic construct
  REGION 1..470: note = neuraminidase__InfluenzaA__AHJ57900
MNPNQKITCISATGMTLSVVSLLIGIANLGLNIGLHYKVSDSTNINIPNMNETSPTATIINNHPQNNFTNITNIIVNKNEEENFFNLAKPLCEVNSWHILSKDNAIRIGENAHILVTREPYLSCDPQGCRMFALSQGTTLRGQHANGTIHDRSPFRALISWEMGQAPSPYNARVECIGWSSTSCHDGISRMSICISGPNNNASAVVWYGGRPVTEIPSWAGNILRTQESECVCHGGICPVVMTDGPANNRAETKIIYFKEGKIQKIEDLKGNAQHIEECSCYGASGMIKCICRDNWKGANRPVITIDPEMMTHTSKYLCSKILTDTSRPNDPTNGNCDAPITGGSPDPGVKGFAFLDGENSWLGRTISKDSRSGYEMLKVPNAETDTQSGAISHQMIVNNQNWSGYSGAFIDYWANKECFNPCFYVELIRGRPKESSVLWTSNSIVALCGSRERLGSWSWHDGAEIIYFK

SEQ ID NO: 24433 - protein, 470 aa, synthetic construct
  REGION 1..470: note = neuraminidase__InfluenzaA__AHJ57911
MNPNQKITCISATGVTLSVVSLLIGIANLGLNIGLHYKVSDSSNINIPNMNETNPTTTIINNHTQNNFKNITNIIVNKNEEGIFLNLTKPLCEVNSWHILSKDNAIRIGEDAHILVTREPYLSCDPQGCRMFALSQGTTLRGRHANGTIHDRSPFRALISWEMGQAPSPYNARVECIGWSSTSCHDGISRMSICISGPNNNASAVVWYRGRPVTEIPSWAGNILRTQESECVCHKGICPVVMTDGPANNRAATKIIYFKEGKIQKIEELKGNAQHIEECSCYGAAGMIKCICRDNWRGANRPVITIDPEMMTHTSKYLCSKILTDTSRPNDPTNGNCDAPITGGSPDPGVKGFAFLDGENSWLGRTISKDSRSGYEMLKVPNAETDTQSGSTSYQIIVNNQNWSGYSGAFIDYWANKECFNPCFYVELIRGRPKESSVLWTSNSIVALCGSRERLGSWSWHDGAEIIYFK

SEQ ID NO: 24434 - protein, 469 aa, synthetic construct
  REGION 1..469: note = neuraminidase__InfluenzaA__AHJ57923
MNPNQKIITVGSVSLAIATICFLMQIAILATTVTLHFKQNECNIPSKNQVMPCEPIIIERNITEVVYLNNTIIEKEICPKVVEYRNWSKPQCQITGFAPFSKDNSIRLSAGGDIWVTREPYVSCSPSKCYQFALGQGTTLDNSHSNGTIHDRIPHRTLLMNELGVPFHLGTKQVCIAWSSSSCHDGRAWLHVCITGDDRNATASFIYNGMLVDSISSWSRNILRTQESECVCINGTCTVIMTDGSASGVADTRILFIREGKIVHVSPLSGSAQHIEECSCYPRYPDVRCVCRDNWKGSNRPVVDINMADYSIDSHYVCSGLVGDTPRNDDSSSSSNCKDPNNERGNPGVKGWAFDDGNDVWMGRTISRDSRSGYETFRVIGGWTTANSKSQINRQVIVDNNNWSGYSGVFSVEGKSCINRCFYVELIRGRPQETRVWWTSNSIVVFCGTSGTYGTGSWPDGANINFMPI

SEQ ID NO: 24435 - protein, 459 aa, synthetic construct
  REGION 1..459: note = neuraminidase__InfluenzaA__AHJ57935
MNPNQKITCISATGVTLSVVSLLIGIANLGLNIGLHYKVSDSPTINIPNMNETNPTTTNITNIIVNKNEEGTFLNLTKPLCEVNSWHILSKDNAIRIGEDAHILVTREPYLSCDPQGCRMFALSQGTTLRGRHANGTIHDRSPFRALISWEMGQAPSPYNTRVECIGWSSTSCHDGISRMSICISGPNNNASAVVWYRGRPVTEIPSWAGNILRTQESECVCHKGICPVVMTDGPANNKAATKIIYFKEGKIQKIEELQGNAQHIEECSCYGAAGMIKCVCRDNWKGANRPIITIDPEMMTHTSKYLCSKILTDTSRPNDPTNGNCDAPITGGSPDPGVKGFAFLDGENSWLGRTISKDSRSGYEMLKVPNAQTDTQSGPTSYQLIVNNQNWSGYSGAFIDYWANKECFNPCFYVELIRGRPKESNVLWTSNSMVALCGSRERLGSWSWHDDAEIIYFK

SEQ ID NO: 24436 - protein, 469 aa, synthetic construct
  REGION 1..469: note = neuraminidase__InfluenzaA__AHJ57946
MNPNQKIITIGSVSLTIATVSFLMQIAILTTTVTLHFKHNECNMPPKNQVMSCEPIIIERNITEIVYLNNTTVEKEICPKVVEYRNWSKPQCKITGFAPFSKDNSIRLSAGGDIWVTREPYVSCGLGKCYQFALGQGTTLDNSHSNGTIHDRIPHRTLLMNELGVPFHLGTKQVCIAWSSSSCHDGRAWLHICITGDDRNATASFIYDGMLVDSIGSWSKNILRTQESECVCINGTCAVVMTDGSASGVADTRILFIREGKIVHISPLSGSAQHIEECSCYPRYPDVRCVCRDNWKGSNRPVIDINMADYSIDSHYVCSGLVGDTPRNDDNSSSSNCRDPNNERGNPGVKGWAFDDGNDVWMGRTINRDSRSGYETFRVIGGWTTANSKSQINRQVIVDNNNWSGYSGVFSVEGKSCINRCFYVELIRGRPQEPRVWWTSNSIVVFCGTSGTYGTGSWPDGANINFMPI

SEQ ID NO: 24437 - protein, 469 aa, synthetic construct
  REGION 1..469: note = neuraminidase__InfluenzaA__AHJ57957
MNPNQKIITIGSVSLTIATVSFLMQIAILTTTVTLHFKQNECNMPPKNQVMSCEPIIIERNITEIVYLNNTTVEKEICPKVVEYRNWSKPQCKITGFAPFSKDNSIRLSAGGDIWVTREPYVSCGLGKCYQFALGQGTTLDNSHSNGTIHDRIPHRTLLMNELGVPFHLGTKQVCIAWSSSSCHDGRAWLHICITGDDRNATASFIYDGMLVDSIGSWSKNILRTQESECVCINGTCAVVMTDGSASGVADTRILFIREGKIVHISPLSGSAQHIEECSCYPRYPDVRCVCRDNWKGSNRPVIDINMADYSIDSNYVCSGLVGDTPRNDDNSSSSNCRDPNNERGNPGVKGWAFDYGNDVWMGRTINRDSRSGYETFRVIGGWTTANSKSQINRQVIVDNNNWSGYSGVFSVEGKSCINRCFYVELIRGRPQEPRVWWTSNSIVVFCGTSGTYGTGSWPDGANINFMPI

SEQ ID NO: 24438 - protein, 469 aa, synthetic construct
  REGION 1..469: note = neuraminidase__InfluenzaA__AHJ57968
MNPNQKIITVGSVSLAIATICLLMQIAILATTVTLHFKQNECNIPSKNQVMPCEPIIIERNITEVVYLNNTIIEKEICPKVVEYRNWSKPQCQITGFAPFSKDNSIRLSAGGDIWVTREPYVSCSPSKCYQFALGQGTTLDNSHSNGTIHDRIPHRTLLMNELGVPFHLGTKQVCIAWSSSSCHDGRAWLHVCITGDDRNATASFIYNGMLVDSISSWSRNILRTQESECVCINGTCTVIMTDGSASGVADTRILFIREGKIVHISPLSGSAQHIEECSCYPRYPDVRCVCRDNWKGSNRPVIDINMADYSIDSNYVCSGLVGDTPRNDDNSSSSNCRDPNNERGNPGVKGWAFDDGNDVWMGRTINRDSRSGYETFRVIGGWTTANSKSQINRQVIVDNNNWSGYSGVFSVEGKSCINRCFYVELIRGRPQETRVWWTSNSIVVFCGTSCTYGTGSWPDGANINFMPI

SEQ ID NO: 24439 - protein, 470 aa, synthetic construct
  REGION 1..470: note = neuraminidase__InfluenzaA__AHJ57980
MNPNQKNTCISAIGMTLSVVSLLIGVADLGLNIGLHYKVSDSSNINIPNMNETNPTTTIINNNPQNNFTNITNIIVNKNEEEKFLNLTKPLCEVNSWHILSKDNAIRIGEDAHILVTREPYLSCDPQGCRMFALSQGTTLRGRHANGTIHDRSPFRALISWEMGQAPSPYNARVECIGWSSTSCHDGISRMSICISGPNNNASAVVWYGGRPVTEIPSWAGNILRTQESECVCHKGICPVVMTDGPANNRAATKIIYFKEGKIQKIEELKGNAQHIEECSCYGAAGMIKCICRDNWKGANRPVITIDPEMMTHTSKYLCSKILTDTSRPNDPTSGNCDAPITGGSPDPGVKGFAFLDGENSWLGRTISKDSRSGYEMLKVPNAETDTQSGPISYQTIVNNQNWSGYSGAFIDYWANKECFNPCFYVELIRGRPKESSVLWTSNSIVALCGSRERLGSWSWHDGAEIIYFK

SEQ ID NO: 24440 - protein, 469 aa, synthetic construct
  REGION 1..469: note = neuraminidase__InfluenzaA__AHJ57992
MNPNQKIITIGSVSLTIATVSFLMQIAILTTTVTLHFKHNECNMPPKNQVMSCEPIIIERNITEIVYLNNTTVEKEICPKVVEYRNWSKPQCKITGFAPFSKDNSIRLSAGGDIWVTREPYVSCGLGKCYQFALGQGTTLDNSHSNGTIHDRIPHRTLLMNELGVPFHLGTKQVCIAWSSSSCHDGRAWLHICITGDDRNATASFIYDGMLVDSIGSWSKNILRTQESECVCINGTCAVVMTDGSASGVADTRILFIREGKIVHISPLSGSAQHIEECSCYPRYPDVRCVCRDNWKGSNRPVININMADYSIDSNYVCSGLVGDTPRNDDNSSSSNCRDPNNERGNPGVKGWAFDDGNDVWMGRTINRDSRSGYETFRVIGGWTTANSKSQINRQVIVDNNNWSGYSGVFSVEGKSCINRCFYVELIRGRPQEPRVWWTSNSIVVFCGTSGTYGTGSWPDGANINFMPI

SEQ ID NO: 24441 - protein, 470 aa, synthetic construct
  REGION 1..470: note = neuraminidase__InfluenzaA__AHJ58004
MNPNQKITCISATGVTLSVVSLLIGIANLGLNIGLHYKVSDSSNINIPNMNETNPTTTIINNHTQNNFKNITNIIVNKNEEGTFLNLTKPLCEVNSWHILSKDNAIRIGEDAHILVTREPYLSCDPQGCRMFALSQGTTLRGRHANGTIHDRSPFRALISWEMGQAPSPYNARVECIGWSSTSCHDGISRMSICISGPNNNASAVVWYRGRPVTEIPSWAGNILRTQESECVCHKGICPVVMTDGPANNRAATKIIYFKEGKIQKIEELKGNAQHIEECSCYGAAGMIKCICRDNWRGANRPVITIDPEMMTHTSKYLCSKILTDTSRPNDPTNGNCDEPITGGSPDPGVKGFAFLDGENSWLGRTISKDSRSGYEMLKVPNAETDTQSGPTSYQIIVNNQNWSGYSGAFIDYWANKECFNPCFYVELIRGRPKESSVLWTSNSIVALCGSRERLGSWSWHDGAEIIYFK

SEQ ID NO: 24442 - protein, 470 aa, synthetic construct
  REGION 1..470: note = neuraminidase__InfluenzaA__AHJ58016
MNPNQKITCISATGMTLSVVSMLIGIANLGLNIGLHYKVSDSTNINIPKMNETNPTTTIINNHPQNNFTNITNIIVNKNEEENFLNLTKPLCEVNSWHILSKDNAIRIGENAHILVTREPYLSCDPQGCRMFALSQGTTLRGRHANGTIHDRSPFRALISWEMGQAPSPYNARVECIGWSSTSCHDGISRMSICISGPNNNASAVVWYGGRPVTEIPSWAGNILRTQESECVCHGGICPVVMTDGPANNRAETKIIYFKEGKIQKIEELKGNAQHIEECSCYGASGMIKCICRDNWKGANRPVITIDPEMMTHTSKYLCSKILTDTSRPNDPTNGNCDAPITGGSPDPGVKGFAFLDGKNSWLGRTISKDSRSGYEMLKVPNAETDTQSGAISHQIIVNNQNWSGYSGAFIDYWANKECFNPCFYVELIRGRPKESSVLWTSNSIVALCGSRERLGSWSWHDGAEIIYLK

SEQ ID NO: 24443 - protein, 470 aa, synthetic construct
  REGION 1..470: note = neuraminidase__InfluenzaA__AHJ58028
MNPNQKITCISATGMTLSVVSMLIGIANLGLNIGLHYKVSDSTNINIPKMNETNPTTTIINNHPQNNFTNITNIIVNKNEEENFLNLTKPLCEVNSWHILSKDNAVRIGEDAHILVTREPYLSCDPQGCRMFALSQGTTLRGRHANGTIHDRSPFRALISWEMGQAPSPYNTRVECIGWSSTSCHDGISRMSICISGPNNNASAVVWYRGRPVTEIPSWAGNILRTQESECVCHKGICPVVMTDGPANNRAETKIIYFKEGKIQKIEELEGNAQHIEECSCYGTAGMIKCICRDNWRGANRPVITIDPEMMTHTSRYLCSKILTDTSRPNDPTNGNCDAPITGGSPDPGVKGFAFLDGKNSWLGRTISKDSRSGYEMLKVPNAETDIQSGPTSNQIIVNNQNWSGYSGAFIDYWANKECFNPCFYVELIRGRPKESNVLWTSNSIVALCGSRERLGSWSWHDGAEIIYFK

SEQ ID NO: 24444 - protein, 469 aa, synthetic construct
  REGION 1..469: note = neuraminidase__InfluenzaA__AHJ58040
MNPNQKIITVGSVSLAIATICLLMQIAILATTVTLHFKQNECNIPSKNQVMPCEPIIIERNITEVVYLNNTIIEKEICPKVVEYRNWSKPQCQITGFAPFSKDNSIRLSAGGDIWVTREPYVSCSPSKCYQFALGQGTTLDNSHSNGTIHDRIPHRTLLMNELGVPFHLGTKQVCIAWSSSSCHDGRAWLHVCITGDDRNATASFIYNGMLVDSISSWSRNILRTQESECVCINGTCTVIMTDGSASGVADTRILFIREGKIVHVSPLSGSAQHIEECSCYPRYPDVRCVCRDNWKGSNRPVVDINMADYSIDSHYVCSGLVGDTPRNDDSSSSSNCKDPNNERGNPGVKGWAFDDGNDVWMGRTISRDSRSGYETFRVIGGWTTANSKSQINRQVIVDNNNWSGYSGVFSVEGKSCINRCFYVELIRGRPQETRVWWTSNSIVVFCGTSGTYGTGSWPDGANINFMPI

SEQ ID NO: 24445 - protein, 469 aa, synthetic construct
  REGION 1..469: note = neuraminidase__InfluenzaA__AHJ58052
MNPNQKIITIGSVSLTIATVSFLMQIAILTTTVTLHFKHNECNMPPKNQVMSCEPIIIERNITEIVYLNNTTVEKEICPKVVEYRNWSKPQCKITGFAPFSKDNSIRLSAGGDIWVTREPYVSCGLGKCYQFALGQGTTLDNSHSNGTIHDRIPHRTLLMNELGVPFHLGTKQVCIAWSSSSCHDGRAWLHICITGDDRNATASFIYDGMLVDSIGSWSKNILRTQESECVCINGTCAVVMTDGSASGVADTRILFIREGKIVHISPLSGSAQHIEECSCYPRYPDVRCVCRDNWKGSNRPVIDINMADYSIDSNYVCSGLVGDTPRNDDNSSSSNCRDPNNERGNPGVKGWAFDDGNDVWMGRTINRDSRSGYETFRVIGGWTTANSKSQINRQVIVDNNNWSGYSGVFSVEGKSCINRCFYVELIRGRPQEPRVWWTSNSIVVFCGTSGTYGTGSWPDGANINFMPI

SEQ ID NO: 24446 - protein, 470 aa, synthetic construct
  REGION 1..470: note = neuraminidase__InfluenzaA__AHJ58064
MNPNQKITCISATGMTLSVVSLLIGIANLGLNIGLHYKVSDSTNINIPNMNETSPTTTIINNHPQNNFTNITNIIVNKNEEENFLNLTKPLCEVNSWHILSKDNAIRIGENAHILVTREPYLSCDPQGCRMFALSQGTTLRGQHANGTIHDRSPFRALISWEMGQAPSPYNARVECIGWSSTSCHDGISRMSICISGPNNNASAVVWYGGRPVTEIPSWAGNILRTQESECVCHGGICPVVMTDGPANNRAETKIIYFKEGKIQKIEELKGNAQHIEECSCYGASGMIKCICRDNWKGANRPVITIDPEMMTHTSKYLCSKILTDTSRPNDPINGNCDAPITGGSPDPGVKGFAFLDGENSWLGRTISKDSRSGYEMLKVPNAETDTQSGAISHQMIVNNQNWSGYSGAFIDYWANKECFNPCFYVELIRGRPKESSVLWTSNSIVALCGSRERLGSWSWHDGAEIIYFK

SEQ ID NO: 24447 - protein, 466 aa, synthetic construct
  REGION 1..466: note = neuraminidase__InfluenzaA__AHJ58075
MNPNQKIIAIGSVSLTIAIICFLLQIAILTTTMTLHFRQNECSNPSNNQVVPCEPIIIERNTVHLNSTTIEKEICPKVAEYKNWSKPQCQITGFAPFSKDNSIRLSAGGDIWVTREPYVSCSLGKCYQFALGQGTTLKNKHSNGTTHDRIPHRTLLMNELGVPFHLGTKQVCIAWSSSSCHDGKAWLHICVTGDDKNATASIIYDGMLVDSIGSWSKNILRTQESECVCINGTCAVVMTDGSASGKADTRILFIREGKIINISPLSGSAQHVEECSCYPRYPEVRCVCRDNWKGSNRPVLYINMADYSIESSYVCSGLVGDTPRDDDSSSSSNCRDPNNERGAPGVKGWAFDDGNDIWMGRTIKSDSRSGYETFRVVNGWTTANSKSQINRQVIVDSDSWSGYSGIFSVEGKNCINRCFYVELIRGRPQETRVWWTSNSIIVFCGTSGTYGTGSWPDGANINFMPI

SEQ ID NO: 24448 - protein, 470 aa, synthetic construct
  REGION 1..470: note = neuraminidase__InfluenzaA__AHJ58087
MNPNQKITCISATGMTLSVVSLLIGIANLGLNIGLHYKVSDSTNINIPNMNETSPTTTIINNHPQNNFTNITNIIVNKNEEENFLNLTKPLCEVNSWHILSKDNAIRIGENAHILVTREPYLSCDPQGCRMFALSQGTTLRGQHANGTIHDRSPFRALISWEMGQAPSPYNARVECIGWSSTSCHDGISRMSICISGPNNNASAVVWYGGRPVTEIPSWAGNILRTQESECVCHGGICPVVMTDGPANNRAETKIIYFKEGKIQKIEELKGNAQHIEECSCYGASGMIKCICRDNWKGANRPVITIDPEMMTHTSKYLCSKILTDTSRPNDPINGNCDAPITGGSPDPGVKGFAFLDGDNSWLGRTISKDSRSGYEMLKVPNAETDTQSGAISHQMIVNNQNWSGYSGAFIDYWANKECFNPCFYVELIRGRPKESSVLWTSNSIVALCGSRERLGSWSWHDGAEIIYFK

SEQ ID NO: 24449 - protein, 469 aa, synthetic construct
  REGION 1..469: note = neuraminidase__InfluenzaA__AHL80721
MNPNQKIITIGSVCMTIGMANLILQIGNIISIWISHSIQLGNQNQIETCNQSVITYENNTWVNQTYVNISNTNFAAGQSVVSVKLAGNSSLCPVSGWAIYSKDNSIRIGSKGDVFVIREPFISCSPLECRTFFLTQGALLNDKHSNGTIKDRSPYRTLMSCPIGEVPSPYNSRFESVAWSASACHDGINWLTIGISGPDNGAVAVLKYNGIITDTIKSWRNNILRTQESECACVNGSCFTVMTDGPSDGQASYKIFRIEKGKIVKSVEMNAPNYHYEECSCYPDSSEITCVCRDNWHGSNRPWVSFNQNLEYQIGYICSGIFGDNPRPNDKTGSCGPVSSNGANGVKGFSFKYGNGVWIGRTKSISSRKGFEMIWDPNGWTGTDNNFSIKQDVVGINEWSGYSGSFVQHPELTGLDCIRPCFWVELIRGRPKENTIWTSGSSISFCGVNSDTVGWSWPDGAELPFTIDK

SEQ ID NO: 24450 - protein, 469 aa, synthetic construct
  REGION 1..469: note = neuraminidase__InfluenzaA__AHL80732
MNPNQKIITIGSVCMTIGMANLILQIGNIISIWISHSIQLGNQNQIETCNQSVITYENNTWVNQTYVNISNTNFAAGQSVVSVKLAGNSSLCPVSGWAIYSKDNSIRIGSKGDVFVIREPFISCSPLECRTFFLTQGALLNDKHSNGTIKDRSPYRTLMSCPIGEVPSPYNSRFESVAWSASACHDGINWLTIGISGPDNGAVAVLKYNGIITDTIKSWRNNILRTQESECACVNGSCFTVMTDGPSDGQASYKIFRIEKGKIVKSVEMNAPNYYYEECSCYPDSSEITCVCRDNWHGSNRPWVSFNQNLEYQIGYICSGIFGDNPRPNDKTGSCGPVSSNGANGVKGFSFKYGNGVWIGRTKSISSRNGFEMIWDPNGWTGTDNNFSIKQDIVGINEWSGYSGSFVQHPELTGLDCIRPCFWVELIRGRPKENTIWTSGSSISFCGVNSDTVGWSWPDGAELPFIIDK

SEQ ID NO: 24451 - protein, 469 aa, synthetic construct; identical to SEQ ID NO: 16738
  REGION 1..469: note = neuraminidase__InfluenzaA__AHL80743

SEQ ID NO: 24452 - protein, 469 aa, synthetic construct
  REGION 1..469: note = neuraminidase__InfluenzaA__AHL80754
MNPNQKIITIGSVCMTIGMANLILQIGNIISIWISHSIQLGNQNQIETCNQSVITYENNTWVNQTYVNISNTNFAAGQSVVSVKLAGNSSLCPVSGWAIYSKDNSIRIGSKGDVFVIREPFISCSPLECRTFFLTQGALLNDKHSNGTIKDRSPYRTLMSCPIGEVPSPYNSRFESVAWSASACHDGINWLTIGISGPDNGAVAVLKYNGIITDTIKSWRNNILRTQESECVCVNGSCFTVMTDGPSDGQASYKIFRIEKGKIVKSVEMNAPNYHYEECSCYPDSSEITCVCRDNWHGSNRPWVSFNQNLEYQIGYICSGIFGDNPRPNDKTGSCGPVSSNGANGVKGFSFKYGNGVWIGRTKSISSRNGFEMIWDPNGWTGTDNNFSIKQDIVGINEWSGYSGSFVQHPELTGLDCIRPCFWVELIRGRPKENTIWTSGSSISFCGVNSDTVGWSWPDGAELPFTIDK

SEQ ID NO: 24453 - protein, 469 aa, synthetic construct; identical to SEQ ID NO: 16738
  REGION 1..469: note = neuraminidase__InfluenzaA__AHL80765

SEQ ID NO: 24454 - protein, 469 aa, synthetic construct; identical to SEQ ID NO: 16738
  REGION 1..469: note = neuraminidase__InfluenzaA__AHL80776

SEQ ID NO: 24455 - protein, 469 aa, synthetic construct; identical to SEQ ID NO: 16738
  REGION 1..469: note = neuraminidase__InfluenzaA__AHL80787

SEQ ID NO: 24456 - protein, 469 aa, synthetic construct
  REGION 1..469: note = neuraminidase__InfluenzaA__AHL80798
MNPNQKIITIGSVCMTIGMANLILQIGNIISIWISHSIQLGNQNQIETCNQSVITYENNTWVNQTYVNISNTNFAAGQSVVSVKLAGNSSLCPVSGWAIYSKDNSIRIGSKGDVFVIREPFISCSPLECRTFFLTQGALLNDKHSNGTIKDRSPYRTLMSCPIGEVPSPYNSRFESVAWSASACHDGINWLTIGISGPDNGAVAVLKYNGIITDTIKSWRNNILRTQESECACVNGSCFTVMTDGPSDGQASYKIFRIEKGKIVKSVEMNAPNYHYEECSCYPDSSEITCVCRDNWHGSNRPWVSFNQNLEYQIGYICSGIFGDNPRPNDKKGSCGPVSSNGANGVKGFSFKYGNGVWIGRTKSISSRNGFEMIWDPNGWTGTDNNFSVKQDIVGINEWSGYSGSFVQHPELTGLDCIRPCFWVELIRGRPKENTIWTSGSSISFCGVNSDTVGWSWPDGAELPFTIDK

SEQ ID NO: 24457 - protein, 469 aa, synthetic construct; identical to SEQ ID NO: 16738
  REGION 1..469: note = neuraminidase__InfluenzaA__AHL80809

SEQ ID NO: 24458 - protein, 469 aa, synthetic construct; identical to SEQ ID NO: 16738
  REGION 1..469: note = neuraminidase__InfluenzaA__AHL80820

SEQ ID NO: 24459 - protein, 469 aa, synthetic construct; identical to SEQ ID NO: 16738
  REGION 1..469: note = neuraminidase__InfluenzaA__AHL80831

SEQ ID NO: 24460 - protein, 469 aa, synthetic construct; identical to SEQ ID NO: 16738
  REGION 1..469: note = neuraminidase__InfluenzaA__AHL80842

SEQ ID NO: 24461 - protein, 469 aa, synthetic construct; identical to SEQ ID NO: 18026
  REGION 1..469: note = neuraminidase__InfluenzaA__AHL80853

SEQ ID NO: 24462 - protein, 469 aa, synthetic construct
  REGION 1..469: note = neuraminidase__InfluenzaA__AHL80864
MNPNQKIITIGSVCMTIGMANLILQIGNIISIWISHSIQLGNQNQIETCNQSVITYENNTWVNQTYVNISNTNFAAGQSVVSVKLAGNSSLCPVSGWAIYSKDNSIRIGSKGDVFVIREPFISCSPLECRTFFLTQGALLNDKHSNGTIKDRSPYRTLMSCPIGEVPSPYNSRFESVAWSASACHDGINWLTIGISGPDNGAVAVLKYNGIITDTIKSWRNNILRTQESECACVNGSCFTVMTDGPSDGQASYKIFRIEKGKIVKSVEMNAPNYYYEECSCYPDSSEITCVCRDNWHGSNRPWVSFNQNLEYQIGYICSGIFGDNPRPNDKKGSCGPVSSNGANGVKGFSFKYGNGVWIGRTKSISSRNGFEMIWDPNGWTGTDNNFSIKQDIVGINEWSGYSGSFVQHPELTGLDCIRPCFWVELIRGRPKENTIWTSGSSISFCGVNSDTVGWSWPDGAELPFTIDK

SEQ ID NO: 24463 - protein, 469 aa, synthetic construct; identical to SEQ ID NO: 18026
  REGION 1..469: note = neuraminidase__InfluenzaA__AHL80875

SEQ ID NO: 24464 - protein, 469 aa, synthetic construct; identical to SEQ ID NO: 18026
  REGION 1..469: note = neuraminidase__InfluenzaA__AHL80886

SEQ ID NO: 24465 - protein, 469 aa, synthetic construct
  REGION 1..469: note = neuraminidase__InfluenzaA__AHL80897
MNPNQKIITIGSVCMTIGMANLILQIGNIISIWISHSIQLGNQNQIETCNQSVITYENNTWVNQTYVNISNTNFAAGQSVVSVKLAGNSSLCPVSGWAIYSKDNSIRIGSKGDVFVIREPFISCSPLECRTFFLTQGALLNDKHSNGTIKDRSPYRTLMSCPIGEVPSPYNSRFESVAWSASACHDGINWLTIGISGPDNGAVAVLKYNGIITDTIKSWRNNILRTQESECACINGSCFTVMTDGPSDGQASYKIFRIEKGKIVKSVEMNAPNYHYEECSCYPDSSEITCVCRDNWHGSNRPWVSFNQNLEYQIGYICSGIFGDNPRPNDKKGSCGPVSSNGANGVKGFSFKYGNGVWIGRTKSISSRNGFEMIWDPNGWTGTDNNFSIKQDIVGINEWSGYSGSFVQHPELTGLDCIRPCFWVELIRGRPKENTIWTSGSSISFCGVNSDTVGWSWPDGAELPFTIDK

SEQ ID NO: 24466 - protein, 469 aa, synthetic construct
  REGION 1..469: note = neuraminidase__InfluenzaA__AHL80908
MNPNQKIITIGSVCMTIGMANLILQIGNIISIWISHSIQLGNQNQIETCNQSVTIHENNTWVNQTYVNISNTNFAAGQSVVSVKLAGNSSLCPVSGWAIYSKDNSIRIGSKGDVFVIREPFISCSPLECRTFFLTQGALLNDKHSNGTIKDRSPYRTLMSCPIGEVPSPYNSRFESVAWSASACHDGINWLTIGISGPDNGAVAVLKYNGIITDTIKSWRNNILRTQESECACVNGSCFTVMTDGPSDGQASYKIFRIEKGKIVKSVEMNAPNYYYEECSCYPDSSEITCVCRDNWHGSNRPWVSFNQNLEYQIGYICSGIFGDNPRPNDKKGSCGPVSSNGANGVKGFSFKYGNGVWIGRTKSISSRNGFEMIWDPNGWTGTDNNFSIKQDIVGINEWSGYSGSFVQHPELTGLDCIRPCFWVELIRGRPKENTIWTSGSSISFCGVNSDTVGWSWPDGAELPFTIDK

SEQ ID NO: 24467 - protein, 469 aa, synthetic construct
  REGION 1..469: note = neuraminidase__InfluenzaA__AHL80919
MNPNQKIITIGSVCMTIGMANLILQIGNIISIWISHSIQLGNQSQIETCNQSVITYENNTWVNQTYVNISNTNFAAGQSVVSVKLAGNSSLCPVSGWAIYSKDNSIRIGSKGDVFVIREPFISCSPLECRTFFLTQGALLNDKHSNGTIKDRSPYRTLMSCPTGEVPSPYNSRFESVAWSASACHDGINWLTIGISGPDNGAVAVLKYNGIITDTIKSWRNNILRTQESECACVNGSCFTIMTDGPSDGQASYKIFRIEKGKIVKSVEMNAPNYHYEECSCYPDSSEITCVCRDNWHGSNRPWVSFNQNLEYQIGYICSGIFGDNPRPNDKTGSCGPVSSNGANGVKGFSFKYGNGVWIGRTKSISSRKGFEMIWDPNGWTGTDNNFSIKQDIVGINEWSGYSGSFVQHPELTGLDCIRPCFWVELIRGRPKENTIWTSGSSISFCGVNSDTVGWSWPDGAELPFTIDK

SEQ ID NO: 24468 - protein, 469 aa, synthetic construct; identical to SEQ ID NO: 19518
  REGION 1..469: note = neuraminidase__InfluenzaA__AHL80930

SEQ ID NO: 24469 - protein, 469 aa, synthetic construct; identical to SEQ ID NO: 19518
  REGION 1..469: note = neuraminidase__InfluenzaA__AHL80949

SEQ ID NO: 24470 - protein, 469 aa, synthetic construct
  REGION 1..469: note = neuraminidase__InfluenzaA__AHL80961
MNPNQKIITIGSVCMTIGMANLILQIGNIISIWISHSIQLGNQNQIETCNQSVITYENNTWVNQTYVNISNTNFAAGQSVVSVKLAGNSSLCPVSGWAIYSKDNSIRIGSKGDVFVIREPFISCSPLECRTFFLTQGALLNDKHSNGTIKDRSPYRTLMSCPIGEVPSPYNSRFESVAWSASACHDGINWLTIGISGPDNGAVAVLKYNGIITDTIKSWRNNILRTQESECACVNGSCFTIMTDGPSDGQASYKIFRIEKGKIVKSVEMNAPNYHYEECSCYPDSSEITCVCRDNWHGSNRPWVSFNQNLEYQIGYICSGIFGDNPRPNDKTGSCGPVSSNGANGVKGFSFKYGNGVWIGRTKSISSRKGFEMIWDPNGWTGTDNNFSIKQDVVGINEWSGYSGSFVQHPELTGLDCIRPCFWVELIRGRPKENTIWTSGSSISFCGVNSDTVGWSWPDGAELPFTIDK

SEQ ID NO: 24471 - protein, 469 aa, synthetic construct; identical to SEQ ID NO: 24470
  REGION 1..469: note = neuraminidase__InfluenzaA__AHL80972

SEQ ID NO: 24472 - protein, 469 aa, synthetic construct; identical to SEQ ID NO: 19518
  REGION 1..469: note = neuraminidase__InfluenzaA__AHL80983

SEQ ID NO: 24473 - protein, 469 aa, synthetic construct; identical to SEQ ID NO: 19518
  REGION 1..469: note = neuraminidase__InfluenzaA__AHL80992

SEQ ID NO: 24474 - protein, 469 aa, synthetic construct; identical to SEQ ID NO: 19518
  REGION 1..469: note = neuraminidase__InfluenzaA__AHL81004

SEQ ID NO: 24475 - protein, 469 aa, synthetic construct
  REGION 1..469: note = neuraminidase__InfluenzaA__AHL81016
MNPNQKIITIGSVSLTISTICFFMQIAILITTVTLHFKQYEFNSPPNNQVMLCEPTIIERNITEIVYLTNTTIEKEICPKLAEYRNWSKPQCDITGFAPFSKDNSIRLSAGGDIWVTREPYVSCDSDKCYQFALGQGTTLNNVHSNNTVRDRTPYRTLLMNELGVPFHLGTKQVCIAWSSSSCHDGKAWLHVCITGDDKNATASFIYNGRLVDSVVSWSKEILRTQESECVCINGTCTVVMTDGSASGKADTKILFIEEGKIVHTSTLSGSAQHVEECSCYPRYPGVRCVCRDNWKGSNRPIVDINIKDHSIVSSYVCSGLVGDTPRKNDSSSSSHCLDPNNEEGGHGVKGWAFDDGNDVWMGRTINETSRLGYETFKVIEGWSNPKSKLQINRQVIVDRGNRSGYSGIFSVEGKSCINRCFYVELIRGRKEETEVLWTSNSIVVFCGTSGTYGTGSWPDGADLNLMPI

SEQ ID NO: 24476 - protein, 469 aa, synthetic construct; identical to SEQ ID NO: 19518
  REGION 1..469: note = neuraminidase__InfluenzaA__AHL81028

SEQ ID NO: 24477 - protein, 469 aa, synthetic construct; identical to SEQ ID NO: 19518
  REGION 1..469: note = neuraminidase__InfluenzaA__AHL81040

SEQ ID NO: 24478 - protein, 469 aa, synthetic construct; identical to SEQ ID NO: 19518
  REGION 1..469: note = neuraminidase__InfluenzaA__AHL81052

SEQ ID NO: 24479 - protein, 469 aa, synthetic construct; identical to SEQ ID NO: 24470
  REGION 1..469: note = neuraminidase__InfluenzaA__AHL81064

SEQ ID NO: 24480 - protein, 469 aa, synthetic construct; identical to SEQ ID NO: 24470
  REGION 1..469: note = neuraminidase__InfluenzaA__AHL81075

SEQ ID NO: 24481 - protein, 469 aa, synthetic construct
  REGION 1..469: note = neuraminidase__InfluenzaA__AHL81086
MNPNQKIITIGSVSLTISTICFFMQIAILITTVTLHFKQYEFNSPPNNQVMLCKPTIIERNITEIVYLTNTTIEKEICPKLAEYRNWSKPQCDITGFAPFSKDNSIRLSAGGDIWVTREPYVSCDPDKCYQFALGQGTTLNNVHSNNTVRDRTPYRTLLMNELGVPFHLGTKQVCIAWSSSSCHDGKAWLHVCITGDDKNATASFIYNGRLVDSVVSWSKEILRTQESECVCINGTCTVVMTDGSASGKADTKILFIEEGKIVHTSTLSGSAQHVEECSCYPRYPGVRCVCRDNWKGSNRPIVDINIKDHSIVSSYVCSGLVGDTPRKNDSSSSSHCLDPNNEEGGHGVKGWAFDDGNDVWMGRTINETSRLGYETFKVIEGWSNPKSKLQINRQVIVDRGNRSGYSGIFSVEGKSCINRCFYVELIRGRKEETEVLWTSNSIVVFCGTSGTYGTGSWPDGADLNLMPI

SEQ ID NO: 24482 - protein, 469 aa, synthetic construct
  REGION 1..469: note = neuraminidase__InfluenzaA__AHL81098
MNPNQKIITIGSVSLTISTICFFVQIAILITTVTLHFKQYEFNSPPNNQVMLCEPTIIERNITEIVYLTNTTIEKEICPKLAEYRNWSKPQCDITGFAPFSKDNSIRLSAGGDIWVTREPYVSCDPDKCYQFALGQGTTLNNVHSNNTVRDRTPYRTLLMNELGVPFHLGTKQVCIAWSSSSCHDGKAWLHVCITGDDKNATASFIYNGRLVDSVVSWSKEILRTQESECVCINGTCTVVMTDGSASGKADTKILFIEEGKIVHTSTLSGSAQHVEECSCYPRYPGVRCVCRDNWKGSNRPIVDINIKDHSIVSSYVCSGLVGDTPRKNDSSSSSHCLDPNNEEGGHGVKGWAFDDGNDVWMGRTINETSRLGYETFKVIEGWSNPKSKLQINRQVIVDRGNRSGYSGIFSVEGKSCINRCFYVELIRGRKEETEVLWTSNSIVVFCGTSGTYGTGSWPDGADLNLMPI

SEQ ID NO: 24483 - protein, 469 aa, synthetic construct; identical to SEQ ID NO: 20709
  REGION 1..469: note = neuraminidase__InfluenzaA__AHL81110

SEQ ID NO: 24484 - protein, 469 aa, synthetic construct; identical to SEQ ID NO: 20709
  REGION 1..469: note = neuraminidase__InfluenzaA__AHL81121

SEQ ID NO: 24485 - protein, 469 aa, synthetic construct; identical to SEQ ID NO: 19518
  REGION 1..469: note = neuraminidase__InfluenzaA__AHL81132

SEQ ID NO: 24486 - protein, 469 aa, synthetic construct; identical to SEQ ID NO: 19518
  REGION 1..469: note = neuraminidase__InfluenzaA__AHL81144

SEQ ID NO: 24487 - protein, 469 aa, synthetic construct; identical to SEQ ID NO: 19518
  REGION 1..469: note = neuraminidase__InfluenzaA__AHL81156

SEQ ID NO: 24488 - protein, 469 aa, synthetic construct; identical to SEQ ID NO: 21787
  REGION 1..469: note = neuraminidase__InfluenzaA__AHL81168

SEQ ID NO: 24489 - protein, 469 aa, synthetic construct; identical to SEQ ID NO: 21787
  REGION 1..469: note = neuraminidase__InfluenzaA__AHL81180

SEQ ID NO: 24490 - protein, 469 aa, synthetic construct; identical to SEQ ID NO: 19518
  REGION 1..469: note = neuraminidase__InfluenzaA__AHL81192

SEQ ID NO: 24491 - protein, 469 aa, synthetic construct
  REGION 1..469: note = neuraminidase__InfluenzaA__AHL81215
MNPNQKIITIGSVSLTISTICFFMQIAILITTVTLHFKQYEFNSPPNNQVMLCEPTIIERNITEIMYLTNTTIEKEICPKLAEYRNWSKPQCDITGFAPFSKDNSIRLSAGGDIWVTREPYVSCDPDKCYQFALGQGTTLNNVHSNNTVRDRTPYRTLLMNELGVPFHLGTKQVCIAWSSSSCHDGKAWLHVCITGDDKNATASFIYNGRLVDSVVSWSKEILRTQESECVCINGTCTVVMTDGSASGKADTKILFIEEGKIVHTSTLSGSAQHVEECSCYPRYPGVRCVCRDNWKGSNRPIVDINIKDHSIVSSYVCSGLVGDTPRKNDSSSSSHCLDPNNEEGGHGVKGWAFDDGNDVWMGRTINETSRLGYETFKVIEGWSNPKSKLQINRQVIVDRGNRSGYSGIFSVEGKSCINRCFYVELIRGRKEETEVLWTSNSIVVFCGTSGTYGTGSWPDGADLNFMPI

SEQ ID NO: 24492 - protein, 469 aa, synthetic construct
  REGION 1..469: note = neuraminidase__InfluenzaA__AHL81227
MNPNQKIITIGSVCMTIGMANLILQIGNIISIWISHSIQLGNQSQIETCNQSVITYENNTWVNQTYVNISNTNFAAGQSVVSVKLAGNSSLCPVSGWAIYSKDNSIRIGSKGDVFVIREPFISCSPLECRTFFLTQGALLNDKHSNGTIKDRSPYRTLMSCPTGEVPSPYNSRFESVAWSASACHDGINWLTIGISGPDNGAVAVLKYNGIITDTIKSWRNNILRTQESECACVNGSCFTIMTDGPSDGQASYKIFRIEKGKIVKSVEMNAPNYHYEECSCYPDSSEITCVCRDNWHGSNRPWVSFNQNLEYQIGYICSGIFGDNPRPNDKTGSCGPVSSNGANGVKGFSFKYGNGVWIGRTKSISSRKGFEMIWDPNGWTGTDNNFSIKQDIIGINEWSGYSGSFVQHPELTGLDCIRPCFWVELIRGRPKENTIWTSGSSISFCGVNSDTVGWSWPDGAELPFTIDK

SEQ ID NO: 24493 - protein, 469 aa, synthetic construct; identical to SEQ ID NO: 19518
  REGION 1..469: note = neuraminidase__InfluenzaA__AHL81238

SEQ ID NO: 24494 - protein, 469 aa, synthetic construct; identical to SEQ ID NO: 19518
  REGION 1..469: note = neuraminidase__InfluenzaA__AHL81250

SEQ ID NO: 24495 - protein, 469 aa, synthetic construct; identical to SEQ ID NO: 19518
  REGION 1..469: note = neuraminidase__InfluenzaA__AHL81262

SEQ ID NO: 24496 - protein, 469 aa, synthetic construct; identical to SEQ ID NO: 19518
  REGION 1..469: note = neuraminidase__InfluenzaA__AHL81274

SEQ ID NO: 24497 - protein, 469 aa, synthetic construct; identical to SEQ ID NO: 19518
  REGION 1..469: note = neuraminidase__InfluenzaA__AHL81286

SEQ ID NO: 24498 - protein, 469 aa, synthetic construct; identical to SEQ ID NO: 19518
  REGION 1..469: note = neuraminidase__InfluenzaA__AHL81298

SEQ ID NO: 24499 - protein, 469 aa, synthetic construct; identical to SEQ ID NO: 24470
  REGION 1..469: note = neuraminidase__InfluenzaA__AHL81310

SEQ ID NO: 24500 - protein, 469 aa, synthetic construct; identical to SEQ ID NO: 20709
  REGION 1..469: note = neuraminidase__InfluenzaA__AHL81332

SEQ ID NO: 24501 - protein, 469 aa, synthetic construct
  REGION 1..469: note = neuraminidase__InfluenzaA__AHL81343
MNPNQKIITIGSVSLTISTICFLMQIAILITTVTLHFKQYEFNSPPNNQVMLCEPTIIERNITEIVYLTNTTIEKEICPKLAEYRNWSKPQCDITGFAPFSKDNSIRLSAGGDIWVTREPYVSCDPDKCYQFALGQGTTLNNVHSNNTVRDRTPYRTLLMNELGVPFHLGTKQVCIAWSSSSCHDGKAWLHVCITGDDKNATASFIYNGRLVDSVVSWSKEILRTQESECVCINGTCTVVITDGSASGKADTKILFIEEGKIVHTSTLSGSAQHVEECSCYPRYPGVRCVCRDNWKGSNRPIVDINIKDHSIVSSYVCSGLVGDTPRKNDSSSSSHCSDPNNEEGGHGVKGWAFDDGNDVWMGRTISEKSRLGYETFKVIEGWSNPKSKLQINRQVIVDRGNRSGYSGIFSVEGKSCINRCFYVELIRGRKEETEVLWTSNSIVVFCGTSGTYGTGSWPDGADINLMPI

SEQ ID NO: 24502 - protein, 469 aa, synthetic construct; identical to SEQ ID NO: 19518
  REGION 1..469: note = neuraminidase__InfluenzaA__AHL81355

SEQ ID NO: 24503 - protein, 469 aa, synthetic construct; identical to SEQ ID NO: 20709
  REGION 1..469: note = neuraminidase__InfluenzaA__AHL81367

SEQ ID NO: 24504 - protein, 469 aa, synthetic construct; identical to SEQ ID NO: 20709
  REGION 1..469: note = neuraminidase__InfluenzaA__AHL81378

SEQ ID NO: 24505 - protein, 469 aa, synthetic construct; identical to SEQ ID NO: 20709
  REGION 1..469: note = neuraminidase__InfluenzaA__AHL81389

SEQ ID NO: 24506 - protein, 469 aa, synthetic construct; identical to SEQ ID NO: 19518
  REGION 1..469: note = neuraminidase__InfluenzaA__AHL81400

SEQ ID NO: 24507 - protein, 469 aa, synthetic construct; identical to SEQ ID NO: 24491
  REGION 1..469: note = neuraminidase__InfluenzaA__AHL81412

SEQ ID NO: 24508 - protein, 469 aa, synthetic construct; identical to SEQ ID NO: 16738
  REGION 1..469: note = neuraminidase__InfluenzaA__AHL81422

SEQ ID NO: 24509 - protein, 469 aa, synthetic construct; identical to SEQ ID NO: 18026
  REGION 1..469: note = neuraminidase__InfluenzaA__AHL81433

SEQ ID NO: 24510 - protein, 469 aa, synthetic construct
  REGION 1..469: note = neuraminidase__InfluenzaA__AHL88954
MNPNQKIITIGSVSLTISTICFFMQIAILITTVTLHFKQYEFNSPPNNQVMLCEPTIIERNITEIVYLTNTTIEKEICPKLAEYRNWSKPQCNITGFAPFSKDNSIRLSAGGDIWVTREPYVSCDPDKCYQFALGQGTTLNNVHSNDTVHDRTPYRTLLMNELGVPFHLGTKQVCIAWSSSSCHDGKAWLHVCVTGDDKNATASFIYNGRLVDSIVSWSKEILRTQESECVCINGTCTVVMTDGSASGKADTKILFIKEGKIVHTSTLSGSAQHVEECSCYPRYPGVRCVCRDNWKGSNRPIVDINIKDYSIVSSYVCSGLVGDTPRKNDSSSSSHCLDPNNEEGGHGVKGWAFDDGNDVWMGRTISEKLRSGYETFKVIEGWSNPNSKLQINRQVIVDRDNRSGYSGIFSVEGKSCINRCFYVELIRGRKEETEVLWTSNSIVVFCGTSGTYGTGSWPDGADINLMPI

SEQ ID NO: 24511 - protein, 469 aa, synthetic construct
  REGION 1..469: note = neuraminidase__InfluenzaA__AHL89033
MNPNQKIITIGSVSLTISTICFFMQIAILITTVTLHFKQYEFNSPPNNQVMLCEPTIIERNITEIVYLTNTTIEKEICPKLAEYRNWSKPQCNITGFAPFSKDNSIRLSAGGDIWVTREPYVSCDPDKCYQFALGQGTTLNNVHSNDTVHDRTPYRTLLMNELGVPFHLGTKQVCIAWSSSSCHDGKAWLHVCVTGDDKNATASFIYNGRLVDSIVSWSKEILRTQESECVCINGTCTVVMTDGSASGKADTKILFIEEGKIVHTSTLSGSAQHVEECSCYPRYPGVRCVCRDNWKGSNRPIVDINIKDYSIVSSYVCSGLVGDTPRKNDSSSSSHCLDPNNEEGGHGVKGWAFDDGNDVWMGRTISEKLRSGYETFKVIEGWSNPNSKLQINRQVIVDRGNRSGYSGIFSVEDKSCINRCFYVELIRGRKEETEVLWTSNSIVVFCGTSGTYGTGSWPDGADINLMPI

SEQ ID NO: 24512 - protein, 469 aa, synthetic construct
  REGION 1..469: note = neuraminidase__InfluenzaA__AHL89045
MNPNQKIITIGSVSLTISTICFFMQIAILITTVTLHFKQYEFNSPPNNQVMLCEPTIIERNITEIVYLTNTTIEKEICPKLAEYRNWSKPQCNITGFAPFSKDNSIRLSAGGDIWVTREPYVSCDPDKCYQFALGQGTTLNNVHSNDTVHDRTPYRTLLMNELGVPFHLGTKQVCIAWSSSSCHDGKAWLHVCVTGDDKNATASFIYNGRLVDSIVSWSKEILRTQESECVCINGTCTVVMTDGSASGKADTKILFIEEGKIVHTSTLSGSAQHVEECSCYPRHPGVRCVCRDNWKGSNRPIVDINIKDYSIVSSYVCSGLVGDTPRKNDSSSSSHCLDPNNEEGGHGVKGWAFDDGNDVWMGRTISEKLRSGYETFKVIEGWSNPNSKLQTNRQVIVDRGNRSGYSGIFSVEGKSCINRCFYVELIRGRKEETEVLWTSNSIVVFCGTSGTYGTGSWPDGADINLMPI

SEQ ID NO: 24513 - protein, 469 aa, synthetic construct
  REGION 1..469: note = neuraminidase__InfluenzaA__AHL89057
MNPNQKIITIGSVSLTISTICFFMQIAILITTVTLHFKQYEFNSPPNNQVMLCEPTIIERNITEIVYLTNTTIEKEICPKLAEYRNWSKPQCNITGFAPFSKDNSIRLSAGGDIWVTREPYVSCDPDKCYQFALGQGTTLNNVHSNDTVHDRTPYRTLLMNELGVPFHLGTKQVCIAWSSSSCHDGKAWLHVCVTGDDKNATASFIYNGRLVDSIVSWSKEILRTQESECVCINGTCTVVMTDGSASGKADTKILFIEEGKIVHTSTLSGSAQHVEECSCYPRYPGVRCVCRDNWKGSNRPIVDINIKDYSIVSSYVCSGLVGDTPRKNDSSSSSHCLDPNNEEGGHGVKGWAFDDGNDVWMGRTISEKLRSGYETFKVIEGWSKPNSKLQINRQVIVDRGNRSGYSGIFSVEGKSCINRCFYVELIRGRKEETEVLWTSNSIVVFCGTSGTYGTGSWPDGADINLMPI

SEQ ID NO: 24514 - protein, 469 aa, synthetic construct; identical to SEQ ID NO: 15707
  REGION 1..469: note = neuraminidase__InfluenzaA__AHL89069

SEQ ID NO: 24515 - protein, 469 aa, synthetic construct; identical to SEQ ID NO: 14712
  REGION 1..469: note = neuraminidase__InfluenzaA__AHL89081

SEQ ID NO: 24516 - protein, 469 aa, synthetic construct; identical to SEQ ID NO: 14712
  REGION 1..469: note = neuraminidase__InfluenzaA__AHL89093

SEQ ID NO: 24517 - protein, 469 aa, synthetic construct; identical to SEQ ID NO: 14712
  REGION 1..469: note = neuraminidase__InfluenzaA__AHL89117

SEQ ID NO: 24518 - protein, 469 aa, synthetic construct; identical to SEQ ID NO: 14712
  REGION 1..469: note = neuraminidase__InfluenzaA__AHL89129

SEQ ID NO: 24519 - protein, 469 aa, synthetic construct
  REGION 1..469: note = neuraminidase__InfluenzaA__AHL89141
MNPNQKIITIGSVSLTISTICFFMQIAILITTVTLHFKQYEFNSPPNNQVMLCEPTIIERNITEIVYLTNTTIEKEICPKLAEYRNWSKPQCNITGFAPFSKDNSIRLSAGGDIWVTREPYVSCDPDKCYQFALGQGTTLNNVHSNDTVHDRTPYRTLLMNELGVPFHLGTKQVCIAWSSSSCHDGKAWLHVCVTGDDKNATASFIYNGRLVDSIVSWSKEILRTQESECVCINGTCTVVMTDGSASGKADTKILFIEEGKIVHTSTLSGSAQHVEECSCYPRYPGVRCVCRDNWKGSNRPIVDINIKDYSIVSSYVCSGLVGDTPRKNDSSSSSHCLDPNNEEGGHGVKGWAFDDGNDVWMGRTISEKLRLGYETFKVIEGWSNPNSKLQTNRQVIVDRGNRSGYSGIFSVEGKSCINRCFYVELIRGRKEETEVLWTSNSIVVFCGTSGTYGTGSWPDGADINLMPI

SEQ ID NO: 24520 - protein, 469 aa, synthetic construct
  REGION 1..469: note = neuraminidase__InfluenzaA__AHL89153
MNPNQKIITIGSVSLTISTICFFMQIAILITTVTLHFKQYEFNSPPNNQVMLCEPTIIERNITEIVYLTNTTIEKEICPKLAEYRNWSKPQCNITGFAPFSKDNSIRLSAGGDIWVTREPYVSCDPDKCYQFSLGQGTTLNNVHSNDTVHDRTPYRTLLMNELGVPFHLGTKQVCIAWSSSSCHDGKAWLHVCVTGDDKNATASFIYNGRLVDSIVSWSKEILRTQESECVCINGTCTVVMTDGSASGKADTKILFIEEGKIVHTSTLSGSAQHVEECSCYPRYPGVRCVCRDNWKGSNRPIVDINIKDYSIVSSYVCSGLVGDTPRKNDSSSSSHCLDPNNEEGGHGVKGWAFDDGNDVWMGRTISEKLRSGYETFKVIEGWSNPNSKLQINRQVIVDRGNRSGYSGIFSVEGKSCINRCFYVELIRGRKEETEVLWTSNSIVVFCGTSGTYGTGSWPDGADINLMPI

SEQ ID NO: 24521 - protein, 469 aa, synthetic construct; identical to SEQ ID NO: 14712
  REGION 1..469: note = neuraminidase__InfluenzaA__AHL89165

SEQ ID NO: 24522 - protein, 469 aa, synthetic construct
  REGION 1..469: note = neuraminidase__InfluenzaA__AHL89177
MNPNQKIITIGSVSLTISTICFFMQIAILITTVTLHFKQYEFNSPPNNQVMLCEPTIIERNITEIVYLTNTTIEKEICPKLAEYRNWSKPQCNITGFAPFSKDNSIRLSAGGDIWVTREPYVSCDPDKCYQFALGQGTTLNNVHSNDTVHDRTPYRTLLMNELGVPFHLGTKQVCIAWSSSSCHDGKAWLHVCVTGDDKNATASFIYNGRLVDSIVSWSNEILRTQESECVCINGTCTVVMTDGSASGKADTKILFIEEGKIVHTSTLSGSAQHVEECSCYPRYPGVRCVCRDNWKGSNRPIVDINIKDYSIVSSYVCSGLVGDTPRKNDSSSSSHCLDPNNEEGGHGVKGWAFDDGNDVWMGRTISEKLRSGYETFKVIEGWSNPNSKLQINRQVIVDRGNRSGYSGIFSVEGKSCINRCFYVELIRGRKEENEVLWTSNSIVVFCGTSGTYGTGSWPDGADINLMPI

SEQ ID NO: 24523 - protein, 469 aa, synthetic construct; identical to SEQ ID NO: 16564
  REGION 1..469: note = neuraminidase__InfluenzaA__AHL89189

SEQ ID NO: 24524 - protein, 469 aa, synthetic construct; identical to SEQ ID NO: 15707
  REGION 1..469: note = neuraminidase__InfluenzaA__AHL89201

SEQ ID NO: 24525 - protein, 469 aa, synthetic construct; identical to SEQ ID NO: 16564
  REGION 1..469: note = neuraminidase__InfluenzaA__AHL89213

SEQ ID NO: 24526 - protein, 469 aa, synthetic construct
  REGION 1..469: note = neuraminidase__InfluenzaA__AHL89225
MNPNQKIITIGSVSLTISTICFFMQIAILITTVTLHFKQYEFNPPPNNQVMLCEPTIIERNITEIVYLTNTTIEKEICPKLAEYRNWSKPQCNITGFAPFSKDNSIRLSAGGDIWVTREPYVSCDPDKCYQFALGQGTTLNNVHSNDTVHDRTPYRTLLMNELGVPFHLGTKQVCIAWSSSSCHDGKAWLHVCVTGDDKNATASFIYNGRLVDSIVSWSKEILRTQESECVCINGTCTVVMTDGSASGKADTKILFIEEGKIVHTSTLSGSAQHVEECSCYPRYPGVRCVCRDNWKGSNRPIVDINIKDYSIVSSYVCSGLVGDTPRKNDSSSSSHCLDPNNEEGGHGVKGWAFDDGNDVWMGRTISEKLRLGYETFKVIEGWSNPNSKLQTNRQVIVDRGNRSGYSGIFSVEGKSCINRCFYVELIRGRKEETEVLWTSNSIVVFCGTSGTYGTGSWPDGADINLMPI

SEQ ID NO: 24527 - protein, 469 aa, synthetic construct; identical to SEQ ID NO: 16564
  REGION 1..469: note = neuraminidase__InfluenzaA__AHL89237

SEQ ID NO: 24528 - protein, 469 aa, synthetic construct; identical to SEQ ID NO: 15707
  REGION 1..469: note = neuraminidase__InfluenzaA__AHL89261

SEQ ID NO: 24529 - protein, 469 aa, synthetic construct
  REGION 1..469: note = neuraminidase__InfluenzaA__AHL89273
MNPNQKIITIGSVSLTISTICFFMQIAILITTVTLHFKQYEFNSPPNNQVMLCEPTIIERNITEIVYLTNTTIEKEICPKLAEYRNWSKPQCNITGFAPFSKDNSIRLSAGGDIWVTREPYVSCDPDKCYQFALGQGTTLNNVHSNDTVHDRTPYRTLLMNELGVPFHLGTKQVCIAWSSSSCHDGKAWLHVCVTGDDKNATASFIYNGRLVDSIVSWSKEILRTQESECVCINGTCTVVMTDGSASGKADTKILFIEEGKIVHTSTLSGSAQHVEECSCYPRYPGVRCVCRDNWKGSNRPIVDINIKDYSIVSSYVCSGLVGDTPRKNDSSSSSHCLDPNNEEGGHGVKGWAFDDGNDVWMGRTISEKLRLGYETFKVIEGWSNPNSKLQTNRQVIVDRGNRSGYSGIFSVEGKSCINRCFYVELIRGRKEETDVLWTSNSIVVFCGTSGTYGTGSWPDGADINLMPI

SEQ ID NO: 24530 - protein, 469 aa, synthetic construct
  REGION 1..469: note = neuraminidase__InfluenzaA__AHL89285
MNPNQKIITIGSVSLTISTICFFMQIAILITTVTLHFKQYEFNSPPNNQVMLCEPTIIERNITEIVYLTNTTIEKEICPKLAEYRNWSKPQCNITGFAPFSKDNSIRLSAGGDIWVTREPYVSCDPDKCYQFALGQGTTLNNVHSNDTVHDRTPYRTLLMNELGVPFHLGTKQVCIAWSSSSCHDGKAWLHVCVTGDDKNATASFIYNGRLVDSIVSWSKEILRTQESECVCINGTCTVVMTDGSASGKADTKILFIEEGKIVHTSTLSGSAQHVEECSCYPRYPGVRCVCRDNWKGSNRPIVDINIKDYSIVSSYVCSGLVGDTPRKNDSSSSSHCLDPNNEEGGHGVKGWAFDDGNDVWMGRTISEKLRLGYETFKVIEGWSNPNSKLQTNRQVIVDRGNRSGYSGIFSVEGKSCINRCFYVELIRGRKEETDVLWTSNSIVVFCSTSGTYGTGSWPDGADINLMPI

SEQ ID NO: 24531 - protein, 469 aa, synthetic construct; identical to SEQ ID NO: 24529
  REGION 1..469: note = neuraminidase__InfluenzaA__AHL89297

SEQ ID NO: 24532 - protein, 469 aa, synthetic construct; identical to SEQ ID NO: 24529
  REGION 1..469: note = neuraminidase__InfluenzaA__AHL89309

SEQ ID NO: 24533 - protein, 469 aa, synthetic construct
  REGION 1..469: note = neuraminidase__InfluenzaA__AHL89321
MNPNQKIITIGSVSLTISTICFFMQIAILITTVTLHFKQYEFNSPPNNQVMLCEPTIIERNITEIVYLTNTTIEKEICPKLAEYRNWSKPQCDITGFAPFSKDNSIRLSAGGDIWVTREPYVSCDPDKCYQFALGQGTTLNNVHSNDTVHDRTPYRTLLMNELGVPFHLGTKQVCIAWSSSSCHDGKAWLHVCVTGDDKNATASFIYNGRLVDSVVSWSKDILRTQESECVCINGTCTVVMTDGSASGKADTKILFIEEGKIVHISTLSGSAQHVEECSCYPRYPGVRCVCRDNWKGSNRPIVDINIKNYSIVSSYVCSGLVGDTPRKTDSSSSSHCLDPNNEEGGHGVKGWAFDDGNDVWMGRTISEKLRLGYETFKVIEGWSNPNSKLQINRQVIVDRGNRSGYSGIFSVEGKSCINRCFYVELIRGRKEETEVLWTSNSIVVFCGTSGTYGTGSWPDGADINLMPI

SEQ ID NO: 24534 - protein, 469 aa, synthetic construct
  REGION 1..469: note = neuraminidase__InfluenzaA__AHL89333
MNPNQKIITIGSVSLTISTICFFMQIAILIATVTLHFKQYEFNSPPNNQVMLCEPTIIERNITEIVYLTNTTIEKEICPKLAEYRNWSKPQCNITGFAPFSKDNSIRLSAGGDIWVTREPYVSCDPDKCYQFALGQGTTLNNVHSNDTVHDRTPYRTLLMNELGVPFHLGTKQVCIAWSSSSCHDGKAWLHVCVTGDDKNATASFIYNGRLVDSIVSWSKEILRTQESECVCINGTCAVVMTDGSASGKADTKILFIEEGKIVHTSTLSGSAQHVEECSCYPRYPGVRCVCRDNWKGSNRPIVDINIKDYSIVSSYVCSGLVGDTPRKNDSSSSSHCLDPNNEEGGHGVKGWAFDDGNDVWMGRTISEKLRLGYETFKVIEGWSNPNSKLQTNRQVIVDRGNRSGYSGIFSVEGKSCINRCFYVELIRGRKEETEVLWTSNSIVVFCGTSGTYGTGSWPDGADINLMPI

SEQ ID NO: 24535 - protein, 469 aa, synthetic construct; identical to SEQ ID NO: 14712
  REGION 1..469: note = neuraminidase__InfluenzaA__AHL89345

SEQ ID NO: 24536 - protein, 469 aa, synthetic construct; identical to SEQ ID NO: 15706
  REGION 1..469: note = neuraminidase__InfluenzaA__AHL89357

SEQ ID NO: 24537 - protein, 469 aa, synthetic construct; identical to SEQ ID NO: 15707
  REGION 1..469: note = neuraminidase__InfluenzaA__AHL89369

SEQ ID NO: 24538 - protein, 469 aa, synthetic construct
  REGION 1..469: note = neuraminidase__InfluenzaA__AHL89381
MNPNQKIITIGSVSLTISTICFFMQIAILITTVTLHFKQYEYNSPPNNQVMLCEPTIIERNITEIVYLTNTTIEKEICPKLAEYRNWSKPQCNITGFAPFSKDNSIRLSAGGDIWVTREPYVSCDPDKCYQFALGQGTTLNNVHSNDTVHDRTPYRTLLMNELGVPFHLGTKQVCIAWSSSSCHDGKAWLHVCVTGDDKNATASFIYNGRLVDSIVSWSKEILRTQESECVCINGTCTVVMTDGSASGKADTKILFIEEGKIVHTSTLSGSAQHVEECSCYPRYPGVRCVCRDNWKGSNRPIVDINIKDYSIVSSYVCSGLVGDTPRKNDSSSSSHCLDPNNEEGGHGVKGWAFDDGNDVWMGRTISEKLRLGYETFKVIEGWSNPNSKLQTNRQVIVDRGNRSGYSGIFSVEGKSCINRCFYVELIRGRKEETEVLWTSNSIVVFCGTSGTYGTGSWPDGADINLMPI

SEQ ID NO: 24539 - protein, 469 aa, synthetic construct; identical to SEQ ID NO: 24529
  REGION 1..469: note = neuraminidase__InfluenzaA__AHL89405

SEQ ID NO: 24540 - protein, 469 aa, synthetic construct
  REGION 1..469: note = neuraminidase__InfluenzaA__AHL89417
MNPNQKIITIGSVSLTISTICFFMQIAILITTVTLHFKQYEFNSPPNNQVMLCEPTIIERNITEIVYLTNTTIEKEICPKLAEYRNWSKPQCDITGFAPFSKDNSIRLSAGGDIWVTREPYVSCDPDKCYQFALGQGTTLNNVHSNDTVHDRTPYRTLLMNELGVPFHLGTKQVCIAWSSSSCHDGKAWLHVCVTGDDKNATASFIYNGRLVDSVVSWSKDILRTQESECVCINGTCTVVMTDGSASGKADTKILFIEEGKIVHTSTLSGSAQHVEECSCYPRYPGVRCVCRDNWKGSNRPIVDIDIKNYSIVSSYVCSGLVGDTPRKTDSSSSSHCLDPNNEEGGHGVKGWAFDDGNDVWMGRTISEKLRLGYETFKVIEGWSNPNSKLQINRQVIVDRGNRSGYSGIFSVEGKSCINRCFYVELIRGRKEETEVLWTSNSIVVFCGTSGTYGTGSWPDGADINLMPI

SEQ ID NO: 24541 - protein, 469 aa, synthetic construct; identical to SEQ ID NO: 15707
  REGION 1..469: note = neuraminidase__InfluenzaA__AHL89429

SEQ ID NO: 24542 - protein, 469 aa, synthetic construct; identical to SEQ ID NO: 14712
  REGION 1..469: note = neuraminidase__InfluenzaA__AHL89441

SEQ ID NO: 24543 - protein, 469 aa, synthetic construct; identical to SEQ ID NO: 14712
  REGION 1..469: note = neuraminidase__InfluenzaA__AHL89453

SEQ ID NO: 24544 - protein, 469 aa, synthetic construct
  REGION 1..469: note = neuraminidase__InfluenzaA__AHL89465
MNPNQKIITIGSVSLTISTICFFMQIAILITTVTLHFKQYEFNSPPNNQVMLCEPTIIERNITEIVYLTNITIEKEKCPKLAEYRNWSKPQCNITGFAPFSKDNSIRLSAGGDIWVTREPYVSCDPDRCYQFALGQGTTLNNVHSNDTVHDRTPYRTLLMNELGVPFHLGTKQVCIAWSSSSCHDGKAWLHVCVTGDDKNATASFIYNGRLVDSIVSWSKEILRTQESECVCINGTCTVVMTDGSASGKADTKILFIEEGKIVHTSTLSGSAQHVEECSCYPRYPGVRCVCRDNWKGSNRPIVDINIKDYSIVSSYVCSGLVGDTPRKNDSSSSSHCLDPNNEEGGHGVKGWAFDDGNDVWMGRTISEKLRLGYETFKVIEGWSNPNSKLQTNRQVIVDRGNRSGYSGIFSVEGKSCINRCFYVELIRGRKEETEVLWTSNSIVVFCGTSGTYGTGSWPDGADINLMPI

SEQ ID NO: 24545 - protein, 469 aa, synthetic construct; identical to SEQ ID NO: 24519
  REGION 1..469: note = neuraminidase__InfluenzaA__AHL89477

SEQ ID NO: 24546 - protein, 469 aa, synthetic construct
  REGION 1..469: note = neuraminidase__InfluenzaA__AHL89489
MNPNQKIITIGSVSLTISTICFFMQIAILITTVTLHFKQYEFNSPPNNQVMLCEPTIIERNITEIVYLTNTTIEKEICPKLAEYRNWSKPQCSITGFAPFSKDNSIRLSAGGDIWVTREPYVSCDPDKCYQFALGQGTTLNNVHSNDTVHDRTPYRTLLMNELGVPFHLGTKQVCIAWSSSSCHDGKAWLHVCVTGDDKNATASFIYNGRLVDSIVSWSKEILRTQESECVCINGTCTVVMTDGSASGKADTKILFIEEGKIVHTSTLSGSAQHVEECSCYPRYPGVRCVCRDNWKGSNRPIVDINIKDYSIVSSYVCSGLVGDTPRKNDRSSSSHCLDPNNEEGGHGVKGWAFDDGNDVWMGRTISEKSRSGYETFKVIEGWSNPHSKLQINRQVIVDRGNRSGYSGIFSVEGKSCINRCFYVELIRGRKEETEVLWTSNSIVVFCGTSGTYGTGSWPDGADINLMPI

SEQ ID NO: 24547 - protein, 469 aa, synthetic construct; identical to SEQ ID NO: 15707
  REGION 1..469: note = neuraminidase__InfluenzaA__AHL89501

SEQ ID NO: 24548 - protein, 469 aa, synthetic construct; identical to SEQ ID NO: 15707
  REGION 1..469: note = neuraminidase__InfluenzaA__AHL89513

SEQ ID NO: 24549 - protein, 469 aa, synthetic construct; identical to SEQ ID NO: 15707
  REGION 1..469: note = neuraminidase__InfluenzaA__AHL89525

SEQ ID NO: 24550 - protein, 469 aa, synthetic construct; identical to SEQ ID NO: 15707
  REGION 1..469: note = neuraminidase__InfluenzaA__AHL89537

SEQ ID NO: 24551 - protein, 470 aa, synthetic construct
  REGION 1..470: note = neuraminidase__InfluenzaA__AHL89549
MNPNQKIITIGSISIAIGIISLMLQIGNIISIWASHSIQTGSQNHTGICNQRIITYENSTWVNHTYVNINNTNVVAGKDKTSVTLAGNSSLCSISGWAIYTKDNSIRIGSKGDVFVIREPFISCSHLECRTFFLTQGALLNDKHSNGTVKDRSPYRALMSCPLGEAPSPYNSKFESVAWSASACHDGMGWLTIGISGPDNGAVAVLKYNGIITETIKSWKKRILRTQESECVCVNGSCFTIMTDGPSNGAASYKIFKIEKGKVTKSIELNAPNFHYEECSCYPDTGTVMCVCRDNWHGSNRPWVSFNQHLDYQIGYICSGVFGDNPRPKDGKGSCNPVTVDGADGVKGFSYKYGNGVWIGRTKSNRLRKGFEMIWDPNGWTDTDSDFSVKQDVVAITDWSGYSGSFVQHPELTGLDCIRPCFWVELVRGLPRENTTIWTSGSSISFCGVDSDTANWSWPDGAELPFTIDK

SEQ ID NO: 24552 - protein, 470 aa, synthetic construct; identical to SEQ ID NO: 16030
  REGION 1..470: note = neuraminidase__InfluenzaA__AHL89561

SEQ ID NO: 24553 - protein, 470 aa, synthetic construct; identical to SEQ ID NO: 16030
  REGION 1..470: note = neuraminidase__InfluenzaA__AHL89573

SEQ ID NO: 24554 - protein, 470 aa, synthetic construct; identical to SEQ ID NO: 16065
  REGION 1..470: note = neuraminidase__InfluenzaA__AHL89585

SEQ ID NO: 24555 - protein, 470 aa, synthetic construct
  REGION 1..470: note = neuraminidase__InfluenzaA__AHL89597
MNPNQKIITIGSISIAIGIISLMLQIGNIISIWASHSIQTGSQNHTGICNQRIITYENSTWVNHTYVNINNTNVVAGKDKTSVTLAGNSSLCSISGWAIYTKDNSIRIGSKGDVFVIREPFISCSHLECRTFFLTQGALLNDKHSNGTVRDRSPYRALMSCPLGEAPSPYNSKFESVAWSASACHDGMGWLTIGISGPDNGAVAVLKYNGIITETIKSWKKRILRTQESECVCVNGSCFTIMTDGPSNGAASYKIFKIEKGKVTKSIELNAPNFHYEECSCYPDTGTVMCVCRDNWHGSNRPWVSFNQNLDYQVGYICSGVFGDNPRPKDGKGSCNPMTVDGADGVKGFSYKYGNGVWIGRTKSNKLRKGFEMIWDPNGWTDTDSDFSVKQDVVAITDWSGYSGSFVQHPELTGLDCIRPCFWVELVRGLPRENTTIWTSGSSISFCGVDSDTANWSWPDGAELPFTIDK

SEQ ID NO: 24556 - protein, 470 aa, synthetic construct; identical to SEQ ID NO: 16065
  REGION 1..470: note = neuraminidase__InfluenzaA__AHL89609

SEQ ID NO: 24557 - protein, 470 aa, synthetic construct
  REGION 1..470: note = neuraminidase__InfluenzaA__AHL89621
MNPNQKIITIGSISIAIGIISLMLQIGNIISIWASHSIQTGSQNHTGICNQRIITYENSTWVNHTYVSINNTNVVAGKDKTSVTLAGNSSLCSISGWAIYTKDNSIRIGSKGDVFVIREPFISCSHLECRTFFLTQGALLNDKHSNGTVKDRSPYRALMSCPLGEAPSPYNSKFESVAWSASACHDGMGWLTIGISGPDNGAVAVLKYNGIITETIKSWKKRILRTQESECVCVNGSCFTIMTDGPSNGAASYKIFKIEKGKVTKSIELNAPNFHYEECSCYPDTGTVMCVCRDNWHGSNRPWVSFNQNLDYQIGYICSGVFGDNPRPKDGKGSCNPVTVDGADGVKGFSYKYGNGVWIGRTKSNRHRKGFEMIWDPNGWTDTDSDFSVKQDVVAITDWSGYSGSFVQHPELTGLDCIRPCFWVELVRGLPRENTTIWTSGSSISFCGVDSDTANWSWPDGAELPFTIDK

SEQ ID NO: 24558 - protein, 470 aa, synthetic construct; identical to SEQ ID NO: 16056
  REGION 1..470: note = neuraminidase__InfluenzaA__AHL89633

SEQ ID NO: 24559 - protein, 470 aa, synthetic construct; identical to SEQ ID NO: 16065
  REGION 1..470: note = neuraminidase__InfluenzaA__AHL89645

SEQ ID NO: 24560 - protein, 470 aa, synthetic construct; identical to SEQ ID NO: 16030
  REGION 1..470: note = neuraminidase__InfluenzaA__AHL89657

SEQ ID NO: 24561 - protein, 470 aa, synthetic construct
  REGION 1..470: note = neuraminidase__InfluenzaA__AHL89669
MNPNQKIITIGSISIAIGIISLMLQIGNIISIWASHSIQTGSQNHTGICNQRIITYENSTWVNHTYVNINNTNVVAGKDKTSVTLAGNSSLCSISGWAIYTKDNSIRIGSKGDVFVIREPFISCSHLECRTFFLTQGALLNDKHSNGTVKDRSPYRALMSCPLGEAPSPYNSKFESVAWSASACHDGMGWLTIGISGPDNGAVAVLKYNGIITETIKSWKKRILRTQESECVCVNGSCFTIMTDGPSNGAASYKIFKIEKGKVTKSIELNAPNFHYEECSCYPDTGTVMCVCRDNWHGSNRPWVSFNQNLDYQVGYICSGVFGDNPRPKDGKGSCNPMTVDGADGVKGFSYKYGNGVWIGRTKSNELRKGFEMIWDPNGWTDTDSDFSVKQDVVAITDWSGYSGSFVQHPELTGLDCIRPCFWVELVRGLPRENTTIWTSGSSISFCGVDSDTANWSWPDGAELPFTIDK

SEQ ID NO: 24562 - protein, 470 aa, synthetic construct
  REGION 1..470: note = neuraminidase__InfluenzaA__AHL89681
MNPNQKIITIGSISIAIGIISLMLQIGNIISIWASHSIQTGSQNHTGICNQRIITYENSTWVNHTYVNINNTNVVAGKDKTSVTLAGNSSLCSISGWAIYTKDNSIRIGSKGDVFVIREPFISCSHLECRTFFLTQGALLNDKHSNGTVKDRSPYRALMSCPLGEAPSPYNSKFESVAWSASACHDGMGWLTIGISGPDNGAVAVLKYNGIITETIKSWKKRILRTQESECVCVNGSCFTIMTDGPSNGAASYKIFKIEKGKITKSIELNAPNFHYEECSCYPDTGTVMCVCRDNWHGSNRPWVSFNQNLDYQVGYICSGVFGDNPRPKDGKGSCNPMTVDGADGVKGFSYKYGNGVWIGRTKSNKLRKGFEMIWDPNGWTDTDSDFSVKQDVVAITDWSGYSGSFVQHPELTGLDCIRPCFWVELVRGLPRENATIWTSGSSISFCGVDSDTANWSWPDGAELPFTIDK

SEQ ID NO: 24563 - protein, 470 aa, synthetic construct
  REGION 1..470: note = neuraminidase__InfluenzaA__AHL89693
MNPNQKIITIGSISIAIGIISLMLQIGNIISIWASHSIQTGSQNHTGICNQRIITYENSTWVNHTYVNINNTNVVAGKDKTSVTLAGNSSLCSISGWAIYTKDNSIRIGSKGDVFVIREPFISCSHLECRTFFLTQGALLNDKHSNGTVKDRSPYRALMSCPLGEAPSPYNSKFESVAWSASACHDGMGWLTIGISGPDNGAVAVLKYKGIITGTIKSWRKQILRTQESECVCMNGSCFTIMTDGPSNGAASYKIFKIEKGKVTKSIELNAPNFHYEECSCYPDTGIVMCVCRDNWHGSNRPWVSFNQNLDYQIGYICSGVFGDNPRPKDGEGSCNPVTVDGADGVKGFSYKYDDGVWIGRTKSNRLRKGFEMIWDPNGWTNTDSDFSVKQDVVAITDWSGYSGSFVQHPELTGLDCIRPCFWVELVRGLPRENTTIWTSGSSISFCGVNSDTANWSWPDGAELPFTIDK

SEQ ID NO: 24564 - protein, 470 aa, synthetic construct
  REGION 1..470: note = neuraminidase__InfluenzaA__AHL89705
MNPNQKIITIGSISIAIGIISLMLQIGNIISIWASHSIQNGSQNHTGICNQRIITYENSTWVNHTYVSINNTNVVAGKDKTSVTLAGNSSLCSISGWAIYTKDNSIRIGSKGDVFVIREPFISCSHLECRTFFLTQGALLNDKHSNGTVKDRSPYRALMSCPLGEAPSPYNSKFESVAWSASACHDGMGWLTIGISGPDNGAVAVLKYNGIITETIKSWKKRILRTQESECVCVNGSCFTIMTDGPSNGAASYKIFKIEKGKVTKSIELNAPNFHYEECSCYPDTGTVMCVCRDNWHGSNRPWVSFNQNLDYQIGYICSGVFGDNPRPKDGKGSCNPVTVDGADGVKGFSYKYGNGVWIGRTKSNRLRKGFEMIWDPNGWTDTDSDFSVKQDVVAITDWSGYSGSFVQHPELTGLDCIRPCFWVELVRGLPRENTTIWTSGSSISFCGVDSDTANWSWPDGAELPFTIDK

SEQ ID NO: 24565 - protein, 470 aa, synthetic construct; identical to SEQ ID NO: 16030
  REGION 1..470: note = neuraminidase__InfluenzaA__AHL89717

SEQ ID NO: 24566 - protein, 470 aa, synthetic construct; identical to SEQ ID NO: 16030
  REGION 1..470: note = neuraminidase__InfluenzaA__AHL89729

SEQ ID NO: 24567 - protein, 470 aa, synthetic construct
  REGION 1..470: note = neuraminidase__InfluenzaA__AHL89753
MNPNQKIITIGSISIAIGIISLMLQIGNIISIWASHSIQTGSQNHTGICNQRIITYENSTWVNHTYVSINNTNVVAGNDKTSVTLAGNSSLCSISGWAIYTKDNSIRIGSKGDVFVIREPFISCSHLECRTFFLTQGALLNDKHSNGTVKDRSPYRALMSCPLGEAPSPYNSKFESVAWSASACHDGMGWLTIGISGPDNGAVAVLKYNGIITETIKSWKKRILRTQESECVCVNGSCFTIMTDGPSNGAASYKIFKIEKGKVTKSIELNAPNFHYEECSCYPDTGTVMCVCRDNWHGSNRPWVSFNQNLDYQIGYICSGVFGDNPRPKDGKGSCNPVTVDGADGVKGFSYKYGNGVWIGRTKSNRLRKGFEMIWDPNGWTDTDSDFSVKQDVVAITDWSGYSGSFVQHPELTGLDCIRPCFWVELVRGLPRENTTIWTSGSSISFCGVDSDTANWSWPDGAELPFTIDK

SEQ ID NO: 24568 - protein, 470 aa, synthetic construct; identical to SEQ ID NO: 16030
  REGION 1..470: note = neuraminidase__InfluenzaA__AHL89765

SEQ ID NO: 24569 - protein, 470 aa, synthetic construct; identical to SEQ ID NO: 16071
  REGION 1..470: note = neuraminidase__InfluenzaA__AHL89777

SEQ ID NO: 24570 - protein, 470 aa, synthetic construct; identical to SEQ ID NO: 16030
  REGION 1..470: note = neuraminidase__InfluenzaA__AHL89789

SEQ ID NO: 24571 - protein, 470 aa, synthetic construct
  REGION 1..470: note = neuraminidase__InfluenzaA__AHL89801
MNPNQKIITIGSISIAIGIISLMLQIGNIISIWASHSIQTGSQNHTGICNQRIITYENSTWVNHTYVNINNTNVVAGKDKTSVALAGNSSLCSISGWAIYTKDNSIRIGSKGDVFVIREPFISCSHLECRTFFLTQGALLNDKHSNGTVKDRSPYRALMSCPLGEAPSPYNSKFESVAWSASACHDGMGWLTIGISGPDNGAVAVLKYNGIITETIKSWKKRILRTQESECVCVNGSCFTIMTDGPSNGAASYKIFKIEKGKVTKSIELNAPNFHYEECSCYPDTGTVMCVCRDNWHGSNRPWVSFNQNLDYQIGYICSGVFGDNPRPKDGKGSCNPVTVDGADGVKGFSYKYGNGVWIGRTKSNRLRKGFEMIWDPNGWTNTDSDFSVKQDVVAITDWSGYSGSFVQHPELTGLDCIRPCFWVELVRGLPRENTTIWTSGSSISFCGVDSDTANWSWPDGAELPFTIDK

SEQ ID NO: 24572 - protein, 470 aa, synthetic construct
  REGION 1..470: note = neuraminidase__InfluenzaA__AHL89813
MNPNQKIITIGSISIAIGIISLMLQIGNIISIWASHSIQTGSQNHTGICNQRIITYENSTWVNHTYVNINNTNVVAGKDKTSVTLAGNSSLCSISGWAIYTKDNSIRIGSKGDVFVIREPFISCSHLECRTFFLTQGALLNDKHSNGTVKDRSPYRALMSCPLGEAPSPYNSKFESVAWSASACHDGMGWLTIGISGPDNGAVAVLKYNGIITETIKSWKKRILRTQESECVCVNGSCFTIMTDGPSNGAASYKIFKIEKGKVTKSIELNAPNFHYEECSCYPDTGTVMCVCRDNWHGSNRPWVSFNQNLDYQVGYICSGVFGDNPRPKDGKGSCNPMTADGADGVKGFSYKYGNGVWIGRTKSNKLRKGFEMIWDPNGWTDTDSDFSVKQDVVAITDWSGYSGSFVQHPELTGLDCIRPCFWVELVRGLPRENATIWTSGSSISFCGVDSDTANWSWPDGAELPFTIDK

SEQ ID NO: 24573 - protein, 470 aa, synthetic construct; identical to SEQ ID NO: 16071
  REGION 1..470: note = neuraminidase__InfluenzaA__AHL89825

SEQ ID NO: 24574 - protein, 470 aa, synthetic construct; identical to SEQ ID NO: 16030
  REGION 1..470: note = neuraminidase__InfluenzaA__AHL89837

SEQ ID NO: 24575 - protein, 470 aa, synthetic construct
  REGION 1..470: note = neuraminidase__InfluenzaA__AHL89849
MNPNQKIITIGSISIAIGIISLMLQIGNIISIWASHSIQTGSQNHTGICNQRIITYENSTWVNHTYVYINNTNVVAGKDKTSVTLAGNSSLCSISGWAIYTKDNSIRIGSKGDVFVIREPFISCSHLECRTFFLTQGALLNDKHSNGTVKDRSPYRALMSCPLGEAPSPYNSKFESVAWSASACHDGMGWLTIGISGPDNGAVAVLKYNGIITETIKSWKKRILRTQESECVCVNGSCFTIMTDGPSNGAASYKIFKIEKGMVTKSIELNAPNFHYEECSCYPDTGTVMCVCRDNWHGSNRPWVSFNQNLDYQIGYICSGVFGDNPRPKDGKGSCNPVTVDGADGVKGFSYKYGNGVWIGRTKSNRLRKGFEMIWDPNGWTNTDSDFSVKQDVVAITDWSGYSGSFVQHPELTGLDCIRPCFWVELVRGLPRENTTIWTSGSSISFCGVDSDTANWSWPDGAELPFTIDK

SEQ ID NO: 24576 - protein, 469 aa, synthetic construct; identical to SEQ ID NO: 16066
  REGION 1..469: note = neuraminidase__InfluenzaA__AHL89861

SEQ ID NO: 24577 - protein, 469 aa, synthetic construct
  REGION 1..469: note = neuraminidase__InfluenzaA__AHL89873
MNPNQKIITIGSVSLTISTICFFMQTAILITTVTLHFKQYEFNSPPNNQVMLCEPTIIERNITEIVYLTNTTIEKEICPKLAEYRNWSKPQCDITGFAPFSKDNSIRLSAGGDIWVTREPYVSCDPDKCYQFALGQGTTLNNVHSNDTVRDRTPYRTLLMNELGVPFHLGTKQVCIAWSSSSCHDGKAWLHVCITGDDKNATASFIYNGRLVDSIVSWSKEILRTQESECVCINGTCTVVMTDGSASGKADTKILFIEEGKIVHTSTLSGSAQHVEECSCYPRYPGVRCVCRDNWKGSNRPIVDINIKDHSIVSSYVCSGLVGDTPRKNDSSSSSHCLDPNNEEGGHGVKGWAFDDGNDVWMGRTISEKSRLGYETFKVIEGWSNPKSKLQINRQVIVDGGNRSGYSGIFSVEGKSCINRCFYVELIRGRKEETEVLWTSNSIVVFCGTSGTYGTGSWPDGADINLMPI

SEQ ID NO: 24578 - protein, 469 aa, synthetic construct; identical to SEQ ID NO: 16743
  REGION 1..469: note = neuraminidase__InfluenzaA__AHL89885

SEQ ID NO: 24579 - protein, 469 aa, synthetic construct
  REGION 1..469: note = neuraminidase__InfluenzaA__AHL89897
MNPNQKIITIGSVSLTISTICFFMQIAILITTVTLHFKQYEFNSPPNNQVMLCEPTIIERNITEIVYLTNTTIEKEICPKLAEYRNWSKPQCDITGFAPFSKDNSIRLSAGGDIWVTREPYVSCDPDKCYQFALGQGTTLNNVHSNDTVRDRTPYRTLLMNELGVPFHLGTKQVCIAWSSSSCHDGKAWLHVCITGDDKNATASFIYNGRLVDSIVSWSKEILRTQESECVCINGTCTVVMTDGSASGKADTKILFIEEGKIVHTSTLSGSAQHVEECSCYPRYPGVRCVCRDNWKGSNRPIVDINIKDHSIVSSYVCSGLVGDTPRKNDSSSSSHCLDPNNEEGGHGVKGWAFDDGNDVWMGRTISEKSRLGYETFKVIEGWSNPKSKLQTNRQVIVDRGNRSGYSGIFSVEGKSCINRCFYVELIRGRKEETEVLWTSNSIVVFCGTSGTYGTGSWPDGADINLMPI

SEQ ID NO: 24580 - protein, 469 aa, synthetic construct; identical to SEQ ID NO: 16402
  REGION 1..469: note = neuraminidase__InfluenzaA__AHL89909

SEQ ID NO: 24581 - protein, 469 aa, synthetic construct; identical to SEQ ID NO: 16041
  REGION 1..469: note = neuraminidase__InfluenzaA__AHL89921

SEQ ID NO: 24582 - protein, 469 aa, synthetic construct; identical to SEQ ID NO: 16402
  REGION 1..469: note = neuraminidase__InfluenzaA__AHL89933

SEQ ID NO: 24583 - protein, 469 aa, synthetic construct; identical to SEQ ID NO: 16041
  REGION 1..469: note = neuraminidase__InfluenzaA__AHL89945

SEQ ID NO: 24584 - protein, 469 aa, synthetic construct
  REGION 1..469: note = neuraminidase__InfluenzaA__AHL89957
MNPNQKIITIGSVSLTISTICFFMQIAILITTVTLHFKQYEFNSPPNNQVMLCEPTIIERNITEIVYLTNTTIEKEICPKLAEYRNWSKPQCDITGFAPFSKDNSIRLSAGGDIWVTREPYVSCDPDKCYQFALGQGTTLNNVHSNDTVRDRTPYRTLLMNELGVPFHLGTKQVCIAWSSSSCHDGKAWLHVCITGDDKNATASFIYNGRLVDSIVSWSKEILRTQESECVCINGTCTVVMTDGSASGKADTKILFIKEGKIVHTSTLSGSAQHVEECSCYPRYPGVRCVCRDNWKGSNRPIVDINIKDHSIVSSYVCSGLVGDTPRKNDSSSSSHCLDPNNEEGGHGVKGWAFDDGNDVWMGRTISEKSRLGYETFKVIEGWSNPKSKLQINRQVIVDRGNRSGYSGIFSVEGKSCINRCFYVELIRGRKEETEVLWTSNSIVVFCGTSGTYGTGSWPDGADINLMPI

SEQ ID NO: 24585 - protein, 469 aa, synthetic construct; identical to SEQ ID NO: 15884
  REGION 1..469: note = neuraminidase__InfluenzaA__AHL89969

SEQ ID NO: 24586 - protein, 469 aa, synthetic construct; identical to SEQ ID NO: 15884
  REGION 1..469: note = neuraminidase__InfluenzaA__AHL89981

SEQ ID NO: 24587 - protein, 469 aa, synthetic construct
  REGION 1..469: note = neuraminidase__InfluenzaA__AHL89993
MNPNQKIITIGSVSLSISTICFFMQIAILITTVTLHFKQYEFNSPPNNQVMLCEPTIIERNITEIVYLTNTTIEKEICPKLAEYRNWSKPQCDITGFAPFSKDNSIRLSAGGDIWVTREPYVSCDPDKCYQFALGQGTTLNNVHSNDTVRDRTPYRTLLMNELGVPFHLGTKQVCIAWSSSSCHDGKAWLHVCITGDDKNATASFIYNGRLVDSIVSWSKEILRTQESECVCINGTCTLVMTDGSASGKADTKILFIEEGKIVHTSTLSGSAQHVEECSCYPRYPGVRCVCRDNWKGSNRPIVDINIKDHSIVSSYVCSGLVGDTPRKNDSSSSSHCLDPNNEEGGHGVKGWAFDDGNDVWMGRTISEKSRLGYETFKVIEGWSNPKSKLQINRQVIVDRGNRSGYSGIFSVEGKSCINRCFYVELIRGRKEETEVLWTSNSIVVFCGTSGTYGTGSWPDGADINLMPI

SEQ ID NO: 24588 - protein, 469 aa, synthetic construct
  REGION 1..469: note = neuraminidase__InfluenzaA__AHL90005
MNPNQKIITIGSVSLTISTICFFMQIAILITTVTLHFKQYEFSSPPNNQVMLCEPTIIKRNITEIVYLTNTTIEKEICPKLAEYRNWSKPQCDITGFAPFSKDNSIRLSAGGDIWVTREPYVSCDPDKCYQFALGQGTTLNNVHSNDTVHDRTPYRTLLMNELGVPFHLGTKQVCIAWSSSSCHDGKAWLHVCVTGDDKNATASFIYNGRLVDSIVSWSKEILRTQESECVCINGTCTVVMTDGSASGKADTKILFIEEGKIVHTSTLSGSAQHVEECSCYPRYPGVRCVCRDNWKGSNRPIVDINIKDYSIVSRYVCSGLVGDTPRKNDSYSSSHCLDPNNEEGGHGVKGWAFDDGNDVWMGRTISEKSRSGYETFKVIEGWSNPNSKLQINRQVIVDRGNRSGYSGIFSVEGKSCINRCFYVELIRGRKEETEVLWTSNSIVVFCGTSGTYGTGSWPDGADINLMPI

SEQ ID NO: 24589 - protein, 469 aa, synthetic construct; identical to SEQ ID NO: 16090
  REGION 1..469: note = neuraminidase__InfluenzaA__AHL90017

SEQ ID NO: 24590 - protein, 469 aa, synthetic construct; identical to SEQ ID NO: 16041
  REGION 1..469: note = neuraminidase__InfluenzaA__AHL90029

SEQ ID NO: 24591 - protein, 469 aa, synthetic construct; identical to SEQ ID NO: 16057
  REGION 1..469: note = neuraminidase__InfluenzaA__AHL90041

SEQ ID NO: 24592 - protein, 469 aa, synthetic construct; identical to SEQ ID NO: 16057
  REGION 1..469: note = neuraminidase__InfluenzaA__AHL90053

SEQ ID NO: 24593 - protein, 469 aa, synthetic construct; identical to SEQ ID NO: 22322
  REGION 1..469: note = neuraminidase__InfluenzaA__AHL90065

SEQ ID NO: 24594 - protein, 469 aa, synthetic construct; identical to SEQ ID NO: 24584
  REGION 1..469: note = neuraminidase__InfluenzaA__AHL90077

SEQ ID NO: 24595 - protein, 469 aa, synthetic construct; identical to SEQ ID NO: 16066
  REGION 1..469: note = neuraminidase__InfluenzaA__AHL90089

SEQ ID NO: 24596 - protein, 469 aa, synthetic construct; identical to SEQ ID NO: 16743
  REGION 1..469: note = neuraminidase__InfluenzaA__AHL90101

SEQ ID NO: 24597 - protein, 469 aa, synthetic construct; identical to SEQ ID NO: 16041
  REGION 1..469: note = neuraminidase__InfluenzaA__AHL90113

SEQ ID NO: 24598 - protein, 470 aa, synthetic construct; identical to SEQ ID NO: 16632
  REGION 1..470: note = neuraminidase__InfluenzaA__AHL90125

SEQ ID NO: 24599 - protein, 470 aa, synthetic construct
  REGION 1..470: note = neuraminidase__InfluenzaA__AHL90136
MNPNQKIITIGSISIAIGIISLMLQIGNIISIWASHSIQTGSQNNTGICNQRIITYENSTWVNHTYVNINNTNVVAGEDKTSVTLAGNSSLCSISGWAIYTKDNSIRIGSKGDVFVIREPFISCSHLECRTFFLTQGALLNDKHSNGTVKDRSPYRALMSCPLGEAPSPYNSKFESVAWSASACHDGMGWLTIGISGPDNGAVAVLKYNGIITGTIKSWKKQILRTQESECVCMNGSCFTIMTDGPSNKAASYKIFKIEKGKVTKSIELNAPNFYYEECSCYPDSGMVMCVCRDNWHGSNRPWVSFNQNLDYQIGYICSGVFGDNPRPEDGEGSCNPVTVDGANGVKGFSYKYGNGVWIGRTKSNRLRKGFEMIWDPNGWTNTDSDFSVKQDVVAITDWSGYSGSFVQHPELTGLDCIRPCFWVELVRGLPRENTTIWTSGSSISFCGVNSDTANWSWPDGAELPFTIDK

SEQ ID NO: 24600 - protein, 470 aa, synthetic construct; identical to SEQ ID NO: 16632
  REGION 1..470: note = neuraminidase__InfluenzaA__AHL90160

SEQ ID NO: 24601 - protein, 470 aa, synthetic construct
  REGION 1..470: note = neuraminidase__InfluenzaA__AHL90172
MNPNQKIITIGSISIAIGIISLMLQIGNIISIWASHSIQTGSQNNTGICNQRIITYENSTWVNHTYVNINNTNVVAGEDKTSVTLAGNSSLCSISGWAIYTKDNSIRIGSKGDVFVIREPFISCSHLECRTFFLTQGALLNDKHSNGTVKDRSPYRALMSCPLGEAPSPYNSKFESVAWSASACHDGMGWLTIGISGPDNGAVAVLKYNGIITGTIKSWKKQILRTQESECVCMNGSCFTIMTDGPSNKAASYKIFKIEKGKVTKSIELNAPNFHYEECSCYPDTGIVMCVCRDNWHGSNRPWVSFNQNLDYQIGYICSGVFGDNPRPEDGEGNCNPVTVDGANGVKGFSYKYGNGVWIGRTKSNRLRKGFEMIWDPNGWTNTDSDFSVKQDVVAITDWSGYSGSFVQHPELTGLDCIRPCFWVELVRGLPRENTTIWTSGSSISFCGVNSDTANWSWPDGAELPFTIDK

SEQ ID NO: 24602 - protein, 470 aa, synthetic construct; identical to SEQ ID NO: 16632
  REGION 1..470: note = neuraminidase__InfluenzaA__AHL90184

SEQ ID NO: 24603 - protein, 470 aa, synthetic construct; identical to SEQ ID NO: 19930
  REGION 1..470: note = neuraminidase__InfluenzaA__AHL90196

SEQ ID NO: 24604 - protein, 470 aa, synthetic construct; identical to SEQ ID NO: 16632
  REGION 1..470: note = neuraminidase__InfluenzaA__AHL90220

SEQ ID NO: 24605 - protein, 470 aa, synthetic construct
  REGION 1..470: note = neuraminidase__InfluenzaA__AHL90232
MNPNQKIITIGSISIAIGIISLMLQIGNIISIWASHSIQTGSQNNTGICNQRIITYENSTWVNHTYVNINNTNVVAGEDKTSVTLAGNSSLCSISGWAIYTKDNSIRIGSKGDVFVIREPFISCSHLECRTFFLTQGALLNDKHSNGTVKDRSPYRALMSCPLGEAPSPYNSKFESVAWSASACHDGMGWLTIGISGPDNGAVAVLKYNGIITGTIKSWKKQILRTQESECVCMNGSCFTIMTDGPSNKAASYKIFKIEKGKVTKSIELNAPNFHYEECSCYPDTGIVMCVCRDNWHGSNRPWVSFNQNLDYQIGYICSGVFGDNPRPEDGEGSCNPVTVNGANGVKGFSYKYDNGVWIGRTKSNRLRKGFEMIWDPNGWTNTDSDFSVKQDVVAITDWSGYSGSFVQHPELTGLDCIRPCFWVELVRGLPRENTTIWTSGSSISFCGVNSDTANWSWPDGAELPFTIDK

SEQ ID NO: 24606 - protein, 470 aa, synthetic construct
  REGION 1..470: note = neuraminidase__InfluenzaA__AHL90244
MNPNQKIITIGSISIAIGIISLMLQIGNIISIWASHSIQTGSQNNTGICNQRIITYENSTWVNHTYVNINNTNVVAGEDKTSVTLAGNSSLCSISGWAIYTKDNSIRIGSKGDVFVIREPFISCSHLECRTFFLTQGALLNDKHSNGTVKDRSPYRALMSCPLGEAPSPYNSKFESVAWSASACHDGMGWLTIGISGPDNGAVAVLKYNGIITGTIKSWKKQILRTQESECVCMNGSCFTIMTDGPSNKAASYKIFKIEKGKVTKSIELNAPNFHYEECSCYPDTGIVMCVCRDNWHGSNRPWVSFNQNLDYQIGYICSGVFGDNPRPEDGEGSCNPMTVDGANGVKGFSYKYDNGVWIGRTKSNRLRKGFEMIWDPNGWTNTDSDFSVKQDVVAITDWSGYSGSFVQHPELTGLDCIRPCFWVELVRGLPRENTTIWTSGSSISFCGVNSDTASWSWPDGAELPFTIDK

SEQ ID NO: 24607 - protein, 470 aa, synthetic construct; identical to SEQ ID NO: 17461
  REGION 1..470: note = neuraminidase__InfluenzaA__AHL90256

SEQ ID NO: 24608 - protein, 470 aa, synthetic construct
  REGION 1..470: note = neuraminidase__InfluenzaA__AHL90268
MNPNQKIITIGSISIAIGIISLMLQIGNIISIWASHSIQTGSQNNTGICNQRIITYENSTWVNHTYVNINNTNVVAGEDKTSVTLAGNSSLCSISGWAIYTKDNSIRIGSKGDVFVIREPFISCSHLECRTFFLTQGALLNDKHSNGTVKDRSPYRALMSCPLGEAPSPYNSKFESVAWSASACHDGMGWLTIGISGPDNGAVAVLKYNGIITGTIKSWKKQILRTQESECVCMNGSCFTIMTDGPSNKAASYKIFKIEKGKVTKSIELNAPNFHYEECSCYPDTSIVMCVCRDNWHGSNRPWVSFNQNLDYQIGYICSGVFGDNPRPEDGEGSCNPVTVDGANGVKGFSYKYDNGVWIGRTKSNRLRKGFEMIWDPNGWTNTDRDFSVKQDVVAITDWSGYSGSFVQHPELTGLDCIRPCFWVELVRGLPRENTTIWTSGSSISFCGVNSDTANWSWPDGAELPFTIDK

SEQ ID NO: 24609 - protein, 470 aa, synthetic construct; identical to SEQ ID NO: 17461
  REGION 1..470: note = neuraminidase__InfluenzaA__AHL90280

SEQ ID NO: 24610 - protein, 470 aa, synthetic construct
  REGION 1..470: note = neuraminidase__InfluenzaA__AHL90304
MNPNQKIITIGSISIAIGIISLMLQIGNIISIWASHSIQTGSQNNTEICNQRIITYENSTWVNHTYVNINNTNVVAGEDKTSVTLAGNSSLCSISGWAIYTKDNSIRIGSKGDVFVIREPFISCSHLECRTFFLTQGALLNDKHSNGTVKDRSPYRALMSCPLGEAPSPYNSKFESVAWSASACHDGMGWLTIGISGPDNGAVAVLKYNGIITGTIKSWKKQILRTQESECVCMNGSCFTIMTDGPSNKAASYKIFKIEKGKVTKSIELNAPNFHYEECSCYPDTGIVMCVCRDNWHGSNRPWVSFNQNLDYQIGYICSGVFGDNPRPEDGEGSCNPVTVDGANGVKGFSYKYDNGVWIGRTKSNRLRKGFEMIWDPNGWTNTDSDFSVKQDVVAITDWSGYSGSFVQHPELTGLDCIRPCFWVELVRGLPRENTTIWTSGSSISFCGVNSDTANWSWPDGAELPFTIDK

SEQ ID NO: 24611 - protein, 470 aa, synthetic construct; identical to SEQ ID NO: 16632
  REGION 1..470: note = neuraminidase__InfluenzaA__AHL90316

SEQ ID NO: 24612 - protein, 470 aa, synthetic construct
  REGION 1..470: note = neuraminidase__InfluenzaA__AHL90328
MNPNKKIITIGSISIAIGIISLMLQIGNIISIWASHSIQTGSQNNTGICNQRIITYENSTWVNHTYVNINNTNVVAGEDKTSVTLAGNSSLCSISGWAIYTKDNSIRIGSKGDVFVIREPFISCSHLECRTFFLTQGALLNDKHSNGTVKDRSPYRALMSCPLGEAPSPYNSKFESVAWSASACHDGMGWLTIGISGPDNGAVAVLKYNGIITGTIKSWKKQILRTQESECVCMNGSCFTIMTDGPSNKAASYKIFKIEKGKVTKSIELNAPNFHYEECSCYPDTGIVMCVCRDNWHGSNRPWVSFNQNLDYQIGYICSGVFGDNPRPEDGEGSCNPVTVDGANGVKGFSYKYDNGVWIGRTKSNRLRKGFEMIWDPNGWTNTDSDFSVKQDVVAVTDWSGYSGSFVQHPELTGLDCIRPCFWVELVRGLPRENTTIWTSGSSISFCGVNSDTANWSWPDGAELPFTIDK

SEQ ID NO: 24613 - protein, 470 aa, synthetic construct; identical to SEQ ID NO: 16632
  REGION 1..470: note = neuraminidase__InfluenzaA__AHL90340

SEQ ID NO: 24614 - protein, 470 aa, synthetic construct
  REGION 1..470: note = neuraminidase__InfluenzaA__AHL90352
MNPNQKIMTIGSISIAIGIISLMLQIGNIISIWASHSIQTGSQNNTGICNQRIITYENSTWVNHTYVNINNTNVVAGEDKTSVTLAGNSSLCSISGWAIYTKDNSIRIGSKGDVFVIREPFISCSHLECRTFFLTQGALLNDKHSNGTVKDRSPYRALMSCPLGEAPSPYNSKFESVAWSASACHDGMGWLTIGISGPDNGAVAVLKYNGIITGTIKSWKKQILRTQESECVCMNGSCFTIMTDGPSNKAASYKIFKIEKGKVTKSIELNAPNFHYEECSCYPDTGIVMCVCRDNWHGSNRPWVSFNQNLDYQIGYICSGVFGDNPRPEDGEGSCSPVTVDGANGVKGFSYKYDNGVWIGRTKSNRLRKGFEMIWDPNGWTNTDSDFSVKQDVVAITDWSGYSGSFVQHPELTGLDCIRPCFWVELVRGMPRENTTIWTSGSSISFCGVNSDTANWSWPDGAELPFTIDK

SEQ ID NO: 24615 - protein, 470 aa, synthetic construct; identical to SEQ ID NO: 23461
  REGION 1..470: note = neuraminidase__InfluenzaA__AHL90364

SEQ ID NO: 24616 - protein, 470 aa, synthetic construct; identical to SEQ ID NO: 17461
  REGION 1..470: note = neuraminidase__InfluenzaA__AHL90376

SEQ ID NO: 24617 - protein, 469 aa, synthetic construct
  REGION 1..469: note = neuraminidase__InfluenzaA__AHL90388
MNPNQKIITIGSVSLIISTICFFMQIAILITTVTLHFKQYEFNSSPNNQVMLCEPTIIERNITEIVYLTNTIIEKEICPKLAEYRNWSKPQCDITGFAPFSKDNSIRLSAGGDIWVTREPYVSCDPDKCYQFALGQGTTLNNVHSNNTVRDRTPYRTLLMNELGVPFHLGTKQVCIAWSSSSCHDGKAWLHVCITGDDKNATASFIYNGRLVDSIVSWSKEILRTQESECVCINGTCTVVMTDGSASGKADTKILFIEEGKIVHTSTLSGSAQHVEECSCYPRYPGVRCVCRDNWKGSNRPIVDINIKDHSIVSSYVCSGLVGDTPRKNDSSSSSHCLDPNNEEGGHGVKGWAFDDGNDVWMGRTISEKSRLGYETFKVIEGWSNPKSKLQINRQVIVDRGNRSGYSGIFSVEGKSCINRCFYVELIRGRKEETEVLWTSNSIVVFCGTSGTYGTGSWPDGADINLMPI

SEQ ID NO: 24618 - protein, 469 aa, synthetic construct; identical to SEQ ID NO: 16512
  REGION 1..469: note = neuraminidase__InfluenzaA__AHL90400

SEQ ID NO: 24619 - protein, 469 aa, synthetic construct; identical to SEQ ID NO: 16512
  REGION 1..469: note = neuraminidase__InfluenzaA__AHL90413

SEQ ID NO: 24620 - protein, 469 aa, synthetic construct
  REGION 1..469: note = neuraminidase__InfluenzaA__AHL90425
MNPNQKIITIGSVSLTISTICFFMQTAILITTVTLHFKQYEFNSPPNNQVMLCEPTIIERNITEIVYLTNTTIEKEICPKLAEYRNWSKPQCDITGFAPFSKDNSIRLSAGGDIWVTREPYVSCDPDKCYQFALGQGTTLNNVHSNDTVHDRTPYRTLLMNELGVPFHLGTKQVCIAWSSSSCHDGKAWLHVCITGDDKNATASFIYNGRLVDSIVSWSKEILRTQESECVCINGTCTVVMTDGSASGKADTKILFIEEGKIVHTSTLSGSAQHVEECSCYPRYPGVRCVCRDNWKGSNRPIVDINIKDHSIVSSYVCSGLVGDTPRKNDSSSSSHCLDPNNEEGGHGVKGWAFDDGNDVWMGRTISEKSRLGYETFKVIEGWSNPKSKLQINRQVIVDRGDRSGYSGIFSVEGKSCINRCFYVELIRGRKEETEVLWTSNSIVVFCGTSGTYGTGSWPDGADINLMPI

SEQ ID NO: 24621 - protein, 469 aa, synthetic construct; identical to SEQ ID NO: 16599
  REGION 1..469: note = neuraminidase__InfluenzaA__AHL90437

SEQ ID NO: 24622 - protein, 469 aa, synthetic construct; identical to SEQ ID NO: 16512
  REGION 1..469: note = neuraminidase__InfluenzaA__AHL90449

SEQ ID NO: 24623 - protein, 469 aa, synthetic construct; identical to SEQ ID NO: 16512
  REGION 1..469: note = neuraminidase__InfluenzaA__AHL90461

SEQ ID NO: 24624 - protein, 469 aa, synthetic construct; identical to SEQ ID NO: 16512
  REGION 1..469: note = neuraminidase__InfluenzaA__AHL90473

SEQ ID NO: 24625 - protein, 469 aa, synthetic construct; identical to SEQ ID NO: 16512
  REGION 1..469: note = neuraminidase__InfluenzaA__AHL90485

SEQ ID NO: 24626 - protein, 469 aa, synthetic construct; identical to SEQ ID NO: 16603
  REGION 1..469: note = neuraminidase__InfluenzaA__AHL90497

SEQ ID NO: 24627 - protein, 469 aa, synthetic construct; identical to SEQ ID NO: 16603
  REGION 1..469: note = neuraminidase__InfluenzaA__AHL90509

SEQ ID NO: 24628 - protein, 469 aa, synthetic construct
  REGION 1..469: note = neuraminidase__InfluenzaA__AHL90521
MNPNQKIITIGSVSLTISTICFFLQIAILITTVTLHFKQYEFNSPPNNQVMLCEPTIIERNITEIVYLTNTTIEKEICPKLAEYRNWSKPQCDITGFAPFSKDNSIRLSAGGDIWVTREPYVSCDPDKCYQFALGQGTTLNNVHSNNTVRDRTPYRTLLMNELGVPFHLGTKQVCIAWSSSSCHDGKAWLHVCITGDDKNATASFIYNGRLVDSIVSWSKEILRTQESECVCINGTCTVVMTDGSASGKADTKILFIEEGKIVHTSTLSGSAQHVEECSCYPRYPGVRCVCRDNWKGSNRPIVDINIKDHSIVSSYVCSGLVGDTPRKNDSSSSSHCLDPNNEEGGHGVKGWAFDDGNDVWMGRTISEKSRLGYETFKVIEGWSNPKSKLQINRQVIVDRGNRSGYSGIFSVEGKSCINRCFYVELIRGRKEETEVLWTSNSIVVFCGTSGTYGTGSWPDGADINLMPI

SEQ ID NO: 24629 - protein, 469 aa, synthetic construct
  REGION 1..469: note = neuraminidase__InfluenzaA__AHL90533
MNPNQKIITIGSVSLTISTICFFMQTAILITTVTLHFKQYEFNSPPNNQVMLCEPTIIERNITEIVYLTNTTIEKEICPKLAEYRNWSKPQCDITGFAPFSKDNSIRLSAGGDIWVTREPYVSCDPDKCYQFALGQGTTLNNVHSNDTVRDRTPYRTLLMNELGVPFHLGTKQVCIAWSSSSCHDGKAWLHVCITGDDKNATASFIYNGRLVDSIVSWSKEILRTQESECVCINGTCTVVMTDGSASGKADTKILFIEEGKIVHTSTLSGSAQHVEECSCYPRYPGVRCVCRDNWKGSNRPIVDINIKDHSIVSSYVCSGLVGDTPRKNDSSSSSHCLDPNNEEGGHGVKGWAFDDGNDVWMGRTISEKSRLGYETFKVIEGWSNPKSKLQINRQVIVERGDRSGYSGIFSVEGKSCINRCFYVELIRGRKEETEVLWTSNSIVVFCGTSGTYGTGSWPDGADINLMPI

SEQ ID NO: 24630 - protein, 469 aa, synthetic construct; identical to SEQ ID NO: 16512
  REGION 1..469: note = neuraminidase__InfluenzaA__AHL90545

SEQ ID NO: 24631 - protein, 469 aa, synthetic construct; identical to SEQ ID NO: 16599
  REGION 1..469: note = neuraminidase__InfluenzaA__AHL90557

SEQ ID NO: 24632 - protein, 469 aa, synthetic construct
  REGION 1..469: note = neuraminidase__InfluenzaA__AHL90569
MNPNQKIITIGSVSLTISTICFFMQIAILITTVTLHFKQYEFNSPPNNQVMLCEPTIIERNITEIVYLTNTTIEKEICPKLAEYRNWSKPQCDIKGFAPFSKDNSIRLSAGGDIWVTREPYVSCDPDKCYQFALGQGTTLNNVHSNNTVRDRTPYRTLLMNELGVPFHLGTKQVCIAWSSSSCHDGKAWLHVCITGDDKNATASFIYNGRLVDSVVSWSKEILRTQESECVCINGTCTVVMTDGSASGKADTKILFIEEGKIVHTSTLSGSAQHVEECSCYPRYPGVRCVCRDNWKGSNRPIVDINIKDHSIVSSYVCSGLVGDTPRKNDSSSSSHCLDPNNEEGGHGVKGWAFDDGNDVWMGRTISEKSRLGYETFKVIEGWSNPKSKLQINRQVIVDRGNRSGYSGIFSVEGKSCINRCFYVELIRGRKEETEVLWTSNSIVVFCGTSGTYGTGSWPDGADINLMPI

SEQ ID NO: 24633 - protein, 469 aa, synthetic construct; identical to SEQ ID NO: 16599
  REGION 1..469: note = neuraminidase__InfluenzaA__AHL90581

SEQ ID NO: 24634 - protein, 469 aa, synthetic construct; identical to SEQ ID NO: 16603
  REGION 1..469: note = neuraminidase__InfluenzaA__AHL90593

SEQ ID NO: 24635 - protein, 469 aa, synthetic construct
  REGION 1..469: note = neuraminidase__InfluenzaA__AHL90605
MNPNQKIITIGSVSLTISTICFFMQIAILITTVTLHFKQYEFNSPPNNQVMLCEPTIIERNITEIVYLTNTTIEKEICPKLAEYRNWSKPQCDITGFAPFSKDNSIRLSAGGDIWVTREPYVSCDPDKCYQFALGQGTTLNNVHSNNTVRDRTPYRTLLMNELGVPFHLGTKQVCIAWSSSSCHDGKAWLHVCITGDDKNATASFIYNGRLVDSVVSWSKEILRTQESECVCINGTCTVVMTDGSASGKADTKILFIEEGKIVHTSTLSGSAQHVEECSCYPRYPGVRCVCRDNWKGSNRPIVDINIKDHSIVSSYVCSGLVGDTPRKNDSSSSSHCLDPNNEEGGHGVKGWAFDDGNDVWMGRTISEKSRLGYETFKVIEGWSNPKSKLQINRQVIVDRGNRSGYSGIFSVEGKSCINRCFYVELIRGRKEETEVLWTSNSIVVFCGTSGTYGTGSWPDGANINLMPI

SEQ ID NO: 24636 - protein, 469 aa, synthetic construct; identical to SEQ ID NO: 16599
  REGION 1..469: note = neuraminidase__InfluenzaA__AHL90629

SEQ ID NO: 24637 - protein, 469 aa, synthetic construct; identical to SEQ ID NO: 16599
  REGION 1..469: note = neuraminidase__InfluenzaA__AHL90641

SEQ ID NO: 24638 - protein, 469 aa, synthetic construct; identical to SEQ ID NO: 16512
  REGION 1..469: note = neuraminidase__InfluenzaA__AHL90653

SEQ ID NO: 24639 - protein, 469 aa, synthetic construct; identical to SEQ ID NO: 16599
  REGION 1..469: note = neuraminidase__InfluenzaA__AHL90665

SEQ ID NO: 24640 - protein, 469 aa, synthetic construct
  REGION 1..469: note = neuraminidase__InfluenzaA__AHL90677
MNPNQKIITIGSVSLTISTICFFMQTAILITTVTLHFKQYEFNSPPNNQVMLCEPTIIERNITEIVYLTNTTIEKEICPKLAEYRNWSKPQCDITGFAPFSKDNSIRLSAGGDIWVTREPYVSCDPDKCYQFALGQGTTLNNVHSNNTVRDRTPYRTLLMNELGVPFHLGTKQVCIAWSSSSCHDGKAWLHVCITGDDKNATASFIYNGKLVDSIVSWSKEILRTQESECVCINGTCTVVMTDGSASGKADTKILFIEEGKIVHTSTLSGSAQHVEECSCYPRYPGVRCVCRDNWKGSNRPIVDINIKDHSIVSSYVCSGLVGDTPRKNDSSSSSHCLDPNNEEGGHGVKGWAFDDGNDVWMGRTISEKSRLGYETFKVIEGWSNPKSKLQINRQVIVDRGNRSGYSGIFSVEGKSCINRCFYVELIRGRKEETEVLWTSNSIVVFCGTSGTYGTGSWPDGADINLMPI

SEQ ID NO: 24641 - protein, 469 aa, synthetic construct; identical to SEQ ID NO: 16599
  REGION 1..469: note = neuraminidase__InfluenzaA__AHL90689

SEQ ID NO: 24642 - protein, 469 aa, synthetic construct
  REGION 1..469: note = neuraminidase__InfluenzaA__AHL90701
MNPNQKIITIGSVSLTISTICFFMQIAILITTVTLHFKQYEFNSPPNNQVMLCEPTIIERNITEIVYLTNTTIEKEICPKLAEYRNWSKPQCDITGFAPFSKDNSIRLSAGGGIWVTREPYVSCDPDKCYQFALGQGTTLNNVHSNNTVRDRTPYRTLLMNELGVPFHLGTKQVCIAWSSSSCHDGKAWLHVCITGDDKNATASFIYNGRLVDSVVSWSKDILRTQESECVCINGTCTVVMTDGSASGKADTKILFIEEGKIVHTSTLSGSAQHVEECSCYPRYPGVRCVCRDNWKGSNRPIVDINIKDHSIVSSYVCSGLVGDTPRKNDSSSSSHCLDPNNEEGGHGVKGWAFDDGNDVWMGRTISEKSRLGYETFKVIEGWSNPKSKLQINRQVIVDRGNRSGYSGIFSVEGKSCINRCFYVELIRGRKEETEVLWTSNSIVVFCGTSGTYGTGSWPDGADINLMPI

SEQ ID NO: 24643 - protein, 469 aa, synthetic construct; identical to SEQ ID NO: 19304
  REGION 1..469: note = neuraminidase__InfluenzaA__AHL90713

SEQ ID NO: 24644 - protein, 470 aa, synthetic construct; identical to SEQ ID NO: 19937
  REGION 1..470: note = neuraminidase__InfluenzaA__AHL90725

SEQ ID NO: 24645 - protein, 470 aa, synthetic construct; identical to SEQ ID NO: 18930
  REGION 1..470: note = neuraminidase__InfluenzaA__AHL90749

SEQ ID NO: 24646 - protein, 470 aa, synthetic construct; identical to SEQ ID NO: 17461
  REGION 1..470: note = neuraminidase__InfluenzaA__AHL90761

SEQ ID NO: 24647 - protein, 470 aa, synthetic construct
  REGION 1..470: note = neuraminidase__InfluenzaA__AHL90773
MNPNQKIITIGSISIAIGIISLMLQIGNIISIWASHSIQTGSQNNTGICNQRIITYENSTWVNHTYVNINNTNVVAGEDKTSMTLAGNSSLCSISGWAIYTKDNSIRIGSKGDVFVIREPFISCSHLECRTFFLTQGALLNDKHSNGTVKDRSPYRALMSCPLGEAPSPYNSKFESVAWSASACHDGMGWLTIGISGPDNGAVAVLKYNGIITGTIKSWKKQILRTQESECVCMNGSCFTIMTDGPSNKAASYKIFKIEKGKVTKSIELNAPNFYYEECSCYPDTGIVMCVCRDNWHGSNRPWVSFNQNLDYQIGYICSGVFGDNPRPEDREGSCNPVTVDGANGVKGFSYKYGNGVWIGRTKSNRLRKGFEMIWDPNGWTNTDSDFSVKQDVVAITDWSGYSGSFVQHPELTGLDCIRPCFWVELVRGLPRENTTIWTSGSSISFCGVNSDTANWSWPDGAELPFTIDK

SEQ ID NO: 24648 - protein, 470 aa, synthetic construct
  REGION 1..470: note = neuraminidase__InfluenzaA__AHL90785
MNPNQKIITIGSISIAIGIISLMLQIGNIISIWASHSIQTGSQNNTGICNQRIITYENSTWVNHTYVNINNTNVVAGEDKTSVTLAGNSSLCSISGWAIYTKDNSIRIGSKGDVFVIREPFISCSHLECRTFFLTQGALLNDKHSNGTVKDRSPYRALMSCPLGEAPSPYNSKFESVAWSASACHDGMGWLTIGISGPDNGAVAVLKYNGIITGTIKSWKKQILRTQESECVCMNGSCFTIMTDGPSNKAASYKIFKIEKGKVTKSIELNAPNFYYEECSCYPDTGIVMCVCRDNWHGSNRPWVSFNQNLDYQIGYICSGVFGDNPRPEDGEGSCNPVTVNGADGVKGFSYKYGNGVWIGRTKSNRLRKGFEMIWDPNGWTNTDSDFSVKQDVVAITDWSGYSGSFVQHPELTGLDCIRPCFWVELVRGLPRENITIWTSGSSISFCGVNSDTANWSWPDGAELPFTIDK

SEQ ID NO: 24649 - protein, 470 aa, synthetic construct
  REGION 1..470: note = neuraminidase__InfluenzaA__AHL90797
MNPNQKIITIGSISIAIGIISLMLQIGNIISIWASHSIQTGSQNNTGICNKRIITYENSTWVNHTYVNINNTNVVAGEDKTSVTLAGNSSLCSISGWAIYTKDNSIRIGSKGDVFVIREPFIACSHLECRTFFLTQGALLNDKHSNGTVKDRSPYRALMSCPLGEAPSPYNSKFESVAWSASACHDGMGWLTIGISGPDNGAVAVLKYNGIITGTIKSWKKQILRTQESECVCMNGSCFTIMTDGPSDKAASYKIFKIEKGKVTKSIELNAPNFHYEECSCYPDTGIVMCVCRDNWHGSNRPWVSFNQNLDYQIGYICSGVFGDNPRPEDGEGSCSPVTVDGANGVKGFSYKYDNGVWIGRTKSNRLRKGFEVIWDPNGWTNTDSDFSVKQDVVAITDWSGYSGSFVQHPELTGLDCIRPCFWVELVRGLPRENTTIWTSGSSISFCGVNSDTANWSWPDGAELPFTIDK

SEQ ID NO: 24650 - protein, 470 aa, synthetic construct; identical to SEQ ID NO: 17461
  REGION 1..470: note = neuraminidase__InfluenzaA__AHL90809

SEQ ID NO: 24651 - protein, 470 aa, synthetic construct; identical to SEQ ID NO: 19937
  REGION 1..470: note = neuraminidase__InfluenzaA__AHL90821

SEQ ID NO: 24652 - protein, 470 aa, synthetic construct
  REGION 1..470: note = neuraminidase__InfluenzaA__AHL90833
MNPNQRIITIGSISIAIGIISLMLQIGNIISIWASHSIQTGSQNNTGICNQRIITYENSTWVNHTYVNINNTNVVAGEDKTSVTLAGNSSLCSISGWAIYTKDNSIRIGSKGDVFVIREPFISCSHLECRTFFLTQGALLNDKHSNGTAKDRSPYRALMSCPLGEAPSPYNSKFESVAWSASACHDGMGWLTIGISGPDNGAVAVLKYNGIITGTIKSWKKQILRTQESECVCMNGSCFTIMTDGPSNKAASYKIFKIEKGKVTKSIELNAPNFYYEECSCYPDTGIVMCVCRDNWHGSNRPWVSFNQNLDYQMGYICSGVFGDNPRPEDGEGSCNPVTVDGANGVKGFSYKYGNGVWIGRTKSNRLRKGFEMIWDPNGWTNTDSDFSVKQDVVAITDWSGYSGSFVQHPELTGLDCIRPCFWVELVRGLPRENTTIWTSGSSISFCGVNSDTANWSWPDGAELPFTIDK

SEQ ID NO: 24653 - protein, 470 aa, synthetic construct; identical to SEQ ID NO: 17461
  REGION 1..470: note = neuraminidase__InfluenzaA__AHL90845

SEQ ID NO: 24654 - protein, 470 aa, synthetic construct; identical to SEQ ID NO: 18930
  REGION 1..470: note = neuraminidase__InfluenzaA__AHL90857

SEQ ID NO: 24655 - protein, 470 aa, synthetic construct; identical to SEQ ID NO: 17461
  REGION 1..470: note = neuraminidase__InfluenzaA__AHL90869

SEQ ID NO: 24656 - protein, 470 aa, synthetic construct
  REGION 1..470: note = neuraminidase__InfluenzaA__AHL90881
MNPNQKIITIGSISIAIGIISTMLQIGSIISIWASHSIQTGSQNNTGICNQRIITYENSTWVNHTYVNINNTNVVAGEDKTSVTLAGNSSLCSISGWAIYTKDNSIRIGSKGDVFVIREPFISCSHLECRTFFLTQGALLNDKHSNGTVKDRSPYRALMSCPLGEAPSPYNSKFESVAWSASACHDGMGWLTIGISGPDNGAVAVLKYNGIITGTIKSWKKQILRTQESECVCMNGSCFTIMTDGPSNKAASYKIFKIEKGKVTKSIELNAPNFYYEECSCYPDTGIVMCVCRDNWHGSNRPWVSFNQNLDYQIGYICSGVFGDNPRPEDGEGSCNPVTVDGANGVKGFSYKYGNGVWIGRTKSNRLIKGFEMIWDPNGWTNTDSDFSVKQDVVAITDWSGYSGSFVQHPELTGLDCIRPCFWVELVRGLPRENTTIWTSGSSISFCGVNSDTANWSWPDGAELPFTIDK

SEQ ID NO: 24657 - protein, 470 aa, synthetic construct; identical to SEQ ID NO: 19937
  REGION 1..470: note = neuraminidase__InfluenzaA__AHL90893

SEQ ID NO: 24658 - protein, 470 aa, synthetic construct; identical to SEQ ID NO: 18930
  REGION 1..470: note = neuraminidase__InfluenzaA__AHL90905

SEQ ID NO: 24659 - protein, 470 aa, synthetic construct
  REGION 1..470: note = neuraminidase__InfluenzaA__AHL90917
MNPNQKIITIGSISIAIGIISLTLQIGNIISIWASHSIQTGSQNNTGICNQRIITYENSTWVNHTYVNINNTNVVAGEDKTSVTLAGNSSLCSISGWAIYTKDNSIRIGSKGDVFVIREPFISCSHLECRTFFLTQGALLNDKHSNGTVKDRSPYRALMSCPLGEAPSPYNSKFESVAWSASACHDGMGWLTIGISGPDNGAVAVLKYNGIITGTIKSWKKQILRTQESECVCMNGSCFTIMTDGPSNKAASYKIFKIEKGKVTKSIELNAPNFYYEECSCYPDTGIVMCVCRDNWHGSNRPWVSFNQNLDYQIGYICSGVFGDNPRPEDGEGSCNPVTVDGANGVKGFSYKYGNGVWIGRTKSNRLRKGFEMIWDPNGWTNTDSDFSVKQDVVAITDWSGYSGSFVQHPELTGLDCIRPCFWVELVRGLPRENTTIWTSGSSISFCGVNSDTANWSWPDGAELPFTIDK

SEQ ID NO: 24660 - protein, 470 aa, synthetic construct
  REGION 1..470: note = neuraminidase__InfluenzaA__AHL90929
MNPNQKIITIGSISIAIGIISLMLQIGNIISIWASHSIQTGSQNNTGICNQRIITYENSTWVNHTYVNINNTNVVAGEDKTSMTLAGNSSLCSISGWAIYTKDNSIRIGSKGDVFVIREPFISCSHLECRTFFLTQGALLNDKHSNGTVKDRSPYRALMSCPLGEAPSPYNSKFESVAWSASACHDGMGWLTIGISGPDNGAVAVLKYNGIITGTIKSWKKQILRTQESECVCMNGSCFTIMTDGPSNKAASYKIFKIEKGKVTKSIELNAPNFYYEECSCYPDTGIVMCVCRDNWHGSNRPWVSFNQNLDYQIGYICSGVFGDNPRPEDGEGSCNPVTVDGANGVKGFSYKYGNGVWIGRTKSNRLRKGFEMIWDPNGWTNTDSDFSVKQDVVAITDWSGYSGSFVQHPELTGLDCIRPCFWVELVRGLPRENTTIWTSGSSISFCGVNSDTANWSWPDGAELPFTIDK

SEQ ID NO: 24661 - protein, 470 aa, synthetic construct; identical to SEQ ID NO: 18930
  REGION 1..470: note = neuraminidase__InfluenzaA__AHL90941

SEQ ID NO: 24662 - protein, 470 aa, synthetic construct; identical to SEQ ID NO: 18930
  REGION 1..470: note = neuraminidase__InfluenzaA__AHL90953

SEQ ID NO: 24663 - protein, 470 aa, synthetic construct; identical to SEQ ID NO: 18930
  REGION 1..470: note = neuraminidase__InfluenzaA__AHL90965

SEQ ID NO: 24664 - protein, 470 aa, synthetic construct
  REGION 1..470: note = neuraminidase__InfluenzaA__AHL90977
MNPNQKIITIGSISIAIGIISLMLQIGNIISIWASHSIQTGSQNNTGICNQRIITYENSTWVNHTYVNINNTNVVAGEDKTSVTLAGNSSLCSISGWAIYTKDNSIRIGSKGDVFVIREPFISCSHLECRTFFLTQGALLNDKHSNGTVKDRSPYRALMSCPLGEAPSPYNSKFESVAWSASACHDGMGWLTIGISGPDNGAVAVLKYNGIITGTIKSWKKQILRTQESECVCMNGSCFTIMTDGPSNKAASYKIFKIEKGKVTKSIELNAPNFYYEECSCYPDTGIVMCVCRDNWHGSNRPWVSFNQNLDYQIGYICSGVFGDNPRPEDGEGSCNPVTVDGANGVKGFSYKYGNGVWIGRTKSNRLRKGFEMIWDPNGWTNTDSDFSVKQDVVAIADWSGYSGSFVQHPELTGLDCIRPCFWVELVRGLPRENTTIWTSGSSISFCGVNSDTANWSWPDGAELPFTIDK

SEQ ID NO: 24665 - protein, 470 aa, synthetic construct; identical to SEQ ID NO: 20204
  REGION 1..470: note = neuraminidase__InfluenzaA__AHL90989

SEQ ID NO: 24666 - protein, 470 aa, synthetic construct; identical to SEQ ID NO: 24660
  REGION 1..470: note = neuraminidase__InfluenzaA__AHL91001

SEQ ID NO: 24667 - protein, 470 aa, synthetic construct
  REGION 1..470: note = neuraminidase__InfluenzaA__AHL91013
MNPNQKIITIGSISIAIGIISLMLQIGNIISIWASHSIQTGSQNNTGICSQRIITYENSTWVNHTYVNINNTNVVAGEDKTSMTLAGNSSLCSISGWAIYTKDNSIRIGSKGDVFVIREPFISCSHLECRTFFLTQGALLNDKHSNGTVKDRSPYRALMSCPLGEAPSPYNSKFESVAWSASACHDGMGWLTIGISGPDNGAVAVLKYNGIITGTIRSWKKQILRTQESECVCMNGSCFTIMTDGPSNKAASYKIFKIEKGKVTKSIELNAPNFYYEECSCYPDTGIVMCVCRDNWHGSNRPWVSFNQNLDYQIGYICSGVFGDNPRPEDGEGSCNPVTVDGANGVKGFSYKYGNGVWIGRTKSNRLRKGFEMIWDPNGWTNTDSDFSVKQDVVAITDWSGYSGSFVQHPELTGLDCIRPCFWVELVRGLPRENTTIWTSGSSISFCGVNSDTANWSWPDGAELPFTIDK

SEQ ID NO: 24668 - protein, 470 aa, synthetic construct; identical to SEQ ID NO: 24660
  REGION 1..470: note = neuraminidase__InfluenzaA__AHL91025

SEQ ID NO: 24669 - protein, 469 aa, synthetic construct; identical to SEQ ID NO: 17905
  REGION 1..469: note = neuraminidase__InfluenzaA__AHL91037

SEQ ID NO: 24670 - protein, 469 aa, synthetic construct; identical to SEQ ID NO: 19518
  REGION 1..469: note = neuraminidase__InfluenzaA__AHL91049

SEQ ID NO: 24671 - protein, 469 aa, synthetic construct
  REGION 1..469: note = neuraminidase__InfluenzaA__AHL91061
MNPNQKIITIGSVSLTISTICFFMQIAILITTVTLHFKQYEFNSPPNNQVMLCEPTIIERNITEIVYLTNTTIEKEICPKLAEYRNWSKPQCDITGFAPFSKDNSIRLSAGGDIWVTREPYVSCDPDKCYQFALGQGTTLNNVHSNNTVRDRTPYRTLLMNELGVPFHLGTKQVCIAWSSSSCHDGKAWLHVCITGDDKNATASFIYNGRLVDSVVSWSKEILRTQESECVCINGTCTVVMTDGSASGKADTKILFIEEGKIVHTSTLSGSAQHVEECSCYPRYPGVRCVCRDNWKGSNRPIVDINIKDHSIVSSYVCSGLVGDTPRKNDSSSSSHCLNPNNEEGGHGVKGWAFDDGNDVWMGRTISEKSRLGYETFKVIEGWSNHKSKLQINRQVIVDRGNRSGYSGIFSVEGKSCINRCFYVELIRGRKEETEVLWTSNSIVVFCGTSGTYGTGSWPDGADLNLMPI

SEQ ID NO: 24672 - protein, 469 aa, synthetic construct
  REGION 1..469: note = neuraminidase__InfluenzaA__AHL91073
MNPNQKIITIGSVSLTISTICFFMQIAILITTVTLHFKQYEFNSPPNNQVMLCEPTIIERNITEIVYLTNTTIEKEICPKLAEYRTWSKPQCDITGFAPFSKDNSIRLSAGGDIWVTREPYVSCDPDKCYQFALGQGTTLNNVHSNNTVRDRTPYRTLLMNELGVPFHLGTKQVCIAWSSSSCHDGKAWLHVCITGDDKNATASFIYNGRLVDSVVSWSKEILRTQESECVCINGTCTVVMTDGSASGKADTKILFIEEGKIVHTSTLSGSAQHVEECSCYPRYPGVRCVCRDNWKGSNRPIVDINIKDHSIVSSYVCSGLVGDTPRKNDSSSGSHCLDPNNEEGGHGVKGWAFDDGNDVWMGRTISEKSRLGYETFKVIEGWSNHKSKLQINRQVIVDRGNRSGYSGIFSVEGKSCINRCFYVELIRGRKEETEVLWTSNSIVVFCGTSGTYGTGSWPDGADLNLMPI

SEQ ID NO: 24673 - protein, 469 aa, synthetic construct
  REGION 1..469: note = neuraminidase__InfluenzaA__AHL91085
MNPNQKIITIGSVSLTISTICFFMQIAILITTVTLHFKQYEFNSPPNNQVMLCEPKIIERNITEIVYLTNTTIEKEICPKLAEYRNWSKPQCDITGFAPFSKDNSIRLSAGGDIWVTREPYVSCDPDKCYQFALGQGTTLNNVHSNNTVRDRTPYRTLLMNELGVPFHLGTKQVCIAWSSSSCHDGKAWLHVCITGDDKNATASFIYNGRLVDSVVSWSKEILRTQESECVCINGICTVVMTDGSASGKADTKILFIEEGKIVHTSTLSGSAQHVEECSCYPRYPGVRCVCRDNWKGSNRPIVDINIKDHSIVSSYVCSGLVGDTPRKNDSSSSSHCLDPNNEEGGHGVKGWAFDDGNDVWMGRTISEKSRLGYETFKVIEGWSNPKSKLQINRQVIVDRGNRSGYSGIFSVEGKSCINRCFYVELIRGRKEETEVLWTSNSIVVFCGTSGTYGTGSWPDGADINLMPI

SEQ ID NO: 24674 - protein, 469 aa, synthetic construct; identical to SEQ ID NO: 16599
  REGION 1..469: note = neuraminidase__InfluenzaA__AHL91097

SEQ ID NO: 24675 - protein, 469 aa, synthetic construct
  REGION 1..469: note = neuraminidase__InfluenzaA__AHL91109
MNPNQKIITIGSVSLTISTICFFMQIAILITTVTLHFKQYEFNSPPNNQVMLCEPTIIERNITEIVYLTNTTIEKEICPKLAEYRNWSKPQCDITGFAPFSKDNSIRLSAGGDIWVTREPYVSCDPDKCYQFALGQGTTLNNVHSNNTVRDRTPYRTLLMNELGVPFHLGTKQVCIAWSSSSCHDGKAWLHVCITGDDKNATASFIYNGRLVDSVVSWSKEILRTQESECVCINGTCTVVMTDGSASGKADTKILFIEEGKIVHTSTLSGSAQHVEECSCYPRYPGVRCVCRDNWKGSNRPIVDINIKDHSIVSSYVCSGLVGDTPRKNDSSSSSHCLDPNNEEGGHGVKGWAFDDGNDVWMGRTISEKSRLGYETFKVIEGWSNHKSKLQINRQVIVDRGNRSGYSGIFSVEGKSCINRCFYVELIRGRKEETEVLWTSNSIVVFCGTSGTYGTGSWPDGADLNIMPI

SEQ ID NO: 24676 - protein, 469 aa, synthetic construct; identical to SEQ ID NO: 17905
  REGION 1..469: note = neuraminidase__InfluenzaA__AHL91121

SEQ ID NO: 24677 - protein, 469 aa, synthetic construct
  REGION 1..469: note = neuraminidase__InfluenzaA__AHL91133
MNPNQKIITIGSVSLTISTICFFMQIAILITTVTLHFKQFEFNSPPNNQVMLCEPTIIERNITEIVYLTNTTIEKEICPKLAEYRNWSKPQCDITGFAPFSKDNSIRLSAGGDIWVTREPYVSCDPDKCYQFALGQGTTLNNVHSNNTVRDRTPYRTLLMNELGVPFHLGTKQVCIAWSSSSCHDGKAWLHVCITGDDKNATASFIYNGRLVDSVVSWSKEILRTQESECVCINGTCTVVMTDGSASGKADTKILFIEEGKIVHTSTLSGSAQHVEECSCYPRYPGVRCVCRDNWKGSNRPIVDINIKDHSIVSSYVCSGLVGDTPRKNDSSSSSHCLDPNNEEGGHGVKGWAFDDGNDVWMGRTISEKSRLGYETFKVIEGWSNHKSKLQINRQVIVDRGNRSGYSGIFSVEGKSCINRCFYVELIRGRKEETEVLWTSNSIVVFCGTSGTYGTGSWPDGADLNLMPI

SEQ ID NO: 24678 - protein, 469 aa, synthetic construct; identical to SEQ ID NO: 19304
  REGION 1..469: note = neuraminidase__InfluenzaA__AHL91145

SEQ ID NO: 24679 - protein, 469 aa, synthetic construct; identical to SEQ ID NO: 19304
  REGION 1..469: note = neuraminidase__InfluenzaA__AHL91157

SEQ ID NO: 24680 - protein, 469 aa, synthetic construct; identical to SEQ ID NO: 14712
  REGION 1..469: note = neuraminidase__InfluenzaA__AHL91169

SEQ ID NO: 24681 - protein, 469 aa, synthetic construct; identical to SEQ ID NO: 22146
  REGION 1..469: note = neuraminidase__InfluenzaA__AHL94987

SEQ ID NO: 24682 - protein, 469 aa, synthetic construct; identical to SEQ ID NO: 22146
  REGION 1..469: note = neuraminidase__InfluenzaA__AHL94999

SEQ ID NO: 24683 - protein, 469 aa, synthetic construct
  REGION 1..469: note = neuraminidase__InfluenzaA__AHL95011
MNPNQKIITIGSVSLTISTICFFMQIAILITTVTLHFKQYEFNSPPNNQVMLCEPTIIERNITEIVYLTNTTIEKEICPKPAEYRNWSKPQCDITGFAPFSKDNSIRLSAGGDIWVTREPYVSCDPDKCYQFALGQGTTLNNVHSNNTVRDRTPYRTLLMNELGVPFHLGTKQVCIAWSSSSCHDGKAWLHVCITGDDKNATASFIYNGRLVDSVVSWSKEILRTQESECVCINGTCTVVMTDGSASGKADTKILFIEEGKIVHTSTLSGSAQHVEECSCYPRYPGVRCVCRDNWKGSNRPIVDINIKDHSIVSRYVCSGLVGDTPRKNDSSSSSHCLDPNNEEGGHGVKGWAFDDGNDVWMGRTINETSRLGYETFKVIEGWFNPKSKLQINRQVIVDRGDRSGYSGIFSVEGKSCINRCFYVELIRGRKEETEVLWTSNSIVVFCGTSGTYGTGSWPDGADLNLMPI

SEQ ID NO: 24684 - protein, 469 aa, synthetic construct; identical to SEQ ID NO: 23903
  REGION 1..469: note = neuraminidase__InfluenzaA__AHL95023

SEQ ID NO: 24685 - protein, 469 aa, synthetic construct; identical to SEQ ID NO: 22146
  REGION 1..469: note = neuraminidase__InfluenzaA__AHL95035

SEQ ID NO: 24686 - protein, 469 aa, synthetic construct; identical to SEQ ID NO: 22146
  REGION 1..469: note = neuraminidase__InfluenzaA__AHL95047

SEQ ID NO: 24687 - protein, 469 aa, synthetic construct; identical to SEQ ID NO: 23894
  REGION 1..469: note = neuraminidase__InfluenzaA__AHL95059

SEQ ID NO: 24688 - protein, 469 aa, synthetic construct; identical to SEQ ID NO: 22146
  REGION 1..469: note = neuraminidase__InfluenzaA__AHL95071

SEQ ID NO: 24689 - protein, 469 aa, synthetic construct; identical to SEQ ID NO: 22146
  REGION 1..469: note = neuraminidase__InfluenzaA__AHL95083

SEQ ID NO: 24690 - protein, 469 aa, synthetic construct; identical to SEQ ID NO: 22146
  REGION 1..469: note = neuraminidase__InfluenzaA__AHL95095

SEQ ID NO: 24691 - protein, 469 aa, synthetic construct; identical to SEQ ID NO: 22146
  REGION 1..469: note = neuraminidase__InfluenzaA__AHL95107

SEQ ID NO: 24692 - protein, 469 aa, synthetic construct
  REGION 1..469: note = neuraminidase__InfluenzaA__AHL95119
MNPNQKIITIGSVSLTISTICFFMQIAILITTVTLHFKQYEFNSPPNNQVMLCEPTIIERNITEIVYLTNTTIEKEICPKPAEYRNWSKPQCDITGFAPFSKDNSIRLSAGGDIWVTREPYVSCDPDKCYQFALGQGTTLNNVHSNNTVRDRTPYRTLLMNELGVPFHLGTKQVCIAWSSSSCHDGKAWLHVCITGDDKNATASFIYNGRLVDSVVSWSKEILRTQESECVCINGTCTVVMTDGSASGKADTKILFIEEGKIVHTSTLSGSAQHVEECSCYPRYPGVRCVCRDNWKGSNRPIVDINIKDHSIVSRYVCSGLVGDTPRKNDSLSSSHCLDPNNEEGGHGVKGWAFDDGNDVWMGRTINETSRLGYETFKVIEGWSNPKSKLQINRQVIVDRGDRSGYSGIFSVEGKSCINRCFYVELIRGRKEETEVLWTSNSIVVFCGTSGTYGTGSWPDGADLNLMPI

SEQ ID NO: 24693 - protein, 469 aa, synthetic construct; identical to SEQ ID NO: 23375
  REGION 1..469: note = neuraminidase__InfluenzaA__AHL95131

SEQ ID NO: 24694 - protein, 469 aa, synthetic construct; identical to SEQ ID NO: 23883
  REGION 1..469: note = neuraminidase__InfluenzaA__AHL95143

SEQ ID NO: 24695 - protein, 469 aa, synthetic construct
  REGION 1..469: note = neuraminidase__InfluenzaA__AHL95155
MNPNQKIITIGSVSLTISTICFFMQIAILITTVTLHFKQYEFNSPPNNQVMLCEPTIIERNITEIVYLTNTTIEKEICPKPAEYRNWSKPQCGITGFAPFSKDNSIRLSAGGDIWVTREPYVSCDPDKCYQFALGQGTTLNNVHSNNTVRDRTPYRTLLMNELGVPFHLGTKQVCIAWSSSSCHDGKAWLHVCITGDDKNATASFIYNGRLVDSVVSWSKEILRTQESECVCINGTCTVVMTDGSASGKADTKILFIEEGKIVHTSTLSGSAQHVEECSCYPRYPGVRCVCRDNWKGSNRPIVDINIKDHSIVSSYVCSGLVGDTPRKNDSSSSSHCLDPNNEEGSHGVKGWAFDDGNDVWMGRTINETSRLGYETFKVIEGWSNPKSKLQINRQVIVDRGDRSGYSGIFSVEGKSCINRCFYVELIRGRKEETEVLWTSNSIVVFCGTSGTYGTGSWPDGADLNLMPI

SEQ ID NO: 24696 - protein, 469 aa, synthetic construct
  REGION 1..469: note = neuraminidase__InfluenzaA__AHL95167
MNPNQKIITIGSVSLTISTICFFMQIAILITTVTLHFKQYEFNSPPNNQVMLCEPTIIERNITEIVYLTNTTIEKEICPKPAEYRNWSKPQCDITGFAPFSKDNSIRLSAGGDIWVTREPYVSCDPDKCYQFALGQGTTLNNVHSNNTVRDRTPYRTLLMNELGVPFHLGTKQVCIAWSSSSCHDGKAWLHVCITGDDKNATASFIYNGRLVDSVVSWSKEILRTQESECVCINGTCTVVMTDGSASGKADTKILFIEEGKIVHTSTLSGSAQHVEECSCYPRYPGVRCVCRDNWKGSNRPIVDINIKDHSIVSRYLCSGLVGDTPRKNDSSSSSHCLDPNNEEGGHGVKGWAFDDGNDVWMGRTINETSRLGYETFKVIEGWSNPKSKLQINRQVIVDRGDRSGYSGIFSVEGKSCINRCFYVELIRGRKEETEVLWTSNSIVVFCGTSGTYGTGSWPDGADLNLMPI

SEQ ID NO: 24697 - protein, 469 aa, synthetic construct; identical to SEQ ID NO: 22146
  REGION 1..469: note = neuraminidase__InfluenzaA__AHL95179

SEQ ID NO: 24698 - protein, 469 aa, synthetic construct; identical to SEQ ID NO: 22146
  REGION 1..469: note = neuraminidase__InfluenzaA__AHL95191

SEQ ID NO: 24699 - protein, 469 aa, synthetic construct; identical to SEQ ID NO: 22146
  REGION 1..469: note = neuraminidase__InfluenzaA__AHL95203

SEQ ID NO: 24700 - protein, 469 aa, synthetic construct; identical to SEQ ID NO: 22146
  REGION 1..469: note = neuraminidase__InfluenzaA__AHL95215

SEQ ID NO: 24701 - protein, 469 aa, synthetic construct
  REGION 1..469: note = neuraminidase__InfluenzaA__AHL95227
MNPNQKIITIGSVSLTISTICFFMQIAILITTVTLHFKQYEFNSPPNNQVMLCEPTIIERNITEIVYLTNTTIEKEICPKPAEYRNWSKPQCGITGFAPFSKDNSIRLSAGGDIWVTREPYVSCDPDKCYQFALGQGTTLNNMHSNNTVRDRTPYRTLLMNELGVPFHLGTKQVCIAWSSSSCHDGKAWLHVCITGDDKNATASFIYNGRLVDSVVSWSKEILRTQESECVCINGTCTVVMTDGSASGKADTKILFIEEGKIVHTSTLSGSAQHVEECSCYPRYPGVRCVCRDNWKGSNRPIVDINIKDHSIVSSYVCSGLVGDTPRENDSSSSSHCLDPNNEEGGHGVKGWAFDDGNDVWMGRTINETSRLGYETFKVIEGWSNPKSKLQINRQVIVDRGDRSGYSGIFSVEGKSCINRCFYVELIRGRKEETEVLWTSNSIVVFCGTSGTYGTGSWPDGADLNLMPI

SEQ ID NO: 24702 - protein, 469 aa, synthetic construct; identical to SEQ ID NO: 23883
  REGION 1..469: note = neuraminidase__InfluenzaA__AHL95239

SEQ ID NO: 24703 - protein, 469 aa, synthetic construct
  REGION 1..469: note = neuraminidase__InfluenzaA__AHL95251
MNPNQKIITIGSVSLTISTICFFMQIAILITTVTLHFKQYEFNSPPNNQVMLCEPTIIERNITEIVYLTNTTIEKEICPKPAEYRNWSKPQCGITGFAPFSKDNSIRLSAGGDIWVTREPYVSCDPDKCYQFALGQGTTLNNVHSNNTVRDRTPYRTLLMNELGVPFHLGTKQVCIAWSSSSCHDGKAWLHVCITGDDKNATASFIYNGRLVDSVVSWSKEILRTQESECVCINGTCTVVMTDGSASGKADTKILFIKEGKIVHTSTLSGSAQHVEECSCYPRYPGVRCVCRDNWKGSNRPIVDINIKDHSIVSSYVCSGLVGDTPRKNDSSSSSHCLDPNNEEGGHGVKGWAFDDGNDVWMGRTINETSRLGYETFKVIEGWSNPKSKLQINRQVIVDRGDRSGYSGIFSVEGKSCINRCFYVELIRGRKEETEVLWTSNSIVVFCGTSGTYGTGSWPDGADLNLMPI

SEQ ID NO: 24704 - protein, 469 aa, synthetic construct; identical to SEQ ID NO: 22146
  REGION 1..469: note = neuraminidase__InfluenzaA__AHL95263

SEQ ID NO: 24705 - protein, 469 aa, synthetic construct
  REGION 1..469: note = neuraminidase__InfluenzaA__AHL95275
MNPNQKIITIGSVSLTISTICFFMQIAILITTVTLHFKQYEFNSPPNNQVMLCEPTIIERNITEIVYLTNITIEKEICPKPAEYRNWSKPQCGITGFAPFSKDNSIRLSAGGDIWVTREPYVSCDPDKCYQFALGQGTTLNNVHSNNTVRDRTPYRTLLMNELGVPFHLGTKQVCIAWSSSSCHDGKAWLHVCITGDDKNATASFIYNGRLVDSVVSWSKEILRTQESECVCINGTCTVVMTDGSASGKADTKILFIEEGKIVHTSTLSGSAQHVEECSCYPRYPGVRCVCRDNWKGSNRPIVDINIKDHSIVSSYVCSGLVGDTPRKNDSSSSSHCLDPNNEEGGHGVKGWAFDDGNDVWMGRTINETSRLGYETFKVIEGWSNPKSKLQINRQVIVDRGDRSGYSGIFSVEGKSCINRCFYVELIRGRKEETEVLWTSNSIVVFCGTSGTYGTGSWPDGADLNLMPI

SEQ ID NO: 24706 - protein, 469 aa, synthetic construct; identical to SEQ ID NO: 23389
  REGION 1..469: note = neuraminidase__InfluenzaA__AHL95299

SEQ ID NO: 24707 - protein, 469 aa, synthetic construct
  REGION 1..469: note = neuraminidase__InfluenzaA__AHL95310
MNPNQKIITIGSVSLTISTICFFMQIAILITTVTLHFKQYEFNSPPNNQVMLCEPTIIERNITEIVYLTNTTIEKEICPKPAEYRNWSKPQCDITGFAPFSKDNSIRLSAGGDIWVTREPYVSCDPDKCYQFALGQGTTLNNVHSNNTVRDRTPYRTLLMNELGVPFHLGTKQVCIAWSSSSCHDGKAWLHVCITGDDKNATASFIYNGRLVDSVVSWSKEILRTQESECVCINGTCTVVMTDGSASGKADTKILFIEEGKIVHTSTLSGSAQHVEECSCYPRYPGVRCVCRDNWKGSNRPIVDINIKDHSIVSRYVCSGLVGDTPRKNDSSSSSHCLDPNNEEGGHGVKGWAFDDGNDVWMGRTINETSRLGYETFKVIEGWSNPKSKLQINRQVIVDRGDRSGYSGIFSVEGKSCINRCFYVELIRGRKEETEVLWTSNSIVVFCGTSGTYGTGSWPDGANLNLMPI

SEQ ID NO: 24708 - protein, 469 aa, synthetic construct; identical to SEQ ID NO: 23894
  REGION 1..469: note = neuraminidase__InfluenzaA__AHL95322

SEQ ID NO: 24709 - protein, 469 aa, synthetic construct; identical to SEQ ID NO: 23871
  REGION 1..469: note = neuraminidase__InfluenzaA__AHL95334

SEQ ID NO: 24710 - protein, 469 aa, synthetic construct; identical to SEQ ID NO: 22146
  REGION 1..469: note = neuraminidase__InfluenzaA__AHL95423

SEQ ID NO: 24711 - protein, 469 aa, synthetic construct; identical to SEQ ID NO: 23894
  REGION 1..469: note = neuraminidase__InfluenzaA__AHL95435

SEQ ID NO: 24712 - protein, 469 aa, synthetic construct; identical to SEQ ID NO: 23871
  REGION 1..469: note = neuraminidase__InfluenzaA__AHL95447

SEQ ID NO: 24713 - protein, 469 aa, synthetic construct
  REGION 1..469: note = neuraminidase__InfluenzaA__AHL95461
MNPNQKIITIGSVSLTISTICFFMQIAILITTVTLHFKQYEFNPPPNNQVMLCEPTIIERNITEIVYLTNTTIEKEICPKPAEYRNWSKPQCGITGFAPFSKDNSIRLSAGGDIWVTREPYVSCGPDKCYQFALGQGTTLNNMHSNNTVRDRTPYRTLLMNELGVPFHLGTKQVCIAWSSSSCHDGKAWLHVCITGDDKNATASFIYNGRLVDSVVSWSKEILRTQESECVCINGTCTVVMTDGSASGKADTKILFIEEGKIVHTSTLSGSAQHVEECSCYPRYPGVRCVCRDNWKGSNRPIVDINIKDHSIVSSYVCSGLVGDTPRKNDSSSSSHCLDPNNEEGGHGVKGWAFDDGNDVWMGRTINETSRLGYETFKVIEGWSNPKSKLQINRQVIVDRGDRSGYSGIFSVEGKSCINRCFYVELIRGRKEETEVLWTSNSIVVFCGTSGTYGTGSWPDGADLNLMPI

SEQ ID NO: 24714 - protein, 469 aa, synthetic construct; identical to SEQ ID NO: 22922
  REGION 1..469: note = neuraminidase__InfluenzaA__AHL95473

SEQ ID NO: 24715 - protein, 469 aa, synthetic construct; identical to SEQ ID NO: 22146
  REGION 1..469: note = neuraminidase__InfluenzaA__AHL95485

SEQ ID NO: 24716 - protein, 469 aa, synthetic construct; identical to SEQ ID NO: 22146
  REGION 1..469: note = neuraminidase__InfluenzaA__AHL95497

SEQ ID NO: 24717 - protein, 469 aa, synthetic construct
  REGION 1..469: note = neuraminidase__InfluenzaA__AHL95509
MNPNQKIITIGSVSLTISTICFFMQIAILITTVTLHFKQYEFNSPPNNQVMLCEPTIIERNITEIVYLTNTTIEKEICPKPAEYRNWSKPQCGITGFAPFSKDNSIRLSAGGDIWVTREPYVSCDPDKCYQFALGQGTTLNNVHSNNTVRDRTPYRTLLMNELGVPFHLGTKQVCIAWSSSSCHDGKAWLHVCITGDDKNATASFIYNGRLVDSVVSWSKEILRTQESECVCINGTCTVVMTDGSASGKADTKILFIEEGKIVHTSTLSGSAQHVEECSCYPRYPGVRCVCRDNWKGSNRPIVDINIKNHSIVSSYVCSGLVGDTPRKNDSSSSSHCLDPNNEEGGHGVKGWAFDDGNDVWMGRTINETSRLGYETFKVIEGWSNPKSKLQINRQVIVDRGDRSGYSGIFSVEGKSCINRCFYVELIRGRKEETEVLWTSNSIVVFCGTSGTYGTGSWPDGADLNLMPI

SEQ ID NO: 24718 - protein, 469 aa, synthetic construct; identical to SEQ ID NO: 22146
  REGION 1..469: note = neuraminidase__InfluenzaA__AHL95521

SEQ ID NO: 24719 - protein, 469 aa, synthetic construct; identical to SEQ ID NO: 22146
  REGION 1..469: note = neuraminidase__InfluenzaA__AHL95533

SEQ ID NO: 24720 - protein, 469 aa, synthetic construct; identical to SEQ ID NO: 22146
  REGION 1..469: note = neuraminidase__InfluenzaA__AHL95545

SEQ ID NO: 24721 - protein, 469 aa, synthetic construct
  REGION 1..469: note = neuraminidase__InfluenzaA__AHL95557
MNPNQKIITIGSVSLTISTICFFIQIAILITTVTLHFKQYEFNSPPNNQVMLCEPTIIERNITEIVYLTNTTIEKEICPKPAEYRNWSKPQCGITGFAPFSKDNSIRLSAGGDIWVTREPYVSCDPDKCYQFALGQGTTLNNVHSNNTARDRTPYRTLLMNELGVPFHLGTKQVCIAWSSSSCHDGKAWLHVCITGDDKNATASFIYNGRLVDSVVSWSKEILRTQESECVCINGTCTVVMTDGSASGKADTKILFIEEGKIVHTSTLSGSAQHVEECSCYPRYPGVRCVCRDNWKGSNRPIVDINIKDHSIVSSYVCSGLVGDTPRKNDSSSSSHCLDPNNEEGGHGVKGWAFDDGNDVWMGRTINETSRLGYETFKVIEGWSNPESKLQINRQVIVDRGDRSGYSGIFSVEGKSCINRCFYVELIRGRKEETEVLWTSNSIVVFCGTSGTYGTGSWPDGADLNLMPI

SEQ ID NO: 24722 - protein, 469 aa, synthetic construct; identical to SEQ ID NO: 23871
  REGION 1..469: note = neuraminidase__InfluenzaA__AHL95569

SEQ ID NO: 24723 - protein, 469 aa, synthetic construct; identical to SEQ ID NO: 22146
  REGION 1..469: note = neuraminidase__InfluenzaA__AHL95581

SEQ ID NO: 24724 - protein, 469 aa, synthetic construct
  REGION 1..469: note = neuraminidase__InfluenzaA__AHL95605
MNPNQKIITIGSVSLTISTICFFMQIAILITTVTLHFKQYEFNSPPNNQVMLCEPTIIERNITEIVYLTNTTIEKEICPKPAEYRNWSKPQCGITGFAPFSKDNSIRLSAGGDIWVTREPYVSCDPDKCYQFALGQGTTLNNVHSNNTVRDRTPYRTLLMNELGVPFHLGTKQVCIAWSSSSCHDGKAWLHVCITGDDKNATASFIYNGRLVDSVVSWSKEILRTQESECVCINGTCTVVMTDGSASGKADTKILFIEEGKIVHTSTLSGSAQHVEECSCYPRYPGVRCVCRDNWKGSNRPIVDINIKDHSIVSSYVCSGLVGDTPRKNDISSSSHCLDPNNEEGGHGVKGWAFDDGNDVWMGRTINETSRLGYETFKVIEGWSNPKSKLQINRQVIVDRGDRSGYSGIFSVEGKSCINRCFYVELIRGRKEETEVLWTSNSIVVFCGTSGTYGTGSWPDGADLNLMPI

SEQ ID NO: 24725 - protein, 469 aa, synthetic construct; identical to SEQ ID NO: 22146
  REGION 1..469: note = neuraminidase__InfluenzaA__AHL95617

SEQ ID NO: 24726 - protein, 469 aa, synthetic construct; identical to SEQ ID NO: 22146
  REGION 1..469: note = neuraminidase__InfluenzaA__AHL95629

SEQ ID NO: 24727 - protein, 469 aa, synthetic construct; identical to SEQ ID NO: 22146
  REGION 1..469: note = neuraminidase__InfluenzaA__AHL95641

SEQ ID NO: 24728 - protein, 469 aa, synthetic construct; identical to SEQ ID NO: 22146
  REGION 1..469: note = neuraminidase__InfluenzaA__AHL95653

SEQ ID NO: 24729 - protein, 469 aa, synthetic construct; identical to SEQ ID NO: 24724
  REGION 1..469: note = neuraminidase__InfluenzaA__AHL95665

SEQ ID NO: 24730 - protein, 469 aa, synthetic construct; identical to SEQ ID NO: 22146
  REGION 1..469: note = neuraminidase__InfluenzaA__AHL95677

SEQ ID NO: 24731 - protein, 469 aa, synthetic construct
  REGION 1..469: note = neuraminidase__InfluenzaA__AHL95689
MNPNQKIITIGSVSLTISTICFFMQIAILITTVTLHFKQYEFDSPPNNQVMLCEPTIIERNITEIVYLTNTTIEKEICPKPAEYRNWSKPQCGITGFAPFSKDNSIRLSAGGDIWVTREPYVSCDPDKCYQFALGQGTTLNNVHSNNTVRDRTPYRTLLMNELGVPFHLGTKQVCIAWSSSSCHDGKAWLHVCITGDDKNATASFIYNGRLVDSVVSWSKEILRTQESECVCINGTCTVVMTDGSASGKADTKILFIEEGKIVHTSTLSGSAQHVEECSCYPRYPGVRCVCRDNWKGSNRPIVDINIKDHSIVSSYVCSGLVGDTPRKNDSSSSSHCLDPNNEEGGHGVKGWAFDDGNDVWMGRTINETSRLGYETFKVIEGWSNPKSKLQINRQVIVDRGDRSGYSGIFSVEGKSCINRCFYVELIRGRKEETEVLWTSNSIVVFCGTSGTYGTGSWPDGANLNLMPI

SEQ ID NO: 24732 - protein, 469 aa, synthetic construct; identical to SEQ ID NO: 22146
  REGION 1..469: note = neuraminidase__InfluenzaA__AHL95701

SEQ ID NO: 24733 - protein, 469 aa, synthetic construct; identical to SEQ ID NO: 22146
  REGION 1..469: note = neuraminidase__InfluenzaA__AHL95713

SEQ ID NO: 24734 - protein, 469 aa, synthetic construct
  REGION 1..469: note = neuraminidase__InfluenzaA__AHL95725
MNPNQKIITIGSVSLTISTICFFMQIAILITTVTLHFKQYEFDPPPNNQVMLCEPTIIERNITEIVYLTNTTIEKEICPKPAEYRNWSKPQCGITGFAPFSKDNSIRLSAGGDIWVTREPYVSCDPDKCYQFALGQGTTLNNVHSNNTVRDRTPYRTLLMNELGVPFHLGTKQVCIAWSSSSCHDGKAWLHVCITGDDKNATASFIYNGRLVDSVVSWSKEILRTQESECVCINGTCTVVMTDGSASGKADTKILFIEEGKIVHTSTLSGSAQHVEECSCYPRYPGVRCVCRDNWKGSNRPIVDINIKDHSIVSSYVCSGLVGDTPRKNDSSSSSHCLDPNNEEGGHGVKGWAFDDGNDVWMGRTINETSRLGYETFKVIEGWSNPKSKLQINRQVIVDRGDRSGYSGIFSVEGKSCINRCFYVELIRGRKEEIEVLWTSNSIVVFCGTSGTYGTGSWPDGADLNLMPI

SEQ ID NO: 24735 - protein, 469 aa, synthetic construct; identical to SEQ ID NO: 23883
  REGION 1..469: note = neuraminidase__InfluenzaA__AHL95737

SEQ ID NO: 24736 - protein, 469 aa, synthetic construct
  REGION 1..469: note = neuraminidase__InfluenzaA__AHL95749
MNPNQKIITIGSVSLTISTICFFMQIAILITTVTLHFKQYEFNSPPNNQVMLCEPTIIERNITEIVYLTNTTIEKEICPKPAEYRNWSKPQCGITGFAPFSKDNSIRLSAGGDIWVTREPYVSCDPDKCYQFALGQGTTLNNVHSNNTARDRTPYRTLLMNELGVPFHLGTKQVCIAWSSSSCHDGKAWLHVCITGDDKNATASFIYNGRLVDSVVSWSKEILRTQESECVCINGTCTVVMTDGSASGKADTKILFIEEGKIVHTSTLSGSAQHVEECSCYPRYPGVRCVCRDNWKGSNRPIVDINIKDHSIVSSYVCSGLVGDTPRKNDSSSSSHCLDPNNEEGGHGVKGWAFDDGNDVWMGRTINETSRLGYETFKVIEGWSNPKSKLQINRQVIVDRGDRSGYSGIFSVEGKSCINRCFYVELIRGRKEETEVLWTSNSIVVFCGTSGTYGTGSWPDGADLNLMPI

SEQ ID NO: 24737 - protein, 469 aa, synthetic construct; identical to SEQ ID NO: 22146
  REGION 1..469: note = neuraminidase__InfluenzaA__AHL95761

SEQ ID NO: 24738 - protein, 469 aa, synthetic construct; identical to SEQ ID NO: 22146
  REGION 1..469: note = neuraminidase__InfluenzaA__AHL95773

SEQ ID NO: 24739 - protein, 469 aa, synthetic construct
  REGION 1..469: note = neuraminidase__InfluenzaA__AHL95785
MNPNQKIITIGSVSLTISTICFFMQIAILITTVTLHFKQYEFNSPPNNQVMLCEPTIIERNITEIVYLTNTTIEKEICPKPAEYRNWSKPQCDITGFAPFSKDNSVRLSAGGDIWVTREPYVSCDPDKCYQFALGQGTTLNNVHSNNTVRDRTPYRTLLMNELGVPFHLGTKQVCIAWSSSSCHDGKAWLHVCITGDDKNATASFIYNGRLVDSVVSWSKEILRTQESECVCINGTCTVVMTDGSASGKADTKILFIEEGKIVHTSTLSGSAQHVEECSCYPRYPGVRCVCRDNWKGSNRPIVDINIKDHSIVSSYVCSGLVGDTPRKNDSSSSSHCLDPNNEEGGHGVKGWAFDDGNDVWMGRTINETSRLGYETFKVIEGWSNPKSKLQINRQVIVDRGDRSGYSGIFSVEGKSCINRCFYVELIRGRKEETEVLWTSNSIVVFCGTSGTYGTGSWPDGADLNLMPI

SEQ ID NO: 24740 - protein, 469 aa, synthetic construct; identical to SEQ ID NO: 23871
  REGION 1..469: note = neuraminidase__InfluenzaA__AHL95797

SEQ ID NO: 24741 - protein, 469 aa, synthetic construct; identical to SEQ ID NO: 22146
  REGION 1..469: note = neuraminidase__InfluenzaA__AHL95833

SEQ ID NO: 24742 - protein, 469 aa, synthetic construct; identical to SEQ ID NO: 23871
  REGION 1..469: note = neuraminidase__InfluenzaA__AHL95845

SEQ ID NO: 24743 - protein, 469 aa, synthetic construct
  REGION 1..469: note = neuraminidase__InfluenzaA__AHL95857
MNPNQKIISIGSVSLTISTICFFMQIAILITTVTLHFKQYEFNSPPNNQVMLCEPTIIERNITEIVYLTNTTIEKEICPKPAEYRNWSKPQCGITGFAPFSKDNSIRLSAGGDIWVTREPYVSCDPDKCYQFALGQGTTLNNVHSNNTVRDRTPYRTLLMNELGVPFHLGTKQVCIAWSSSSCHDGKAWLHVCITGDDKNATASFIYNGRLVDSVVSWSKEILRTQESECVCINGTCTVVMTDGSASGKADTKILFIEEGKIVHTSTLSGSAQHVEECSCYPRYPGVRCVCRDNWKGSNRPIVDINIKDHSIVSSYVCSGLVGDTPRKNDSSSSSHCLDPNNEEGGHGVKGWAFDDGNDVWMGRTINETSRLGYETFKVIEGWSNPKSKLQINRQVIVDRGDRSGYSGIFSVEGKSCINRCFYVELIRGRKEETEVLWTSNSIVVFCGTSGTYGTGSWPDGADLNLMPI

SEQ ID NO: 24744 - protein, 469 aa, synthetic construct; identical to SEQ ID NO: 22146
  REGION 1..469: note = neuraminidase__InfluenzaA__AHL95869

SEQ ID NO: 24745 - protein, 469 aa, synthetic construct
  REGION 1..469: note = neuraminidase__InfluenzaA__AHL95881
MNPNQKIITIGSVCMTIGMANLILQIGNIISIWISHSIQVGNQSQIETCNQSVITYENNTWVNQTYVNISNTNLAAGQSVVSVKLAGNSSLCPVSGWAIYSKDNSVRIGSKGDVFVIREPFISCSPLECRTFFLTQGALLNDKHSNGTIKDRSPYRTLMSCPIGEVPSPYNSRFESVAWSASACHDGINWLTIGISGPDSGAVAVLKYNGIITDTIKSWRNNILRTQESECACVNGSCFTIMTDGPSDGQASYKIFRIEKGKIVKSVEMNAPNYHYEECSCYPDSSEITCVCRDNWHGSNRPWVSFNQNLEYQIGYICSGIFGDNPRPNDKTGSCGPVSSNGANGVKGFSFKYGNGVWIGRTKSISSRKGFEMIWDPNGWTGTDNNFSIKQDIVGINEWSGYSGSFVQHPELTGLDCIRPCFWVELIRGRPKENTIWTSGSSISFCGVNSDTVGWSWPDGAELPFTIDK

SEQ ID NO: 24746 - protein, 469 aa, synthetic construct
  REGION 1..469: note = neuraminidase__InfluenzaA__AHL95892
MNPNQKIITIGSVSLTISTICFFMQIAILITTVTLHFKQYEFNSPPNNQVMLCEPTIIERNITEIVYLTNTTIEKEICPKPAEYRNWSKPQCGITGFAPFSKDNSIRLSAGGDIWVTREPYVSCDPDKCYQFALGQGTTLNNVHSNNTVRDRTPYRTLLMNELGVPFHLGTKQVCIAWSSSSCHDGKAWLHVCITGDDKNATASFIYNGRLVDSVVSWSKEILRTQESECVCINGTCTVVMTDGSASGKADTKILFIEEGKIVHTSTLSGSAQHVEECSCYPRYPGVRCVCRDNWKGSNRPIVDINIKDHSIVSRYVCSGLVGDTPRKNDSSSSSHCLDPNNEEGGHGVKGWAFDDGNDVWMGRTINETSRLGYETFKVIEGWSNPKSKLQINRQVIVDRGDRSGYSGIFSVEGKSCINRCFYVELIRGRKEETEVLWTSNSIVVFCGTSGTYGTGSWPDGADLNLMPI

SEQ ID NO: 24747 - protein, 469 aa, synthetic construct; identical to SEQ ID NO: 22146
  REGION 1..469: note = neuraminidase__InfluenzaA__AHL95904

SEQ ID NO: 24748 - protein, 469 aa, synthetic construct
  REGION 1..469: note = neuraminidase__InfluenzaA__AHL95916
MNPNQKIITIGSVSLTISTICFFMQIAILITTVTLHFKQYELNSPPNNQVMLCEPTIIERNITEIVYLTNTTIEKEICPKPAEYRNWSKPQCGITGFAPFSKDNSIRLSAGGDIWVTREPYVSCDPDKCYQFALGQGTTLNNVHSNNTVRDRTPYRTLLMNELGVPFHLGTKQVCIAWSSSSCHDGKAWLHVCITGDDKNATASFIYNGRLVDSVVSWSKEILRTQESECVCINGTCTVVMTDGSASGKADTKILFIEEGKIVHTSTLSGSAQHVEECSCYPRYPGVRCVCRDNWKGSNRPIVDINIKDHSIVSSYVCSGLVGDTPRKNDSSSSSHCLDPNNEEGGHGVKGWAFDDGNDVWMGRTINETSRLGYETFKVIEGWSNPKSKLQINRQVIVDRGDRSGYSGIFSVEGKSCINRCFYVELIRGRKEETEVLWTSNSIVVFCGTSGTYGTGSWPDGADLNLMPI

SEQ ID NO: 24749 - protein, 469 aa, synthetic construct; identical to SEQ ID NO: 23883
  REGION 1..469: note = neuraminidase__InfluenzaA__AHL95928

SEQ ID NO: 24750 - protein, 469 aa, synthetic construct; identical to SEQ ID NO: 23871
  REGION 1..469: note = neuraminidase__InfluenzaA__AHL95940

SEQ ID NO: 24751 - protein, 469 aa, synthetic construct; identical to SEQ ID NO: 22146
  REGION 1..469: note = neuraminidase__InfluenzaA__AHL95952

SEQ ID NO: 24752 - protein, 469 aa, synthetic construct; identical to SEQ ID NO: 22146
  REGION 1..469: note = neuraminidase__InfluenzaA__AHL95964

SEQ ID NO: 24753 - protein, 469 aa, synthetic construct; identical to SEQ ID NO: 22146
  REGION 1..469: note = neuraminidase__InfluenzaA__AHL95976

SEQ ID NO: 24754 - protein, 469 aa, synthetic construct; identical to SEQ ID NO: 22146
  REGION 1..469: note = neuraminidase__InfluenzaA__AHL95988

SEQ ID NO: 24755 - protein, 469 aa, synthetic construct; identical to SEQ ID NO: 22146
  REGION 1..469: note = neuraminidase__InfluenzaA__AHL96000

SEQ ID NO: 24756 - protein, 469 aa, synthetic construct
  REGION 1..469: note = neuraminidase__InfluenzaA__AHL96012
MNPNQKIITIGSVSLTISTICFFMQIAILITTVTLHFKQYEFNSPPNNQVMLCEPTIIERNITEIVYLTNTTIEKEICPKPAEYRNWSKPQCGITGFAPFSKDNSIRLSAGGDIWVTRVPYVSCDPDKCYQFALGQGTTLNNVHSNNTVRDRTPYRTLLMNELGVPFHLGTKQVCIAWSSSSCHDGKAWLHVCITGDDKNATASFIYNGRLVDSVVSWSKEILRTQESECVCINGTCTVVMTDGSASGKADTKILFIEEGKIVHTSTLSGSAQHVEECSCYPRYPGVRCVCRDNWKGSNRPIVDINIKDHSIVSSYVCSGLVGDTPRKNDSSSSSHCLDPNNEEGGHGVKGWAFDDGNDVWMGRTINETSRLGYETFKVIEGWSNPKSKLQINRQVIVDRGDRSGYSGIFSVEGKSCINRCFYVELIRGRKEETEVLWTSNSIVVFCGTSGTYGTGSWPDGADLNLMPI

SEQ ID NO: 24757 - protein, 469 aa, synthetic construct
  REGION 1..469: note = neuraminidase__InfluenzaA__AHL96024
MNPNQKIITIGSVSLTISTICFFMQIAILITTVTLHFKQYEFNSPPNNQVMLCEPTIIERNITEIVYLTNTTIEKEICPKPAEYRNWSKPQCGITGFAPFSKDNSIRLSAGGDIWVTREPYVSCDPDKCYQFALGQGTTLNNVHSNNTVRDRTPYRTLLMNELGVPFHLGTKQVCIAWSSSSCHDGKAWLHVCITGDDKNATASFIYNGRLVDSVVSWSKENLRTQESECVCINGTCTVVMTDGSASGKADTKILFIEEGKIVHTSTLSGSAQHVEECSCYPRYPGVRCVCRDNWKGSNRPIVDINIKDHSIVSSYVCSGLVGDTPRKNDSSSSSHCLDPNNEEGGHGVKGWAFDDGNDVWMGRTINETSRLGYETFKVIEGWSNPKSKLQINRQVIVDRGDRSGYSGIFSVEGKSCINRCFYVELIRGRKEETEVLWTSNSIVVFCGTSGTYGTGSWPDGADLNLMPI

SEQ ID NO: 24758 - protein, 469 aa, synthetic construct; identical to SEQ ID NO: 22146
  REGION 1..469: note = neuraminidase__InfluenzaA__AHL96036

SEQ ID NO: 24759 - protein, 469 aa, synthetic construct; identical to SEQ ID NO: 23389
  REGION 1..469: note = neuraminidase__InfluenzaA__AHL96048

SEQ ID NO: 24760 - protein, 469 aa, synthetic construct; identical to SEQ ID NO: 22146
  REGION 1..469: note = neuraminidase__InfluenzaA__AHL96059

SEQ ID NO: 24761 - protein, 469 aa, synthetic construct; identical to SEQ ID NO: 23883
  REGION 1..469: note = neuraminidase__InfluenzaA__AHL96071

SEQ ID NO: 24762 - protein, 469 aa, synthetic construct; identical to SEQ ID NO: 24724
  REGION 1..469: note = neuraminidase__InfluenzaA__AHL96083

SEQ ID NO: 24763 - protein, 469 aa, synthetic construct; identical to SEQ ID NO: 22146
  REGION 1..469: note = neuraminidase__InfluenzaA__AHL96095

SEQ ID NO: 24764 - protein, 469 aa, synthetic construct
  REGION 1..469: note = neuraminidase__InfluenzaA__AHL96107
MNPNQKIITIGSVSLTISTICFFMQIAILITTVTLHFKQYEFNSPPNNQVMLCEPTIIERNITEIVYLTNTTIEKEICPKPAEYRNWSKPQCGITGFAPFSKDNSIRLSAGGDIWVTREPYVSCDPDKCYQFALGQGTTLNNMHSNNTVRDRTPYRTLLMNELGVPFHLGTKQVCIAWSSSSCHDGKAWLHVCITGDDKNATASFIYNGRLVDSVVSWSKEILRTQESECVCINGTCTVVMTDGSASGKADTKILFIEEGKIVHTSTLSGSAQHVEECSCYPRYPGVRCVCRDNWKGSNRPIVDINIKDHSIVSSYVCSGLVGDTPRKNDNSSSSHCLDPNNEEGGHGVKGWAFDDGNDVWMGRTINETSRLGYETFKVIEGWSNPKSKLQINRQVIVDRGDRSGYSGIFSVEGKSCINRCFYVELIRGRKEETEVLWTSNSIVVFCGTSGTYGTGSWPDGADLNLMPI

SEQ ID NO: 24765 - protein, 469 aa, synthetic construct; identical to SEQ ID NO: 22146
  REGION 1..469: note = neuraminidase__InfluenzaA__AHL96119

SEQ ID NO: 24766 - protein, 469 aa, synthetic construct; identical to SEQ ID NO: 23883
  REGION 1..469: note = neuraminidase__InfluenzaA__AHL96131

SEQ ID NO: 24767 - protein, 469 aa, synthetic construct; identical to SEQ ID NO: 22146
  REGION 1..469: note = neuraminidase__InfluenzaA__AHL96143

SEQ ID NO: 24768 - protein, 469 aa, synthetic construct; identical to SEQ ID NO: 22146
  REGION 1..469: note = neuraminidase__InfluenzaA__AHL96167

SEQ ID NO: 24769 - protein, 469 aa, synthetic construct; identical to SEQ ID NO: 22146
  REGION 1..469: note = neuraminidase__InfluenzaA__AHL96179

SEQ ID NO: 24770 - protein, 469 aa, synthetic construct
  REGION 1..469: note = neuraminidase__InfluenzaA__AHL96191
MNPNQKIITIGSVSLTISTICFFMQIAILITTVTLHFKQYEFDSPPNNQVMLCEPTIIERNITEIVYLTNTTIEKEICPKPAEYRNWSKPQCGITGFAPFSKDNSIRLSAGGDIWVTREPYVSCDPDKCYQFALGQGTTLNNMHSNNTVRDRTPYRTLLMNELGVPFHLGTKQVCIAWSSSSCHDGKAWLHVCITGDDKNATASFIYNGRLVDSVVSWSKEILRTQESECVCINGTCTVVMTDGSASGKADTKILFIEEGKIVHTSTLSGSAQHVEECSCYPRYPGVRCVCRDNWKGSNRPIVDINIKDHSIVSSYVCSGLVGDTPRKNDSSSSSHCLDPNNEEGGHGVKGWAFDDGNDVWMGRTINETSRLGYETFKVIEGWSNPKSKLQINRQVIVDRGDRSGYSGIFSVEGKSCINRCFYVELIRGRKEETEVLWTSNSIVVFCGTSGTYGTGSWPDGADLNLMPI

SEQ ID NO: 24771 - protein, 469 aa, synthetic construct; identical to SEQ ID NO: 23871
  REGION 1..469: note = neuraminidase__InfluenzaA__AHL96203

SEQ ID NO: 24772 - protein, 469 aa, synthetic construct; identical to SEQ ID NO: 23883
  REGION 1..469: note = neuraminidase__InfluenzaA__AHL96215

SEQ ID NO: 24773 - protein, 469 aa, synthetic construct; identical to SEQ ID NO: 22146
  REGION 1..469: note = neuraminidase__InfluenzaA__AHL96227

SEQ ID NO: 24774 - protein, 469 aa, synthetic construct; identical to SEQ ID NO: 22146
  REGION 1..469: note = neuraminidase__InfluenzaA__AHL96239

SEQ ID NO: 24775 - protein, 469 aa, synthetic construct; identical to SEQ ID NO: 22146
  REGION 1..469: note = neuraminidase__InfluenzaA__AHL96251

SEQ ID NO: 24776 - protein, 469 aa, synthetic construct; identical to SEQ ID NO: 22146
  REGION 1..469: note = neuraminidase__InfluenzaA__AHL96263

SEQ ID NO: 24777 - protein, 469 aa, synthetic construct; identical to SEQ ID NO: 23927
  REGION 1..469: note = neuraminidase__InfluenzaA__AHL96277

SEQ ID NO: 24778 - protein, 469 aa, synthetic construct
  REGION 1..469: note = neuraminidase__InfluenzaA__AHL96308
MNPNQKIITIGSVSLTISTICFFMQIAILITTVTLHFKQYEFNFPPNNQVMLCEPTIIERNITEIVYLTNTTIEKEICPKPAEYRNWSKPQCGITGFAPFSKDNSIRLSAGGDIWVTREPYVSCDPDKCYQFALGQGTTLNNVHSNNTVRDRTPYRTLLMSELGVPFHLGTKQVCIAWSSSSCHDGKAWLHVCITGDDKNATASFIYNGRLVDSVVSWSKEILRTQESECVCINGTCTVVMTDGSASGKADTKILFIEEGKIVHTSTLSGSAQHVEECSCYPRYPGVRCVCRDNWKGSNRPIVDINIKDHSIVSSYVCSGLVGDTPRKNDSSSSSHCLDPNNEEGGHGVKGWAFDDGNDVWMGRTINETSRLGYETFKVIEGWSNPKSKLQINRQVIVDRGDRSGYSGIFSVEGKSCINRCFYVELIRGRKEETEVLWTSNSIVVFCGTSGTYGTGSWPDGADLNLMPI

SEQ ID NO: 24779 - protein, 469 aa, synthetic construct; identical to SEQ ID NO: 23375
  REGION 1..469: note = neuraminidase__InfluenzaA__AHL96321

SEQ ID NO: 24780 - protein, 469 aa, synthetic construct; identical to SEQ ID NO: 22146
  REGION 1..469: note = neuraminidase__InfluenzaA__AHL96333

SEQ ID NO: 24781 - protein, 469 aa, synthetic construct
  REGION 1..469: note = neuraminidase__InfluenzaA__AHL96345
MNPNQKIITIGSVSLTISTICFFMQIAILITTVTLHFKQYEFNSPPNNQVMLCEPTIIERNITEIVYLTNTTIEKEICPKPAEYRNWSKPQCGITGFAPFSKDNSIRLSAGGDIWVTREPYVSCDPDKCYQFALGQGTTLNNVHSNNTVRDRTPYRTLLMNELGVPFHLGTKQVCIAWSSSSCHDGKAWLHVCITGDDKNATASFIYNGRLVDSVVSWSKEILRTQESECVCINGTCTVVMTDGSASGKADTKILFIEEGKIVHTSTLSGSAQHVEECSCYPRYPGVRCVCRDNWKGSNRPIVDINIKDHSIVSSYVCSGLVGDTPRKNDNSSSSHCLDPNNEEGGHGVKGWAFDDGNDVWMGRTINETSRLGYETFKVIEGWSNPKSKLQINRQVIVDRGDRSGYSGIFSVEGKSCINRCFYVELIRGRKEETEVLWTSNSIVVFCGTSGTYGTGSWPDGADLNLMPI

SEQ ID NO: 24782 - protein, 469 aa, synthetic construct; identical to SEQ ID NO: 23871
  REGION 1..469: note = neuraminidase__InfluenzaA__AHL96357

SEQ ID NO: 24783 - protein, 469 aa, synthetic construct; identical to SEQ ID NO: 22146
  REGION 1..469: note = neuraminidase__InfluenzaA__AHL96369

SEQ ID NO: 24784 - protein, 469 aa, synthetic construct; identical to SEQ ID NO: 22146
  REGION 1..469: note = neuraminidase__InfluenzaA__AHL96381

SEQ ID NO: 24785 - protein, 469 aa, synthetic construct; identical to SEQ ID NO: 23883
  REGION 1..469: note = neuraminidase__InfluenzaA__AHL96393

SEQ ID NO: 24786 - protein, 469 aa, synthetic construct
  REGION 1..469: note = neuraminidase__InfluenzaA__AHL96405
MNPNQKIITIGSVSLTISTICFFMQIAILITTVTLHFKQYEFNSPPNNQVMLCEPTIIERNITEIVYLTNTTIEKEICPKPAEYRNWSKPQCGITGFAPFSKDNSIRLSAGGDIWVTREPYVSCDPDKCYQFALGQGTTLNNVHSNNTVRDRTPYRTLLMNELGVPFHLGTKQVCIAWSSSSCHDGKAWLHVCITGDDKNATASFIYNGRLVDSVVSWSKEILRTQESECVCINGTCTVVMTDGSASGKADTKILFIEEGKIVHTSTLSGSAQHVEECSCYPRYPGVRCVCRDNWKGSNRPIVDINIKDHSIVSSYVCSGLVGDTPRKNDSSSSSHCLGPNNEEGGHGVKGWAFDDGNDVWMGRTINETSRLGYETFKVIEGWSNPKSKLQINRQVIVDRGDRSGYSGIFSVEGKSCINRCFYVELIRGRKEETEVLWTSNSIVVFCGTSGTYGTGSWPDGADLNLMPI

SEQ ID NO: 24787 - protein, 469 aa, synthetic construct; identical to SEQ ID NO: 22146
  REGION 1..469: note = neuraminidase__InfluenzaA__AHL96417

SEQ ID NO: 24788 - protein, 469 aa, synthetic construct; identical to SEQ ID NO: 22146
  REGION 1..469: note = neuraminidase__InfluenzaA__AHL96429

SEQ ID NO: 24789 - protein, 469 aa, synthetic construct
  REGION 1..469: note = neuraminidase__InfluenzaA__AHL96441
MNPNQKIITIGSVSLTISTICFFMQIAILITTVTLHFKHYEFNSPPNNQVMLCEPTIIERNITEIVYLTNTTIEKEICPKPAEYRNWSKPQCDITGFAPFSKDNSIRLSAGGDIWVTREPYVSCDPDKCYQFALGQGTTLNNVHSNNTVRDRTPYRTLLMNELGVPFHLGTKQVCIAWSSSSCHDGKAWLHVCITGDDKNATASFIYNGRLVDSVVSWSKEILRTQESECVCINGTCTVVMTDGSASGKADTKILFIEEGKIVHTSTLSGSAQHVEECSCYPRYPGVRCVCRDNWKGSNRPIVDINIKDHSIVSRYVCSGLVGDTPRKNDSSSSSHCLNPNNEEGGHGVKGWAFDDGNDVWMGRTINETSRLGYETFKVIEGWSNPKSKLQINRQIIVDRGDRSGYSGIFSVEGKSCINRCFYVELIRGRKEETEVLWTSNSIVVFCGTSGTYGTGSWPDGADLNLMPI

SEQ ID NO: 24790 - protein, 469 aa, synthetic construct; identical to SEQ ID NO: 22146
  REGION 1..469: note = neuraminidase__InfluenzaA__AHL96453

SEQ ID NO: 24791 - protein, 469 aa, synthetic construct; identical to SEQ ID NO: 22146
  REGION 1..469: note = neuraminidase__InfluenzaA__AHL96465

SEQ ID NO: 24792 - protein, 469 aa, synthetic construct
  REGION 1..469: note = neuraminidase__InfluenzaA__AHL96477
MNPNQKIITIGSVCMTIGMANLILQIGNIISIWISHSIQVGNQSQIETCNQSVITYENNTWVNQTYVNISNTNFAAGQSVVSVKLAGNSSLCPVSGWAIYSKDNSVRIGSKGDVFVIREPFISCSPLECRTFFLTQGALLNDKHSNGTIKDRSPYRTLMSCPIGEVPSPYNSRFESVAWSASACHDGINWLTIGISGPDSGAVAVLKYNGIITDTIKSWRNNILRTQESECACVNGSCFTIMTDGPSDGQASYKIFRIEKGKIVKSVEMNAPNYHYEECSCYPDSSEITCVCRDNWHGSNRPWVSFNQNLEYQIGYICSGIFGDNPRPNDKTGSCGPVSSNGANGVKGFSFKYGNGVWIGRTKSISSRKGFEMIWDPNGWTGTDNNFSIKQDIVGINEWSGYSGSFVQHPELTGLDCIRPCFWVELIRGRPKENTIWTSGSSISFCGVNSDTVGWSWPDGAELPFTIDK

SEQ ID NO: 24793 - protein, 469 aa, synthetic construct; identical to SEQ ID NO: 23883
  REGION 1..469: note = neuraminidase__InfluenzaA__AHL96488

SEQ ID NO: 24794 - protein, 469 aa, synthetic construct; identical to SEQ ID NO: 22146
  REGION 1..469: note = neuraminidase__InfluenzaA__AHL96500

SEQ ID NO: 24795 - protein, 469 aa, synthetic construct; identical to SEQ ID NO: 22146
  REGION 1..469: note = neuraminidase__InfluenzaA__AHL96512

SEQ ID NO: 24796 - protein, 469 aa, synthetic construct; identical to SEQ ID NO: 23375
  REGION 1..469: note = neuraminidase__InfluenzaA__AHL96524

SEQ ID NO: 24797 - protein, 469 aa, synthetic construct
  REGION 1..469: note = neuraminidase__InfluenzaA__AHL96536
MNPNQKIITIGSVSLTISTICFFTQIAILITTVTLHFKQYEFNSPPNNQVMLCEPTIIERNITEIVYLTNTTIEKEICPKPAEYRNWSKPQCGITGFAPFSKDNSIRLSAGGDIWVTREPYVSCDPDKCYQFALGQGTTINNVHSNNTVRDRTPYRTLLMNELGVPFHLGTKQVCIAWSSSSCHDGKAWLHVCITGDDKNATASFIYNGRLVDSVVSWSKEILRTQESECVCINGTCTVVMTDGSASGKADTKILFIEEGKIVHTSTLSGSAQHVEECSCYPRYPGVRCVCRDNWKGSNRPIVDINIKDHSIVSSYVCSGLVGDTPRKNDSSSSSHCLDPNNEEGGHGVKGWAFDDGNDVWMGRTINETSRLGYETFKVIEGWSNPKSKLQINRQVIVDRGDRSGYSGIFSVEGKSCINRCFYVELIRGRKEETEVLWTSNSIVVFCGTSGTYGTGSWPDGADLNLMPI

SEQ ID NO: 24798 - protein, 469 aa, synthetic construct; identical to SEQ ID NO: 23883
  REGION 1..469: note = neuraminidase__InfluenzaA__AHL96548

SEQ ID NO: 24799 - protein, 469 aa, synthetic construct
  REGION 1..469: note = neuraminidase__InfluenzaA__AHL96560
MNPNQKIITIGSVSLTISTICFFMQIAILITTVTLHFKQYEFNSPPNNQVMLCEPTIIERNITEIVYLTNTTIEKEICPKPAEYRNWSKPQCGITGFAPFSKDNSIRLSAGGDIWVTREPYVSCDPDKCYQFALGQGTTLNNVHSNNTVRDRTPYRTLLMNELGVPFHLGTKQVCIAWSSSSCHDGKAWLHVCITGDDKNATASFIYNGRLVDSVVSWSKEILRTQESECVCINGTCTVVMTDGNASGKADTKILFIEEGKIVHTSTLSGSAQHVEECSCYPRYPGVRCVCRDNWKGSNRPIVDINIKDHSIVSSYVCSGLVGDTPRKNDSSSSSHCLDPNNEEGGHGVKGWAFDDGNDVWMGRTINETSRLGYETFKVIEGWSNPKSKLQINRQVIVDRGDRSGYSGIFSVEGKSCINRCFYVELIRGRKEETEVLWTSNSIVVFCGTSGTYGTGSWPDGADLNLMPI

SEQ ID NO: 24800 - protein, 469 aa, synthetic construct; identical to SEQ ID NO: 23357
  REGION 1..469: note = neuraminidase__InfluenzaA__AHL96572

SEQ ID NO: 24801 - protein, 469 aa, synthetic construct; identical to SEQ ID NO: 24792
  REGION 1..469: note = neuraminidase__InfluenzaA__AHL96584

SEQ ID NO: 24802 - protein, 469 aa, synthetic construct
  REGION 1..469: note = neuraminidase__InfluenzaA__AHL96595
MNPNQKIITIGSVSLTISTICFFMQIAILITTVTLHFKQYEFNSPPNNQVMLCEPTIIERNITEIVYLTNTTIEKEICPKPAEYRNWSKPQCGITGFAPFSKDNSIRLSAGGDIWVTREPYVSCDPDKCYQFALGQGTTLNNVHSNNTVRDRTPYRTLLMNELGVPFHLGTKQVCIAWSSSSCHDGKAWLHVCITGDDKNATASFIYNGRLVDSVVSWSKEILRTQESECVCINGTCTVVMTDGSASGKADTKILFIEEGKIVHTSTLSGSAQHVEECSCYPRYPGVRCVCRDNWKGSNRPIVDINIKDHSIVSSYVCSGLVGDTPRKNDSSSSSHCLDPNNEEGGHGVKGWAFDDGNDVWMGRTINETSRLGYETFKVIEGWSNPKSKLQINRQVIVDRGDRSGYSGIFSVESKSCINRCFYVELIRGRKEETEVLWTSNSIVVFCGTSGTYGTGSWPDGADLNLMPI

SEQ ID NO: 24803 - protein, 469 aa, synthetic construct; identical to SEQ ID NO: 22146
  REGION 1..469: note = neuraminidase__InfluenzaA__AHL96607

SEQ ID NO: 24804 - protein, 469 aa, synthetic construct
  REGION 1..469: note = neuraminidase__InfluenzaA__AHL96631
MNPNQKIITIGSVSLTISTICFFMQIAILITTVTLHFKQYEFNSLPNNQVMLCEPTIIERNITEIVYLTNTTIEKEICPKPAEYRNWSKPQCGITGFAPFSKDNSIRLSAGGDIWVTREPYVSCDPDKCYQFALGQGTTLNNMHSNNTVRDRTPYRTLLMNELGVPFHLGTKQVCIAWSSSSCHDGKAWLHVCITGDDKNATASFIYNGRLVDSVVSWSKEILRTQESECVCINGTCTVVMTDGSASGKADTKILFIEEGKIVHTSTLSGSAQHVEECSCYPRYPGVRCVCRDNWKGSNRPIVDINIKDHSIVSSYVCSGLVGDTPRKNDSSSSSHCLDPNNEEGGHGVKGWAFDDGNDVWMGRTINETSRLGYETFKVIEGWSNPKSKLQINRQVIVDRGDRSGYSGIFSVEGKSCINRCFYVELIRGRKEETEVLWTSNSIVVFCGTSGTYGTGSWPDGADLNLMPI

SEQ ID NO: 24805 - protein, 469 aa, synthetic construct; identical to SEQ ID NO: 23883
  REGION 1..469: note = neuraminidase__InfluenzaA__AHL96643

SEQ ID NO: 24806 - protein, 469 aa, synthetic construct; identical to SEQ ID NO: 22146
  REGION 1..469: note = neuraminidase__InfluenzaA__AHL96655

SEQ ID NO: 24807 - protein, 469 aa, synthetic construct; identical to SEQ ID NO: 22146
  REGION 1..469: note = neuraminidase__InfluenzaA__AHL96667

SEQ ID NO: 24808 - protein, 469 aa, synthetic construct; identical to SEQ ID NO: 22146
  REGION 1..469: note = neuraminidase__InfluenzaA__AHL96679

SEQ ID NO: 24809 - protein, 469 aa, synthetic construct; identical to SEQ ID NO: 22146
  REGION 1..469: note = neuraminidase__InfluenzaA__AHL96691

SEQ ID NO: 24810 - protein, 469 aa, synthetic construct; identical to SEQ ID NO: 22146
  REGION 1..469: note = neuraminidase__InfluenzaA__AHL96703

SEQ ID NO: 24811 - protein, 469 aa, synthetic construct; identical to SEQ ID NO: 23871
  REGION 1..469: note = neuraminidase__InfluenzaA__AHL96763

SEQ ID NO: 24812 - protein, 469 aa, synthetic construct; identical to SEQ ID NO: 24724
  REGION 1..469: note = neuraminidase__InfluenzaA__AHL96787

SEQ ID NO: 24813 - protein, 469 aa, synthetic construct
  REGION 1..469: note = neuraminidase__InfluenzaA__AHL96799
MNPNQKIITIGSVSLTISTICFFMQIAILITTVTLHFKQYEFNSPPNNQVMLCEPTIIERNITEIVYLTNTTIEKEICPKPAEYRNWSKPQCGITGFAPFSKDNSIRLSAGGDIWVTREPYVSCDPDKCYQFALGQGTTLNNVHSNNTVRDRTPYRTLLMNELGVPFHLGTKQVCIAWSSSSCHDGKAWLHVCITGDDKNATASFIYNGRLVDSVVSWSKEILRTQESECVCINGTCTVVMTDGSASGKADTKILFIEEGKIVHTSTLSGSAQHVEECSCYPRYPGVRCVCRDNWKGSNRPIVDINIKDHSIVSSYVCSGLVGDTPRKNDSSSSSHCLDPNNEEGGHGVKGWAFDDGNDVWMGRTINETSRLGYETFKVIEGWSNPKSKLQINRQVIVDRGDRSGYSGIFSVEGKSCINRCFYVELIRGRKDETEVLWTSNSIVVFCGTSGTYGTGSWPDGADLNLMPI

SEQ ID NO: 24814 - protein, 469 aa, synthetic construct; identical to SEQ ID NO: 23883
  REGION 1..469: note = neuraminidase__InfluenzaA__AHL96811

SEQ ID NO: 24815 - protein, 469 aa, synthetic construct; identical to SEQ ID NO: 23883
  REGION 1..469: note = neuraminidase__InfluenzaA__AHL96823

SEQ ID NO: 24816 - protein, 469 aa, synthetic construct; identical to SEQ ID NO: 22146
  REGION 1..469: note = neuraminidase__InfluenzaA__AHL96847

SEQ ID NO: 24817 - protein, 469 aa, synthetic construct
  REGION 1..469: note = neuraminidase__InfluenzaA__AHL96859
MNPNQKIITIGSVSLTISTICFFMQIAILITTVTLHFKQYEFNSPPNNQMMLCEPTIIERNITEIVYLTNTTIEKEICPKPAEYRNWSKPQCGITGFAPFSKDNSIRLSAGGDIWVTREPYVSCDPDKCYQFALGQGTTLNNVHSNNTVRDRTPYRTLLMNELGVPFHLGTKQVCIAWSSSSCHDGKAWLHVCITGDDKNATASFIYNGRLVDSVVSWSKEILRTQESECVCINGTCTVVMTDGSASGKADTKILFIEEGKIVHTSTLSGSAQHVEECSCYPRYPGVRCVCRDNWKGSNRPIVDINIKDHSIVSSYVCSGLVGDTPRKNDSSSSSHCLDPNNEEGGHGVKGWAFDDGNDVWMGRTINETSRLGYETFKVIEGWSNPKSKLQINRQVIVDRGDRSGYSGIFSVEGKSCINRCFYVELIRGRKEETEVLWTSNSIVVFCGTSGTYGTGSWPDGADLNLMPI

SEQ ID NO: 24818 - protein, 469 aa, synthetic construct
  REGION 1..469: note = neuraminidase__InfluenzaA__AHL96871
MNPNQKIITIGSVSLTISTICFFMQIAILITTVTLHFKQYEFNSPPNNQVMLCEPTIVERNITEIVYLTNTTIEKEICPKPAEYRNWSKPQCGITGFAPFSKDNSIRLSAGGDIWVTREPYVSCDPDKCYQFALGQGTTLNNVHSNNTVRDRTPYRTLLMNELGVPFHLGTKQVCIAWSSSSCHDGKAWLHVCITGDDKNATASFIYNGRLVDSVVSWSKEVLRTQESECVCINGTCAVVMTDGSASGKADTKILFIEEGKIVHTSTLSGSAQHVEECSCYPRYPGVRCVCRDNWKGSNRPIVDINIKDHSIVSSYVCSGLVGDTPRKNDRSSSSHCLDPNNEEGGHGVKGWAFDDGNDVWMGRTINETSRLGYETFKVIEGWSNPKSKLQINRQVIVDRGDRSGYSGIFSVEGKSCINRCFYVELIRGRKEETEVLWTSNSIVVFCGTSGTYGTGSWPDGADLNLMPI

SEQ ID NO: 24819 - protein, 469 aa, synthetic construct
  REGION 1..469: note = neuraminidase__InfluenzaA__AHL96883
MNPNQKIITIGSVSLTISTICFFMQIAILITTVTLHFKQYEFNSPPNNQVMLCEPTIIERNITEIVYLTNTTIEKEICPKSAEYRNWSKPQCGITGFAPFSKDNSIRLSAGGDIWVTREPYVSCDPDKCYQFALGQGTTLNNMHSNNTVRDRTPYRTLLMNELGVPFHLGTKQVCIAWSSSSCHDGKAWLHVCITGDDKNATASFIYNGRLVDSVVSWSKEILRTQESECVCINGTCTVVMTDGSASGKADTKILFIEEGKIVHTSTLSGSAQHVEECSCYPRYPGVRCVCRDNWKGSNRPIVDINIKDHSIVSSYVCSGLVGDTPRKNDSSSSSHCLDPNNEEGGHGVKGWAFDDGNDVWMGRTINETSRLGYETFKVIEGWSNPKSKLQINRQVIVDRGDRSGYSGIFSVEGKSCINRCFYVELIRGRKEETEVLWTSNSIVVFCGTSGTYGTGSWPDGADLNLMPI

SEQ ID NO: 24820 - protein, 469 aa, synthetic construct; identical to SEQ ID NO: 23871
  REGION 1..469: note = neuraminidase__InfluenzaA__AHL96895

SEQ ID NO: 24821 - protein, 469 aa, synthetic construct
  REGION 1..469: note = neuraminidase__InfluenzaA__AHL96907
MNPNQKIITIGSVSLTISTICFFMQIAILITTVTLHFKQYEFNSPPNNQVMLCEPTIVERNITEIVYLTNTTIEKEICPKPAEYRNWSKPQCGITGFAPFSKDNSIRLSAGGDIWVTREPYVSCDPDKCYQFALGQGTTLNNVHSNNTVRDRTPYRTLLMNELGVPFHLGTKQVCIAWSSSSCHDGKAWLHVCITGDDKNATASFIYNGRLVDSVVSWSKEVLRTQESECVCINGTCAVVMTDGSASGKADTKILFIEEGKIVHTSTLSGSAQHVEECSCYPRYPGVRCVCRDNWKGSNRPIVDINIKDHSIVSSYVCSGLVGDTPRKNDSSSSSHCLDPNNEEGGHGVKGWAFDDGNDVWMGRTINETSRLGYETFKVIEGWSNPKSKLQINRQVIVDRGDRSGYSGIFSVEGKSCINRCFYVELIRGRKEETEVLWTSNSIVVFCGTSGTYGTGSWPDGADLNLMPI

SEQ ID NO: 24822 - protein, 469 aa, synthetic construct; identical to SEQ ID NO: 23883
  REGION 1..469: note = neuraminidase__InfluenzaA__AHL96919

SEQ ID NO: 24823 - protein, 469 aa, synthetic construct; identical to SEQ ID NO: 23883
  REGION 1..469: note = neuraminidase__InfluenzaA__AHL96931

SEQ ID NO: 24824 - protein, 469 aa, synthetic construct; identical to SEQ ID NO: 23883
  REGION 1..469: note = neuraminidase__InfluenzaA__AHL96943

SEQ ID NO: 24825 - protein, 469 aa, synthetic construct
  REGION 1..469: note = neuraminidase__InfluenzaA__AHL96955
MNPNQKIITIGSVSLTISTICFFMQIAILITTVTLHFKQYEFNSPSNNQVMLCEPTIIERNITEIVYLTNTTIEKEICPKPAEYRNWSKPQCGITGFAPFSKDNSIRLSAGGNIWVTREPYVSCDPDKCYQFALGQGTTLNNVHSNNTVRDRTPYRTLLMNELGVPFHLGTKQVCIAWSSSSCHDGKAWLHVCITGDDKNATASFIYNGRLVDSVVSWSKEILRTQESECVCINGTCTVVMTDGSASGKADTKILFIEEGKIVHTSTLSGSAQHVEECSCYPRYPGVRCVCRDNWKGSNRPIVDINIKDHSIVSSYVCSGLVGDTPRKNDSSSSSHCLDPNNEEGGHGVKGWAFDDGNDVWMGRTINETSRLGYETFKVIEGWSNPKSKLQINRQVIVDRGDRSGYSGIFSVEGKSCINRCFYVELIRGRKEETEVLWTSNSIVVFCGTSGTYGTGSWPDGADLNLMPI

SEQ ID NO: 24826 - protein, 469 aa, synthetic construct; identical to SEQ ID NO: 24724
  REGION 1..469: note = neuraminidase__InfluenzaA__AHL96967

SEQ ID NO: 24827 - protein, 469 aa, synthetic construct
  REGION 1..469: note = neuraminidase__InfluenzaA__AHL96979
MNPNQKIITIGSVSLTISTICFFMQIAILITTVTLHFKQYEFNSPPNNQVMLCEPTIIERNITEIVYLTNTTIEKEICPKPAEYRNWSKPQCDITGFAPFSKDNSIRLSAGGDIWVTREPYVSCDPDKCYQFALGQGTTLNNMHSNNTVRDRTPYRTLLMNELGVPFHLGTKQVCIAWSSSSCHDGKAWLHVCITGDDKNATASFIYNGRLVDSVVSWSKEILRTQESECVCINGTCTVVMTDGSASGKADTKILFIEEGKIVHTSTLSGSAQHVEECSCYPRYPGVRCVCRDNWKGSNRPIVDINIKDHSIVSSYVCSGLVGDTPRKNDSSSSSHCLDPNNEEGGHGVKGWAFDDGNDVWMGRTINETSRLGYETFKVIEGWSNPKSKLQINRQVIVDRGDRSGYSGIFSVEGKSCINRCFYVELIRGRKEETEVLWTSNSIVVFCGTSGTYGTGSWPDGADLNIMPI

SEQ ID NO: 24828 - protein, 469 aa, synthetic construct; identical to SEQ ID NO: 23883
  REGION 1..469: note = neuraminidase__InfluenzaA__AHL96991

SEQ ID NO: 24829 - protein, 469 aa, synthetic construct; identical to SEQ ID NO: 22146
  REGION 1..469: note = neuraminidase__InfluenzaA__AHL97003

SEQ ID NO: 24830 - protein, 469 aa, synthetic construct
  REGION 1..469: note = neuraminidase__InfluenzaA__AHL97015
MNPNQKIITIGSVSLTISTICFFMQIAILITTVTLHFKQYEFNSPPNNQVMLCEPTIIERNITEIVYLTNTTIEKEICPKPAEYRNWSKPQCGITGFAPFSKDNSIRLSAGGDIWVTREPYVSCDPDKCYQFALGQGTTLNNVHSNNTVRDRTPYRTLLMNELGVPFHLGTKQVCIAWSSSSCHDGKAWLHVCITGDDKNATASFIYNGRLVDSVVSWSKEILRTQESECVCINGTCTVVMTDGSASGKADTKILFIEEGKIVHTSTLSGSAQHVEECSCYPRYPGVRCVCRDNWKGSNRPIVDINIKDHSIVSSYVCSGLVGDTPRKNDSSSSSHCLDPNNEEGGHGVKGWAFDDGNDVWMGRTINETSRLGYETFKVIEGWSNPKSKLQINRQIIVDRGDRSGYSGIFSVEGKSCINRCFYVELIRGRKEETEVLWTSNSIVVFCGTSGTYGTGSWPDGADLNLMPI

SEQ ID NO: 24831 - protein, 469 aa, synthetic construct; identical to SEQ ID NO: 22146
  REGION 1..469: note = neuraminidase__InfluenzaA__AHL97027

SEQ ID NO: 24832 - protein, 469 aa, synthetic construct
  REGION 1..469: note = neuraminidase__InfluenzaA__AHL97039
MNPNQKIITIGSVSLTISTICFFMQIAILITTVTLHFKQYEFNSPPNNQVMLCEPTIIERNITEIVYLTNTTIEKEICPKPAEYRNWSKPQCGITGFAPFSKDNSIRLSAGGDIWVTREPYVSCDPDKCYQFALGQGTTLNNVHSNNTVRDRTPYRTLLMNELGVPFHLGTKQVCIAWSSSSCHDGKAWLHVCITGDDKNATASFIYNGRLVDSVVSWSKEILRTQESECVCINGTCTVVMTDGNASGKADTKILFIEEGKIVHTSTLSGSAQHVEECSCYPRYPGVRCVCRDNWKGSNRPIVDINIKDYSIVSSYVCSGLVGDTPRKNDSSSSSHCLDPNNEEGGHGVKGWAFDDGNDVWMGRTINETSRLGYETFKVIEGWSNPKSKLQINRQVIVDRGDRSGYSGIFSVEGKSCINRCFYVELIRGRKEETEVLWTSNSIVVFCGTSGTYGTGSWPDGADLNLMPI

SEQ ID NO: 24833 - protein, 469 aa, synthetic construct; identical to SEQ ID NO: 22146
  REGION 1..469: note = neuraminidase__InfluenzaA__AHL97051

SEQ ID NO: 24834 - protein, 469 aa, synthetic construct
  REGION 1..469: note = neuraminidase__InfluenzaA__AHL97063
MNPNQKIITIGSVSLTISTICFFMQIAILITTVTLHFKQYEFNSPPNNQVMLCEPTIIERNITEIVYLTNTTIEKEICPKPAEYRNWSKPQCGITGFAPFSKDNSIRLSAGGDIWVTREPYVSCDPDKCYQFALGQGTTLNNVHSNNTVRDRTPYRTLLMNELGVPFHLGTKQVCIAWSSSSCHDGKAWLHVCITGDDKNATASFIYNGRLVDSVVSWSKEILRTQESECVCINGTCTVVMTDGSASGKADTKILFIEEGKIVHTSTLSGSAQHVEECSCYPRYPGVRCVCRDNWKGSNRPIVDINIKDHSIVSSYVCSGLVGDTPRKNDSSSSSHCLGPNNEEGGHGVKGWAFDDGNDVWMGRTINETSRLGYETFKVIDGWSNPKSKLQINRQVIVDRGDRSGYSGIFSVEGKSCINRCFYVELIRGRKEETEVLWTSNSIVVFCGTSGTYGTGSWPDGADLNLMPI

SEQ ID NO: 24835 - protein, 469 aa, synthetic construct; identical to SEQ ID NO: 22146
  REGION 1..469: note = neuraminidase__InfluenzaA__AHL97075

SEQ ID NO: 24836 - protein, 469 aa, synthetic construct; identical to SEQ ID NO: 23871
  REGION 1..469: note = neuraminidase__InfluenzaA__AHL97087

SEQ ID NO: 24837 - protein, 469 aa, synthetic construct; identical to SEQ ID NO: 23375
  REGION 1..469: note = neuraminidase__InfluenzaA__AHL97099

SEQ ID NO: 24838 - protein, 469 aa, synthetic construct; identical to SEQ ID NO: 22146
  REGION 1..469: note = neuraminidase__InfluenzaA__AHL97111

SEQ ID NO: 24839 - protein, 469 aa, synthetic construct
  REGION 1..469: note = neuraminidase__InfluenzaA__AHL97123
MNPNQKIITIGSVSLTISTICFFMQIAILITTVTLHFKQYEFDSPPNNQVMLCEPTIIERNITEIVYLTNTTIEKEICPKPAEYRNWSKPQCGITGFAPFSKDNSIRLSAGGDIWVTREPYVSCDPDKCYQFALGQGTTLNNVHSNNTVRDRTPYRTLLMNELGVPFHLGTKQVCIAWSSSSCHDGKAWLHVCITGDDKNATASFIYNGRLVDSVVSWSKEILRTQESECVCINGTCTVVMTDGSASGKADTKILFIEEGKIVHTSTLSGSAQHVEECSCYPRYPGVRCVCRDNWKGSNRPIVDINIKDHSIVSSYVCSGLVGDTPRRNDSSSSSHCLDPNNEEGGHGVKGWAFDDGNDVWMGRTINETSRLGYETFKVIEGWSNPKSKLQINRQVIVDRGDRSGYSGIFSVEGKSCINRCFYVELIRGRKEETEVLWTSNSIVVFCGTSGTYGTGSWPDGADLNLMPI

SEQ ID NO: 24840 - protein, 469 aa, synthetic construct; identical to SEQ ID NO: 23903
  REGION 1..469: note = neuraminidase__InfluenzaA__AHL97135

SEQ ID NO: 24841 - protein, 469 aa, synthetic construct
  REGION 1..469: note = neuraminidase__InfluenzaA__AHL97147
MNPNQKIITIGSVSLTISTICFFMQIAILITTVTLHFKQYEFNSPPNNQVMLCEPTIIERNITEIVYLTNTTIEKEICPKPAEYRNWSKPQCGITGFAPFSKDNSIRLSAGGDIWVTREPYVSCDPDKCYQFALGQGTTLNNVHSNNTVRDRTPYRTLLMNELGVPFHLGTKQVCIAWSSSSCHDGKAWLHVCITGDDKNATASFIYNGRLVDSVVSWSKEILRTQESECVCINGTCTVVMTDGSASGKADTKILFIEEGKIVHTSTLSGSAQHVEECSCYPRYPGVRCVCRDNWRGSNRPIVDINIKDHSIVSSYVCSGLVGDTPRKNDSSSSSHCLDPNNEEGGHGVKGWAFDDGNDVWMGRTINETSRLGYETFKVIEGWSNPKSKLQINRQVIVDRGDRSGYSGIFSVEGKSCINRCFYVELIRGRKEETEVLWTSNSIVVFCGTSGTYGTGSWPDGADLNLMPI

SEQ ID NO: 24842 - protein, 469 aa, synthetic construct; identical to SEQ ID NO: 22146
  REGION 1..469: note = neuraminidase__InfluenzaA__AHL97159

SEQ ID NO: 24843 - protein, 469 aa, synthetic construct; identical to SEQ ID NO: 22146
  REGION 1..469: note = neuraminidase__InfluenzaA__AHL97171

SEQ ID NO: 24844 - protein, 469 aa, synthetic construct; identical to SEQ ID NO: 22146
  REGION 1..469: note = neuraminidase__InfluenzaA__AHL97183

SEQ ID NO: 24845 - protein, 469 aa, synthetic construct; identical to SEQ ID NO: 22146
  REGION 1..469: note = neuraminidase__InfluenzaA__AHL97195

SEQ ID NO: 24846 - protein, 469 aa, synthetic construct; identical to SEQ ID NO: 22146
  REGION 1..469: note = neuraminidase__InfluenzaA__AHL97207

SEQ ID NO: 24847 - protein, 469 aa, synthetic construct; identical to SEQ ID NO: 22146
  REGION 1..469: note = neuraminidase__InfluenzaA__AHL97219

SEQ ID NO: 24848 - protein, 469 aa, synthetic construct
  REGION 1..469: note = neuraminidase__InfluenzaA__AHL97231
MNPNQKIITIGSVSLTISTICFFMQIAILITTVTLHFKQYDFNSPPNNQVMLCEPTIIERNITEIVYLTNTTIEKEICPKPAEYRNWSKPQCGITGFAPFSKDNSIRLSAGGDIWVTREPYVSCDPDKCYQFALGQGTTLNNVHSNNTVRDRTPYRTLLMNELGVPFHLGTKQVCIAWSSSSCHDGKAWLHVCITGDDKNATASFIYNGRLVDSVVSWSKEILRTQESECVCINGTCTVVMTDGSASGKADTKILFIEEGKIVHTSTLSGSAQHVEECSCYPRYPGVRCVCRDNWKGSNRPIVDINIKDHSVISSYVCSGLVGDTPRKNDSSSSSHCLDPNNEEGGHGVKGWAFDDGNDVWMGRTINETSRLGYETFKVIGGWSNPKSKLQINRQVIVDRGDRSGYSGIFSVEGKSCINRCFYVELIRGRKEETEVLWTSNSIVVFCGTSGTYGTGSWPDGADLNLMPI

SEQ ID NO: 24849 - protein, 469 aa, synthetic construct
  REGION 1..469: note = neuraminidase__InfluenzaA__AHL97243
MNPNQKIITIGSVSLTISTICFFMQIAILITTVTLNFKQYEFNSPPNNQVMLCEPTIIERNITEIVYLTNTTIEKEICPKPAEYRNWSKPQCGITGFAPFSKDNSIRLSAGGDIWVTREPYVSCDPDKCYQFALGQGTTLNNVHSNNTVRDRTPYRTLLMNELGVPFHLGTKQVCIAWSSSSCHDGKAWLHVCITGDDKNATASFIYNGRLVDSVVSWSKEILRTQESECVCINGTCTVVMTDGSASGKADTKILFIEEGKIVHTSTLSGSAQHVEECSCYPRYPGVRCVCRDNWKGSNRPIVDINIKDHSIVSSYVCSGLVGDTPRKNDSSSSSHCLDPNNEEGGHGVKGWAFDDGNDVWMGRTINETSRLGYETFKVIEGWSNPKSKLQINRQVIVDRGDRSGYSGIFSVEGKSCINRCFYVELIRGRKEETEVLWTSNSIVVFCGTSGTYGTGSWPDGADLNLMPI

SEQ ID NO: 24850 - protein, 469 aa, synthetic construct; identical to SEQ ID NO: 23375
  REGION 1..469: note = neuraminidase__InfluenzaA__AHL97255

SEQ ID NO: 24851 - protein, 469 aa, synthetic construct
  REGION 1..469: note = neuraminidase__InfluenzaA__AHL97267
MNPNQKIITIGSVSLTISTICFFMQIAILITTVTLHFKQYEFNSPPNNQVMLCEPTIIERNITEIVYLTNTTIEKEICPKPAEYRNWSKPQCGITGFAPFSKDNSIRLSAGGDIWVTREPYVSCDPDKCYQFALGQGTTLNNVHSNNTARDRTPYRTLLMNELGVPFHLGTKQVCIAWSSSSCHDGKAWLHVCITGDDKNATASFIYNGRLVDSVVSWSKEILRTQESECVCINGTCTVVMTDGSASGKADTKILFIEEGKIVHTSTLSGSAQHVEECSCYPRYPGVRCVCRDNWKGSNRPIVDINIKDHSIVSSYVCSGLVGDTPRKNDSFSSSHCLDPNNEEGGHGVKGWAFDDGNDVWMGRTINETSRLGYETFKVIEGWSNPKSKLQINRQVIVDRGDRSGYSGIFSVEGKSCINRCFYVELIRGRKEETEVLWTSNSIVVFCGTSGTYGTGSWPDGADLNLMPI

SEQ ID NO: 24852 - protein, 469 aa, synthetic construct; identical to SEQ ID NO: 22146
  REGION 1..469: note = neuraminidase__InfluenzaA__AHL97279

SEQ ID NO: 24853 - protein, 469 aa, synthetic construct; identical to SEQ ID NO: 24736
  REGION 1..469: note = neuraminidase__InfluenzaA__AHL97291

SEQ ID NO: 24854 - protein, 469 aa, synthetic construct; identical to SEQ ID NO: 24724
  REGION 1..469: note = neuraminidase__InfluenzaA__AHL97303

SEQ ID NO: 24855 - protein, 469 aa, synthetic construct
  REGION 1..469: note = neuraminidase__InfluenzaA__AHL97339
MNPNQKIITIGSVSLTISTICFFMQIAILITTVTLHFKQYEFDSPPNNQVMLCEPTIIERNITEIVYLTNTTIEKEICPKPAEYRNWSKPQCGITGFAPFSKDNSIRLSAGGDIWVTREPYVSCDPDKCYQFALGQGTTLNNVHSNNTVRDRTSYRTLLMNELGVPFHLGTKQVCIAWSSSSCHDGKAWLHVCITGDDKNATASFIYNGRLVDSVVSWSKEILRTQESECVCINGTCTVVMTDGSASGRADTKILFIEEGKIVHTSTLSGSAQHVEECSCYPRYPGVRCVCRDNWKGSNRPIVDINIKDHSIVSSYVCSGLVGDTPRKNDSSSSSHCLDPNNEEGGHGVKGWAFDDGNDVWMGRTINETSRLGYETFKVIEGWSNPKSKLQINRQVIVDRGDRSGYSGIFSVEGKSCINRCFYVELIRGRKEETEVLWTSNSIVVFCGTSGTYGTGSWPDGADLNLMPI

SEQ ID NO: 24856 - protein, 469 aa, synthetic construct; identical to SEQ ID NO: 23871
  REGION 1..469: note = neuraminidase__InfluenzaA__AHL97351

SEQ ID NO: 24857 - protein, 469 aa, synthetic construct; identical to SEQ ID NO: 24736
  REGION 1..469: note = neuraminidase__InfluenzaA__AHL97363

SEQ ID NO: 24858 - protein, 469 aa, synthetic construct; identical to SEQ ID NO: 22146
  REGION 1..469: note = neuraminidase__InfluenzaA__AHL97387

SEQ ID NO: 24859 - protein, 469 aa, synthetic construct
  REGION 1..469: note = neuraminidase__InfluenzaA__AHL97399
MNPNQKIITIGSVSLTISTICFFMQIAILITTVTLHFKQYEFNSPPNNQVMLCEPTIIERNITEIMYLTNTTIEKEICPKPAEYRNWSKPQCGITGFAPFSKDNSIRLSAGGDIWVTREPYVSCDPDKCYQFALGQGTTLNNMHSNNTVRDRTPYRTLLMNELGVPFHLGTKQVCIAWSSSSCHDGKAWLHVCITGDDKNATASFIYNGRLVDSVVSWSKEILRTQESECVCINGTCTVVMTDGSASGKADTKILFIEEGKIVHTSTLSGSAQHVEECSCYPRYPGVRCVCRDNWKGSNRPIVDINIKDHSIVSSYVCSGLVGDTPRKNDSSSSSHCLDPNNEEGGHGVKGWAFDDGNDVWMGRTINETSRLGYETFKVIEGWSNPKSKLQINRQVIVDRGDRSGYSGIFSVEGRSCINRCFYVELIRGRKEETEVLWTSNSIVVFCGTSGTYGTGSWPDGADLNLMPI

SEQ ID NO: 24860 - protein, 469 aa, synthetic construct; identical to SEQ ID NO: 23375
  REGION 1..469: note = neuraminidase__InfluenzaA__AHL97411

SEQ ID NO: 24861 - protein, 469 aa, synthetic construct
  REGION 1..469: note = neuraminidase__InfluenzaA__AHL97423
MNPNQKIITIGSVSLTISTICFFMQIAILITTVTLHFKQYEFNSPPNNQVMLCEPTIIERNITEIVYLTNTTIEKEICPKPAEYRNWSKPQCGITGFAPFSKDNSIRLSAGGDIWVTREPYVSCDPDKCYQFALGQGTTLNNVHSNNTVRDRTPYRTLLMNELGVPFHLGTKQVCIAWSSSSCHDGKAWLHVCITGDDKNATASFIYNGRLVDSVVSWSKEILRTQESECVCINGTCTVVMTDGSASGKADTKILFIEEGKIVHTSTLSGSAQHVEECSCYPRYPGVRCVCRDNWKGSNRPIVDINIKDHSIVSSYVCSGLVGDTPRKNDSSSSSHCLDPNNEEGGHGVKGWAFDDGNDMWMGRTINETSRLGYETFKVIEGWSNPKSKLQINRQVIVDRGDRSGYSGIFSVEGKSCINRCFYVELIRGRKEETEVLWTSNSIVVFCGTSGTYGTGSWPDGADLNLMPI

SEQ ID NO: 24862 - protein, 469 aa, synthetic construct
  REGION 1..469: note = neuraminidase__InfluenzaA__AHL97447
MNPNQKIITIGSVSLTISTICFFMQIAILITTVTLHFKQYEFNSPPNNQVMLCEPTIIERNITEIVYLTNTTIEKEICPKPAEYRNWSKPQCGITGFAPFSKDNSIRLSAGGDIWVTREPYVSCDPDKCYQFALGQGTTLNNVHSNNTVRDRTPYRTLLMNELGVPFHLGTKQVCIAWSSSSCHDGKAWLHVCITGDDKNATASFIYNGRLVDSVVSWSKEILRTQESECVCINGTCTVVMTDGSASGKADTKILFIEEGKIVHTSTLSGSAQHVEECSCYPRYPGVRCVCRDNWKGSNRPIVDINIKDHSIVSSYVCSGLVGDTPRKNDSFSSSHCLDPNNEEGGHGVKGWAFDDGNDVWMGRTINETSRLGYETFKVIEGWSNPKSKLQINRQVIVDRGDRSGYSGIFSVEGKSCINRCFYVELIRGRKEETEVLWTSNSIVVFCGTSGTYGTGSWPDGADLNLMPI

SEQ ID NO: 24863 - protein, 469 aa, synthetic construct; identical to SEQ ID NO: 22146
  REGION 1..469: note = neuraminidase__InfluenzaA__AHL97459

SEQ ID NO: 24864 - protein, 469 aa, synthetic construct; identical to SEQ ID NO: 24736
  REGION 1..469: note = neuraminidase__InfluenzaA__AHL97471

SEQ ID NO: 24865 - protein, 469 aa, synthetic construct; identical to SEQ ID NO: 23871
  REGION 1..469: note = neuraminidase__InfluenzaA__AHL97483

SEQ ID NO: 24866 - protein, 469 aa, synthetic construct; identical to SEQ ID NO: 22146
  REGION 1..469: note = neuraminidase__InfluenzaA__AHL97496

SEQ ID NO: 24867 - protein, 469 aa, synthetic construct; identical to SEQ ID NO: 22146
  REGION 1..469: note = neuraminidase__InfluenzaA__AHL97508

SEQ ID NO: 24868 - protein, 469 aa, synthetic construct
  REGION 1..469: note = neuraminidase__InfluenzaA__AHL97520
MNPNQKIITIGSVSLTISTICFFMQIAILITTVTLHFKQYEFNSPPNNQVMLCEPTIIERNITEIVYLTNTTIEKETCPKPAEYRNWSKPQCGITGFAPFSKDNSIRLSAGGDIWVTREPYVSCGPDKCYQFALGQGTTLNNMHSNNTVRDRTPYRTLLMNELGVPFHLGTKQVCIAWSSSSCHDGKAWLHVCITGDDKNATASFIYNGRLVDSVVSWSKEILRTQESECVCINGTCTVVMTDGSASGKADTKILFIEEGKIVHTSTLSGSAQHVEECSCYPRYPGVRCVCRDNWKGSNRPIVDINIKDHSIVSSYVCSGLVGDTPRKNDSSSSSHCLDPNNEEGGHGVKGWAFDDGNDVWMGRTINETSRLGYETFKVIEGWSNPKSKLQINRQVIVDRGDRSGYSGIFSVEGKSCINRCFYVELIRGRKEETEVLWTSNSIVVFCGTSGTYGTGSWPDGADLNLMPI

SEQ ID NO: 24869 - protein, 469 aa, synthetic construct; identical to SEQ ID NO: 22146
  REGION 1..469: note = neuraminidase__InfluenzaA__AHL97532

SEQ ID NO: 24870 - protein, 469 aa, synthetic construct; identical to SEQ ID NO: 22146
  REGION 1..469: note = neuraminidase__InfluenzaA__AHL97544

SEQ ID NO: 24871 - protein, 469 aa, synthetic construct; identical to SEQ ID NO: 23871
  REGION 1..469: note = neuraminidase__InfluenzaA__AHL97556

SEQ ID NO: 24872 - protein, 469 aa, synthetic construct
  REGION 1..469: note = neuraminidase__InfluenzaA__AHL97568
MNPNQKIITIGSVSLTISAICFFMQIAILITTVTLRFKQYEFNSPPNNQVMLCEPTIIERNITEIVYLTNTTIEKEICPKPAEYRNWSKPQCDITGFAPFSKDNSIRLSAGGDIWVTREPYVSCDPDKCYQFALGQGTTLTNVHSNNTVRDRTPYRTLLMNELGVPFHLGTKQVCIAWSSSSCHDGKAWLHVCITGDDKNATASFIYNGRLVDSVVSWSKEILRTQESECVCINGTCTVVMTDGSASGKADTKILFIEEGKIVHTSTLSGSAQHVEECSCYPRYPGVRCVCRDNWKGSNRPIVDINIKDHSIVSRYVCSGLVGDTPRKNDSSSSSHCLDPNNEEGGHGVKGWAFDDGNDVWMGRTINETSRLGYETFKVIEGWSNPKSKLQINRQVIVDRGDRSGYSGIFSVEGKSCINRCFYVELIRGRKEETEVLWTSNSIVVFCGTSGTYGTGSWPDGADLNLMPI

SEQ ID NO: 24873 - protein, 469 aa, synthetic construct; identical to SEQ ID NO: 24786
  REGION 1..469: note = neuraminidase__InfluenzaA__AHL97580

SEQ ID NO: 24874 - protein, 469 aa, synthetic construct
  REGION 1..469: note = neuraminidase__InfluenzaA__AHL97592
MNPNQKIITIGSVSLTISTICFFMQIAILITTVTLHFKQYEFNSPPNNQVMLCEPTIIERNITEIVYLTNTTIEKEICPKPAEYRNWSKPQCGITGFAPFSKDNSVRLSAGGDIWVTREPYVSCDPDKCYQFALGQGTTLNNVHSNNTVRDRTPYRTLLMNELGVPFHLGTKQVCIAWSSSSCHDGKAWLHVCITGDDKNATASFIYNGRLVDSVVSWSKEILRTQESECVCINGTCTVVMTDGSASGKADTKILFIEEGKIVHTSTLSGSAQHVEECSCYPRYPGVRCVCRDNWKGSNRPIVDINIKDHSIVSSYVCSGLVGDTPRKNDSSSSSHCLGPNNEEGGHGVKGWAFDDGNDVWMGRTINETSRSGYETFKVIEGWSNPKSKLQINRQVIVDRGDRSGYSGIFSVEGKSCINRCFYVELIRGRKEETEVLWTSNSIVVFCGTSGTYGTGSWPDGADLNLMPI

SEQ ID NO: 24875 - protein, 469 aa, synthetic construct; identical to SEQ ID NO: 22146
  REGION 1..469: note = neuraminidase__InfluenzaA__AHL97604

SEQ ID NO: 24876 - protein, 469 aa, synthetic construct
  REGION 1..469: note = neuraminidase__InfluenzaA__AHL97616
MNPNQKIITIGSVSLTISTICFFMQIAILITTVTLHFKQYEFNSPPNNQVMLCEPTIIERNITEIVYLTNTTIEKEICPKPAEYRNWSKPQCGITGFAPFSKDNSIRLSAGGDIWVTREPYVSCDPDKCYQFALGQGTTLNNMHSNNTVRDRTPYRTLLMNELGVPFHLGTKQVCIAWSSSSCHDGKAWLHVCITGDDKNATASFIYNGRLVDSVVSWSKEVLRTQESECVCINGTCTVVMTDGSASGKADTKILFIEEGKIVHTSTLSGSAQHVEECSCYPRYPGVRCVCRDNWKGSNRPIVDINIKDHSIVSSYVCSGLVGDTPRKNDSSSSSHCLDPNNEEGGHGVKGWAFDDGNDVWMGRTINETSRLGYETFKVIEGWSNPKSKLQINRQVIVDRGDRSGYSGIFSVEGKSCINRCFYVELIRGRKEETEVLWTSNSIVVFCGTSGTYGTGSWPDGADLNLMPI

SEQ ID NO: 24877 - protein, 469 aa, synthetic construct; identical to SEQ ID NO: 24736
  REGION 1..469: note = neuraminidase__InfluenzaA__AHL97628

SEQ ID NO: 24878 - protein, 469 aa, synthetic construct; identical to SEQ ID NO: 22146
  REGION 1..469: note = neuraminidase__InfluenzaA__AHL97640

SEQ ID NO: 24879 - protein, 469 aa, synthetic construct; identical to SEQ ID NO: 23894
  REGION 1..469: note = neuraminidase__InfluenzaA__AHL97652

SEQ ID NO: 24880 - protein, 469 aa, synthetic construct; identical to SEQ ID NO: 23894
  REGION 1..469: note = neuraminidase__InfluenzaA__AHL97664

SEQ ID NO: 24881 - protein, 469 aa, synthetic construct; identical to SEQ ID NO: 23375
  REGION 1..469: note = neuraminidase__InfluenzaA__AHL97676

SEQ ID NO: 24882 - protein, 469 aa, synthetic construct; identical to SEQ ID NO: 22146
  REGION 1..469: note = neuraminidase__InfluenzaA__AHL97688

SEQ ID NO: 24883 - protein, 469 aa, synthetic construct; identical to SEQ ID NO: 23871
  REGION 1..469: note = neuraminidase__InfluenzaA__AHL97700

SEQ ID NO: 24884 - protein, 469 aa, synthetic construct
  REGION 1..469: note = neuraminidase__InfluenzaA__AHL97712
MNPNQKIITIGSVSLTISTICFFMQIAILITTVTLHFKQYEFNSPPNNQVMLCEPTIIERNITEIVYLTNTTIEKEICPKPAEYRNWSKPQCGITGFAPFSKDNSIRLSAGGDIWVTREPYVSCDPDKCYQFALGQGTTLNNVHSNNTVRDRTPYRTLLMNELGVPFHLGTKQVCIAWSSSSCHDGKAWLHVCITGDDKNATASFIYNGRLVDSVVSWSKEILRTQESECVCINGTCTVVMTDGSASGKADTKILFIEEGKIVHTSTLSGSAQHVEECSCYPRYPGVRCVCRDNWKGSNRPIVDINIKDHSIVSSYVCSGLVGDTPRKNDSTSSSHCLDPNNEEGGHGVKGWAFDDGNDVWMGRTINETSRLGYETFKVIEGWSNPKSKLQINRQVIVDRGDRSGYSGIFSVEGKSCINRCFYVELIRGRKEETEVLWTSNSIVVFCGTSGTYGTGSWPDGADLNLMPI

SEQ ID NO: 24885 - protein, 469 aa, synthetic construct; identical to SEQ ID NO: 23871
  REGION 1..469: note = neuraminidase__InfluenzaA__AHL97724

SEQ ID NO: 24886 - protein, 469 aa, synthetic construct; identical to SEQ ID NO: 22146
  REGION 1..469: note = neuraminidase__InfluenzaA__AHL97736

SEQ ID NO: 24887 - protein, 469 aa, synthetic construct
  REGION 1..469: note = neuraminidase__InfluenzaA__AHL97760
MNPNQKIITIGSVSLTISTICFFMQIAILITTVTLHFKQYEFNSPPNNQVMLCEPTIIERNITEIVYLTNTTIEKEICPKPAEYRNWSKPQCGITGFAPFSKDNSIRLSAGGDIWVTREPYVSCDPDKCYQFALGQGTTLNNVHSNNTVRDRTPYRTLLMNELGVPFHLGTKQVCIAWSSSSCHDGKAWLHVCITGDDENATASFIYNGRLVDSVVSWSKEILRTQESECVCINGTCTVVMTDGSASGKADTKILFIEEGKIVHTSTLSGSAQHVEECSCYPRYPGVRCVCRDNWKGSNRPIVDINIKDHSIVSSYVCSGLVGDTPRKNDSSSSSHCLDPNNEEGGHGVKGWAFDDGNDVWMGRTINETSRLGYETFKVIEGWSNPKSKLQINRQVIVDRGDRSGYSGIFSVEGKSCINRCFYVELIRGRKEETEVLWTSNSIVVFCGTSGTYGTGSWPDGADLNLMPI

SEQ ID NO: 24888 - protein, 469 aa, synthetic construct
  REGION 1..469: note = neuraminidase__InfluenzaA__AHL97772
MNPNQKIITIGSVSLTISTICFFMQIAILITTVTLHFKQYEFNSPPNNQVMLCEPTIIERNITEIVYLTNTTIEKEICPKPAEYRNWSKPQCGITGFAPFSKDNSIRLSAGGDIWVTREPYVSCDPDKCYQFALGQGTTLNNVHSNNTVRDRTPYRTLLMNELGVPFHLGTKQVCIAWSSSSCHDGKAWLHVCITGDDKNATASFIYNGRLVDSVVSWSKEILRTQESECVCINGTCTVVMTDGSASGKADTKILFIEEGKIVHTSTLSGSAQHVEECSCYPRYPGVRCVCRDNWKGSNRPIVDINIKDHSIVSSYVCSGLVGDTPRKNDSSSSSHCLDPNNEEGGHGVKGWAFDDGNDVWMGRTINETSRLGYETFKVIEGWSNPKSKLQINRQVIVDRGDRSGYSGIFSVEGKSCINRCFYVELIRGRKEETEVLWTSNSVVVFCGTSGTYGTGSWPDGADLNLMPI

SEQ ID NO: 24889 - protein, 469 aa, synthetic construct; identical to SEQ ID NO: 23375
  REGION 1..469: note = neuraminidase__InfluenzaA__AHL97784

SEQ ID NO: 24890 - protein, 469 aa, synthetic construct; identical to SEQ ID NO: 22146
  REGION 1..469: note = neuraminidase__InfluenzaA__AHL97796

SEQ ID NO: 24891 - protein, 469 aa, synthetic construct; identical to SEQ ID NO: 22146
  REGION 1..469: note = neuraminidase__InfluenzaA__AHL97808

SEQ ID NO: 24892 - protein, 469 aa, synthetic construct; identical to SEQ ID NO: 22146
  REGION 1..469: note = neuraminidase__InfluenzaA__AHL97820

SEQ ID NO: 24893 - protein, 469 aa, synthetic construct
  REGION 1..469: note = neuraminidase__InfluenzaA__AHL97832
MNPNQKIITIGSVSLTISTICFFMQIAILITTVTLHFKQYEFDSPPNNQVMLCEPTIIERNITEIVYLTNTTIEKEICPKPAEYRSWSKPQCGITGFAPFSKDNSIRLSAGGDIWVTREPYVSCDPDKCYQFALGQGTTLNNVHSNNTVRDRTPYRTLLMNELGVPFHLGTKQVCIAWSSSSCHDGKAWLHVCITGDDKNATASFIYNGRLVDSVVSWSKEILRTQESECVCINGTCTVVMTDGSASGKADTKILFIEEGKIVHTSTLSGSAQHVEECSCYPRYPGVRCVCRDNWKGSNRPIVDINIKDHSIVSSYVCSGLVGDTPRKNDSSSSSHCLDPNNEEGGHGVKGWAFDDGNDVWMGRTINETSRLGYETFKVIEGWSNPKSKLQINRQVIVDRGDRSGYSGIFSVEGKSCINRCFYVELIRGRKEETEVLWTSNSIVVFCGTSGTYGTGSWPDGADLNLMPI

SEQ ID NO: 24894 - protein, 469 aa, synthetic construct; identical to SEQ ID NO: 22146
  REGION 1..469: note = neuraminidase__InfluenzaA__AHL97844

SEQ ID NO: 24895 - protein, 469 aa, synthetic construct; identical to SEQ ID NO: 24887
  REGION 1..469: note = neuraminidase__InfluenzaA__AHL97856

SEQ ID NO: 24896 - protein, 469 aa, synthetic construct; identical to SEQ ID NO: 22146
  REGION 1..469: note = neuraminidase__InfluenzaA__AHL97868

SEQ ID NO: 24897 - protein, 469 aa, synthetic construct; identical to SEQ ID NO: 23871
  REGION 1..469: note = neuraminidase__InfluenzaA__AHL97880

SEQ ID NO: 24898 - protein, 469 aa, synthetic construct; identical to SEQ ID NO: 22146
  REGION 1..469: note = neuraminidase__InfluenzaA__AHL97892

SEQ ID NO: 24899 - protein, 469 aa, synthetic construct; identical to SEQ ID NO: 22146
  REGION 1..469: note = neuraminidase__InfluenzaA__AHL97904

SEQ ID NO: 24900 - protein, 469 aa, synthetic construct; identical to SEQ ID NO: 23883
  REGION 1..469: note = neuraminidase__InfluenzaA__AHL97916

SEQ ID NO: 24901 - protein, 469 aa, synthetic construct; identical to SEQ ID NO: 22146
  REGION 1..469: note = neuraminidase__InfluenzaA__AHL97928

SEQ ID NO: 24902 - protein, 469 aa, synthetic construct; identical to SEQ ID NO: 24862
  REGION 1..469: note = neuraminidase__InfluenzaA__AHL97952

SEQ ID NO: 24903 - protein, 469 aa, synthetic construct; identical to SEQ ID NO: 22146
  REGION 1..469: note = neuraminidase__InfluenzaA__AHL97964

SEQ ID NO: 24904 - protein, 469 aa, synthetic construct; identical to SEQ ID NO: 22146
  REGION 1..469: note = neuraminidase__InfluenzaA__AHL97976

SEQ ID NO: 24905 - protein, 469 aa, synthetic construct; identical to SEQ ID NO: 22146
  REGION 1..469: note = neuraminidase__InfluenzaA__AHL97988

SEQ ID NO: 24906 - protein, 469 aa, synthetic construct
  REGION 1..469: note = neuraminidase__InfluenzaA__AHL98000
MNPNQKIITIGSVSLTISTICFFMQIAILITTVTLHFKQYEFNSPPNNQVMLCEPTIIERNITEIVYLTNTTIEKEICPKPAEYRNWSKPQCGITGFAPFSKDNSIRLSAGGDIWVTREPYVSCDPDKCYQFALGQGTTLNNVHSNNTVRDRTPYRTLLMNELGVPFHLGTKQVCIAWSSSSCHDGKAWLHVCITGDDKNATASFIYNGRLVDSVVSWSKEILRTHESECVCINGTCTVVMTDGSASGKADTKILFIEEGKIVHTSTLSGSAQHVEECSCYPRYPGVRCVCRDNWKGSNRPIVDINIKDHSIVSSYVCSGLVGDTPRKKDSSSSSHCLDPNNEEGGHGVKGWAFDDGNDVWMGRTINETSRLGYETFKVIEGWSNPKSKLQINRQVIVDRGDRSGYSGIFSVEGKSCINRCFYVELIRGRKEETEVLWTSNSIVVFCGTSGTYGTGSWPDGADLNLMPI

SEQ ID NO: 24907 - protein, 469 aa, synthetic construct
  REGION 1..469: note = neuraminidase__InfluenzaA__AHL98012
MNPNQKIITIGSVSLTISTICFFMQIAILITTVTLHFKQYEFNSPPNNQVMLCEPTIIERNITEIVYLTNTTIEKEICPKPAEYRNWSKPQCGITGFAPFSKDNSIRLSAGGDIWVTREPYVSCDPDKCYQFALGQGTTLNNVHSNNTVRDRTPYRTLLMNELGVPFHLGTKQVCIAWSSSSCHDGKAWLHVCITGDDKNATASFIYNGRLVDSVVSWSKEVLRTQESECVCINGTCTVVMTDGSASGKADTKILFIEEGKIVHTSTLSGSAQHVEECSCYPRYPGVRCVCRDNWKGSNRPIVDINIKDHSIVSSYVCSGLVGDTPRKNDSSSSSHCLDPNNEEGDHGVKGWAFDDGNDVWMGRTINETSRLGYETFKVIEGWSNPKSKLQINRQVIVDRGDRSGYSGIFSVEGKSCINRCFYVELIRGRKEETEVLWTSNSIVVFCGTSGTYGTGSWPDGADLNLMPI

SEQ ID NO: 24908 - protein, 469 aa, synthetic construct; identical to SEQ ID NO: 23883
  REGION 1..469: note = neuraminidase__InfluenzaA__AHL98048

SEQ ID NO: 24909 - protein, 469 aa, synthetic construct; identical to SEQ ID NO: 23883
  REGION 1..469: note = neuraminidase__InfluenzaA__AHL98060

SEQ ID NO: 24910 - protein, 469 aa, synthetic construct; identical to SEQ ID NO: 23883
  REGION 1..469: note = neuraminidase__InfluenzaA__AHL98072

SEQ ID NO: 24911 - protein, 469 aa, synthetic construct; identical to SEQ ID NO: 22146
  REGION 1..469: note = neuraminidase__InfluenzaA__AHL98084

SEQ ID NO: 24912 - protein, 469 aa, synthetic construct; identical to SEQ ID NO: 23883
  REGION 1..469: note = neuraminidase__InfluenzaA__AHL98096

SEQ ID NO: 24913 - protein, 469 aa, synthetic construct; identical to SEQ ID NO: 22146
  REGION 1..469: note = neuraminidase__InfluenzaA__AHL98119

SEQ ID NO: 24914 - protein, 469 aa, synthetic construct; identical to SEQ ID NO: 22146
  REGION 1..469: note = neuraminidase__InfluenzaA__AHL98131

SEQ ID NO: 24915 - protein, 469 aa, synthetic construct; identical to SEQ ID NO: 22146
  REGION 1..469: note = neuraminidase__InfluenzaA__AHL98143

SEQ ID NO: 24916 - protein, 469 aa, synthetic construct
  REGION 1..469: note = neuraminidase__InfluenzaA__AHL98155
MNPNQKIITIGSVSLTISTICFFMQIAILITTVTLHFKQYEFNSPPNNQVMLCEPTIIERNITEIVYLTNTTIEKEICPKPAEYRNWSKPQCGITGFAPFSKDNSIRLSAGGDIWVTREPYVSCDPDKCYQFALGQGTTLNNVHSNNTVRDRTPYRTLLMNELGVPFHLGTKQVCIAWSSSSCHDGKAWLHVCITGDDKNATASFIYNGRLVDSVVSWSKEILRTQESECVCINGTCTVVMTDGSASGKADTKILFIEEGKIVHTSTLSGSAQHVEECSCYPRYPGVRCVCRDNWKGSNRPIVDINIKDHSIVSSYVCSGLVGDTPRKNDSSSSSHCLDPNNEEGGHGVKGWAFDDGNDVWMGRTINETSRLGYETFKVIEGWSNSKSKLQINRQVIVDRGDRSGYSGIFSVEGKSCINRCFYVELIRGRKEETEVLWTSNSIVVFCGTSGTYGTGSWPDGADLNLMPI

SEQ ID NO: 24917 - protein, 469 aa, synthetic construct; identical to SEQ ID NO: 22146
  REGION 1..469: note = neuraminidase__InfluenzaA__AHL98167

SEQ ID NO: 24918 - protein, 469 aa, synthetic construct; identical to SEQ ID NO: 22146
  REGION 1..469: note = neuraminidase__InfluenzaA__AHL98179

SEQ ID NO: 24919 - protein, 469 aa, synthetic construct; identical to SEQ ID NO: 22146
  REGION 1..469: note = neuraminidase__InfluenzaA__AHL98191

SEQ ID NO: 24920 - protein, 469 aa, synthetic construct; identical to SEQ ID NO: 23883
  REGION 1..469: note = neuraminidase__InfluenzaA__AHL98215

SEQ ID NO: 24921 - protein, 469 aa, synthetic construct
  REGION 1..469: note = neuraminidase__InfluenzaA__AHL98227
MNPNQKIITIGSVSLTISTICFFMQIAILITTVTLHFKQYEFNSPPNNQVMLCEPTIIERNITDIVYLTNTTIEKEICPKPAEYRNWSKPQCGITGFAPFSKDNSIRLSAGGDIWVTREPYVSCDPDKCYQFALGQGTTLNNMHSNNTVRDRTPYRTLLMNELGVPFHLGTKQVCIAWSSSSCHDGKAWLHVCITGDDKNATASFIYNGRLVDSVVSWSKEILRTQESECVCINGTCTVVMTDGSASGKADTKILFIEEGKIVHTSTLSGSAQHVEECSCYPRYPGVRCVCRDNWKGSNRPIVDINIKDHSIVSSYVCSGLVGDTPRKNDSSSSSHCLDPNNEEGGHGVKGWAFDDGNDVWMGRTINETSRLGYETFKVIEGWSNPKSKLQINRQVIVDRGDRSGYSGIFSVEGKSCINRCFYVELIRGRKEETEVLWTSNSIVVFCGTSGTYGTGSWPDGADLNLMPI

SEQ ID NO: 24922 - protein, 469 aa, synthetic construct; identical to SEQ ID NO: 22146
  REGION 1..469: note = neuraminidase__InfluenzaA__AHL98239

SEQ ID NO: 24923 - protein, 469 aa, synthetic construct; identical to SEQ ID NO: 22146
  REGION 1..469: note = neuraminidase__InfluenzaA__AHL98251

SEQ ID NO: 24924 - protein, 469 aa, synthetic construct; identical to SEQ ID NO: 23894
  REGION 1..469: note = neuraminidase__InfluenzaA__AHL98263

SEQ ID NO: 24925 - protein, 469 aa, synthetic construct; identical to SEQ ID NO: 22146
  REGION 1..469: note = neuraminidase__InfluenzaA__AHL98275

SEQ ID NO: 24926 - protein, 469 aa, synthetic construct; identical to SEQ ID NO: 24792
  REGION 1..469: note = neuraminidase__InfluenzaA__AHL98287

SEQ ID NO: 24927 - protein, 469 aa, synthetic construct
  REGION 1..469: note = neuraminidase__InfluenzaA__AHL98298
MNPNQKIITIGSVSLTISTICFFMQIAILITTVTLHFKQYEFNSPPNNQVMLCEPTIIGRNITEIVYLTNTTIEKEICPKPAEYRNWSKPQCGITGFAPFSKDNSIRLSAGGDIWVTREPYVSCDPDKCYQFALGQGTTLNNVHSNNTVRDRTPYRTLLMNELGVPFHLGTKQVCIAWSSSSCHDGKAWLHVCITGDDKNATASFIYNGRLVDSVVSWSKEILRTQESECVCINGTCTVVMTDGSASGKADTKILFIEEGKIVHTSTLSGSAQHVEECSCYPRYPGVRCVCRDNWKGSNRPIVDINIKDHSIVSSYVCSGLVGDTPRKNDSSSSSHCLDPNNEEGGHGVKGWAFDDGNDVWMGRTINETSRLGYETFKVIEGWSNPKSKLQINRQVIVDRGDRSGYSGIFSVEGKSCINRCFYVELIRGRKEETEVLWTSNSIVVFCGTSGTYGTGSWPDGADLNLMPI

SEQ ID NO: 24928 - protein, 469 aa, synthetic construct; identical to SEQ ID NO: 22146
  REGION 1..469: note = neuraminidase__InfluenzaA__AHL98310

SEQ ID NO: 24929 - protein, 469 aa, synthetic construct; identical to SEQ ID NO: 22146
  REGION 1..469: note = neuraminidase__InfluenzaA__AHL98322

SEQ ID NO: 24930 - protein, 469 aa, synthetic construct
  REGION 1..469: note = neuraminidase__InfluenzaA__AHL98334
MNPNQKIITIGSVSLTISTICFFMQIAILITTVTLHFKQYEFNSPPNNQVMLCEPTIIERNITEVVYLTNTTIEKEICPKPAEYRNWSKPQCGITGFAPFSKDNSIRLSAGGDIWVTREPYVSCDPDKCYQFALGQGTTLNNVHSNNTVRDRTPYRTLLMNELGVPFHLGTKQVCIAWSSSSCHDGKAWLHVCITGDDKNATASFIYNGRLVDSVVSWSKEILRTQESECVCINGTCTVVMTDGSASGKADTKILFIEEGKIVHTSTLSGSAQHVEECSCYPRYPGVRCVCRDNWKGSNRPIVDINIKDHSIVSSYVCSGLVGDTPRKNDSSSSSHCLDPNNEEGGHGVKGWAFDDGNDVWMGRTINETSRLGYETFKVIEGWSNPKSKLQINRQVIVDRGDRSGYSGIFSVEGKSCINRCFYVELIRGRKEETEVLWTSNSIVVFCGTSGTYGTGSWPDGADLNLMPI

SEQ ID NO: 24931 - protein, 469 aa, synthetic construct
  REGION 1..469: note = neuraminidase__InfluenzaA__AHL98346
MNPNQKIITIGSVSLTISTICFFMQIAILITTVTLHFKQYEFDSPPNNQVMLCEPTIIERNITEIVYLTNTTIEKEICPKPAEYRNWSKPQCGITGFAPFSKDNSIRLSAGGDIWVTREPYVSCDPDKCYQFALGQGTTLNNVHSNNTVRDRTPYRTLLMNELGVPFHLGTKQVCIAWSSSSCHDGKAWLHVCITGDDKNATASFIYNGRLVDSVVSWSKEILRTQESECVCINGTCTVVMTDGSASGKADTKILFIEEGKIVHTSTLSGSAQHVEECSCYPRYPGVRCVCRDNWKGSNRPIVDINIKDHSIVSSYVCSGLVGDTPRKNDSSSSSHCLDPNNEEGGHGVKGWAFDDGNDVWMGRTINETSRLGYETFKVIEGWSNPKSKLQINRQVIVDRGDRSGYSGIFSVEGKSCINRCFYVELIRGRKEENEVLWTSNSIVVFCGTSGTYGTGSWPDGADLNLMPI

SEQ ID NO: 24932 - protein, 469 aa, synthetic construct; identical to SEQ ID NO: 22146
  REGION 1..469: note = neuraminidase__InfluenzaA__AHL98357

SEQ ID NO: 24933 - protein, 469 aa, synthetic construct; identical to SEQ ID NO: 23894
  REGION 1..469: note = neuraminidase__InfluenzaA__AHL98369

SEQ ID NO: 24934 - protein, 469 aa, synthetic construct
  REGION 1..469: note = neuraminidase__InfluenzaA__AHL98381
MNPNQKIITIGSVSLTISTICFFMQIAILITTVTLHFKQYEFNSPPNNQVMLCEPTIIERNITEIVYLTNTTIEKEICPKPAEYRNWSKPQCGITGFAPFSKDNSIRLSAGGDIWVTREPYVSCGPDKCYQFALGQGTTLNNMHSNNTVRDRTPYRTLLMSELGVPFHLGTKQVCIAWSSSSCHDGKAWLHVCITGDDKNATASFIYNGRLVDSVVSWSKEILRTQESECVCINGTCTVVMTDGSASGKADTKILFIEEGKIVHTSTLSGSAQHVEECSCYPRYPGVRCVCRDNWKGSNRPIVDINIKDHSTVSSYVCSGLVGDTPRKNDSSSSSHCLDPNNEEGGHGVKGWAFDDGNDVWMGRTINETSRLGYETFKVIEGWSNPKSKLQINRQVIVDRGDRSGYSGIFSVEGKSCINRCFYVELIRGRKEETEVLWTSNSIVVFCGTSGTYGTGSWPDGADLNLMPI

SEQ ID NO: 24935 - protein, 469 aa, synthetic construct
  REGION 1..469: note = neuraminidase__InfluenzaA__AHL98393
MNPNQKIITIGSVSLTISTICFFMQIAILITTVTLHFKQYEFNSPPNNQMMLCEPTIIERNITEIVYLTNTTIEKEICPKPAEYRNWSKPQCGITGFAPFSKDNSIRLSAGGDIWVTREPYVSCGPDKCYQFALGQGTTLNNMHSNNTVRDRTPYRTLLMNELGVPFHLGTKQVCIAWSSSSCHDGKAWLHVCITGDDKNATASFIYNGRLVDSVVSWSKEILRTQESECVCINGTCTVVMTDGSASGKADTKILFIEEGKIVHTSTLSGSDQHIEECSCYPRYPGVRCVCRDNWKGSNRPIVDINIKDHSIVSSYVCSGLVGDTPRKNDSSSSSHCLDPNNEEGGHGVKGWAFDDGNDVWMGRTINETSRLGYETFKVIEGWSNPKSKLQINRQVIVDRGDRSGYSGIFSVEGKSCINRCFYVELIRGRKEETEVLWTSNSIVVFCGTSGTYGTGSWPDGADLNLMPI

SEQ ID NO: 24936 - protein, 469 aa, synthetic construct; identical to SEQ ID NO: 22146
  REGION 1..469: note = neuraminidase__InfluenzaA__AHL98405

SEQ ID NO: 24937 - protein, 469 aa, synthetic construct; identical to SEQ ID NO: 22146
  REGION 1..469: note = neuraminidase__InfluenzaA__AHL98417

SEQ ID NO: 24938 - protein, 469 aa, synthetic construct; identical to SEQ ID NO: 22146
  REGION 1..469: note = neuraminidase__InfluenzaA__AHL98429

SEQ ID NO: 24939 - protein, 469 aa, synthetic construct
  REGION 1..469: note = neuraminidase__InfluenzaA__AHL98452
MNPTQKIITIGSVCMTIGMANLILQIGNIISIWISHSIQLGNQSQIETCNQSVITYENNTWVNQTYVNISNTNFAAGQSVVSVKLAGNSSLCPVSGWAIYSKDNSVRIGSKGDVFVIREPFISCSPLECRTFFLTQGALLNDKHSNGTIKDRSPYRTLMSCPIGEVPSPYNSRFESVAWSASACHDGINWLTIGISGPDSGAVAVLKYNGIITDTIKSWKNNILRTQESECACVNGSCFTIMTDGPSDGQASYKIFRIEKGKIVKSVEMNAPNYHYEECSCYPDSSEITCVCRDNWHGSNRPWVSFNQNLEYQIGYICSGVFGDNPRPNDKTGSCGPVSSNGANGVKGFSFKYGNGVWIGRTKSISSRKGFEMIWDPNGWTGTDNNFSIKQDIVGINEWSGYSGSFVQHPELTGLDCIRPCFWVELIRGRPKENTIWTSGSSISFCGVNSDTVGWSWPDGAELPFTIDK

SEQ ID NO: 24940 - protein, 469 aa, synthetic construct
  REGION 1..469: note = neuraminidase__InfluenzaA__AHL98474
MNPNQKIITIGSVCMTIGMANLILQIGNIISIWISHSIQLGNQSQIETCNQSVITYENNTWVNQTYVNISNTNFAAGQSVVSVKLAGNSSLCPVSGWAIYSKDNSVRIGSKGDVFVIREPFISCSPLECRTFFLTQGALLNDKHSNGTIKDRSPYRTLMSCPIGEVPSPYNSRFESVAWSASACHDGINWLTIGISGPNSGAVAVLKYNGIITDTIKSWRNNILRTQESECACVNGSCFTIMTDGPSDGQASYKIFRIEKGKIVKSVEMNAPNYHYEECSCYPDSSEITCVCRDNWHGSNRPWVSFNQNLEYQIGYICSGVFGDNPRPNDKTGSCGPVSSNGANGVKGFSFKYGNGVWIGRTKSISSRKGFEMIWDPNGWTGTDNNFSIKQDIVGINEWSGYSGSFVQHPELTGLDCIRPCFWVELIRGRPKENTIWTSGSSISFCGVNSDTVGWSWPDGAELPFTIDK

SEQ ID NO: 24941 - protein, 469 aa, synthetic construct
  REGION 1..469: note = neuraminidase__InfluenzaA__AHL98485
MNPNQKIITIGSVSLTISTICFFMQIAILITTVTLHFKQYEFNSPPNNQVMLCEPTIIERNITEIVYLTNTTIEKEICPKPAEYRNWSKPQCGITGFAPFSKDNSIRLSAGGDIWVTREPYVSCDPDKCYQFALGQGTTLNNVHSNNTVRDRTPYRTLLMNELGVPFHLGTKQVCIAWSSSSCHDGKAWLHVCITGDDKNATASFIYNGRLVDSVVSWSKEILRTQESECVCINGTCTVVMTDGSASGKADTKILFIEEGKIVHTSILSGSAQHVEECSCYPRYPGVRCVCRDNWKGSNRPIVDINIKDHSIVSSYVCSGLVGDTPRKNDSSSSSHCLDPNNEEGGHGVKGWAFDDGNDVWMGRTINETSRLGYETFKVIEGWSNPKSKLQINRQVIVDRGDRSGYSGIFSVEGKSCINRCFYVELIRGRKEETEVLWTSNSIVVFCGTSGTYGTGSWPDGADLNLMPI

SEQ ID NO: 24942 - protein, 469 aa, synthetic construct; identical to SEQ ID NO: 23375
  REGION 1..469: note = neuraminidase__InfluenzaA__AHL98497

SEQ ID NO: 24943 - protein, 469 aa, synthetic construct; identical to SEQ ID NO: 22146
  REGION 1..469: note = neuraminidase__InfluenzaA__AHL98509

SEQ ID NO: 24944 - protein, 469 aa, synthetic construct; identical to SEQ ID NO: 22146
  REGION 1..469: note = neuraminidase__InfluenzaA__AHL98521

SEQ ID NO: 24945 - protein, 469 aa, synthetic construct; identical to SEQ ID NO: 23375
  REGION 1..469: note = neuraminidase__InfluenzaA__AHL98533

SEQ ID NO: 24946 - protein, 469 aa, synthetic construct; identical to SEQ ID NO: 22146
  REGION 1..469: note = neuraminidase__InfluenzaA__AHL98545

SEQ ID NO: 24947 - protein, 469 aa, synthetic construct; identical to SEQ ID NO: 22146
  REGION 1..469: note = neuraminidase__InfluenzaA__AHL98557

SEQ ID NO: 24948 - protein, 469 aa, synthetic construct; identical to SEQ ID NO: 22146
  REGION 1..469: note = neuraminidase__InfluenzaA__AHL98569

SEQ ID NO: 24949 - protein, 469 aa, synthetic construct
  REGION 1..469: note = neuraminidase__InfluenzaA__AHL98581
MNPNQKIITIGSVSLTISTICFFMQIAILITTVTLHFKQYEFNSPPNNQVMLCEPTIIERNITEIVYLTNTTIEKEICPKPAEYRNWSKPQCGITGFAPFSKDNSIRLSAGGNIWVTREPYVSCDPDKCYQFALGQGTTLNNVHSNNTVRDRTPYRTLLMNELGVPFHLGTKQVCIAWSSSSCHDGKAWLHVCITGDDKNATASFIYNGRLVDSVVSWSKEILRTQESECVCINGTCTVVMTDGSASGKADTKILFIEEGKIVHTSTLSGSAQHVEECSCYPRYPGVRCVCRDNWKGSNRPIVDINIKDHSIVSSYVCSGLVGDTPRKNDSSSSSHCLDPNNEEGGHGVKGWAFDDGNDVWMGRTINETSRLGYETFKVIEGWSNPKSKLQINRQVIVDRGDRSGYSGIFSVEGKSCINRCFYVELIRGRKEETEVLWTSNSIVVFCGTSGTYGTGSWPDGADLNLMPI

SEQ ID NO: 24950 - protein, 469 aa, synthetic construct; identical to SEQ ID NO: 22146
  REGION 1..469: note = neuraminidase__InfluenzaA__AHL98593

SEQ ID NO: 24951 - protein, 469 aa, synthetic construct; identical to SEQ ID NO: 23883
  REGION 1..469: note = neuraminidase__InfluenzaA__AHL98605

SEQ ID NO: 24952 - protein, 469 aa, synthetic construct; identical to SEQ ID NO: 23375
  REGION 1..469: note = neuraminidase__InfluenzaA__AHL98617

SEQ ID NO: 24953 - protein, 469 aa, synthetic construct; identical to SEQ ID NO: 23375
  REGION 1..469: note = neuraminidase__InfluenzaA__AHL98629

SEQ ID NO: 24954 - protein, 469 aa, synthetic construct; identical to SEQ ID NO: 22146
  REGION 1..469: note = neuraminidase__InfluenzaA__AHL98641

SEQ ID NO: 24955 - protein, 469 aa, synthetic construct; identical to SEQ ID NO: 24724
  REGION 1..469: note = neuraminidase__InfluenzaA__AHL98653

SEQ ID NO: 24956 - protein, 469 aa, synthetic construct; identical to SEQ ID NO: 22146
  REGION 1..469: note = neuraminidase__InfluenzaA__AHL98665

SEQ ID NO: 24957 - protein, 469 aa, synthetic construct
  REGION 1..469: note = neuraminidase__InfluenzaA__AHL98677
MNPNQKIITIGSVSLTISTICFFMQIAILITTVTLHFKQYEFNSPPNNQVMLCEPTIIERNITEIVYLTNTTIEKEICPKPAEYRNWSKPQCGITGFAPFSKDNSIRLSAGGDIWVTREPYVSCDPDKCYQFALGQGTTLNNVHSNNTVRDRTPHRTLLMNELGVPFHLGTKQVCIAWSSSSCHDGKAWLHVCITGDDKNATASFIYNGRLVDSVVSWSKEILRTQESECVCINGTCTVVMTDGSASGKADTKILFIEEGKIVHTSTLSGNAQHVEECSCYPRYPGVRCVCRDNWKGSNRPIVDINIKDHSIVSSYVCSGLVGDTPRKNDSSSSSHCLDPNNEEGGHGVKGWAFDDGNDVWMGRTINETSRLGYETFKVIEGWSNPKSKLQINRQVIVDRGDRSGYSGIFSVEGKSCINRCFYVELIRGRKEETEVLWTSNSIVVFCGTSGTYGTGSWPDGADLNLMPI

SEQ ID NO: 24958 - protein, 469 aa, synthetic construct; identical to SEQ ID NO: 23894
  REGION 1..469: note = neuraminidase__InfluenzaA__AHL98689

SEQ ID NO: 24959 - protein, 469 aa, synthetic construct
  REGION 1..469: note = neuraminidase__InfluenzaA__AHL98702
MNPNQKIITIGSVSLTISTICFFMQIAILITTVTLHFKQYEFDSPPNNQVMLCEPTIIERNITEIVYLTNTTIEKEICPKPAEYRNWSKPQCGITGFAPFSKDNSIRLSAGGDIWVTREPYVSCDPDKCYQFALGQGTTLNNGHSNNTVRDRTPYRTLLMNELGVPFHLGTKQVCIAWSSSSCHDGKAWLHVCITGDDKNATASFIYNGRLVDSVVSWSKEILRTQESECVCINGTCTVVMTDGSASGKADTKILFIEEGKIVHTSTLSGSAQHVEECSCYPRYPGVRCVCRDNWKGSNRPIVDINIKDHSIVSSYVCSGLVGDTPRKNDSSSSSHCLDPNNEEGGHGVKGWAFDDGNDVWMGRTINETSRLGYETFKVIEGWSNPKSKLQINRQVIVDRGDRSGYSGIFSVEGKSCINRCFYVELIRGRKEETEVLWTSNSIVVFCGTSGTYGTGSWPDGADLNLMPI

SEQ ID NO: 24960 - protein, 469 aa, synthetic construct; identical to SEQ ID NO: 23389
  REGION 1..469: note = neuraminidase__InfluenzaA__AHL98714

SEQ ID NO: 24961 - protein, 469 aa, synthetic construct
  REGION 1..469: note = neuraminidase__InfluenzaA__AHL98725
MNPNQKIITIGSVSLTISTICFFMQIAILITTVTLHFKQYEFNSPPNNQVMLCEPTIIERNITEIVYLTNTTIEKEICPKPAEYRNWSKPQCGITGFAPFSKDNSIRLSAGGGIWVTREPYVSCDPDKCYQFALGQGTTLNNVHSNNTVRDRTPYRTLLMNELGVPFHLGTKQVCIAWSSSSCHDGKAWLHVCITGDDKNATASFIYNGRLVDSVVSWSKEILRTQESECVCINGTCTVVMTDGNASGKADTKILFIEEGKIVHTSTLSGSAQHVEECSCYPRYPGVRCVCRDNWKGSNRPIVDINIKDHSIVSSYVCSGLVGDTPRKNDSSSSSHCLDPNNEEGGHGVKGWAFDDENDVWMGRTINETSRLGYETFKVIEGWSNPKSKLQINRQVIVDRGNRSGYSGIFSVEGKSCINRCFYVELIRGRKEETEVLWTSNSIVVFCGTSGTYGTGSWPDGADLNLMPI

SEQ ID NO: 24962 - protein, 469 aa, synthetic construct; identical to SEQ ID NO: 23883
  REGION 1..469: note = neuraminidase__InfluenzaA__AHL98737

SEQ ID NO: 24963 - protein, 469 aa, synthetic construct; identical to SEQ ID NO: 23871
  REGION 1..469: note = neuraminidase__InfluenzaA__AHL98749

SEQ ID NO: 24964 - protein, 469 aa, synthetic construct; identical to SEQ ID NO: 23883
  REGION 1..469: note = neuraminidase__InfluenzaA__AHL98761

SEQ ID NO: 24965 - protein, 469 aa, synthetic construct
  REGION 1..469: note = neuraminidase__InfluenzaA__AHL98773
MNPNQKIITIGSVSLTISTICFFMQIAILITTVTLHFKQYEFNSPPNNQVMLCEPTIIERNITEIVYLTNTTIEKEICPKPAEYRNWSKPQCGITGFAPFSKDNSIRLSAGGNIWVTREPYVSCDPDKCYQFALGQGTTLNNVHSNNTARDRTPYRTLLMNELGVPFHLGTKQVCIAWSSSSCHDGKAWLHVCITGDDKNATASFIYNGRLVDSVVSWSKEILRTQESECVCINGTCTVVMTDGSASGKADTKILFIEEGKIVHTSTLSGSAQHVEECSCYPRYPGVRCVCRDNWKGSNRPIVDINIKDHSIVSSYVCSGLVGDTPRKNDSSSSSHCLDPNNEEGGHGVKGWAFDDGNDVWMGRTINETSRLGYETFKVIEGWSNPKSKLQINRQVIVDRGDRSGYSGIFSVEGKSCINRCFYVELIRGRKEETEVLWTSNSIVVFCGTSGTYGTGSWPDGADLNLMPI

SEQ ID NO: 24966 - protein, 469 aa, synthetic construct; identical to SEQ ID NO: 23903
  REGION 1..469: note = neuraminidase__InfluenzaA__AHL98785

SEQ ID NO: 24967 - protein, 469 aa, synthetic construct
  REGION 1..469: note = neuraminidase__InfluenzaA__AHL98797
MNPNQKIITIGSVSLTISTICFFTQIAILITTVTLHFKQYEFNSPPNNQVMLCEPTIIERNITEIVYLTNTTIEKEICPKPAEYRNWSKPQCGITGFAPFSKDNSIRLSAGGDIWVTREPYVSCDPDKCYQFALGQGTTLNNVHSNNTVRDRTPYRTLLMNELGVPFHLGTKQVCIAWSSSSCHDGKAWLHVCITGDDKNATASFIYNGRLVDSVVSWSKEILRTQESECVCINGTCTVVMTDGSASGKADTKILFIEEGKIVHTSTLSGSAQHVEECSCYPRYPGVRCVCRDNWKGSNRPIVDINIKDHSIVSSYVCSGLVGDTPRKNDSSSSSHCLDPNNEEGGHGVKGWAFDDGNDVWMGRTINETSRSGYETFKVIEGWSNPKSKLQINRQVIVDRGDRSGYSGIFSVEGKSCINRCFYVELIRGRKEETEVLWTSNSIVVFCGTSGTYGTGSWPDGADLNLMPI

SEQ ID NO: 24968 - protein, 469 aa, synthetic construct; identical to SEQ ID NO: 22146
  REGION 1..469: note = neuraminidase__InfluenzaA__AHL98809

SEQ ID NO: 24969 - protein, 469 aa, synthetic construct
  REGION 1..469: note = neuraminidase__InfluenzaA__AHL98821
MNPNQKIITIGSVSLTISTICFFMQIAILITTVTLHFKQYEFNSPPNNQVMLCEPTIIERNITEIVYLTNTTIEKEICPKPAEYRNWSKPQCGITGFAPFSKDNSIRLSAGGDIWVTREPYVSCDPDRCYQFALGQGTTLNNMHSNNTVRDRTPYRTLLMNELGVPFHLGTKQVCIAWSSSSCHDGKAWLHVCITGDDKNATASFIYNGRLVDSVVSWSKEILRTQESECVCINGTCTVVMTDGSASGKADTKILFIEEGKIVHTSTLSGSAQHVEECSCYPRYPGVRCVCRDNWKGSNRPIVDINIKDHSIVSSYVCSGLVGDTPRKNDSSSSSHCLDPNNEEGGHGVKGWAFDDGNDVWMGRTINETSRLGYETFKVIEGWSNPKSKLQINRQVIVDRGDRSGYSGIFSVEGKSCINRCFYVELIRGRKEETEVLWTSNSIVVFCGTSGTYGTGSWPDGADLNLMPI

SEQ ID NO: 24970 - protein, 469 aa, synthetic construct; identical to SEQ ID NO: 22146
  REGION 1..469: note = neuraminidase__InfluenzaA__AHL98833

SEQ ID NO: 24971 - protein, 469 aa, synthetic construct
  REGION 1..469: note = neuraminidase__InfluenzaA__AHL98845
MNPNQKIITIGSVSLTISTICFFMQIAILITTVTLHFKQYEFNSPPNNQVMLCEPTIIERNITEIVYLINTTIEKEICPKPAEYRNWSKPQCGITGFAPFSKDNSIRLSAGGDIWVTREPYVSCGPDKCYQFALGQGTTLNNMHSNNTVRDRTPYRTLLMNELGVPFHLGTKQVCIAWSSSSCHDGKAWLHVCITGDDKNATASFIYNGRLVDSVVSWSKEILRTQESECVCINGTCTVVMTDGSASGKADTKILFIEEGKIVHTSTLSGSAQHVEECSCYPRYPGVRCVCRDNWKGSNRPIVDINIKDHSIVSSYVCSGLVGDTPRKNDSSSSSHCLDPNNEEGGHGVKGWAFDDGNDVWMGRTINETSRLGYETFKVIEGWSNPKSKLQINRQVIVDRGDRSGYSGIFSVEGKSCINRCFYVELIRGRKEETEVLWTSNSIVVFCGTSGTYGTGSWPDGADLNLMPI

SEQ ID NO: 24972 - protein, 469 aa, synthetic construct; identical to SEQ ID NO: 23883
  REGION 1..469: note = neuraminidase__InfluenzaA__AHL98857

SEQ ID NO: 24973 - protein, 469 aa, synthetic construct; identical to SEQ ID NO: 23883
  REGION 1..469: note = neuraminidase__InfluenzaA__AHL98869

SEQ ID NO: 24974 - protein, 469 aa, synthetic construct; identical to SEQ ID NO: 22146
  REGION 1..469: note = neuraminidase__InfluenzaA__AHL98881

SEQ ID NO: 24975 - protein, 469 aa, synthetic construct
  REGION 1..469: note = neuraminidase__InfluenzaA__AHL98893
MNPNQKIITIGSVSLTISTICFFMQIAILITTVTLHFKQYEFDSPPNNQVMLCEPTIIERNITEIVYLTNTTIEKEICPKPAEYRNWSKPQCGITGFAPFSKDNSIRLSAGGDIWVTREPYVSCDPDKCYQFALGQGTTLNNVHSNNTVRDRTPYRTLLMNELGVPFHLGTKQVCIAWSSSSCHDGKAWLHVCITGDDKNATASFIYNGRLVDSVVSWSKEILRTQESECVCINGTCTVVMTDGSASGKADTKILFIEEGKIVHTSTLSGSAQHVEECSCYPRYPGVRCVCRDNWKGSNRPIVDINIKDHSIVSSYVCSGLVGDTPRKNDSSSSSHCLDPNNEEGGHGVKGWAFDDGNDVWMGRTINETSRLGYETFKVFEGWSNPKSKLQINRQVIVDRGDRSGYSGIFSVEGKSCINRCFYVELIRGRKEETEVLWTSNSIVVFCGTSGTYGTGSWPDGADLNLMPI

SEQ ID NO: 24976 - protein, 469 aa, synthetic construct; identical to SEQ ID NO: 23871
  REGION 1..469: note = neuraminidase__InfluenzaA__AHL98905

SEQ ID NO: 24977 - protein, 469 aa, synthetic construct; identical to SEQ ID NO: 22146
  REGION 1..469: note = neuraminidase__InfluenzaA__AHL98916

SEQ ID NO: 24978 - protein, 469 aa, synthetic construct; identical to SEQ ID NO: 23894
  REGION 1..469: note = neuraminidase__InfluenzaA__AHL98928

SEQ ID NO: 24979 - protein, 469 aa, synthetic construct; identical to SEQ ID NO: 22146
  REGION 1..469: note = neuraminidase__InfluenzaA__AHL98940

SEQ ID NO: 24980 - protein, 469 aa, synthetic construct; identical to SEQ ID NO: 22146
  REGION 1..469: note = neuraminidase__InfluenzaA__AHL98952

SEQ ID NO: 24981 - protein, 469 aa, synthetic construct; identical to SEQ ID NO: 23871
  REGION 1..469: note = neuraminidase__InfluenzaA__AHL98964

SEQ ID NO: 24982 - protein, 469 aa, synthetic construct
  REGION 1..469: note = neuraminidase__InfluenzaA__AHL98976
MNPNQKIITIGSVSLTISTICFFMQIAILITTVTLHFKQYEFNSPPNNQVMLCEPTIVERNITEIVYLTNTTIEKEICPKPAEYRNWSKPQCGITGFAPFSKDNSIRLSAGGDIWVTREPYVSCDPDKCYQFALGQGTTLNNVHSNNTVRDRTPYRTLLMNELGVPFHLGTKQVCIAWSSSSCHDGKAWLHVCITGDDKNATASFIYNGRLVDSVASWSKEVLRTQESECVCINGTCAVVMTDGSASGKADTKILFIEEGKIVHTSTLSGSAQHVEECSCYPRYPGVRCVCRDNWKGSNRPIVDINIKDHSIVSSYVCSGLVGDTPRKNDSSSSSHCLDPNNEEGGHGVKGWAFDDGNDVWMGRTINETSRLGYETFKVIEGWSNPKSKLQINRQVIVDRGDRSGYSGIFSVEGKSCINRCFYVELIRGRKEETEVLWTSNSIVVFCGTSGTYGTGSWPDGADLNLMPI

SEQ ID NO: 24983 - protein, 469 aa, synthetic construct; identical to SEQ ID NO: 23871
  REGION 1..469: note = neuraminidase__InfluenzaA__AHL98988

SEQ ID NO: 24984 - protein, 469 aa, synthetic construct; identical to SEQ ID NO: 22146
  REGION 1..469: note = neuraminidase__InfluenzaA__AHL99000

SEQ ID NO: 24985 - protein, 469 aa, synthetic construct; identical to SEQ ID NO: 22146
  REGION 1..469: note = neuraminidase__InfluenzaA__AHL99012

SEQ ID NO: 24986 - protein, 469 aa, synthetic construct
  REGION 1..469: note = neuraminidase__InfluenzaA__AHL99024
MNPNQKIITIGSVSLTISTICFFMQIAILITTVTLHFKQYEFNSPPNNQVMLCEPTIIERNITEIVYLTNTTIEKEICPKPAEYRNWSKPQCGITGFAPFSKDNSIRLSAGGDIWVTREPYVSCDPDKCYQFALGQGTTLNNVHSNNTVRDRTPYRTLLMNELGVPFHLGTKQVCIAWSSSSCHDGKAWLHVCITGDDKNATASFIYNGRLVDSVVSWSKEILRTQESECVCINGTCTVVMTDGSASGKADTKILFIEEGKIVHTSTLSGSAQHVEECSCYPRYPGVRCICRDNWKGSNRPIVDINIKDHSIVSSYVCSGLVGDTPRKNDSSSSSHCLDPNNEEGGHGVKGWAFDDGNDVWMGRTINETSRLGYETFKVIEGWSNPKSKLQINRQVIVDRGDRSGYSGIFSVEGKSCINRCFYVELIRGRKEETEVLWTSNSIVVFCGTSGTYGTGSWPDGADLNLMPI

SEQ ID NO: 24987 - protein, 469 aa, synthetic construct; identical to SEQ ID NO: 23364
  REGION 1..469: note = neuraminidase__InfluenzaA__AHL99036

SEQ ID NO: 24988 - protein, 469 aa, synthetic construct; identical to SEQ ID NO: 24786
  REGION 1..469: note = neuraminidase__InfluenzaA__AHL99048

SEQ ID NO: 24989 - protein, 469 aa, synthetic construct; identical to SEQ ID NO: 22146
  REGION 1..469: note = neuraminidase__InfluenzaA__AHL99060

SEQ ID NO: 24990 - protein, 469 aa, synthetic construct
  REGION 1..469: note = neuraminidase__InfluenzaA__AHL99072
MNPNQKIITIGSVSLTISTICFFMQIAILITTVTLHFKQYEFNSPPNNQVMLCEPTIIERNITEIVYLTNTTIEKEICPKPAEYRNWSKPQCGITGFAPFSKDNSIRLSAGGDIWVTREPYVSCDPDKCYQFALGQGTTLNNVHSNNTVRDRTPYRTLLMNELGVPFHLGTKQVCIAWSSSSCHDGKAWLHVCITGDDKNATASFIYNGRLVDSVVSWSKEILRTQESECVCINGTCTVVMTDGSASGKADTKILFIEEGKIVHTSTLSGSAQHVEECSCYPRYPGVRCVCRDNWKGSNRPIVDINMKDHSIVSSYVCSGLVGDTPRKNDSSSSSHCLDPNNEEGGHGVKGWAFDDGNDVWMGRTINETSRLGYETFKVIEGWSNPKSKLQINRQVIVDRGDRSGYSGIFSVEGKSCINRCFYVELIRGRKEETEVLWTSNSIVVFCGTSGTYGTGSWPDGADLNLMPI

SEQ ID NO: 24991 - protein, 469 aa, synthetic construct
  REGION 1..469: note = neuraminidase__InfluenzaA__AHL99084
MNPNQKIITIGSVSLTISTICFFMQIAILITTVTLHFKQYEFNSPPNNQVMLCEPTIIERNITEIVYLTNTTIEKEICPKPAEYRNWSKPQCGITGFAPFSKDNSIRLSAGGDIWVTREPYVSCDPDRCYQFALGQGTTLNNMHSNNTVRDRTPYRTLLMNELGVPFHLGTKQVCIAWSSSSCHDGKAWLHVCITGDDKNATASFIYNGRLVDSVVSWSKEILRTQESECVCINGTCTVVMTDGSASGKADTKILFIEEGKIVHTSTLSGSAQHVEECSCYPRYPGVRCVCRDNWKGSNRPIVDINIKDHNIVSSYVCSGLVGDTPRKNDSSSSSHCLDPNNEEGGHGVKGWAFDDGNDVWMGRTINETSRLGYETFKVIEGWSNPKSKLQINRQVIVDRGDRSGYSGIFSVEGKSCINRCFYVELIRGRKEETEVLWTSNSIVVFCGTSGTYGTGSWPDGADLNLMPI

SEQ ID NO: 24992 - protein, 469 aa, synthetic construct; identical to SEQ ID NO: 22146
  REGION 1..469: note = neuraminidase__InfluenzaA__AHL99096

SEQ ID NO: 24993 - protein, 469 aa, synthetic construct; identical to SEQ ID NO: 22146
  REGION 1..469: note = neuraminidase__InfluenzaA__AHL99108

SEQ ID NO: 24994 - protein, 469 aa, synthetic construct; identical to SEQ ID NO: 22146
  REGION 1..469: note = neuraminidase__InfluenzaA__AHL99120

SEQ ID NO: 24995 - protein, 469 aa, synthetic construct; identical to SEQ ID NO: 22146
  REGION 1..469: note = neuraminidase__InfluenzaA__AHL99132

SEQ ID NO: 24996 - protein, 469 aa, synthetic construct
  REGION 1..469: note = neuraminidase__InfluenzaA__AHL99144
MNPNQKIITIGSVSLTISTICFFMQIAILITTVTLHFKQYEFNSPPNNQVMLCEPTIIERNITEIVYLTNTTIEKEICPKPAEYRNWSKPQCGITGFAPFSKDNSIRLSAGGDIWVTREPYVSCDPDKCYQFALGQGTTLNNVHSNNTVRDRTPYRTLLMNELGVPFHLGTKQVCIAWSSSSCHDGKAWLHVCITGDDKNATASFIYNGRLVDSVVSWSKEILRTQESECVCINGTCTVVMTDGSASGKADTKILFIEEGRIVHTSTLSGSAQHVEECSCYPRYPGVRCVCRDNWKGSNRPIVDINIKDHSIVSSYVCSGLVGDTPRKNDSSSSSHCLDPNNEEGGHGVKGWAFDDGNDVWMGRTINETSRLGYETFKVIEGWSNPKSKLQINRQVIVDRGDRSGYSGIFSVEGKSCINRCFYVELIRGRKEETEVLWTSNSIVVFCGTSGTYGTGSWPDGADLNLMPI

SEQ ID NO: 24997 - protein, 469 aa, synthetic construct; identical to SEQ ID NO: 22146
  REGION 1..469: note = neuraminidase__InfluenzaA__AHL99156

SEQ ID NO: 24998 - protein, 469 aa, synthetic construct
  REGION 1..469: note = neuraminidase__InfluenzaA__AHL99168
MNPNQKIITIGSVSLTISTICFFMQIAILITTVTLHFKQYEFNSPPNNQVMLCEPTIIERNTTEIVYLTNTTIEKEICPKPAEYRNWSKPQCGITGFAPFSKDNSIRLSAGGDIWVTREPYVSCDPDKCYQFALGQGTTLNNVHSNNTVRDRTPYRTLLMNELGVPFHLGTKQVCIAWSSSSCHDGKAWLHVCITGDDKNATASFIYNGRLVDSVVSWSKEILRTQESECVCINGTCTVVMTDGSASGKADTKILFIEEGKIVHTSTLSGSAQHVEECSCYPRYPGVRCVCRDNWKGSNRPIVDINIKDHSIVSSYVCSGLVGDTPRKNDSSSSSHCLDPNNEEGGHGVKGWAFDDGNDVWMGRTINETSRLGYETFKVIEGWSNPKSKLQINRQVIVDRGDRSGYSGIFSVEGKSCINRCFYVELIRGRKEETEVLWTSNSIVVFCGTSGTYGTGSWPDGADLNLMPI

SEQ ID NO: 24999 - protein, 469 aa, synthetic construct; identical to SEQ ID NO: 22146
  REGION 1..469: note = neuraminidase__InfluenzaA__AHL99180

SEQ ID NO: 25000 - protein, 469 aa, synthetic construct; identical to SEQ ID NO: 23010
  REGION 1..469: note = neuraminidase__InfluenzaA__AHL99204

SEQ ID NO: 25001 - protein, 469 aa, synthetic construct
  REGION 1..469: note = neuraminidase__InfluenzaA__AHL99216
MNPNQKIITIGSVSLTISTICFFMQIAILITTVTLHFKQYEFNSPPNNQVMLCEPTIIERNITEIVYLTNTTVEKEICPKPAEYRNWSKPQCGITGFAPFSKDNSIRLSAGGDIWVTREPYVSCDPDKCYQFALGQGTTLNNVHSNNTVRDRTPYRTLLMNELGVPFHLGTKQVCIAWSSSSCHDGKAWLHVCITGDDKNATASFIYNGRLVDSVVSWSKEILRTQESECVCINGTCTVVMTDGSASGKADTKILFIEEGKIVHTSTLSGSAQHVEECSCYPRYPGVRCVCRDNWKGSNRPIIDINIKDHSIVSSYVCSGLVGDTPRKNDSSSSSHCLDPNNEEGGHGVKGWAFDDGNDVWMGRTINETSRLGYETFKVIEGWSNPKSKLQINRQVIVDRGDRSGYSGIFSVEGKSCINRCFYVELIRGRKKETEVLWTSNSIVVFCGTSGTYGTGSWPDGADLNLMPI

SEQ ID NO: 25002 - protein, 469 aa, synthetic construct; identical to SEQ ID NO: 22146
  REGION 1..469: note = neuraminidase__InfluenzaA__AHL99228

SEQ ID NO: 25003 - protein, 469 aa, synthetic construct; identical to SEQ ID NO: 22146
  REGION 1..469: note = neuraminidase__InfluenzaA__AHL99240

SEQ ID NO: 25004 - protein, 469 aa, synthetic construct; identical to SEQ ID NO: 22146
  REGION 1..469: note = neuraminidase__InfluenzaA__AHL99252

SEQ ID NO: 25005 - protein, 469 aa, synthetic construct; identical to SEQ ID NO: 22146
  REGION 1..469: note = neuraminidase__InfluenzaA__AHL99264

SEQ ID NO: 25006 - protein, 469 aa, synthetic construct; identical to SEQ ID NO: 22146
  REGION 1..469: note = neuraminidase__InfluenzaA__AHL99276

SEQ ID NO: 25007 - protein, 469 aa, synthetic construct; identical to SEQ ID NO: 23883
  REGION 1..469: note = neuraminidase__InfluenzaA__AHL99288

SEQ ID NO: 25008 - protein, 469 aa, synthetic construct; identical to SEQ ID NO: 24786
  REGION 1..469: note = neuraminidase__InfluenzaA__AHL99300

SEQ ID NO: 25009 - protein, 469 aa, synthetic construct; identical to SEQ ID NO: 22146
  REGION 1..469: note = neuraminidase__InfluenzaA__AHL99312

SEQ ID NO: 25010 - protein, 469 aa, synthetic construct
  REGION 1..469: note = neuraminidase__InfluenzaA__AHL99324
MNPNQKIITIGSVSLTISTICFFMQIAILITTVTLHFKQYEFNSPPNNQVILCEPTIIERNITEIVYLTNTTIEKEICPKPAEYRNWSKPQCGITGFAPFSKDNSIRLSAGGDIWVTREPYVSCDPDKCYQFALGQGTTLNNVHSNNTVRDRTPYRTLLMNELGVPFHLGTKQVCIAWSSSSCHDGKAWLHVCITGDDKNATASFIYNGKLVDSVVSWSKEILRTQESECVCINGTCTVVMTDGSASGKADTKILFIEEGKIVHTSTLSGSAQHVEECSCYPRYPGVRCVCRDNWKGSNRPIVDINIKDHSIVSSYVCSGLVGDTPRKNDSSSSSHCLDPNNEEGGHGVKGWAFDDGNDVWMGRTINETSRLGYETFKVIEGWSNPKSKLQINRQVIVDRGDRSGYSGIFSVEGKSCINRCFYVELIRGRKEETEVLWTSNSIVVFCGTSGTYGTGSWPDGADLNLMPI

SEQ ID NO: 25011 - protein, 469 aa, synthetic construct; identical to SEQ ID NO: 23389
  REGION 1..469: note = neuraminidase__InfluenzaA__AHL99348

SEQ ID NO: 25012 - protein, 469 aa, synthetic construct; identical to SEQ ID NO: 23389
  REGION 1..469: note = neuraminidase__InfluenzaA__AHL99359

SEQ ID NO: 25013 - protein, 469 aa, synthetic construct
  REGION 1..469: note = neuraminidase__InfluenzaA__AHL99370
MNPNQKIITIGSVSLTITTICFFMQIAILITTVTLHFKQYEFNSPPNNQMMLCEPTIIERNITEIVYLTNTTIEKEICPKPAEYRNWSKPQCGITGFAPFSKDNSIRLSAGGDIWVTREPYVSCDPDKCYQFALGQGTTLNNVHSNNTVRDRTPYRTLLMNELGVPFHLGTKQVCIAWSSSSCHDGKAWLHVCITGDDKNATASFIYNGRLVDSVVSWSKEILRTQESECVCINGTCTVVMTDGSASGKADTKILFIEEGKIVHTSTLSGSAQHVEECSCYPRYPGVRCVCRDNWKGSNRPIVDINIKDHSIVSSYVCSGLVGDTPRKNDSSSSSHCLDPNNEEGGHGVKGWAFDDGNDVWMGRTINETSRLGYETFKVIEGWSNPKSKLQINRQVIVDRGDRSGYSGIFSVEGKSCINRCFYVELIRGRKEETEVLWTSNSIVVFCGTSGTYGTGSWPDGADLNLMPI

SEQ ID NO: 25014 - protein, 469 aa, synthetic construct; identical to SEQ ID NO: 22146
  REGION 1..469: note = neuraminidase__InfluenzaA__AHL99393

SEQ ID NO: 25015 - protein, 469 aa, synthetic construct; identical to SEQ ID NO: 22146
  REGION 1..469: note = neuraminidase__InfluenzaA__AHL99417

SEQ ID NO: 25016 - protein, 469 aa, synthetic construct; identical to SEQ ID NO: 22146
  REGION 1..469: note = neuraminidase__InfluenzaA__AHL99429

SEQ ID NO: 25017 - protein, 469 aa, synthetic construct; identical to SEQ ID NO: 22146
  REGION 1..469: note = neuraminidase__InfluenzaA__AHL99441

SEQ ID NO: 25018 - protein, 469 aa, synthetic construct; identical to SEQ ID NO: 22146
  REGION 1..469: note = neuraminidase__InfluenzaA__AHL99453

SEQ ID NO: 25019 - protein, 469 aa, synthetic construct; identical to SEQ ID NO: 22146
  REGION 1..469: note = neuraminidase__InfluenzaA__AHL99477

SEQ ID NO: 25020 - protein, 469 aa, synthetic construct; identical to SEQ ID NO: 24786
  REGION 1..469: note = neuraminidase__InfluenzaA__AHL99489

SEQ ID NO: 25021 - protein, 469 aa, synthetic construct
  REGION 1..469: note = neuraminidase__InfluenzaA__AHL99501
MNPNQKIITIGSVSLTISTICFFMQIAILITTVTLHFKQYEFNSPPNNQVMLCEPTIIERNITEIVYLTNTTIEKEICPKPAEYRNWSKPQCGITGFAPFSKDNSIRLSAGGDIWVTREPYVSCDPDKCYQFALGQGTTLNNVHSNNTVRDRTPYRTLLMNELGVPFHLGTKQVCIAWSSSSCHDGKAWLHVCITGDDKNATASFIYNGRLVDSVVSWSKEILRTQESECVCINGTCTVVMTDGSASGKADTKILFIEEGKIVHTSTLSGSAQHVEECSCYPRYPGVRCVCRDNWKGSNRPIVDINIKDHSTVSSYVCSGLVGDTPRKNDSSSSSHCLDPNNEEGGHGVKGWAFDDGNDVWMGRTINETSRLGYETFKVIEGWSNPKSKLQINRQVIVDRGDRSGYSGIFSVEGKSCINRCFYVELIRGRKEETEVLWTSNSIVVFCGTSGTYGTGSWPDGADLNLMPI

SEQ ID NO: 25022 - protein, 469 aa, synthetic construct; identical to SEQ ID NO: 22146
  REGION 1..469: note = neuraminidase__InfluenzaA__AHL99525

SEQ ID NO: 25023 - protein, 469 aa, synthetic construct
  REGION 1..469: note = neuraminidase__InfluenzaA__AHL99537
MNPNQKIITIGSVSLTISTICFFMQIAILITTVTLHFKQYEFNSPPNNQVMLCEPTIIERNITEIVYLTNTTIEKEICPKPAEYRNWSKPQCGITGFAPFSKDNSIRLSAGGDIWVTREPYVSCDPDKCYQFALGQGTTLNNVHSNNTVRDRTSYRTLLMNELGVPFHLGTKQVCIAWSSSSCHDGKAWLHVCITGDDKNATASFIYNGRLVDSVVSWSKEILRTQESECVCINGTCTVVMTDGSASGKADTKILFIEEGKIVHTSTLSGSAQHVEECSCYPRYPGVRCVCRDNWKGSNRPIVDINIKDHSIVSSYVCSGLVGDTPRKNDSSSSSHCLDPNNEEGGHGVKGWAFDDGNDVWMGRTINETSRLGYETFKVIEGWSNPKSKLQINRQVIVDRGDRSGYSGIFSVEGKSCINRCFYVELIRGRKEETEVLWTSNSIVVFCGTSGTYGTGSWPDGADLNLMPI

SEQ ID NO: 25024 - protein, 469 aa, synthetic construct; identical to SEQ ID NO: 23883
  REGION 1..469: note = neuraminidase__InfluenzaA__AHL99549

SEQ ID NO: 25025 - protein, 469 aa, synthetic construct; identical to SEQ ID NO: 22146
  REGION 1..469: note = neuraminidase__InfluenzaA__AHL99561

SEQ ID NO: 25026 - protein, 469 aa, synthetic construct
  REGION 1..469: note = neuraminidase__InfluenzaA__AHL99573
MNPNQKIITIGSVSLTISTICFFMQIAILITTVTLHFKQYEFNSPPNNQVMLCEPTIIERNITEIVYLTNTTGEKEICPKPAEYRNWSKPQCGITGFAPFSKDNSIRLSAGGDIWVTREPYVSCDPDKCYQFALGQGTTLNNVHSNNTVRDRTPYRTLLMNELGVPFHLGTKQVCIAWSSSSCHDGKAWLHVCITGDDKNATASFIYNGRLVDSVVSWSKEILRTQESECVCINGTCTVVMTDGSASGKADTKILFIEEGKIVHTSTLSGSAQHVEECSCYPRYPGVRCVCRDNWKGSNRPIIDINIKDHSIVSSYVCSGLVGDTPRKNDSSSSSHCLDPNNEEGGHGVKGWAFDDGNDVWMGRTINETSRLGYETFKVIEGWSNPKSKLQINRQVIVDKGDRSGYSGIFSVEGKSCINRCFYVELIRGRKEETEVLWTSNSIVVFCGTSGTYGTGSWPDGADLNLMPI

SEQ ID NO: 25027 - protein, 469 aa, synthetic construct
  REGION 1..469: note = neuraminidase__InfluenzaA__AHL99585
MNPNQKIITIGSVSLTISTICFFMQIAILITTVTLHFKQYEFNSPPNNQVMLCEPTIIERNITEIVYLTNTTIEKEICPKPAEYRNWSKPQCGITGFAPFSKDNSIRLSAGGDIWVTREPYVSCDPDKCYQFALGQGTTLNNVHSNNTARDRTPYRTLLMNELGVPFHLGTKQVCIAWSSSSCHDGKAWLHVCITGDDKNATASFIYNGRLVDSVVSWSKEILRTQESECVCINGTCTVVMTDGSASGKADTKILFIEEGKIVHTSTLSGSAQHVEECSCYPRYPGVRCVCRDNWKGSNRPIVDINIKDHSIVSSYVCSGLVGDTPRKNDSSSSSHCLNPNNEEGGHGVKGWAFDDGNDVWMGRTINETSRLGYETFKVIEGWSNPKSKLQINRQVIVDRGDRSGYSGIFSVEGKSCINRCFYVELIRGRKEETEVLWTSNSIVVFCGTSGTYGTGSWPDGADLNLMPI

SEQ ID NO: 25028 - protein, 469 aa, synthetic construct
  REGION 1..469: note = neuraminidase__InfluenzaA__AHL99597
MNPNQKIITIGSVCMTIGMANLILQIGNIISIWISHSIQVGNQSQIETCNQSVITYENNTWVNQTYVNISNTNFAVGQSVVSVKLAGNSSLCPVSGWAIYSKDNSVRIGSKGDVFVIREPFISCSPLECRTFFLTQGALLNDKHSNGTIKDRSPYRTLMSCPIGEVPSPYNSRFESVAWSASACHDGINWLTIGISGPDSGAVAVLKYNGIITDTIKSWRNDILRTQESECACVNGSCFTIMTDGPSDGQASYKIFRIEKGKIVKSVEMNAPNYHYEECSCYPDSSEITCVCRDNWHGSNRPWVSFNQNLEYQIGYICSGIFGDNPRPNDKTGSCGPVSSNGANGVKGFSFKYGNGVWIGRTKSISSRKGFEMIWDPNGWTGTDNNFSIKQDIVGINEWSGYSGSFVQHPELTGLDCIRPCFWVELIRGRPKENTIWTSGSSISFCGVNSDTVGWSWPDGAELPFTIDK

SEQ ID NO: 25029 - protein, 469 aa, synthetic construct
  REGION 1..469: note = neuraminidase__InfluenzaA__AHL99608
MNPNQKIITIGSVSLTISTICVFMQIAILITTVTLHFKQYEFNSPPNNQVMLCEPTIIERNITEIVYLTNTTIEKEICPKPAEYRNWSKPQCGITGFAPFSKDNSIRLSAGGDIWVTREPYVSCDPDKCYQFALGQGTTLNNVHSNNTVRDRTPYRTLLMNELGVPFHLGTKQVCIAWSSSSCHDGKAWLHVCITGDDKNATASFIYNGRLVDSVVSWSKEILRTQESECVCINGTCTVVMTDGSASGKADTKILFIEEGKIVHTSTLSGSAQHVEECSCYPRYPGVRCVCRDNWKGSNRPIVDINIKDHSIVSSYVCSGLVGDTPRKNDSSSSSHCLDPNNEEGGHGVKGWAFDDGNDVWMGRTINETSRLGYETFKVIEGWSNPKSKLQINRQVIVDRGDRSGYSGIFSVEGKSCINRCFYVELIRGRKEETEVLWTSNSIVVFCGTSGTYGTGSWPDGADLNLMPI

SEQ ID NO: 25030 - protein, 469 aa, synthetic construct
  REGION 1..469: note = neuraminidase__InfluenzaA__AHL99620
MNPNQKIITIGSVSLTISTICFFMQIAILITTVTLHFKQYEFNSPPNNQVMLCEPTIIERNITEIVYLTNTTIEKEICPKPAEYRNWSKPQCGITGFAPFSKDNSIRLSAGGDIWVTREPYVSCDPDKCYQFALGQGTTLNNVHSNNTVRDRTPYRTLLMNELGVPFHLGTKQVCIAWSSSSCHDGKAWLHVCITGDDKNATASFIYNGKLVDSVVSWSKEILRTQESECVCINGTCTVVMTDGSASGKADTKILFIEEGKIVHTSTLSGSAQHVEECSCYPRYPGVRCVCRDNWKGSNRPIVDINIKDHSIVSSYVCSGLVGDTPRKNDSSSSSHCLDPNNEEGGHGVKGWAFDDGNDVWMGRTINETSRLGYETFKVIEGWSNPKSKLQINRQVIVDRGDRSGYSGIFSVEGKSCINRCFYVELIRGRKEETEVLWTSNSIVVFCGTSGTYGTGSWPDGADLNLMPI

SEQ ID NO: 25031 - protein, 469 aa, synthetic construct
  REGION 1..469: note = neuraminidase__InfluenzaA__AHL99632
MNPNQKIITIGSVSLTISTICFFMQIAILITTVTLHFKQYEFNSPPNNQVMLCEPTTIERNITEIVYLTNTTIEKEICPKPAEYRNWSKPQCGITGFAPFSKDNSIRLSAGGDIWVTREPYVSCDPDKCYQFALGQGTTLNNVHSNNTVRDRTPYRTLLMNELGVPFHLGTKQVCIAWSSSSCHDGKAWLHVCITGDDKNATASFIYNGRLVDSVVSWSKEILRTQESECVCINGTCTVVMTDGSASGKADTKILFIEEGKIVHTSTLSGSAQHVEECSCYPRYPGVRCVCRDNWKGSNRPIVDINIKDHSIVSSYVCSGLVGDTPRKNDSSSSSHCLDPNNEEGGHGVKGWAFDDGNDVWMGRTINETSRLGYETFKVIEGWSNPKSKLQINRQVIVDRGDRSGYSGIFSVEGKSCINRCFYVELIRGRKEETEVLWTSNSIVVFCGTSGTYGTGSWPDGADLNLMPI

SEQ ID NO: 25032 - protein, 469 aa, synthetic construct; identical to SEQ ID NO: 24821
  REGION 1..469: note = neuraminidase__InfluenzaA__AHL99644

SEQ ID NO: 25033 - protein, 469 aa, synthetic construct
  REGION 1..469: note = neuraminidase__InfluenzaA__AHL99668
MNPNQKIITIGSVSLTISTICFFMQIAILITTVTLHFKQYEFNSPPNNQVMLCEPTIIERNITEIVYLTNTTVEKEICPKPAEYRNWSKPQCGITGFAPFSKDNSIRLSAGGDIWVTREPYVSCDPDKCYQFALGQGTTLNNVHSNNTVRDRTPYRTLLMNELGVPFHLGTKQVCIAWSSSSCHDGKAWLHVCITGDDKNATASFIYNGRLVDSVVSWSKEILRTQESECVCINGTCTVVMTDGSASGKADTKILFIEEGKIVHTSTLSGSAQHVEECSCYPRYPGVRCVCRDNWKGSNRPIIDINIKDHSIVSSYVCSGLVGDTPRKNDSSSSSHCLDPNNEEGGHGVKGWAFDDGNDVWMGRTINETSRLGYETFKVIEGWSNPKSKLQINRQVIVDRGDRSGYSGIFSVEGKSCINRCFYVELIRGRKEETEVLWTSNSIVVFCGTSGTYGTGSWPDGADLNLMPI

SEQ ID NO: 25034 - protein, 469 aa, synthetic construct; identical to SEQ ID NO: 22146
  REGION 1..469: note = neuraminidase__InfluenzaA__AHL99680

SEQ ID NO: 25035 - protein, 469 aa, synthetic construct
  REGION 1..469: note = neuraminidase__InfluenzaA__AHL99692
MNPNQKIITIGSVSLTISTTCFFMQIAILITTVTLHFKQYEFNSPPNNQVMLCEPTIIERNITEIVYLTNTTIEKEICPKPAEYRNWSKPQCGITGFAPFSKDNSIRLSAGGDIWVTREPYVSCDPDKCYQFALGQGTTLNNVHSNNTVRDRTPYRTLLMNELGVPFHLGTKQVCIAWSSSSCHDGKAWLHVCITGDDKNATASFIYNGRLVDSVVSWSKEILRTQESECVCINGTCTVVMTDGSASGKADTKILFIEEGKIVHTSTLSGSAQHVEECSCYPRYPGVRCVCRDNWKGSNRPIVDINIKDHSIVSSYVCSGLVGDTPRKNDSSSSSHCLDPNNEEGGHGVKGWAFDDGNDVWMGRTINETSRLGYETFKVIEGWSNPKSKLQINRQVIVDRGDRSGYSGIFSVEGKSCINRCFYVELIRGRKEETEVLWTSNSIVVFCGTSGTYGTGSWPDGADLNLMPI

SEQ ID NO: 25036 - protein, 469 aa, synthetic construct; identical to SEQ ID NO: 22146
  REGION 1..469: note = neuraminidase__InfluenzaA__AHL99704

SEQ ID NO: 25037 - protein, 469 aa, synthetic construct; identical to SEQ ID NO: 22146
  REGION 1..469: note = neuraminidase__InfluenzaA__AHL99716

SEQ ID NO: 25038 - protein, 469 aa, synthetic construct; identical to SEQ ID NO: 25028
  REGION 1..469: note = neuraminidase__InfluenzaA__AHL99740

SEQ ID NO: 25039 - protein, 469 aa, synthetic construct
  REGION 1..469: note = neuraminidase__InfluenzaA__AHL99751
MNPNQKIITIGSVSLTISTICFFMQIAILITTVTLHFKQYEFNSPPNNQVMLCEPTIIERNITEIVYLTNTTVEKEICPKPAEYRNWSKPQCGITGFAPFSKDNSIRLSAGGDIWVTREPYVSCDPDKCYQFALGQGTTLNNVHSNNTARDRTPYRTLLMNELGVPFHLGTKQVCIAWSSSSCHDGKAWLHVCITGDDKNATASFIYNGRLVDSVVSWSKEILRTQESECVCINGTCTVVMTDGSASGKADTKILFIEEGKIVHTSTLSGSAQHVEECSCYPRYPGVRCVCRDNWKGSNRPIVDINIKDHSIVSSYVCSGLVGDTPRKNDSSSSSHCLNPNNEEGGHGVKGWAFDDGNDVWMGRTINETSRLGYETFKVIEGWSNPKSKLQINRQVIVDRGDRSGYSGIFSVEGKSCINRCFYVELIRGRKEETEVLWTSNSIVVFCGTSGTYGTGSWPDGADLNLMPI

SEQ ID NO: 25040 - protein, 469 aa, synthetic construct
  REGION 1..469: note = neuraminidase__InfluenzaA__AHL99763
MNPNQKIITIGSVSLTISTICFFMQIAILITTVTLHFKQYEFNSPPNNQVMLCEPTIIERNITEIVYLTNTTIEKEICPKPAEYRNWSKPQCGITGFAPFSKDNSIRLSAGGDIWVTREPYVSCDPDKCYQFALGQGTTLNNVHSNNTVRDRTPYRTLLMNELGVPFHLGTKQVCIAWSSSSCHDGKAWLHVCITGDDKNATASFIYNGRLVDSVVSWSKEILRTQESECVCINGTCTVVMTDGSASGKADTKILFIEEGKIVHTSTLSGSAQHVEECSCYPRYPGVRCVCRDNWKGSNRPIVDINIKDHSIVSSYVCSGLVGDTPRKNDSSSSSHCLDPNNEEGGHGVKGWAFDDGNDVWMGRTINETSRLGYETFKVIEGWSNPKSKLQMNRQVIVDRGDRSGYSGIFSVEGKSCINRCFYVELIRGRKEETEVLWTSNSIVVFCGTSGTYGTGSWPDGADLNLMPI

SEQ ID NO: 25041 - protein, 469 aa, synthetic construct; identical to SEQ ID NO: 22146
  REGION 1..469: note = neuraminidase__InfluenzaA__AHL99775

SEQ ID NO: 25042 - protein, 469 aa, synthetic construct
  REGION 1..469: note = neuraminidase__InfluenzaA__AHL99787
MNPNQKIITIGSVSLTISTICFFMQIAILITTVTLHFKQYEFNSPPNNQVMLCEPTIIERNITEIVYLTNTTIEKEICPKPAEYRNWSKPQCGITGFAPFSKDNSIRLSAGGDIWVTREPYVSCDPDKCYQFALGQGTTLNNVHSNNTVRDRTPYRTLLMNELGVPFHLGTKQVCIAWSSSSCHDGKAWLHVCITGDDKNATASFIYNGRLVDSVVSWSKEILRTQESECVCINGTCTVVMTDGSASGKADTKILFIEEGKIVHTSTLSGSAQHVEECSCYPRYPGVRCVCRDNWKGSNRPIVDINIKDHSIVSSYVCSGLVGDTPRKNDSSSSSHCLDPNNEEGGHGVKGWAFDDGNDVWMGRTINETSRLGYETFKVIEGWSNPESKLQINRQVIVDRGDRSGYSGIFSVEGKSCINRCFYVELIRGRKEETEVLWTSNSIVVFCGTSGTYGTGSWPDGADLNLMPI

SEQ ID NO: 25043 - protein, 469 aa, synthetic construct
  REGION 1..469: note = neuraminidase__InfluenzaA__AHL99799
MNPNQKIITIGSVSLTISTICFFMQIAILITTVTLHFKQYEFNSPPNNQVMLCEPTIIERNITEIVYLTNTTIEKEICPKPAEYRNWSKPQCGITGFAPFSKDNSIRLSAGGDIWVTREPYVSCDPDKCYQFALGQGTTLNNVHSNNTVRDRTPYRTLLMNELGVPFHLGTKQVCIAWSSSSCHDGKAWLHVCITGDDKNATASFIYNGRLVDSVVSWSKEILRTQESECVCINGTCTVVMTDGSASGKADTKILFIEEGKIVHTSTLSGSAQHVEECSCYPRYPGVRCICRDNWKGSNRPIVDINIKDHSIVSSYVCSGLVGDTPRKNDSSSSSHCLGPNNEEGGHGVKGWAFDDGNDVWMGRTINETSRLGYETFKVIEGWSNPKSKLQINRQVIVDRGDRSGYSGIFSVEGKSCINRCFYVELIRGRKEETEVLWTSNSIVVFCGTSGTYGTGSWPDGADLNLMPI

SEQ ID NO: 25044 - protein, 469 aa, synthetic construct; identical to SEQ ID NO: 22146
  REGION 1..469: note = neuraminidase__InfluenzaA__AHL99811

SEQ ID NO: 25045 - protein, 469 aa, synthetic construct
  REGION 1..469: note = neuraminidase__InfluenzaA__AHL99823
MNPNQKIITIGSVSLTISTICFFMQIAILITTVTLHFKQYEFNSPPNNQVMLCEPTIIERNITEIVYLTNTTIEKEICPKPAEYRNWSKPQCGITGFAPFSKDNSIRLSAGGDIWVTREPYVSCDPDKCYQFALGQGTTLNNVHSNNTVRDRTPYRTLLMNELGVPFHLGTKQVCIAWSSSSCHDGKAWLHVCITGDDKNATASFIYNGRLVDSVVSWSKEILRTQESECVCINGTCAVVMTDGSASGKADTKILFIEEGKIVHTSTLSGSAQHVEECSCYPRYPGVRCVCRDNWKGSNRPIVDINIKDHSIVSSYVCSGLVGDTPRKNDSSSSSHCLDPNNEEGGHGVKGWAFDDGNDVWMGRTINETSRLGYETFKVIEGWSNPKSKLQINRQVIVDRGDRSGYSGIFSVEGKSCINRCFYVELIRGRKEETEVLWTSNSIVVFCGTSGTYGTGSWPDGADLNLMPI

SEQ ID NO: 25046 - protein, 469 aa, synthetic construct
  REGION 1..469: note = neuraminidase__InfluenzaA__AHL99835
MNPNQKIITIGSVSLTISTICFFMQIAILITTVTLHFKQYEFNSPPNNQVMLCEPTIIERNITEIVYLTNTTIEKEICPKPAEYRNWSKPQCGITGFAPFSKDNSIRLSAGGDIWVTREPYVSCAPDKCYQFALGQGTTLNNVHSNNTVRDRTPYRTLLMNELGVPFHLGTKQVCIAWSSSSCHDGKAWLHVCITGDDKNATASFIYNGRLVDSVVSWSKEILRTQESECVCINGTCTVVMTDGSASGKADTKILFIEEGKIVHTSTLSGSAQHVEECSCYPRYPGVRCVCRDNWKGSNRPIVDINIKDHSIVSSYVCSGLVGDTPRKNDSSSSSHCLDPNNEEGGHGVKGWAFDDGNDVWMGRTINETSRLGYETFKVIEGWSNPKSKLLINRQVIVDRGDRSGYSGIFSVEGKSCINRCFYVELIRGRKEETEVLWTSNSIVVFCGTSGTYGTGSWPDGADLNLMPI

SEQ ID NO: 25047 - protein, 469 aa, synthetic construct; identical to SEQ ID NO: 22146
  REGION 1..469: note = neuraminidase__InfluenzaA__AHL99847

SEQ ID NO: 25048 - protein, 469 aa, synthetic construct; identical to SEQ ID NO: 23375
  REGION 1..469: note = neuraminidase__InfluenzaA__AHL99859

SEQ ID NO: 25049 - protein, 469 aa, synthetic construct
  REGION 1..469: note = neuraminidase__InfluenzaA__AHL99871
MNPNQKIITIGSVSLTISTICFFMQIAILTTTVTLHFKQYEFNSPPNNQVMLCEPTIIERNITEIVYLTNTTIEKEICPKPAEYRNWSKPQCDITGFAPFSKDNSIRLSAGGDIWVTREPYVSCDPDKCYQFALGQGTTLNNVHSNNTVRDRTPYRTLLMNELGVPFHLGTKQVCIAWSSSSCHDGKAWLHVCITGDDKNATASFIYNGRLVDSVVSWSKEILRTQESECVCINGTCTVVMTDGSASGKADTKILFIEEGRIVHTSTLSGSAQHVEECSCYPRYPGVRCVCRDNWKGSNRPIVDINIKDHSIVSRYVCSGLVGDTPRKNDSSSSSHCLDPNNEEGGHGVKGWAFDDGNDVWMGRTINETSRLGYETFKVIEGWSNPKSKLQINRQVIVDRGDRSGYSGIFSVEGKSCINRCFYVELIRGRKEETEVLWTSNSIVVFCGTSGTYGTGSWPDGADLNLMPI

SEQ ID NO: 25050 - protein, 469 aa, synthetic construct; identical to SEQ ID NO: 22146
  REGION 1..469: note = neuraminidase__InfluenzaA__AHL99883

SEQ ID NO: 25051 - protein, 469 aa, synthetic construct; identical to SEQ ID NO: 25027
  REGION 1..469: note = neuraminidase__InfluenzaA__AHL99895

SEQ ID NO: 25052 - protein, 469 aa, synthetic construct; identical to SEQ ID NO: 22146
  REGION 1..469: note = neuraminidase__InfluenzaA__AHL99907

SEQ ID NO: 25053 - protein, 469 aa, synthetic construct; identical to SEQ ID NO: 22146
  REGION 1..469: note = neuraminidase__InfluenzaA__AHL99919

SEQ ID NO: 25054 - protein, 469 aa, synthetic construct
  REGION 1..469: note = neuraminidase__InfluenzaA__AHL99943
MNPNQKIITIGSVSLTISTICFFMQIAILITTVTLHFKQHEFNSPPNNQVMLCEPTIIERNITEIVYLTNTTIEKEICPKPAEYRNWSKPQCGITGFAPFSKDNSIRLSAGGDIWVTREPYVSCDPDKCYQFALGQGTTLNNVHSNNTVRDRTPYRTLLMNELGVPFHLGTKQVCIAWSSSSCHDGKAWLHVCITGDDKNATASFIYNGRLVDSVVSWSKEILRTQESECVCINGTCTVVMTDGSASGKADTKILFIEEGKIVHTSTLSGSAQHVEECSCYPRYPGVRCVCRDNWKGSNRPIVDINIKDHSIVSSYVCSGLVGDTPRKNDSSSSSHCLDPNNEEGGHGVKGWAFDDGNDVWMGRTINETSRLGYETFKVIEGWSNPKSKLQINRQVIVDRGDRSGYSGIFSVEGKSCINRCFYVELIRGRKEETEVLWTSNSIVVFCGTSGTYGTGSWPDGADLNLMPI

SEQ ID NO: 25055 - protein, 469 aa, synthetic construct; identical to SEQ ID NO: 22146
  REGION 1..469: note = neuraminidase__InfluenzaA__AHL99955

SEQ ID NO: 25056 - protein, 469 aa, synthetic construct
  REGION 1..469: note = neuraminidase__InfluenzaA__AHL99967
MNPNQKIITIGSVSLTISTICFFMQIAILITTVTLHFKQYEFNSPPNNQVMLCEPTIIERNITEIVYLTNTTIEKEICPKPAEYRNWSKPQCGITGFAPFSKDNSIRLSAGGDIWVTREPYVSCDPDKCYQFALGQGTTLNNVHSNNTVHDRTPYRTLLMNELGVPFHLGTKQVCIAWSSSSCHDGKAWLHVCITGDDKNATASFIYNGRLVDSVVSWSKEILRTQESECVCINGTCTVVMTDGSASGKADTKILFIEEGKIVHTSTLSGSAQHVEECSCYPRYPGVRCVCRDNWKGSNRPIVDINMKDHSIVSSYVCSGLVGDTPRKNDSSSSSHCLDPNNEEGGHGVKGWAFDDGNDVWMGRTINETSRLGYETFKVIEGWSNPKSKLQINRQVIVDRGDRSGYSGIFSVEGKSCINRCFYVELIRGRKEETEVLWTSNSIVVFCGTSGTYGTGSWPDGADLNLMPI

SEQ ID NO: 25057 - protein, 469 aa, synthetic construct
  REGION 1..469: note = neuraminidase__InfluenzaA__AHL99979
MNPNQKIITIGSVSLTISTICFFMQIAILITTVALHFKQHEFNSPPNNQVMLCEPTIIERNITEIVYLTNTTIEKEICPKPAEYRNWSKPQCGITGFAPFSKDNSIRLSAGGDIWVTREPYVSCDPDKCYQFALGQGTTLNNVHSNNTVRDRTPYRTLLMNELGVPFHLGTKQVCIAWSSSSCHDGKAWLHVCITGDDKNATASFIYNGRLVDSVVSWSKEILRTQESECVCINGTCTVVMTDGSASGKADTKILFIEEGKIVHTSTLSGSAQHVEECSCYPRYPGVRCVCRDNWKGSNRPIVDINIKDHSIVSSYVCSGLVGDTPRKNDSSSSSHCLDPNNEEGGHGVKGWAFDDGNDVWMGRTINETSRLGYETFKVIEGWSNPKSKLQINRQVIVDRGDRSGYSGIFSVEGKSCINRCFYVELIRGRKEETEVLWTSNSIVVFCGTSGTYGTGSWPDGADLNLMPI

SEQ ID NO: 25058 - protein, 469 aa, synthetic construct; identical to SEQ ID NO: 25054
  REGION 1..469: note = neuraminidase__InfluenzaA__AHL99991

SEQ ID NO: 25059 - protein, 469 aa, synthetic construct; identical to SEQ ID NO: 22146
  REGION 1..469: note = neuraminidase__InfluenzaA__AHM00004

SEQ ID NO: 25060 - protein, 469 aa, synthetic construct; identical to SEQ ID NO: 22146
  REGION 1..469: note = neuraminidase__InfluenzaA__AHM00016

SEQ ID NO: 25061 - protein, 469 aa, synthetic construct; identical to SEQ ID NO: 22146
  REGION 1..469: note = neuraminidase__InfluenzaA__AHM00028

SEQ ID NO: 25062 - protein, 469 aa, synthetic construct; identical to SEQ ID NO: 25054
  REGION 1..469: note = neuraminidase__InfluenzaA__AHM00040

SEQ ID NO: 25063 - protein, 469 aa, synthetic construct; identical to SEQ ID NO: 22146
  REGION 1..469: note = neuraminidase__InfluenzaA__AHM00052

SEQ ID NO: 25064 - protein, 469 aa, synthetic construct; identical to SEQ ID NO: 23010
  REGION 1..469: note = neuraminidase__InfluenzaA__AHM00064

SEQ ID NO: 25065 - protein, 469 aa, synthetic construct; identical to SEQ ID NO: 22146
  REGION 1..469: note = neuraminidase__InfluenzaA__AHM00076

SEQ ID NO: 25066 - protein, 469 aa, synthetic construct; identical to SEQ ID NO: 22146
  REGION 1..469: note = neuraminidase__InfluenzaA__AHM00088

SEQ ID NO: 25067 - protein, 469 aa, synthetic construct
  REGION 1..469: note = neuraminidase__InfluenzaA__AHM00100
MNPNQKIITIGSICMTIGMANLILQIGNIISIWISHSIQLGNQSQIETCNQSVITYENNTWVNQTYVNISNTNFAAGQSVVSVKLAGNSSLCPVSGWAIYSKDNSIRIGSKGDVFVIREPFISCSPLECRTFFLTQGALLNDKHSNGTIKDRSPYRTLMSCPIGEVPSPYNSRFESVAWSASACHDGINWLTIGISGPDNGAVAVLKYNGVITDTIKSWRNNILRTQESECACVNGSCFTIMTDGPSDGQASYKIFRIEKGKIVKSVEMNAPNYHYEECSCYPDSSEITCVCRDNWHGSNRPWVSFNQNLEYQIGYICSGIFGDNPRPNDKTGSCGPVSSNGANGVKGFSFKYGNGVWIGRTKSISSRKGFEMIWDPNGWTGTDNNFSTKQDIVGINEWSGYSGSFVQHPELTGLDCIRPCFWVELIRGRPKENTIWTSGSSISFCGVNSDTVGWSWPDGAELPFTIDN

SEQ ID NO: 25068 - protein, 469 aa, synthetic construct; identical to SEQ ID NO: 24990
  REGION 1..469: note = neuraminidase__InfluenzaA__AHM00111

SEQ ID NO: 25069 - protein, 469 aa, synthetic construct; identical to SEQ ID NO: 25054
  REGION 1..469: note = neuraminidase__InfluenzaA__AHM00123

SEQ ID NO: 25070 - protein, 469 aa, synthetic construct; identical to SEQ ID NO: 23375
  REGION 1..469: note = neuraminidase__InfluenzaA__AHM00135

SEQ ID NO: 25071 - protein, 469 aa, synthetic construct; identical to SEQ ID NO: 23883
  REGION 1..469: note = neuraminidase__InfluenzaA__AHM00147

SEQ ID NO: 25072 - protein, 469 aa, synthetic construct; identical to SEQ ID NO: 25054
  REGION 1..469: note = neuraminidase__InfluenzaA__AHM00159

SEQ ID NO: 25073 - protein, 469 aa, synthetic construct; identical to SEQ ID NO: 22146
  REGION 1..469: note = neuraminidase__InfluenzaA__AHM00171

SEQ ID NO: 25074 - protein, 469 aa, synthetic construct; identical to SEQ ID NO: 22146
  REGION 1..469: note = neuraminidase__InfluenzaA__AHM00183

SEQ ID NO: 25075 - protein, 469 aa, synthetic construct
  REGION 1..469: note = neuraminidase__InfluenzaA__AHM00195
MNPNQKIITIGSVSLTISTICFFMQIAILITTVTLHFKQYEFNSPPNNQVMLCEPTIIERNITEIVYLTNTTIEKEICPKPAEYRNWSKPQCDITGFAPFSKDNSIRLSAGGDIWVTREPYVSCDPDKCYQFALGQGTTLNNVHSNNTVRDRTPYRTLLMNELGVPFHLGTKQVCIAWSSSSCHDGKAWLHVCITGDDKNATASFIYNGRLVDSVVSWSKEILRTQESECVCINGTCTVVMTDGSASGKADTKVLFIEEGKIVHTSTLSGSAQHVEECSCYPRYPGVRCVCRDNWKGSNRPIVDINIKDHSIVSRYVCSGLVGDTPRKNDSSSSSHCLDPNNEEGGHGVKGWAFDDGNDVWMGRTINETSRLGYETFKVIEGWSNPKSKLQINRQVIVDRGDRSGYSGIFSVEGKSCINRCFYVELIRGRKEETEVLWTSNSIVVFCGTSGTYGTGSWPDGADLNLMPI

SEQ ID NO: 25076 - protein, 469 aa, synthetic construct
  REGION 1..469: note = neuraminidase__InfluenzaA__AHM00207
MNPNQKIITIGSVSLTISTICFFMQIAILITTVTLHFKQHEFNSPPNNQVMLCEPTIIERNITEIVYLTNTTIEKEICPKPAEYRNWSKPQCGITGFAPFSKDNSIRLSAGGNIWVTREPYVSCDPDKCYQFALGQGTTLNNVHSNNTVRDRTPYRTLLMNELGVPFHLGTKQVCIAWSSSSCHDGKAWLHVCITGDDKNATASFIYNGRLVDSVVSWSKEILRTQESECVCINGTCTVVMTDGSASGKADTKILFIEEGKIVHTSTLSGSAQHVEECSCYPRYPGVRCVCRDNWKGSNRPIVDINIKDHSIVSSYVCSGLVGDTPRKNDSSSSSHCLDPNNEEGGHGVKGWAFDDGNDVWMGRTINETSRLGYETFKVIEGWSNPKSKLQINRQVIVDRGDRSGYSGIFSVEGKSCINRCFYVELIRGRKEETEVLWTSNSIVVFCGTSGTYGTGSWPDGADLNLMPI

SEQ ID NO: 25077 - protein, 469 aa, synthetic construct; identical to SEQ ID NO: 25054
  REGION 1..469: note = neuraminidase__InfluenzaA__AHM00219

SEQ ID NO: 25078 - protein, 469 aa, synthetic construct; identical to SEQ ID NO: 22146
  REGION 1..469: note = neuraminidase__InfluenzaA__AHM00231

SEQ ID NO: 25079 - protein, 469 aa, synthetic construct; identical to SEQ ID NO: 22146
  REGION 1..469: note = neuraminidase__InfluenzaA__AHM00243

SEQ ID NO: 25080 - protein, 469 aa, synthetic construct; identical to SEQ ID NO: 22146
  REGION 1..469: note = neuraminidase__InfluenzaA__AHM00255

SEQ ID NO: 25081 - protein, 469 aa, synthetic construct
  REGION 1..469: note = neuraminidase__InfluenzaA__AHM00267
MNPNQKIITIGSVSLTISTICFFMQIAILITTVTLHFKQYEFNSPPNNQVMLCEPTIIERNITEIVYLTNTTIEKEICPKPAEYRNWSKPQCGITGFAPFSKDNSIRLSAGGDIWVTREPYVSCDPDKCYQFALGQGTTLNNVHSNNTVRDRTPYRTLLMNELGVPFHLGTKQVCIAWSSSSCHDGKAWLHVCITGDDKNATASFIYNGRLVDSVASWSKEILRTQESECVCINGTCTVVMTDGSASGKADTKILFIEEGKIVHTSTLSGSAQHVEECSCYPRYPGVRCVCRDNWKGSNRPIVDINIKDHSIVSSYVCSGLVGDTPRKNDSSSSSHCLDPNNEEGGHGVKGWAFDDGNDVWMGRTINETSRLGYETFKVIEGWSNPKSKLQINRQVIVDRGDRSGYSGIFSVEGKSCINRCFYVELIRGRKEETEVLWTSNSIVVFCGTSGTYGTGSWPDGADLNLMPI

SEQ ID NO: 25082 - protein, 469 aa, synthetic construct; identical to SEQ ID NO: 23375
  REGION 1..469: note = neuraminidase__InfluenzaA__AHM00279

SEQ ID NO: 25083 - protein, 469 aa, synthetic construct; identical to SEQ ID NO: 22146
  REGION 1..469: note = neuraminidase__InfluenzaA__AHM00291

SEQ ID NO: 25084 - protein, 469 aa, synthetic construct; identical to SEQ ID NO: 22146
  REGION 1..469: note = neuraminidase__InfluenzaA__AHM00303

SEQ ID NO: 25085 - protein, 469 aa, synthetic construct; identical to SEQ ID NO: 22146
  REGION 1..469: note = neuraminidase__InfluenzaA__AHM00315

SEQ ID NO: 25086 - protein, 469 aa, synthetic construct; identical to SEQ ID NO: 23375
  REGION 1..469: note = neuraminidase__InfluenzaA__AHM00327

SEQ ID NO: 25087 - protein, 469 aa, synthetic construct; identical to SEQ ID NO: 23375
  REGION 1..469: note = neuraminidase__InfluenzaA__AHM00339

SEQ ID NO: 25088 - protein, 469 aa, synthetic construct; identical to SEQ ID NO: 25054
  REGION 1..469: note = neuraminidase__InfluenzaA__AHM00351

SEQ ID NO: 25089 - protein, 469 aa, synthetic construct; identical to SEQ ID NO: 24990
  REGION 1..469: note = neuraminidase__InfluenzaA__AHM00363

SEQ ID NO: 25090 - protein, 469 aa, synthetic construct
  REGION 1..469: note = neuraminidase__InfluenzaA__AHM00375
MNPNQKIITIGSVSLTISTICFFMQIAILITTVTLHFKQHEFNSPPNNQVMLCEPTIIERNITEIVYLTNTTIEKEVCPKPAEYRNWSKPQCGITGFAPFSKDNSIRLSAGGDIWVTREPYVSCDPDKCYQFALGQGTTLNNVHSNNTVRDRTPYRTLLMNELGVPFHLGTKQVCIAWSSSSCHDGKAWLHVCITGDDKNATASFIYNGRLVDSVVSWSKEILRTQESECVCINGTCTVVMTDGSASGKADTKILFIEEGKIVHTSTLSGSAQHVEECSCYPRYPGVRCVCRDNWKGSNRPIVDINIKDHSIVSSYVCSGLVGDTPRKNDSSSSSHCLDPNNEEGGHGVKGWAFDDGNDVWMGRTINETSRLGYETFKVIEGWSNPKSKLQINRQVIVDRGDRSGYSGIFSVEGKSCINRCFYVELIRGRKEETEVLWTSNSIVVFCGTSGTYGTGSWPDGADLNLMPI

SEQ ID NO: 25091 - protein, 469 aa, synthetic construct
  REGION 1..469: note = neuraminidase__InfluenzaA__AHM00398
MNPNQKIITIGSVSLTISTICFFMQIAILITTVTLHFKQHEFNSPPNNQVMLCEPTIIERNITEIVYLTNTTIEKEICPKPAEYRNWSKPQCGITGFAPFSKENSIRLSAGGDIWVTREPYVSCDPDKCYQFALGQGTTLNNVHSNNTVRDRTPYRTLLMNELGVPFHLGTKQVCIAWSSSSCHDGKAWLHVCITGDDKNATASFIYNGRLVDSVVSWSKEILRTQESECVCINGTCTVVMTDGSASGKADTKILFIEEGKIVHTSTLSGSAQHVEECSCYPRYPGVRCVCRDNWKGSNRPIVDINIKDHSIVSSYVCSGLVGDTPRKNDSSSSSHCLDPNNEEGGHGVKGWAFDDGNDVWMGRTINETSRLGYETFKVIEGWSNPKSKLQINRQVIVDRGDRSGYSGIFSVEGKSCINRCFYVELIRGRKEETEVLWTSSSIVVFCGTSGTYGTGSWPDGADLNLMPI

SEQ ID NO: 25092 - protein, 469 aa, synthetic construct; identical to SEQ ID NO: 22146
  REGION 1..469: note = neuraminidase__InfluenzaA__AHM00410

SEQ ID NO: 25093 - protein, 469 aa, synthetic construct
  REGION 1..469: note = neuraminidase__InfluenzaA__AHM00422
MNPNQKIITIGSVSLTISTICFFMQIAILVTTVTLHFKQYEFNSPPNNQVMLCEPTIIERNITEIVYLTNTTIEKEICPKPAEYRNWSKPQCGITGFAPFSKDNSIRLSAGGDIWVTREPYVSCDPDKCYQFALGQGTTLNNVHSNNTVRDRTPYRTLLMNELGVPFHLGTKQVCIAWSSSSCHDGKAWLHVCITGDDKNATASFIYNGRLVDSVVSWSKEILRTQESECVCINGTCTVVMTDGSASGKADTKILFIEEGKIVHTSTLSGSAQHVEECSCYPRYPGVRCVCRDNWKGSNRPIVDINIKDHSIVSSYVCSGLVGDTPRKNDSSSSSHCLDPNNEEGGHGVKGWAFDDGNDVWMGRTINETSRLGYETFKVIEGWSNPKSKLQINRQVIVDRGDRSGYSGIFSVEGKSCINRCFYVELIRGRKEETEVLWTSNSIVVFCGTSGTYGTGSWPDGADLNLMPI

SEQ ID NO: 25094 - protein, 469 aa, synthetic construct
  REGION 1..469: note = neuraminidase__InfluenzaA__AHM00434
MNPNQKIITIGSVSLTISTICFFMQIAILITTVTLHFKQYEFNPPPNNQVMLCEPTIIERNITEIVYLTNTTIEKEICPKPAEYRNWSKPQCGITGFAPFSKDNSIRLSAGGDIWVTREPYVSCDPDKCYQFALGQGTTLNNVHSNNTVRDRTPYRTLLMNELGVPFHLGTKQVCIAWSSSSCHDGKAWLHVCITGDDKNATASFIYNGRLVDSVVSWSKEILRTQESECVCINGTCTVVMTDGSASGKADTKILFIEEGKIVHTSTLSGSAQHVEECSCYPRYPGVRCVCRDNWKGSNRPIVDINIKDHSIVSSYVCSGLVGDTPRKNDSSSSSHCLDPNNEEGGHGVKGWAFDDGNDVWMGRTINETSRLGYETFKVIEGWSNPKSKLQINRQVIVDRGDRSGYSGIFSVEGKSCINRCFYVELIRGRKEETEVLWTSNSIVVFCGTSGTYGTGSWPDGADLNLMPI

SEQ ID NO: 25095 - protein, 469 aa, synthetic construct; identical to SEQ ID NO: 22146
  REGION 1..469: note = neuraminidase__InfluenzaA__AHM00446

SEQ ID NO: 25096 - protein, 469 aa, synthetic construct; identical to SEQ ID NO: 25054
  REGION 1..469: note = neuraminidase__InfluenzaA__AHM00458

SEQ ID NO: 25097 - protein, 469 aa, synthetic construct; identical to SEQ ID NO: 25054
  REGION 1..469: note = neuraminidase__InfluenzaA__AHM00470

SEQ ID NO: 25098 - protein, 469 aa, synthetic construct; identical to SEQ ID NO: 25054
  REGION 1..469: note = neuraminidase__InfluenzaA__AHM00482

SEQ ID NO: 25099 - protein, 469 aa, synthetic construct; identical to SEQ ID NO: 25054
  REGION 1..469: note = neuraminidase__InfluenzaA__AHM00494

SEQ ID NO: 25100 - protein, 469 aa, synthetic construct
  REGION 1..469: note = neuraminidase__InfluenzaA__AHM00506
MNPNQKIITIGSVSLTISTICFFMQIAILITTVTLHFKQYEFNSPPNNQVMLCEPTIIERNITEIVYLTNTTIEKEICPKPAEYRNWSKPQCGITGFAPFSKDNSIRLSAGGDIWVTREPYVSCDPDKCYQFALGQGTTLNNVHSNNTVRDRTPYRTLLMNELGVPFHLGTKQVCIAWSSSSCHDGKAWLHVCITGDDKNATASFIYNGRLVDSVVSWSKEILRTQESECVCINGTCTVVMTDGSASGKADTKILFIEEGKIVHTSTLSGSAQHVEECSCYPRYPGVRCVCRDNWKGSNRPIVDINIKDHSIVSSYVCSGLVGDTPRKNDSSSSSHCLDPNNEEGGHGVKGWAFDDGNDVWMGRTINETSRLGYETFKVIEGWSNPKSKLQINRQVIVNRGDRSGYSGIFSVEGKSCINRCFYVELIRGRKEETEVLWTSNSIVVFCGTSGTYGTGSWPDGADLNLMPI

SEQ ID NO: 25101 - protein, 469 aa, synthetic construct; identical to SEQ ID NO: 22146
  REGION 1..469: note = neuraminidase__InfluenzaA__AHM00518

SEQ ID NO: 25102 - protein, 469 aa, synthetic construct
  REGION 1..469: note = neuraminidase__InfluenzaA__AHM00530
MNPNQKIITIGSVSLTISTICFSMQIAILITTVTLHFKQYEFNPPPNNQVMLCEPTIIERNITEIVYLTNTTIEKEICPKPAEYRNWSKPQCGITGFAPFSKDNSIRLSAGGDIWVTREPYVSCDPDKCYQFALGQGTTLNNVHSNNTVRDRTPYRTLLMNELGVPFHLGTKQVCIAWSSSSCHDGKAWLHVCITGDDKNATASFIYNGRLVDSVVSWSKEILRTQESECVCINGTCTVVMTDGSASGKADTKILFIEEGKIVHTSTLSGSAQHVEECSCYPRYPGVRCVCRDNWKGSNRPIVDINIKDHSIVSSYVCSGLVGDTPRKNDSSSSSHCLDPNNEEGGHGVKGWAFDDGNDVWMGRTINETSRLGYETFKVIEGWSNPKSKLQINRQVIVDRGDRSGYSGIFSVEGKSCINRCFYVELIRGRKEETEVLWTSNSIVVFCGTSGTYGTGSWPDGADLNLMPI

SEQ ID NO: 25103 - protein, 469 aa, synthetic construct; identical to SEQ ID NO: 23375
  REGION 1..469: note = neuraminidase__InfluenzaA__AHM00542

SEQ ID NO: 25104 - protein, 469 aa, synthetic construct
  REGION 1..469: note = neuraminidase__InfluenzaA__AHM00546
MNPNQKIITIGSVSLTISTICFFMQIAILITTVTLHFKQYEFNSPPNNQVMLCEPTIIERNITEIVYLTNTTIEKEICPKPAEYRNWSKPQCDITGFAPFSKDNSIRLSAGGDIWVTREPYVSCDPDKCYQFALGQGTTLNNVHSNNTVRDRTPYRTLLMNELGVPFHLGTKQVCIAWSSSSCHDGKAWLHVCITGDDKNATASFIYNGRLVDSVVSWSKEILRTQESECVCINGTCTVVMTDGSASGKADTKILFIEEGKIVHTSTLSGSAQHVEECSCYPRYPGVRCVCRDNWKGSNRPIVDINIKDHSIVSKYVCSGLVGDTPRKNDSSSSSHCLDPNNEEGGHGVKGWAFDDGNDVWMGRTINETSRLGYETFKVIEGWSNPKSKLQINRQVIVDRGDRSGYSGIFSVEGKSCINRCFYVELIRGRKEETEVLWTSNSIVVFCGTSGTYGTGSWPDGADLNLMPI

SEQ ID NO: 25105 - protein, 469 aa, synthetic construct
  REGION 1..469: note = neuraminidase__InfluenzaA__AHM00558
MNPNQKIITIGSVSLTISTICFFMQIAILITTVTLHFKQYEFNSPPNNQVMLCEPTIIERNITEIVYLTNTTIEKEVCPKPAEYRNWSKPQCGITGFAPFSKDNSIRLSAGGDIWVTREPYVSCDPDKCYQFALGQGTTLNNVHSNNTVRDRTPYRTLLMNELGVPFHLGTKQVCIAWSSSSCHDGKAWLHVCITGDDKNATASFIYNGRLVDSVVSWSKEILRTQESECVCINGTCTVVMTDGSASGKADTKILFIEEGKIVHTSTLSGSAQHVEECSCYPRYPGVRCVCRDNWKGSNRPIVDINIKDHSIVSSYVCSGLVGDTPRKNDSSSSSHCLDPNNEEGGHGVKGWAFDDGNDVWMGRTINETSRLGYETFKVIEGWSNPKSKLQINRQVIVDRGDRSGYSGIFSVEGKSCINRCFYVELIRGRKEETEVLWTSNSIVVFCGTSGTYGTGSWPDGADLNLMPI

SEQ ID NO: 25106 - protein, 469 aa, synthetic construct; identical to SEQ ID NO: 22146
  REGION 1..469: note = neuraminidase__InfluenzaA__AHM00570

SEQ ID NO: 25107 - protein, 469 aa, synthetic construct; identical to SEQ ID NO: 22146
  REGION 1..469: note = neuraminidase__InfluenzaA__AHM00582

SEQ ID NO: 25108 - protein, 469 aa, synthetic construct
  REGION 1..469: note = neuraminidase__InfluenzaA__AHM00594
MNPNQKIITIGSVSLTISTICFFMQIAILITTVTLHFKQHEFNSPPNNQVMLCEPTIIERNITEIVHLTNTTIEKEICPKPAEYRNWSKPQCGITGFAPFSKDNSIRLSAGGDIWVTREPYVSCDPDKCYQFALGQGTTLNNVHSNNTVRDRTPYRTLLMNELGVPFHLGTKQVCIAWSSSSCHDGKAWLHVCITGDDKNATASFIYNGRLVDSVVSWSKEILRTQESECVCINGTCTVVMTDGSASGKADTKILFIEEGKIVHTSTLSGSAQHVEECSCYPRYPGVRCVCRDNWKGSNRPIVDINIKDHSIVSSYVCSGLVGDTPRKNDSSSSSHCLDPNNEEGGHGVKGWAFDDGNDVWMGRTINETSRLGYETFKVIEGWSNPKSKLQINRQVIVDRGDRSGYSGIFSVEGKSCINRCFYVELIRGRKEETEVLWTSNSIVVFCGTSGTYGTGSWPDGADLNLMPI

SEQ ID NO: 25109 - protein, 469 aa, synthetic construct; identical to SEQ ID NO: 22146
  REGION 1..469: note = neuraminidase__InfluenzaA__AHM00606

SEQ ID NO: 25110 - protein, 469 aa, synthetic construct; identical to SEQ ID NO: 22146
  REGION 1..469: note = neuraminidase__InfluenzaA__AHM00618

SEQ ID NO: 25111 - protein, 469 aa, synthetic construct; identical to SEQ ID NO: 22146
  REGION 1..469: note = neuraminidase__InfluenzaA__AHM00630

SEQ ID NO: 25112 - protein, 469 aa, synthetic construct; identical to SEQ ID NO: 22146
  REGION 1..469: note = neuraminidase__InfluenzaA__AHM00642

SEQ ID NO: 25113 - protein, 469 aa, synthetic construct; identical to SEQ ID NO: 23375
  REGION 1..469: note = neuraminidase__InfluenzaA__AHM00654

SEQ ID NO: 25114 - protein, 469 aa, synthetic construct; identical to SEQ ID NO: 22146
  REGION 1..469: note = neuraminidase__InfluenzaA__AHM00666

SEQ ID NO: 25115 - protein, 469 aa, synthetic construct; identical to SEQ ID NO: 25054
  REGION 1..469: note = neuraminidase__InfluenzaA__AHM00678

SEQ ID NO: 25116 - protein, 469 aa, synthetic construct; identical to SEQ ID NO: 23389
  REGION 1..469: note = neuraminidase__InfluenzaA__AHM00690

SEQ ID NO: 25117 - protein, 469 aa, synthetic construct; identical to SEQ ID NO: 23375
  REGION 1..469: note = neuraminidase__InfluenzaA__AHM00701

SEQ ID NO: 25118 - protein, 469 aa, synthetic construct
  REGION 1..469: note = neuraminidase__InfluenzaA__AHM00713
MNPNQKIITIGSVSLTISTICFFMQIAILITTVTLHFKQYEFNSPPNNQVMLCEPTIIERNITEIVYLTNTTIEKEICPKSAEYRNWSKPQCGITGFAPFSKDNSIRLSAGGDIWVTREPYVSCDPDKCYQFALGQGTTLNNVHSNNTVRDRTPYRTLLMNELGVPFHLGTKQVCIAWSSSSCHDGKAWLHVCITGDDKNATASFIYNGRLVDSVVSWSKEILRTQESECVCINGTCTVVMTDGSASGKADTKILFIEEGKIVHTSTLSGSAQHVEECSCYPRYPGVRCVCRDNWKGSNRPIVDINIKDHSIVSSYVCSGLVGDTPRKNDSSSSSHCLDPNNEEGGHGVKGWAFDDGNDVWMGRTINETSRLGYETFKVIEGWSNPKSKLQINRQVIVDRGDRSGYSGIFSVEGKSCINRCFYVELIRGRKEETEVLWTSNSIVVFCGTSGTYGTGSWPDGADLNLMPI

SEQ ID NO: 25119 - protein, 469 aa, synthetic construct; identical to SEQ ID NO: 22146
  REGION 1..469: note = neuraminidase__InfluenzaA__AHM00725

SEQ ID NO: 25120 - protein, 469 aa, synthetic construct; identical to SEQ ID NO: 22146
  REGION 1..469: note = neuraminidase__InfluenzaA__AHM00737

SEQ ID NO: 25121 - protein, 469 aa, synthetic construct; identical to SEQ ID NO: 25054
  REGION 1..469: note = neuraminidase__InfluenzaA__AHM00749

SEQ ID NO: 25122 - protein, 469 aa, synthetic construct; identical to SEQ ID NO: 22146
  REGION 1..469: note = neuraminidase__InfluenzaA__AHM00761

SEQ ID NO: 25123 - protein, 469 aa, synthetic construct; identical to SEQ ID NO: 23375
  REGION 1..469: note = neuraminidase__InfluenzaA__AHM00785

SEQ ID NO: 25124 - protein, 469 aa, synthetic construct; identical to SEQ ID NO: 23010
  REGION 1..469: note = neuraminidase__InfluenzaA__AHM00797

SEQ ID NO: 25125 - protein, 469 aa, synthetic construct
  REGION 1..469: note = neuraminidase__InfluenzaA__AHM00809
MNPNQKIITIGSVSLTISTICFFIQIAILITTVTLHFKQYEFNSPPNNQVMLCEPTIIERNITEIVYLTNTTIEKEICPKPAEYRNWSKPQCDITGFAPFSKDNSIRLSAGGDIWVTREPYVSCDPDKCYQFALGQGTTLNNMHSNNTVRDRTPYRTLLMNELGVPFHLGTKQVCIAWSSSSCHDGKAWLHVCITGDDKNATASFIYNGRLVDSVVSWSKEILRTQESECVCINGTCTVVMTDGSASGKADTKILFIEEGKIVHTSTLSGSAQHVEECSCYPRYPGVRCVCRDNWKGSNRPIVDINIKDHSIVSSYVCSGLVGDTPRKNDSSSSSHCLDPNNEEGGHGVKGWAFDDGNDVWMGRTINETSRLGYETFKVIEGWSNPKSKLQINRQVIVDRGDRSGYSGIFSVEGKSCINRCFYVELIRGRKEETEVLWTSNSIVVFCGTSGTYGTGSWPDGADLNLMPI

SEQ ID NO: 25126 - protein, 469 aa, synthetic construct; identical to SEQ ID NO: 25054
  REGION 1..469: note = neuraminidase__InfluenzaA__AHM00821

SEQ ID NO: 25127 - protein, 469 aa, synthetic construct; identical to SEQ ID NO: 25054
  REGION 1..469: note = neuraminidase__InfluenzaA__AHM00833

SEQ ID NO: 25128 - protein, 469 aa, synthetic construct; identical to SEQ ID NO: 23010
  REGION 1..469: note = neuraminidase__InfluenzaA__AHM00845

SEQ ID NO: 25129 - protein, 469 aa, synthetic construct; identical to SEQ ID NO: 22146
  REGION 1..469: note = neuraminidase__InfluenzaA__AHM00857

SEQ ID NO: 25130 - protein, 469 aa, synthetic construct; identical to SEQ ID NO: 22146
  REGION 1..469: note = neuraminidase__InfluenzaA__AHM00869

SEQ ID NO: 25131 - protein, 469 aa, synthetic construct; identical to SEQ ID NO: 22146
  REGION 1..469: note = neuraminidase__InfluenzaA__AHM00881

SEQ ID NO: 25132 - protein, 469 aa, synthetic construct; identical to SEQ ID NO: 23375
  REGION 1..469: note = neuraminidase__InfluenzaA__AHM00893

SEQ ID NO: 25133 - protein, 469 aa, synthetic construct
  REGION 1..469: note = neuraminidase__InfluenzaA__AHM00905
MNPNQKIITIGSVSLTISTICFFMQIAILITTVTLHFKQYEFNSPPNNQVMLCEPTIIERNITEIVYLTNTTIEKEICPKPAEYRNWSKPQCGITGFAPFSKDNSIRLSAGGDIWVTREPYVSCDPDKCYQFALGQGTTLNNVHSNNTVRDRTPYRTLLMNELGVPFHLGTKQVCIAWSSSSCHDGKAWLHVCITGDDKNATASFIYNGRLVDSVVSWSKEILRTQESECVCINGTCTVVMTDGSASGKADTKILFIEEGKIVHTSTLSGSAQHVEECSCYPRYPGVRCVCRDNWKGSNRPIVDINIKDHSIVSSYVCSGLVGDTPRKTDSSSSGHCLDPNNEEGGHGVKGWAFDDGNDVWMGRTINETSRLGYETFKVIEGWSNPKSKLQINRQVIVDRGDRSGYSGIFSVEGKSCINRCFYVELIRGRKEETEVLWTSNSIVVFCGTSGTYGTGSWPDGADLNLMPI

SEQ ID NO: 25134 - protein, 469 aa, synthetic construct
  REGION 1..469: note = neuraminidase__InfluenzaA__AHM00917
MNPNQKIITIGSVSLTISTICFFMQIAILITTVTLHFKQYEFNSPPNNQVMLCEPTIIERNITEIVYLTNTTIEKEICPKPAEYRNWSKPQCGITGFAPFSKDNSIRLSAGGDIWVTREPYVSCDPDKCYQFALGQGTTLNNVHSNNTVRDRTPYRTLLMNELGVPFHLGTKQVCIAWSSSSCHDGKAWLHVCITGDDKNATASFIYNGRLVDSVVSWSKEILRTQESECVCINGTCTVVMTDGSASGKADTKILFIEEGKIVHTSTLSGSAQHVEECSCYPRYPGVRCVCRDNWKGSNRPIVDINIKDHSIVSSYVCSGLVGDTPRKNDSSSSSHCLDPNNEEGGHGVKGWAFDDGNDIWMGRTINETSRLGYETFKVIEGWSNPKSKLQINRQVIVDRGDRSGYSGIFSVEGKSCINRCFYVELIRGRKEETEVLWTSNSIVVFCGTSGTYGTGSWPDGADLNLMPI

SEQ ID NO: 25135 - protein, 469 aa, synthetic construct; identical to SEQ ID NO: 22146
  REGION 1..469: note = neuraminidase__InfluenzaA__AHM00929

SEQ ID NO: 25136 - protein, 469 aa, synthetic construct
  REGION 1..469: note = neuraminidase__InfluenzaA__AHM00941
MNPNQKIITIGSVSLTISTICFFMQIAILITTVTLHFKQYEFNSPPNNQVMLCEPTIIERNITEIVYLTNTTIEKEICPKPAEYRNWSKPQCDITGFAPFSKDNSIRLSAGGDIWVTREPYVSCDPDKCYQFALGQGTTLNNVHSNNTIRDRTPYRTLLMNELGVPFHLGTKQVCIAWSSSSCHDGKAWLHVCITGDDKNATASFIYNGRLVDSVVSWSKEILRTQESECVCINGTCTVVMTDGSASGKADTKILFIEEGKIVHTSTLSGSAQHVEECSCYPRYPGVRCVCRDNWKGSNRPIVDINIKDHSIVSRYVCSGLVGDTPRKNDSSSSSHCLDPNNEEGGHGVKGWAFDDGNDVWMGRTINETSRLGYETFKVIEGWSNPKSKLQINRQVIVDRGDRSGYSGIFSVEGKSCINRCFYVELIRGRKEETEVLWTSNSIVVFCGTSGTYGTGSWPDGADLNLMPI

SEQ ID NO: 25137 - protein, 469 aa, synthetic construct
  REGION 1..469: note = neuraminidase__InfluenzaA__AHM00953
MNPNQKIITIGSVSLTISTICFFMQIAILITTVTLHFKQYAFNSPPNNQVMLCEPTIIERNITEIVYLTNTTIEKEICPKPAEYRNWSKPQCGITGFAPFSKDNSIRLSAGGDIWVTREPYVSCDPDKCYQFALGQGTTLNNVHSNNTVRDRTPYRTLLMNELGVPFHLGTKQVCIAWSSSSCHDGKAWLHVCITGDDKNATASFIYNGRLVDSVVSWSKEILRTQESECVCINGTCTVVMTDGSASGKADTKILFIEEGKIVHTSTLSGSAQHVEECSCYPRYPGVRCVCRDNWKGSNRPIVDINIKDHSIVSSYVCSGLVGDTPRKNDSSSSSHCLDPNNEEGGHGVKGWAFDDGNDVWMGRTINETSRLGYETFKVIEGWSNPKSKLQINRQVIVDRGDRSGYSGIFSVEGKSCINRCFYVELIRGRKEETEVLWTSNSIVVFCGTSGTYGTGSWPDGADLNLMPI

SEQ ID NO: 25138 - protein, 469 aa, synthetic construct; identical to SEQ ID NO: 23375
  REGION 1..469: note = neuraminidase__InfluenzaA__AHM00965

SEQ ID NO: 25139 - protein, 469 aa, synthetic construct; identical to SEQ ID NO: 23375
  REGION 1..469: note = neuraminidase__InfluenzaA__AHM00977

SEQ ID NO: 25140 - protein, 465 aa, synthetic construct
  REGION 1..465: note = neuraminidase__InfluenzaA__AHM24226
MNPNQKILCTSATAIIIGAIAVLIGIANLGLNIGLHLKPGCNCSHSQPETTNTSQTIINNYYNETNITNIQMEERTSRNFNNLTKGLCTINSWHIYGKDNAVRIGESSDVLVTREPYVSCDPDECRFYALSQGTTIRGKHSNGTIHDRSQYRALISWPLSSPPTVYNSRVECIGWSSTSCHDGKSRMSICISGPNNNASAVVWYNRRPVAEINTWARNILRTQESECVCHNGVCPVVFTDGSATGPADTRIYYFKEGKMLKWESLTGTAKHNEECSCYGERTGITCTCRDNWQGSNRPVIQIDPVAMTHTSQYICSPVLTDNPRPNDPNIGKCNDPYPGNNNNGVKGFSYLDGANTWLGRTISTASRSGYEMLKVPNALTDDRSKPIQGQTIVLNADWSGYSGSFMDYWAEGDCYRACFYVELIRGRPKEDKVWWTSNSIVSMCSSTEFLGQWNWPDGAKIEYFL

SEQ ID NO: 25141 - protein, 465 aa, synthetic construct; identical to SEQ ID NO: 23454
  REGION 1..465: note = neuraminidase__InfluenzaA__AHM24238

SEQ ID NO: 25142 - protein, 465 aa, synthetic construct
  REGION 1..465: note = neuraminidase__InfluenzaA__AHM24250
MNPNQKILCTSATAIIIGAIAVLIGIANLGLNIGLHLKPSCNCSHSQPETTNTSQTIINNYYNETNITNIQMEERTSRNFNNLTKGLCTINSWHIYGKDNAVRIGENSDVLVTREPYVSCDPDECRFYALSQGTTIRGKHSNGTIHDRSQYRALISWPLSSPPTVYNSRVECIGWSSTSCHDGKSRMSICISGPNNNASAVVWYNRRPVAEINTWARNILRTQESECVCHNGVCPVVFTDGSATGPADTRIYYFKEGKILKWESLTGTAKHIEECSCYGERTGITCTCRDNWQGSNRPVIQIDPVAMTHTSQYICSPVLTDNPRPNDPNIGKCNDPYPGNNNNGVKGFSYLDGANTWLGRTISTASRSGYEMLKVPNALTDDRSKPIQGQTIVLNADWSGYSGSFMDYWAEGDCYRACFYVELIRGRPKEDKVWWTSNSIVSMCSSTEFLGQWNWPDGAKIEYFL

SEQ ID NO: 25143 - protein, 469 aa, synthetic construct; identical to SEQ ID NO: 20709
  REGION 1..469: note = neuraminidase__InfluenzaA__AHM98312

SEQ ID NO: 25144 - protein, 469 aa, synthetic construct
  REGION 1..469: note = neuraminidase__InfluenzaA__AHM98331
MNPNQKIITIGSVCMTIGMANLILQIGNIISIWISHSIQLGNQSQIETCNQSVITYENNTWVNQTYVNISNTNFAAGQSVVSVKLAGNSSLCPVSGWAIYSKDNSIRIGSKGDVFVIREPFISCSPLECRTFFLTQGALLNDKHSNGTIKDRSPYRTLMSCPIGEVPSPYNSRFESVAWSASACHDGINWLTIGISGPDNGAVAVLKYNGIITDTIKSWRNNILRTQESECACVNGSCFTIMTDGPSDGQASYKIFRIEKGKIVKSVEMNAPNYHYEECSCYPDSSEITCVCRDNWHGSNRPWVSFNQNLEYQIGYICSGIFGDNPRPNDKTGSCGPVSSNGANGVKGFSFKYGNGVWIGRTKSISSRKGFEMIWDPNGWTGTDNNFSIKQDIVGINEWSGYSGSFVQHPELTGLDCIRPCFWVELIRGRPKENTIWTSGSSISFCGVHSDTVGWSWPDGAELPFTIDK

SEQ ID NO: 25145 - protein, 469 aa, synthetic construct; identical to SEQ ID NO: 20725
  REGION 1..469: note = neuraminidase__InfluenzaA__AHM98342

SEQ ID NO: 25146 - protein, 469 aa, synthetic construct
  REGION 1..469: note = neuraminidase__InfluenzaA__AHM98353
MNPNQKIITIGSVCMTIGMANLILQIGNIISIWISHSIQLGNQSQIETCNQSVITYENNTWVNQTYVNISNTNFAAGQSVVSVKLAGNSSLCPVSGWAIYSKDNSIRIGSKGDVFVIREPFISCSPLECRTFFLTQGALLNDKHSNGTIKDRSPYRTLMSCPIGEVPSPYNSRFESVAWSASACHDGINWLTIGISGPDNGAVAVLKYNGIITDTIKSWRNNILRTQESECACVDGSCFTIMTDGPSDGQASYKIFRIEKGKIVKSVEMNAPNYHYEECSCYPDSSEITCVCRDNWHGSNRPWVSFNQNLEYQIGYICSGIFGDNPRPNDKTGSCGPVSSNGANGVKGFSFKYGNGVWIGRTKSISSRKGFEMIWDPNGWTGTDNNFSIKQDIVGINEWSGYSGSFVQHPELTGLDCIRPCFWVELIRGRPKENTIWTSGSSISFCGVNSDTVGWSWPDGAELPFTIDK

SEQ ID NO: 25147 - protein, 469 aa, synthetic construct
  REGION 1..469: note = neuraminidase__InfluenzaA__AHM98364
MNPNQKIITIGSVCMTIGMANLILQIGNIISIWISHSIQLGNQSQIETCNQSVITYENNTWVNQTYVNISNTNFAAGQSVVSVNLAGNSSLCPVSGWAIYSKDNSIRIGSKGDVFVIREPFISCSPLECRTFFLTQGALLNDKHSNGTIKDRSPYRTLMSCPIGEVPSPYNSRFESVAWSASACHDGINWLTIGISGPDNGAVAVLKYNGIITDTIKSWRNNILRTQESECACVNGSCFTIMTDGPSDGQASYKIFRIEKGKIVKSVEMNAPNYHYEECSCYPDSSEITCVCRDNWHGSNRPWVSFNQNLEYQIGYICSGIFGDNPRPNDKTGSCGPVSSNGANGVKGFSFKYGNGVWIGRTKSISSRKGFEMIWDPNGWTGTDNNFSIKQDIVGINEWSGYSGSFVQHPELTGLDCIRPCFWVELIRGRPKENTIWTSGSSISFCGVNSDTVGWSWPDGAELPFTIDK

SEQ ID NO: 25148 - protein, 469 aa, synthetic construct
  REGION 1..469: note = neuraminidase__InfluenzaA__AHM98375
MNPNQKIITIGSVCMTIGMANLILQIGNIISIWISHSIQLGNQNQIETCNQSVITYENNTWVNQTYVNISNTNFAAGQSVVSVKLAGNSSLCPVSGWAIYSKDNSIRIGSKGDVFVIREPFISCSPLECRTFFLTQGALLNDKHSNGTIKDRSPFRTLMSCPIGEVPSPYNSRFESVAWSASACHDGINWLTIGISGPDNGAVAVLKYNGIITDTIKSWRNNILRTQESECACVNGSCFTIMTDGPSDGQASYKIFRIEKGKIVKSVEMNAPNYHYEECSCYPDSSEITCVCRDNWHGSNRPWVSFNQNLEYQIGYICSGIFGDNPRPNDKTGSCGPVSSNGANGVKGFSFKYGNGVWIGRTKSISSRKGFEMIWDPNGWTGTDNNFSIKQDIVGINEWSGYSGSFVQHPELTGLDCIRPCFWVELIRGRPKENTIWTSGSSISFCGVNSDTVGWSWPDGAELPFTIDK

SEQ ID NO: 25149 - protein, 469 aa, synthetic construct; identical to SEQ ID NO: 20709
  REGION 1..469: note = neuraminidase__InfluenzaA__AHM98386

SEQ ID NO: 25150 - protein, 469 aa, synthetic construct
  REGION 1..469: note = neuraminidase__InfluenzaA__AHM98408
MNPNQKIITIGSVCMTIGMANLILQIGNIISIWISHSIQLGNQSQIETCNQSVITYENNTWINQTYVNISNTNFAAGQSVVSVKLAGNSSLCPVSGWAIYSKDNSIRIGSKGDVFVIREPFISCSPLECRTFFLTQGALLNDKHSNGTIKDRSPYRTLMSCPIGEVPSPYNSRFESVAWSASACHDGINWLTIGISGPDNGAVAVLKYNGIITDTIKSWRNNILRTQESECACVNGSCFTIMTDGPSDGQASYKIFRIEKGKIVKSVEMNAPNYHYEECSCYPDSSEITCVCRDNWHGSNRPWVSFNQNLEYQIGYICSGIFGDNPRPNDKTGSCGPVSSNGANGVKGFSFKYGNGVWIGRTKSISSRKGFEMIWDPNGWTGTDNSFSIKQDIVGINEWSGYSGSFVQHPELTGLDCIRPCFWVELIRGRPKENTIWTSGSSISFCGVNSDTVGWSWPDGAELPFTIDK

SEQ ID NO: 25151 - protein, 469 aa, synthetic construct; identical to SEQ ID NO: 25150
  REGION 1..469: note = neuraminidase__InfluenzaA__AHM98419

SEQ ID NO: 25152 - protein, 469 aa, synthetic construct
  REGION 1..469: note = neuraminidase__InfluenzaA__AHM98430
MNPNQKIITIGSVCMTIGMANLILQIGNIISIWISHSIQLGNQSQIETCNQNVITYENNTWVNQTYVNISNTNFAAGQSVVPVKLAGNSSLCPVSGWAIYSKDNSIRIGSKGDVFVIREPFISCSPLECRTFFLTQGALLNDKHSNGTIKDRSPYRTLMSCPIGEVPSPYNSRFESVAWSASACHDGINWLTIGISGPDNGAVAVLKYNGIITDTIKSWRNNILRTQESECACVNGSCFTIMTDGPSDGQASYKIFRIEKGKIVKSVEMNAPNYHYEECSCYPDSSEITCVCRDNWHGSNRPWVSFNQNLEYQIGYICSGIFGDNPRPNDKTGSCGPVSSNGANGVKGFSFKYGNGVWIGRTKSISSRKGFEMIWDPNGWTGTDNNFSIKQDIVGINEWSGYSGSFVQHPELTGLDCIRPCFWVELIRGRPKENTIWTSGSSISFCGVNSDTVGWSWPDGAELPFTIDK

SEQ ID NO: 25153 - protein, 469 aa, synthetic construct; identical to SEQ ID NO: 20957
  REGION 1..469: note = neuraminidase__InfluenzaA__AHM98441

SEQ ID NO: 25154 - protein, 469 aa, synthetic construct
  REGION 1..469: note = neuraminidase__InfluenzaA__AHM98452
MNPNQKIITIGSVCMTIGMANLILQIGNIISIWISHSIQLRNQSQIETCNQSVITYENNTWVNQTYVNISNTNFAAGQSVVSVKLAGNSSLCPVSGWAIYSKDNSIRIGSKGDVFVIREPFISCSPLECRTFFLTQGALLNDKHSNGTIKDRSPYRTLMSCPIGEVPSPYNSRFESVAWSASACHDGINWLTIGISGPDNGAVAVLKYNGIITDTIKSWRNNILRTQESECACVNGSCFTIMTDGPSDGQASYKIFRIEKGKIVKSVEMNAPNYHYEECSCYPDSSEITCVCRDNWHGSNRPWVSFNQNLEYQIGYICSGIFGDNPRPNDKTGSCGPVSSNGANGVKGFSFKYGNGVWIGRTKSISSRKGFEMIWDPNGWTGTDNNFSIKQDIVGVNEWSGYSGSFVQHPELTGLDCIRPCFWVELIRGRPKENTIWTSGSSISFCGVNSDTVGWSWPDGAELPFTIDK

SEQ ID NO: 25155 - protein, 469 aa, synthetic construct; identical to SEQ ID NO: 20709
  REGION 1..469: note = neuraminidase__InfluenzaA__AHM98474

SEQ ID NO: 25156 - protein, 469 aa, synthetic construct
  REGION 1..469: note = neuraminidase__InfluenzaA__AHM98485
MNPNQKIITIGSVCMTIGMANLILQIGNIISIWISHSIQLGNQSQIETCNQSVITYENNTWVNQTYVNISNTNFAAGQSVVSVKLVGNSSLCPVSGWAIYSKDNSIRIGSKGDVFVIREPFISCSPLECRTFFLTQGALLNDKHSNGTIKDRSPYRTLMSCPIGEVPSPYNSRFESVAWSASACHDGINWLTIGISGPDNGAVAVLKYNGIITDTIKSWRNNILRTQESECACVNGSCFTIMTDGPSDGQASYKIFRIEKGKIVKSVEMNAPNYHYEECSCYPDSSEITCVCRDNWHGSNRPWVSFNQNLEYQIGYICSGIFGDNPRPNDKTGSCGPVSSNGANGVKGFSFKYGNGVWIGRTKSISSRKGFEMIWDPNGWTGTDNNFSIKQDIVGINEWSGYSGSFVQHPELTGLDCIRPCFWVELIRGRPKENTIWTSGSSISFCGVNSDTVGWSWPDGAELPFTIDK

SEQ ID NO: 25157 - protein, 469 aa, synthetic construct
  REGION 1..469: note = neuraminidase__InfluenzaA__AHM98496
MNPNQKIITIGSVCMTIGMANLILQIGNIISIWISHSIQLGNQNQIETCNQSVITYENNTWVNQTYVNISNTNFAAGQSVVSVKLAGNSSLCPVSGWAIYSKDNSIRIGSKGDVFVIREPFISCSPLECRTFFLTQGALLNDKHSNGTIKNRSPYRTLMSCPIGEVPSPYNSRFESVAWSASACHDGINWLTIGISGPDNGAVAVLKYNGIITDTIKSWRNNILRTQESECACVNGSCFTIMTDGPSDGQASYKIFRIEKGKIVKSVEMNAPNYHYEECSCYPDSSEIKCVCRDNWHGSNRPWVSFNQNLEYQIGYICSGIFGDNPRPNDKTGSCGPVSSNGANGVKGFSFKYGNGVWIGRTKSISSRKGFEMIWDPNGWTGTDNNFSIKQDIVGINEWSGYSGSFVQHPELTGLDCIRPCFWVELIRGRPKENTIWTSGSSISFCGVNSDTVGWSWPDGAELPFTIDK

SEQ ID NO: 25158 - protein, 469 aa, synthetic construct; identical to SEQ ID NO: 20709
  REGION 1..469: note = neuraminidase__InfluenzaA__AHM98507

SEQ ID NO: 25159 - protein, 469 aa, synthetic construct
  REGION 1..469: note = neuraminidase__InfluenzaA__AHM98518
MNPNQKIITIGSVCMTIGMANLILQIGNIISIWISHSIQLGNQSQIETCNQSVITYENNTWINQTYVNISNTNFAAGQSVVSVKLAGNSSLCPVSGWAIYSKDNSIRIGSKGDVFVIREPFISCSPLECRTFFLTQGALLNDKHSNGTIKDRSPYRTLMSCPIGEVPSPYNSRFESVAWSASACHDGINWLTIGISGPDNGAVAVLKYNGIITDTIKSWRNNILRTQESECACVNGSCFTIMTDGPSDGQASYKIFRIEKGKIVKSVEMNAPNYHYEECSCYPDSSEITCVCRDNWHGSNRPWVSFNQNLEYQIGYICSGIFGDNPRPNDKTGSCGPVSSNGANGVKGFSFKYGNGVWIGRTKSISSRKGFEMIWDPNGWTGTDNNFSIKQDIVGINEWSGYSGSFVQHPELTGLDCIRPCFWVELIRGRPKENTIWTSGSSMSFCGVNSDTVGWSWPDGAELPFTIDK

SEQ ID NO: 25160 - protein, 469 aa, synthetic construct; identical to SEQ ID NO: 20257
  REGION 1..469: note = neuraminidase__InfluenzaA__AHM98529

SEQ ID NO: 25161 - protein, 469 aa, synthetic construct; identical to SEQ ID NO: 21001
  REGION 1..469: note = neuraminidase__InfluenzaA__AHM98540

SEQ ID NO: 25162 - protein, 469 aa, synthetic construct
  REGION 1..469: note = neuraminidase__InfluenzaA__AHM98562
MNPNQKIITIGSVCMTIGMANLILQIGNIISIWISHSIQLGNQNQIETCNQSVITYENNTWVNQTYVNISNTNFAAGQSVVSVKLAGNSSLCPVSGWAIYSKDNSIRIGSKGDVFVIREPFISCSPLECRTFFLTQGALLNDKHSNGTIKDRSPYRTLMSCPIGEVPSPYNSRFESVAWSASACHDGINWLTIGISGPDNGAVAVLKYNGIITDTIKSWRNNILRTQESECACVNGSCFTIMTDGPSDGQASYKIFRIEKGKIVKSVEMNAPNYHYEECSCYPDSSEITCVCRDNWHGSNRPWVSFNQNLEYQIGYICSGIFGDNPRPNDKAGSCGPVSSNGANGVKGFSFKYGNGVWIGRTKSISSRKGFEMIWDPNGWTGTDNNFSIKQDIVGINEWSGYSGSFVQHPELTGLDCIRPCFWVELIRGRPKENTIWTSGSSISFCGVNSYTVGWSWPDGAELPFTIDK

SEQ ID NO: 25163 - protein, 469 aa, synthetic construct; identical to SEQ ID NO: 25152
  REGION 1..469: note = neuraminidase__InfluenzaA__AHM98573

SEQ ID NO: 25164 - protein, 469 aa, synthetic construct
  REGION 1..469: note = neuraminidase__InfluenzaA__AHM98584
MNPNQKIITIGSVCMTIGMANLILQIGNIISIWISHSIQLGNQSQIETCNQSVITYENNTWINQTYVNISNTNFAAGQSVVSVKLAGNSSLCPVSGWAIYSKDNSIRIGSKGDVFVIREPFISCSPLECRTFFLTQGALLNDKHSNGTIKDRSPYRTLMSCPIGEVPSPYNSRFESVAWSASACHDGINWLTIGISGPDNGAVAVLRYNGIITDTIKSWRNNILRTQESECACVNGSCFTIMTDGPSDGQASYKIFRIEKGKIVKSVEMNAPNYHYEECSCYPDSSEITCVCRDNWHGSNRPWVSFNQNLEYQIGYICSGIFGDNPRPNDKTGSCGPVSSNGANGVKGFSFKYGNGVWIGRTKSISSRKGFEMIWDPNGWTGTDNSFSIKQDIVGINEWSGYSGSFVQHPELTGLDCIRPCFWVELIRGRPKENTIWTSGSSISFCGVNSDTVGWSWPDGAELPFTIDK

SEQ ID NO: 25165 - protein, 469 aa, synthetic construct; identical to SEQ ID NO: 25152
  REGION 1..469: note = neuraminidase__InfluenzaA__AHM98595

SEQ ID NO: 25166 - protein, 469 aa, synthetic construct; identical to SEQ ID NO: 20709
  REGION 1..469: note = neuraminidase__InfluenzaA__AHM98606

SEQ ID NO: 25167 - protein, 469 aa, synthetic construct
  REGION 1..469: note = neuraminidase__InfluenzaA__AHM98617
MNPNQKIITIGSVCMTIGMANLILQIGNIISIWISHSIQLGNQSQIETCNQSVITYENNTWINQTYVNISNTNFAAGQSVVSVKLAGNSSLCPVSGWAIYSKDNSIRIGSKGDVFVIREPFISCSPLGCRTFFLTQGALLNDKHSNGTIKDRSPYRTLMSCPIGEVPSPYNSRFESVAWSASACHDGINWLTIGISGPDNGAVAVLKYNGIITDTIKSWRNNILRTQESECACVNGSCFTIMTDGPSDGQASYKIFRIEKGKIVKSVEMNAPNYHYEECSCYPDSSEITCVCRDNWHGSNRPWVSFNQNLEYQIGYICSGIFGDNPRPNDKTGSCGPVSSNGANGVKGFSFKYGNGVWIGRTKSISSRKGFEMIWDPNGWTGTDNSFSIKQDIVGINEWSGYSGSFVQHPELTGLDCIRPCFWVELIRGRPKENTIWTSGSSISFCGVNSDTVGWSWPDGAELPFTIDK

SEQ ID NO: 25168 - protein, 469 aa, synthetic construct; identical to SEQ ID NO: 25150
  REGION 1..469: note = neuraminidase__InfluenzaA__AHM98628

SEQ ID NO: 25169 - protein, 469 aa, synthetic construct
  REGION 1..469: note = neuraminidase__InfluenzaA__AHM98639
MNPNQKIITIGSVCMTIGMANLILQIGNIISIWISHSIQLGNQSQIETCNQSVIIYENNTWINQTYVNISNTNFAAEQSVVSVKLAGNSSLCPVSGWAIYSKDNSIRIGSKGDVFVIREPFISCSPLECRTFFLTQGALLNDKHSNGTIKDRSPYRTLMSCPIGEVPSPYNSRFESVAWSASACHDGINWLTIGISGPDNGAVAVLKYNGIITDTIKSWRNNILRTQESECACVNGSCFTIMTDGPSDGQASYKIFRIEKGKIVKSVEMNAPNYHYEECSCYPDSSEITCVCRDNWHGSNRPWVSFNQNLEYQIGYICSGIFGDNPRPNDKTGSCGPVSSNGANGVKGFSFKYGNGVWIGRTKSISSRKGFEMIWDPNGWTGTDNSFSIKQDIVGINEWSGYSGSFVQHPELTGLDCIRPCFWVELIRGRPKENTIWTSGSSISFCGVNSDTVGWSWPDGAELPFTIDK

SEQ ID NO: 25170 - protein, 469 aa, synthetic construct; identical to SEQ ID NO: 20709
  REGION 1..469: note = neuraminidase__InfluenzaA__AHM98650

SEQ ID NO: 25171 - protein, 469 aa, synthetic construct; identical to SEQ ID NO: 20709
  REGION 1..469: note = neuraminidase__InfluenzaA__AHM98661

SEQ ID NO: 25172 - protein, 469 aa, synthetic construct
  REGION 1..469: note = neuraminidase__InfluenzaA__AHM98672
MNPNQKIITIGSVCMTIGMANLILQIGNIISIWISHSIQLGNQSQIETCNQNVITYENNTWVNQTYVNISNTNFAAEQSVVPVKLAGNSSLCPVSGWAIYSKDNSIRIGSKGDVFVIREPFISCSPLECRTFFLTQGALLNDKHSNGTIKDRSPYRTLMSCPIGEVPSPYNSRFESVAWSASACHDGINWLTIGISGPDNGAVAVLKYNGIITDTIKSWRNNILRTQESECACVNGSCFTIMTDGPSDGQASYKIFRIEKGKIVKSVEMNAPNYHYEECSCYPDSSEITCVCRDNWHGSNRPWVSFNQNLEYQIGYICSGIFGDNPRPNDKTGSCGPVSSNGANGVKGFSFKYGNGVWIGRTKSISSRKGFEMIWDPNGWTGTDNNFSIKQDIVGINEWSGYSGSFVQHPELTGLDCIRPCFWVELIRGRPKENTIWTSGSSISFCGVNSDTVGWSWPDGAELPFTIDK

SEQ ID NO: 25173 - protein, 469 aa, synthetic construct
  REGION 1..469: note = neuraminidase__InfluenzaA__AHM98683
MNPNQKIITIGSVCMTIGMANLILQIGNIISIWISHSIQLGNQNQIETCNQSVITYENNTWVNQTYVNISNTNFDAGQSVVSVRLAGNSSLCPVSGWAIYSKDNSIRIGSKGDVFVIREPFISCSPLECRTFFLTQGALLNDKHSNGTIKDRSPYRTLMSCPIGEVPSPYNSRFESVAWSASACHDGFNWLTIGISGPDNGAVAVLKYNGIITDTIRSWRNNILRTQESECACVNGSCFTIMTDGPSDGQASYKIFRIEKGKIVKSVEMNAPNYHYEECSCYPDSSEITCVCRDNWHGSNRPWVSFNQNLEYQIGYICSGIFGDNPRPNDKTGSCGPVSSNGANGVKGFSFKYGNGVWIGRTKSISSRKGFEMIWDPNGWTGTDNNFSIKQDIVGINEWSGYSGSFVQHPELTGLDCIRPCFWVELIRGRPKENTIWTSGSSISFCGVNSDTVGWSWPDGAELPFTIDK

SEQ ID NO: 25174 - protein, 469 aa, synthetic construct; identical to SEQ ID NO: 20709
  REGION 1..469: note = neuraminidase__InfluenzaA__AHM98693

SEQ ID NO: 25175 - protein, 469 aa, synthetic construct; identical to SEQ ID NO: 23158
  REGION 1..469: note = neuraminidase__InfluenzaA__AHM98704

SEQ ID NO: 25176 - protein, 469 aa, synthetic construct; identical to SEQ ID NO: 23158
  REGION 1..469: note = neuraminidase__InfluenzaA__AHM98715

SEQ ID NO: 25177 - protein, 469 aa, synthetic construct; identical to SEQ ID NO: 20709
  REGION 1..469: note = neuraminidase__InfluenzaA__AHM98726

SEQ ID NO: 25178 - protein, 469 aa, synthetic construct
  REGION 1..469: note = neuraminidase__InfluenzaA__AHM98737
MNPNQKIITIGSVCMTIGMANLILQIGNIISIWISHSIQLRNQSQIETCNQSVINYENNTWVNQTYVNISNTNFAAGQSVVSVKLAGNSSLCPVSGWAIYSKDNSIRIGSKGDVFVIREPFVSCSPLECRTFFLTQGALLNDKHSNGTIKDRSPYRTLMSCPIGEVPSPYNSRFESVAWSASACHDGINWLTIGISGPDNGAVAVLKYNGIITDTIKSWRNDILRTQESECACVNGSCFTIMTDGPSDGQASYKIFRIEKGKIVKSVEMNAPNYHYEECSCYPDSSEITCVCRDNWHGSNRPWVSFNQNLEYQIGYICSGIFGDNPRPNDKTGSCGPVSSNGANGVKGFSFKYGNGVWIGRTKSISSRKGFEMIWDPNGWTGTDNNFSIKQDIVGINEWSGYSGSFVQHPELTGLDCIRPCFWVELIRGRPKENTIWTSGSSISFCGVNSDTVGWSWPDGAELPFTIDK

SEQ ID NO: 25179 - protein, 469 aa, synthetic construct; identical to SEQ ID NO: 23158
  REGION 1..469: note = neuraminidase__InfluenzaA__AHM98748

SEQ ID NO: 25180 - protein, 469 aa, synthetic construct; identical to SEQ ID NO: 23158
  REGION 1..469: note = neuraminidase__InfluenzaA__AHM98759

SEQ ID NO: 25181 - protein, 469 aa, synthetic construct
  REGION 1..469: note = neuraminidase__InfluenzaA__AHM98770
MNPNQKIITIGSVCMTIGMANLILQIGNIISIWISHSIQLRNQSQIETCNQSAITYENNTWVNQTYVNISNTNFAAGQSVVSVKLAGNSSLCPVSGWAIYSKDNSIRIGSKGDVFVIREPFISCSPLECRTFFLTQGALLNDKHSNGTIKDRSPYRTLMSCPIGEVPSPYNSRFESVAWSASACHDGINWLTIGISGPDNGAVAVLKYNGIITDTIKSWRNNILRTQESECACVNGSCFTIMTDGPSDGQASYKIFRIEKGKIVKSVEMNAPNYHYEECSCYPDSSEITCVCRDNWHGSNRPWVSFNQNLEYQIGYICSGIFGDNPRPNDKTGSCGPVSSNGANGVKGFSFKYGNGVWIGRTKSISSRKGFEMIWDPNGWTGTDNNFSIKQDIVGINEWSGYSGSFVQHPELTGLDCIRPCFWVELIRGRPKENTIWTSGSSISFCGVNSDTVGWSWPDGAELPFTIDK

SEQ ID NO: 25182 - protein, 469 aa, synthetic construct
  REGION 1..469: note = neuraminidase__InfluenzaA__AHM98781
MNPNQKIITIGSVCMTIGMANLILQIGNIISIWISHSIQLGNQNQIETCNQSVITYENNTWVNQTYVNISNTNFAAGQSVVSVKLAGNSSLCPVSGWAIYSKDNSIRIGSKGDVFVIREPFISCSPLECRTFFLTQGALLNDKHSNGTIKDRSPYRTLMSCPIGEVPSPYNSRFESVAWSASACHDGINWLTIGISGPDNGAVAVLKYNGIITDTIKSWRNNILRTQESECACVNGSCFTIMTDGPSDGQASYKIFRIEKGKIVKSVEMNAPNYHYEECSCYPDSSEITCVCRDNWHGSNRPWVSFNQNLEYQIGYICSGIFGDNPRPSDKTGSCGPVSSNGANGVKGFSFKYGNGVWIGRTKSISSRKGFEMIWDPNGWTGTDNSFSIKQDIVGINEWSGYSGSFVQHPELTGLDCIRPCFWVELIRGRPKENTIWTSGSSISFCGVNSGTVGWSWPDGAELPFTIDK

SEQ ID NO: 25183 - protein, 469 aa, synthetic construct; identical to SEQ ID NO: 20709
  REGION 1..469: note = neuraminidase__InfluenzaA__AHM98801

SEQ ID NO: 25184 - protein, 469 aa, synthetic construct; identical to SEQ ID NO: 20257
  REGION 1..469: note = neuraminidase__InfluenzaA__AHM98812

SEQ ID NO: 25185 - protein, 469 aa, synthetic construct
  REGION 1..469: note = neuraminidase__InfluenzaA__AHM98823
MNPNQKIITIGSVCMTIGMANLILQIGNIISIWISHSIQLGNQSQIETCNQSVITYENNTWVNQTYINISNTNFAAGQSVVSVKLAGNSSLCPVSGWAIYSKDNSIRIGSKGDVFVIREPFISCSPSECRTFFLTQGALLNDKHSNGTIKDRSPYRTLMSCPIGEVPSPYNSRFESVAWSASACHDGINWLTIGISGPDNGAVAVLKYNGIITDTIKSWRNNILRTQESECACVNGSCFTIMTDGPSDGQASYKIFRIEKGKIVKSVEMNAPNYHYEECSCYPDSSEITCVCRDNWHGSNRPWVSFNQNLEYQIGYICSGIFGDNPRPNDKTGSCGPVSSNGANGVKGFSFKYGNGVWIGRTKSISSRKGFEMIWDPNGWTGTDNNFSIKQDIVGINEWSGYSGSFVQHPELTGLDCIRPCFWVELIRGRPKENTIWTSGSSISFCGVNSDTVGWSWPDGAELPFTIDK

SEQ ID NO: 25186 - protein, 469 aa, synthetic construct
  REGION 1..469: note = neuraminidase__InfluenzaA__AHM98839
MNPNQKIITIGSVCMTVGMANLILQIGNIISIWISHSIQLGNQSQIETCNQSVITYENNTWVNQTYVNISNTNFAAGQSVVSVKLAGNSSLCPVSGWAIYSKDNSIRIGSKGDVFVIREPFISCSPLECRTFFLTQGALLNDKHSNGTIKDRSPYRTLMSCPIGEVPSPYNSRFESVAWSASACHDGINWLTIGISGPDNGAVAVLKYNGIITDTIKSWRNNILRTQESECACVNGSCFTIMTDGPSDGQASYKIFRIEKGKIVKSVEMNAPNYHYEECSCYPDSSEITCVCRDNWHGSNRPWVSFNQNLEYQIGYICSGIFGDNPRPNDKTGSCGPVSSNGANGVKGFSFKYGNGVWIGRTKSISSRKGFEMIWDPNGWTGTDNNFSIKQDIVGINEWSGYSGSFVQHPELTGLDCIRPCFWVELIRGRPKENTIWTSGSSISFCGVNSDTVGWSWPDGAELPFTIDK

SEQ ID NO: 25187 - protein, 469 aa, synthetic construct; identical to SEQ ID NO: 20257
  REGION 1..469: note = neuraminidase__InfluenzaA__AHM98850

SEQ ID NO: 25188 - protein, 469 aa, synthetic construct; identical to SEQ ID NO: 20257
  REGION 1..469: note = neuraminidase__InfluenzaA__AHM98861

SEQ ID NO: 25189 - protein, 469 aa, synthetic construct
  REGION 1..469: note = neuraminidase__InfluenzaA__AHM98901
MNPNQKIITIGSVCMTIGMANLILQIGNIISIWISHSIQLGNQNQIETCNQSVITYENNTWVNQTYVNISNTNFAAGQSVVSVKLAGNSSLCPVSGWAIYSKDNSIRIGSKGDVFVIREPFISCSPLECRTFFLTQGALLNDKHSNGTIKDRSPHRTLMSCPIGEVPSPYNSRFESVAWSASACHDGINWLTIGISGPDNGAVAVLKYNGIITDTIKSWRNNILRTQESECACVNGSCFTIMTDGPSDGQASYKIFRIEKGKIVKSVEMNAPNYHYEECSCYPDSSEITCVCRDNWHGSNRPWVSFNQNLEYQIGYICSGIFGDNPRPNDKTGSCGPVSSNGANGVKGFSFKYGNGVWIGRTKSISSRKGFEMIWDPNGWTGTDNNFSIKQDIVGINEWSGYSGSFVQHPELTGLDCIRPCFWVELIRGRPKENTIWTSGSSISFCGVNSDTVGWSWPDGAELPFTIDK

SEQ ID NO: 25190 - protein, 469 aa, synthetic construct; identical to SEQ ID NO: 23846
  REGION 1..469: note = neuraminidase__InfluenzaA__AHM98912

SEQ ID NO: 25191 - protein, 469 aa, synthetic construct; identical to SEQ ID NO: 23846
  REGION 1..469: note = neuraminidase__InfluenzaA__AHM98923

SEQ ID NO: 25192 - protein, 469 aa, synthetic construct; identical to SEQ ID NO: 23846
  REGION 1..469: note = neuraminidase__InfluenzaA__AHM98935

SEQ ID NO: 25193 - protein, 469 aa, synthetic construct; identical to SEQ ID NO: 23846
  REGION 1..469: note = neuraminidase__InfluenzaA__AHM98943

SEQ ID NO: 25194 - protein, 469 aa, synthetic construct; identical to SEQ ID NO: 23846
  REGION 1..469: note = neuraminidase__InfluenzaA__AHM98954

SEQ ID NO: 25195 - protein, 469 aa, synthetic construct; identical to SEQ ID NO: 23846
  REGION 1..469: note = neuraminidase__InfluenzaA__AHM98972

SEQ ID NO: 25196 - protein, 469 aa, synthetic construct; identical to SEQ ID NO: 23846
  REGION 1..469: note = neuraminidase__InfluenzaA__AHM98978

SEQ ID NO: 25197 - protein, 469 aa, synthetic construct; identical to SEQ ID NO: 23846
  REGION 1..469: note = neuraminidase__InfluenzaA__AHM98990

SEQ ID NO: 25198 - protein, 469 aa, synthetic construct; identical to SEQ ID NO: 23846
  REGION 1..469: note = neuraminidase__InfluenzaA__AHM99000

SEQ ID NO: 25199 - protein, 469 aa, synthetic construct; identical to SEQ ID NO: 23846
  REGION 1..469: note = neuraminidase__InfluenzaA__AHM99011

SEQ ID NO: 25200 - protein, 469 aa, synthetic construct; identical to SEQ ID NO: 23822
  REGION 1..469: note = neuraminidase__InfluenzaA__AHM99022

SEQ ID NO: 25201 - protein, 469 aa, synthetic construct; identical to SEQ ID NO: 23822
  REGION 1..469: note = neuraminidase__InfluenzaA__AHM99034

SEQ ID NO: 25202 - protein, 469 aa, synthetic construct; identical to SEQ ID NO: 23822
  REGION 1..469: note = neuraminidase__InfluenzaA__AHM99046

SEQ ID NO: 25203 - protein, 469 aa, synthetic construct; identical to SEQ ID NO: 23822
  REGION 1..469: note = neuraminidase__InfluenzaA__AHM99057

SEQ ID NO: 25204 - protein, 469 aa, synthetic construct; identical to SEQ ID NO: 23822
  REGION 1..469: note = neuraminidase__InfluenzaA__AHM99068

SEQ ID NO: 25205 - protein, 469 aa, synthetic construct; identical to SEQ ID NO: 23846
  REGION 1..469: note = neuraminidase__InfluenzaA__AHM99078

SEQ ID NO: 25206 - protein, 469 aa, synthetic construct
  REGION 1..469: note = neuraminidase__InfluenzaA__AHN00720
MNTNQRIITIGTICLIVGIISLLLQIGNIVSLWISHSIQTEEKSHPEVCNQSVITYENNTWVNQTYINISNTNIAAGQGVTPIILAGNSSLCPISGWAIYSKDNSIRIGSKGDIFVMREPFISCSHLECRTFFLTQGALLNDRHSNGTVKDRSPYRTLMSCPIGEAPSPYNSRFESVAWSASACHDGMGWLTIGISGPDNGAVAVLKYNGIITDTMKSWRNKILRTQESECVCINGSCFTIMTDGPSNGQASYKIFKMEKGKIIKSIELDAPNYHYEECSCYPDTGKVVCVCRDNWHASNRPWVSFDQNLDYQIGYICSGVFGDNPRSNDGKGNCGPVLSNGANGVKGFSFRYGNGVWIGRTKSISSRSGFEMIWDPNGWTETDSSFSMKQDIIALTDWSGYSGSFVQHPELTGMNCIRPCFWVELIRGQPKESTIWTSGSSISFCGVNSETASWSWPDGADLPFTIDK

SEQ ID NO: 25207 - protein, 469 aa, synthetic construct
  REGION 1..469: note = neuraminidase__InfluenzaA__AHN00767
MNTNQRIITIGTICLIVGIISLLLQIGNIVSLWISHSIQTGEKSHPEVCNQSVITYENNTWVNQTYVNISNTNIAAGQGVTPIILAGNSSLCPISGWAIYSKDNSIRIGSKGDIFVMREPFISCSHLECRTFFLTQGALLNDRHSNGTVKDRSPYRTLMSCPIGEAPSPYNSRFESVAWSASACHDGMGWLTIGISGPDNGAVAVLKYNGIITDTIKSWRNKILRTQESECVCINGSCFTIMTDGPSNGQASYKIFKMEKGKIIKSIELDAPNYHYEECSCYPDTGKVVCVCRDNWHASNRPWVSFDQNLDYQIGYICSGVFGDNPRSNDGKGNCGPVLSNGANGVKGFSFRYGNGVWIGRTKSISSRSGFEMIWDPNGWTETDSSFSMKQDIIALTDWSGYSGSFVQHPELTGMNCIRPCFWVELIRGQPKESTIWTSGSSISFCGVNSETASWSWPDGADLPFTIDK

SEQ ID NO: 25208 - protein, 465 aa, synthetic construct
  REGION 1..465: note = neuraminidase__InfluenzaA__AHN96324
MNPNQKILCTSATAIIIGAIAVLIGIANLGLNIGLHLKPSCNCSHSQPETTNTSQTIINNYYNETNITNIQMEERTSRNFNNLTKGLCTINSWHIYGKDNAVRIGESSDVLVTREPYVSCDPDECRFYALSQGTTIRGKHSNGTIHDRSQYRALISWPLSSPPTVYNSRVECIGWSSTSCHDGKSRMSICISGPNNNASAVVWYNRRPVAEINTWARNILRTQESECVCHNGVCPVVFTDGSATGPADTRIYYFKEGKILKWESLTGTAKHIEECSCYGERTGITCTCRDNWQGSNRPVVQIDPVAMTHTSQYICSPVLTDNPRPNDPNIGKCNDPYPGNNNNGVKGFSYLDGANTWLGRTISTASRSGYEMLKVPNALTDDRSKPIQGQTIVLNADWSGYSGSFMDYWAEGDCYRACFYVELIRGRPKEDKVWWTSNSIVSMCSSTEFLGQWNWPDGAKIEYFL

SEQ ID NO: 25209 - protein, 469 aa, synthetic construct; identical to SEQ ID NO: 21143
  REGION 1..469: note = neuraminidase__InfluenzaA__AHN96448

SEQ ID NO: 25210 - protein, 469 aa, synthetic construct; identical to SEQ ID NO: 22146
  REGION 1..469: note = neuraminidase__InfluenzaA__AHN96450

SEQ ID NO: 25211 - protein, 469 aa, synthetic construct
  REGION 1..469: note = neuraminidase__InfluenzaA__AHN96451
MNPNQKIITIGSVSLTISTICFFMQIAILITTVTLHFKQYEFNSPPNNQVMLCEPTIIERNITEIMYLTNTTIEKEICPKPAEYRNWSKPQCGITGFAPFSKDNSIRLSAGGDIWVTREPYVSCDPDKCYQFALGQGTTLNNVHSNNTVRDRTPYRTLLMNELGVPFHLGTKQVCIAWSSSSCHDGKAWLHVCITGDDKNATASFIYNGRLVDSVVSWSKEILRTQESECVCINGTCTVVMTDGSASGKADTKILFIEEGKIVHTSTLSGSAQHVEECSCYPRYPGVRCVCRDNWKGSNRPIVDINIKDHSIVSSYVCSGLVGDTPRKNDSSSSSHCLDPNNEEGGHGVKGWAFDDGNDVWMGRTINETSRLGYETFKVIEGWSNPKSKLQINRQVIVDRGDRSGYSGIFSVEGKSCINRCFYVELIRGRKEETEVLWTSNSIVVFCGTSGTYGTGSWPDGADLNLMPI

SEQ ID NO: 25212 - protein, 469 aa, synthetic construct
  REGION 1..469: note = neuraminidase__InfluenzaA__AHN96453
MNPNQKIITIGSVSLTISTICFFMQIAILITTVTLHFKQYEFNSPPNNQVMLCEPTIIERNITEIVYLTNTTIEKEICPKPAEYRNWSKPQCGITGFAPFSKDNSIRLSAGGDIWVTREPYVSCDPDKCYQFALGQGTTLDNVHSNNTVRNRTPYRTLLMNELGVPFHLGTKQVCIAWSSSSCHDGKAWLHVCITGDDKNATASFIYNGRLVDSVVSWSKDILRTQESECVCINGTCTVVMTDGSASGKADTKILFIEEGKIVHTSTLSGSAQHVEECSCYPRYPGVRCVCRDNWKGSNRPIVDINIKDHSIVSSYVCSGLVGDTPRKNDSSSSSHCLDPNNEEGGHGVKGWAFDDGNDVWMGRTINETSRLGYETFKVIEGWSNPKSKLQINRQVIVDRGDRSGYSGIFSIEGKSCINRCFYVELIRGRKEETEVLWTSNSIVVFCGTSGTYGTGSWPDGADLNLMPI

SEQ ID NO: 25213 - protein, 469 aa, synthetic construct
  REGION 1..469: note = neuraminidase__InfluenzaA__AHZ13526
MNPNQKIITIGSVSLTIATICFLMQIAILVTTVTLHFKQYECSSPPNNQVMPCEPIIIERNMTEIVYLTNTTIEKEICPKLVEYRNWSKPQCKITGFAPFSKDNSIRLSAGGDIWVTREPYVSCDPGKCYQFALGQGTTLNNKHSNDTIHDRTPYRTLLMNELGVPFHLGTKQVCIAWSSSSCHDGKAWLHVCVTGHDKNATASFIYDGRLVDSIGSWSKNILRTQESECVCINGTCTVVMTDGSASDRADTKILFIEEGKIVHISPLSGSAQHVEECSCYPRYPGVRCVCRDNWKGSNRPIVDINVKDYSIVSSYVCSGLVGDTPRKNDGSSSSYCRNPNNEKGNHGVKGWAFDDGNDVWMGRTIGEELRSGYETFKVIGGWSTPNSKLQINRQVIVDSNNRSGYSGIFSVEGKSCINRCFYVELIRGREQETRVWWTSNSIVVFCGTSGTYGTGSWPDGADINLMPI

SEQ ID NO: 25214 - protein, 470 aa, synthetic construct; identical to SEQ ID NO: 20205
  REGION 1..470: note = neuraminidase__InfluenzaA__AHZ13584

SEQ ID NO: 25215 - protein, 469 aa, synthetic construct; identical to SEQ ID NO: 22922
  REGION 1..469: note = neuraminidase__InfluenzaA__AHZ35575

SEQ ID NO: 25216 - protein, 469 aa, synthetic construct; identical to SEQ ID NO: 22922
  REGION 1..469: note = neuraminidase__InfluenzaA__AHZ35587

SEQ ID NO: 25217 - protein, 469 aa, synthetic construct
  REGION 1..469: note = neuraminidase__InfluenzaA__AHZ35611
MNPNQKIITIGSVSLTISTICFFMQIAILITTVTLHFKQYEFNSPPNNQVMLCEPTIIERNITEIVYLTNTTIEKEICPKPAEYRNWSKPQCDITGFAPFSKDNSIRLSAGGDIWVTREPYVSCDPDKCYQFALGQGTTLNNVHSNNTVRDRTPYRTLLMNELGVPFHLGTKQVCIAWSSSSCHDGKAWLHVCITGDDKNATASFIYNGRLVDSVVSWSKEILRTQESECVCINGTCTVVMTDGSASGKADTKILFIEEGKIVHTSTLSGSAQHVEECSCYPRYPGVRCVCRDNWKGSNRPIVDINIKDHSIVSSYVCSGLVGDTPRKNDSSSSSHCLDPNNEEGGHGVKGWAFDDGNDVWMGRTINETSRLGYETFKVIEGWSNPKSKLQINRQVIVDRGDRSGYSGIFSVEGRSCINRCFYVELIRGRKEETEVLWTSNSIVVFCGTSGTYGTGSWPDGADLNLMPI

SEQ ID NO: 25218 - protein, 469 aa, synthetic construct; identical to SEQ ID NO: 22922
  REGION 1..469: note = neuraminidase__InfluenzaA__AHZ35623

SEQ ID NO: 25219 - protein, 469 aa, synthetic construct; identical to SEQ ID NO: 22922
  REGION 1..469: note = neuraminidase__InfluenzaA__AHZ35635

SEQ ID NO: 25220 - protein, 469 aa, synthetic construct
  REGION 1..469: note = neuraminidase__InfluenzaA__AHZ35647
MNPNQKIITIGSVSLTISTICFFMQIAILITTVTLHFKQYEFNSPPNNQVMLCEPTIIERNITEIVYLTNTTIEKEICPKPAEYRNWSKPQCDITGFAPFSKDNSIRLSAGGDIWVTREPYVSCDPDKCYQFALGQGTTLNNVHSNNTVRDRTPYRTLLMNELGVPFHLGTKQVCIAWSSSSCHDGKAWLHVCITGDDKNATASFIYNGRLVDSVVSWSKEILRTQESECVCINGTCTVVMTDGSASGKADTKILFIEEGKIVHTSTLSGSAQHVEECSCYPRYPDVRCVCRDNWKGSNRPIVDINIKDHSIVSSYVCSGLVGDTPRKNDSSSSSHCLDPNNEEGGHGVKGWAFDDGNDVWMGRTINETSRLGYETFKVIEGWSNPKSKLQINRQVIVDRGDRSGYSGIFSVEGKSCINRCFYVELIRGRKEETEVLWTSNSIVVFCGTSGTYGTGSWPDGADLNLMPI

SEQ ID NO: 25221 - protein, 469 aa, synthetic construct; identical to SEQ ID NO: 22922
  REGION 1..469: note = neuraminidase__InfluenzaA__AHZ35659

SEQ ID NO: 25222 - protein, 469 aa, synthetic construct; identical to SEQ ID NO: 22922
  REGION 1..469: note = neuraminidase__InfluenzaA__AHZ35671

SEQ ID NO: 25223 - protein, 469 aa, synthetic construct; identical to SEQ ID NO: 22922
  REGION 1..469: note = neuraminidase__InfluenzaA__AHZ35683

SEQ ID NO: 25224 - protein, 469 aa, synthetic construct
  REGION 1..469: note = neuraminidase__InfluenzaA__AHZ35695
MNPNQKIITIGSVSLTISTICFFMQIAILITTVTLHFKQYEFNPPPNNQVMLCEPTIIERNITEIVYLTNTTIEKEICPKPAEYRNWSKPQCDITGFAPFSKDNSIRLSAGGDIWVTREPYVSCDPDKCYQFALGQGTTLNNVHSNNTVRDRTPYRTLLMNELGVPFHLGTKQVCIAWSSSSCHDGKAWLHVCITGDDKNATASFIYNERLVDSVVSWSKEILRTQESECVCINGTCTVVMTDGSASGKADTKILFIEEGKIVHTSTLSGSAQHVEECSCYPRYPGVRCVCRDNWKGSNRPIVDINIKDHSIVSSYVCSGLVGDTPRKNDSSSSSHCLDPNNEEGGHGVKGWAFDDGNDVWMGRTINETSRLGYETFKVIEGWSNPKSKLQINRQVIVDRGDRSGYSGIFSVEGNSCINRCFYVELIRGRKEETEVLWTSNSIVVFCGTSGTYGTGSWPDGADLNLMPI

SEQ ID NO: 25225 - protein, 469 aa, synthetic construct
  REGION 1..469: note = neuraminidase__InfluenzaA__AHZ35719
MNPNQKIITIGSVSLTISTICFFMQIAILITTVTLHFKQYEFNSPPNNQVMLCEPTIIERNITEIVYLTNTTIEKEICPKPAEYRNWSKPQCDITGFAPFSKDNSIRLSAGGDIWVTREPYVSCDPDKCYQFALGQGTTLNNVHSNNTVRDRTPYRTLLMNELGVPFHLGTKQVCIAWSSSSCHDGKAWLHVCITGDDKNATASFIYNGRLVDSVVSWSKEILRTQESECVCINGTCTVVMTDGSASGKADTKILFIEEGKIVHTSTLSGSAQHVEECSCYPRYPGVRCVCRDNWKGSNRPIVDINIKDHSIVSSYVCSGLVGDTPRKNDSSSSSHCLDPNNEEGGHGVKGWAFDDGNDVWMGRTINETSRLGYETFKVIEGWSNPKSKLQINRQVIVDRGDRSGYSGIFSVEGKSCINRCFYVELIRGRKEETEVLWTSNSIVVFCGTSGTYGTGSWPDGADLNLTPI

SEQ ID NO: 25226 - protein, 469 aa, synthetic construct; identical to SEQ ID NO: 22922
  REGION 1..469: note = neuraminidase__InfluenzaA__AHZ35731

SEQ ID NO: 25227 - protein, 469 aa, synthetic construct; identical to SEQ ID NO: 22922
  REGION 1..469: note = neuraminidase__InfluenzaA__AHZ35743

SEQ ID NO: 25228 - protein, 469 aa, synthetic construct; identical to SEQ ID NO: 22922
  REGION 1..469: note = neuraminidase__InfluenzaA__AHZ35755

SEQ ID NO: 25229 - protein, 469 aa, synthetic construct; identical to SEQ ID NO: 22922
  REGION 1..469: note = neuraminidase__InfluenzaA__AHZ35767

SEQ ID NO: 25230 - protein, 469 aa, synthetic construct; identical to SEQ ID NO: 22922
  REGION 1..469: note = neuraminidase__InfluenzaA__AHZ35779

SEQ ID NO: 25231 - protein, 469 aa, synthetic construct
  REGION 1..469: note = neuraminidase__InfluenzaA__AHZ35803
MNPNQKIITIGSVCMTIGMANLMLQIGNIISIWISHSIQLGNKNQIETCNQSVITYENNTWVNQTYVNISNTNFAAGQSVVSVKIAGNSSLCPVSGWAIYSKDNSIRIGSKGDVFVIREPFISCSPLECRTFFLTQGALLNDKHSNGTIKDRSPYRTLMSCPIGEVPSPYNSRFESVAWSASACHDGINWLTIGISGPDNGAVAVLKYNGIITDTIKSWRNNILRTQESECACVNGSCFTIMTDGPSDGQASYKIFRIEKGKIVKSVEMNAPNYHYEECSCYPDSSEITCVCRDNWHGSNRPWVSFNQNLEYQIGYICSGIFGDNPRPHDKTGSCGPVSSNGANGVKGFSFKYGNGVWIGRTKSISSRKGFEMIWDPNGWTGTDNNFSIKQDIVGMNEWSGYSGSFVQHPELTGLDCIRPCFWVELIRGRPKENTIWTSGSSISFCGVNSDTVGWSWPDGAELPFTIDK

SEQ ID NO: 25232 - protein, 469 aa, synthetic construct
  REGION 1..469: note = neuraminidase__InfluenzaA__AHZ35814
MNPNQKIITIGSVSLTISTICFFMQIAILITTVTLHFKQYEFNSPPNNQVMLCEPTIIERNITEIVYLTNTTIEKEICPKLAEYRNWSKPQCDITGFAPFSKDNSIRLSAGGDLWVTREPYVSCDPDKCYQFALGQGTTLNNVHSNNTVRDRTPYRTLLMNELGVPFHLGTKQVCIAWSSSSCHDGKAWLHVCITGDDKNATASFIYNGRLVDSVVSWSKEILRTQESECVCINGTCTVVMTDGSASGKADTKILFIEEGKIVHTSTLSGSAQHVEECSCYPRYPGVRCVCRDNWKGSNRPIVDINIKDHSIVSSYVCSGLVGDTPRKNDSSSSSHCLDPNNEEGGHGVKGWAFDDGNDVWMGRTINETSRLGYETFKVIEGWSNPKSKLQINRQVIVDRGNRSGYSGIFSVEGKSCINRCFYVELIRGRKEETEVLWTSNSIVVFCGTSGTYGTGSWPDGADLNLMPI

SEQ ID NO: 25233 - protein, 469 aa, synthetic construct
  REGION 1..469: note = neuraminidase__InfluenzaA__AHZ35837
MNPNQKIITIGSVCMTIGMANLMLQIGNIISIWISHSIQLGNKNQIETCNQSVITYENNTWVNQTYVNISNTNFAAGQSVVSVKIAGNSSLCPVSGWAIYSKDNSIRIGSKGDVFVIREPFISCSPLECRTFFLTQGALLNDKHSNGTIKDRSPYRTLMSCPIGEVPSPYNSRFESVAWSASACHDGINWLTIGISGPDNGAVAVLKYNGIITDTIKSWRNNILRTQESECACVNGSCFTIMTDGPSDGQASYKIFRIEKGKIVKSVEMNAPNYHYEECSCYPDSSEITCVCRDNWHGSNRPWVSFNQNLEYQIGYICSGIFGDNPRPHDKTGSCGPVSSNGANGVKGFSFKYGNGVWIGRTKSISSRKGFEMIWDPNGWTGTDNNFSIKQDIVGINEWSGYSGSFVQHPELTGLDCIRPCFWVELIRGRPKENTIWTSGSSISFCGVNSDTVGWSWPDGAELPFTIDK

SEQ ID NO: 25234 - protein, 469 aa, synthetic construct; identical to SEQ ID NO: 25233
  REGION 1..469: note = neuraminidase__InfluenzaA__AHZ35848

SEQ ID NO: 25235 - protein, 469 aa, synthetic construct; identical to SEQ ID NO: 25233
  REGION 1..469: note = neuraminidase__InfluenzaA__AHZ35859

SEQ ID NO: 25236 - protein, 469 aa, synthetic construct; identical to SEQ ID NO: 25232
  REGION 1..469: note = neuraminidase__InfluenzaA__AHZ35870

SEQ ID NO: 25237 - protein, 469 aa, synthetic construct; identical to SEQ ID NO: 25232
  REGION 1..469: note = neuraminidase__InfluenzaA__AHZ35882

SEQ ID NO: 25238 - protein, 469 aa, synthetic construct
  REGION 1..469: note = neuraminidase__InfluenzaA__AHZ35894
MNPNQKIITIGSVCMTIGMANLMLQIGNIISIWISHSIQLGNKNQIETCNQSVITYENNTWVNQTYVNISNTNFAAGQSVVSVKIAGNSSLCPVSGWAIYSKDNSIRIGSKGDVFVIREPFISCSPLECRTFFLTQGALLNDKHSNGTIKDRSPYRTLMSCPIGEVPSPYNSRFESVAWSASACHDGINWLTIGISGPDNGAVAVLKYNGIITDTIKSWRNNILRTQESECACVNGSCFTIMTDGPSDGQASYKIFRIEKGKIVKSVEMNAPNYHYEECSCYPDSSEITCVCRDNWHGSNRPWVSFNQNLEYQIGYICSGIFGDNPRPHDKTGSCGPVSSNGANGVKGFSFKYGSGVWIGRTKSISSRKGFEMIWDPNGWTGTDNNFSIKQDIVGINEWSGYSGSFVQHPELTGLDCIRPCFWVELIRGRPKENTIWTSGSSISFCGVNSDTVGWSWPDGAELPFTIDK

SEQ ID NO: 25239 - protein, 469 aa, synthetic construct; identical to SEQ ID NO: 25233
  REGION 1..469: note = neuraminidase__InfluenzaA__AHZ35905

SEQ ID NO: 25240 - protein, 469 aa, synthetic construct; identical to SEQ ID NO: 25233
  REGION 1..469: note = neuraminidase__InfluenzaA__AHZ35916

SEQ ID NO: 25241 - protein, 469 aa, synthetic construct; identical to SEQ ID NO: 20958
  REGION 1..469: note = neuraminidase__InfluenzaA__AHZ35927

SEQ ID NO: 25242 - protein, 469 aa, synthetic construct
  REGION 1..469: note = neuraminidase__InfluenzaA__AHZ35938
MNPNQKIITIGSVCMIIGMANLILQIGNIISIWISHSIQLGNQNQIETCNQSVITYENNTWVNQTYVNISNTNFAAGQSVVSVKLAGNSSLCPVSGWAIYSKDNSIRIGSKGDVFVIREPFISCSPLECRTFFLTQGALLNDKHSNGTIKDRSPYRTLMSCPIGEVPSPYNSRFESVAWSASACHDGINWLTIGISGPDNGAVAVLKYNGIITDTIKSWRNNILRTQESECACVNGSCFTIMTDGPSDGQASYKIFRIEKGKIVKSVEMNAPNYHYEECSCYPDSSEITCVCRDNWHGSNRPWVSFNQNLEYQIGYICSGIFGDNPRPHDKTGSCGPVSSNGANGVKGFSFKYGNGVWIGRTKSISSRKGFEMIWDPNGWTGTDNNFSIKQDIVGINEWSGYSGSFVQHPELTGLDCIRPCFWVELIRGRPKENTIWTSGSSISFCGVNSDTVGWSWPDGAELPFTIDK

SEQ ID NO: 25243 - protein, 469 aa, synthetic construct; identical to SEQ ID NO: 25232
  REGION 1..469: note = neuraminidase__InfluenzaA__AHZ35949

SEQ ID NO: 25244 - protein, 469 aa, synthetic construct
  REGION 1..469: note = neuraminidase__InfluenzaA__AHZ35961
MNPNQKIITIGSVCMTIGMANLMLQIGNIISIWISHSIQLGNKNQIETCNQSVITYENNTWVNQTYVNISNTNFAAGQSVVSVKIAGNSSLCPVSGWAIYSKDNSIRIGSKGDVFVIREPFISCSPLECRTFFLTQGALLNDKHSNGTIKDRSPYRTLMSCPIGEVPSPYNSRFESVAWSASACHDGINWLTIGISGPDNGAVAVLKYNGIITDTIKSWRNNILRTQESECACVNGSCFTIMTDGPSDGQASYKIFRIEKGKIVKSVEMNAPNYHYEECSCYPDSSEITCVCRDNWHGSNRPWVSFNQNLEYQIGYICSGIFGDNPRPHDKTGSCGPVSSNGANGVKGFSFKYGNGVWIGRTKSISSRKGFEMIWDPNGWTGTDNNFSIKQDIVGINEWSGYSGSFVQHPELTGLDCIRPCFWVELIRGRPKESTIWTSGSSISFCGVNSDTVGWSWPDGAELPFTIDK

SEQ ID NO: 25245 - protein, 469 aa, synthetic construct; identical to SEQ ID NO: 25233
  REGION 1..469: note = neuraminidase__InfluenzaA__AHZ35972

SEQ ID NO: 25246 - protein, 469 aa, synthetic construct
  REGION 1..469: note = neuraminidase__InfluenzaA__AHZ35983
MNPNQKITTIGSVCMTIGMANLMLQIGNIISIWISHSIQLGNKNQIETCNQSVITYENNTWVNQTYVNISNTNFAAGQSVVSVKIAGNSSLCPVSGWAIYSKDNSIRIGSKGDVFVIREPFISCSPLECRTFFLTQGALLNDKHSNGTIKDRSPYRTLMSCPIGEVPSPYNSRFESVAWSASACHDGINWLTIGISGPDNGAVAVLKYNGIITDTIKSWRNNILRTQESECACVNGSCFTIMTDGPSDGQASYKIFRIEKGKIVKSVEMNAPNYHYEECSCYPDSSEITCVCRDNWHGSNRPWVSFNQNLEYQIGYICSGIFGDNPRPHDKTGSCGPVSSNGANGVKGFSFKYGNGVWIGRTKSISSRKGFEMIWDPNGWTGTDNNFSIKQDIVGINEWSGYSGSFVQHPELTGLDCIRPCFWVELIRGRPKENTIWTSGSSISFCGVNSDTVGWSWPDGAELPFTIDK

SEQ ID NO: 25247 - protein, 469 aa, synthetic construct; identical to SEQ ID NO: 25233
  REGION 1..469: note = neuraminidase__InfluenzaA__AHZ35994

SEQ ID NO: 25248 - protein, 469 aa, synthetic construct; identical to SEQ ID NO: 25233
  REGION 1..469: note = neuraminidase__InfluenzaA__AHZ36005

SEQ ID NO: 25249 - protein, 469 aa, synthetic construct; identical to SEQ ID NO: 25233
  REGION 1..469: note = neuraminidase__InfluenzaA__AHZ36016

SEQ ID NO: 25250 - protein, 469 aa, synthetic construct
  REGION 1..469: note = neuraminidase__InfluenzaA__AHZ36027
MNPNQKIITIGSVCMTIGMANLILQIGNIISIWISHSIQLGNQNQIETCNQSVIIYENNTWVNQTYVNISNTNFAAGQSVVSVKLAGNSSLCPVSGWAIYSKDNSIRIGSKGDVFVIREPFISCSPLECRTFFLTQGALLNDKHSNGTIKDRSPYRTLMSCPIGEVPSPYNSRFESVAWSASACHDGFNWLTIGISGPDNGAVAVLKYNGIITDTIKSWRNNILRTQESECACVNGSCFTIMTDGPSDGQASYKIFRIEKGKIVKSVEMNAPNYHYEECSCYPDSSEITCVCRDNWHGSNRPWVSFNQNLEYQIGYICSGIFGDNPRPNDKTGSCGPVSSNGANGVKGFSFKYGNGVWIGRTKSISSRKGFEMIWDPNGWTGTDNNFSIKQDIIGINEWSGYSGSFVQHPELTGLDCIRPCFWVELIRGRPKENTIWTSGSSISFCGVNSDTVGWSWPDGAELPFTIDK

SEQ ID NO: 25251 - protein, 469 aa, synthetic construct
  REGION 1..469: note = neuraminidase__InfluenzaA__AHZ36050
MNPNQKIITIGSVSLTISTICFFMQIAILITTVTLHFKQYEFNSPPNNQVMLCEPTIIERNITEIVYLTNTTIEKEICPKLAEYRNWSKPQCDITGFAPFSKDNSIRLSAGGDIWVTREPYVSCDPDKCYQFALGQGTTLNNVHSNNTVRDRTPYRTLLMNELGVPFHLGTKQVCIAWSSSSCHDGKAWLHVCITGDDKNATASFIYNGRLVDSVVSWSKEILRTQESECVCINGTCTVVMTDGSASGKADTKILFIEEGKIVHTSTLSGSAQHVEECSCYPRYPGVRCVCRDNWKGSNRPIVDINIKDHSIVSSYVCSGLVGDTPRRNDSSSSSHCLDPNNEEGGHGVKGWAFDDGNDVWMGRTINETSRLGYETFKVIEGWSNPKSKLQINRQVIVDRGNRSGYSGIFSVEGKSCINRCFYVELIRGRKEETEVLWTSNSIVVFCGTSGTYGTGSWPDGADLNLMPI

SEQ ID NO: 25252 - protein, 469 aa, synthetic construct
  REGION 1..469: note = neuraminidase__InfluenzaA__AHZ36062
MNPNQKIITIGSVCMTIGMANLMLQIGNIISIWISHSIQLGNKNQIETCNQSVITYENNTWVNQTYVNISNTNFAAGQSVVSVKIAGNSSLCPVSGWAIYSKDNSIRIGSKGDVFVIREPFISCSPLGCRTFFLTQGALLNDKHSNGTIKDRSPYRTLMSCPIGEVPSPYNSRFESVAWSASACHDGINWLTIGISGPDNGAVAVLKYNGIITDTIKSWRNNILRTQESECACVNGSCFTIMTDGPSDGQASYKIFRIEKGKIVKSVEMNAPNYHYEECSCYPDSSEITCVCRDNWHGSNRPWVSFNQNLEYQIGYICSGIFGDNPRPHDKTGSCGPVSSNGANGVKGFSFKYGNGVWIGRTKSISSRKGFEMIWDPNGWTGTDNNFSIKQDIVGINEWSGYSGSFVQHPELTGLDCIRPCFWVELIRGRPKENTIWTSGSSISFCGVNSDTVGWSWPDGAELPFTIDK

SEQ ID NO: 25253 - protein, 469 aa, synthetic construct; identical to SEQ ID NO: 25233
  REGION 1..469: note = neuraminidase__InfluenzaA__AHZ36084

SEQ ID NO: 25254 - protein, 469 aa, synthetic construct
  REGION 1..469: note = neuraminidase__InfluenzaA__AHZ36095
MNPNQKIITIGSVCMTIGMANLILQIGNIISIWISHSIQLGNQNQIETCNQSVIIYENNTWVNQTYVNISNTNFAAGQSVVSVKLAGNSSLCPVSGWAIYSKDNSIRIGSKGDVFVIREPFISCSPLECRTFFLTQGALLNDKHSNGTIKDRSPYRTLMSCPIGEVPSPYNSRFESVAWSASACHDGFNWLTIGISGPDNGAVAVLKYNGIITDTIKSWRNNILRTQESECACVNGSCFTIMTDGPSDGQASYKIFRIEKGKIVKSVEMNAPNYHYEECSCYPDSSEITCVCRDNWHGSNRPWVSFNQNLEYQIGYICSGIFGDNPRPNDKTGGCGPVSSNGANGVKGFSFKYGNGVWIGRTKSISSRKGFEMIWDPNGWTGTDNNFSIKQDIIGINEWSGYSGSFVQHPELTGLDCIRPCFWVELIRGRPKENTIWTSGSSISFCGVNSDTVGWSWPDGAELPFTIDK

SEQ ID NO: 25255 - protein, 469 aa, synthetic construct; identical to SEQ ID NO: 25233
  REGION 1..469: note = neuraminidase__InfluenzaA__AHZ36106

SEQ ID NO: 25256 - protein, 469 aa, synthetic construct
  REGION 1..469: note = neuraminidase__InfluenzaA__AHZ36117
MNPNQKIITIGSVCMTIGMANLILQIGNIISIWISHSIQLGNQNQIETCNQSVIIYENNTWVNQTYVNISNTNFAAGQSVVSVKLAGNSSLCPVSGWAIYSKDNSIRIGSKGDVFVIREPFISCSPLECRTFFLTQGALLNDKHSNGTIKDRSPYRTLMSCSIGEVPSPYNSRFESVAWSASACHDGFNWLTIGISGPDNGAVAVLKYNGIITDTIKSWRNNILRTQESECACVNGSCFTIMTDGPSDGQASYKIFRIEKGKIVKSVEMNAPNYHYEECSCYPDSSEITCVCRDNWHGSNRPWVSFNQNLEYQIGYICSGIFGDNPRPNDKTGSCGPVSSNGANGVKGFSFKYGNGVWIGRTKSISSRKGFEMIWDPNGWTGTDNNFSIKQDIIGINEWSGYSGSFVQHPELTGLDCIRPCFWVELIRGRPKENTIWTSGSSISFCGVNSDTVGWSWPDGAELPFTIDK

SEQ ID NO: 25257 - protein, 469 aa, synthetic construct; identical to SEQ ID NO: 25233
  REGION 1..469: note = neuraminidase__InfluenzaA__AHZ36128

SEQ ID NO: 25258 - protein, 469 aa, synthetic construct; identical to SEQ ID NO: 25233
  REGION 1..469: note = neuraminidase__InfluenzaA__AHZ36139

SEQ ID NO: 25259 - protein, 469 aa, synthetic construct; identical to SEQ ID NO: 25251
  REGION 1..469: note = neuraminidase__InfluenzaA__AHZ36150

SEQ ID NO: 25260 - protein, 469 aa, synthetic construct; identical to SEQ ID NO: 25233
  REGION 1..469: note = neuraminidase__InfluenzaA__AHZ36161

SEQ ID NO: 25261 - protein, 469 aa, synthetic construct; identical to SEQ ID NO: 25233
  REGION 1..469: note = neuraminidase__InfluenzaA__AHZ36172

SEQ ID NO: 25262 - protein, 469 aa, synthetic construct
  REGION 1..469: note = neuraminidase__InfluenzaA__AHZ36183
MNPNQKIITIGSVCMTIGMANLMLQIGNIISIWISHSIQLGNKNQIETCNQSVITYENNTWVNQTYVNISNTNFAAGQSVVSVKIAGNSSLCPVSGWAIYSKDNSIRIGSKGDVFVIREPFISCSPLECRTFFLTQGALLNDKHSNGTIKDRSPYRTLMSCPIGEVPSPYNSRFESVAWSASACHDGINWLTIGISGPDNGAVAVLKYNGIITDTIKSWRNNILRTQESECACVNGSCFTIMTDGPSDGQASYKIFRIEKGKIVKSVEMNAPNYHYEECSCYPDSSEITCVCRDNWHGSNRPWVSFNQNLEYQIGYICSGILGDNPRPHDKTGSCGPVSSNGANGVKGFSFKYGNGVWIGRTKSISSRKGFEMIWDPNGWTGTDNNFSIKQDIVGINEWSGYSGSFVQHPELTGLDCIRPCFWVELIRGRPKENTIWTSGSSISFCGVNSDTVGWSWPDGAELPFTIDK

SEQ ID NO: 25263 - protein, 469 aa, synthetic construct; identical to SEQ ID NO: 25232
  REGION 1..469: note = neuraminidase__InfluenzaA__AHZ36194

SEQ ID NO: 25264 - protein, 469 aa, synthetic construct; identical to SEQ ID NO: 25251
  REGION 1..469: note = neuraminidase__InfluenzaA__AHZ36206

SEQ ID NO: 25265 - protein, 469 aa, synthetic construct; identical to SEQ ID NO: 25233
  REGION 1..469: note = neuraminidase__InfluenzaA__AHZ36218

SEQ ID NO: 25266 - protein, 469 aa, synthetic construct; identical to SEQ ID NO: 25251
  REGION 1..469: note = neuraminidase__InfluenzaA__AHZ36229

SEQ ID NO: 25267 - protein, 469 aa, synthetic construct; identical to SEQ ID NO: 25233
  REGION 1..469: note = neuraminidase__InfluenzaA__AHZ36241

SEQ ID NO: 25268 - protein, 469 aa, synthetic construct; identical to SEQ ID NO: 25233
  REGION 1..469: note = neuraminidase__InfluenzaA__AHZ36252

SEQ ID NO: 25269 - protein, 469 aa, synthetic construct; identical to SEQ ID NO: 25233
  REGION 1..469: note = neuraminidase__InfluenzaA__AHZ36263

SEQ ID NO: 25270 - protein, 469 aa, synthetic construct; identical to SEQ ID NO: 22922
  REGION 1..469: note = neuraminidase__InfluenzaA__AHZ36274

SEQ ID NO: 25271 - protein, 469 aa, synthetic construct; identical to SEQ ID NO: 25233
  REGION 1..469: note = neuraminidase__InfluenzaA__AHZ36286

SEQ ID NO: 25272 - protein, 469 aa, synthetic construct
  REGION 1..469: note = neuraminidase__InfluenzaA__AHZ36297
MNPNQKIITIGSVSLTISTICFFMQIAILITTVTLHFKQYEFNSPPNNQVMLCEPTIIERNITEIVYLTNTTIEKEICPRPAEYRNWSKPQCDITGFAPFSKDNSIRLSAGGDIWVTREPYVSCDPDKCYQFALGQGTTLNNVHSNNTVRDRTPYRTLLMNELGVPFHLGTKQVCIAWSSSSCHDGKAWLHVCITGDDKNATASFIYNGRLVDSVVSWSKEILRTQESECVCINGTCTVVMTDGSASGKADTKILFIEEGKIVHTSTLSGGAQHVEECSCYPRYPGVRCVCRDNWKGSNRPIVDINIKDHSIVSSYVCSGLVGDTPRKNDSSSSSHCLDPNNEEGGHGVKGWAFDDGNDVWMGRTINETSRLGYETFKVIEGWSNPKSKLQINRQVIVDRGDRSGYSGIFSVEGKSCINRCFYVELIRGRKEETEVLWTSNSIVVFCGTSGTYGTGSWPDGADLNLMPI

SEQ ID NO: 25273 - protein, 469 aa, synthetic construct
  REGION 1..469: note = neuraminidase__InfluenzaA__AHZ36309
MNPNQKIITIGSVCMTIGMANLMLQIGNIISIWISHSIQLGDKNQIETCNQSVITYENNTWVNQTYVNISNTNFAAGQSVVSVKIAGNSSLCPVSGWAIYSKDNSIRIGSKGDVFVIREPFISCSPLECRTFFLTQGALLNDKHSNGTIKDRSPYRTLMSCPIGEVPSPYNSRFESVAWSASACHDGINWLTIGISGPDNGAVAVLKYNGIITDTIKSWRNNILRTQESECACVNGSCFTIMTDGPSDGQASYKIFRIEKGKIVKSVEMNAPNYHYEECSCYPDSSEITCVCRDNWHGSNRPWVSFNQNLEYQIGYICSGIFGDNPRPHDKTGSCGPVSSNGANGVKGFSFKYGNGVWIGRTKSISSRKGFEMIWDPNGWTGTDNNFSIKQDIVGINEWSGYSGSFVQHPELTGLDCIRPCFWVELIRGRPKENTIWTSGSSISFCGVNSDTVGWSWPDGAELPFTIDK

SEQ ID NO: 25274 - protein, 469 aa, synthetic construct; identical to SEQ ID NO: 25233
  REGION 1..469: note = neuraminidase__InfluenzaA__AHZ36320

SEQ ID NO: 25275 - protein, 469 aa, synthetic construct; identical to SEQ ID NO: 25233
  REGION 1..469: note = neuraminidase__InfluenzaA__AHZ36331

SEQ ID NO: 25276 - protein, 469 aa, synthetic construct; identical to SEQ ID NO: 22922
  REGION 1..469: note = neuraminidase__InfluenzaA__AHZ36353

SEQ ID NO: 25277 - protein, 469 aa, synthetic construct
  REGION 1..469: note = neuraminidase__InfluenzaA__AHZ36365
MNPNQKIITIGSVCMTIGMANLMLQIGNIISIWISHPIQLGNKNQIETCNQSVITYENNTWVNQTYVNISNTNFAAGQSVVSVKIAGNSSLCPVSGWAIYSKDNSIRIGSKGDVFVIREPFISCSPLECRTFFLTQGALLNDKHSNGTIKDRSPYRTLMSCPIGEVPSPYNSRFESVAWSASACHDGINWLTIGISGPDNGAVAVLKYNGIITDTIKSWRNNILRTQESECACVNGSCFTIMTDGPSDGQASYKIFRIEKGKIVKSVEMNAPNYHYEECSCYPDSSEITCVCRDNWHGSNRPWVSFNQNLEYQIGYICSGIFGDNPRPHDKTGSCGPVSSNGANGVKGFSFKYGNGVWIGRTKSISSRKGFEMIWDPNGWTGTDNNFSIKQDIVGINEWSGYSGSFVQHPELTGLDCIRPCFWVELIRGRPKENTIWTSGSSISFCGVNSDTVGWSWPDGAELPFTIDK

SEQ ID NO: 25278 - protein, 469 aa, synthetic construct; identical to SEQ ID NO: 22922
  REGION 1..469: note = neuraminidase__InfluenzaA__AHZ36376

SEQ ID NO: 25279 - protein, 469 aa, synthetic construct; identical to SEQ ID NO: 22922
  REGION 1..469: note = neuraminidase__InfluenzaA__AHZ36388

SEQ ID NO: 25280 - protein, 469 aa, synthetic construct; identical to SEQ ID NO: 22922
  REGION 1..469: note = neuraminidase__InfluenzaA__AHZ36400

SEQ ID NO: 25281 - protein, 469 aa, synthetic construct; identical to SEQ ID NO: 22922
  REGION 1..469: note = neuraminidase__InfluenzaA__AHZ36412

SEQ ID NO: 25282 - protein, 469 aa, synthetic construct; identical to SEQ ID NO: 22922
  REGION 1..469: note = neuraminidase__InfluenzaA__AHZ36424

SEQ ID NO: 25283 - protein, 469 aa, synthetic construct; identical to SEQ ID NO: 22922
  REGION 1..469: note = neuraminidase__InfluenzaA__AHZ36436

SEQ ID NO: 25284 - protein, 469 aa, synthetic construct
  REGION 1..469: note = neuraminidase__InfluenzaA__AHZ36448
MNPNQKIITIGSVSLTISTICFFMQIAILITTVTLHFKQYEFNSPPNNQVMLCEPTIIEKNITEIVYLTNTTIEKEICPKPAEYRNWSKPQCDITGFAPFSKDNSIRLSAGGDIWVTREPYVSCDPDKCYQFALGQGTTLNNVHSNNTVRDRTPYRTLLMNELGVPFHLGTKQVCIAWSSSSCHDGKAWLHVCITGDDKNATASFIYNGRLVDSVVSWSKEILRTQESECVCINGTCTVVMTDGSASGKADTKILFIEEGKIVHTSTLSGSAQHVEECSCYPRYPGVRCVCRDNWKGSNRPIVDINIKDHSIVSSYVCSGLVGDTPRKNDSSSSSHCLDPNNEEGGHGVKGWAFDDGNDVWMGRTINETSRLGYETFKVIEGWSNPKSKLQINRQVIVDRGDRSGYSGIFSVEGKSCINRCFYVELIRGRKEETEVLWTSNSIVVFCGTSGTYGTGSWPDGADLNLMPI

SEQ ID NO: 25285 - protein, 469 aa, synthetic construct; identical to SEQ ID NO: 22922
  REGION 1..469: note = neuraminidase__InfluenzaA__AHZ36460

SEQ ID NO: 25286 - protein, 469 aa, synthetic construct; identical to SEQ ID NO: 22922
  REGION 1..469: note = neuraminidase__InfluenzaA__AHZ36472

SEQ ID NO: 25287 - protein, 469 aa, synthetic construct; identical to SEQ ID NO: 22922
  REGION 1..469: note = neuraminidase__InfluenzaA__AHZ36484

SEQ ID NO: 25288 - protein, 469 aa, synthetic construct; identical to SEQ ID NO: 22922
  REGION 1..469: note = neuraminidase__InfluenzaA__AHZ36496

SEQ ID NO: 25289 - protein, 469 aa, synthetic construct; identical to SEQ ID NO: 22922
  REGION 1..469: note = neuraminidase__InfluenzaA__AHZ36508

SEQ ID NO: 25290 - protein, 469 aa, synthetic construct; identical to SEQ ID NO: 22922
  REGION 1..469: note = neuraminidase__InfluenzaA__AHZ36520

SEQ ID NO: 25291 - protein, 469 aa, synthetic construct
  REGION 1..469: note = neuraminidase__InfluenzaA__AHZ36532
MNPNQKIITIGSVSLTISTICFFMQIAILITTVTLHFKQYEFNSPPNNQVMLCEPTIIERNITEIVYLTNTTIEKEICPKPAEYRTWSKPQCDITGFAPFSKDNSIRLSAGGDIWVTREPYVSCDPDKCYQFALGQGTTLNNVHSNNTVRDRTPYRTLLMNELGVPFHLGTKQVCIAWSSSSCHDGKAWLHVCITGDDKNATASFIYNGRLVDSVVSWSKEILRTQESECVCINGTCTVVMTDGSASGKADTKILFIEEGKIVHTSTLSGSAQHVEECSCYPRYPGVRCVCRDNWKGSNRPIVDINIKDHSIVSSYVCSGLVGDTPRKNDSSSSSHCLDPNNEEGGHGVKGWAFDDGNDVWMGRTINETSRLGYETFKVIEGWSNPKSKLQINRQVIVDRGDRSGYSGIFSVEGKSCINRCFYVELIRGRKEETEVLWTSNSIVVFCGTSGTYGTGSWPDGADLNLMPI

SEQ ID NO: 25292 - protein, 469 aa, synthetic construct; identical to SEQ ID NO: 22922
  REGION 1..469: note = neuraminidase__InfluenzaA__AHZ36544

SEQ ID NO: 25293 - protein, 469 aa, synthetic construct; identical to SEQ ID NO: 22922
  REGION 1..469: note = neuraminidase__InfluenzaA__AHZ36556

SEQ ID NO: 25294 - protein, 469 aa, synthetic construct; identical to SEQ ID NO: 22922
  REGION 1..469: note = neuraminidase__InfluenzaA__AHZ36568

SEQ ID NO: 25295 - protein, 469 aa, synthetic construct; identical to SEQ ID NO: 22922
  REGION 1..469: note = neuraminidase__InfluenzaA__AHZ36580

SEQ ID NO: 25296 - protein, 469 aa, synthetic construct; identical to SEQ ID NO: 22922
  REGION 1..469: note = neuraminidase__InfluenzaA__AHZ36592

SEQ ID NO: 25297 - protein, 469 aa, synthetic construct; identical to SEQ ID NO: 22922
  REGION 1..469: note = neuraminidase__InfluenzaA__AHZ36604

SEQ ID NO: 25298 - protein, 469 aa, synthetic construct; identical to SEQ ID NO: 22922
  REGION 1..469: note = neuraminidase__InfluenzaA__AHZ36616

SEQ ID NO: 25299 - protein, 469 aa, synthetic construct
  REGION 1..469: note = neuraminidase__InfluenzaA__AHZ36628
MNPNQKIITIGSVSLTISTICFFMQIAILITTVTLHFKQCEFNSPPNNQVMLCEPTIIERNITEIVYLTNTTIEKEICPKPAEYRNWSKPQCDITGFAPFSKDNSIRLSAGGDIWVTREPYVSCDPDKCYQFALGQGTTLNNVHSNNTVRDRTPYRTLLMNELGVPFHLGTKQVCIAWSSSSCHDGKAWLHVCITGDDKNATASFIYNGRLVDSVVSWSKEILRTQESECVCINGTCTVVMTDGSASGKADTKILFIEEGKIVHTSTLSGSAQHVEECSCYPRYPGVRCVCRDNWKGSNRPIVDINIKDHSIVSSYVCSGLVGDTPRKNDSSSSSHCLDPNNEEGGHGVKGWAFDDGNDVWMGRTINETSRLGYETFKVIEGWSNPKSKLQINRQVIVDRGDRSGYSGIFSVEGKSCINRCFYVELIRGRKEETEVLWTSNSIVVFCGTSGTYGTGSWPDGADLNLMPI

SEQ ID NO: 25300 - protein, 469 aa, synthetic construct
  REGION 1..469: note = neuraminidase__InfluenzaA__AHZ36640
MNPNQKIITIGSVSLTISTICFFMQIAILITTVTLHFKQYEFNSPPNNQVMLCEPTIIERNITEIVYLTNTTIEKEICPKPAEYRNWSKPQCDITGFAPFSKDNSIRLSAGGDIWVTREPYVSCDPDKCYQFALGQGTTLNNVHSNNTVHDRTPYRTLLMNELGVPFHLGTKQVCIAWSSSSCHDGKAWLHVCITGDDKNATASFIYNGRLVDSVVSWSKEILRTQESECVCINGTCTVVMTDGSASGKADTKILFIEEGKIVHTSTLSGSAQHVEECSCYPRYPGVRCVCRDNWKGSNRPIVDINIKDHSIVSSYVCSGLVGDTPRKNDSSSSSHCLDPNNEEGGHGVKGWAFDDGNDVWMGRTINETSRLGYETFKVIEGWSNPKSKLQINRQVIVDRGDRSGYSGIFSVEGKSCINRCFYVELIRGRKEETEVLWTSNSIVVFCGTSGTYGTGSWPDGADLNLMPI

SEQ ID NO: 25301 - protein, 469 aa, synthetic construct; identical to SEQ ID NO: 22922
  REGION 1..469: note = neuraminidase__InfluenzaA__AHZ36652

SEQ ID NO: 25302 - protein, 469 aa, synthetic construct; identical to SEQ ID NO: 22146
  REGION 1..469: note = neuraminidase__InfluenzaA__AHZ36664

SEQ ID NO: 25303 - protein, 469 aa, synthetic construct; identical to SEQ ID NO: 22146
  REGION 1..469: note = neuraminidase__InfluenzaA__AHZ36676

SEQ ID NO: 25304 - protein, 469 aa, synthetic construct; identical to SEQ ID NO: 22146
  REGION 1..469: note = neuraminidase__InfluenzaA__AHZ36688

SEQ ID NO: 25305 - protein, 465 aa, synthetic construct; identical to SEQ ID NO: 23454
  REGION 1..465: note = neuraminidase__InfluenzaA__AHZ39689

SEQ ID NO: 25306 - protein, 465 aa, synthetic construct; identical to SEQ ID NO: 23454
  REGION 1..465: note = neuraminidase__InfluenzaA__AHZ39713

SEQ ID NO: 25307 - protein, 465 aa, synthetic construct; identical to SEQ ID NO: 23454
  REGION 1..465: note = neuraminidase__InfluenzaA__AHZ39725

SEQ ID NO: 25308 - protein, 465 aa, synthetic construct; identical to SEQ ID NO: 23454
  REGION 1..465: note = neuraminidase__InfluenzaA__AHZ39737

SEQ ID NO: 25309 - protein, 465 aa, synthetic construct
  REGION 1..465: note = neuraminidase__InfluenzaA__AHZ39749
MNPNQKILCISATAIIIGAIAVLIGIANLGLNIGLHLKPGCNCSHSQPETTNTSQTIINNYYNETNITNIQMEERTSRNFNNLTKGLCTINSWHIYGKDNAVRIGESSDVLVTREPYVSCDPDECRFYALSQGTTIRGKHSNGTIHDRSQYRALISWPLSSPPTVYNSRVECIGWSSTSCHDGKSRMSICISGPNNNASAVVWYNRRPVAEINTWARNILRTQESECVCHNGVCPVVFTDGSATGPADTRIYYFKEGKILKWESLTGTAKHIEECSCYGERTGITCTCRDNWQGSNRPVIQIDPVAMTHTSQYICSPVLTDNPRPNDPNIGKCNDPYPGNNNNGVKGFSYLDGANTWLGRTISTASRSGYEMLKVPNALTDDRSKPIQGQTIVLNADWSGYSGSFMDYWAEGDCYRACFYVELIRGRPKEDKVWWTSNSIVSMCSSTEFLGQWNWPDGAKIEYFL

SEQ ID NO: 25310 - protein, 465 aa, synthetic construct; identical to SEQ ID NO: 25309
  REGION 1..465: note = neuraminidase__InfluenzaA__AHZ39761

SEQ ID NO: 25311 - protein, 465 aa, synthetic construct; identical to SEQ ID NO: 23454
  REGION 1..465: note = neuraminidase__InfluenzaA__AHZ39773

SEQ ID NO: 25312 - protein, 465 aa, synthetic construct; identical to SEQ ID NO: 23454
  REGION 1..465: note = neuraminidase__InfluenzaA__AHZ39785

SEQ ID NO: 25313 - protein, 469 aa, synthetic construct
  REGION 1..469: note = neuraminidase__InfluenzaA__AHZ39797
MNPNQKIITIGSVSLTISTVCFFMQIAILITTVTLHFKQYEFNPPPNNQVMLCEPTIIERNITEIVYLTNTTIEKEICPKPAEYRNWSKPQCGITGFAPFSKDNSIRLSAGGDIWVTREPYVSCDPDKCYQFALGQGTTLNNVHSNNTVRDRTPYRTLLMNELGVPFHLGTKQVCIAWSSSSCHDGKAWLHVCITGDDKNATASFIYNGRLVDSVVSWSKEILRTQESECVCINGTCTVVMTDGSASGKSDTKILFIEEGKIVHTSTLSGSAQHVEECSCYPRYPGVRCVCRDNWKGSNRPIVDINIKDHSIVSSYVCSGLVGDTPRKNDSSSSSHCLDPNNEEGGHGVKGWAFDDGNDVWMGRTINETSRLGYETFKVIEGWSNPKSKLQINRQVIVDRGDRSGYSGIFSVEGKSCINRCFYVELIRGRKEETEVLWTSNSIVVFCGTSGTYGTGSWPDGADLNLMPI

SEQ ID NO: 25314 - protein, 469 aa, synthetic construct
  REGION 1..469: note = neuraminidase__InfluenzaA__AHZ39821
MNPNQKIITIGSVSLTISTICFFMQTAILITTVTLHFKQYEFNSPPNNQVMLCEPTIIERNITEIVYLTNTTIEKEICPKLAEYRNWSKPQCDITGFAPFSKDNSIRLSAGGDIWVTREPYVSCDPDKCYQFALGQGTTLNNVHSNNTVRDRTPYRTLLMNELGVPFHLGTKQVCIAWSSSSCHDGKAWLHVCITGDDKNATASFIYNGRLVDSVVSWSKEILRTQESECVCINGTCTVVMTDGSASGKADTKILFIEEGKIVHTSTLSGSAQHVEECSCYPRYPGVRCVCRDNWKGSNRPIVDINIKDHSIVSSYVCSGLVGDTPRRNDSSSSSHCLDPNNEEGGHGVKGWAFDDGNDVWMGRTINETSRLGYETFKVIEGWSNPKSKLQINRQVIVDRGNRSGYSGIFSVEGKSCINRCFYVELIRGRKEETEVLWTSNSIVVFCGTSGTYGTGSWPDGADLNLMPT

SEQ ID NO: 25315 - protein, 469 aa, synthetic construct; identical to SEQ ID NO: 23389
  REGION 1..469: note = neuraminidase__InfluenzaA__AHZ39833

SEQ ID NO: 25316 - protein, 469 aa, synthetic construct; identical to SEQ ID NO: 22146
  REGION 1..469: note = neuraminidase__InfluenzaA__AHZ39844

SEQ ID NO: 25317 - protein, 469 aa, synthetic construct
  REGION 1..469: note = neuraminidase__InfluenzaA__AHZ39856
MNPNQKIITIGSVSLTISTICFFMQIAILITTVTLHFKQYEFNSPPNNQVMLCEPTIIERNITEIVYLTNTTIEKEICPKPAEYRNWSKPQCDITGFAPFSKDNSIRLSAGGDIWVTREPYVSCDPDKCYQFALGQGTTLNNVHSNNTVRDRTPYRTLLMNELGVPFHLGTKQVCIAWSSSSCHDGKAWLHVCITGDDKNATASFIYNGRLVDSVVSWSKEILRTQESECVCINGTCTVVMTDGSASGKADTKILFIEEGKIVHTSTLSGSAQHVEECSCYPRYPGVRCVCRDNWKGSNRPIVDINIKDHSIVSRYVCSGLVGDTPRKNDSSSSSHCLDPNNEEGGHGVKGWAFDDGNDVWMGRTINETSRLGYETFKVIEGWSNPKSKLPINRQVIVDRGDRSGYSGIFSVEGKSCINRCFYVELIRGRKEETEVLWTSNSIVVFCGTSGTYGTGSWPDGADLNLMPI

SEQ ID NO: 25318 - protein, 469 aa, synthetic construct; identical to SEQ ID NO: 22146
  REGION 1..469: note = neuraminidase__InfluenzaA__AHZ39868

SEQ ID NO: 25319 - protein, 469 aa, synthetic construct
  REGION 1..469: note = neuraminidase__InfluenzaA__AHZ39892
MNPNQKIITIGSVSLTISTICFFMQIAILITTVTLHFKQYEFNSPPNNQVVLCEPTIIERNITEIVYLTNTTIEKEICPKPAEYRNWSKPQCDITGFAPFSKDNSIRLSAGGDIWVTREPYVSCDPDKCYQFALGQGTTLNNVHSNNTVRDRTPYRTLLMNELGVPFHLGTKQVCIAWSSSSCHDGKAWLHVCITGDDKNATASFIYNGRLVDSVVSWSKEILRTQESECVCINGTCTVVMTDGSASGKADTKILFIEEGKIVHTSTLSGSAQHVEECSCYPRYPGVRCVCRDNWKGSNRPIVDINIKDHSIVSRYVCSGLVGDTPRKNDSSSSSHCLDPNNEEGGHGVKGWAFDDGNDVWMGRTINETSRLGYETFKVIEGWSNPKSKLQINRQVIVDRGDRSGYSGIFSVEGKSCINRCFYVELIRGRKEETEVLWTSNSIVVFCGTSGTYGTGSWPDGADLNLMPI

SEQ ID NO: 25320 - protein, 469 aa, synthetic construct; identical to SEQ ID NO: 23354
  REGION 1..469: note = neuraminidase__InfluenzaA__AHZ39904

SEQ ID NO: 25321 - protein, 469 aa, synthetic construct; identical to SEQ ID NO: 23354
  REGION 1..469: note = neuraminidase__InfluenzaA__AHZ39916

SEQ ID NO: 25322 - protein, 469 aa, synthetic construct; identical to SEQ ID NO: 22146
  REGION 1..469: note = neuraminidase__InfluenzaA__AHZ39928

SEQ ID NO: 25323 - protein, 469 aa, synthetic construct
  REGION 1..469: note = neuraminidase__InfluenzaA__AHZ39940
MNPNQKIITIGSVSLTISTICFFMQIAILITTVTLHFKQYEFNSPPNNQVMLCEPTIIERNMTEIVYLTNTTIEKEICPKPAEYRNWSKPQCGITGFAPFSKDNSIRLSAGGDIWVTREPYVSCDPDKCYQFALGQGTTLNNVHSNNTVRDRTPYRTLLMNELGVPFHLGTKQVCIAWSSSSCHDGKAWLHVCITGDDKNATASFIYNGRLVDSVVSWSKEILRTQESECVCINGTCTVVMTDGSASGKADTKILFIEEGKIVHTSTLSGSAQHVEECSCYPRYPGVRCVCRDNWKGSNRPIVDINIKDHSIVSSYVCSGLVGDTPRKTDSSSSSHCLDPNNEEGGHGVKGWAFDDGNDVWMGRTINETSRLGYETFKVIEGWSNPKSKLQINRQVIVDRGDRSGYSGIFSVEGKSCINRCFYVELIRGRKEETEVLWTSNSIVVFCGTSGTYGTGSWPDGADLNLMPI

SEQ ID NO: 25324 - protein, 469 aa, synthetic construct; identical to SEQ ID NO: 22146
  REGION 1..469: note = neuraminidase__InfluenzaA__AHZ39952

SEQ ID NO: 25325 - protein, 469 aa, synthetic construct; identical to SEQ ID NO: 22146
  REGION 1..469: note = neuraminidase__InfluenzaA__AHZ39976

SEQ ID NO: 25326 - protein, 469 aa, synthetic construct
  REGION 1..469: note = neuraminidase__InfluenzaA__AHZ39988
MNPNQKIITIGSVSLTISTICFFMQIAILITTVTLHFKQYEFNSPPNNQVMLCEPTIIERNITEIVYLTNTTIEKEICPKPAEYRNWSKPQCGITGFAPFSKDNSIRLSAGGDIWVTREPYVSCDPDKCYQFALGQGTTLNNMHSNNTVRDRTPYRTLLMNELGVPFHLGTKQVCIAWSSSSCHDGKAWLHVCITGDDKNATASFIYNGRLVDSVVSWSKEILRTQESECVCINGTCTVVMTDGSASGKADTKILFIEEGKIVHTSTLSGSTQHVEECSCYPRYPGVRCVCRDNWKGSNRPIVDINIKDHSIVSSYVCSGLVGDTPRKNDSSSSSHCLDPNNEEGGHGVKGWAFDDGNDVWMGRTINETSRLGYETFKVIEGWSNPKSKLQINRQVIVDRGDRSGYSGIFSVEGKSCINRCFYVELIRGRKEETEVLWTSNSIVVFCGTSGTYGTGSWPDGADLNLMPI

SEQ ID NO: 25327 - protein, 469 aa, synthetic construct; identical to SEQ ID NO: 22146
  REGION 1..469: note = neuraminidase__InfluenzaA__AHZ40000

SEQ ID NO: 25328 - protein, 469 aa, synthetic construct; identical to SEQ ID NO: 22146
  REGION 1..469: note = neuraminidase__InfluenzaA__AHZ40012

SEQ ID NO: 25329 - protein, 469 aa, synthetic construct
  REGION 1..469: note = neuraminidase__InfluenzaA__AHZ40024
MNPNQKIITIGSVSLTISTICFFMQIAILITTVTLHFKQYEFNSPPNNQVMLCEPTIIERNITEIVYLTNTTIEKEICPKPAEYRNWSKPQCGITGFAPFSKDNSIRLSAGGDIWVTREPYVSCDPDKCYQFALGQGTTLNNVHSNNTVRDRTPYRTLLMNELGVPFHLGTKQVCIAWSSSSCHDGKAWLHVCITGDDKNATASFIYNGRLVDSVVSWSKEILRTQESECVCINGTCTVVMTDGSASGKADTKILFIEEGKIVHTSTLSGSAQHVEECSCYPRYPGVRCVCRDNWKGSNRPIVDINIKDHSIVSSYVCSGLVGDTPRKNDSSSSSHCLDPNNEEGGHGVKGWAFDDGNDVWMGRTINETSRLGFETFKVIEGWSNPKSKLQINRQVIVDRGDRSGYSGIFSVEGKSCINRCFYVELIRGRKEETEVLWTSNSIVVFCGTSGTYGTGSWPDGADLNLMPI

SEQ ID NO: 25330 - protein, 469 aa, synthetic construct; identical to SEQ ID NO: 22146
  REGION 1..469: note = neuraminidase__InfluenzaA__AHZ40036

SEQ ID NO: 25331 - protein, 469 aa, synthetic construct; identical to SEQ ID NO: 23357
  REGION 1..469: note = neuraminidase__InfluenzaA__AHZ40048

SEQ ID NO: 25332 - protein, 469 aa, synthetic construct; identical to SEQ ID NO: 22146
  REGION 1..469: note = neuraminidase__InfluenzaA__AHZ40063

SEQ ID NO: 25333 - protein, 469 aa, synthetic construct
  REGION 1..469: note = neuraminidase__InfluenzaA__AHZ40075
MNPNQKIITIGSVSLTISTVCFFMQIAILITTVTLHFKQYEFNSPPNNQVMLCEPTIIERNITEIVYLTNTTIEKEICPKPAEYRNWSKPQCGITGFAPFSKDNSIRLSAGGDIWVTREPYVSCDPDKCYQFALGQGTTLNNVHSNNTVRDRTPYRTLLMNELGVPFHLGTKQVCIAWSSSSCHDGKAWLHVCITGDDKNATASFIYNGRLVDSVVSWSKEILRTQESECVCINGTCTVVMTDGSASGKADTKILFIEEGKIVHTSTLSGSAQHVEECSCYPRYPGVRCVCRDNWKGSNRPIVDINIKDHSIVSSYVCSGLVGDTPRKNDSSSSSHCLDPNNEEGGHGVKGWAFDDGNDVWMGRTINETSRLGYETFKVIEGWSNSKSKLQINRQVIVDRGDRSGYSGIFSVEGKSCINRCFYVELIRGRKEETEVLWTSNSIVVFCGTSGTYGTGSWPDGADLNLMPI

SEQ ID NO: 25334 - protein, 469 aa, synthetic construct; identical to SEQ ID NO: 22146
  REGION 1..469: note = neuraminidase__InfluenzaA__AHZ40087

SEQ ID NO: 25335 - protein, 469 aa, synthetic construct; identical to SEQ ID NO: 23357
  REGION 1..469: note = neuraminidase__InfluenzaA__AHZ40099

SEQ ID NO: 25336 - protein, 469 aa, synthetic construct
  REGION 1..469: note = neuraminidase__InfluenzaA__AHZ40111
MNPNQKIITIGSVSLTISTICFFMQIAILITTVTLHFKQYEFNPPPNNQVMLCEPTIIERNITEIVYLTNTTIEKEICPKLAEYRNWSKPQCDITGFAPFSKDNSIRLSAGGDIWVTREPYVSCDPDKCYQFALGQGTTLNNVHSNNTVRDRTPYRTLLMNELGVPFHLGTKQVCIAWSSSSCHDGKAWLHVCITGDDKNATASFIYNGRLVDSVVSWSKDILRTQESECVCINGTCAVVMTDGSASGKADTKILFIEEGKIVHTSTLSGSAQHVEECSCYPRYPGVRCVCRDNWKGSNRPIVDINIKDHSIVSSYVCSGLVGDTPRKNDSSSSGHCLDPNNEEGGHGVKGWAFDDGNDVWMGRTINETSRLGYETFKVIEGWSNPKSKLQINRQVIVDRGNRSGYSGIFSVEGKNCINRCFYVELIRGRKEETEVLWTSNSIVVFCGTSGTYGTGSWPDGADLNLMPI

SEQ ID NO: 25337 - protein, 469 aa, synthetic construct
  REGION 1..469: note = neuraminidase__InfluenzaA__AHZ40123
MNPNQKIITIGSVSLTISTICFFMQIAILITTVTLHFKQYEFNSPPNNQVMLCEPTITERNITEIVYLTNTTIEKEICPKPAEYRNWSKPQCGITGFAPFSKDNSIRLSAGGDIWVTREPYVSCDPDKCYQFALGQGTTLNNVHSNNTVRDRTPYRTLLMNELGVPFHLGTKQVCIAWSSSSCHDGKAWLHVCITGDDKNATASFIYNGRLVDSVVSWSKEILRTQESECVCINGTCTVVMTDGSASGKADTKILFIEEGKIVHTRTLSGSAQHVEECSCYPRYPGVRCVCRDNWKGSNRPIVDINIKDHSIVSSYVCSGLVGDTPRKNDSSSSSHCLDPNNEEGGHGVKGWAFDDGNDVWMGRTINETSRLGYETFKVIEGWSNPKSKLQINRQVIVDRGDRSGYSGIFSVEGKSCINRCFYVELIRGRKEETEVLWTSNSIVVFCGTSGTYGTGSWPDGADLNLMPI

SEQ ID NO: 25338 - protein, 469 aa, synthetic construct; identical to SEQ ID NO: 22146
  REGION 1..469: note = neuraminidase__InfluenzaA__AHZ40133

SEQ ID NO: 25339 - protein, 469 aa, synthetic construct; identical to SEQ ID NO: 23364
  REGION 1..469: note = neuraminidase__InfluenzaA__AHZ40145

SEQ ID NO: 25340 - protein, 469 aa, synthetic construct
  REGION 1..469: note = neuraminidase__InfluenzaA__AHZ40157
MNPNQKIITIGSVSLTISTICFFMQIAILITTVTLHFKQYEFNSPPNNQVMLCEPTIIERNITEIVYLTNTTIEKELCPKLAEYRNWSKPQCDITGFAPFSKDNSIRLSAGGDIWVTREPYVSCDPDKCYQFALGQGTTLNNVHSNNTVRDRTPYRTLLMNELGVPFHLGTKQVCMAWSSSSCHDGKAWLHVCITGDDKNATASFIYNGKLVDSVVSWSKEILRTQESECVCINGTCTVVMTDGSASGKADTKILFIEEGKIVHTSTLSGSAQHVEECSCYPRYPGVRCVCRDNWKGSNRPIVDINIKDHSIVSSYVCSGLVGDTPRKTDSSSSSHCLDPNNEEGGHGVKGWAFDDGNDVWMGRTINETSRLGYETFKVIEGWSNPKSKLQINRQVIVDRGDRSGYSGIFSVEGKSCINRCFYVELIRGRKEETAVLWTSNSIVVFCGTSGTYGTGSWPDGADLNLMPI

SEQ ID NO: 25341 - protein, 469 aa, synthetic construct
  REGION 1..469: note = neuraminidase__InfluenzaA__AHZ40169
MNPNQKIITIGSVCMTIGMANLILQIGNIISIWISHSIQLENQSQIETCNQSVITYENNTWVNQTYVNISNTNFAAGQSVVSVKLAGNSSLCPVSGWAIYSKDNSVRIGSKGDVFVIREPFISCSPLECRTFFLTQGALLNDKHSNGTIKDRSPYRTLMSCPIGEVPSPYNSRFESVAWSASACHDGINWLTIGISGPDSGAVAVLKYNGIITDTIKSWRNNILRTQESECACVNGSCFTIMTDGPSDGQASYKIFRIEKGKIVKSVEMNAPNYHYEECSCYPDSSEITCVCRDNWHGSNRPWVSFNQNLEYQIGYICSGIFGDNPRPNDKTGSCGPVSSNGANGVKGFSFKYGNGVWIGRTKSISSRKGFEMIWDPNGWTGTDNNFSIKQDIVGINEWSGYSGSFVQHPELTGLDCIRPCFWVELIRGRPKENTIWTSGSSISFCGVNSDTVGWSWPDGAELPFTIDK

SEQ ID NO: 25342 - protein, 469 aa, synthetic construct
  REGION 1..469: note = neuraminidase__InfluenzaA__AHZ40180
MNPNQKIITIGSVSLTISTICFFMQITILITTVTLHFKQYEFNSPPNNQVMLCEPTIIERNITEIVYLTNTTIEKEICPKPAEYRNWSKPQCGITGFAPFSKDNSIRLSAGGDIWVTREPYVSCDPDKCYQFALGQGTTLNNVHSNNTVRDRTPYRTLLMNELGVPFHLGTKQVCIAWSSSSCHDGKAWLHVCITGDDKNATASFIYNGRLVDSVVSWSKEILRTQESECVCINGTCTVVMTDGSASGKADTKILFIEEGKIVHTSTLSGSAQHVEECSCYPRYPGVRCVCRDNWKGSNRPIVDINIKDHSIVSSYVCSGLVGDTPRKNDSSSSSHCLDPNNEEGGHGVKGWAFDDGNDVWMGRTINETSRLGYETFKVIEGWSNPKSKLQINRQVIVDRGDRSGYSGIFSVEGKSCINRCFYVELIRGRKEETEVLWTSNSIVVFCGTSGTYGTGSWPDGADLNLMPI

SEQ ID NO: 25343 - protein, 469 aa, synthetic construct; identical to SEQ ID NO: 23010
  REGION 1..469: note = neuraminidase__InfluenzaA__AHZ40192

SEQ ID NO: 25344 - protein, 469 aa, synthetic construct; identical to SEQ ID NO: 22146
  REGION 1..469: note = neuraminidase__InfluenzaA__AHZ40204

SEQ ID NO: 25345 - protein, 469 aa, synthetic construct; identical to SEQ ID NO: 22146
  REGION 1..469: note = neuraminidase__InfluenzaA__AHZ40216

SEQ ID NO: 25346 - protein, 469 aa, synthetic construct; identical to SEQ ID NO: 23375
  REGION 1..469: note = neuraminidase__InfluenzaA__AHZ40228

SEQ ID NO: 25347 - protein, 469 aa, synthetic construct
  REGION 1..469: note = neuraminidase__InfluenzaA__AHZ40240
MNPNQKIITIGSVSLTISTICFLMQIAILITTATLHFKQYEFNSPPNNQVMLCEPTIIERNITEIVYLTNTTIEKEICPKPAEYRNWSKPQCGITGFAPFSKDNSIRLSAGGDIWVTREPYVSCDPDKCYQFALGQGTTLNNVHSNNTVRDRTPYRTLLMNELGVPFHLGTKQVCIAWSSSSCHDGKAWLHVCITGDDKNATASFIYNGRLVDSVVSWSKEILRTQESECVCINGTCTVVMTDGSASGKADTKILFIEEGKIVHTSTLSGSAQHVEECSCYPRYPGVRCVCRDNWKGSNRPIVDINIKDRSIVSSYVCSGLVGDTPRKNDSSSSSHCLDPNNEEGGHGVKGWAFDDGNDVWMGRTINETSRLGYETFKVIEGWSNPKSKLQINRQVIVDRGDRSGYSGIFSVEGKSCINRCFYVELIRGRKEETEVLWTSNSIVVFCGTSGTYGTGSWPDGADLNLMPI

SEQ ID NO: 25348 - protein, 469 aa, synthetic construct
  REGION 1..469: note = neuraminidase__InfluenzaA__AHZ40252
MNPNQKIITIGSVSLTISTICFFMQIAILITTVTLHFKQYEFNSPPNNQVMLCEPTIIERNITEIVYLTNTTIEKEICPKPAEYRNWSKPQCGITGFAPFSKDNSIRLSAGGDIWVTREPYVSCDPDKCYQFALGQGTTLNNVHSNNTVRDRTPYRTLLMNELGVPFHLGTKQVCIAWSSSSCHDGKAWLHVCITGEDKNATASFIYNGRLVDSIVSWSKEILRTQESECVCINGTCTVVMTDGSASGKADTKILFIEEGKIVHTSTLSGSAQHVEECSCYPRYPGVRCVCRDNWKGSNRPIVDINIKDHSIVSSYVCSGLVGDTPRKNDSSSSSHCLDPNNEEGGHGVKGWAFDDGNDVWMGRTINETSRLGYETFKVIEGWSNPKSKLQINRQVIVDRGDRSGYSGIFSVEGKSCINRCFYVELIRGRKEETEVLWTSNSIVVFCGTSGTYGTGSWPDGADLNLMPI

SEQ ID NO: 25349 - protein, 469 aa, synthetic construct; identical to SEQ ID NO: 25094
  REGION 1..469: note = neuraminidase__InfluenzaA__AHZ40264

SEQ ID NO: 25350 - protein, 469 aa, synthetic construct; identical to SEQ ID NO: 22146
  REGION 1..469: note = neuraminidase__InfluenzaA__AHZ40276

SEQ ID NO: 25351 - protein, 469 aa, synthetic construct
  REGION 1..469: note = neuraminidase__InfluenzaA__AHZ40288
MNPNQKIITIGSVSLTISTICFFMQIAILITTVTLHFKQYEFNSPPNNQVMLCEPTIIERNITEIVYLTNTTIEKEICPKLAEYRNWSKPQCDITGFAPFSKDNSIRLSAGGDIWVTREPYVSCDPDKCYQFALGQGTTLNNVHSNNTVRDRTPYRTLLMNELGVPFHLGTKQVCIAWSSSSCHDGKAWLHVCITGDDKNATASFIYNGRLVDSVISWSKDILRTQESECVCINGTCAVVMTDGSASGKADTKILFIEEGKIVHTSTLSGSAQHVEECSCYPRYPGVRCVCRDNWKGSNRPIVDINIKDHSIVSSYVCSGLVGDTPRKNDSSSSGHCLDPNNEEGGHGVKGWAFDDGNDVWMGRTINETSRLGYETFKVIEGWSNPKSKLQINRQVIVDRGNRSGYSGIFSVEGKNCINRCFYVELIRGRKEETEVLWTSNSIVVFCGTSGTYGTGSWPDGADLNLMPI

SEQ ID NO: 25352 - protein, 469 aa, synthetic construct
  REGION 1..469: note = neuraminidase__InfluenzaA__AHZ40312
MNPNQKIITIGSVSLTISTICFFMQIAILITTVTLHFKQYEFNYPPNNQVMLCEPTIIERNITEIVYLTNTTIEKEICPKPAEYRNWSKPQCGITGFAPFSKDNSIRLSAGGDIWVTREPYVSCDPDKCYQFALGQGTTLNNVHSNNTVRDRTPYRTLLMNELGVPFHLGTKQVCIAWSSSSCHDGKAWLHVCITGDDKNATASFIYNGRLVDSVVSWSKEILRTQESECVCINGTCTVVMTDGSASGKADTKILFIEEGKIVHTSTLSGSAQHVEECSCYPRYPGVRCVCRDNWKGSNRPIVDINIKDHSVVSSYVCSGLVGDTPRKNDSSSSSHCLDPNNEEGGHGVKGWAFDDGNDVWMGRTINETSRLGYETFKVIEGWSNPKSKLQINRQVIVDRGDRSGYSGIFSVEGKSCINRCFYVELIRGRKEETEVLWTSNSIVVFCGTSGTYGTGSWPDGADLNLMPI

SEQ ID NO: 25353 - protein, 469 aa, synthetic construct; identical to SEQ ID NO: 22146
  REGION 1..469: note = neuraminidase__InfluenzaA__AHZ40324

SEQ ID NO: 25354 - protein, 469 aa, synthetic construct; identical to SEQ ID NO: 22146
  REGION 1..469: note = neuraminidase__InfluenzaA__AHZ40336

SEQ ID NO: 25355 - protein, 469 aa, synthetic construct; identical to SEQ ID NO: 25329
  REGION 1..469: note = neuraminidase__InfluenzaA__AHZ40348

SEQ ID NO: 25356 - protein, 469 aa, synthetic construct; identical to SEQ ID NO: 23354
  REGION 1..469: note = neuraminidase__InfluenzaA__AHZ40360

SEQ ID NO: 25357 - protein, 469 aa, synthetic construct
  REGION 1..469: note = neuraminidase__InfluenzaA__AHZ40372
MNPNQKIITIGSVSLTISTICFFMQIAILITTVTLHFKQYEFNSPPNNQVMLCEPTIIERNITEIVYLTNTTIEKEICPKPAEYRNWSKPQCGITGFAPFSKDNSIRLSAGGDIWVTREPYVSCDPDKCYQFALGQGTTLNNVHSNNTVRDRTPYRTLLMNELGVPFHLGTKQVCIAWSSSSCHDGKAWLHVCITGDDKNATASFIYNGRLVDSVVSWSKEILRTQESECVCINGTCTVVMTDGSASGKADTKILFIEEGKIVHTSTLSGSAQHVEECSCYPRYPGVRCVCRDNWKGSNRPIVDINIKDHSIVSSYVCSGLVGDTPRKNDSSSSSHCLDPNNEEGDHGVKGWAFDDGNDVWMGRTINETSRLGYETFKVIEGWSNPKSKLQINRQVIVDRGDRSGYSGIFSVEGKSCINRCFYVELIRGRKEETEVLWTSNSIVVFCGTSGTYGTGSWPDGADLNLMPI

SEQ ID NO: 25358 - protein, 469 aa, synthetic construct; identical to SEQ ID NO: 23010
  REGION 1..469: note = neuraminidase__InfluenzaA__AHZ40384

SEQ ID NO: 25359 - protein, 469 aa, synthetic construct; identical to SEQ ID NO: 22146
  REGION 1..469: note = neuraminidase__InfluenzaA__AHZ40396

SEQ ID NO: 25360 - protein, 469 aa, synthetic construct; identical to SEQ ID NO: 22146
  REGION 1..469: note = neuraminidase__InfluenzaA__AHZ40408

SEQ ID NO: 25361 - protein, 469 aa, synthetic construct; identical to SEQ ID NO: 22146
  REGION 1..469: note = neuraminidase__InfluenzaA__AHZ40420

SEQ ID NO: 25362 - protein, 469 aa, synthetic construct
  REGION 1..469: note = neuraminidase__InfluenzaA__AHZ40432
MNPNQKIITIGSVSLTISTICFFMQIAILITTVTLHFKQYEFNSPPNNQVMLCEPTIIERNITEIVYLTNTTIEKEICPKPAEYRNWSKPQCDITGFAPFSKDNSIRLSAGGDIWVTREPYVSCDPDKCYQFALGQGTTLNNVHSNNTVRDRTPYRTLLMNELGVPFHLGTKQVCIAWSSSSCHDGKAWLHVCITGDDKNATASFIYNGRLVDSVVSWSKEILRTQESECVCINGTCTVVMTDGSASGKADTKILFIEEGKIVHTSTLSGSAQHVEECSCYPRYPGVRCVCRDNWKGSNRPIIDINIKDHSIVSRYVCSGLVGDTPRKNDSSSSSHCLDPNNEEGGHGVKGWAFDDGNDVWMGRTINETSRLGYETFKVIEGWSNPKSKLQINRQVIVDRGDRSGYSGIFSVEGKSCINRCFYVELIRGRKEETEVLWTSNSIVVFCGTSGTYGTGSWPDGADLNLMPI

SEQ ID NO: 25363 - protein, 469 aa, synthetic construct; identical to SEQ ID NO: 22146
  REGION 1..469: note = neuraminidase__InfluenzaA__AHZ40444

SEQ ID NO: 25364 - protein, 469 aa, synthetic construct
  REGION 1..469: note = neuraminidase__InfluenzaA__AHZ40456
MNPNQKIITIGSVSLTISTICFFMQIAILITTVTLHFKQYEFNSPPNNQVMLCEPTIIERNITEIVYLTNTTIEKEICPKPAEYRNWSKPQCDITGFAPFSKDNSIRLSAGGDIWVTREPYVSCDPDKCYQFALGQGTTLNNMHSNNTVRDRTPYRTLLMNELGVPFHLGTKQVCIAWSSSSCHDGKAWLHVCITGDDKNATASFIYNGRLVDSVVSWSKEILRTQESECVCINGTCTVVMTDGSASGKADTKILFIEEGKIVHTSTLSGSAQHVEECSCYPRYPGVRCVCRDNWKGSNRPIVDINIKDHSIVSSYVCSGLVGDTPRKNDSSSSSHCLDPNNEEGGHGVKGWAFDDGNDVWMGRTINETSRLGYETFKVIEGWSNPKSKLQINRQVIVDRGDRSGYSGIFSVEGKSCINRCFYVELIRGRKEETEVLWTSNSIVVFCGTSGTYGTGSWPDGADLNLMPI

SEQ ID NO: 25365 - protein, 469 aa, synthetic construct
  REGION 1..469: note = neuraminidase__InfluenzaA__AHZ40468
MNPNQKIITIGSVSLTISTICFFMQIAILITTVTLHFKQYEFNSPPNNQVMLCEPTIIERNITEIVYLTNTTIEKEICPKPAEYRNWSKPQCGITGFAPFSKDNSIRLSAGGDIWVTREPYVSCDPDKCYQFALGQGTTLNNVHSNNTVRDRTPYRTLLMNELGVPFHLGTKQVCIAWSSSSCHDGKAWLHVCITGNDKNATASFIYNGRLVDSVVSWSKEILRTQESECVCINGTCTVVMTDGSASGKADTKILFIEEGKIVHTSTLSGSAQHVEECSCYPRYPGVRCVCRDNWKGSNRPIVDINIKDHSIVSSYVCSGLVGDTPRKNDSSSSSHCLDPNNEEGGHGVKGWAFDDGNDVWMGRTINETSRLGYETFKVIEGWSNPKSKLQINRQVIVDRGDRSGYSGIFSVEGKSCINRCFYVELIRGRKEETEVLWTSNSIVVFCGTSGTYGTGSWPDGADLNLMPI

SEQ ID NO: 25366 - protein, 469 aa, synthetic construct; identical to SEQ ID NO: 23354
  REGION 1..469: note = neuraminidase__InfluenzaA__AHZ40480

SEQ ID NO: 25367 - protein, 469 aa, synthetic construct; identical to SEQ ID NO: 24792
  REGION 1..469: note = neuraminidase__InfluenzaA__AHZ40492

SEQ ID NO: 25368 - protein, 469 aa, synthetic construct; identical to SEQ ID NO: 22146
  REGION 1..469: note = neuraminidase__InfluenzaA__AHZ40503

SEQ ID NO: 25369 - protein, 469 aa, synthetic construct; identical to SEQ ID NO: 22146
  REGION 1..469: note = neuraminidase__InfluenzaA__AHZ40515

SEQ ID NO: 25370 - protein, 469 aa, synthetic construct
  REGION 1..469: note = neuraminidase__InfluenzaA__AHZ40527
MNPNQKIITIGSVSLTISTMCFFMQIAILITTVTLHFKQYEFDSPPNNQVMLCEPTIIERNITEIVYLTNTTIEKEICPKPAEYRNWSKPQCGITGFAPFSKDNSIRLSAGGDIWVTREPYVSCDPDKCYQFALGQGTTLNNVHSNNTVRDRTPYRTLLMNELGVPFHLGTKQVCIAWSSSSCHDGKAWLHVCITGDDKNATASFIYNGRLVDSVVSWSKEILRTQESECVCINGTCTVVMTDGSASGKADTKILFIEEGKIVHTSTLSGSAQHVEECSCYPRYPGVRCVCRDNWKGSNRPIVDINIKDHSIVSSYVCSGLVGDTPRKNDSSSSSHCLDPNNEEGGHGVKGWAFDDGNDVWMGRTINETSRLGYETFKVIEGWSNPKSKLQINRQVIVDRGDRSGYSGIFSVEGKSCINRCFYVELIRGRKEETEVLWTSNSIVVFCGTSGTYGTGSWPDGADLNLMPI

SEQ ID NO: 25371 - protein, 469 aa, synthetic construct
  REGION 1..469: note = neuraminidase__InfluenzaA__AHZ40539
MNPNQKIITIGSVSLTISTICFFMQIAILITTVTLHFKQYEFNSPPNNQVMLCEPTIIERNITEIVYLTNTTIEKEICPKPAEYRNWSKPQCGITGFAPFSKDNSIRLSAGGDIWVTREPYVSCDPDKCYQFALGQGTTLNNVHSNNTVRDRTPYRTLLMNELGVPFHLGTKQVCIAWSSSSCHDGKAWLHVCITGDDKNATASFIYNGRLVDSVVSWSKEILRTQESECVCINGTCTVVMTDGSASGKADTKILFIEEGKIVNTSTLSGSAQHVEECSCYPRYPGVRCVCRDNWKGSNRPIVDINIKDHSIVSSYVCSGLVGDTPRKNDSSSSSHCLDPNNEEGGHGVKGWAFDDGNDVWMGRTINETSRLGYETFKVIEGWSNPKSKLQINRQVIVDRGDRSGYSGIFSVEGKSCINRCFYVELIRGRKEETEVLWTSNSIVVFCGTSGTYGTGSWPDGADLNLMPI

SEQ ID NO: 25372 - protein, 469 aa, synthetic construct; identical to SEQ ID NO: 22146
  REGION 1..469: note = neuraminidase__InfluenzaA__AHZ40551

SEQ ID NO: 25373 - protein, 469 aa, synthetic construct
  REGION 1..469: note = neuraminidase__InfluenzaA__AHZ40563
MNPNQKIITIGSVSLTISTVCFFMQIAILITTVTLHFKQYEFNSSPNNQVMLCEPTIIERNITEIVYLTNTTIEKEICPKPAEYRNWSKPQCGITGFAPFSKDNSIRLSAGGDIWVTREPYVSCDPDKCYQFALGQGTTLNNVHSNNTVRDRTPYRTLLMNELGVPFHLGTKQVCIAWSSSSCHDGKAWLHVCITGDDKNATASFIYNGRLVDSVVSWSKEILRTQESECVCINGTCTVVMTDGSASGKADTKILFIEEGKIVHTSTLSGSAQHVEECSCYPRYPGVRCVCRDNWKGSNRPIVDINIKDHSIVSSYVCSGLVGDTPRKNDSSSSSHCLDPNNEEGGHGVKGWAFDDGNDVWMGRTINETSRLGYETFKVIEGWSNSKSKLQINRQVIVDRGDRSGYSGIFSVEGKSCINRCFYVELIRGRKEETEVLWTSNSIVVFCGTSGTYGTGSWPDGADLNLMPI

SEQ ID NO: 25374 - protein, 469 aa, synthetic construct
  REGION 1..469: note = neuraminidase__InfluenzaA__AHZ40575
MNPNQKIITIGSVSLTISTICFFMQIAILITTVTLHFKQYEFNSPPNNQVMLCEPTIIERNITEIVYLTNTTIEKEICPKPAEYRNWSKPQCGITGFAPFSKDNSIRLSAGGDIWVTREPYVSCDPDKCYQFALGQGTTLNNVHSNNTVRDRTPYRTLLMNELGVPFHLGTKQVCIAWSSSSCHDGKAWLHVCITGDDKNATASFIYNGRLVDSVVSWSKEILRTQESECVCINGTCTVVMTDGSASGKADTKILFIEEGKIVHTSTLSGSAQHVEECSCYPRYPGVRCVCRDNWKGSNRPIVDINIKDHSIVSSYVCSGLVGDTPRKNDSSSSSHCLDPNNEEGGHGVKGWAFDDGNDVWMGRTINETSRLGYETFKVIEGWSNPKSKLQISRQVIVDRGDRSGYSGIFSVEGKSCINRCFYVELIRGRKEETEVLWTSNSIVVFCGTSGTYGTGSWPDGADLNLMPI

SEQ ID NO: 25375 - protein, 469 aa, synthetic construct; identical to SEQ ID NO: 25093
  REGION 1..469: note = neuraminidase__InfluenzaA__AHZ40586

SEQ ID NO: 25376 - protein, 469 aa, synthetic construct
  REGION 1..469: note = neuraminidase__InfluenzaA__AHZ40598
MNPNQKIITIGSVCMTIGMANLILQIGNIISIWISHSIQVGNQSQIETCNQSVITYENNTWVNQTYVNISNTNFAAGQPVVSVKLAGNSSLCPVSGWAIYSKDNSVRIGSKGDVFVIREPFISCSPLECRTFFLTQGALLNDKHSNGTIKDRSPYRTLMSCPIGEVPSPYNSRFESVAWSASACHDGINWLTIGISGPDSGAVAVLKYNGIITDTIKSWRNDILRTQESECACVNGSCFTIMTDGPSDGQASYKIFRIEKGKIVKSVEMNAPNYHYEECSCYPDSSEITCVCRDNWHGSNRPWVSFNQNLEYQIGYICSGIFGDNPRPNDKTGSCGPVSSNGANGVKGFSFKYGNGVWIGRTKSISSRKGFEMIWDPNGWTGTDNNFSIKQDIVGINEWSGYSGSFVQHPELTGLDCIRPCFWVELIRGRPKENTIWTSGSSISFCGVNSDTVGWSWPDGAELPFTIDK

SEQ ID NO: 25377 - protein, 469 aa, synthetic construct; identical to SEQ ID NO: 22146
  REGION 1..469: note = neuraminidase__InfluenzaA__AHZ40609

SEQ ID NO: 25378 - protein, 469 aa, synthetic construct; identical to SEQ ID NO: 23375
  REGION 1..469: note = neuraminidase__InfluenzaA__AHZ40629

SEQ ID NO: 25379 - protein, 469 aa, synthetic construct; identical to SEQ ID NO: 23357
  REGION 1..469: note = neuraminidase__InfluenzaA__AHZ40641

SEQ ID NO: 25380 - protein, 469 aa, synthetic construct
  REGION 1..469: note = neuraminidase__InfluenzaA__AHZ40653
MNPNQKIITIGSVSLTISTICFFMQIAILITTVTLHFKQYEFNSPPNNQVMLCEPTIIERNITEIVYLTNTTIEKEICPKPAGYRNWSKPQCGITGFAPFSKDNSIRLSAGGDIWVTREPYVSCDPDKCYQFALGQGTTLNNVHSNNTVRDRTPYRTLLMNELGVPFHLGTKQVCIAWSSSSCHDGKAWLHVCITGDDKNATASFIYNGRLVDSVVSWSKEILRTQESECVCINGTCTVVMTDGSASGKADTKILFIEEGKIVHTSTLSGSAQHVEECSCYPRYPGVRCVCRDNWKGSNRPIVDINIKDHSIVSSYVCSGLVGDTPRKNDSSSSSHCLDPNNEEGGHGVKGWAFDDGNDVWMGRTINETSRLGYETFKVIEGWSNPKSKLQINRQVIVDRGDRSGYSGIFSVEGKSCINRCFYVELIRGRKEETEVLWTSNSIVVFCGTSGTYGTGSWPDGADLNLMPI

SEQ ID NO: 25381 - protein, 469 aa, synthetic construct; identical to SEQ ID NO: 23375
  REGION 1..469: note = neuraminidase__InfluenzaA__AHZ40665

SEQ ID NO: 25382 - protein, 469 aa, synthetic construct; identical to SEQ ID NO: 23375
  REGION 1..469: note = neuraminidase__InfluenzaA__AHZ40677

SEQ ID NO: 25383 - protein, 469 aa, synthetic construct; identical to SEQ ID NO: 22146
  REGION 1..469: note = neuraminidase__InfluenzaA__AHZ40689

SEQ ID NO: 25384 - protein, 469 aa, synthetic construct
  REGION 1..469: note = neuraminidase__InfluenzaA__AHZ40713
MNPNQKIITIGSVSLTISTICFFMQIAILITTVTLHFKQYEFNSPPNNQVMLCEPTIIERNITEIVYLTNTTIEKEICPKPAEYRNWSKPQCGITGFAPFSKDNSIRLSAGGDIWVTREPYVSCDPDKCYQFALGQGTTLNNVHSNNTVRDRTPYRTLLMNELGVPFHLGTKQVCIAWSSSSCHDGKAWLHVCITGDDKNATASFIYNGRLVDSVVSWSKEILRTQESECVCINGTCTVVMTDGSASGKADTKILFIEEGKIVHTSTLSGSAQHVEECSCYPRYPGVRCVCRDNWKGSNRPIVDINIKDHSIVSSYVCSGLVGDTPRKNDSSSSSHCLDPNNEEGGHGVKGWAFDDGNDVWMGRTINETSRLGYETFKVIEGWSNPKSKLQINRQVIVDRGDKSGYSGIFSVEGKSCINRCFYVELIRGRKEETEVLWTSNSIVVFCGTSGTYGTGSWPDGADLNLMPI

SEQ ID NO: 25385 - protein, 469 aa, synthetic construct
  REGION 1..469: note = neuraminidase__InfluenzaA__AHZ40725
MNPNQKIITIGSVSLTISTICFFMQIAILITTVTLHFKQYEFNSPPNNQVMLCEPTIIERNITEIVYLTNTTIEKEICPKPAEYRNWSKPQCGITGFAPFSKDNSIRLSAGGDIWVTREPYVSCDPDKCYQFALGQGTTLNNVHSNNTVRDRTPYRTLLMNELGVPFHLGTKQVCIAWSSSSCHDGKAWLHVCITGDDKNATASFIYNGRLVDSVVSWSKEILRTQESECVCINGTCTVVMTDGSASGKADTKILFIEEGKIVHTSTLSGSAQHVEECSCYPRYPGVRCVCRDNWKGSNRPIVDINIKDHSIVSGYVCSGLVGDTPRKNDSSSSSHCLDPNNEEGGHGVKGWAFDDGNDVWMGRTINETSRLGYETFKVIEGWSNPKSKLQINRQVIVDRGDRSGYSGIFSVEGKSCINRCFYVELIRGRKEETEVLWTSNSIVVFCGTSGTYGTGSWPDGADLNLMPI

SEQ ID NO: 25386 - protein, 469 aa, synthetic construct; identical to SEQ ID NO: 23364
  REGION 1..469: note = neuraminidase__InfluenzaA__AHZ40737

SEQ ID NO: 25387 - protein, 469 aa, synthetic construct
  REGION 1..469: note = neuraminidase__InfluenzaA__AHZ40749
MNPNQKIITIGSVSLTISTICLFMQIAILITTVTLHFKQYEFNSPPNNQVMLCEPTIIERNITEIVYLTNTTIEKEICPKPAEYRNWSKPQCGITGFAPFSKDNSIRLSAGGDIWVTREPYVSCDPDKCYQFALGQGTTLNNVHSNNTVRDRTPYRTLLMNELGVPFHLGTKQVCIAWSSSSCHDGKAWLHVCITGDDKNATASFIYNGRLVDSVVSWSKEILRTQESECVCINGTCTVVMTDGSASGKADTKILFIEEGKIVHTSTLSGSAQHVEECSCYPRYPGVRCVCRDNWKGSNRPIVDINIKDHSIVSSYVCSGLVGDTPRKNDSSSSSHCLDPNNEEGGHGVKGWAFDDGNDVWMGRTINETSRLGYETFKVIEGWSNPKSKLQINRQVIVDRGDRSGYSGIFSVEGKSCINRCFYVELIRGRKEETEVLWTSNSIVVFCGTSGTYGTGPWPDGADLNLMPI

SEQ ID NO: 25388 - protein, 469 aa, synthetic construct
  REGION 1..469: note = neuraminidase__InfluenzaA__AHZ40761
MNPNQKIITIGSVSLTISTICFFMQIAILITTVTLHFKQYEFNSPPNNQVMLCEPTIIERNITEIVYLTNTTIEKELCPKLAEYRNWSKPQCDITGFAPFSKDNSIRLSAGGDIWVTREPYVSCDPDKCYQFALGQGTTLNNVHSNNTVRDRTPYRTLLMNELGVPFHLGTKQVCMAWSSSSCHDGKAWLHVCITGDDKNATASFIYNGKLVDSVVSWSKEILRTQESECVCINGTCTVVMTDGSASGKADTKILFIEEGKIVHTSTLSGSAQHVEECSCYPRYPGVRCVCRDNWKGSNRPIVDINIKDHSIVSSYVCSGLVGDTPRKTDSSSSSHCLDPNNEEGGHGVKGWAFDDGNDVWMGRTINETSRLGYETFKVIEGWSNPKSKLQINRQVIVDRGDRSGYSGIFSVEGKSCINRCFYVELIRGRKKETAVLWTSNSIVVFCGTSGTYGTGSWPDGADLNLMPI

SEQ ID NO: 25389 - protein, 469 aa, synthetic construct; identical to SEQ ID NO: 22146
  REGION 1..469: note = neuraminidase__InfluenzaA__AHZ40773

SEQ ID NO: 25390 - protein, 469 aa, synthetic construct; identical to SEQ ID NO: 16728
  REGION 1..469: note = neuraminidase__InfluenzaA__AHZ40785

SEQ ID NO: 25391 - protein, 469 aa, synthetic construct; identical to SEQ ID NO: 16728
  REGION 1..469: note = neuraminidase__InfluenzaA__AHZ40796

SEQ ID NO: 25392 - protein, 469 aa, synthetic construct; identical to SEQ ID NO: 16728
  REGION 1..469: note = neuraminidase__InfluenzaA__AHZ40807

SEQ ID NO: 25393 - protein, 469 aa, synthetic construct; identical to SEQ ID NO: 16728
  REGION 1..469: note = neuraminidase__InfluenzaA__AHZ40818

SEQ ID NO: 25394 - protein, 469 aa, synthetic construct; identical to SEQ ID NO: 16728
  REGION 1..469: note = neuraminidase__InfluenzaA__AHZ40829

SEQ ID NO: 25395 - protein, 469 aa, synthetic construct; identical to SEQ ID NO: 16728
  REGION 1..469: note = neuraminidase__InfluenzaA__AHZ40840

SEQ ID NO: 25396 - protein, 469 aa, synthetic construct; identical to SEQ ID NO: 16728
  REGION 1..469: note = neuraminidase__InfluenzaA__AHZ40851

SEQ ID NO: 25397 - protein, 469 aa, synthetic construct; identical to SEQ ID NO: 16728
  REGION 1..469: note = neuraminidase__InfluenzaA__AHZ40862

SEQ ID NO: 25398 - protein, 469 aa, synthetic construct; identical to SEQ ID NO: 16728
  REGION 1..469: note = neuraminidase__InfluenzaA__AHZ40873

SEQ ID NO: 25399 - protein, 469 aa, synthetic construct; identical to SEQ ID NO: 16728
  REGION 1..469: note = neuraminidase__InfluenzaA__AHZ40884

SEQ ID NO: 25400 - protein, 469 aa, synthetic construct; identical to SEQ ID NO: 16728
  REGION 1..469: note = neuraminidase__InfluenzaA__AHZ40895

SEQ ID NO: 25401 - protein, 469 aa, synthetic construct; identical to SEQ ID NO: 16728
  REGION 1..469: note = neuraminidase__InfluenzaA__AHZ40906

SEQ ID NO: 25402 - protein, 469 aa, synthetic construct; identical to SEQ ID NO: 16728
  REGION 1..469: note = neuraminidase__InfluenzaA__AHZ40917

SEQ ID NO: 25403 - protein, 469 aa, synthetic construct; identical to SEQ ID NO: 16728
  REGION 1..469: note = neuraminidase__InfluenzaA__AHZ40928

SEQ ID NO: 25404 - protein, 469 aa, synthetic construct; identical to SEQ ID NO: 16728
  REGION 1..469: note = neuraminidase__InfluenzaA__AHZ40939

SEQ ID NO: 25405 - protein, 469 aa, synthetic construct; identical to SEQ ID NO: 16728
  REGION 1..469: note = neuraminidase__InfluenzaA__AHZ40950

SEQ ID NO: 25406 - protein, 469 aa, synthetic construct; identical to SEQ ID NO: 16728
  REGION 1..469: note = neuraminidase__InfluenzaA__AHZ40961

SEQ ID NO: 25407 - protein, 469 aa, synthetic construct; identical to SEQ ID NO: 16728
  REGION 1..469: note = neuraminidase__InfluenzaA__AHZ40972

SEQ ID NO: 25408 - protein, 469 aa, synthetic construct; identical to SEQ ID NO: 16728
  REGION 1..469: note = neuraminidase__InfluenzaA__AHZ40983

SEQ ID NO: 25409 - protein, 469 aa, synthetic construct; identical to SEQ ID NO: 16728
  REGION 1..469: note = neuraminidase__InfluenzaA__AHZ40994

SEQ ID NO: 25410 - protein, 469 aa, synthetic construct; identical to SEQ ID NO: 16728
  REGION 1..469: note = neuraminidase__InfluenzaA__AHZ41005

SEQ ID NO: 25411 - protein, 469 aa, synthetic construct; identical to SEQ ID NO: 16728
  REGION 1..469: note = neuraminidase__InfluenzaA__AHZ41016

SEQ ID NO: 25412 - protein, 469 aa, synthetic construct; identical to SEQ ID NO: 16728
  REGION 1..469: note = neuraminidase__InfluenzaA__AHZ41027

SEQ ID NO: 25413 - protein, 469 aa, synthetic construct; identical to SEQ ID NO: 16728
  REGION 1..469: note = neuraminidase__InfluenzaA__AHZ41049

SEQ ID NO: 25414 - protein, 469 aa, synthetic construct; identical to SEQ ID NO: 16728
  REGION 1..469: note = neuraminidase__InfluenzaA__AHZ41060

SEQ ID NO: 25415 - protein, 469 aa, synthetic construct; identical to SEQ ID NO: 16728
  REGION 1..469: note = neuraminidase__InfluenzaA__AHZ41071

SEQ ID NO: 25416 - protein, 469 aa, synthetic construct; identical to SEQ ID NO: 16728
  REGION 1..469: note = neuraminidase__InfluenzaA__AHZ41082

SEQ ID NO: 25417 - protein, 469 aa, synthetic construct; identical to SEQ ID NO: 16728
  REGION 1..469: note = neuraminidase__InfluenzaA__AHZ41093

SEQ ID NO: 25418 - protein, 469 aa, synthetic construct; identical to SEQ ID NO: 16728
  REGION 1..469: note = neuraminidase__InfluenzaA__AHZ41104

SEQ ID NO: 25419 - protein, 469 aa, synthetic construct; identical to SEQ ID NO: 16728
  REGION 1..469: note = neuraminidase__InfluenzaA__AHZ41115

SEQ ID NO: 25420 - protein, 469 aa, synthetic construct; identical to SEQ ID NO: 16728
  REGION 1..469: note = neuraminidase__InfluenzaA__AHZ41126

SEQ ID NO: 25421 - protein, 469 aa, synthetic construct; identical to SEQ ID NO: 16728
  REGION 1..469: note = neuraminidase__InfluenzaA__AHZ41137

SEQ ID NO: 25422 - protein, 469 aa, synthetic construct; identical to SEQ ID NO: 16728
  REGION 1..469: note = neuraminidase__InfluenzaA__AHZ41148

SEQ ID NO: 25423 - protein, 469 aa, synthetic construct; identical to SEQ ID NO: 16728
  REGION 1..469: note = neuraminidase__InfluenzaA__AHZ41159

SEQ ID NO: 25424 - protein, 469 aa, synthetic construct; identical to SEQ ID NO: 16728
  REGION 1..469: note = neuraminidase__InfluenzaA__AHZ41170

SEQ ID NO: 25425 - protein, 469 aa, synthetic construct; identical to SEQ ID NO: 16728
  REGION 1..469: note = neuraminidase__InfluenzaA__AHZ41181

SEQ ID NO: 25426 - protein, 469 aa, synthetic construct; identical to SEQ ID NO: 16728
  REGION 1..469: note = neuraminidase__InfluenzaA__AHZ41205

SEQ ID NO: 25427 - protein, 469 aa, synthetic construct; identical to SEQ ID NO: 16728
  REGION 1..469: note = neuraminidase__InfluenzaA__AHZ41251

SEQ ID NO: 25428 - protein, 469 aa, synthetic construct; identical to SEQ ID NO: 16728
  REGION 1..469: note = neuraminidase__InfluenzaA__AHZ41266

SEQ ID NO: 25429 - protein, 469 aa, synthetic construct; identical to SEQ ID NO: 16728
  REGION 1..469: note = neuraminidase__InfluenzaA__AHZ41284

SEQ ID NO: 25430 - protein, 469 aa, synthetic construct; identical to SEQ ID NO: 16728
  REGION 1..469: note = neuraminidase__InfluenzaA__AHZ41295

SEQ ID NO: 25431 - protein, 469 aa, synthetic construct; identical to SEQ ID NO: 16728
  REGION 1..469: note = neuraminidase__InfluenzaA__AHZ41306

SEQ ID NO: 25432 - protein, 469 aa, synthetic construct; identical to SEQ ID NO: 16728
  REGION 1..469: note = neuraminidase__InfluenzaA__AHZ41317

SEQ ID NO: 25433 - protein, 469 aa, synthetic construct; identical to SEQ ID NO: 16728
  REGION 1..469: note = neuraminidase__InfluenzaA__AHZ41328

SEQ ID NO: 25434 - protein, 469 aa, synthetic construct; identical to SEQ ID NO: 16728
  REGION 1..469: note = neuraminidase__InfluenzaA__AHZ41339

SEQ ID NO: 25435 - protein, 469 aa, synthetic construct; identical to SEQ ID NO: 16728
  REGION 1..469: note = neuraminidase__InfluenzaA__AHZ41350

SEQ ID NO: 25436 - protein, 469 aa, synthetic construct; identical to SEQ ID NO: 16728
  REGION 1..469: note = neuraminidase__InfluenzaA__AHZ41369

SEQ ID NO: 25437 - protein, 469 aa, synthetic construct; identical to SEQ ID NO: 16728
  REGION 1..469: note = neuraminidase__InfluenzaA__AHZ41380

SEQ ID NO: 25438 - protein, 469 aa, synthetic construct; identical to SEQ ID NO: 16728
  REGION 1..469: note = neuraminidase__InfluenzaA__AHZ41391

SEQ ID NO: 25439 - protein, 469 aa, synthetic construct; identical to SEQ ID NO: 16728
  REGION 1..469: note = neuraminidase__InfluenzaA__AHZ41402

SEQ ID NO: 25440 - protein, 469 aa, synthetic construct; identical to SEQ ID NO: 16728
  REGION 1..469: note = neuraminidase__InfluenzaA__AHZ41413

SEQ ID NO: 25441 - protein, 469 aa, synthetic construct; identical to SEQ ID NO: 16728
  REGION 1..469: note = neuraminidase__InfluenzaA__AHZ41444

SEQ ID NO: 25442 - protein, 469 aa, synthetic construct; identical to SEQ ID NO: 16728
  REGION 1..469: note = neuraminidase__InfluenzaA__AHZ41455

SEQ ID NO: 25443 - protein, 469 aa, synthetic construct; identical to SEQ ID NO: 16728
  REGION 1..469: note = neuraminidase__InfluenzaA__AHZ41476

SEQ ID NO: 25444 - protein, 469 aa, synthetic construct; identical to SEQ ID NO: 16728
  REGION 1..469: note = neuraminidase__InfluenzaA__AHZ41487

SEQ ID NO: 25445 - protein, 469 aa, synthetic construct; identical to SEQ ID NO: 16728
  REGION 1..469: note = neuraminidase__InfluenzaA__AHZ41498

SEQ ID NO: 25446 - protein, 469 aa, synthetic construct; identical to SEQ ID NO: 16728
  REGION 1..469: note = neuraminidase__InfluenzaA__AHZ41509

SEQ ID NO: 25447 - protein, 469 aa, synthetic construct; identical to SEQ ID NO: 16728
  REGION 1..469: note = neuraminidase__InfluenzaA__AHZ41520

SEQ ID NO: 25448 - protein, 469 aa, synthetic construct; identical to SEQ ID NO: 16728
  REGION 1..469: note = neuraminidase__InfluenzaA__AHZ41531

SEQ ID NO: 25449 - protein, 469 aa, synthetic construct; identical to SEQ ID NO: 16728
  REGION 1..469: note = neuraminidase__InfluenzaA__AHZ41542

SEQ ID NO: 25450 - protein, 469 aa, synthetic construct; identical to SEQ ID NO: 16728
  REGION 1..469: note = neuraminidase__InfluenzaA__AHZ41553

SEQ ID NO: 25451 - protein, 469 aa, synthetic construct; identical to SEQ ID NO: 16728
  REGION 1..469: note = neuraminidase__InfluenzaA__AHZ41564

SEQ ID NO: 25452 - protein, 469 aa, synthetic construct; identical to SEQ ID NO: 16728
  REGION 1..469: note = neuraminidase__InfluenzaA__AHZ41586

SEQ ID NO: 25453 - protein, 469 aa, synthetic construct; identical to SEQ ID NO: 16728
  REGION 1..469: note = neuraminidase__InfluenzaA__AHZ41597

SEQ ID NO: 25454 - protein, 469 aa, synthetic construct; identical to SEQ ID NO: 16728
  REGION 1..469: note = neuraminidase__InfluenzaA__AHZ41608

SEQ ID NO: 25455 - protein, 469 aa, synthetic construct; identical to SEQ ID NO: 16728
  REGION 1..469: note = neuraminidase__InfluenzaA__AHZ41619

SEQ ID NO: 25456 - protein, 469 aa, synthetic construct; identical to SEQ ID NO: 16728
  REGION 1..469: note = neuraminidase__InfluenzaA__AHZ41630

SEQ ID NO: 25457 - protein, 469 aa, synthetic construct; identical to SEQ ID NO: 16728
  REGION 1..469: note = neuraminidase__InfluenzaA__AHZ41641

SEQ ID NO: 25458 - protein, 469 aa, synthetic construct; identical to SEQ ID NO: 16728
  REGION 1..469: note = neuraminidase__InfluenzaA__AHZ41652

SEQ ID NO: 25459 - protein, 469 aa, synthetic construct; identical to SEQ ID NO: 16728
  REGION 1..469: note = neuraminidase__InfluenzaA__AHZ41663

SEQ ID NO: 25460 - protein, 469 aa, synthetic construct; identical to SEQ ID NO: 16728
  REGION 1..469: note = neuraminidase__InfluenzaA__AHZ41674

SEQ ID NO: 25461 - protein, 469 aa, synthetic construct; identical to SEQ ID NO: 16728
  REGION 1..469: note = neuraminidase__InfluenzaA__AHZ41685

SEQ ID NO: 25462 - protein, 469 aa, synthetic construct; identical to SEQ ID NO: 16728
  REGION 1..469: note = neuraminidase__InfluenzaA__AHZ41696

SEQ ID NO: 25463 - protein, 469 aa, synthetic construct; identical to SEQ ID NO: 16728
  REGION 1..469: note = neuraminidase__InfluenzaA__AHZ41707

SEQ ID NO: 25464 - protein, 469 aa, synthetic construct; identical to SEQ ID NO: 16728
  REGION 1..469: note = neuraminidase__InfluenzaA__AHZ41718

SEQ ID NO: 25465 - protein, 469 aa, synthetic construct; identical to SEQ ID NO: 16728
  REGION 1..469: note = neuraminidase__InfluenzaA__AHZ41729

SEQ ID NO: 25466 - protein, 469 aa, synthetic construct; identical to SEQ ID NO: 16728
  REGION 1..469: note = neuraminidase__InfluenzaA__AHZ41740

SEQ ID NO: 25467 - protein, 469 aa, synthetic construct; identical to SEQ ID NO: 16728
  REGION 1..469: note = neuraminidase__InfluenzaA__AHZ41751

SEQ ID NO: 25468 - protein, 469 aa, synthetic construct; identical to SEQ ID NO: 16728
  REGION 1..469: note = neuraminidase__InfluenzaA__AHZ41762

SEQ ID NO: 25469 - protein, 469 aa, synthetic construct; identical to SEQ ID NO: 23389
  REGION 1..469: note = neuraminidase__InfluenzaA__AHZ42564

SEQ ID NO: 25470 - protein, 469 aa, synthetic construct; identical to SEQ ID NO: 22146
  REGION 1..469: note = neuraminidase__InfluenzaA__AHZ42575

SEQ ID NO: 25471 - protein, 469 aa, synthetic construct
  REGION 1..469: note = neuraminidase__InfluenzaA__AHZ42587
MNPNQKIITIGSVSLTISTICFFMQIAILITTVTLHFKQYEFNSPPNNQVMLCEPTIIERNITEIVYLTNTTIEKEMCPKPAEYRNWSKPQCGITGFAPFSKDNSIRLSAGGDIWVTREPYVSCDPDKCYQFALGQGTTLNNVHSNNTVRDRTPYRTLLMNELGVPFHLGTKQVCIAWSSSSCHDGKAWLHVCITGDDKNATASFIYNGRLVDSVVSWSKEILRTQESECVCINGTCTVVMTDGSASGKADTKILFIEEGKIVHTSTLSGSAQHVEECSCYPRYPGVRCVCRDNWKGSNRPIVDINIKDHSIVSSYVCSGLVGDTPRKNDSSSSSHCLDPNNEEGGHGVKGWAFDDGNDVWMGRTINETSRLGYETFKVIEGWSNPKSKLQINRQVIVDRGDRSGYSGIFSVEGKSCINRCFYVELIRGRKEETEVLWTSNSIVVFCGTSGTYGTGSWPDGADLNLMPI

SEQ ID NO: 25472 - protein, 470 aa, synthetic construct
  REGION 1..470: note = neuraminidase__InfluenzaA__AHZ42599
MNPNQKIITIGSVSLTISTICFFMQIAILITTVTLHFKQYEFNSPPKNNQVMLCEPTIIERNITEIVYLTNTTIEKEICPKPAEYRNWSKPQCGITGFAPFSKDNSIRLSAGGDIWVTREPYVSCDPDKCYQFALGQGTTLNNVHSNNTVRDRTPYRTLLMNELGVPFHLGTKQVCIAWSSSSCHDGKAWLHVCITGDDKNATASFIYNGRLVDSVVSWSKEILRTQESECVCINGTCTVVMTDGSASEKADTKILFIEEGKIVHTSTLSGSAQHVEECSCYPRYPGVRCVCRDNWKGSNRPIVDINIKDHSIVSSYVCSGLVGDTPRKNDSSSSSHCLDPNNEEGGHGVKGWAFDDGNDVWMGRTINETSRLGYETFKVIEGWSNPKSKLQINRQVIVDRGDRSGYSGIFSVEGKSCINRCFYVELIRGRKEETEVLWTSNSIVVFCGTSGTYGTGSWPDGADLNLMPI

SEQ ID NO: 25473 - protein, 469 aa, synthetic construct; identical to SEQ ID NO: 24792
  REGION 1..469: note = neuraminidase__InfluenzaA__AHZ42611

SEQ ID NO: 25474 - protein, 469 aa, synthetic construct; identical to SEQ ID NO: 22146
  REGION 1..469: note = neuraminidase__InfluenzaA__AHZ42622

SEQ ID NO: 25475 - protein, 469 aa, synthetic construct; identical to SEQ ID NO: 25333
  REGION 1..469: note = neuraminidase__InfluenzaA__AHZ42634

SEQ ID NO: 25476 - protein, 469 aa, synthetic construct; identical to SEQ ID NO: 25376
  REGION 1..469: note = neuraminidase__InfluenzaA__AHZ42646

SEQ ID NO: 25477 - protein, 469 aa, synthetic construct; identical to SEQ ID NO: 22146
  REGION 1..469: note = neuraminidase__InfluenzaA__AHZ42657

SEQ ID NO: 25478 - protein, 469 aa, synthetic construct; identical to SEQ ID NO: 25093
  REGION 1..469: note = neuraminidase__InfluenzaA__AHZ42669

SEQ ID NO: 25479 - protein, 469 aa, synthetic construct; identical to SEQ ID NO: 22146
  REGION 1..469: note = neuraminidase__InfluenzaA__AHZ42681

SEQ ID NO: 25480 - protein, 469 aa, synthetic construct
  REGION 1..469: note = neuraminidase__InfluenzaA__AHZ42693
MNPNQKIITIGSVCMTIGMANLILQIGNIISIWISHSIQLGNQSQIETCNQSVITYENNTWVNQTYVNISNTNFAAGQSVVSVKLAGNSSLCPVSGWAIYSKDNSVRIGSKGDVFVIREPFISCSPLECRTFFLTQGALLNDKHSNGTIKDRSPYRTLMSCPIGEVPSPYNSRFESVAWSASACHDGINWLTIGISGPDSGAVAVLKYNGIITDTIKSWRNNILRTQESECACVNGSCFTIMTDGPSDGQASYKIFRIEKGKIVKSVEMNAPNYHYEECSCYPDSSEITCVCRDNWHGSNRPWVSFNQNLEYQIGYICSGIFGDNPRPNDKTGSCGPVSSNGANGVKGFSFKYGNGVWIGRTKSISSRKGFEMIWDPNGWTGTDNNFSIKQDIVGINEWSGYSGSFVQHPELTGMDCIRPCFWVELIRGRPKENTIWTSGSIISFCGVNSDTVGWSWPDGAELPFTIDK

SEQ ID NO: 25481 - protein, 469 aa, synthetic construct; identical to SEQ ID NO: 22146
  REGION 1..469: note = neuraminidase__InfluenzaA__AHZ42704

SEQ ID NO: 25482 - protein, 469 aa, synthetic construct
  REGION 1..469: note = neuraminidase__InfluenzaA__AHZ42716
MNPNQKIITIGSVSLTISTICFFMQIAILITTVTLHFKQYEFNSPPNNQVMLCEPTIIERNITEIVYLTNTTIEKEICPKPAEYRNWSKPQCGITGFAPFSKDNSIRLSAGGDIWVTREPYVSCDPDKCYQFALGQGTTLNNVHSNNTVRDRTPYRTLLMNELGVPFHLGTKQVCIAWSSSSCHDGKAWLHVCITGDDKNATASFIYNGRLVDSVVSWSKEILRTQESECVCINGTCTVVMTDGSASGKADTKILFIEEGKIVHTSTLSGSAQHVEECSCYPRYPGVRCVCRDNWKGSNRPIVDINIKDHSIVSSYVCSGLVGDTPRKNDSSSSSHCLDPNNEEGGHGVKGWAFDDGNDVWMGRTINETSRLGYETFKVIEGWSNPKSKFQINRQVIVDRGDRSGYSGIFSVEGKSCINRCFYVELIRGRKEETEVLWTSNSIVVFCGTSGTYGTGSWPDGADLNLMPI

SEQ ID NO: 25483 - protein, 469 aa, synthetic construct; identical to SEQ ID NO: 22146
  REGION 1..469: note = neuraminidase__InfluenzaA__AHZ42728

SEQ ID NO: 25484 - protein, 469 aa, synthetic construct; identical to SEQ ID NO: 23389
  REGION 1..469: note = neuraminidase__InfluenzaA__AHZ42740

SEQ ID NO: 25485 - protein, 469 aa, synthetic construct; identical to SEQ ID NO: 23357
  REGION 1..469: note = neuraminidase__InfluenzaA__AHZ42751

SEQ ID NO: 25486 - protein, 469 aa, synthetic construct
  REGION 1..469: note = neuraminidase__InfluenzaA__AHZ42763
MNPNQKIITIGSVSLTISTICFFMQIAILITTVTLHFKQYEFNSPPNNQVMLCEPTIIERNITEIVYLTNTTIEKEICPKPAEYRNWSKPQCDITGFAPFSKDNSIRLSAGGDIWVTREPYVSCDPDKCYQFALGQGTTLNNVHSNNTVRDRTPYRTLLMNELGVPFHLGTKQVCIAWSSSSCHDGKAWLHVCITGDDKNATASFIYNGRLVDSVVSWSKEILRTQESECVCINGTCTVVMTDGSASGKADTKILFIEEGKIVYTSTLSGSAQHVEECSCYPRYPGVRCVCRDNWKGSNRPIVDINIKDHSIVSRYVCSGLVGDTPRKNDSSSSSHCLDPNNEEGGHGVKGWAFDDGNDVWMGRTINETSRLGYETFKVIEGWSNPKSKLQINRQVIVDRGDRSGYSGIFSVEGKSCINRCFYVELIRGRKEETEVLWTSNSIVVFCGTSGTYGTGSWPDGADLNLMPI

SEQ ID NO: 25487 - protein, 469 aa, synthetic construct; identical to SEQ ID NO: 23375
  REGION 1..469: note = neuraminidase__InfluenzaA__AHZ42775

SEQ ID NO: 25488 - protein, 469 aa, synthetic construct; identical to SEQ ID NO: 22146
  REGION 1..469: note = neuraminidase__InfluenzaA__AHZ42787

SEQ ID NO: 25489 - protein, 469 aa, synthetic construct
  REGION 1..469: note = neuraminidase__InfluenzaA__AHZ42799
MNPNQKIITIGSVSLTISTICFFMQIAILITTVTLHFKQYEFNSPPNNQVMLCEPTIIERNITEIVYLTNTTIEKEICPKPAEYRNWSKPQCGITGFAPFSKDNSIRLSAGGDIWVTREPYVSCDPDKCYQFALGQGTTLNNVHSNNTVRDRTPYRTLLMNELGVPFHLGTKQVCIAWSSSSCHDGKAWLHVCITGDDKNATASFIYNGRLVDSVVSWSKEILRTQESECVCINGTCTVVMTDGSASGKADTKILFIEEGKIVHTSTLSGSAQHVEECSCYPRYPGVRCVCRDNWKGSNRPIIDINIKDHSIVSSYVCSGLVGDTPRKNDSSSSSHCLDPNNEEGGHGVKGWAFDDGNDVWMGRTINETSRLGYETFKVIEGWSNPKSKLQINRQVIVDRGDRSGYSGIFSVEGKSCINRCFYVELIRGRKEETEVLWTSNSIVVFCGTSGTYGTGSWPDGADLNLMPI

SEQ ID NO: 25490 - protein, 469 aa, synthetic construct
  REGION 1..469: note = neuraminidase__InfluenzaA__AHZ42811
MNPNQKIITIGSVSLTISTICFFMQIAILITTVTLHFKQYEFNSPPNNQVMLCEPTIIERNITEIVYLTNTTIEKEICPKPAEYRNWSKPQCGITGFAPFSKDNSIRLSAGGDIWVTREPYVSCDPDKCYQFALGQGTTLNNVHSNNTVRDRTPYRTLLMNELGVPFHLGTKQVCIAWSSSSCHDGKAWLHVCITGDDKNATASFIYNGRLVDSVVSWSKEILRTQESECVCINGTCTVVMTDGSASGKADTKILFIEEGKIVHTSTLSGSAQHVEECSCYPRYPGVRCVCRDNWKGSNRPIVDINIKDHSIVSSYVCSGLVGDTPRKNDSSSSSHCLDPNNEEGGHGVKGWAFDDGNDVWMGRTINETSRLGYETFKVIEGWSNPKSKLQINRQVIVGRGDRSGYSGIFSVEGKSCINRCFYVELIRGRKEETEVLWTSNSIVVFCGTSGTYGTGSWPDGADLNLMPI

SEQ ID NO: 25491 - protein, 469 aa, synthetic construct
  REGION 1..469: note = neuraminidase__InfluenzaA__AHZ42823
MNPNQKIITIGSVCMTIGMANLILQIGNIISIWISHSIQLGNQSQIETCNQSVITYENNTWVNQTYVNISNTNFAAEQSVVSVKLAGNSSLCPVSGWAIYSKDNSVRIGSKGDVFVIREPFISCSPLECRTFFLTQGALLNDKHSNGTIKDRSPYRTLMSCPIGEVPSPYNSRFESVAWSASACHDGINWLTIGISGPDSGAVAVLKYNGIITDTIKSWRNNILRTQESECACVNGSCFTIMTDGPSDGQASYKIFRIEKGKIVKSVEMNAPNYHYEECSCYPDSSEITCVCRDNWHGSNRPWVSFNQNLEYQIGYICSGIFGDNPRPNDKTGSCGPVSSNGANGVKGFSFKYGNGVWIGRTKSISSRKGFEMIWDPNGWTGTDNNFSIKQDIVGINEWSGYSGSFVQHPELTGLDCIRPCFWVELIRGRPKENTIWTSGSSISFCGVNSDTVGWSWPDGAELPFTIDK

SEQ ID NO: 25492 - protein, 469 aa, synthetic construct
  REGION 1..469: note = neuraminidase__InfluenzaA__AHZ42834
MNPNQKIITIGSVSLTISTICFFMQTAILITTVTLHFKQYEFNSPPNNQVMLCEPTIIERNITEIVYLTNTTIEKEICPKPAEYRNWSKPQCGITGFAPFSKDNSIRLSAGGDIWVTREPYVSCDPDKCYQFALGQGTTLNNVHSNNTVRDRTPYRTLLMNELGVPFHLGTKQVCIAWSSSSCHDGKAWLHVCITGDDKNATASFIYNGRLVDSVVSWSKEILRTQESECVCINGTCTVVMTDGSASGKADTKILFIEEGKIVHTSTLSGSAQHVEECSCYPRYPGVRCVCRDNWKGSNRPIVDINIKDHSIVSSYVCSGLVGDTPRKNDSSSSSHCLDPNNEEGGHGVKGWAFDDGNDVWMGRTINETSRLGYETFKVIEGWSNPKSKLQINRQVIVDRGDRSGYSGIFSVEGKSCINRCFYVELIRGRKEETEVLWTSNSIVVFCGTSGTYGTGSWPDGADLNLMPI

SEQ ID NO: 25493 - protein, 469 aa, synthetic construct; identical to SEQ ID NO: 22146
  REGION 1..469: note = neuraminidase__InfluenzaA__AHZ42846

SEQ ID NO: 25494 - protein, 469 aa, synthetic construct; identical to SEQ ID NO: 22146
  REGION 1..469: note = neuraminidase__InfluenzaA__AHZ42858

SEQ ID NO: 25495 - protein, 469 aa, synthetic construct; identical to SEQ ID NO: 22146
  REGION 1..469: note = neuraminidase__InfluenzaA__AHZ42870

SEQ ID NO: 25496 - protein, 469 aa, synthetic construct; identical to SEQ ID NO: 22146
  REGION 1..469: note = neuraminidase__InfluenzaA__AHZ42882

SEQ ID NO: 25497 - protein, 469 aa, synthetic construct
  REGION 1..469: note = neuraminidase__InfluenzaA__AHZ42894
MNPNQKIITIGSVSLTISTICFFMQIAILITTVTLHFKQYEFNSPPNNQVMLCEPTIIERNITEIVYLTNTTIEKEICPKPAEYRNWSKPQCGITGFAPFSKDNSIRLSAGGDIWVTREPYVSCDPDKCYQFALGQGTTLNNVHSNNTVRDRTPYRTLLMNELGVPFHLGTKQVCIAWSSSSCHDGKAWLHVCITGDDKNATASFIYNGRLVDSVVSWSKEILRTQESECVCINGTCTVVMTDGSASGKADTKILFIEEGKIVHTSTLSGSAQHVEECSCYPRYPGVRCVCRDNWKGSNRPIVDINIKDHSIVSSYVCSGLVGDTPRKNDSSSSSHCLDPNNEEGGHGVKGWAFDDGNDVWMGRTINETSRLGYETFKVIEGWSNPKSKLQINRQVIVDKGDRSGYSGIFSVEGKSCINRCFYVELIRGRKEETEVLWTSNSIVVFCGTSGTYGTGSWPDGADLNLMPI

SEQ ID NO: 25498 - protein, 469 aa, synthetic construct; identical to SEQ ID NO: 22146
  REGION 1..469: note = neuraminidase__InfluenzaA__AHZ42906

SEQ ID NO: 25499 - protein, 469 aa, synthetic construct; identical to SEQ ID NO: 23375
  REGION 1..469: note = neuraminidase__InfluenzaA__AHZ42918

SEQ ID NO: 25500 - protein, 465 aa, synthetic construct; identical to SEQ ID NO: 23454
  REGION 1..465: note = neuraminidase__InfluenzaA__AHZ59750

SEQ ID NO: 25501 - protein, 465 aa, synthetic construct; identical to SEQ ID NO: 23454
  REGION 1..465: note = neuraminidase__InfluenzaA__AHZ59762

SEQ ID NO: 25502 - protein, 465 aa, synthetic construct; identical to SEQ ID NO: 23454
  REGION 1..465: note = neuraminidase__InfluenzaA__AHZ59774

SEQ ID NO: 25503 - protein, 465 aa, synthetic construct; identical to SEQ ID NO: 23454
  REGION 1..465: note = neuraminidase__InfluenzaA__AHZ59786

SEQ ID NO: 25504 - protein, 465 aa, synthetic construct; identical to SEQ ID NO: 23454
  REGION 1..465: note = neuraminidase__InfluenzaA__AHZ59798

SEQ ID NO: 25505 - protein, 465 aa, synthetic construct; identical to SEQ ID NO: 23454
  REGION 1..465: note = neuraminidase__InfluenzaA__AHZ59810

SEQ ID NO: 25506 - protein, 465 aa, synthetic construct; identical to SEQ ID NO: 23454
  REGION 1..465: note = neuraminidase__InfluenzaA__AHZ59822

SEQ ID NO: 25507 - protein, 465 aa, synthetic construct; identical to SEQ ID NO: 23454
  REGION 1..465: note = neuraminidase__InfluenzaA__AHZ59834

SEQ ID NO: 25508 - protein, 465 aa, synthetic construct; identical to SEQ ID NO: 23454
  REGION 1..465: note = neuraminidase__InfluenzaA__AHZ59846

SEQ ID NO: 25509 - protein, 465 aa, synthetic construct; identical to SEQ ID NO: 23454
  REGION 1..465: note = neuraminidase__InfluenzaA__AHZ59858

SEQ ID NO: 25510 - protein, 465 aa, synthetic construct; identical to SEQ ID NO: 23454
  REGION 1..465: note = neuraminidase__InfluenzaA__AHZ59870

SEQ ID NO: 25511 - protein, 465 aa, synthetic construct; identical to SEQ ID NO: 23454
  REGION 1..465: note = neuraminidase__InfluenzaA__AHZ59882

SEQ ID NO: 25512 - protein, 465 aa, synthetic construct; identical to SEQ ID NO: 23454
  REGION 1..465: note = neuraminidase__InfluenzaA__AHZ59918

SEQ ID NO: 25513 - protein, 465 aa, synthetic construct; identical to SEQ ID NO: 23454
  REGION 1..465: note = neuraminidase__InfluenzaA__AHZ59930

SEQ ID NO: 25514 - protein, 465 aa, synthetic construct; identical to SEQ ID NO: 23454
  REGION 1..465: note = neuraminidase__InfluenzaA__AHZ59942

SEQ ID NO: 25515 - protein, 465 aa, synthetic construct; identical to SEQ ID NO: 23454
  REGION 1..465: note = neuraminidase__InfluenzaA__AHZ59954

SEQ ID NO: 25516 - protein, 465 aa, synthetic construct; identical to SEQ ID NO: 23454
  REGION 1..465: note = neuraminidase__InfluenzaA__AHZ59966

SEQ ID NO: 25517 - protein, 465 aa, synthetic construct; identical to SEQ ID NO: 23454
  REGION 1..465: note = neuraminidase__InfluenzaA__AHZ59991

SEQ ID NO: 25518 - protein, 465 aa, synthetic construct; identical to SEQ ID NO: 23454
  REGION 1..465: note = neuraminidase__InfluenzaA__AHZ60003

SEQ ID NO: 25519 - protein, 465 aa, synthetic construct; identical to SEQ ID NO: 23454
  REGION 1..465: note = neuraminidase__InfluenzaA__AHZ60015

SEQ ID NO: 25520 - protein, 465 aa, synthetic construct; identical to SEQ ID NO: 23454
  REGION 1..465: note = neuraminidase__InfluenzaA__AHZ60027

SEQ ID NO: 25521 - protein, 465 aa, synthetic construct; identical to SEQ ID NO: 23454
  REGION 1..465: note = neuraminidase__InfluenzaA__AHZ60039

SEQ ID NO: 25522 - protein, 465 aa, synthetic construct; identical to SEQ ID NO: 23454
  REGION 1..465: note = neuraminidase__InfluenzaA__AHZ60051

SEQ ID NO: 25523 - protein, 465 aa, synthetic construct; identical to SEQ ID NO: 23454
  REGION 1..465: note = neuraminidase__InfluenzaA__AHZ60063

SEQ ID NO: 25524 - protein, 465 aa, synthetic construct; identical to SEQ ID NO: 23454
  REGION 1..465: note = neuraminidase__InfluenzaA__AHZ60075

SEQ ID NO: 25525 - protein, 465 aa, synthetic construct; identical to SEQ ID NO: 23454
  REGION 1..465: note = neuraminidase__InfluenzaA__AHZ60087

SEQ ID NO: 25526 - protein, 465 aa, synthetic construct; identical to SEQ ID NO: 23454
  REGION 1..465: note = neuraminidase__InfluenzaA__AHZ60099

SEQ ID NO: 25527 - protein, 469 aa, synthetic construct; identical to SEQ ID NO: 22146
  REGION 1..469: note = neuraminidase__InfluenzaA__AHZ60111

SEQ ID NO: 25528 - protein, 469 aa, synthetic construct; identical to SEQ ID NO: 16402
  REGION 1..469: note = neuraminidase__InfluenzaA__AIA26299

SEQ ID NO: 25529 - protein, 457 aa, synthetic construct
  REGION 1..457: note = neuraminidase__InfluenzaA__AIC64891
MNPNQKIITIGSVCMTIGMANLILQIGNIISIWISHSIQLGNQNQIETCNQSVITYENNTNFAAGQSVVSVKLAGNSSLCPVSGWAIYSKDNSVRIGSKGDVFVIREPFISCSPLECRTFFLTQGALLNDKHSNGTIKDRSPYRTLMSCPIGEVPSPYNSRFESVAWSASACHDGINWLTIGISGPDNGAVAVLKYNGIITDTIKSWRNNILRTQESECACVNGSCFTVMTDGPSNGQASYKIFRIEKGKIVKSVEMNAPNYHYEECSCYPDSSEITCVCRDNWHGSNRPWVSFNQNLEYQIGYICSGIFGDNPRPNDKTGSCGPVSSNGANGVKGFSFKYGNGVWIGRTKSISSRNGFEMIWDPNGWTGTDNNFSIKQDIVGINEWSGYSGSFVQHPELTGLDCIRPCFWVELIRGRPKENTIWTSGSSISFCGVNSDTVGWSWPDGAELPFTIDK

SEQ ID NO: 25530 - protein, 449 aa, synthetic construct
  REGION 1..449: note = neuraminidase__InfluenzaA__AID48084
MNPNKKIITIGSICMVTGMVSLMLQIGNLISIWVSHSIHTGNQHKAEPISNTNLLTEKTVASVKLAGNSSLCPINGWAVYSKDNSIRIGSKGDVFVIREPFISCSHLECRTFFLTQGALLNDKHSNGTVKDRSPHRTLMSCPVGEAPSPYNSRFESVAWSASACHDGTSWLTIGISGPDNGAVAVLKYNGIITDTIKSWRNNILRTQESECACVNGSCFTVMTDGPSNGQASHKIFKMEKGKVVKSVELDAPNYHYEECSCYPDAGEITCVCRDNWHGSNRPWVSFNQNLEYQIGYICSGVFGDNPRPNDGAGSCGPVSSNGAYGVKGFSFKYGNGVWIGRTKSTNSRSGFEMIWDPNGWTETDSSFSVKQDIVAITDWSGYSGSFVQHPELTGLDCIRPCFWVELIRGRPKESTIWTSGSSISFCGVNSDTVGWSWPDGAELPFTIDK

SEQ ID NO: 25531 - protein, 469 aa, synthetic construct
  REGION 1..469: note = neuraminidase__InfluenzaA__AID70507
MNPNQKIITIGSVCTTIGMANLILQIGNIISIWISHSIQLGNQNQIETCNQSVITYENKTWVNQTYVNISNTNFAAGQSVVSVKLAGNSSLCPVSGWAIYSKDNSIRIGSKGDVFVIREPFISCSPLECRTFFLTQGALLNDKHSNGTIKDRSPYRTLMSCPIGEVPSPYNSRFESVAWSASACHDGINWLTIGISGPDNGAVAVLKYNGIITDTIKSWRNNILRTQESECACVNGSCFTVMTDGPSDGQASYKIFRIEKGKIVKSVEMNAPNYHYEECSCYPDSSEITCVCRDNWHGSNRPWVSFNQNLEYQIGYICSGIFGDNPRPNDKTGSCDPVSFNGANGVKGFSFKYGNGVWIGRTKSISSRNGFEMIWDPNGWTGTDNKFSIKQDIVGINEWSGYSGSFVQHPELTGLDCIRPCFWVELIRGRPKENTIWTSGSSISFCGVNSDTVGWFWPDGAELPFTIDK

SEQ ID NO: 25532 - protein, 469 aa, synthetic construct
  REGION 1..469: note = neuraminidase__InfluenzaA__AID70508
MNPNQKIITIGSVCMTIGMANLILQIGNIISIWISHSIQLGNQSQIETCNQSVITYENNTWVNQTYVNISNTNFAAGQSVVSVKLAGNSSLCPVSGWAIYSKDNSIRIGSKGDVFVIREPFISCSPLECRTFFLTQGALLNDKHSNGTIKDRSPYRTLMSCPIGEVPSPYNSRFESVAWSASACHDGINWLTIGISGPNNGAVAVLKYNGIITDTIKSWRNNILRTQESECACVNGSCFTIMTDGPSDGQASYKIFRIEKGKIVKSVEMNAPNYHYEECSCYPDSSEITCVCRDNWHGSNRPWVSFNQNLEYQIGYICSGIFGDNPRPNDKTGSCGPVSSNGANGVKGFSFKYGNGVWIGRTKSISSRKGFEMIWDPNGWTGTDNNFSIKQDIVGINEWSGYSGSFVQHPELTGLDCIRPCFWVELIRGRPKENTIWTSGSSISFCGVNSDTVGWSWPDGAELPFTIDK

SEQ ID NO: 25533 - protein, 469 aa, synthetic construct
  REGION 1..469: note = neuraminidase__InfluenzaA__AID70509
MNPNQKIITIGSVCMTIGMANLILQIGNIISIWISHSIQLGNQSQIETCNQSVITYENNTWVNQTYVNISNTNFAAGQSVVSVKLAGNSSLCPVSGWAIYSKDNSIRIGSKGDVFVIREPFISCSPLECRTFFLTQGALLNDKHSNGTIKDRSPYRTLMSCPIGEVPSPYNSRFESVAWSASACHDGINWLTIGISGPDNGAVAVLKYNGIITDTIKSWRNNILRTQESECACVNGSCFTIMTDGPSDGQASYKIFRIEKGKIVKSVEMNAPNYHYEECSCYPDSSEITCVCRDNWHGSNRPWVSFNQNLEYQIGYICSGIFGDNPRPNDKTGSCGPVSSNGANGVKGFSFKYGNGVWIGRTKSINSRKGFEMIWDPNGWTGTDNNFSIKQDIVGINEWSGYSGSFVQHPELTGLDCIRPCFWVELIRGRPKENTIWTSGSSISFCGVNSDTVGWSWPDGAELPFTIDK

SEQ ID NO: 25534 - protein, 469 aa, synthetic construct
  REGION 1..469: note = neuraminidase__InfluenzaA__AID70510
MNPNQKIITIGSVCITIGMANLILQIGNIISIWISHSIQLGNQSQIETCNQSVITYENNTWVNQTYVNISNTNFAAGQSVVSVKLAGNSSLCPVSGWAIYSKDNSIRIGSKGDVFVIREPFISCSPLECRTFFLTQGALLNDKHSNGTIKDRSPYRTLMSCPIGEVPSPYNSRFESVAWSASACHDGINWLTIGISGPDNGAVAVLKYNGIITDTIKSWRNNILRTQESECACVNGSCFTIMTDGPSDGQASYKIFRIEKGKIVKSVEMNAPNYHYEECSCYPDSSEITCVCRDNWHGSNRPWVSFNQNLEYQIGYICSGIFGDNPRPNDKTGSCGPVSSNGANGVKGFSFKYGNGVWIGRTKSISSRKGFEMIWDPNGWTGTDNNFSIKQDIVGINEWSGYSGSFVQHPELTGLDCIRPCFWVELIRGRPKENTIWTSGSSISFCGVNSDTVGWSWPDGAELPFTIDK

SEQ ID NO: 25535 - protein, 469 aa, synthetic construct
  REGION 1..469: note = neuraminidase__InfluenzaA__AID70511
MNPNQKIITMGSVWMTIGMANLILQSGNIISIWISHSIQLRNQSQIETCNQSVITYENNTWVNQTYVNISNTNFAAGQSVVSVKLAGNSSLCPVSGWAIYSKDNSIRIGSKGDVFVIREPFISCSPLECRTFFLTQGALLNDKHSNGTIKDRSPYRTLMSCPIGEVPSPYNSRFESVAWSASACHDGINWLTIGISGPDNGAVAVLKYNGIITDTIKSWRNNILRTQESECACVNGSCFTIMTDGPSDGQASYKIFRIEKGKIVKSVEMNAPNYHYEECSCYPDSSEITCVCRDNWHGSNRPWVSFNQNLEYQIGYICSGIFGDNPRPNDKTGSCGPVSSNGANGVKGFSFKYGNGVWIGRTKSISSRKGFEMIWDPNGWTGTDNNFSIKQDIVGINEWSGYSGSFVQHPELTGLDCIRPCFWVELIRGRPKENTIWTSGSSISFCGVNSDTVGWSWPDGAELPFTIDK

SEQ ID NO: 25536 - protein, 469 aa, synthetic construct
  REGION 1..469: note = neuraminidase__InfluenzaA__AID70512
MNPNQKIITIGSVWMTIGMANLILQIGNIISIWISHSIQLGNQSQIETCNQSVITYENNTWVNQTYVNISNTNFAAGQSVVSVKLAGNSSLCPVSGWAIYSKDNSIRIGSKGDVFVIREPFISCSPLECRTFFLTQGALLNDKHSNGTIKDRSPYRTLMSCPIGEVPSPYNSRFESVAWSASACHDGINWLTIGISGPDNGAVAVLKYNGIITDTIKSWRNNILRTQESECACVNGSCFTIMTDGPSDGQASYKIFRIEKGKIVKSVEMKAPNYHYEECSCYPDSSEITCVCRDNWHGSNRPWVSFNQNLEYQIGYICSGIFGDNPRPNDKTGSCGPVSSNGANGVKGFSFKYGNGVWIGRTKSISSRKGFEMIWDPNGWTGTDNNFSIKQDIIGINEWSGYSGSFVQHPELTGLDCIRPCFWVELIRGRPKENTIWTSGSSISFCGVNSDTVGWSWPDGAELPFTIDK

SEQ ID NO: 25537 - protein, 469 aa, synthetic construct; identical to SEQ ID NO: 20257
  REGION 1..469: note = neuraminidase__InfluenzaA__AID70514

SEQ ID NO: 25538 - protein, 469 aa, synthetic construct
  REGION 1..469: note = neuraminidase__InfluenzaA__AID70515
MNPNQKIITIGSVCMTIGMANLILQIGNIISIWISHSIQLRNQSQIETCNQSVITYENNTWVNQTYVNISNTNFAAGQSVVSVKLAGNSSLCPVSGWAIYSKDNSIRIGSKGDVFVIREPFISCSPLECRTFFLTQGALLNDKHSNGTIKDRSPYRTLMSCPIGEVPSPYNSRFESVAWSASACHDGINWLTIGISGPDNGAVAVLKYNGIITDTIKSWRNNILRTQESECACVNGSCFTIMTDGPSDGQASYKIFRIEKGKIVKSVEMNAPNYHYEECSCYPDSSEITCVCRDNWHGSNRPWVSFNQNLEYQIGYICSGIFGDNPRPNDKTGSCGPVSSNGANGVKGFSFKYSNGVWIGRTKSISSRKGFEMIWDPNGWTGTDNNFSIKQDIVGINEWSGYSGSFVQHPELTGLDCIRPCFWVELIRGRPKENTIWTSGSSISFCGVNSDTVGWSWPDGAELPFTIDK

SEQ ID NO: 25539 - protein, 469 aa, synthetic construct; identical to SEQ ID NO: 23158
  REGION 1..469: note = neuraminidase__InfluenzaA__AID70516

SEQ ID NO: 25540 - protein, 469 aa, synthetic construct
  REGION 1..469: note = neuraminidase__InfluenzaA__AID70517
MNPNQKIITIGSVCMTIGMANLTLQIGNIISIWISHSIQLGNQNQIETCNQSVITYENNTWVNQTYVNISNTNFAAGQSVVSVKLAGNSSLCPVSGWAIYSKDNSIRIGSKGDVFVIREPFISCSPLECRTFFLTQGALLNDKHSNGTIKDRSPYRTLMSCPIGEVPSPYNSRFESVAWSASACHDGINWLTIGISGPDNGAVAVLKYNGIITDTIKSWRNNILRTQESECACVNGSCFTIMTDGPNDGQASYKIFRIEKGKIVKSVEMNAPNYHYEECSCYPDSSEITCVCRDNWHGSNRPWVSFNQNLEYQIGYICSGIFGDNPRPNDKTGSCGPVSSNGANGVKGFSFKYGNGVWIGRTKSISSRKGFEMIWDPNGWTGTDNNFSIKQDIVGINEWSGYSGSFVQHPELTGLDCIRPCFWVELIRGRPKENTIWTSGSSISFCGVNSDTVGWSWPDGAELPFTIDK

SEQ ID NO: 25541 - protein, 469 aa, synthetic construct
  REGION 1..469: note = neuraminidase__InfluenzaA__AID70518
MNPNQKIITIGSVCMTIGMANLILQIGNIISIWISHSIQLRNQSQIETCNQSVITYENNTWVNQTYVNISNTNFAAGQSVVSVKLAGNSSLCPVSGWAIYSKDNSIRIGSKGDVFVIREPFISCSPLECRTFFLTQGALLNDKHSNGTIKDRSPYRTLMSCPIGEIPSPYNSRFESVAWSASACHDGINWLTIGISGPDNGAVAVLKYNGIITDTIKSWRNNILRTQESECACVNGSCFTIMTDGPSDGQASYKIFRIEKGKIVKSVEMNAPNYHYEECSCYPDSSEITCVCRDNWHGSNRPWVSFNQNLEYQIGYICSGIFGDNPRPNDKTGSCGPVSSNGANGVKGFSFKYGNGVWIGRTKSISSRKGFEMIWDPNGWTGTDNNFSIKQDIVGINEWSGYSGSFVQHPELTGLDCIRPCFWVELIRGRPKENTIWTSGSSISFCGVNSDTVGWSWPDGAELPFTIDK

SEQ ID NO: 25542 - protein, 469 aa, synthetic construct
  REGION 1..469: note = neuraminidase__InfluenzaA__AID70519
MNPNQKIITIGSVCMTIGMANLILQIGNIISIWISHSIQLGNQSQIETCNQSVITYENNTWVNQTYVNISNTNFAAGQSVVSVKLAGNSSLCPVSGWAIYSKDNSIRIGSKGDVFVIREPFISCSPLECRTFFLTQGALLNDKHSNGTIKDRSPYRTLMSCPIGEVPSPYNSRFESVAWSASACHDGINWLTIGISGPDNGAVAVLKYNGIITDTIKSWRNNILRTQESECACVNGSCFTIMTDGPSDGQASYKIFRIEKGKIVKSVEMKAPNYHYEECSCYPDSSEITCVCRDNWHGSNRPWVSFNQNLEYQIGYICSGIFGDNPRPNDKTGSCGPVSSNGANGVKGFSFKYGNGVWIGRTKSISSRKGFEMIWDPNGWTGTDNNFSIKQDIVGINEWSGYSGSFVQHPELTGLDCIRPCFWVELIRGRPKENTIWTSGSSISFCGVNSDTVGWSWPDGAELPFTIDK

SEQ ID NO: 25543 - protein, 469 aa, synthetic construct
  REGION 1..469: note = neuraminidase__InfluenzaA__AID70520
MNPNQKIITIGSVCMTIGMANLILQIGNIISIWISHSIQLRNQSQIETCNQSVITYENNTWVNQTYVNISNTNFAAGQSVVSVKLAGNSSLCPVSGWAIYSKDNSIRIGSKGDVFVIREPFISCSPLECRTFFLTQGALLNDKHSNGTIKDRSPYRTLMSCPIGEVPSPYNSRFESVAWSASACHDGINWLTIGISGPDNGAVAVLKYNGIITDTIKSWRNNILRTQESECACVNGSCFTIMTDGPSDGQASYKIFRIEKGKIVKSVEMNAPNYHYEECSCYPDSSEITCVCRDNWHGSNRPWVSFNQNLEYQIGYICSGIFGDNPRPNDKTGSCGPVSSNGANGVKGFSFKYGNGVWIGRTKSISSRKGFEMIWDPNGWTGTDNNFSIKQDIVGINEWSGYSGSFVQHPELTGLDCIRPCFWVELIRGRPKENTIWTSGSSISFCGVNSGTVGWSWPDGAELPFTIDK

SEQ ID NO: 25544 - protein, 469 aa, synthetic construct
  REGION 1..469: note = neuraminidase__InfluenzaA__AID70521
MNPNQKIITIGSVSLTISRICFFMQIAILINTVTLHFKQYEFNSPPNNQVMLCEPTIIERNITKIVYLTNTTIEKEICPKLAEYRSWSKPQCDITGFAPFSKDNSIRLSAGGDIWVTREPYVSCDPDKCFQFALGQGTTLNNVHSNDTVHDRTPYRTLLMNELGVPFHLGTKQVCIAWSSSSCHDGKAWLHVCITGDDKNATASIIYNGRLVDSIVSWSKKILRTQESECVCINGTCTVVMTDGSASGKADTKILFIEEGKIVHTSTLSGSAQHVEECSCYPRYPGVRCVCRDNWKGSNRPIVDINIKDYSIVSSYVCSGFVGDTPRKPDRSSSSHCLDPNNEEGGHGVKGWAFDDGNDVWMGRTISEKSRLGYETFKVIGGWSNPNSKSQINRQVIVDRGNRSGYSGIFSVEGKSCINRCFYVELIRGRKDETEVLWTSNSIVVFCGTSGTYGTGSWPDGADINLMPI

SEQ ID NO: 25545 - protein, 469 aa, synthetic construct
  REGION 1..469: note = neuraminidase__InfluenzaA__AID70522
MNPNQKIITIGSVSLTISTICFFMQIAILITTVTLHFRQYEFNSPPNNQVMLCEPTIIERNITEIVYLTNTTIEKEICPKLAEYRNWSKPQCDITGFAPFSKDNSIRLSAGGDIWVTREPYVSCDPDKCYQFALGQGTTLNNVHSNNTVRDRTPYRTLLMNELGVPFHLGTKQVCIAWSSSSCHDGKAWLHVCITGDDKNATASFIYNGRLVDSVVSWSKEILRTQESECVCINGTCTVVMTDGSASGKADTKILFIEEGKIVHTSTLSGSAQHVEECSCYPRYPGVRCVCRDNWKGSNRPIVDINIKDHSIVSSYVCSGLVGDTPRKNDSSSSSHCLDPNNEEGGHGVKGWAFDDGNDVWMGRTINETSRLGYETFKVIEGWSNPKSKLQINRQVIVDRGNRSGYSGIFSVEGKSCINRCFYVELIRGRKEETEVLWTSNSIVVFCGTSGTYGTGSWPDGADLNLMPI

SEQ ID NO: 25546 - protein, 469 aa, synthetic construct
  REGION 1..469: note = neuraminidase__InfluenzaA__AID70523
MNPNQKIKTIGSVSLTNSTICIFMQIAILITTVTLHFKQYEFNSPPNNQVMLCEPTIIERNITEIVYLTNTTIEKEICPKLAEYRNWSKPQCDITGFAPFSKDNSIRLSAGGDIWVTREPYVSCDPDKCYQFALGQGTTLNNVHSNNTVRDRTPYRTLLMNELGVPFHLGTKQVCIAWSSSSCHDGKAWLHVCITGDDKNATASFIYNGRLVDSVVSWSKEILRTQESECVCINGTCTVVMTDGSASGKADTKILFIEEGKIVHTSTLSGSAQHVEECSCYPRYPGVRCVCRDNWKGSNRPIVDINIKDHSIVSSYVCSGLVGDTPRKNDSSSSSHCLDPNNEEGGHGVKGWAFDDGNDVWMGRTINETSRLGYETFKVIEGWSNPKSKLQINRQFIVDRGNRSGYSGIFSVEGKSCINRCFYVELIRGRKEETEVLWTSNSIVVFCGTSGTYGTGSWPDGADLNLMPI

SEQ ID NO: 25547 - protein, 469 aa, synthetic construct
  REGION 1..469: note = neuraminidase__InfluenzaA__AID70524
MNPNQKIITIGAVWRTISTICFFMQIAFLITTVTLHFKQYEFNSPPNNQVMPCEPTIIERNITEIVYLTNTTIEKEICPKLAEYRNWSKPQCDITGFAPFSKDNSIRLSAGGDIWVTREPYVSCDPDKCYQFALGQGTTLNNVHSNNTVRDRTPYRTLLMNELGVPFHLGTKQVCIAWSSSSCHDGKAWLHVCITGDDKNATASFIYNGRLVDSVVSWSKEILRTQESECVCINGTCTVVMTDGSASGKADTKILFIEEGKIVHTSTLSGSAQHVEECSCYPRYPGVRCVCRDNWKGSNRPIVDINIKDHSIVSSYVCSGLVGDTPRKNDSSSSSHCLDPNNEEGGHGVKGWAFDDGNDVWMGRTINETSRLGYETFKVIEGWSNPKSKLQINRQVIVDRGNRSGYSGIFSVEGKSCINRCFYVELIRGRKEETEVLWTSNSIVVFCGTSGTYGTGSWPDGADLNLMPI

SEQ ID NO: 25548 - protein, 469 aa, synthetic construct
  REGION 1..469: note = neuraminidase__InfluenzaA__AID70525
MNPNQKIITIGSVSLTIWIICFFMQIAILITTVTLHFKQYEFNSPPNNQVMLCEPTIIERNITEIVYLTNTTIEKEICPKLAEYRNWSKPQCDITGFAPFSKDNSIRLSAGGDIWVTREPYVSCDPDKCYQFALGQGTTLNNVHSNNTVRDRTPYRTLLMNELGVPFHLGTKQVCIAWSSSSCHDGKAWLHVCITGDDKNATASFIYNGRLVDSVVSWSKEILRTQESECVCINGTCTVVMTDGSASGKADTKILFIEEGKIVHTSTLSGSAQHVEECSCYPRYPGVRCVCRDNWKGSNRPIVDINIKDHSIVSSYVCSGLVGDTPRKNDSSSSSHCLDPNNEEGGHGVKGWAFDDGNDVWMGRTINETSRLGYETFKVIEGWSNPKSKLQINRQVIVDRGNRSGYSGIFSVEGKSCINRCFYVELIRGRKEETEVLWTSNSIVVFCGTSGTYGTGSWPDGADLNIMPI

SEQ ID NO: 25549 - protein, 469 aa, synthetic construct; identical to SEQ ID NO: 19518
  REGION 1..469: note = neuraminidase__InfluenzaA__AID70526

SEQ ID NO: 25550 - protein, 469 aa, synthetic construct
  REGION 1..469: note = neuraminidase__InfluenzaA__AID70527
MNPNQKIITIGSVSLTMWIICFFMQIAILITTVTLHFKQYEFNSPPNNQVMLCEPTIIERNITEIVYLTNTTIEKEICPKLAEYRNWSKPQCDITGFAPFSKDNSIRLSAGGDIWVTREPYVSCDPDKCYQFALGQGTTLNNVHSNNTVRDRTPYRTLLMNELGVPFHLGTKQVCIAWSSSSCHDGKAWLHVCITGDDKNATASFIYNGRLVDSVVSWSKEILRTQESECVCINGTCTVVMTDGSASGKADTKILFIEEGKIVHTSTLSGSAQHVEECSCYPRYPGVRCVCRDNWKGSNRPIVDINIKDHSIVSSYVCSGLVGDTPRKNDSSSSSHCLDPNNEEGGHGVKGWAFDDGNDVWMGRTINETSRLGYETFKVIEGWSNPKSKLQINRQVIVDRGNRSGYSGIFSVEGKSCINRCFYVELIRGRKEETEVLWTSNSIVVFCGTSGTYGTGSWPDGADLNLMPI

SEQ ID NO: 25551 - protein, 469 aa, synthetic construct
  REGION 1..469: note = neuraminidase__InfluenzaA__AID70528
MNPNQKIITIGSVSLSISTICFFMQIAILITTVTLHFKQYEFNSPPNNQVMLCEPTIIERNITEIVYLTNTTIEKEICPKLAEYRNWSKPQCDITGFAPFSKDNSIRLSAGGDIWVTREPYVSCDPDKCYQFALGQGTTLNNVHSNNTVRDRTPYRTLLMNELGVPFHLGTKQVCIAWSSSSCHDGKAWLHVCITGDDKNATASFIYNGRLVDSVVSWSKEILRTQESECVCINGTCTVVMTDGSASGKADTKILFIEEGKIVHTSTLSGSAQHVEECSCYPRYPGVRCVCRDNWKGSNRPIVDINIKDHSIVSSYVCSGLVGDTPRKNDSSSSSHCLDPNNEEGGHGVKGWAFDDGNDVWMGRTINETSRLGYETFKVIEGWSNPKSKLQINRQVIVDRGNRSGYSGIFSVEGKSCINRCFYVELIRGRKEETEVLWTSNSIVVFCGTSGTYGTGSWPDGADLNLMPI

SEQ ID NO: 25552 - protein, 469 aa, synthetic construct; identical to SEQ ID NO: 19518
  REGION 1..469: note = neuraminidase__InfluenzaA__AID70529

SEQ ID NO: 25553 - protein, 469 aa, synthetic construct
  REGION 1..469: note = neuraminidase__InfluenzaA__AID70530
MNPNQKIITIGSVSLTISTICFFMQIAILITTVTLHFKQYEFNSPPNNQVMLCEPTIIERNITEIVYLTNTTIEKEICPKLAEYRNWSKPQCDITGFAPFSKDNSIRLSAGGDIWVTREPYVSCDPDKCYQFALGQGTTLNNVHSNNTVRDRTPYRTLLMNELGVPFHLGTKQVCIAWSSSSCHDGKAWLHVCITGDDKNATASFIYNGRLVDSVVSWSKEILRTQESECVCINGTCTVVMTDGSASGKADTKILFIEEGKIVHTSTLSGSAQHVEECSCYPRYPGVRCVCRDNWKGSNRPIVDINIKDHSIVSSYVCSGLVGDTPRKNDSSSSSHCLDPNNEEGGHGVKGWAFDDGNDVWMGRTINETSRLGYETFKVIEGWSNPKSKLQINRQVIVDRGNRSGYSGIFSVEGKSCINRCFYVELIRGRKEETEVLWTSNSIVVFCGTSGTYGTGSWPDGADLNIMPI

SEQ ID NO: 25554 - protein, 469 aa, synthetic construct; identical to SEQ ID NO: 19518
  REGION 1..469: note = neuraminidase__InfluenzaA__AID70531

SEQ ID NO: 25555 - protein, 469 aa, synthetic construct
  REGION 1..469: note = neuraminidase__InfluenzaA__AID70532
MNPNQKIITIGSVSLTISTICFFMQIAILITTVTLHFKQYEFNSPPNNQVMLCEPTIIERNITEIVYLTNTTIEKEICPKLAEYRNWSKPQCDITGFAPFSKDNSIRLSAGGDIWVTREPYVSCDPDKCYQFALGQGTTLNNVHSNNTVRDRTPYRTLLMNELGVPFHLGTKQVCIAWSSSSCHDGKAWLHVCITGDDKNATASFIYNGRLVDSVVSWSKEILRTQESECVCINGTCTVVMTDGSASGKADTKILFIEEGKIVHTSTLSGSAQHVEECSCYPRYPGVRCVCRDNWKGSNRPIVDINIKDHSIVSSYVCSGLVGDTPRKNDSSSSSHCLDPNNEEGGHGVKGWAFDDGNDVWMGRTINETSRLGYETLKVIEGWSNPKSKLQINRQVIVDRGNRSGYYGIFSVEGKSCINRCFYVELIWGRKEEIEVLWTSNSKVVFCGTSGTYGTGSSPDGADLNFMPI

SEQ ID NO: 25556 - protein, 469 aa, synthetic construct
  REGION 1..469: note = neuraminidase__InfluenzaA__AID70533
MNPNQKIITIGSVSLAISTICFFMQIAILITTVTLHFKQYEFNSPPNNQVMLCEPTIIERNITEIVYLTNTTIEKEICPKLAEYRNWSKPQCDITGFAPFSKDNSIRLSAGGDIWVTREPYVSCDPDKCYQFALGQGTTLNNVHSNNTVRDRTPYRTLLMNELGVPFHLGTKQVCIAWSSSSCHDGKAWLHVCITGDDKNATASFIYNGRLVDSVVSWSKEILRTQESECVCINGTCTVVMTDGSASGKADTKILFIEEGKIVHTSTLSGSAQHVEECSCYPRYPGVRCVCRDNWKGSNRPIVDINIKDHSIVSSYVCSGLVGDTPRKNDSSSSSHCLDPNNEEGGHGVKGWAFDDGNDVWMGRTINETSRLGYETFKVIEGWSNPKSKLQINRQVIVDRGNRSGYSGIFSVEGKSCINRCFYVELIRGRKEETEVLWTSNSIVVFCGTSGTYGTGSWPDGADLNLMPI

SEQ ID NO: 25557 - protein, 469 aa, synthetic construct
  REGION 1..469: note = neuraminidase__InfluenzaA__AID70534
MNPNQKIITIGSVSLSIYIICFFMQIAILITTVTLHFKQYEFNSPPNNQAMPCEPTIIERNITEIVYLTNTTIEKEICPKLAEYRNWSKPQCDITGFAPFSKDNSIRLSAGGDIWVTREPYVSCDPDKCYQFALGQGTTLNNVHSNNTVRDRTPYRTLLMNELGVPFHLGTKQVCIAWSSSSCHDGKAWLHVCITGDDKNATASFIYNGRLVDSVVSWSKEILRTQESECVCINGTCTVVMTDGSASGKADTKILFIEEGKIVHTSTLSGSAQHVEECSCYPRYPGVRCVCRDNWKGSNRPIVDINIKDHSIVSSYVCSGLVGDTPRKNDSSSSSHCLDPNNEEGGHGVKGWAFDDGNDVWMGRTINETSRLGYETFKVIEGWSNPKSKLQINRQVIVDRGNRSGYSGIFSVEGKSCINRCFYVELIRGRKEETEVLWTSNSIVVFCGTSGTYGTGSWPDGADLNLMPI

SEQ ID NO: 25558 - protein, 469 aa, synthetic construct
  REGION 1..469: note = neuraminidase__InfluenzaA__AID70535
MNPNQKIITIGSVSLAMCTICFFMQIAILITTVTLHFKQYEFNSPPNNQAMPCEPTIIERNITEIVYLTNTTIEKEICPKLAEYRNWSKPQCDITGFAPFSKDNSIRLSAGGDIWVTREPYVSCDPDKCYQFALGQGTTLNNVHSNNTVRDRTPYRTLLMNELGVPFHLGTKQVCIAWSSSSCHDGKAWLHVCITGDDKNATASFIYNGRLVDSVVSWSKEILRTQESECVCINGTCTVVMTDGSASGKADTKILFIEEGKIVHTSTLSGSAQHVEECSCYPRYPGVRCVCRDNWKGSNRPIVDINIKDHSIVSSYVCSGLVGDTPRKNDSSSSSHCLDPNNEEGGHGVKGWAFDDGNDVWMGRTINETSRLGYETFKVIEGWSNPKSKLQINRQVIVDRGNRSGYSGIFSVEGKSCINRCFYVELIRGRKEETEVLWTSNSIVVFCGTSGTYGTGSWPDGADLNLMPI

SEQ ID NO: 25559 - protein, 469 aa, synthetic construct
  REGION 1..469: note = neuraminidase__InfluenzaA__AID70536
MNPNQKIITIGSVSLTISTVCFFMQIAILITTVTLHFKQYEFNSPPNNQVMLCEPTIIDRNITEIVYLTNTTIEKEICPKLAEYRNWSKPQCDITGFAPFSKDNSIRLSAGGDIWVTREPYVSCDPDKCYQFALGQGTTLNNVHSNNTVRDRTPYRTLLMNELGVPFHLGTKQVCIAWSSSSCHDGKAWLHVCITGDDKNATASFIYNGRLVDSVVSWSKEILRTQESECVCINGTCTVVMTDGSASGKADTKILFIEEGKIVHTSTLSGSAQHVEECSCYPRYPGVRCVCRDNWKGSNRPIVDINIKDHSIVSSYVCSGLVGDTPRKNDSSSSSHCLDPNNEEGGHGVKGWAFDDGNDVWMGRTINETSRLGYETFKVIEGWSNPKSKLQINRQVIVDRGNRSGYSGIFSVEGKSCINRCFYVELIRGRKEETEVLWTSNSIVVFCGTSGTYGTGSWPDGADLNLMPI

SEQ ID NO: 25560 - protein, 469 aa, synthetic construct; identical to SEQ ID NO: 19518
  REGION 1..469: note = neuraminidase__InfluenzaA__AID70537

SEQ ID NO: 25561 - protein, 469 aa, synthetic construct
  REGION 1..469: note = neuraminidase__InfluenzaA__AID70538
MNPNQKKITIGAVSLTMCTVCIFMQIAILITTVTLHFRQYEFNSPPNNQVMLCEPTIIERNITEIVYLTNTTIEKEICPKLAEYRNWSKPQCDITGFAPFSKDNSIRLSAGGDIWVTREPYVSCDPDKCYQFALGQGTTLNNVHSNNTVRDRTPYRTLLMNELGVPFHLGTKQVCIAWSSSSCHDGKAWLHVCITGDDKNATASFIYNGRLVDSVVSWSKEILRTQESECVCINGTCTVVMTDGSASGKADTKILFIEEGKIVHTSTLSGSAQHVEECSCYPRYPGVRCVCRDNWKGSNRPIVDINIKDHSIVSSYVCSGLVGDTPRKNDSSSSSHCLDPNNEEGGHGVKGWAFDDGNDVWMGRTINETSRLGYETFKVIEGWSNPKSKLQINRQVIVDRGNRSGYSGIFSVEGKSCINRCFYVELIRGRKEETEVLWTSNSIVVFCGTSGTYGTGSWPDGADLNLMPI

SEQ ID NO: 25562 - protein, 469 aa, synthetic construct
  REGION 1..469: note = neuraminidase__InfluenzaA__AID70539
MNPNQKIITIGSVSLTISTICFFMQIAILITTVTLHFKQYEFNSPPNNQVMLCEPTIIERNITEIVYLTNTTIEKEICPKLAEYRNWSKPQCDITGFAPFSKDNSIRLSAGGDIWVTREPYVSCDPDKCYQFALGQGTTLNNVHSNNTVRDRTPYRTLLMNELGVPFHLGTKQVCIAWSSSSCHDGKAWLHVCITGDDKNATASFIYNGRLVDSVVSWSKEILRTQESECVCINGTCTVVMTDGSASGKADTKILFIEEGKIVHTSTLSGSAQHVEECSCYPRYPGVRCVCRDNWKGSNRPIVDINIKDHSIVSSYVCSGLVGDTPRKNDSSSSSHCLNPNNEEGGHGVKGWAFDDGNDVWMGRTINETSRLGYETFKVIEGWSNPKSKLQINRQVIVDRGNRSGYSGIFSVEGKSCINRCFYVELIRGRKEETEVLWTSNSIVVFCGTSGTYGTGSWPDGADLNLMPI

SEQ ID NO: 25563 - protein, 469 aa, synthetic construct; identical to SEQ ID NO: 19518
  REGION 1..469: note = neuraminidase__InfluenzaA__AID70540

SEQ ID NO: 25564 - protein, 469 aa, synthetic construct; identical to SEQ ID NO: 19518
  REGION 1..469: note = neuraminidase__InfluenzaA__AID70541

SEQ ID NO: 25565 - protein, 469 aa, synthetic construct
  REGION 1..469: note = neuraminidase__InfluenzaA__AID70633
MNPNQKIITIGSVCMTIGMANLILQIGNIISIWVSHSIQLGNQSQIEACNQSVITYENNTWVNQTYVNISNTNFAAGQSVVSVKLAGNSSLCPVSGWAIYSKDNSVRIGSKGDVFVIREPFISCSPLECRTFFLTQGALLNDKHSNGTIKDRSPYRTLMSCPIGEVPSPYNSRFESVAWSASACHDGINWLTIGISGPDSGAVAVLKYNGIITDTIKSWRNNILRTQESECACVNGSCFTIMTDGPSDGQASYKIFRIEKGKIVKSVEMNAPNYHYEECSCYPDSSEITCVCRDNWHGSNRPWVSFNQNLEYQIGYICSGVFGDNPRPNDKTGSCGPVSSNGANGVKGFSFKYGNGVWIGRTKSISSRKGFEMIWDPNGWTGTDNKFSIKQDIVGINEWSGYSGSFVQHPELTGLDCIRPCFWVELIRGRPEENTIWTSGSSISFCGVNSDTVGWSWPDGAELPFTIDK

SEQ ID NO: 25566 - protein, 465 aa, synthetic construct
  REGION 1..465: note = neuraminidase__InfluenzaA__AID70635
MNPKQKILCTSATAIIIGAIAVLIGIANLGLNIGLHLKPGCNCSHSQPETTNTSQTIINNYYNETNITNIQMEERTSRNFNNLTKGLCTINSWHIYGKDNAVRIGESSDVLVTREPYVSCDPDECRFYALSQGTTIRGKHSNGTIHDGSQYRALISWPLSSPPTVYNSRVECIGWSSTSCHDGKSRMSICISGPNNNASAVVWYNRRPVAEINTWARNILRTQESECVCHNGVCPVVFTDGSATGPADTRIYYFKEGKILKWESLTGTAKHIEECSCYGERTGITCTCRDNWQGSNRPVIQIDPVAMTHTSQYICSPVLTDNPRPNDPNIGKCNDPYPGNNNNGVKGFSYLDGANTWLGRTISTASRSGYEMLKVPNALTDDRSKPIQGQTIVLNADWSGYSGSFMDYWAEGDCYRACFYVELIRGRPKEDKVWWTSNSIVSMCSSTEFLGQWNWPDGAKIEYFL

SEQ ID NO: 25567 - protein, 466 aa, synthetic construct
  REGION 1..466: note = neuraminidase__InfluenzaA__AIG44695
MNPNQKITAIGSVSLIIAIICLLMQIAILTTTMTLHFRQNECSNPSNNQVMPCEPIIIERNTVHLNSTTIEREICPKVAEYKNWSKPQCQITGFAPFSKDNSIRLSASGDIWVTREPYVSCSLDKCYQFALGQGTTLKNKHSNGTTHDRTPHRTLLMNELGVPFHLGTKQVCIAWSSSSCYDGKAWLHVCVTGDDKNATASIIYDGMLVDSVGSWSKNILRTQESECVCINGTCAVVMTDGSASGKADTRVLFIREGKIINISPLSGSAQHVEECSCYPRYPEVRCVCRDNWKGSNRPILYINMADYSIESSYVCSGLVGDTPRNDDSSSSSNCRDPNNERGAPGVKGWAFDDGNDVWMGRTIKNGSRSGYETFRVVNGWTMANSKSQINRQVIVDSDGWSGYSGIFSVEGKKCINRCFYVELIRGRPQEPRVWWTSNSIIVFCGTSGTYGTGSWPDGANINFMPI

SEQ ID NO: 25568 - protein, 469 aa, synthetic construct
  REGION 1..469: note = neuraminidase__InfluenzaA__AIJ10793
MNPNQKIITIGSVSLTISTICFFMQIAILITTVTLHFKQYEFNSPPNNQVMLCEPTIIERNITEIVYLTNTTIEKEICPKLAEYRNWSKPQCDITGFAPFSKDNSIRLSAGGDIWVTREPYVSCDPDKCYQFALGQGTTLNNVHSNNTVRDRTPYRTLLMNELGVPFHLGTKQVCIAWSSSSCHDGKAWLHVCITGDDKNATASFIYNGRLVDSVVSWSKEILRTQESECVCINGTCTVVMTDGSASGKADTKILFIEEGKIVHTSTLSGSAQHVEECSCYPRYPGVRCVCRDNWKGSNRPIVDINIKDHSIVSSYVCSGLVGDTPRKNDSSSSSHCLDPNNEEGGHGVKGWAFDDGNDVWMGRTINETSRLGYETFKAIEGWSNPKSKLQTNRQVIVDRGNRSGYSGIFSVEGKSCINRCFYVELIRGRKEETEVLWTSNSIVVFCGTSGTYGTGSWPDGADLNLMPI

SEQ ID NO: 25569 - protein, 469 aa, synthetic construct; identical to SEQ ID NO: 19518
  REGION 1..469: note = neuraminidase__InfluenzaA__AIJ10794

SEQ ID NO: 25570 - protein, 469 aa, synthetic construct; identical to SEQ ID NO: 21143
  REGION 1..469: note = neuraminidase__InfluenzaA__AIJ10795

SEQ ID NO: 25571 - protein, 469 aa, synthetic construct; identical to SEQ ID NO: 21143
  REGION 1..469: note = neuraminidase__InfluenzaA__AIJ10796

SEQ ID NO: 25572 - protein, 469 aa, synthetic construct
  REGION 1..469: note = neuraminidase__InfluenzaA__AIJ10797
MNPNQKIITIGSVSLTISTICFFMQIAILITTVTLHFKQYEFNSPPNNQVMLCEPTIIERNITEIVYLTNTTIEKEICPKLAEYRNWSKPQCDITGFAPFSKDNSIRLSAGGDIWVTREPYVSCDPDKCYQFALGQGTTLNNVHSNNTVRDRTPYRTLLMNELGVPFHLGTKQVCIAWSSSSCHDGKAWLHVCITGDDKNATASFIYNGKLVDSVVSWSKEILRTQESECVCINGTCTVVMTDGSASGKADTKILFIEEGKIVHTSTLSGSAQHVEECSCYPRYPGVRCVCRDNWKGSNRPIVDINIKDHSIVSSYVCSGLVGDTPRKNDSSSSSHCLDPNNEEGGHGVKGWAFDDGNDVWMGRTINETSRLGYETFKVIEGWSNPKSKLQINRQVIVDRGNRSGYSGIFSVEDKSCINRCFYVELIRGRKEETEVLWTSNSIVVFCGTSGTYGTGSWPDGADLNLMPI

SEQ ID NO: 25573 - protein, 469 aa, synthetic construct
  REGION 1..469: note = neuraminidase__InfluenzaA__AIJ10798
MNPNQKIITIGSVSLTISTICFFMQIAILITTVTLHFKQYEFNSPPNNQVMLCEPTIIERNITEIVYLTNTTIEKEICPTLAEYRNWSKPQCDITGFAPFSKDNSIRLSAGGDIWVTREPYVSCDPDKCYQFALGQGTTLNNVHSNNTVRDRTPYRTLLMNELGVPFHLGTKQVCIAWSSSSCHDGKAWLHVCITGDDKNATASFIYNGRLVDSVVSWSKEILRTQESECVCINGTCTVVMTDGSASGKADTKILFIEEGKIVHTSTLSGSAQHVEECSCYPRYPGVRCVCRDNWKGSNRPIVDINIKDHSIVSSYVCSGLVGDTPRKNDSSSSSHCLDPNNEEGGHGVKGWAFDDGNDVWMGRTINETSRLGYETFKVIEGWSNPKSKLQINRQVIVDRGNRSGYSGIFSVEGKSCINRCFYVELIRGRKEETEVLWTSNSIVVFCGTSGTYGTGSWPDGADLNLMPI

SEQ ID NO: 25574 - protein, 469 aa, synthetic construct; identical to SEQ ID NO: 21143
  REGION 1..469: note = neuraminidase__InfluenzaA__AIJ10799

SEQ ID NO: 25575 - protein, 469 aa, synthetic construct
  REGION 1..469: note = neuraminidase__InfluenzaA__AIJ10800
MNPNQKIITIGSVSLTISTICFFMQIAILITTVTLHFKQYEFNSSPNNQVMLCEPTIIERNITEIVYLTNTTIEKEICPKLAEYRNWSKPQCDITGFAPFSKDNSIRLSAGGDIWVTREPYVSCDPDKCYQFALGQGTTLNNVHSNNTVRDRTPYRTLLMNELGVPFHLGTKQVCIAWSSSSCHDGKAWLHVCITGDDKNATASFIYNGKLVDSVVSWSKEILRTQESECVCINGTCTVVMTDGSASGKADTKILFIEEGKIVHTSTLSGSAQHVEECSCYPRYPGVRCVCRDNWKGSNRPIVDINIKDHSIVSSYVCSGLVGDTPRKNDSSSSSHCLDPNNEEGGHGVKGWAFDDGNDVWMGRTINETSRLGYETFKVIEGWSNPKSKLQINRQVIVDRGNRSGYSGIFSVEGKSCINRCFYVELIRGRKEETEVLWTSNSIVVFCGTSGTYGTGSWPDGADLNLMPI

SEQ ID NO: 25576 - protein, 469 aa, synthetic construct; identical to SEQ ID NO: 22146
  REGION 1..469: note = neuraminidase__InfluenzaA__AIJ10801

SEQ ID NO: 25577 - protein, 469 aa, synthetic construct; identical to SEQ ID NO: 22146
  REGION 1..469: note = neuraminidase__InfluenzaA__AIJ10803

SEQ ID NO: 25578 - protein, 469 aa, synthetic construct; identical to SEQ ID NO: 22146
  REGION 1..469: note = neuraminidase__InfluenzaA__AIJ10804

SEQ ID NO: 25579 - protein, 469 aa, synthetic construct; identical to SEQ ID NO: 22146
  REGION 1..469: note = neuraminidase__InfluenzaA__AIJ10805

SEQ ID NO: 25580 - protein, 469 aa, synthetic construct
  REGION 1..469: note = neuraminidase__InfluenzaA__AIJ10806
MNPNQKIITIGSVSLTISTICFFMQIAILITTVTLHFKQYEFNSPPNNQVMLCEPTIIERNITEIVYLTNTTIEKEICPKPAEYRNWSKPQCGITGFAPFSKDNSIRLSAGGDIWVTREPYVSCDPDKCYQFALGQGTTLNNVHSNNTVRDRTPYRTLLMNELGVPFHLGTKQVCIAWSSSSCHDGKAWLHVCITGDDKNATASFIYNGRLVDSVVSWSKEILRTQESECVCINGTCTVVMTDGSASGKADTKILFIEEGKIVHTSTLSGSAQHVEECSCYPRYPGVRCVCRDNWKGSNRPIVDINIKDHSIVSSYVCSGLVGDTPRKNDSSSISHCLDPNNEEGGHGVKGWAFDDGNDVWMGRTINETSRLGYETFKVIEGWSNPKSKLQINRQVIVDRGDRSGYSGIFSVEGKSCINRCFYVELIRGRKEETEVLWTSNSIVVFCGTSGTYGTGSWPDGADLNLMPI

SEQ ID NO: 25581 - protein, 469 aa, synthetic construct
  REGION 1..469: note = neuraminidase__InfluenzaA__AIJ10807
MNPNQKIITIGSVSLTISTICFFMQIAILITTVTLHFKQYEFNSPPNNQVMLCEPTIIERNITEIVYLTNTTIEKEICPKPAEYRNWSKPQCGITGFAPFSKDNSIRLSAGGDIWVTREAYVSCDPDKCYQFALGQGTTLNNVHSNNTVRDRTPYRTLLMNELGVPFHLGTKQVCIAWSSSSCHDGKAWLHVCITGDDKNATASFIYNGRLVDSVVSWSKEILRTQESECVCINGTCTVVMTDGSASGKADTKILFIEEGKIVHTSTLSGSAQHVEECSCYPRYPGVRCVCRDNWKGSNRPIVDINIKDHSIVSSYVCSGLVGDTPRKNDSSSSSHCLDPNNEEGGHGVKGWAFDDGNDVWMGRTINETSRLGYETFKVIEGWSNPKSKLQINRQVIVDRGDRSGYSGIFSVEGKSCINRCFYVELIRGRKEETEVLWTSNSIVVFCGTSGTYGTGSWPDGADLNLMPI

SEQ ID NO: 25582 - protein, 469 aa, synthetic construct
  REGION 1..469: note = neuraminidase__InfluenzaA__AIJ10808
MNPNQKIITIGSVSLTISTICFFMQIAILITTVTLHFKQYEFNSPPNNQVMLCEPTIIERNITEIVYLTNTTIEKEICPKPAEYRNWSKPQCGITGFAPFSKDNSIRLSAGGDIWVTREPYVSCDPDKCYQFALGQGTTLNNVHSNNTVRDRTPYRTLLMNELGVPFHLGTKQVCIAWSSSSCHDGKAWLHVCITGDDKNATASFIYNGRLVDSVVSWSKEVLRTQESECVCINGTCTVVMTDGSASGKADTKILFIEEGKIVHTSTLSGSAQHVEECSCYPRYPGVRCVCRDNWKGSNRPIVDINIKDHSIVSSYVCSGLVGDTPRKNDSSSSSHCLDPNNEEGGHGVKGWAFDDGNDVWMGRTINETSRLGYETFKVIEGWSNPKSKLQINRQVIVDRGDRSGYSGIFSVEGKSCINRCFYVELIRGRKEETEVLWTSNSIVVFCGTSGTYGTGSWPDGADLNLMPI

SEQ ID NO: 25583 - protein, 469 aa, synthetic construct; identical to SEQ ID NO: 22146
  REGION 1..469: note = neuraminidase__InfluenzaA__AIJ10809

SEQ ID NO: 25584 - protein, 469 aa, synthetic construct; identical to SEQ ID NO: 22146
  REGION 1..469: note = neuraminidase__InfluenzaA__AIJ10810

SEQ ID NO: 25585 - protein, 469 aa, synthetic construct
  REGION 1..469: note = neuraminidase__InfluenzaA__AIJ10812
MNPNQKIITIGSVSLTISTICFFMQIAILITTVTLHFKQYEFNSPPNNQVMLCEPTIMERNVTEIVYLTNTTIEKEICPKPAEYRNWSKPQCGITGFAPFSKDNSIRLSAGGDIWVTREPYVSCDPDKCYQFALGQGTTLNNVHSNNTVRDRTPYRTLLMNELGVPFHLGTKQVCIAWSSSSCHDGKAWLHVCITGDDKNATASFIYNGRLVDSVVSWSKEILRTQESECVCINGTCTVVMTDGSASGKADTKILFIEEGKIVHTSTLSGSAQHVEECSCYPRYPGVRCVCRDNWKGSNRPIVDINIKDHSIVSSYVCSGLVGDTPRKNDSSSSSHCLDPNNEEGGHGVKGWAFDDGNDVWMGRTINETSRLGYETFKVIEGWSNPKSKLQINRQVIVDRGDRSGYSGIFSVEGKSCINRCFYVELIRGRKEETEVLWTSNSIVVFCGTSGTYGTGSWPDGADLNLMPI

SEQ ID NO: 25586 - protein, 469 aa, synthetic construct
  REGION 1..469: note = neuraminidase__InfluenzaA__AIJ10813
MNPNQKIITIGSVSLTISTICFFMQIAILITTVTLHFKQYEFNSPPNNQVMLCEPTIMERNVTEIVYLTNTTIEKEICPKPAEYRNWSKPQCGITGFAPFSKDNSIRLSAGGDIWVTREPYVSCDPDKCYQFALGQGTTLNNVHSNNPVRDRTPYRTLLMNELGVPFHLGTKQVCIAWSSSSCHDGKAWLHVCITGDDKNATASFIYNGRLVDSVVSWSKEILRTQESECVCINGTCTVVMTDGSASGKADTKILFIEEGKIVHTSTLSGSAQHVEECSCYPRYPGVRCVCRDNWKGSNRPIVDINIKDHSIVSSYVCSGLVGDTPRKNDSSSSSHCLDPNNEEGGHGVKGWAFDDGNDVWMGRTINETSRLGYETFKVIEGWSNPKSKLQINRQVIVDRGDRSGYSGIFSVEGKSCINRCFYVELIRGRKEETEVLWTSNSIVVFCGTSGTYGTGSWPDGADLNLMPI

SEQ ID NO: 25587 - protein, 469 aa, synthetic construct
  REGION 1..469: note = neuraminidase__InfluenzaA__AIJ10814
MNPNQKIITIGSVSLTISTICFFMQIAILITTVTLHFKQYEFNSPPNNQVMLCEPTIVERNITEIVYLTNTTIEKEICPKPAEYRNWSKPQCGITGFAPFSKDNSIRLSAGGDIWVTREPYVSCDPDKCYQFALGQGTTLNNVHSNNTVRDRTPYRTLLMNELGVPFHLGTKQVCIAWSSSSCHDGKAWLHVCITGDDKNATASFIYNGRLVDSVVSWSKEILRTQESECVCINGTCTVVMTDGSASGKADTKILFIEEGKIVHTSTLSGSAQHVEECSCYPRYPGVRCVCRDNWKGSNRPIVDINIKDHSIVSSYVCSGLVGDTPRKNDSSSSSHCLDPNNEEGGHGVKGWAFDDGNDVWMGRTINETSRLGYETFKVIEGWSNPKSKLQINRQVIVDKGDRSGYSGIFSVEGKSCINRCFYVELIRGRKEETEVLWTSNSIVVFCGTSGTYGTGSWPDGADLNLMPI

SEQ ID NO: 25588 - protein, 469 aa, synthetic construct
  REGION 1..469: note = neuraminidase__InfluenzaA__AIJ10815
MNPNQKIITIGSVSLTISTICFFMQIAILITTVTLHFKQYEFNSPPNNQVMLCEPTIIERNITEIVYLTNTTIEKEICPKPAEYRNWSKPQCGITGFAPFSKDNSIRLSAGGDIWVTREPYVSCDPDKCYQFALGQGTTLNNVHSNNTVRDRTPYRTLLMNELGVPFHLGTKQVCIAWSSSSCHDGKAWLHVCITGDDKNATASFIYNGRLVDSVVSWSKEILRTQESECVCINGTCTVVMTDGSASGKADTKILFIEEGKIVHTSTLSGSAQHVEECSCYPRYPGVRCVCRDNWKGSNRPIVDINIKDHSIVSSYVCSGLVGDTPRKNDSSSSSHCLDPNNEEGGHGVKGWAFDDGNDVWMGRTINETSRLGYETFKVIEGWSNPKSKLQINRQVIVDRGDRSGYSGIFSVEGKSCINRCFYVELIRGRKEENEVLWTSNSIVVFCGTSGTYGTGSWPDGADLNLMPI

SEQ ID NO: 25589 - protein, 469 aa, synthetic construct
  REGION 1..469: note = neuraminidase__InfluenzaA__AIJ10816
MNPNQKIITIGSVSLTISTICFFMQIAILITTVTLHFKQYEFNSPPNNQVMLCEPTIIERNITEIVYLTNTTIEKEICPKPAEYRNWSKPQCGITGFAPFSKDNSIRLSAGGDIWVTREPYVSCDPDKCYQFALGQGTTLNNVHSNNTVRDRTPYRTLLMNELGVPFHLGTKQVCIAWSSSSCHDGKAWLHVCITGDDKNATASFIYNGRLVDSVVSWSKEILRTQESECVCINGTCTVVMTDGSASGKADTKILFIEEGKIVHTSTLSGSAQHVEECSCYPRYPGVRCVCRDNWKGSNRPIVDINIKDHSIVSSYVCSGLVGDTPRKNDSSSSSHCLDPNNEEGGHGVKGWAFDDGNDVWMGRTINETSRLGYETFKVIEGWSNPKSKLQINRQVIVDRGDRSGYSGIFSVEGKGCINRCFYVELIRGRKEETEVLWTSNSIVVFCGTSGTYGTGSWPDGADLNLMPI

SEQ ID NO: 25590 - protein, 469 aa, synthetic construct; identical to SEQ ID NO: 22146
  REGION 1..469: note = neuraminidase__InfluenzaA__AIJ10817

SEQ ID NO: 25591 - protein, 469 aa, synthetic construct; identical to SEQ ID NO: 22146
  REGION 1..469: note = neuraminidase__InfluenzaA__AIJ10818

SEQ ID NO: 25592 - protein, 469 aa, synthetic construct
  REGION 1..469: note = neuraminidase__InfluenzaA__AIJ10819
MNPNQKIITIGSVSLTISTICFFMQIAILITTVALHFKQYEFNSPPNNQVMLCEPTIIERNITEIVYLTNTTIEKEICPKPAEYRNWSKPQCGITGFAPFSKDNSIRLSAGGDIWVTREPYVSCDPDKCYQFALGQGTTLNNVHSNNTVRDRTPYRTLLMNELGVPFHLGTKQVCIAWSSSSCHDGKAWLHVCITGDDKNATASFIYNGRLVDSVVSWSKEILRTQESECVCINGTCTVVMTDGSASGKANTKILFIEEGKIVHTSTLSGSAQHVEECSCYPRYPGVRCVCRDNWKGSNRPIVDINIKDHSIVSSYVCSGLVGDTPRKNDSSSSSHCLDPNNEEGGHGVKGWAFDDGNDVWMGRTINETSRLGYETFKVIEGWSNPKSKLQINRQVIVDRGDRSGYSGIFSVEGKSCINRCFYVELIRGRKEETEVLWTSNSIVVFCGTSGTYGTGSWPDGADLNLMPI

SEQ ID NO: 25593 - protein, 469 aa, synthetic construct; identical to SEQ ID NO: 22146
  REGION 1..469: note = neuraminidase__InfluenzaA__AIJ10820

SEQ ID NO: 25594 - protein, 469 aa, synthetic construct; identical to SEQ ID NO: 22146
  REGION 1..469: note = neuraminidase__InfluenzaA__AIJ10821

SEQ ID NO: 25595 - protein, 469 aa, synthetic construct
  REGION 1..469: note = neuraminidase__InfluenzaA__AIJ10822
MNPNQKIITIGSVSLTISTICFFMQIAILITTVTLHFKQYEFNSPPNNQVMLCEPTIIERNITEIVYLTNTTIEKEICPKPAEYRNWSKPQCGITGFAPFSKDNSIRLSAGGDIWVTREPYVSCDPDKCYQFALGQGTTLNNVHSNNTVRDRTPYRTLLMNELGVPFHLGTKQVCIAWSSSSCHDGKAWLHVCITGDDKNATASFIYNGRLVDSVVSWSKDILRTQESECVCINGTCTVVMTDGSASGKADTKILFIEEGKIVHTSTLSGSAQHVEECSCYPRYPGVRCVCRDNWKGSNRPIVDINIKDHSIVSSYVCSGLVGDTPRKNDSSSSSHCLDPNNEEGGHGVKGWAFDDGNDVWMGRTINETSRLGYETFKVIEGWSNPKSKLQINRQVIVDRGDRSGYSGIFSVEGKSCINRCFYVELIRGRKEENEVLWTSNSIVVFCGTSGTYGTGSWPDGADLNLMPI

SEQ ID NO: 25596 - protein, 469 aa, synthetic construct
  REGION 1..469: note = neuraminidase__InfluenzaA__AIJ10823
MNPNQKIITIGSVSLTISTICFFMQIAILITTVTLHFNQYEFNSPPNNQVMLCEPTIIERNITEIVYLTTTTIEKEICPKPAEYRNWSKPQCGITGFAPFSKDNSIRLSAGGDIWVTREPYVSCDPDKCYQFALGQGTTLNNVHSNNTVRDRTPFRTLLMNELGVPFHLGTKQVCIAWSSSSCHDGKAWLHVCITGDDKNATASFIYNGRLVDSVVSWSKEILRTQESECVCINGTCTVVMTDGSASGKAVTKILFIEEGKIVHTSTLSGSAQHVEECSCYPRYPGVRCVCRDNWKGSNRPIVDINIKDHSIVSGYVCSGLVGDTPRKNDSSSSSHCLNPNNEEGGHGVKGWAFDDGNDVWMGRTINETSRLGYETFKVIEGWSNPKSKLQINRQVIVDRGDRSGYSGIFSVEGKSCINRCFYVELIRGRKEETEVLWTSNSIVVFCGTSGTYGTGSWPDGADLNLMPI

SEQ ID NO: 25597 - protein, 469 aa, synthetic construct
  REGION 1..469: note = neuraminidase__InfluenzaA__AIJ10824
MNPNQKIITIGSVSLTISTICFFMQIAILITTVTLHFKQYEFNSPPNNQVVLCEPTIIERNITEIVYLTNTTIEKEICPKPAEYRNWSKPQCGITGFAPFSKDNSIRLSAGGDIWVTREPYVSCDPDKCYQFALGQGTTLNNVHSNNTVRDRTPYRTLLMNELGVPFHLGTKQVCIAWSSSSCHDGKAWLHVCITGDDKNATASFIYNGRLVDSVVSWSKEILRTQESECVCINGTCTVVMTDGSASGKADTKILFIEEGKIVHTSTLSGSAQHVEECSCYPRYPGVRCVCRDNWKGSNRPIVDINIKDHSIVSSYVCSGLVGDTPRKNDSSSSSHCLDPNNEEGGHGVKGWAFDDGNDVWMGRTINETSRLGYETFKVIEGWSNPKSKLQINRQVIVDRGDRSGYSGIFSVEGKSCINRCFYVELIRGRKEETEVLWTSNSIVVFCGTSGTYGTGSWPDGADLNLMPI

SEQ ID NO: 25598 - protein, 469 aa, synthetic construct
  REGION 1..469: note = neuraminidase__InfluenzaA__AIJ10827
MNPNQKIITIGSVSLTISTICFFMQIAILITTVTLHFKQYEFNSPPNNQVMLCEPTIIERNITEIVYLTNTTIEKEICPKPAEYRNWSKPQCGITGFAPFSKDNSIRLSAGGDIWVTREPYVSCDPDKCYQFALGQGTTLNNVHSNNTVRDRTPYRTLLMNELGVPFHLGTKQVCIAWSSSSCHDGKAWLHVCITGDDKNATASFIYNGRLVDSVVSWSKDILRTQESECVCINGTCTVVMTDGSASGKADTKILFIEEGKIVHTSTLSGSAQHVEECSCYPRYPGVRCVCRDNWKGSNRPIVDINIKDHSIVSSYVCSGLVGDTPRKNDSSSSSHCLDPNNEEGGHGVKGWAFDDGNDVWMGRTINETSRLGYETFKVIEGWSNPKSKLQINRQVIVDRGDRSGYSGIFSIEGKSCINRCFYVELIRGRKEETEVLWTSNSIVVFCGTSGTYGTGSWPDGADLNLMPI

SEQ ID NO: 25599 - protein, 469 aa, synthetic construct
  REGION 1..469: note = neuraminidase__InfluenzaA__AIJ10828
MNPNQKIITIGSVSLTISTICFFMQIAILITTVTLHFKQYEFNSPPNNQVMLCEPTIIERNITEIVYLTNTTIEKEICPKPAEYRNWSKPQCGITGFAPFSKDNSIRLSAGGDIWVTREPYVSCDPDKCYQFALGQGTTLNNVHSNNTVRDRTPYRTLLMNELGVPFHLGTKQVCIAWSSSSCHDGKAWLHVCITGDDKNATASFIYNGRLVDSVVSWSKDILRTQESECVCINGTCTVVMTDGSASGKADTKILFIEEGKIVHTSTLSGSAQHVEECSCYPRYPGVRCVCRDNWKGSNRPIVDINIKDHSIVSSYVCSGLVGDTPRKNDSSSSSHCLDPNNEEGGHGVKGWAFDDGNDVWMGRTINETSRLGYETFKVIEGWSNPKSKLQINRQVIVDRGDRSGYSGIFSIEGKSCINRCFYVELIRGRKEETEVVWTSNSIVVFCGTSGTYGTGSWPDGADLNLMPI

SEQ ID NO: 25600 - protein, 469 aa, synthetic construct
  REGION 1..469: note = neuraminidase__InfluenzaA__AIJ10829
MNPNQKIITIGSVSLTISTICFFMQIAILITTVTLHFKQYEFNSPPNNQVMLCEPTIIERNITEIVYLTNTTIEKEICPKPAEYRNWSKPQCGITGFAPFSKDNSIRLSAGGDIWVTREPYVSCDPDNCYQFALGQGTTLNNVHSNNTVRDRTPYRTLLMNELGVPFHLGTKQVCIAWSSSSCHDGKAWLHVCITGDDKNATASFIYNGRLVDSVVSWSKDILRTQESECVCINGTCTVVMTDGSASGKADTKILFIEEGKIVHTSTLSGSAQHVEECSCYPRYPGVRCVCRDNWKGSNRPIVDINIKDHSIVSSYVCSGLVGDTPRKNDSSSSSHCLDPNNEEGDHGVKGWAFDDGNDVWMGRTINETSRLGYETFKVIEGWSNPKSKLQINRQVIVDRGDRSGYSGIFSIEGKSCINRCFYVELIRGRKEETEVLWTSNSIVVFCGTSGTYGTGSWPDGADLNLMPI

SEQ ID NO: 25601 - protein, 469 aa, synthetic construct
  REGION 1..469: note = neuraminidase__InfluenzaA__AIJ10830
MNPNQKIITIGSVSLTISTICFFMQIAILITTVTLHFKQYEFNSPPNNQVMLCEPTIIERNITEIVYLTNTTIEKEICPKPAEYKNWSKPQCGITGFAPFSKDNSIRLSAGGDIWVTREPYVSCDPDKCYQFALGQGTTLNNVHSNNTVRDRTPYRTLLMNELGVPFHLGTKQVCIAWSSSSCHDGKAWLHVCITGDDKNATASFIYNGRLVDSVVSWSKDILRTQESECVCINGTCTVVMTDGSASGKADTKILFIEEGKIVHTSTLSGSAQHVEECSCYPRYPGVRCVCRDNWKGSNRPIVDINIKDHSIVSSYVCSGLVGDTPRKNDSSSSSHCLDPNNEEGGHGVKGWAFDDGNDVWMGRTINETSRLGYETFKVIEGWSNPKSKLQINRQVIVDRGDRSGYSGIFSIEGKSCINRCFYVELIRGRKEETEVLWTSNSIVVFCGTSGTYGTGSWPDGADLNLMPI

SEQ ID NO: 25602 - protein, 469 aa, synthetic construct; identical to SEQ ID NO: 25598
  REGION 1..469: note = neuraminidase__InfluenzaA__AIJ10831

SEQ ID NO: 25603 - protein, 469 aa, synthetic construct; identical to SEQ ID NO: 25598
  REGION 1..469: note = neuraminidase__InfluenzaA__AIJ10832

SEQ ID NO: 25604 - protein, 469 aa, synthetic construct
  REGION 1..469: note = neuraminidase__InfluenzaA__AIJ10834
MNPNQKIITIGSVSLTISTICFFMQIAILITTVTLHFKQYEFNSPPNNQVMLCEPTIIERNITEIVYLTNTTIEKEICPKPAEYRNWSKPQCGITGFAPFSKDNSIRLSAGGDIWVTREPYVSCDPDKCYQFALGQGTTLNNVHSNNTVRDRTPYRTLLMNELGVPFHLGTKQVCIAWSSSSCHDGKAWLHVCITGDDKNATASFIYNGRLVDSVVSWSKDILRTQESECVCINGTCTVVMTDGSASGKADTKILFIEEGKIVHTSTLSGSAQHVEECSCYPRYPGVRCVCRDNWKGSNRPIVDINIKDHSIVSSYVCSGLVGDTPRKNDSSSSSHCLDPNNEEGGHGVKGWAFDDGNDVWMGRTINETSRLGYETFKVIEGWSNPKSKLQINRQVIVDRGDRSGYSGIFSIESKSCINRCFYVELIRGRKEETEVLWTSNSIVVFCGTSGTYGTGSWPDGADLNLMPI

SEQ ID NO: 25605 - protein, 469 aa, synthetic construct
  REGION 1..469: note = neuraminidase__InfluenzaA__AIJ10835
MNPNQKIITIGSVSLTISTICFFMQIAILITTVTLHFKQYEFNSTPNNQVMLCEPTIIERNITEIVYLTNTTIEKEICPKPAEYRNWSKPQCGITGFAPFSKDNSIRLSAGGDIWVTREPYVSCDPDKCYQFALGQGTTLNNVHSNNTVRDRTPYRTLLMNELGVPFHLGTKQVCIAWSSSSCHDGKAWLHVCITGDDKNATASFIYNGRLVDSVVSWSKDILRTQESECVCINGTCTVVMTDGSASGKADTKILFIEEGKIVHTSTLSGSAQHVEECSCYPRYPGVRCVCRDNWKGSNRPIVDINIKDHSIVSSYVCSGLVGDTPRKNDSSSSSHCLDPNNEEGGHGVKGWAFDDGNDVWMGRTINETSRLGYETFKVIEGWSNPKSKLQINRQVIVDRGDRSGYSGIFSIEGKSCINRCFYVELIRGRKEETEVLWTSNSIVVFCGTSGTYGTGSWPDGADLNLMPI

SEQ ID NO: 25606 - protein, 469 aa, synthetic construct; identical to SEQ ID NO: 25598
  REGION 1..469: note = neuraminidase__InfluenzaA__AIJ10836

SEQ ID NO: 25607 - protein, 469 aa, synthetic construct
  REGION 1..469: note = neuraminidase__InfluenzaA__AIJ10837
MNPNQKIITIGSVSLTISTICFFMQIAILITTVTLHFKQYEFNSPPNNQVMLCEPTIIERNITEIVYLTNTTIEKEICPKPAEYRNWSKPQCGITGFAPFSKDNSIRLSAGGDIWVTREPYVSCDPDKCYQFALGQGTTLNNVHSNNTVRDRTPYRTLLMNELGVPFHLGTKQVCIAWSSSSCHDGKAWLHVCITGDDKNATASFIYNGRLVDSVVSWSKDILRTQESECVCINGTCTVVMTDGSASGKADTKILFIEEGKIIHTSTLSGSAQHVEECSCYPRYPGVRCVCRDNWKGSNRPIVDINIKDHSIVSSYVCSGLVGDTPRKNDSSSSSHCLDPNNEEGGHGVKGWAFDDGNDVWMGRTINETSRLGYETFKVIEGWSNPKSKLQINRQVIVDRGDRSGYSGIFSIEGKSCINRCFYVELIRGRKEETEVLWTSNSIVVFCGTSGTYGTGSWPDGADLNLMPI

SEQ ID NO: 25608 - protein, 469 aa, synthetic construct; identical to SEQ ID NO: 25598
  REGION 1..469: note = neuraminidase__InfluenzaA__AIJ10838

SEQ ID NO: 25609 - protein, 469 aa, synthetic construct
  REGION 1..469: note = neuraminidase__InfluenzaA__AIJ10841
MNPNQKIITIGSVSLTISTICFFMQIAILITTVTLHFKQYEFNSPPNNQVMLCEPTIIERNITEIVYLTNTTIEKEICPKPAEYRNWSKPQCGITGFAPFSKDNSIRLSAGGDIWVTREPYVSCDPDKCYQFALGQGTTLNNVHSNNTVRDRTPYRTLLMNELGVPFHLGTKQVCIAWSSSSCHDGKAWLHVCITGDDKNATASFIYNGRLVDSVVSWSKDILRTQESECVCINGTCTVVMTDGSASGEADTKILFIEEGKIVHTSTLSGSAQHVEECSCYPRYPGVRCVCRDNWKGSNRPIVDINIKDHSIVSSYVCSGLVGDTPRKNDSSSSSHCLDPNNEEGGHGVKGWAFDDGNDVWMGRTINETSRLGYETFKVIEGWSNPKSKLQINRQVIVDRGDRSGYSGIFSIEGKSCINRCFYVELIRGRKEETEVLWTSNSIVVFCGTSGTYGTGSWPDGADLNLMPI

SEQ ID NO: 25610 - protein, 469 aa, synthetic construct
  REGION 1..469: note = neuraminidase__InfluenzaA__AIJ10842
MNPNQKIITIGSVSLTISTICFFMQIAILITTVTLHFKQYEFNPPPNNQVMLCEPTIIERNITEIVYLTNTTIEKEICPKPAEYRNWSKPQCGITGFAPFSKDNSIRLSAGGDIWVTREPYVSCDPDKCYQFALGQGTTLNNVHSNNTVRDRTPYRTLLMNELGVPFHLGTKQVCIAWSSSSCHDGKAWLHVCITGDDKNATASFIYNGRLVDSVVSWSKDILRTQESECVCINGTCTVVMTDGSASGKADTKILFIEEGKIVHTSTLSGSAQHVEECSCYPRYPGVRCVCRDNWKGSNRPIVDINIKDHSIVSSYVCSGLVGDTPRKNDSSSSSHCLDPNNEEGGHGVKGWAFDDGNDVWMGRTINETSRLGYETFKVIEGWSNPKSKLQINRQVIVDRGDRSGYSGIFSIEGKSCINRCFYVELIRGRKEETEVLWTSNSIVVFCGTSGTYGTGSWPDGADLNLMPI

SEQ ID NO: 25611 - protein, 469 aa, synthetic construct; identical to SEQ ID NO: 25598
  REGION 1..469: note = neuraminidase__InfluenzaA__AIJ10843

SEQ ID NO: 25612 - protein, 469 aa, synthetic construct
  REGION 1..469: note = neuraminidase__InfluenzaA__AIJ10844
MNPNQKIITIGSVSLTISTICFFMQIAILITTVTLHFKQYEFNSPPNNQVMLCEPTIIERNITEIVYLTNTTIEKEICPKPAEYRNWSKPQCGITGFAPFSKDNSIRLSAGGDIWVTREPYVSCDPDKCYQFALGQGTTLNNVHSNNTVRDRTPFRTLLMNELGVPFHLGTKQVCIAWSSSSCHDGKAWLHVCITGDDKNATASFIYNGRLVDSVVSWSKEILRTQESECVCINGTCTVVMTDGSASGKAVTKILFIEEGKIVHTSTLSGSAQHVEECSCYPRYPGVRCVCRDNWKGSNRPIVDINIKDHSIVSGYVCSGLVGDTPRKNDSSSSGHCLDPNNEEGGHGVKGWAFDDGNDVWMGRTINETSRLGYETFKVIKGWSNPKSKLQINRQVIVDRGDRSGYSGIFSVEGKSCINRCFYVELIRGRKEETEVLWTSNSIVVFCGTSGTYGTGSWPDGADLNLMPI

SEQ ID NO: 25613 - protein, 469 aa, synthetic construct
  REGION 1..469: note = neuraminidase__InfluenzaA__AIJ10845
MNPNQKIITIGSVSLTISTICFFMQIAILITTVTLHFKQYEFNSPPNNQVMLCEPTIIERNITEIVYLTNTIIEKEICPKPAEYRNWSKPQCGITGFAPFSKDNSIRLSAGGDIWVTREPYVSCDPDKCYQFALGQGTTLNNVHSNNTVRDRTPFRTLLMNELGVPFHLGTKQVCIAWSSSSCHDGKAWLHVCITGDDKNATASFIYNGRLVDSVVSWSKEILRTQESECVCINGTCTVVMTDGSASGKAVTKILFIEEGKIVHTSTLSGSAQHVEECSCYPRYPGVRCVCRDNWKGSNRPIVDINIKDHSIVSGYVCSGLVGDTPRKNDSSSSSHCLDPNNEEGGHGVKGWAFDDGNDVWMGRTINETSRLGYETFKVIEGWSNPKSKLQINRQVIVDRGDRSGYSGIFSVEGKSCINRCFYVELIRGRKEETEVLWTSNSIVVFCGTSGTYGTGSWPDGADLNLMPI

SEQ ID NO: 25614 - protein, 469 aa, synthetic construct
  REGION 1..469: note = neuraminidase__InfluenzaA__AIJ10847
MNPNQKIITIGSVSLTISTICFFMQIAILITTVTLHFKQYEFNSPPNNQVMLCEPTIIERNITEIVYLTNTTIEKEICPKPAEYRNWSKPQCGITGFAPFSKDNSIRLSAGGDIWVTREPYVSCDPDKCYQFALGQGTTLNNVHSNNTVRDRTPYRTLLMNELGVPFHLGTKQVCIAWSSSSCHDGKAWLHVCITGDDKNATASFIYNGRLVDSVVSWSKDILRTQESECVCINGTCTVVMTDGSASGKADTKILFIEEGKIVHTSTLSGSAQHVEECSCYPRYPGVRCVCRDNWKGSNRPIVDINIKDHSIVSSYVCSGLVGDTPRKNDSFSSSHCLDPNNEEGGHGVKGWAFDDGNDVWMGRTINETSRLGYETFKVIEGWSNPKSKLQINRQVIVDRGDRSGYSGIFSIEGKSCINRCFYVELIRGRKEETEVLWTSNSIVVFCGTSGTYGTGSWPDGADLNLMPI

SEQ ID NO: 25615 - protein, 469 aa, synthetic construct; identical to SEQ ID NO: 25598
  REGION 1..469: note = neuraminidase__InfluenzaA__AIJ10848

SEQ ID NO: 25616 - protein, 469 aa, synthetic construct
  REGION 1..469: note = neuraminidase__InfluenzaA__AIJ10849
MNPNQKIITIGSVSLTISTICFFMQIAILITTVTLHFKQYEFNSPPNNQVMLCEPTIIERNITEIVYLTNTTIEKEICPKPAEYRNWSKPQCGITGFAPFSKDNSIRLSAGGDIWVTREPYVSCDPDKCYQFALGQGTTLNNVHSNNTVRDRTPFRTLLMNELGVPFHLGTKQVCIAWSSSSCHDGKAWLHVCITGDDKNATASFIYNGRLVDSVVSWSKEILRTQESECVCINGTCTVVMTDGSASGKAVTKILFIEEGKIVHTSTLSGSAQHVEECSCYPRYPGVRCVCRDNWKGSNRPIVDINIKDHSIVSGYVCSGLVGDTPRKNDSSSSSHCLDPNNEEGGHGVKGWAFDDGNDVWMGRTINETSRLGYETFKVIEGWSNPKSKLQINRQVIVDRGDRSGYSGIFSVEGKSCINRCFYVELIRGRKEETEVLWTSNSIVVFCGTSGTYGTGSWPDGADLNLMPI

SEQ ID NO: 25617 - protein, 469 aa, synthetic construct; identical to SEQ ID NO: 25616
  REGION 1..469: note = neuraminidase__InfluenzaA__AIJ10851

SEQ ID NO: 25618 - protein, 469 aa, synthetic construct; identical to SEQ ID NO: 25616
  REGION 1..469: note = neuraminidase__InfluenzaA__AIJ10852

SEQ ID NO: 25619 - protein, 469 aa, synthetic construct; identical to SEQ ID NO: 25612
  REGION 1..469: note = neuraminidase__InfluenzaA__AIJ10853

SEQ ID NO: 25620 - protein, 469 aa, synthetic construct; identical to SEQ ID NO: 25612
  REGION 1..469: note = neuraminidase__InfluenzaA__AIJ10854

SEQ ID NO: 25621 - protein, 469 aa, synthetic construct
  REGION 1..469: note = neuraminidase__InfluenzaA__AIJ10855
MNPNQKIITIGSVSLTISTICFFMQIAILITTVTLHFKQYEFNSPPNNQVMLCEPTIIERNITEIVYLTNTTIEKEICPKPAEYRNWSKPQCGITGFAPFSKDNSIRLSAGGDIWVTREPYVSCDPDKCYQFALGQGTTLNNVHSNNTVRDRTPFRTLLMNELGVPFHLGTKQVCIAWSSSSCHDGKAWLHVCITGDDKNATASFIYNGRLVDSVVSWSKEILRTQESECVCINGTCTVVMTDGSASGKAVTKILFIEEGKIVHTSTLSGSAQHVEECSCYPRYPGVRCVCRDNWKGSNRPIVDINIKDHSIVSGYVCSGLVGDTPRKNDSSSSSHCLDPNNEEGDHGVKGWAFDDGNDVWMGRTINETSRLGYETFKVIEGWSNPKSKLQINRQVIVDRGDRSGYSGIFSVEGKSCINRCFYVELIRGRKEETEVLWTSNSIVVFCGTSGTYGTGSWPDGADLNLMPI

SEQ ID NO: 25622 - protein, 469 aa, synthetic construct
  REGION 1..469: note = neuraminidase__InfluenzaA__AIJ10856
MNPNKKIITIGSVSLTISTICFFMQIAILITTVTLHFKQYEFNSPPNNQVMLCEPTIIERNITEIVYLTNTTIEKEICPKPAEYRNWSKPQCGITGFAPFSKDNSIRLSAGGDIWVTREPYVSCDPDKCYQFALGQGTTLKNVHSNNTVRDRTPYRTLLMNELGVPFHLGTKQVCIAWSSSSCHDGKAWLHVCITGDDKNATASFIYNGRLVDSVVSWSKDILRTQESECVCINGTCTVVMTDGSASGKADTKILFIEEGKIVHTSTLSGSAQHVEECSCYPRYPGVRCVCRDNWKGSNRPIVDINIKDHSIVSSYVCSGLVGDTPRKNDSFSSGHCLDPNNEEGGHGVKGWAFDDGNDVWMGRTINETSRLGYETFKVIEGWSNPKSKLQINRQVIVDRGDRSGYSGIFSIEGKSCINRCFYVELIRGRKEETEVLWTSNSIVVFCGTSGTYGTGSWPDGADLNLMPI

SEQ ID NO: 25623 - protein, 469 aa, synthetic construct; identical to SEQ ID NO: 25598
  REGION 1..469: note = neuraminidase__InfluenzaA__AIJ10857

SEQ ID NO: 25624 - protein, 469 aa, synthetic construct; identical to SEQ ID NO: 22146
  REGION 1..469: note = neuraminidase__InfluenzaA__AIJ29348

SEQ ID NO: 25625 - protein, 469 aa, synthetic construct; identical to SEQ ID NO: 22146
  REGION 1..469: note = neuraminidase__InfluenzaA__AIJ29350

SEQ ID NO: 25626 - protein, 469 aa, synthetic construct
  REGION 1..469: note = neuraminidase__InfluenzaA__AIJ29352
MNPNQKIITIGSVSLTISTICFFMQIAILITTVTLHFKQYEFNSPPNNQVMLCEPTIIERNITEIVYLTNTTIEKEICPKPAKYRNWSKPQCGITGFAPFSKDNSIRLSAGGDIWVTREPYVSCDPDKCYQFALGQGTTLNNVHSNNTVRDRTPYRTLLMNELGVPFHLGTKQVCIAWSSSSCHDGKAWLHVCITGDDKNATASFIYNGRLVDSVVSWSKEILRTQESECVCINGTCTVVMTDGSASGKADTKILFIEEGKIVHTSTLSGSAQHVEECSCYPRYPGVRCVCRDNWKGSNRPIVDINIKDHSIVSSYVCSGLVGDTPRKNDSSSSSHCLDPNNEEGGHGVKGWAFDDGNDVWMGRTINETSRLGYETFKVIEGWSNPKSKLQINRQVIVDRGDRSGYSGIFSVEGKSCINRCFYVELIRGRKEETEVLWTSNSIVVFCGTSGTYGTGSWPDGADLNLMPI

SEQ ID NO: 25627 - protein, 469 aa, synthetic construct; identical to SEQ ID NO: 21143
  REGION 1..469: note = neuraminidase__InfluenzaA__AIJ29354

SEQ ID NO: 25628 - protein, 469 aa, synthetic construct; identical to SEQ ID NO: 22922
  REGION 1..469: note = neuraminidase__InfluenzaA__AIJ29356

SEQ ID NO: 25629 - protein, 469 aa, synthetic construct; identical to SEQ ID NO: 22922
  REGION 1..469: note = neuraminidase__InfluenzaA__AIJ29358

SEQ ID NO: 25630 - protein, 469 aa, synthetic construct
  REGION 1..469: note = neuraminidase__InfluenzaA__AIJ29360
MNPNQKIITIGSVSLTISTICFFMQIAILTTTVTLHFKQYEFNSPPNNQVMLCEPTIIERNITEIVYLTNTTIEKEICPKPAEYRNWSKPQCGITGFAPFSKDNSIRLSAGGDIWVTREPYVSCDPDKCYQFALGQGTTLNNVHSNNTVRDRTPYRTLLMNELGVPFHLGTKQVCIAWSSSSCHDGKAWLHVCITGDDKNATASFIYNGRLVDSVVSWSKEILRTQESECVCINGTCTVVMTDGSASGKADTKILFIEEGKIVHTSTLSGSAQHVEECSCYPRYPGVRCVCRDNWKGSNRPIVDINIKDHSIVSSYVCSGLVGDTPRKNDSSSSSHCLDPNNEEGGHGVKGWAFDDGNDVWMGRTINETSRLGYETFKVIEGWSNPKSKLQINRQVIVDRGDRSGYSGIFSVEGKSCINRCFYVELIRGRKEETEVLWTSNSIVVFCGTSGTYGTGSWPDGADLNLMPI

SEQ ID NO: 25631 - protein, 469 aa, synthetic construct; identical to SEQ ID NO: 22146
  REGION 1..469: note = neuraminidase__InfluenzaA__AIJ29362

SEQ ID NO: 25632 - protein, 469 aa, synthetic construct
  REGION 1..469: note = neuraminidase__InfluenzaA__AIL93626
MNPNQKIITIGSVCMTIGMANLILQIGNIISIWISHSIQLGNQSQIEACNQSVITYENNTYVNQTYVNISNTNFAAGRSVVSVKLAGNSSLCPVSGWAIYSKDNSVRIGSKGDVFVIREPFISCSPLECRTFFLTQGALLNDKHSNGTIKDRSPYRTLMSCPIGEVPSPYNSRFESVAWSASACHDGINWLTIGISGPDSGAVAVLKYNGIITDTIKSWKNNILRTQESECACVNGSCFTIMTDGPSDGQASYKIFRIEKGKIVKSVEMNAPNYHYEECSCYPDSSEITCVCRDNWHGSNRPWVSFNQNLEYQIGYICSGVFGDNPRPNDKTGSCGPVLSNGANGVKGFSFKYGNGVWIGRTKSISSRKGFEMIWDPNGWTGTDNNFSIKQDIVGINEWSGYSGSFVQHPELTGLDCIRPCFWVELIRGRPKENTIWTSGSSISFCGVNSDTVGWSWPDGAELPFTIDK

SEQ ID NO: 25633 - protein, 469 aa, synthetic construct
  REGION 1..469: note = neuraminidase__InfluenzaA__AIL93648
MNPNQKIITIGSVSLTISTICFFMQIAILITTVTLHFKQYEFNSPPNNQVMLCEPTIIERNITEIVYLTNTTIEKEICPKPAEYRNWSKPQCGITGFAPFSKDNSIRLSAGGDIWVTREPYVSCDPDKCYQFALGQGTTLNNVHSNNTVRDRTPYRTLLMNELGVPFHLGTKQVCIAWSSSSCHDGKAWLHVCITGDDKNATASFIYNGRLVDSVVSWSKEILRTQESECVCINGTCTVVMTDGSASGKADTKILFIEEGRIVHTSTLSGSAQHVEECSCYPRYPGVRCVCRDNWKGSNRPIVDINIKDHSIVSSYVCSGLVGDTPRKNDSSSSSHCLDPNNEEGGHGVKGWAFDDGNDVWMGRTINETSRLGYETFKVIEGWSNPKSKLQINKQVIVDRGDRSGYSGIFSVEGKSCINRCFYVELIRGRKEETEVLWTSNSIVVFCGTSGTYGTGSWPDGADLNLMPI

SEQ ID NO: 25634 - protein, 469 aa, synthetic construct; identical to SEQ ID NO: 22146
  REGION 1..469: note = neuraminidase__InfluenzaA__AIL93660

SEQ ID NO: 25635 - protein, 469 aa, synthetic construct; identical to SEQ ID NO: 22146
  REGION 1..469: note = neuraminidase__InfluenzaA__AIL93672

SEQ ID NO: 25636 - protein, 469 aa, synthetic construct
  REGION 1..469: note = neuraminidase__InfluenzaA__AIL93684
MNPNQKIITIGSVCMTIGMANLILQIGNIISIWISHSIQLGNQSQIEACNQSVITYENNTWVNQTYVNISNTNSATGQSVVSVKLAGNSSLCPVSGWAIYSKDNSVRIGSKGDVFVIREPFISCSPLECRTFFLTQGALLNDKHSNGTIKDRSPYRTLMSCPIGEVPSPYNSRFESVAWSASACHDGINWLTIGISGPDSGAVAVLKYNGIITDTIKSWKNNILRTQESECACVNGSCFTIMTDGPSDGQASYKIFRIEKGKIVKSVEMNAPNYHYEECSCYPDSSEITCVCRDNWHGSNRPWVSFNQNLEYQIGYICSGVFGDNPRPNDKTGSCGPVLSNGANGVKGFSFKYGNGVWIGRTKSISSRKGFEMIWDPNGWTGTDNNFSIKQDIVGINEWSGYSGSFVQHPELTGLDCIRPCFWIELIRGRPKENTIWTSGSSISFCGVNSDTVGWSWPDGAELPFTIDK

SEQ ID NO: 25637 - protein, 469 aa, synthetic construct
  REGION 1..469: note = neuraminidase__InfluenzaA__AIL93719
MNPNQKIITIGSVSLTISTICFFMQIAILITTVTLHFKQYEFNSPPNNQVMLCEPTIIERNITEIVYLTNTTIEKEICPKPAEYRNWSKPQCGITGFAPFSKDNSIRLSAGGDIWVTREPYVSCDPDKCYQFALGQGTTLNNVHSNNTVRDRTPYRTLLMNELGVPFHLGTKQVCIAWSSSSCHDGKAWLHVCITGDDKNATASFIYNGRLVDSVVSWSKEILRTQESECVCINGTCTVVMTDGSASGKADTKILFIEEGKIVHTSTLSGSAQHVEECSCYPRYPGVRCVCRDNWKGSNRPIVDINIKDHSIVSSYVCSGLVGDTPRKNDSSSSSHCLDPNNEEGGHGVKGWAFDDGNDVWMGRTINETSRLGYETFKVIEGWSNPKSKLQINKQVIVDRGDRSGYSGIFSVEGKSCINRCFYVELIRGRKEETEVLWTSNSIVVFCGTSGTYGTGSWPDGADLNLMPI

SEQ ID NO: 25638 - protein, 469 aa, synthetic construct; identical to SEQ ID NO: 25637
  REGION 1..469: note = neuraminidase__InfluenzaA__AIL93743

SEQ ID NO: 25639 - protein, 469 aa, synthetic construct; identical to SEQ ID NO: 25637
  REGION 1..469: note = neuraminidase__InfluenzaA__AIL93755

SEQ ID NO: 25640 - protein, 469 aa, synthetic construct; identical to SEQ ID NO: 22146
  REGION 1..469: note = neuraminidase__InfluenzaA__AIL93767

SEQ ID NO: 25641 - protein, 469 aa, synthetic construct; identical to SEQ ID NO: 22146
  REGION 1..469: note = neuraminidase__InfluenzaA__AIL93779

SEQ ID NO: 25642 - protein, 469 aa, synthetic construct
  REGION 1..469: note = neuraminidase__InfluenzaA__AIL93791
MNPNQKIITIGSVSLTISTICFFMQIAILITTVTLHFKQYKFNSPPNNQVMLCEPTIIERNITEIVYLTNTTIEKEICPKPAEYRNWSKPQCGITGFAPFSKDNSIRLSAGGDIWVTREPYVSCDPDKCYQFALGQGTTLNNVHSNNTVRDRTPYRTLLMNELGVPFHLGTKQVCIAWSSSSCHDGKAWLHVCITGDDKNATASFIYNGRLVDSVVSWSKEILRTQESECVCINGTCTVVMTDGSASGKADTKILFIEEGKIVHTRTLSGSAQHVEECSCYPRYPGVRCVCRDNWKGSNRPIVDINIKDHSIVSSYVCSGLVGDTPRKNDSSSSSHCLDPNNEEGGHGVKGWAFDDGNDVWMGRTINETSRLGYETFKVIEGWSNPKSKLQINKQVIVDRGDRSGYSGIFSVEGKSCINRCFYVELIRGRKEETEVLWTSNSIVVFCGTSGTYGTGSWPDGADLNLMPI

SEQ ID NO: 25643 - protein, 469 aa, synthetic construct; identical to SEQ ID NO: 25637
  REGION 1..469: note = neuraminidase__InfluenzaA__AIL93803

SEQ ID NO: 25644 - protein, 469 aa, synthetic construct
  REGION 1..469: note = neuraminidase__InfluenzaA__AIL93815
MNPNQKIITIGSVSLTISTICFFMQIAILITTVTLHFKQYEFNSPPNNQVMLCEPTIIERNITEIVYLTNTTIEKEICPKPAEYRNWSKPQCGITGFAPFSKDNSIRLSAGGDIWVTREPYVSCDPDKCYQFALGQGTTLNNVHSNNTVRDRTPYRTLLMNELGVPFHLGTKQVCIAWSSSSCHDGKAWLHVCITGDDKNATASFIYNGRLVDSVVSWSKEILRTQESECVCINGTCTVVMTDGSASGKADTKILFIEEGKIVHTSTLSGSAQHVEECSCYPRYPGVRCVCRDNWKGSNRPIVDINIKDHSIVYSYVCSGLVGDTPRKNDSSSSSHCLNPNNEEGGHGVKGWAFDDGNDVWMGRTINETSRLGYETFKVIEGWSNPKSKLQINRQVIVDRGDRSGYSGIFSVEGKSCINRCFYVELIRGRKEETEVLWTSNSIVVFCGTSGTYGTGSWPDGADLNLMPI

SEQ ID NO: 25645 - protein, 469 aa, synthetic construct; identical to SEQ ID NO: 22146
  REGION 1..469: note = neuraminidase__InfluenzaA__AIL93827

SEQ ID NO: 25646 - protein, 469 aa, synthetic construct
  REGION 1..469: note = neuraminidase__InfluenzaA__AIL93839
MNPNQKIITIGSVCMTIGMANLILQIGNIISIWISHSIQLGNQSQIEACNQSVITYENNTWVNQTYVNISNTNFATGQSVVSVKLAGNSSLCPVSGWAIYSKDNSVRIGSKGDVFVIREPFISCSPLECRTFFLTQGALLNDKHSNGTIKDRSPYRTLMSCPIGEVPSPYNSRFESVAWSASACHDGINWLTIGISGPDSGAVAVLKYNGIITDTIKSWKNNILRTQESECACVNGSCFTIMTDGPSDGQASYKIFRIEKGKIVKSVEMNAPNYHYEECSCYPDSSEITCVCRDNWHGSNRPWVSFNQNLEYQIGYICSGVFGDNPRPNDKTGSCGPVSSNGANGVKGFSFKYGNGVWIGRTKSISSRKGFEMIWDPNGWTGTDNNFSIKQDIVGINEWSGYSGSFVQHPELTGLDCIRPCFWVELIRGRPKENTIWTSGSSISFCGVNSDTVGWSWPDGAELPFTIDK

SEQ ID NO: 25647 - protein, 469 aa, synthetic construct
  REGION 1..469: note = neuraminidase__InfluenzaA__AIL93850
MNPNQKIITIGSVCMTIGMANLILQIGNIISIWISHSIQLGNQSQIEACNQSVITYENNTWVNQTYVNISNTNFATGQSVVSVKLAGNSSLCPVSGWAIYSKDNSVRIGSKGDVFVIREPFISCSPLECRTFFLTQGALLNDKHSNGTIKDRSPYRTLMSCPIGEVPSPYNSRFESVAWSASACHDGINWLTIGISGPDSGAVAVLKYNGIITDTIKSWKNNILRTQESECACVNGSCFTIMTDGPSDGQASYKIFRIEKGKIVKSVEMNAPNYHYEECSCYPDSSEITCVCRDNWHGSNRPWVSFNQNLEYQIGYICSGVFGDNPRPNDKTGSCGPVSSNGAKGVKGFSFKYGNGVWIGRTKSISSRKGFEMIWDPNGWTGTDNNFSIKQDIVGINEWSGYSGSFVQHPELTGLDCIRPCFWVELIRGRPKENTIWTSGSSISFCGVNSDTVGWSWPDGAELPFTIDK

SEQ ID NO: 25648 - protein, 469 aa, synthetic construct; identical to SEQ ID NO: 25637
  REGION 1..469: note = neuraminidase__InfluenzaA__AIL93861

SEQ ID NO: 25649 - protein, 469 aa, synthetic construct
  REGION 1..469: note = neuraminidase__InfluenzaA__AIL93885
MNPNQKIITIGSVSLTISTICFFMQIAILITTVTLHFKQYEFDSPPNNQVMLCEPTIIERNITEIVYLTNTTIEKEICPKPAEYRNWSKPQCGITGFAPFSKDNSIRLSAGGDIWVTREPYVSCDPDKCYQFALGQGTTLNNVHSNNTVRDRTPYRTLLMNELGVPFHLGTKQVCIAWSSSSCHDGKAWLHVCITGDDKNATASFIYNGRLVDSVVSWSKEILRTQESECVCINGTCTVVMTDGSASGKADTKILFIEEGKIVHTSTLSGSAQHVEECSCYPRYPGVRCVCRDNWKGSNRPIVDINIKDHSIVSSYVCSGLVGDTPRKNDSSSSSHCLDPNNEEGGHGVKGWAFDDGNDVWMGRTINETSRLGYETFKVIEGWSNPKSKLQINRQVIVDRGDRSGYSGVFSVEGKSCINRCFYVELIRGRKEETEVLWTSNSIVVFCGTSGTYGTGSWPDGADLNLMPI

SEQ ID NO: 25650 - protein, 469 aa, synthetic construct; identical to SEQ ID NO: 25637
  REGION 1..469: note = neuraminidase__InfluenzaA__AIL93897

SEQ ID NO: 25651 - protein, 469 aa, synthetic construct
  REGION 1..469: note = neuraminidase__InfluenzaA__AIL93909
MNPNQKIITIGSVCMTIGMANLILQIGNIISIWISHSIQLGNQSQIETCNQSVITYENNTWVNQTYVNISNTNFAAGQSVVSVKLAGNSSLCPVSGWAIYSKDNSIRIGSKGDVFVIREPFISCSPLECRTFFLTQGALLNDKHSNGTIKDRSPYRTLMSCPIGEVPSPYNSRFESVAWSASACHDGINWLTIGISGPDSGAVAVLKYNGIITDTIKSWRNNILRTQESECVCVNGSCFTIMTDGPSDGQASYKIFRIEKGKIVKSVEMNAPNYHYEECSCYPDSSEITCVCRDNWHGSNRPWVSFNQNLEYQIGYICSGIFGDNPRPNDKTGSCGPVSSNGANGVKGFSFKYGNGVWIGRTKSISSRKGFEMIWDPNGWTGTDNNFSIKQDIVGINEWSGYSGSFVQHPELTGLDCIRPCFWVELIRGRPKENTIWTSGSSISFCGVNSDTVGWSWPDGAELPFTIDK

SEQ ID NO: 25652 - protein, 469 aa, synthetic construct; identical to SEQ ID NO: 25637
  REGION 1..469: note = neuraminidase__InfluenzaA__AIL93920

SEQ ID NO: 25653 - protein, 469 aa, synthetic construct
  REGION 1..469: note = neuraminidase__InfluenzaA__AIL93943
MNPNQKIITIGSVCMTIGMANLILQIGNIISIWVSHSIQLGNQSQIETCNQSVITYENNTWVNQTYVNISNTNFAAGQSVVSVKLAGNSSLCPVSGWAIYSKDNSVRIGSKGDVFVIREPFISCSPSECRTFFLTQGALLNDKHSNGTIKDRSPYRTLMSCPIGEVPSPYNSRFESVAWSASACHDGINWLTIGISGPDSGAVAVLKYNGIITDTIKSWRNNILRTQESECACVNGSCFTIMTDGPSDGQASYKIFRIEKGKIVKSVEMNAPNYHYEECSCYPDSSEITCVCRDNWHGSNRPWVSFNQNLEYQIGYICSGVFGDNPRPNDKTGSCGPVSSNGANGVKGFSFKYGNGVWIGRTKSISSRKGFEMIWDPNGWTGTDNNFSIKQDIVGIKEWSGYSGSFVQHPELTGLDCIRPCFWVELIRGRPEENTIWTSGSSISFCGVNSDTVGWSWPDGAELPFTIDK

SEQ ID NO: 25654 - protein, 469 aa, synthetic construct; identical to SEQ ID NO: 25637
  REGION 1..469: note = neuraminidase__InfluenzaA__AIL93954

SEQ ID NO: 25655 - protein, 469 aa, synthetic construct; identical to SEQ ID NO: 25637
  REGION 1..469: note = neuraminidase__InfluenzaA__AIL93966

SEQ ID NO: 25656 - protein, 469 aa, synthetic construct
  REGION 1..469: note = neuraminidase__InfluenzaA__AIL93978
MNPNQKIITIGSVSLTISTICLFMQIAILITTVTLHFKQYEFNSPPNNQVMLCEPTIIERNITEIVYLTNTTIEKEICPKPAEYRNWSKPQCGITGFAPFSKDNSIRLSAGGDIWVTREPYVSCDPDKCYQFALGQGTTLNNVHSNNTVRDRTPYRTLLMNELGVPFHLGTKQVCIAWSSSSCHDGKAWLHVCITGDDKNATASFIYNGRLVDSVVSWSKEILRTQESECVCINGTCTVVMTDGSASGKADTKILFIEEGKIVHTSTLSGSAQHVEECSCYPRYPGVRCVCRDNWKGSNRPIVDINIKDHSIVSSYVCSGLVGDTPRKNDSSSSSHCLDPNNEEGGHGVKGWAFDDGNDVWMGRTINETSRLGYETFKVIEGWSNPKSKLQINRQVIVDRGDRSGYSGIFSVEGKSCINRCFYVELIRGRKEETEVLWTSNSIVVFCGTSGTYGTGSWPDGADLNLMPI

SEQ ID NO: 25657 - protein, 469 aa, synthetic construct; identical to SEQ ID NO: 25646
  REGION 1..469: note = neuraminidase__InfluenzaA__AIL93990

SEQ ID NO: 25658 - protein, 469 aa, synthetic construct; identical to SEQ ID NO: 22146
  REGION 1..469: note = neuraminidase__InfluenzaA__AIL94001

SEQ ID NO: 25659 - protein, 469 aa, synthetic construct; identical to SEQ ID NO: 25637
  REGION 1..469: note = neuraminidase__InfluenzaA__AIL94013

SEQ ID NO: 25660 - protein, 469 aa, synthetic construct; identical to SEQ ID NO: 25637
  REGION 1..469: note = neuraminidase__InfluenzaA__AIL94025

SEQ ID NO: 25661 - protein, 469 aa, synthetic construct; identical to SEQ ID NO: 25637
  REGION 1..469: note = neuraminidase__InfluenzaA__AIL94037

SEQ ID NO: 25662 - protein, 469 aa, synthetic construct; identical to SEQ ID NO: 25637
  REGION 1..469: note = neuraminidase__InfluenzaA__AIL94049

SEQ ID NO: 25663 - protein, 469 aa, synthetic construct; identical to SEQ ID NO: 25646
  REGION 1..469: note = neuraminidase__InfluenzaA__AIL94061

SEQ ID NO: 25664 - protein, 469 aa, synthetic construct
  REGION 1..469: note = neuraminidase__InfluenzaA__AIL94072
MNPNQKIITIGSVCMTIGMANLILQIGNIISIWISHSIQLGNQSQIEACNQSVITYENNTWVNQTYVNISNTNFATGQSVVSVKLAGNSSLCPVSGWAIYSKDNSVRIGSKGDVFVIREPFISCSPLECRTFFLTQGALLNDKHSNGTIKDRSPYRTLMSCPIGEVPSPYNSRFESVAWSASACHDGINWLTIGISGPDSGAVAVLKYNGIITDTIKSWKNNILRTQESECACVNGSCFTIMTDGPSDGQASYKIFRIEKGKIVKSVEMNAPNYHYEECSCYPDSSEITCVCRDNWHGSNRPWVSFNQNLEYQIGYICSGVFGDNPRPNDKTGSCGPVLSNGANGVKGFSFKYGNGVWIGRTKSISSRKGFEMIWDPNGWTGTDNNFSIKQDIVGINEWSGYSGSFVQHPELTGLDCIRPCFWIELIRGRPKENTIWTSGSSISFCGVNSDTVGWSWPDGAELPFTIDK

SEQ ID NO: 25665 - protein, 469 aa, synthetic construct; identical to SEQ ID NO: 25646
  REGION 1..469: note = neuraminidase__InfluenzaA__AIL94083

SEQ ID NO: 25666 - protein, 469 aa, synthetic construct; identical to SEQ ID NO: 25637
  REGION 1..469: note = neuraminidase__InfluenzaA__AIL94238

SEQ ID NO: 25667 - protein, 469 aa, synthetic construct
  REGION 1..469: note = neuraminidase__InfluenzaA__AIL94250
MNPNQKIITIGSVCMTIGMANLILQIGNIISIWISHSIQLGNQSQIEACNQSVITYENNTWVNQTYVNISNTNFAAGQSVVSVKLAGNSSLCPVSGWAIYSKDNSVRIGSKGDVFVIREPFISCSPLECRTFFLTQGALLNDKHSNGTIKDRSPYRTLMSCPIGEVPSPYNSRFESVAWSASACHDGINWLTIGISGPDSGAVAVLKYNGIITDTIKSWKNNILRTQESECACVNGSCFTIMTDGPNDGQASYKIFRIEKGKIVKSVEMNAPNYHYEECSCYPDSSEITCVCRDNWHGSNRPWVSFNQNLEYQIGYICSGVFGDNPRPNDKTGSCGPVSSNGANGVKGFSFKYGNGVWIGRTKSISSRKGFEMIWDPNGWTGTDNNFSIKQDIVGINEWSGYSGSFVQHPELTGLDCIRPCFWVELIRGRPKENTIWTSGSSISFCGVNSDTVGWSWPDGAELPFTIDK

SEQ ID NO: 25668 - protein, 469 aa, synthetic construct; identical to SEQ ID NO: 22146
  REGION 1..469: note = neuraminidase__InfluenzaA__AIL94261

SEQ ID NO: 25669 - protein, 469 aa, synthetic construct; identical to SEQ ID NO: 22146
  REGION 1..469: note = neuraminidase__InfluenzaA__AIL94273

SEQ ID NO: 25670 - protein, 469 aa, synthetic construct; identical to SEQ ID NO: 22146
  REGION 1..469: note = neuraminidase__InfluenzaA__AIL94285

SEQ ID NO: 25671 - protein, 469 aa, synthetic construct
  REGION 1..469: note = neuraminidase__InfluenzaA__AIL94297
MNPNQKIITIGSVSLTISTICFFMQIAILITTVTLHFKQYEFNSPPNNQVMLCEPTIIERNITEIVYLTNTTIEKEICPKPAEYRNWSKPQCGITGFAPFSKDNSIRLSAGGDIWVTREPYVSCDPDKCYQFALGQGTTLNNVHSNNTVRDRTPYRTLLMNELGVPFHLGTKQVCIAWSSSSCHDGKAWLHVCITGDDKNATASFIYNGRLVDSVVSWSKEILRTQESECVCINGTCTVVMTDGSASGKADTKILFIEEGKIVHTRTLSGSAQHVEECSCYPRYPGVRCVCRDNWKGSNRPIVDINIKDHSIVSSYVCSGLVGDTPRKNDSSSSSHCLDPNNEEGGHGVKGWAFDDGNDVWMGRTINETSRLGYETFKVIEGWSNPKSKLQINKQVIVDRGDRSGYSGIFSVEGKSCINRCFYVELIRGRKEETEVLWTSNSIVVFCGTSGTYGTGSWPDGADLNLMPI

SEQ ID NO: 25672 - protein, 469 aa, synthetic construct; identical to SEQ ID NO: 25637
  REGION 1..469: note = neuraminidase__InfluenzaA__AIL94309

SEQ ID NO: 25673 - protein, 469 aa, synthetic construct; identical to SEQ ID NO: 25656
  REGION 1..469: note = neuraminidase__InfluenzaA__AIL94321

SEQ ID NO: 25674 - protein, 469 aa, synthetic construct; identical to SEQ ID NO: 22146
  REGION 1..469: note = neuraminidase__InfluenzaA__AIL94368

SEQ ID NO: 25675 - protein, 469 aa, synthetic construct
  REGION 1..469: note = neuraminidase__InfluenzaA__AIL94380
MNPNQKIITIGSVSLTISTICFFMQIAILITTVTLHFKQYEFNSPPNNQVMLCEPTIIERNITEIVYLTNTTIEKEICPKPAEYRNWSKPQCGITGFAPFSKDNSIRLSAGGDIWVTREPYVSCDPDKCYQFALGQGTTLNNVHSNNTVRDRTPYRTLLMNELGVPFHLGTKQVCIAWSSSSCHDGKAWLHVCITGDDKNATASFIYNGRLVDSVVSWSKEILRTQESECVCINGTCTVVMTDGSASGKADTKILFIEEGKIVHTSTLSGSAQHVEECSCYPRYPGVRCVCRDNWKGSNRPVVDINIKDHSIVSSYVCSGLVGDTPRKNDSSSSSHCLDPNNEEGGHGVKGWAFDDGNDVWMGRTINETSRLGYETFKVIEGWSNPKSKLQINKQVIVDRGDRSGYSGIFSVEGKSCINRCFYVELIRGRKEETEVLWTSNSIVVFCGTSGTYGTGSWPDGADLNLMPI

SEQ ID NO: 25676 - protein, 469 aa, synthetic construct
  REGION 1..469: note = neuraminidase__InfluenzaA__AIL94392
MNPNQKIITIGSVCMTIGMANLILQIGNIISIWISHSIQLGNQSQIEACNQSVITYENNTWVNQTYVNISNTNFAAGQSVVSVKLAGNSSLCPVSGWAIYSKDNSVRIGSKGDVFVIREPFISCSPLECRTFFLTQGALLNDKHSNGTIKDRSPYRTLMSCPIGEVPSPYNSRFESVAWSASACHDGINWLTIGISGPDSGAVAVLKYNGIITDTIKSWKNNILRTQESECACVNGSCFTIMTDGPSDGQASYKIFRIEKGKIVKSVEMNAPNYHYEECSCYPDSSEITCVCRDNWHGSNRPWVSFNQNLEYQIGYICSGVFGDNPRPNDKTGSCGPVSSNGANGVKGFSFKYGNGVWIGRTKSISSRKGFEMIWDPNGWTGTDNNFSIKQDIVGINEWSGYSGSFVQHPELTGLDCIRPCFWVELIRGRPKENTIWTSGSSISFCGVNSDTVGWSWPDGAELPFTIDK

SEQ ID NO: 25677 - protein, 469 aa, synthetic construct
  REGION 1..469: note = neuraminidase__InfluenzaA__AIL94403
MNPNQKIITIGSVCMTIGMANLILQIGNIISIWISHSIQLGNQSQIEACNQSVITYENNTWVNQTYVNISNTNFAAGQSVVSVKLAGNSSLCPVSGWAIYSKDNSVRIGSKGDVFVIREPFISCSPLECRTFFLTQGALLNDKHSNGTIKDRSPYRTLMSCPIGEVPSPYNSRFESVAWSASACHDGINWLTIGISGPDSGAVAVLKYNGIITDTIKSWKNNILRTQESECACVNGSCFTIMTDGPSDGQASYKIFRIEKGKIVKSVEMNAPNYHYEECSCYPDSSEITCVCRDNWHGSNRPWVSFNQNLEYQIGYICSGVFGDNPRPNDKTGSCDPVSSNGANGVKGFSFKYGNGVWIGRTKSISSRKGFEMIWDPNGWTGTDNNFSIKQDIVGINEWSGYSGSFVQHPELTGLDCIRPCFWVELIRGRPKENTIWTSGSSISFCGVNSDTVGWSWPDGAELPFTIDK

SEQ ID NO: 25678 - protein, 469 aa, synthetic construct; identical to SEQ ID NO: 22146
  REGION 1..469: note = neuraminidase__InfluenzaA__AIL94426

SEQ ID NO: 25679 - protein, 469 aa, synthetic construct
  REGION 1..469: note = neuraminidase__InfluenzaA__AIL94438
MNPNQKIITIGSVCMTIGMANLILQIGNIISIWISHSIQLGNQSQIEACNQSVITYENNTWVNQTYVNISNTNFATGQSVVSVKLAGNSSLCPVSGWAIYSKDNSVRIGSKGDVFVIREPFISCSPLECRTFFLTQGALLNDKHSNGTIKDRSPYRTLMSCPIGEVPSPYNSRFESVAWSASACHDGINWLTIGISGPDSGAVAVLKYNGIITDTIKSWKNNILRTQESECACVNGSCFTIMTDGPSDGQASYKIFRIEKGKIVKSVEMNAPNYHYEECSCYPDSSEITCVCRDNWHGSNRPWVSFNQNLEYQIGYICSGVFGDNPRPNDKTGSCGPVSSNGANGVKGFSFKYGNGVWIGRTKSVSSRKGFEMIWDPNGWTGTDNNFSIKQDIVGINEWSGYSGSFVQHPELTGLDCIRPCFWVELIRGRPKENTIWTSGSSISFCGVNSDTVGWSWPDGAELPFTIDK

SEQ ID NO: 25680 - protein, 469 aa, synthetic construct
  REGION 1..469: note = neuraminidase__InfluenzaA__AIL94449
MNPNQKIITIGSVSLTISTICFFMQIAILITTVTLHFKQYEFNSPPNNQVMLCEPTIIERNITEIVYLTNTTIEKEICPKPAKYRNWSKPQCGITGFAPFSKDNSIRLSAGGDIWVTREPYVSCDPDKCYQFALGQGTTLNNVHSNNTVRDRTPYRTLLMNELGVPFHLGTKQVCIAWSSSSCHDGKAWLHVCITGDDKNATASFIYNGRLVDSVVSWSKEILRTQESECVCINGTCTVVMTDGSASGKADTKILFIEEGKIVHTSTLSGSAQHVEECSCYPRYPGVRCVCRDNWKGSNRPIVDINIKDHSIVYSYVCSGLVGDTPRKNDSSSSSHCLNPNNEEGGHGVKGWAFDDGNDVWMGRTINETSRLGYETFKVIEGWSNPKSKLQINRQVIVDRGDRSGYSGIFSVEGKSCINRCFYVELIRGRKEETEVLWTSNSIVVFCGTSGTYGTGSWPDGADLNLMPI

SEQ ID NO: 25681 - protein, 469 aa, synthetic construct; identical to SEQ ID NO: 25675
  REGION 1..469: note = neuraminidase__InfluenzaA__AIL94461

SEQ ID NO: 25682 - protein, 469 aa, synthetic construct
  REGION 1..469: note = neuraminidase__InfluenzaA__AIL94473
MNPNQKIITIGSVCMTIGMANLILQIGNIISIWVGHSIQLGNQSQIETCNQSVITYENNTWVNQTYVNISNTNFAAGQSVVPVKLAGNSSLCPVSGWAIYSKDNSVRIGSKGDVFVIREPFISCSPLECRTFFLTQGALLNDKHSNGTIKDRSPYRTLMSCPIGEVPSPYNSRFESVAWSASACHDGINWLTIGISGPDSGAVAVLKYNGIITDTIKSWRNNILRTQESECACVNGSCFTIMTDGPSDGQASYKIFRIEKGKIVKSVEMNTPNYHYEECSCYPDSSEITCVCRDNWHGSNRPWVSFNQNLEYQIGYICSGVFGDNPRPNDKTGSCGPVSSNGANGVKGFSFKYGNGVWIGRTKSISSRKGFEMIWDPNGWTGTDNNFSIKQDIVGIKEWSGYSGSFVQHPELTGLDCIRPCFWVELIRGRPEENTIWTSGSSISFCGVNSDIVGWSWPDGAELPFTIDK

SEQ ID NO: 25683 - protein, 469 aa, synthetic construct; identical to SEQ ID NO: 24736
  REGION 1..469: note = neuraminidase__InfluenzaA__AIL94484

SEQ ID NO: 25684 - protein, 469 aa, synthetic construct; identical to SEQ ID NO: 25646
  REGION 1..469: note = neuraminidase__InfluenzaA__AIL94507

SEQ ID NO: 25685 - protein, 469 aa, synthetic construct
  REGION 1..469: note = neuraminidase__InfluenzaA__AIL94518
MNPNQKIITIGSVSLTISTICFFMQIAILITTVTLHFKQYEFNSPPNNQVMLCEPTIIERNITEIVYLTNTTIEKEICPKPAEYRNWSKPQCGITGFAPFSKDNSIRLSAGGDIWVTREPYVSCDPDKCYQFALGQGTTLNNVHSNNTVRDRTPYRTLLMNELGVPFHLGTKQVCIAWSSSSCHDGKAWLHVCITGDDKNATASFIYNGRLVDSVVSWSKEILRTQESECVCINGTCTVVMTDGSASGKADTKILFIEEGKIVHTSTLSGSAQHVEECSCYPRYPGVRCVCRDNWKGSNRPIVDINIKDHSIVSSYVCSGLVGDTPRKNDSSSSSHCLDPNNEEGGHGVKGWAFDDGNDVWMGRTINETSRLGYETFKVIEGWSNPKSKLQINKQVIVDRGDRSGYSGIFSVEGKSCINRCFYVELIRGRKEETEVLWTSNSIVVFCGTSGTYGTGSWPDGADLSLMPI

SEQ ID NO: 25686 - protein, 469 aa, synthetic construct
  REGION 1..469: note = neuraminidase__InfluenzaA__AIL94530
MNPNQKIITIGSVSLTISTICFFMQIAILITTVTLHFKQYEFNSPPNNQVMLCEPTIIERNITEIVYLTNTTIEKEICPKPAEYRNWSKPQCGITGFAPFSKDNSIRLSAGGDIWVTREPYVSCDPDKCYQFALGQGTTLNNVHSNNTVRDRTPYRTLLMNELGVPFHLGTKQVCIAWSSSSCHDGKAWLHVCITGDDKNATASFIYNGRLVDSVVSWSKEILRTQESECVCINGTCTVVMTDGSASGKADTKILFIEEGKIVHTSTLSGSAQHVEECSCYPRYPGVRCVCRDNWKGSNRPIVDINIKDHSIVSSYVCSGLVGDTPRKNDSSSSSHCLNPNNEEGGHGVKGWAFDDGNDVWMGRTINETSRLGYETFKVIEGWSNPKSKLQINRQVIVDRGDRSGYSGIFSVEGKSCINRCFYVELIRGRKEETEVLWTSNSIVVFCGTSGTYGTGSWPDGADLNLMPI

SEQ ID NO: 25687 - protein, 469 aa, synthetic construct; identical to SEQ ID NO: 25676
  REGION 1..469: note = neuraminidase__InfluenzaA__AIL94542

SEQ ID NO: 25688 - protein, 469 aa, synthetic construct; identical to SEQ ID NO: 25646
  REGION 1..469: note = neuraminidase__InfluenzaA__AIL94553

SEQ ID NO: 25689 - protein, 469 aa, synthetic construct; identical to SEQ ID NO: 25637
  REGION 1..469: note = neuraminidase__InfluenzaA__AIL94564

SEQ ID NO: 25690 - protein, 469 aa, synthetic construct; identical to SEQ ID NO: 25646
  REGION 1..469: note = neuraminidase__InfluenzaA__AIL94576

SEQ ID NO: 25691 - protein, 469 aa, synthetic construct
  REGION 1..469: note = neuraminidase__InfluenzaA__AIL94587
MNPNQKIITIGSVCMTIGMANLILQIGNIISIWISHSIQLGNQSQIEACNQSVITYENNTWVNQTYVNISNTNFAAGQSVVSVKLAGNSSLCPVSGWAIYSKDNSVRIGSKGDVFVIREPFISCSPLECRTFFLTQGALLNDKHSNGTIKDRSPYRTLMSCPIGEVPSPYNSRFESVAWSASACHDGINWLTIGISGPDSGAVAVLKYNGIITDTIKSWKNNILRTQESECACVNGSCFTIMTDGPSDGQASYKIFRIEKGKIVKSVEMDAPNYHYEECSCYPDSSEITCVCRDNWHGSNRPWVSFNQNLEYQIGYICSGVFGDNPRPNDKTGSCGPVSSNGANGVKGFSFKYGNGVWIGRTKSISSRKGFEMIWDPNGWNGTDNNFSIKQDIVGINEWSGYSGSFVQHPELTGLDCIRPCFWVELIRGRPKENTIWTGGSSISFCGVNSDTVGWSWPDGAELPFTIDK

SEQ ID NO: 25692 - protein, 469 aa, synthetic construct; identical to SEQ ID NO: 25676
  REGION 1..469: note = neuraminidase__InfluenzaA__AIL94598

SEQ ID NO: 25693 - protein, 469 aa, synthetic construct
  REGION 1..469: note = neuraminidase__InfluenzaA__AIL94609
MNPNQKIITIGSVSLTISTICLFMQIAILITTVTLHFKQYEFNSPPNNQVMLCEPTIIERNITEIVYLTNTTIEKEICPKPAEYRNWSKPQCGITGFAPFSKDNSIRLSAGGDIWVTREPYVSCDPDKCYQFALGQGTTLNNVHSNNTVRDRTPYRTLLMSELGVPFHLGTKQVCIAWSSSSCHDGKAWLHVCITGDDKNATASFIYNGRLVDSVVSWSKEILRTQESECVCINGTCTVVMTDGSASGKADTKILFIEEGKIVHTSTLSGSAQHVEECSCYPLYPGVRCVCRDNWKGSNRPIVDINIKDHSIVSSYVCSGLVGDTPRKNDSSSSSHCLDPNNEEGGHGVKGWAFDDGNDVWMGRTINETSRLGYETFKVIEGWSNPKSKLQINRQVIVDRGDRSGYSGIFSVEGKSCINRCFYVELIRGRKEETEVLWTSNSIVVFCGTSGTYGTGSWPDGADLNLMPI

SEQ ID NO: 25694 - protein, 469 aa, synthetic construct
  REGION 1..469: note = neuraminidase__InfluenzaA__AIL94621
MNPNQKIITIGSVCMTIGMANLILQIGNIISIWISHSIQLGNQSQIEACNQSVITYENNTWVNQTYVNISNTNFAAGQSVVPVKLAGNSSLCPVSGWAIYSKDNSVRIGSKGDVFVIREPFISCSPLECRTFFLTQGALLNDKHSNGTIKDRSPYRTLMSCPIGEVPSPYNSRFESVAWSASACHDGINWLTIGISGPDSGAVAVLKYNGIITDTIKSWKNNILRTQESECACVNGSCFTIMTDGPSDGQASYKIFRIEKGKIVKSVEMNAPNYHYEECSCYPDSSEITCVCRDNWHGSNRPWVSFNQNLEYQIGYICSGVFGDNPRPNDKTGSCGPVSSNGANGVKGFSFKYGNGVWIGRTKSISSRKGFEMIWDPNGWTGTDNDFSIKQDIVGINEWSGYSGSFVQHPELTGLDCIRPCFWVELIRGRPKENTIWTSGSSISFCGVNSDTVGWSWPDGAELPFTIDK

SEQ ID NO: 25695 - protein, 469 aa, synthetic construct; identical to SEQ ID NO: 25646
  REGION 1..469: note = neuraminidase__InfluenzaA__AIL94632

SEQ ID NO: 25696 - protein, 469 aa, synthetic construct; identical to SEQ ID NO: 22146
  REGION 1..469: note = neuraminidase__InfluenzaA__AIL94643

SEQ ID NO: 25697 - protein, 469 aa, synthetic construct
  REGION 1..469: note = neuraminidase__InfluenzaA__AIL94655
MNPNQKIITIGSVCMTIGMANLILQIGNIISIWISHSIQLGNQSQIETCNQSVITYENNTWVNQTYVNISNTNFAAGQSVVSVKLAGNSSLCPVSGWAIYSKDNSIRIGSKGDVFVIREPFISCSPLECRTFFLTQGALLNDKHSNGTIKDRSPYRTLMSCPIGEVPSPYNSRFESVAWSASACHDGINWLTIGISGPDSGAVAVLKYNGIITDTIKSWRNNILRTQESECACVNGSCFTIMTDGPSDGQASYKIFRIEKGKIVKSVEMNAPNYHYEECSCYPDSSEITCVCRDNWHGSNRPWVSFNQNLEYQIGYICSGIFGDNPRPNDKTGSCGPVSSNGANGVKGFSFKYGNGVWIGRTKSISSRKGFEMIWDPNGWTGTDNNFSIKQDIVGINEWSGYSGSFVQHPELTGLDCIRPCFWVELIRGRPKENTIWTSGSSISFCGVNSDTVGWSWPDGAELPFTIDK

SEQ ID NO: 25698 - protein, 469 aa, synthetic construct
  REGION 1..469: note = neuraminidase__InfluenzaA__AIL94677
MNPNQKIITIGSVCMTIGMANLILQIGNIISIWISHSIQLGNQSQIEACNQSVITYENNTWVNQTYVNISNTNFAAGQSVVPVKLAGNSSLCPVSGWAIYSKDNSVRIGSKGDVFVIREPFISCSPLECRTFFLTQGALLNDKHSNGTIKDRSPYRTLMSCPIGEVPSPYNSRFESVAWSASACHDGINWLTIGISGPDSGAVAVLKYNGIITDTIKSWKNNILRTQESECACVNGSCFTIMTDGPSDGQASYKIFRIEKGKIVKSVEMNAPNYHYEECSCYPDSSEITCVCRDNWHGSNRPWVSFNQNLEYQIGYICSGVFGDNPRPNDKTGSCGPVSSNGANGVKGFSFKYGNGVWIGRTKSISSRKGFEMIWDPNGWTGTDNNFSIKQDIVGINEWSGYSGSFVQHPELTGLDCIRPCFWVELIRGRPKENTIWTSGSSISFCGVNSDTVGWSWPDGAELPFTIDK

SEQ ID NO: 25699 - protein, 469 aa, synthetic construct; identical to SEQ ID NO: 25637
  REGION 1..469: note = neuraminidase__InfluenzaA__AIL94688

SEQ ID NO: 25700 - protein, 469 aa, synthetic construct
  REGION 1..469: note = neuraminidase__InfluenzaA__AIL94700
MNPNQKIITIGSVSLTISTICFFMQIAILITIVTLHFKQYEFNSPPNNQVMLCEPTIIERNITEIVYLTNTTIEKEICPKPAEYRNWSKPQCGITGFAPFSKDNSIRLSAGGDIWVTREPYVSCDPDKCYQFALGQGTTLNNVHSNNTVRDRTPYRTLLMNELGVPFHLGTKQVCIAWSSSSCHDGKAWLHVCITGDDKNATASFIYNGRLVDSVVSWSKEILRTQESECVCINGTCTVVMTDGSASGKADTKILFIEEGKIVHISTLSGSAQHVEECSCYPRYPGVRCVCRDNWKGSNRPIVDINIEDHSIVSSYVCSGLVGDTPRKNDSSSSSHCLDPNNEEGGHGVKGWAFDDGNDVWMGRTINETSRLGYETFKVIEGWSNPKSKLQINRQVIVDRGDRSGYSGIFSVEGKSCINRCFYVELIRGRKEETEVLWTSNSIVVFCGTSGTYGTGSWPDGADLNLMPI

SEQ ID NO: 25701 - protein, 469 aa, synthetic construct; identical to SEQ ID NO: 25646
  REGION 1..469: note = neuraminidase__InfluenzaA__AIL94712

SEQ ID NO: 25702 - protein, 469 aa, synthetic construct; identical to SEQ ID NO: 25676
  REGION 1..469: note = neuraminidase__InfluenzaA__AIL94723

SEQ ID NO: 25703 - protein, 469 aa, synthetic construct
  REGION 1..469: note = neuraminidase__InfluenzaA__AIL94734
MNPNQKIITIGSVSLTISTICFFMQIAILITTVTLHFKQYEFNSPPNNQVMLCEPTIIERNITEIVYLTNTTIEKEICPKPAEYRNWSKPQCGITGFAPFSKDNSIRLSAGGDIWVTREPYVSCDPDKCYQFALGQGTTLNNEHSNNTVRDRTPYRTLLMNELGVPFHLGTKQVCIAWSSSSCHDGKAWLHVCITGDDKNATASFIYNGRLVDSVVSWSKEILRTQESECVCINGTCTVVMTDGSASGKADTKILFIEEGKIVHISTLSGSAQHVEECSCYPRYPGVRCVCRDNWKGSNRPIVDINIKDHSIVSSYVCSGLVGDTPRKNDSSSSSHCLDPNNEEGGHGVKGWAFDDGNDVWMGRTINETSRLGYETFKVIEGWSNPKSKLQINRQVIVDRGDRSGYSGIFSVEGKSCINRCFYVELIRGRKEETEVLWTSNSIVVFCGTSGTYGTGSWPDGADLNLMPI

SEQ ID NO: 25704 - protein, 469 aa, synthetic construct; identical to SEQ ID NO: 25646
  REGION 1..469: note = neuraminidase__InfluenzaA__AIL94746

SEQ ID NO: 25705 - protein, 469 aa, synthetic construct; identical to SEQ ID NO: 25676
  REGION 1..469: note = neuraminidase__InfluenzaA__AIL94757

SEQ ID NO: 25706 - protein, 469 aa, synthetic construct; identical to SEQ ID NO: 25637
  REGION 1..469: note = neuraminidase__InfluenzaA__AIL94768

SEQ ID NO: 25707 - protein, 469 aa, synthetic construct; identical to SEQ ID NO: 22146
  REGION 1..469: note = neuraminidase__InfluenzaA__AIL94780

SEQ ID NO: 25708 - protein, 469 aa, synthetic construct; identical to SEQ ID NO: 25676
  REGION 1..469: note = neuraminidase__InfluenzaA__AIL94803

SEQ ID NO: 25709 - protein, 469 aa, synthetic construct; identical to SEQ ID NO: 25656
  REGION 1..469: note = neuraminidase__InfluenzaA__AIL94814

SEQ ID NO: 25710 - protein, 469 aa, synthetic construct
  REGION 1..469: note = neuraminidase__InfluenzaA__AIL94826
MNPNQKIITIGSVSLTISTICFFMQIAILITTVTLHFKQYEFNSLPNNQVMLCEPTIIERNITEIVYLTNTTIEKEICPKPAEYRNWSKPQCGITGFAPFSKDNSIRLSAGGDIWVTREPYVSCDPDKCYQFALGQGTTLNNVHSNNTARDRTPYRTLLMNELGVPFHLGTKQVCIAWSSSSCHDGKAWLHVCITGDDKNATASFIYNGRLVDSVVSWSKEILRTQESECVCINGTCTVVMTDGSASGKADTKILFIEEGKIVHTSTLSGSAQHVEECSCYPRYPGVRCVCRDNWKGSNRPIVDINIKDHSIVSSYVCSGLVGDTPRKNDSSSSSHCLNPNNEEGGHGVKGWAFDDGNDVWMGRTINETSRLGYETFKVIEGWSNPKSKLQINRQVIVDRGDRSGYSGIFSVEGKSCINRCFYVELIRGRKEETEVLWTSNSIVVFCGTSGTYGTGSWPDGADLNLMPI

SEQ ID NO: 25711 - protein, 469 aa, synthetic construct
  REGION 1..469: note = neuraminidase__InfluenzaA__AIL94850
MNPNQKIITIGSVSLTISTICFFMQIAILITTVTLHFKQYEFNSPPNNQVMLFEPTIIERNITEIVYLTNTTIEKEICPKLAEYRNWSKPQCDITGFAPFSKDNSIRLSAGGDIWVTREPYVSCDPDKCYQFALGQGTTLNNVHSNDTVRDRTPYRTLLMNELGVPFHLGTKQVCIAWSSSSCHDGKAWLHVCITGDDKNATASFIYNGRLVDSIVSWSKEILRTQESECVCINGTCTVVMTDGSASGKADTKILFIKEGKIVHTSTLSGSAQHVEECSCYPRYPGVRCVCRDNWKGSNRPIVDINIKDHSIVSSYVCSGLVGDTPRKNDSSSSSHCLDPNSEEGGHGVKGWAFDDGNDVWMGRTISEKSRLGYETFKVIEGWSNPKSKFQINRQVIVDRGNRSGYSGIFSVEGKSCINRCFYVELIRGRKEETEVLWTSNSIVVFCGTSGTYGTGSWPDGADLNLMPI

SEQ ID NO: 25712 - protein, 469 aa, synthetic construct; identical to SEQ ID NO: 19410
  REGION 1..469: note = neuraminidase__InfluenzaA__AIL94862

SEQ ID NO: 25713 - protein, 469 aa, synthetic construct; identical to SEQ ID NO: 19410
  REGION 1..469: note = neuraminidase__InfluenzaA__AIL94874

SEQ ID NO: 25714 - protein, 469 aa, synthetic construct
  REGION 1..469: note = neuraminidase__InfluenzaA__AIL94886
MNPNQKIITIGSVCMTIGMANLMLQIGNIISIWISHSIQLGNKNQIETCNQSVITYENNTWVNQTYVNISNTNFAAGQSVVSVKIAGNSSLCPVSGWAIYSKDNSIRIGSKGDVFVIREPFISCSPLECRTFFLTQGALLNDKHSNGTIKDRSPYRTLMSCPIGEVPSPYNSRFESVAWSASACHDGINWLTIGISGPDDGAVAVLKYNGIITDTIKSWRNNILRTQESECACVNGSCFTIMTDGPSDGQASYKIFRIEKGKIVKSVEMNAPNYHYEECSCYPDSSEITCVCRDNWHGSNRPWVSFNQNLEYQIGYICSGIFGDNPRPHDKTGSCGPVSSNGANGVKGFSFKYGNGVWIGRTKSISSRKGFEMIWDPNGWTGTDNNFSIKQDIVGINEWSGYSGSFVQHPELTGLDCIRPCFWVELIRGRPKENTIWTSGSSISFCGVNSDTVGWSWPDGAELPFTIDK

SEQ ID NO: 25715 - protein, 469 aa, synthetic construct; identical to SEQ ID NO: 22922
  REGION 1..469: note = neuraminidase__InfluenzaA__AIL94897

SEQ ID NO: 25716 - protein, 469 aa, synthetic construct; identical to SEQ ID NO: 25710
  REGION 1..469: note = neuraminidase__InfluenzaA__AIL94909

SEQ ID NO: 25717 - protein, 469 aa, synthetic construct; identical to SEQ ID NO: 22146
  REGION 1..469: note = neuraminidase__InfluenzaA__AIL94921

SEQ ID NO: 25718 - protein, 469 aa, synthetic construct; identical to SEQ ID NO: 22146
  REGION 1..469: note = neuraminidase__InfluenzaA__AIL94933

SEQ ID NO: 25719 - protein, 469 aa, synthetic construct; identical to SEQ ID NO: 25637
  REGION 1..469: note = neuraminidase__InfluenzaA__AIL94945

SEQ ID NO: 25720 - protein, 469 aa, synthetic construct
  REGION 1..469: note = neuraminidase__InfluenzaA__AIL94957
MNPNQKIITIGSVCMTIGMANLILQIGNIISIWISHSIQLGNQSQIEACNQSVITYENNTWVNQTYVNISNTNFAAGQSVVSVKLAGNSSLCPVSGWAIYSKDNSVRIGSKGDVFVIREPFISCSPLECRTFFLTQGALLNDKHSNGTIKDRSPYRTLMSCPIGEVPSPYNSRFESVAWSASACHDGINWLTIGISGPDSGAVAVLKYNGIITDTIKSWKNNILRTQESECACVNGSCFTIMTDGPSDGQASYKIFRIEKGKIVKSVEMDAPNYHYEECSCYPDSSEITCVCRDNWHGSNRPWVSFNQNLEYQIGYICSGVFGDNPRPNDKTGSCGPVSSNGANGVKGFSFKYGNGVWIGRTKSISSRKGFEMIWDPNGWNGTDNNFSIKQDIVGINEWSGYSGSFVQHPELTGLDCIRPCFWVELIRGRPKENTIWTSGSSISFCGVNSDTVGWSWPDGAELPFTIDK

SEQ ID NO: 25721 - protein, 469 aa, synthetic construct; identical to SEQ ID NO: 25710
  REGION 1..469: note = neuraminidase__InfluenzaA__AIL94968

SEQ ID NO: 25722 - protein, 469 aa, synthetic construct
  REGION 1..469: note = neuraminidase__InfluenzaA__AIM55840
MNPNQKIITIGSVCMTIGMANLILQIGNIISIWISHSIQVGNQSQIEICNQSVITYENNTWVNQTYVNISNTNFAAGQPVVSVKLAGNSSLCPVSGWAIYSKDNSVRIGSKGDVFVIREPFISCSPLECRTFFLTQGALLNDKHSNGTIKDRSPYRTLMSCPIGEVPSPYNSRFESVAWSASACHDGINWLTIGISGPDSGAVAVLKYNGIITDTIKSWRNDILRTQESECACVNGSCFTIMTDGPSDGQASYKIFRIEKGKIVKSVEMNAPNYHFEECSCYPDSSEITCVCRDNWHGSNRPWVSFNQNLEYQIGYICSGIFGDNPRPNDKTGSCGPVSSNGANGVKGFSFKYGNGVWIGRTKSISSRKGFEMIWDPNGWTGTDNNFSIKQDIVGINEWSGYSGSFVQHPELTGLDCIRPCFWVELIRGRPKENTIWTSGSSISFCGVNSDTVGWSWPDGAELPFTIDK

SEQ ID NO: 25723 - protein, 469 aa, synthetic construct
  REGION 1..469: note = neuraminidase__InfluenzaA__AIM55851
MNPNQKIITIGSVCMTIGMANLILQIGNIISIWVSHSIQLGNQSQIETCNQSVITYENNTWVNQTYVNISNTNFAAGQSVVPVKLAGNSSLCPVSGWAIYSKDNSVRIGSKGDVFVIREPFISCSPLECRTFFLTQGALLNDKHSNGTIKDRSPYRTLMSCPIGEVPSPYNSRFESVAWSASACHDGINWLTIGISGPDSGAVAVLKYNGIITDTIKSWRNNILRTQESECACVNGSCFTIMTDGPSDGQASYKIFRIEKGRIVKSVEMNAPNYHYEECSCYPDSSEITCVCRDNWHGSNRPWVSFNQNLEYQIGYICSGVFGDNPRPNDKTGSCGPVSSNGANGVKGFSFKYGNGVWIGRTKSISSRKGFEMIWDPNGWTGTDNKFSIKQDIVGINEWSGYSGSFVQHPELTGLDCIRPCFWVELIRGRPEENTIWTSGSSISFCGVKSDTVGWSWPDGAELPFTIDK

SEQ ID NO: 25724 - protein, 469 aa, synthetic construct
  REGION 1..469: note = neuraminidase__InfluenzaA__AIM55862
MNPNQKIITIGSVCMTIGMANLILQIGNIISIWVSHSIQLGNQSQIETCNQSVITYENNTWVNQTYVNISNTNFAAGQSVVPVKLAGNSSLCPVSGWAIYSKDNSVRIGSKGDVFVIREPFISCSPLECRTFFLTQGALLNDKHSNGTIKDRSPYRTLMSCPIGEVPSPYNSRFESVAWSASACHDGINWLTIGISGPDSGAVAVLKYNGIITDTIKSWRNNILRTQESECACVNGSCFTIMTDGPSDGQASYKIFKIEKGKIVKSVEMNAPNYHYEECSCYPDSSEITCVCRDNWHGSNRPWVSFNQNLEYQIGYICSGVFGDNPRPNDKTGSCGPVSSNGANGVKGFSFKYGNGVWIGRTKSISSRKGFEMIWDPNGWNGTDNNFSIKQDIVGIKEWSGYSGSFVQHPELTGLDCIRPCFWVELIRGRPEENTIWTSGSSISFCGVNSDTVGWSWPDGAELPFTIDK

SEQ ID NO: 25725 - protein, 469 aa, synthetic construct
  REGION 1..469: note = neuraminidase__InfluenzaA__AIM55873
MNPNQKIITIGSVCMTIGMANLILQIGNIISIWVSHSIQLGNQSQIETCNQSVITYENNTWVNQTYVNISNTNFAAGQSVVPVKLAGNSSLCPVSGWAIYSKDNSVRIGSKGDVFVIREPFISCSPLECRTFFLTQGALLNDKHSNGTIKDRSPYRTLMSCPIGEVPSPYNSRFESVAWSASACHDGINWLTIGISGPDSGAVAVLKYNGIITDTIKSWRNNILRTQESECACVNGSCFTIMTDGPSDGQASYKIFRIEKGKIVKSVEMNAPNYHYEECSCYPDSSEITCVCRDNWHGSNRPWVSFNQNLEYQIGYICSGVFGDNPRPNDKTGSCGPVSSNGANGVKGFSFKYGNGVWIGRTKSISSRKGFEMIWDPNGWTGTDNNFSIKQDIVGIKEWSGYSGSFVQHPELTGLDCIRPCFWVELIRGRPEENTIWTSGSSISFCGVNSDTVGWSWPDGAELPFTIDK

SEQ ID NO: 25726 - protein, 469 aa, synthetic construct; identical to SEQ ID NO: 25725
  REGION 1..469: note = neuraminidase__InfluenzaA__AIM55884

SEQ ID NO: 25727 - protein, 469 aa, synthetic construct; identical to SEQ ID NO: 25725
  REGION 1..469: note = neuraminidase__InfluenzaA__AIM55918

SEQ ID NO: 25728 - protein, 469 aa, synthetic construct
  REGION 1..469: note = neuraminidase__InfluenzaA__AIM55929
MNPNQKIITIGSVCMTIGMANLILQIGNIISIWVSHSIQLGNQSQIETCNQSVITYENNTWVNQTYVNISNTNFAAGQSVVSVKLAGNSSLCPVSGWAIYSKDNSVRIGSKGDVFVIREPFISCSPLECRTFFLTQGALLNDKHSNGTIKDRSPYRTLMSCPTGEVPSPYNSRFESVAWSASACHDGINWLTIGISGPDSGAVAVLKYNGIITDTIKSWRNNILRTQESECACVNGSCFTIMTDGPSDGQASYKIFRIEKGKIVKSVEMNAPNYHYEECSCYPDSSEITCVCRDNWHGSNRPWVSFNQNLEYQIGYICSGVFGDNPRPNDKTGSCGPVSSNGANGVKGFSFKYGNGVWIGRTKSISSRKGFEMIWDPNGWTGTDNNFSIKQDIVGIKEWSGYSGSFVQHPELTGLDCIRPCFWVELIRGRPEENTIWTSGSSISFCGVNSDTVGWSWPDGAELPFTIDK

SEQ ID NO: 25729 - protein, 469 aa, synthetic construct
  REGION 1..469: note = neuraminidase__InfluenzaA__AIM55940
MNPNQKIITIGSVCMTIGMANLILQIGNIISIWVSHSIQLGNQSQIETCNQSVITYENNTWVNQTYVNISSTNFAAGQSVVPVKLAGNSSLCPVSGWAIYSKDNSVRIGSKGDVFVIREPFISCSPLECRTFFLTQGALLNDKHSNGTIKDRSPYRTLMSCPIGEVPSPYNSRFESVAWSASACHDGINWLTIGISGPDSGAVAVLKYNGIITDTIKSWRNNILRTQESECACVNGSCFTIMTDGPSDGQASYKIFRIEKGKIVKSVEMNAPNYHYEECSCYPDSSEITCVCRDNWHGSNRPWVSFNQNLEYQIGYICSGVFGDNPRPNDKTGSCGPVSSNGANGVKGFSFKYGNGVWIGRTKSISSRKGFEMIWDPNGWTGTDNNFSIKQDIVGIKEWSGYSGSFVQHPELTGLDCIRPCFWVELIRGRPEENTIWTSGSSISFCGVNSDTVGWSWPDGAELPFTIDK

SEQ ID NO: 25730 - protein, 469 aa, synthetic construct
  REGION 1..469: note = neuraminidase__InfluenzaA__AIM55965
MNPNQKIITIGSVCMTIGMANLILQIGNIISIWVSHSIQLGNQSQIETCNQSVITYENNTWVNQTYVNISNTNFAAGQSVVPVKLAGNSSLCPVSGWAIYSKDNSVRIGSKGDVFVIREPFISCSPLECRTFFLTQGALLNDKHSNGTIKDRSPYRTLMSCPIGEVPSPYNSRFESVAWSASACHDGINWLTIGISGPDSGAVAVLKYNGIITDTIKSWRNNILRTQESECACVNGSCFTIMTDGPSDGQASYKIFRIEKGKIVKSVEMNAPNYHYEECSCYPDSSEITCVCRDNWHGSNRPWVSFNQNLEYQIGYICSGVFGDNPRPNDKTGSCGPVSSNGANGVKGFSFKYGNGVWIGRTKSISSRKGFEMIWDPNGWTGTDNNFSIKQDIVGIKEWSGYSGSFVQHPELTGLDCIRPCFWVELIRGRPEENTIWTSGSSISFCGVNSDAVGWSWPDGAELPFTIDK

SEQ ID NO: 25731 - protein, 469 aa, synthetic construct
  REGION 1..469: note = neuraminidase__InfluenzaA__AIM55976
MNPNQKIITIGSVCMTIGMANLILQIGNIISIWVSHSIQLGNQSQIETCNQSVITYENNTWVNQTYVNISNTNFAAGQSVVSVKLAGNSSLCPVSGWAIYSKDNSVRIGSKGDVFVIREPFISCSPLECRTFFLTQGALLNDKHSNGTIKDRSPYRTLMSCPIGEVPSPYNSRFESVAWSASACHDGINWLTIGISGPDSGAVAVLKYNGIITDTIKSWRNNILRTQESECACVNGSCFTIMTDGPSDGQASYKIFRIEKGKIVKSVEMNAPNYHYEECSCYPDSSEITCVCRDNWHGSNRPWVSFNQNLEYQIGYICSGVFGDNPRPNDKTGSCGPVSSNGANGVKGFSFKYGNGVWIGRTKSISSRKGFEMIWDPNGWTGTDNNFSIKQDIVGIKEWSGYSGSFVQHPELTGLDCIRPCFWVELIRGRPEENTIWTSGSSISFCGVNSDTVGWSWPDGAELPFTIDK

SEQ ID NO: 25732 - protein, 469 aa, synthetic construct
  REGION 1..469: note = neuraminidase__InfluenzaA__AIM55987
MNPNQKIITIGSVCMTIGMANLILQIGNIISIWVSHSIQLGNQSQIETCNQSVITYENNTWVNQTYVNISNTNFAAGQSVVSVKLAGNSSLCPVSGWAIYSKDNSVRIGSKGDVFVIREPFISCSPLECRTFFLTQGALLNDKHSNGTIKDRSPYRTLMSCPTGEVPSPYNSRFESVAWSASACHDGINWLTIGISGPDSGAVAVLKYNGIITDTIKSWRNNILRTQESECACVNGSCFTIMTDGPSDGQASYKIFRIEKGKIVKSVEMNAPNYHYEECSCYPDSSEITCVCRDNWHGSNRPWVSFNQNLEYQIGYICSGVFGDNPRPNDKTGSCGPVSSNGANGVKGFSFKYGNGVWIGRTKSISSRKGFEMIWDPNGWTGTDNNFSIKQDIVGIKEWSGYSGSFVQHPELTGLDCIRPCFWVELIRGRPEENTIWTSGSSISFCGVNSDTVDWSWPDGAELPFTIDK

SEQ ID NO: 25733 - protein, 469 aa, synthetic construct
  REGION 1..469: note = neuraminidase__InfluenzaA__AIM55998
MNPNQKIITIGSVCMTIGMANLILQIGNTISIWVSHSIQLGNQSQIETCNQSVITYENNTWVNQTYVNISNTNFAAGQSVVPVKLAGNSSLCPVSGWAIYSKDNSVRIGSKGDVFVIREPFISCSPLECRTFFLTQGALLNDKHSNGTIKDRSPYRTLMSCPIGEVPSPYNSRFESVAWSASACHDGINWLTIGISGPDSGAVAVLKYNGIITDTIKSWRNNILRTQESECACVNGSCFTIMTDGPSDGQASYKIFRIEKGKIVKSVEMNAPNYHYEECSCYPDSSEITCVCRDNWHGSNRPWVSFNQNLEYQIGYICSGVFGDNPRPNDKTGSCGPVSSNGANGVKGFSFKYGNGVWIGRTKSISSRKGFEMIWDPNGWTGTDNKFSIKQDIVGINEWSGYSGSFVQHPELTGLDCIRPCFWVELIRGRPEENTIWTSGSSISFCGVKSDTVGWSWPDGAELPFTIDK

SEQ ID NO: 25734 - protein, 469 aa, synthetic construct; identical to SEQ ID NO: 25731
  REGION 1..469: note = neuraminidase__InfluenzaA__AIM56009

SEQ ID NO: 25735 - protein, 469 aa, synthetic construct; identical to SEQ ID NO: 25731
  REGION 1..469: note = neuraminidase__InfluenzaA__AIM56020

SEQ ID NO: 25736 - protein, 469 aa, synthetic construct; identical to SEQ ID NO: 25731
  REGION 1..469: note = neuraminidase__InfluenzaA__AIM56031

SEQ ID NO: 25737 - protein, 469 aa, synthetic construct
  REGION 1..469: note = neuraminidase__InfluenzaA__AIM56042
MNPNQKIITIGSVCMTIGMANLILQIGNIISIWVSHSIQLGNQSQIETCNQSVITYENNTWVNQTYVNISNTNFAAGQSVVPVKLAGNSSLCPVSGWAIYSKDNSVRIGSKGDVFVIREPFISCSPLECRTFFLTQGALLNDKHSNGTIKDRSPYRTLMSCPIGEVPSPYNSRFESVAWSASACHDGINWLTIGISGPDSGAVAVLKYNGIITDTIKSWRNNILRTQESECACVNGSCFTIMTDGPSNGQASYKIFRIEKGKIVKSVEMNAPNYHYEECSCYPDSSEITCVCRDNWHGSNRPWVSFNQNLEYQIGYICSGVFGDNPRPNDKTGSCGPVSSNGANGVKGFSFKYGNGVWIGRTKSISSRKGFEMIWDPNGWTGTDNNFSIKQDIVGIKEWSGYSGSFVQHPELTGLDCIRPCFWVELIRGRPEENTIWTSGSSISFCGVNSDTVGWSWPDGAELPFTIDK

SEQ ID NO: 25738 - protein, 469 aa, synthetic construct
  REGION 1..469: note = neuraminidase__InfluenzaA__AIM56053
MNPNQKIITIGSVCMTIGMANLILQIGNIISIWVSHSIQLGNQSQIETCNQSVITYENNTWVNQTYVNISNTNFAAGQSVVSVKLAGNSSLCPVSGWAIYSKDNSVRIGSKGDVFVIREPFISCSPLECRTFFLTQGALLNDKHSNGTIKDRSPYRTLMSCPIGEVPSPYNSRFESVAWSASACHDGINWLTIGISGPDSGAVAVLKYNGIITDTIKSWRNNILRTQESECACVNGSCFTIMTDGPSDEQASYKIFRIEKGKIVKSVEMNAPNYHYEECSCYPDSSEITCVCRDNWHGSNRPWVSFNQNLEYQIGYICSGVFGDNPRPNDKTGSCGPVSSNGANGVKGFSFKYGNGVWIGRTKSISSRKGFEMIWDPNGWTGTDNNFSIKQDIVGIKEWSGYSGSFVQHPELTGLDCIRPCFWVELIRGRPEENTIWTSGSSISFCGVNSDTVGWSWPDGAELPFTIDK

SEQ ID NO: 25739 - protein, 469 aa, synthetic construct
  REGION 1..469: note = neuraminidase__InfluenzaA__AIM56064
MNPNQKIITIGSVCMTIGMANLILQIGNIISIWVSHSIQLGNQSQIETCNQSVITYENNTWVNQTYVNISNTNFAAGQSVVPVKLAGNSSLCPVSGWAIYSKDNSVRIGSKGDVFVIREPFISCSPLECRTFFLTQGALLNDKHSNGTIKDRSPYRTLMSCPIGEVPSPYNSRFESVAWSASACHDGINWLTIGISGPDSGAVAVLKYNGIITDTIKSWRNNILRTQESECACVNGSCFTIMTDGPSDGQASYKIFRIEKGKIVKSVEMNAPNYHYEECSCYPDSSEITCVCRDNWHGSNRPWVSFNQNLEYQIGYICSGVFGDNPRPNDKTGSCGPVSSNGANGVKGFSFKYGNGVWIGRTKSISSRKGFEMIWDPNGWTGTDNNFSIKQDIVGIKEWSGYSGSFVQHPELTGLDCIRPCFWVELVRGRPEENTIWTSGSSISFCGVNSDTVGWSWPDGAELPFTIDK

SEQ ID NO: 25740 - protein, 469 aa, synthetic construct
  REGION 1..469: note = neuraminidase__InfluenzaA__AIM56086
MNPNQKIITIGSVCMTIGMANLILQIGNIISIWVSHSIQLGNQSHIETCNQSVITYENNTWVNQTYVNISNTNFAAGQSVVPVKLAGNSSLCPVSGWAIYSKDNSVRIGSKGDVFVIREPFISCSPLECRTFFLTQGALLNDKHSNGTIKDRSPYRTLMSCPIGEVPSPYNSRFESVAWSASACHDGINWLTIGISGPDNGAVAVLKYNGIITDTIKSWRNNILRTQESECACVNGSCFTIMTDGPSDGQASYKIFRIEKGKIVKSVEMNAPNYHYEECSCYPDSSEITCVCRDNWHGSNRPWVSFNQNLEYQIGYICSGVFGDNPRPNDKTGSCGPVTSNGANGVKGFSFKYGNGVWIGRTKSISSRKGFEMIWDPNGWTGTDNNFSIKQDIIGIKEWSGYSGSFVQHPELTGLDCIRPCFWVELIRGRPEENTIWTSGSSISFCGVNSDTVGWSWPDGAELPFTIDK

SEQ ID NO: 25741 - protein, 469 aa, synthetic construct
  REGION 1..469: note = neuraminidase__InfluenzaA__AIM56097
MNPNQKIITIGSVCMTIGMANLILQIGNIISIWVSHSIQLGNQSQIETCNQSVITYENNTWVNQTYVNISNTNFAAEQSVVSVKLAGNSSLCPVSGWAIYSKDNSVRIGSKGDVFVIREPFISCSPLECRTFFLTQGALLNDKHSNGTIKDRSPYRTLMSCPIGEVPSPYNSRFESVAWSASACHDGINWLTIGISGPDSGAVAVLKYNGIITDTIKSWRNNILRTQESECACVNGSCFTIMTDGPSDGQASYKIFRIEKGKIVKSVEMNAPNYHYEECSCYPDSSEITCVCRDNWHGSNRPWVSFNQNLEYQIGYICSGVFGDNPRPNDKTGSCGPVSSNGANGVKGFSFKYGNGVWIGRTKSISSRKGFEMIWDPNGWTGTDNNFSIKQDIVGIKEWSGYSGSFVQHPELTGLDCIRPCFWVELIRGRPEENTIWTSGSSISFCGVNSDTVGWSWPDGAELPFTIDK

SEQ ID NO: 25742 - protein, 469 aa, synthetic construct
  REGION 1..469: note = neuraminidase__InfluenzaA__AIM56108
MNPNQKIITIGSVCMTIGMANLILQIGNIISIWVSHSIQLGNQSQIETCNQSVITYENNTWINQTYVNISNTNFAAGQSVVPVKLAGNSSLCPVSGWAIYSKDNSVRIGSKGDVFVIREPFISCSPLECRTFFLTQGALLNDKHSNGTIKDRSPYRTLMSCPIGEVPSPYNSRFESVAWSASACHDGINWLTIGISGPDSGAVAVLKYNGIITDTIKSWRNNILRTQESECACVNGSCFTIMTDGPSDGQASYKIFRIEKGKIVKSVEMNAPNYHYEECSCYPDSSEITCVCRDNWHGSNRPWVSFNQNLEYQIGYICSGVFGDNPRPNDKTGSCGPVSSNGANGVKGFSFKYGNGVWIGRTKSISSRKGFEMIWDPNGWTGTDNNFSIKQDIVGIKEWSGYSGSFVQHPELTGLDCIRPCFWVELIRGRPEENTIWTSGSSISFCGVNSDTVGWSWPDGAELPFTIDK

SEQ ID NO: 25743 - protein, 469 aa, synthetic construct
  REGION 1..469: note = neuraminidase__InfluenzaA__AIM56119
MNPNQKIITIGSVCMTIGMANLILQIGNIISIWVSHSIQIGNQSQIETCNQSVITYENNTWVNQTYVNISNTNFAAGQSVVSVKLAGNSSLCPVSGWAIYSKDNSVRIGSKGDVFVIREPFISCSPLECRTFFLTQGALLNDKHSNGTIKDRSPYRTLMSCPIGEVPSPYNSRFESVAWSASACHDGINWLTIGISGPDSGAVAVLKYNGIITDTIKSWRNNILRTQESECACVNGSCFTIMTDGPSDGQASYKIFRIEKGKIVKSVEMNAPNYHYEECSCYPDSSEITCVCRDNWHGSNRPWVSFNQNLEYQIGYICSGVFGDNPRPNDKTGSCGPVSSNGANGVKGFSFKYGNGVWIGRTKSISSRKGFEMIWDPNGWTGTDNKFSIKQDIVGINEWSGYSGSFVQHPELTGLDCIRPCFWVELIRGRPEENTIWTSGSSISFCGVNSDTVGWSWPDGAELPFTIDK

SEQ ID NO: 25744 - protein, 469 aa, synthetic construct
  REGION 1..469: note = neuraminidase__InfluenzaA__AIM56130
MNPNQKIITIGSVCMTIGMANLILQIGNIISIWVSHSIQLGNQSQIETCNQSVITYENNTWVNQTYVNISNTNFAAGQSVVPVKLAGNSSLCPVSGWAIYSKDNSVRIGSKGDVFVIREPFISCSPLECRTFFLTQGALLNDKHSNGTIKDRSPYRTLMSCPIGEVPSPYNSRFESVAWSASACHDGINWLTIGISGPDSGAVAVLKYNGIITDTIKSWRNNILRTQESECACVNGSCFTIMTDGPSDGQASYKIFRIEKGKIVKSVEMNAPNYHYEECSCYPDSSEITCVCRDNWHGSNRPWVSFNQNLEYQIGYICSGVFGDNPRPNDKTGSCGPVSSNGANGVKGFSFKYGNGVWIGRTKSISSRKGFEMIWDPNGWTGTDNKFSIKQDIVGINEWSGYSGSFVQHPELTGLDCIRPCFWVELIRGRPEENTIWTSGSSISFCGVKSDTVGWSWPDGAELPFTIDK

SEQ ID NO: 25745 - protein, 469 aa, synthetic construct
  REGION 1..469: note = neuraminidase__InfluenzaA__AIM56141
MNPNQKIITIGSVCMTIGMANLILQIGNIISIWVSHSIQLGNQSQIETCNQSVIIYENNTWVNQTYVNISNTNFAAGQSVVSVKLAGNSSLCPVSGWAIYSKDNSVRIGSKGDVFVIREPFISCSPLECRTFFLTQGALLNDKHSNGTIKDRSPYRTLMSCPIGEVPSPYNSRFESVAWSASACHDGINWLTIGISGPDSGAVAVLKYNGIITDTIKSWRNNILRTQESECACVNGSCFTIMTDGPSDGQASYKIFRIEKGKIVKSVEMNAPNYHYEECSCYPDSSEITCVCRDNWHGSNRPWVSFNQNLEYQIGYICSGVFGDNPRPNDKTGSCGPVSSNGANGVKGFSFKYGNGVWIGRTKSISSRKGFEMIWDPNGWTGTDNNFSIKQDIVGIKEWSGYSGSFVQHPELTGLDCIRPCFWVELIRGRPEENTIWTSGSSISFCGVNSDTVGWSWPDGAELPFTIDK

SEQ ID NO: 25746 - protein, 469 aa, synthetic construct; identical to SEQ ID NO: 25731
  REGION 1..469: note = neuraminidase__InfluenzaA__AIM56152

SEQ ID NO: 25747 - protein, 469 aa, synthetic construct
  REGION 1..469: note = neuraminidase__InfluenzaA__AIM56163
MNPNQKIITIGSVCMTIGMANLILQIGNIISIWVSHSIQLGNQSHIETCNQSVITYENNTWVNQTYVNISNTNFAAGQSVVPVKLAGNSSLCPVSGWAIYSKDNSVRIGSKGDVFVIREPFISCSPLECRTFFLTQGALLNDKHSNGTIKDRSPYRTLMSCPIGEVPSPYNSRFESVAWSASACHDGINWLTIGISGPDNGAVAVLKYNGIITDTIKSWRNNILRTQESECACVNGSCFTIMTDGPSDGQASYKIFRIEKGKIVKSVEMNAPNYHYEECSCYPDSSEITCVCRDNWHGSNRPWVSFNQNLEYQIGYICSGVFGDNPRPNDKTGSCGPVTSNGANGVKGFSFKYGNGVWIGRTKSISSRKGFEMIWDPNGWTGTDNNFSIKQDIVGIKEWSGYSGSFVQHPELTGLDCIRPCFWVELIRGRPEENTIWTSGSSISFCGVNSDTVGWSWPDGAELPFTIDK

SEQ ID NO: 25748 - protein, 469 aa, synthetic construct
  REGION 1..469: note = neuraminidase__InfluenzaA__AIM56174
MNPNQKIITIGSVCMTIGMANLILQIGNIISIWVSHSIQLGNQSQIETCNQSVITYENNTWVNQTYVNISNTNFAAGQSVVPVKLAGNSSLCPVSGWAIYSKDNSVRIGSKGDVFVIREPFISCSPLECRTFFLTQGALLNDKHSNGTIKDRSPYRTLMSCPIGEVPSPYNSRFESVAWSASACHDGINWLTIGISGPDSGAVAVLKYNGIITDTIKSWRNNILRTQESECACVNGSCFTIMTDGPSDGQASYKIFRIEKGKIVKSVEMNAPNYHYEECSCYPDSSEITCVCRDNWHGSNRPWVSFNQNLEYQIGYICSGVFGDNPRPNDKTGSCGPVSSNGANGVKGFSFKYGNGVWIGRTKSISSRKGFEMIWDPNGWTGTDNNFSIKQDIVGIKEWSGYSGSFVQHPELTGLDCIRPCFWVELIRGRPEENTIWTSGSSISFCGVNSDTVGWSWPDGAELPFTVDK

SEQ ID NO: 25749 - protein, 469 aa, synthetic construct; identical to SEQ ID NO: 25744
  REGION 1..469: note = neuraminidase__InfluenzaA__AIM56185

SEQ ID NO: 25750 - protein, 469 aa, synthetic construct; identical to SEQ ID NO: 25743
  REGION 1..469: note = neuraminidase__InfluenzaA__AIM56196

SEQ ID NO: 25751 - protein, 469 aa, synthetic construct; identical to SEQ ID NO: 25725
  REGION 1..469: note = neuraminidase__InfluenzaA__AIM56207

SEQ ID NO: 25752 - protein, 469 aa, synthetic construct
  REGION 1..469: note = neuraminidase__InfluenzaA__AIM56229
MNPNQKIITIGSVCMTIGMANLILQIGNTISIWVSHSIQIGNQSQIETCNQSVITYENNTWVNQTYVNISNTNFAAGQSVVSVKLAGNSSLCPVSGWAIYSKDNSVRIGSKGDVFVIREPFISCSPLECRTFFLTQGALLNDKHSNGTIKDRSPYRTLMSCPIGEVPSPYNSRFESVAWSASACHDGINWLTIGISGPDSGAVAVLKYNGIITDTIKSWRNNILRTQESECACVNGSCFTIMTDGPSDGHASYKIFRIEKGKIVKSVEMNAPNYHYEECSCYPDSSEITCVCRDNWHGSNRPWVSFNQNLEYQIGYICSGVFGDNPRPNDKTGSCGPVSSNGANGVKGFSFKYGNGVWIGRTKSISSRKGFEMIWDPNGWTGTDNKFSIKQDIVGINEWSGYSGSFVQHPELTGLDCIRPCFWVELIRGRPEENTIWTSGSSISFCGVNSDTVGWSWPDGAELPFTIDK

SEQ ID NO: 25753 - protein, 469 aa, synthetic construct
  REGION 1..469: note = neuraminidase__InfluenzaA__AIM56240
MNPNQKIITIGSVCMTIGMANLILQIGNIISIWISHSIQVGNQSQIETCNQSVITYENNTWVNQTYVNISNTNFAAGQPVVSVKLAGNSSLCSVSGWAIYSKDNSVRIGSKGDVFVIREPFISCSPLECRTFFLTQGALLNDKHSNGTIKDRSPYRTLMSCPIGEVPSPYNSRFESVAWSASACHDGINWLTIGISGPDSGAVAVLKYNGIITDTIKSWRNDILRTQESECACVNGSCFTIMTDGPSDGQASYKIFRIEKGKIVKSVEMNAPNYHYEECSCYPDSSEITCVCRDNWHGSNRPWVSFNQNLEYQIGYICSGIFGDNPRPNDKTGSCGPVSSNGANGVKGFSFKYGNGVWIGRTKSISSRKGFEMIWDPNGWTGTDNNFSIKQDIVGINEWSGYSGSFVQHPELTGLDCIRPCFWVELIRGRPKENTIWTSGSSISFCGVNSDTVGWSWPDGAELPFTIDK

SEQ ID NO: 25754 - protein, 469 aa, synthetic construct
  REGION 1..469: note = neuraminidase__InfluenzaA__AIM56251
MNPNQKIITIGSVCMTIGMANLILQIGNIISIWVSHSIQLGNQSHIETCNQSVITYENNTWVNQTYVNISNTNFAAGQSVVPVKLAGNSSLCPVSGWAIYSKDNSVRIGSKGDVFVIREPFISCSPLECRTFFLTQGALLNDKHSNGTIKDRSPYRTLMSCPIGEVPSPYNSRFESVAWSASACHDGINWLTIGISGPDSGAVAVLKYNGIITDTIKSWRNNILRTQESECACVNGSCFTIMTDGPSDGQASYKIFRIEKGKIVKSVEMNAPNYHYEECSCYPDSSEITCVCRDNWHGSNRPWVSFNQNLEYQIGYICSGVFGDNPRPNDKTGSCGPVSSNGANGVKGFSFKYGNGVWIGRTKSISSRKGFEMIWDPNGWTGTDNNFSIKQDIVGIKEWSGYSGSFVQHPELTGLDCIRPCFWVELIRGRPEENTIWTSGSSISFCGVNSDTVGWSWPDGAELPFTIDK

SEQ ID NO: 25755 - protein, 469 aa, synthetic construct; identical to SEQ ID NO: 25754
  REGION 1..469: note = neuraminidase__InfluenzaA__AIM56262

SEQ ID NO: 25756 - protein, 469 aa, synthetic construct; identical to SEQ ID NO: 25725
  REGION 1..469: note = neuraminidase__InfluenzaA__AIM56273

SEQ ID NO: 25757 - protein, 469 aa, synthetic construct
  REGION 1..469: note = neuraminidase__InfluenzaA__AIM56284
MNPNQKIITIGSVCITIGMANLILQIGNIISIWVSHSIQIGNQSQIETCNQSVITYENNTWVNQTYVNISNTNFAAGQSVVSVKLAGNSSLCPVSGWAIYSKDNSVRIGSKGDVFVIREPFISCSPLECRTFFLTQGALLNDKHSNGTIKDRSPYRTLMSCPIGEVPSPYNSRFESVAWSASACHDGINWLTIGISGPDSGAVAVLKYNGIITDTIKSWRNNILRTQESECACVNGSCFTIMTDGPSDGQASYKIFRIEKGKIVKSVEMNAPNYHYEECSCYPDSSEITCVCRDNWHGSNRPWVSFNQNLEYQIGYICSGVFGDNPRPNDKTGSCGPVSSNGANGVKGFSFKYGNGVWIGRTKSISSRKGFEMIWDPNGWTGTDNKFSIKQDVVGINEWSGYSGSFVQHPELTGLDCIRPCFWVELIRGRPEENTIWTSGSSISFCGVNSDTVGWSWPDGAELPFTIDK

SEQ ID NO: 25758 - protein, 469 aa, synthetic construct; identical to SEQ ID NO: 25725
  REGION 1..469: note = neuraminidase__InfluenzaA__AIM56295

SEQ ID NO: 25759 - protein, 469 aa, synthetic construct; identical to SEQ ID NO: 25725
  REGION 1..469: note = neuraminidase__InfluenzaA__AIM56306

SEQ ID NO: 25760 - protein, 469 aa, synthetic construct; identical to SEQ ID NO: 25725
  REGION 1..469: note = neuraminidase__InfluenzaA__AIM56317

SEQ ID NO: 25761 - protein, 469 aa, synthetic construct; identical to SEQ ID NO: 25744
  REGION 1..469: note = neuraminidase__InfluenzaA__AIM56339

SEQ ID NO: 25762 - protein, 469 aa, synthetic construct
  REGION 1..469: note = neuraminidase__InfluenzaA__AIM56350
MNPNQKIITIGSVCMTIGMANLILQIGNIISIWVSHSIQLGNQSQIETCNQSVITYENNTWVNQTYVNISNTNFAAGQSVVPVKLAGNSSLCPVSGWAIYSKDNSVRIGSKGDVFVIREPFISCSPLECRTFFLTQGALLNDKHSNGTIKDRSPYRTLMSCPIGEVPSPYNSRFESVAWSASACHDGINWLTIGISGPDSGAVAVLKYNGIITDTIKSWRNNILRTQESECACVNGSCFTIMTDGPSDGQASYKIFRIEKGKIVKSVEMNAPNYHYEECSCYPDSSEITCVCRDNWHGSNRPWVSFNQNLEYQIGYICSGVFGDNPRPNDKTGSCGPVSSNGANGVKGFSFKYGNGVWIGRTKSISSRKGFEMIWDPNGWTGTDNNFSIKQDIVGIKEWSGYSGSFVQHPELTGLDCIRPCFWVELIRGRPEENTIWTSGSSISFCGINSDTVGWSWPDGAELPFTIDK

SEQ ID NO: 25763 - protein, 469 aa, synthetic construct; identical to SEQ ID NO: 25754
  REGION 1..469: note = neuraminidase__InfluenzaA__AIM56361

SEQ ID NO: 25764 - protein, 469 aa, synthetic construct; identical to SEQ ID NO: 25725
  REGION 1..469: note = neuraminidase__InfluenzaA__AIM56372

SEQ ID NO: 25765 - protein, 469 aa, synthetic construct; identical to SEQ ID NO: 25754
  REGION 1..469: note = neuraminidase__InfluenzaA__AIM56383

SEQ ID NO: 25766 - protein, 469 aa, synthetic construct
  REGION 1..469: note = neuraminidase__InfluenzaA__AIM56394
MNPNQKIITIGSVCMTIGMANLILQIGNIISIWVSHSIQIGNQSQIETCNQSVITYENNTWVNQTYVNISNTNFAAGQSVVSVKLAGNSSLCPVSGWAIYSKDNSVRIGSKGDVFVIREPFISCSPLECRTFFLTQGALLNDKHSNGTIKDRSPYRTLMSCPIGEVPSPYNSRFESVAWSASACHDGINWLTIGISGPDSGAVAVLKYNGIITDTIKSWRNNILRTQESECACVNGSCFTIMTDGPSDGQASYKIFRIEKGKIVKSVEMNAPNYHYEECSCYPDSSEITCVCRDNWHGSNRPWVSFNQNLEYQIGYICSGIFGDNPRPNDKTGSCGPVSSNGANGVKGFSFKYGNGVWIGRTKSISSRKGFEMIWDPNGWTGTDNKFSIKQDIVGINEWSGYSGSFVQHPELTGLDCIRPCFWVELIRGRPEENTIWTSGSSISFCGVNSDTVGWSWPDGAELPFTIDK

SEQ ID NO: 25767 - protein, 469 aa, synthetic construct; identical to SEQ ID NO: 25743
  REGION 1..469: note = neuraminidase__InfluenzaA__AIM56405

SEQ ID NO: 25768 - protein, 469 aa, synthetic construct
  REGION 1..469: note = neuraminidase__InfluenzaA__AIM56416
MNPNQKIITIGSVCMTIGMANLILQIGNIISIWVSHSIQLGNQSHIETCNQSVITYENNTWVNQTYVNISNINFAAGQSVVPVKLAGNSSLCPVSGWAIYSKDNSVRIGSKGDVFVIREPFISCSPLECRTFFLTQGALLNDKHSNGTIKDRSPYRTLMSCPIGEVPSPYNSRFESVAWSASACHDGINWLTIGISGPDNGAVAVLKYNGIITDTIKSWRNNILRTQESECACVNGSCFTIMTDGPSDGQASYKIFRIEKGKIVKSVEMNAPNYHYEECSCYPDSSEITCVCRDNWHGSNRPWVSFNQNLEYQIGYICSGVFGDNPRPNDKTGSCGPVTSNGANGVKGFSFKYGNGVWIGRTKSISSRKGFEMIWDPNGWTGTDNNFSIKQDIVGIKEWSGYSGSFVQHPELTGLDCIRPCFWVELIRGRPEENTIWTSGSSISFCGVNSDTVGWSWPDGAELPFTIDK

SEQ ID NO: 25769 - protein, 469 aa, synthetic construct; identical to SEQ ID NO: 25743
  REGION 1..469: note = neuraminidase__InfluenzaA__AIM56428

SEQ ID NO: 25770 - protein, 469 aa, synthetic construct; identical to SEQ ID NO: 25725
  REGION 1..469: note = neuraminidase__InfluenzaA__AIM56439

SEQ ID NO: 25771 - protein, 469 aa, synthetic construct
  REGION 1..469: note = neuraminidase__InfluenzaA__AIM56450
MNPNQKIITIGSVCMTIGMANLILQIGNIISIWISHSIQVGNQSQIETCNQSVITYENNTWVNQTYVNISNTNFAAGQPVVSVKLAGNSSLCPVSGWAIYSKDNSVRVGSKGDVFVIREPFISCSPLECRTFFLTQGALLNDKHSNGTIKDRSPYRTLMSCPIGEVPSPYNSRFESVAWSASACHDGINWLTIGISGPDSGAVAVLKYNGIITDTIKSWRNDILRTQESECACVNGSCFTIMTDGPSDGQASYKIFRIEKGKIVKSVEMNAPNYHYEECSCYPDSSEITCVCRDNWHGSNRPWVSFNQNLEYKIGYICSGIFGDNPRPNDKTGSCGPVSSNGANGVKGFSFKYGNGVWIGRTKSISSRKGFEMIWDPNGWTGTDNNFSVKQDIVGINEWSGYSGSFVQHPELTGLDCIRPCFWVELIRGRPKENTIWTSGSSISFCGVNSDTVGWSWPDGAELPFTIDK

SEQ ID NO: 25772 - protein, 469 aa, synthetic construct
  REGION 1..469: note = neuraminidase__InfluenzaA__AIM56461
MNPNQKIITIGSVCMTIGMANLILQIGNIISIWVSHSIQIGNQSQIETCNQSVITYENNTWVNQTYVNISNTNFAAGQSVVSVKLAGNSSLCPVSGWAIYSKDNSVRIGSKGDVFVIREPFISCSPLECRTFFLTQGALLNDKHSNGTIKDRSPYRTLMSCPIGEVPSPYNSRFESVAWSASACHDGINWLTIGISGPDSGAVAVLKYNGIITDTIKSWKNNILRTQESECACVNGSCFTIMTDGPSDGQASYKIFRIEKGKIVKSVEMNAPNYHYEECSCYPDSSEITCVCRDNWHGSNRPWVSFNQNLEYQIGYICSGVFGDNPRPNDKTGSCGPVSSNGANGVKGFSFKYGNGVWIGRTKSISSRKGFEMIWDPNGWTGTDNKFSIKQDIVGVNEWSGYSGSFVQHPELTGLDCIRPCFWVELIRGRPEENTIWTSGSSISFCGVNSDTVGWSWPDGAELPFTIDK

SEQ ID NO: 25773 - protein, 469 aa, synthetic construct
  REGION 1..469: note = neuraminidase__InfluenzaA__AIM56472
MNPNQKIITIGSVCMTIGMANLILQIGNIISIWVSHSIQIGNQSQIETCNQSVITYENNTWVNQTYVNISNTNFAAGQSVVSVKLAGNSSLCPVSGWAIYSKDNSVRIGSKGDVFVIREPFISCSPLECRTFFLTQGALLNDKHSNGTIKDRSPYRTLMSCPIGEVPSPYNSRFESVAWSASACNDGINWLTIGISGPDSGAVAVLKYNGIITDTIKSWRNNILRTQESECACVNGSCFTIMTDGPSDGQASYKIFRIEKGKIVKSVEMNAPNYHYEECSCYPDSSEITCVCRDNWHGSNRPWVSFNQNLEYQIGYICSGVFGDNPRPNDKTGSCGPVSSNGANGVKGFSFKYGNGVWIGRTKSISSRKGFEMIWDPNGWTGTDNKFSIKQDIVGINEWSGYSGSFVQHPELTGLDCIRPCFWVELIRGRPEENTIWTSGSSISFCGVNSDTVGWSWPDGAELPFTIDK

SEQ ID NO: 25774 - protein, 469 aa, synthetic construct; identical to SEQ ID NO: 25731
  REGION 1..469: note = neuraminidase__InfluenzaA__AIM56483

SEQ ID NO: 25775 - protein, 469 aa, synthetic construct; identical to SEQ ID NO: 25754
  REGION 1..469: note = neuraminidase__InfluenzaA__AIM56494

SEQ ID NO: 25776 - protein, 469 aa, synthetic construct; identical to SEQ ID NO: 25744
  REGION 1..469: note = neuraminidase__InfluenzaA__AIM56505

SEQ ID NO: 25777 - protein, 469 aa, synthetic construct; identical to SEQ ID NO: 25743
  REGION 1..469: note = neuraminidase__InfluenzaA__AIM56516

SEQ ID NO: 25778 - protein, 469 aa, synthetic construct
  REGION 1..469: note = neuraminidase__InfluenzaA__AIM56527
MNPNQKIITIGSVCMTIGMANLILQIGNIISIWVSHSIQLGNQSQIETCNQSVITYENNTWVNQTYVNISNTNFAAEQSVVSVKLAGNSSLCPVSGWAIYSKDNSVRIGSKGDVFVIREPFISCSPLECRTFFLTQGALLNDKHSNGTIKDRSPYRTLMSCPIGEVPSPYNSRFESVAWSASACHDGINWLTIGISGPDSGAVAVLKYNGIITDTIKSWRNNILRTQESECACVNGSCFTIMTDGPSDGQASYKIFRIEKGKIVKSVEMNAPNYHYEECSCYPDSSEITCVCRDNWHGSNRPWVSFNQNLEYQIGYICSGVLGDNPRPNDKTGSCGPVSSNGANGVKGFSFKYGNGVWIGRTKSISSRKGFEMVWDPNGWTGTDNNFSIKQDIVGIKEWSGYSGSFVQHPELTGLDCIRPCFWVELIRGRPEENTIWTSGSSISFCGVNSDTVGWSWPDGAELPFTIDK

SEQ ID NO: 25779 - protein, 469 aa, synthetic construct; identical to SEQ ID NO: 25725
  REGION 1..469: note = neuraminidase__InfluenzaA__AIM56538

SEQ ID NO: 25780 - protein, 469 aa, synthetic construct
  REGION 1..469: note = neuraminidase__InfluenzaA__AIM56549
MNPNQKIITIGSVCMTIGMANLILQIGNIISIWVSHSIQIGNQSQIETCNQSVITYENNTWVNQTYVNISNTNFAAGQSVVSVKLAGNSSLCPVSGWAIYSKDNSVRIGSKGDVFVIREPFISCSPLECRTFFLTQGALLNDKHSNGTIKDRSPYRTLMSCPIGEVPSPYNSRFESVAWSASACHDGINWLTIGISGPDSGAVAVLKYNGIITDTIKSWRNNILRTQESECACVNGSCFTIMTDGPSDGQASYKIFRIEKGKIVKSVEMNAPNYHYEECSCYPDSSEVTCVCRDNWHGSNRPWVSFNQNLEYQIGYICSGVFGDNPRPNDKTGSCGPVSSNGANGVKGFSFKYGNGVWIGRTKSISSRKGFEMIWDPNGWTGTDNKFSIKQDIVGINEWSGYSGSFVQHPELTGLDCIRPCFWVELIRGRPEENTIWTSGSSISFCGVNSDTVGWSWPDGAELPFTIDK

SEQ ID NO: 25781 - protein, 469 aa, synthetic construct
  REGION 1..469: note = neuraminidase__InfluenzaA__AIM56560
MNPNQKIITIGSVCMTIGMANLILQIGNIISIWVSHSIQLGNQSHIETCNQSVITYENNTWVNQTYVNISNTNFAAGQSVVPVKLAGNSSLCPVSGWAIHSKDNSVRIGSKGDVFVIREPFISCSPLECRTFFLTQGALLNDKHSNGTIKDRSPYRTLMSCPIGEVPSPYNSRFESVAWSASACHDGINWLTIGISGPDNGAVAVLKYNGIITDTIKSWRNNILRTQESECACVNGSCFTIMTDGPSDGQASYKIFRIEKGKIVKSVEMNAPNYHYEECSCYPDSSEITCVCRDNWHGSNRPWVSFNQNLEYQIGYICSGVFGDNPRPNDKTGSCGPVTSNGANGVKGFSFKYGNGVWIGRTKSISSRKGFEMIWDPNGWTGTDNNFSIKQDIVGIKEWSGYSGSFVQHPELTGLDCIRPCFWVELIRGRPEENTIWTSGSSISFCGVNSDTVGWSWPDGAELPFTIDK

SEQ ID NO: 25782 - protein, 469 aa, synthetic construct; identical to SEQ ID NO: 25731
  REGION 1..469: note = neuraminidase__InfluenzaA__AIM56571

SEQ ID NO: 25783 - protein, 469 aa, synthetic construct
  REGION 1..469: note = neuraminidase__InfluenzaA__AIM56582
MNPNQKIITIGSVCITIGMANLILQIGNIISIWVSHSIQLGNQSQIETCNQSVITYENNTWVNQTYVNISNTNFAAGQSVVSVKLAGNSSLCPVSGWAIYSKDNSVRIGSKGDVFVIREPFISCSPLECRTFFLTQGALLNDKHSNGTIKDRSPYRTLMSCPIGEVPSPYNSRFESVAWSASACHDGINWLTIGISGPDSGAVAVLKYNGIITDTIKSWRNNILRTQESECACVNGSCFTIMTDGPSDGQASYKIFRIEKGKIVKSVEMNAPNYHYEECSCYPDSSEITCVCRDNWHGSNRPWVSFNQNLEYQIGYICSGVFGDNPRPNDKTGSCGPVSSNGANGVKGFSFKYGNGVWIGRTKSISSRKGFEMIWDPNGWTGTDNNFSIKQDIVGIKEWSGYSGSFVQHPELTGLDCIRPCFWVELIRGRPEENTIWTSGSSISFCGVNSDTVGWSWPDGAELPFTIDK

SEQ ID NO: 25784 - protein, 469 aa, synthetic construct
  REGION 1..469: note = neuraminidase__InfluenzaA__AIM56593
MNPNQKIITIGSVCMTIGMANLILQIGNIISIWVSHSIQLGNQSQIETCNQSVITYENNTWVNQTYVNISNTNFAAEQSVVSVKLAGNSSLCPVSGWAIYSKDNSVRIGSKGDVFVIREPFISCSPLECRTFFLTQGALLNDKHSNGTIKDRSPYRTLMSCPIGEVPSPYNSRFESVAWSASACHDGINWLTIGISGPDSGAVAVLKYNGIITDTIKSWRNNILRTQESECACVNGSCFTIMTDGPSDGQASYKIFRIEKGKIVKSVEMNAPNYHYEECSCYPDSSEITCVCRDNWHGSNRPWVSFNQNLEYQIGYICSGVLGDNPRPNDKTGSCGPVSSNGANGVKGFSFKYGNGVWIGRTKSISSRKGFEMIWDPNGWTETDNNFSIKQDIVGIKEWSGYSGSFVQHPELTGLDCIRPCFWVELIRGRPEENTIWTSGSSISFCGVNSDTVGWSWPDGAELPFTIDK

SEQ ID NO: 25785 - protein, 469 aa, synthetic construct
  REGION 1..469: note = neuraminidase__InfluenzaA__AIM56604
MNPNQKIITIGSVCMTIGMANLILQIGNIISIWVSHSIQIGNQSQIETCNQSVITYENNTWVNQTYVNISNINFAAGQSVVSVKLAGNSSLCPVSGWAIYSKDNSVRIGSKGDVFVIREPFISCSPLECRTFFLTQGALLNDKHSNGTIKDRSPYRTLMSCPIGEVPSPYNSRFESVAWSASACHDGINWLTIGISGPDSGAVAVLKYNGIITDTIKSWRNNILRTQESECACVNGSCFTIMTDGPSDGQASYKIFRIEKGKIVKSVEMNAPNYHYEECSCYPDSSEITCVCRDNWHGSNRPWVSFNQNLEYQIGYICSGVFGDNPRPNDKTGSCGPVSSNGANGVKGFSFKYGNGVWIGRTKSISSRKGFEMIWDPNGWTGTDNKFSIKQDIVGINEWSGYSGSFVQHPELTGLDCIRPCFWVELIRGRPEENTIWTSGSSISFCGVNSDTVGWSWPDGAELPFTIDK

SEQ ID NO: 25786 - protein, 469 aa, synthetic construct
  REGION 1..469: note = neuraminidase__InfluenzaA__AIM56615
MNPNQKIITIGSVCMTIGMANLILQIGNIISIWVSHSIQIGNQSQIETCNQSVITYENNTWVNQTYVDISNTNFAAGQSVVSVKLAGNSSLCPVSGWAIYSKDNSVRIGSKGDVFVIREPFISCSPLECRTFFLTQGALLNDKHSNGTIKDRSPYRTLMSCPIGEVPSPYNSRFESVAWSASACHDGINWLTIGISGPDSGAVAVLKYNGIITDTIKSWRNNILRTQESECACVNGSCFTIMTDGPSDGQASYKIFRIEKGKIVKSVEMNAPNYHYEECSCYPDSSEITCVCRDNWHGSNRPWVSFNQNLEYQIGYICSGVFGDNPRPNDKTGSCGPVSSNGANGVKGFSFKYSNGVWIGRTKSISSRKGFEMIWDPNGWTGTDNKFSIKQDIVGINEWSGYSGSFVQHPELTGLDCIRPCFWVELIRGRPEENTIWTSGSSISFCGVNSDTVGWSWPDGAELPFTIDK

SEQ ID NO: 25787 - protein, 469 aa, synthetic construct; identical to SEQ ID NO: 25780
  REGION 1..469: note = neuraminidase__InfluenzaA__AIM56626

SEQ ID NO: 25788 - protein, 469 aa, synthetic construct; identical to SEQ ID NO: 25725
  REGION 1..469: note = neuraminidase__InfluenzaA__AIM56637

SEQ ID NO: 25789 - protein, 469 aa, synthetic construct; identical to SEQ ID NO: 25731
  REGION 1..469: note = neuraminidase__InfluenzaA__AIM56648

SEQ ID NO: 25790 - protein, 469 aa, synthetic construct
  REGION 1..469: note = neuraminidase__InfluenzaA__AIM56659
MNPNQKIITIGSVCMTIGMANLILQIGNIISIWVSHSIQLGNQSHIETCNQSVITYENNTWVNQTYVNISNTNFAAGQSVVPVKLAGNSSLCPVSGWAIYSKDNSVRIGSKGDVFVIREPFISCSPLECRTFFLTQGALLNDKHSNGTIKDRSPYRTLMSCPIGEVPSPYNSRFESVAWSASACHDGINWLTIGISGPDSGAVAVLKYNGIITDTIKSWRNNILRTQESECACVNGSCFTIMTDGPSDGQASYKIFRIEKGKIVKSVEMNAPNYHYEECSCYPDSSEITCVCRDNWHGSNRPWVSFNQNLEYQIGYICSGVFGDNPRPNDKIGSCGPVSSNGANGVKGFSFKYGNGVWIGRTKSISSRKGFEMIWDPNGWTGTDNNFSIKQDIVGIKEWSGYSGSFVQHPELTGLDCIRPCFWVELIRGRPEEKTIWTSGSSISFCGVNSDTVGWSWPDGAELPFTIDK

SEQ ID NO: 25791 - protein, 469 aa, synthetic construct
  REGION 1..469: note = neuraminidase__InfluenzaA__AIM56670
MNPNQKIITIGSVCMTIGMANLILQIGNTISIWVSHSIQIGNQSQIETCNQSVITYENNTWVNQTYVNISNTNFAAGQSVVSVKLAGNSSLCPVSGWAIYSKDNSVRIGSKGDVFVIREPFISCSPLECRTFFLTQGALLNDKHSNGTIKDRSPYRTLMSCPIGEVPSPYNSRFESVAWSASACHDGINWLTIGISGPDSGAVAVLKYNGIITDTIKSWRNNILRTQESECACVNGSCFTIMTDGPSDGQASYKIFRIEKGKIVKSVEMNAPNYHYEECSCYPDSSEITCVCRDNWHGSNRPWVSFNQNLEYQIGYICSGVFGDNPRPNDKTGSCGPVSSNGANGVKGFSFKYGNGVWIGRTKSISSRKGFEMIWDPNGWTGTDNKFSIKQDIVGINEWSGYSGSFVQHPELTGLDCIRPCFWVELIRGRPEENTIWTSGSSISFCGVNSDTVGWSWPDGAELPFTIDK

SEQ ID NO: 25792 - protein, 469 aa, synthetic construct; identical to SEQ ID NO: 25743
  REGION 1..469: note = neuraminidase__InfluenzaA__AIM56703

SEQ ID NO: 25793 - protein, 469 aa, synthetic construct
  REGION 1..469: note = neuraminidase__InfluenzaA__AIM56714
MNPNQKIITIGSVCMTIGMANLILQIGNIISIWVSHSIQIGNQSQIETCNQSVITYENNTWVNQTYVNISNTNFAAGQSVVSVKLAGNSSLCPVSGWAIYSKDNSVRIGSKGDVFVIREPFISCSPLECRTFFLTQGALLNDKHSNGTIKDRSPYRTLMSCPIGEVPSPYNSRFESVAWSASACHDGINWLTIGISGPDSGAVAVLKYNGIITDTIKSWRNNILRTQESECACVNGSCFTIMTDGPSDGQASYKIFRIEKGKIVKSVEMNAPNYHYEECSCYPDSSEITCVCRDNWHGSNRPWVSFNQNLEYQIGYICSGVFGDNPRPNDKTGSCGPVPSNGANGVKGFSFKYGNGVWIGRTKSISSRKGFEMIWDPNGWTGTDNKFSIKQDIVGINEWSGYSGSFVQHPELTGLDCIRPCFWVELIRGRPEENTIWTSGSSISFCGVNSDTVGWSWPDGAELPFTIDK

SEQ ID NO: 25794 - protein, 469 aa, synthetic construct
  REGION 1..469: note = neuraminidase__InfluenzaA__AIM56725
MNPNQKIITIGSVCMTIGMANLILQIGNIISIWVSHSIQIGNQSQIETCNQSVITYENNTWVNQTYVNISNTNFAAGQSVVSVKLAGNSSLCPVSGWAIYSKDNSVRIGSKGDVFVIREPFISCSPLECRTFFLTQGALLNDKHSNGTIKDRSPYRTLMSCPIGEVPSPYNSRFESVAWSASACHDGINWLTIGISGPDSGAVAVLKYNGIITDTIKSWRNNILRTQESECACVNGSCFTIMTDGPSDGQASYKIFRIEKGKIVKSVEMNAPNYHYEECSCYPDSSEVTCVCRDNWHGSNRPWVSFNQNLEYQIGYICSGIFGDNPRPNDKTGSCGPVSSNGANGVKGFSFKYGNGVWIGRTKSISSRKGFEMIWDPNGWTGTDNKFSIKQDIVGINEWSGYSGSFVQHPELTGLDCIRPCFWVELIRGRPEENTIWTSGSSISFCGVNSDTVGWSWPDGAELPFTIDK

SEQ ID NO: 25795 - protein, 469 aa, synthetic construct; identical to SEQ ID NO: 25743
  REGION 1..469: note = neuraminidase__InfluenzaA__AIM56736

SEQ ID NO: 25796 - protein, 469 aa, synthetic construct
  REGION 1..469: note = neuraminidase__InfluenzaA__AIM56747
MNPNQKIITIGSVCMTIGMANLILQIGNIISIWVSHSIQIGNQSQIETCNQSVITYENNTWVNQTYVNISNTNFAAGQSVVSVKLAGNSSLCPVSGWAIYSKDNSVRIGSKGDVFVIREPFISCSSLECRTFFLTQGALLNDKHSNGTIKDRSPYRTLMSCPIGEVPSPYNSRFESVAWSASACHDGINWLTIGISGPDSGAVAVLKYNGIITDTIKSWRNNILRTQESECACVNGSCFTIMTDGPSDGQASYKIFRIEKGKIVKSVEMNAPNYHYEECSCYPDSSEITCVCRDNWHGSNRPWVSFNQNLEYQIGYICSGVFGDNPRPNDKTGSCGPVSSNGANGVKGFSFKYGNGVWIGRTKSISSRKGFEMIWDPNGWTGTDNKFSIKQDIVGINEWSGYSGSFVQHPELTGLDCIRPCFWVELIRGRPEENTIWTSGSSISFCGVNSDTVGWSWPDGAELPFTIDK

SEQ ID NO: 25797 - protein, 469 aa, synthetic construct; identical to SEQ ID NO: 25780
  REGION 1..469: note = neuraminidase__InfluenzaA__AIM56758

SEQ ID NO: 25798 - protein, 469 aa, synthetic construct; identical to SEQ ID NO: 25743
  REGION 1..469: note = neuraminidase__InfluenzaA__AIM56769

SEQ ID NO: 25799 - protein, 469 aa, synthetic construct
  REGION 1..469: note = neuraminidase__InfluenzaA__AIM56780
MNPNQKIITIGSVCMTIGMANLILQIGNIISIWVSHSIQLGNQSQIGTCNQSVITYENNTWVNQTYVNISNTNFAAGQSVVSVKLAGNSSLCPVSGWAIYSKDNSVRIGSKGDVFVIREPFISCSPLECRTFFLTQGALLNDKHSNGTIKDRSPYRTLMSCPIGEVPSPYNSRFESVAWSASACHDGINWLTIGISGPDSGAVAVLKYNGIITDTIKSWRNNILRTQESECACVNGSCFTIMTDGPSDGQASYKIFRIEKGKIIKSVEMNAPNYHYEECSCYPDSSEITCVCRDNWHGSNRPWVSFNQNLEYQIGYICSGVFGDNPRPNDKTGSCGPVSSNGANGVKGFSFKYGNGVWIGRTKSISSRKGFEMIWDPNGWTGTDNKFSIKQDIVGIHEWSGYSGSFVQHPELTGLDCIRPCFWVELIRGRPEENTIWTSGSSISFCGVNSDTVGWSWPDGAELPFTIDK

SEQ ID NO: 25800 - protein, 469 aa, synthetic construct
  REGION 1..469: note = neuraminidase__InfluenzaA__AIM56791
MNPNQKIITIGSVCMTIGMANLILQIGNIISIWVSHSIQLGNQSQIETCNQSVITYENNTWVNQTYVNISNTNFAAGQSVVSVKLAGNSSLCPVSGWAIYSKDNSVRIGSKGDVFVIREPFISCSPLECRTFFLTQGALLNDKHSNGTIKDRSPYRTLMSCPIGEVPSPYNSRFESVAWSASACHDGISWLTIGISGPDSGAVAVLKYNGIITDTIKSWRNNILRTQESECACVNGSCFTIMTDGPSDGQASYKIFRIEKGKIVKSVEMNAPNYHYEECSCYPDSSEITCVCRDNWHGSNRPWVSFNQNLEYQIGYICSGVFGDNPRPNDKTGSCGPVSSNGANGVKGFSFKYGNGVWIGRTKSISSRKGFEMIWDPNGWTGTDNNFSIKQDIVGIKEWSGYSGSFVQHPELTGLDCIRPCFWVELIRGRPEENTIWTSGSSISFCGVNSDTVGWSWPDGAELPFTIDK

SEQ ID NO: 25801 - protein, 469 aa, synthetic construct
  REGION 1..469: note = neuraminidase__InfluenzaA__AIM56813
MNPNQKIITIGSVCMTIGMANLILQIGNIISIWVSHSIQIGNQSQIETCNQSVITYENNTWVNQTYVNISNTNFAAGQSVVSVKLAGNSSLCPVSGWAIYSKDNSVRIGSKGDVFVIREPFISCSPLECRTFFLTQGALLNDKHSNGTIKDRSPYRTLMSCPIGEVPSPYNSKFESVAWSASACHDGINWLTIGISGPDNGAVAVLKYNGIITDTIKSWRNNILRTQESECACVNGSCFTIMTDGPSDGQASYKIFRIEKGKIVKSVEMNAPNYHYEECSCYPDSSEITCVCRDNWHGSNRPWVSFNQNLEYQIGYICSGVFGDNPRPNDKTGSCGPVSSNGANGVKGFSFKYGNGVWIGRTKSISSRKGFEMIWDPNGWTGTDNKFSIKQDIVGINEWSGYSGSFVQHPELTGLDCIRPCFWVELIRGRPEENTIWTSGSSISFCGVNSDTVGWSWPDGAELPFTIDK

SEQ ID NO: 25802 - protein, 469 aa, synthetic construct
  REGION 1..469: note = neuraminidase__InfluenzaA__AIM56824
MNPNQKIITIGSVCMTIGMANLILQIGNIISIWVSHSIQIGNQSQIETCNQSVITYENNTWVNQTYVNISNTNFAAGQSVVSVKLAGNSSLCPVSGWAIYSKDNSVRIGSKGDVFVIREPFISCSPLECRTFFLTQGALLNDKHSNGTIKDRSPYRTLMSCPIGEVPSPYNSRFESVAWSASACHDGINWLTIGISGPDSGAVAVLKYNGIITDTIKSWRNNILRTQESECACVNGSCFTIMTDGPSDGQASYKIFRIEKGKIVKSVEMNAPNYHYEECSCYPDSSEITCVCRDNWHGSNRPWVSFNQNLEYQIGYICSGVFGDNPRPNDKTGSCGPVPSNGANGVKGFSFKYSNGVWIGRTKSISSRKGFEMIWDPNGWTGTDNKFSIKQDIVGINEWSGYSGSFVQHPELTGLDCIRPCFWVELIRGRPEENTIWTSGSSISFCGVNSDTVGWSWPDGAELPFTIDK

SEQ ID NO: 25803 - protein, 465 aa, synthetic construct
  REGION 1..465: note = neuraminidase__InfluenzaA__AIN76385
MNPNQKILCTSATAIIIGAIAVLIGIANLGLNIGLHLKPGCNCSHSQPGTTNTSQTIINNYYNETNITNIQMEERTSRNFNSLTKGLCTINSWHIYGKDNAVRIGESSDVLVTREPYVSCDPDECRFYALSQGTTIRGKHSNGTIHDRSQYRALISWPLSSPPTVYNSRVECIGWSSTSCHDGKSRMSICISGPNNNASAVVWYNRRPVAEINTWARNILRTQESECVCHNGICPIVFTDGSATGPADTRIYYFKEGKILKWESLTGTAKHIEECSCYGERTGITCTCKDNWQGSNRPVIQIDPVAMTHTSQYICSPVLTDTPRPNDPNIGKCNDPYPGNNNNGVKGFSYLDGANTWLGRTISTASRSGYEMLKVPNALTDDRSKPIQGQTIVLNADWSGYSGSFMDYWAEGDCYRACFYVELIRGRPKEDKVWWTSNSIVSMCSSTEFLGQWNWPDGARIEYFL

SEQ ID NO: 25804 - protein, 469 aa, synthetic construct; identical to SEQ ID NO: 14087
  REGION 1..469: note = neuraminidase__InfluenzaA__AIP93105

SEQ ID NO: 25805 - protein, 469 aa, synthetic construct
  REGION 1..469: note = neuraminidase__InfluenzaA__AIP93117
MNPNQKIITIGSVSLTIATVCFLMQIAILATTVTLHFKQHECDSPASNQVMPCEPIIIERNITEIVYLNNTTIEKEICPEVVEYRNWSKPQCQITGFAPFSKDNSIRLSAGGDIWVTREPYVSCDPGKCYQFALGQGTTLDNKHSNGTIHDRIPHRTLLMNELGVPFHLGTKQVCVAWSSSSCHDGKAWLHVCVTGDDRNATASFIYDGRLVDSIGSWSQNILRTQESECVCINGTCTVVMTDGSASGRADTRILFIKEGKIVHISPLSGSAQHIEECSCYPRYPDVRCICRDNWKGSNRPVIDINMEDYSIDSSYVCSGLVGDTPRNDDSSSNSNCRDPNNERGNPGVKGWAFDNGDDVWMGRTISKDLRSGYETFKVIGGWSTPNSKSQVNRQVIVDNNNWSGYSGIFSVEGKSCINRCFYVELIRGRPQETRVWWTSNSIVVFCGTSGTYGTGSWPDGANINFMPI

SEQ ID NO: 25806 - protein, 469 aa, synthetic construct
  REGION 1..469: note = neuraminidase__InfluenzaA__AIR93973
MNPNQKIITIGSVCMTIGMANLILQIGNIISIWISHSIQLGSRNQIEACNQSVITYENNTWVNQTYVNISNTNFAAGQSVVPVKLAGNSSLCPVSGWAIYSKDNSIRIGSKGDVFVIREPFISCSPLECRTFFLTQGALLNDKHSNGTIKDRSPYRTLMSCPIGEVPSPYNSRFESVAWSASACHDGINWLTIGISGPDNGAVAVLKYNGIITDTIKSWRNNILRTQESECVCVNGSCFTVMTDGPSNGQASYKIFRIEKGKIVKSVEMNAPNYHYEECSCYPDSSEITCVCRDNWHGSNRPWVSFNQNLEYQIGYICSGIFGDNPRPNDKTGSCGPVSSNGANGVKGFSFKYGNGVWIGRTKSISSRNGFEMIWDPNGWTETDNNFSIKQDIVGINEWSGYSGSFVQHPELTGLDCIRPCFWVELIRGRPKENTIWTSGSSISFCGVNSNTVGWSWPDGAELPFTIDK

SEQ ID NO: 25807 - protein, 469 aa, synthetic construct
  REGION 1..469: note = neuraminidase__InfluenzaA__AIR93984
MNPNQKIITIGSVCMTIGMANLILQIGNIISIWISHSIQLGNQNQIETCNQSVITYENNTWVNQTYVNISNTNFAAGQSVVSVKLAGNSSLCPVSGWAIYSKDNSIRIGSKGDVFVIREPFISCSPLECRTFFLTQGALLNDKHSNGTIKDRSPYRTLMSCPIGEVPSPYNSRFESVAWSASACHDGINWLTIGISGPDNGAVAVLKYNGIITDTIKSWRNNILRTQESECACVNGSCFTVMTDGPSNGQASYKIFRIEKGKIVKSVEINAPNYHYEECSCYPDSSEITCVCRDNWHGSNRPWVSFNQNLEYQIGYICSGIFGDNPRPNDKTGSCGPVSSNGANGVKGFSFKYGNGVWIGRTKSISSRNGFEMIWDPNGWTGTDNNFSIKQDIVGINEWSGYSGSFVQHPELTGLGCIRPCFWVELIRGRPKENTIWTSGSSISFCGVNSDTVGWSWPDGAELPFTIDK

SEQ ID NO: 25808 - protein, 469 aa, synthetic construct
  REGION 1..469: note = neuraminidase__InfluenzaA__AIR93995
MNPNQKIIIIGSVCMTIGMANLILQIGNIISIWISHSIQLGNQNQIETCNQSVITYENNTWVNQTYVNISNTNFAAGQSVVPVKLAGNSSLCPVSGWAIYSKDNSIRIGSKGDVFVIREPFISCSPLECRTFFLTQGALLNDKHSNGTIKDRSPYRTLMSCPIGEVPSPYNSRFESVAWSASACHDGINWLTIGISGPDNGAVAVLKYNGIITDTIKSWKNNILRTQESECVCVNGSCFTVMTDGPSNGQASYKIFRIEKGKIVKSVEMNAPNYHYEECSCYPDSSEITCVCRDNWHGSNRPWVSFNQNLEYQIGYICSGVFGDNPRPNDKTGSCGPVSSNGANGVKGFSFKYGNGVWIGRTKSISSRNGFEMIWDPNGWTGTDNNFSIKQDIIGINEWSGYSGSFVQHPELTGMDCIRPCFWVELIRGRPKENTIWTSGSSISFCGVNSDTVGWSWPDGAELPFTIDK

SEQ ID NO: 25809 - protein, 466 aa, synthetic construct
  REGION 1..466: note = neuraminidase__InfluenzaA__AIR94118
MNPNQKIIAIGSVSLIIAIICLLMQIAILTTTMTLHFRQNECNNSSNNQVMPCEPIIIERNTVHLNSTTIEREICPKVAEYKNWSKPQCQITGFAPFSKDNSIRLSAGGDIWVTREPYVSCSLDKCYQFALGQGTTLKNKHSNGTTHDRTPHRTLLMNELGVPFHLGTKQVCIAWSSSSCYDGKAWLHICVTGDDKNATASIIYNGMLVDSIGSWSKNILRTQESECVCINGTCAVVMTDGSASGKADTRVLFIKEGKIINISPLSGSAQHVEECSCYPRYPEVRCVCRDNWKGSNRPILYINMADYSIESSYVCSGLVGDTPRNDDSSSSSNCKDPNSERGAPGVKGWAFDDGNDVWMGRTIKNGSRSGYETFRVVNGWTVANSKSQVNRQVIVDSDDWSGYSGIFSVEGKKCINRCFYVELIRGRPQEPRVWWTSNSIIVFCGTSGTYGTGSWPDGANINFMPI

SEQ ID NO: 25810 - protein, 469 aa, synthetic construct
  REGION 1..469: note = neuraminidase__InfluenzaA__AIT38335
MNPNQKIITIGSVSLTIATICFLMQIAILVTTVTLHFKQYECNSPPTNQVMLCEPTIIERNITEIVYLTNTTIEKEICPKLVEYRNWSKPQCKITGFAPFSKDNSIRLSAGGDIWVTREPYVSCDPDKCYQFALGQGTTLNNRHSNDTVHDRTPYRTLLMNELGIPFHLGTKQVCIAWSSSSCHDGKAWLHVCVTGHDENATASFIYDGRLVDSIVSWSKRILRTQESECVCIDGTCTVVMTDGSASGRADTRILFIKEGKIIHISQLSGSAQHVEECSCYPRYPGVRCVCRDNWKGSNRPIVDINVKDYSINSSYVCSGLVGDTPRKNDSFSSSYCLNPNNEEGGHGVKGWAFDDGDDVWMGRTINEKLRSGYETFKVIKGWSKPNSKLQINRQVIVDRGNRSGYSGIFSVEGKGCINRCFYVELIRGRKQETEVWWTSNSIVVFCGTSGTYGTGSWPDGANINLMPI

SEQ ID NO: 25811 - protein, 469 aa, synthetic construct
  REGION 1..469: note = neuraminidase__InfluenzaA__AIT38346
MNPNQKIITIGSISLTIATICFLLQVAILVTTVTLHFKQFECNPTPNNQVMLCEPTVIERNITKIVYLTNTTVEKEICPKPAEYRNWSKPQCKITGFAPFSKDNSIRLSAGGDIWVTREPYVSCAPNKCYQFALGQGTTLNNRHSNDTVHDRTPYRTLLMNELGIPFHLGTKQVCIAWSSSSCHDGKAWLHVCVTGHDKNATASFIYDGRLVDSIGSWSKNILRTQESECVCINGTCTVVMTDGSASGRADTKILFIKEGKIIHISQLSGSAQHVEECSCYPRYPGVRCVCRDNWKGSNRPIVDINVRDYSIVSSYVCSGLVGDTPRKNDSFSSSHCLNPNNEEGGHGVKGWAFDDGDDVWMGRTISEKLRSGYETFKVIKGWSKPNSKLQINRQVIVDRGNRSGYSGIFSVEGKSCINRCFYVELIRGRKQETEVWWTSNSIVVFCGTSGTYGTGSWPDGADINLMPI

SEQ ID NO: 25812 - protein, 469 aa, synthetic construct
  REGION 1..469: note = neuraminidase__InfluenzaA__AIT38361
MNPNQKIITIGSISLTIATICFLMQVAILVTTVTLHFKQYECNSTPNNQVMLCEPTVIERNITKIVYLTNTTVVKEVCPKPAEYRNWSKPQCKITGFAPFSKDNSIRLSAGGDIWVTREPYVSCAPNKCYQFALGQGTTLNNRHSNDTVHDRTPYRTLLMNELGIPFHLGTKQVCIAWSSSSCYDGKAWLHVCVTGHDKNATASFIYDGRLVDSIGSWSKNILRTQESECVCINGTCTVVMTDGSASGRADTKILFIKEGKIIHISQLSGSAQHVEECSCYPRYPGVRCVCRDNWKGSNRPIVDINMRDYSIVSSYVCSGLVGDTPRENDSFSSSHCLNPNNEEGGHGVKGWAFDDGDDVWMGRTISEKLRSGYETFKVIKGWSKPNSKLQINRQVIVDRGNRSGYSGIFSVEGKSCINRCFYVELIRGRKQETEVWWTSNSIVVFCGTSGTYGTGSWPDGADINLMPI

SEQ ID NO: 25813 - protein, 469 aa, synthetic construct
  REGION 1..469: note = neuraminidase__InfluenzaA__AIT38375
MNPNQKIITIGSVCMTIGMVNLILQIGNIISIWISHSIQLGNQNQIEICNQSVITYENNTWVNQTYVNISNTNFAAGQSVVPVKLAGNSSLCSVSGWAIYSKDNSIRIGSKGDVFVIREPFISCSPLECRTFFLTQGALLNDKHSNGTIKDRSPYRTLMSCPIGEVPSPYNSRFESVAWSASACHDGINWLTIGISGPDNGAVAVLKYNGIITDTIKSWRNNILRTQESECACVNGSCFTVMTDGPSDGQASYKIFRIEKGKIVKSVEMNAPNYHYEECSCYPDSSEITCVCRDNWHGSNRPWVSFNQNLEYQIGYICSGIFGDNPRPNDKTGSCGPVSSNGANGVKGFSFKYGNGVWIGRTKSISSRNGFEMIWDPNGWTGTDNNFSIKQDIVGINEWSGYSGSFVQHPELTGLDCIRPCFWVELIRGRPKENTIWTSGSSISFCGVNSDTVGWSWPDGAELPFTIDK

SEQ ID NO: 25814 - protein, 469 aa, synthetic construct
  REGION 1..469: note = neuraminidase__InfluenzaA__AIT93148
MNPNQKIITIGSVCMTIGMANLILQIGNIISIWVSHSIQLGNQSQIETCNQSVITYENNTWVNQTYVNISNTNFAAGQSVVSVKLAGNSSLCPVSGWAIYSKDNSVRIGSKGDVFVIREPFISCSPLECRTFFLTQGALLNDKHSNGTIKDRSPYRTLMSCPIGEVPSPYNSRFESVAWSASACHDGINWLTIGISGPDSGAVAVLKYNGIITDTIKSWRNNILRTQESECACVNGSCFTIMTDGPSDGQASYKIFRIEKGKIVKSVEMNAPNYHYEECSCYPDSSEITCVCRDNWHGSNRPWVSFNQNLEYQIGYICSGVFGDNPRPNDKTGSCGPVSSNGANGVKGFSFKYGNGVWIGRTKSISSRKGFEMIWDPNGWTGTDNKFSIKQDIVGINEWSGYSGSFVQHPELTGLDCIRPCFWVELIRGRPEENTIWTSGSSISFCGVNSDTVGWSWPDGAELPFTIDK

SEQ ID NO: 25815 - protein, 469 aa, synthetic construct; identical to SEQ ID NO: 18640
  REGION 1..469: note = neuraminidase__InfluenzaA__AIU39701

SEQ ID NO: 25816 - protein, 469 aa, synthetic construct; identical to SEQ ID NO: 16738
  REGION 1..469: note = neuraminidase__InfluenzaA__AIU39703

SEQ ID NO: 25817 - protein, 469 aa, synthetic construct
  REGION 1..469: note = neuraminidase__InfluenzaA__AIU39705
MNPNQKIITIGSVCMTIGMANLILQIGNIISIWISHSIQLGNQSQIETCNQSVITYENNTWVNQTYVNISNTNFAAGQSVVSVKLAGNSSLCPVSGWAIYSKDNSIRIGSKGDVFVIREPFISCSPLECRTFFLTQGALLNDKHSNGTIKDRSPYRTLMSCPIGEVPSPYNSRFESVAWSASACHDGINWLTIGISGPDNGAVAVLKYNGIITDTIKSWRNNILRTQESECACVNGSCFTVMTDGPSDGQASYKIFRIEKGKIVKSVEMNAPNYHYEECSCYPDSSEITCVCRDNWHGSNRPWVSFNQNLEYQIGYICSGIFGDNPRPNDNTGSCGPVSSNGANGVKGFSFKYGNGVWIGRTKSISSRNGFEMIWDPNGWTGTDNNFSIKQDIVGINEWSGYSGSFVQHPELTGLDCIRPCFWVELIRGRPKENTIWTSGSSISFCGVNSDTVGWSWPDGAELPFTIDK

SEQ ID NO: 25818 - protein, 470 aa, synthetic construct
  REGION 1..470: note = neuraminidase__InfluenzaA__AIU46611
MNPNQKITCISATGMTLSVVSMLIGIANLGLNIGLHYKVGDSTNINIPNMNETSPTTTIINNHPQNNFTNITNIIVTRNEEGHLLNLTKPLCEVNSWHILSKDNAIRIGEDAHIIVTREPYLSCDPQGCRMFALSQGTTLRGKHANGTIHDRSPFRALVSWEMGQAPSPYNTRVECIGWSSTSCHDGISRMSICISGPNNNASAVVWYGGRPVTEIPSWAGNILRTQESECVCHGGICPVVMTDGPANNRAETKIIYFKEGKIKKIEELKGDAQHIEECSCYGASEMIKCICRDNWKGANRPVITIDPEMMTHTSKYLCSKILTDTSRPNDPTNGNCEAPITGGSPDPGVKGFAFLDGENSWLGRTISKDSRSGYEMLKVPNAETDTQSGAISHQIIVNNQNWSGYSGAFIDYWANKECFNPCFYVELIRGRPKESSVLWTSNSIVALCGSKERLGSWSWHDGAEIIYFK

SEQ ID NO: 25819 - protein, 469 aa, synthetic construct
  REGION 1..469: note = neuraminidase__InfluenzaA__AIV09221
MNPNQKIITIGSVCMTIGMANLILQIGNITSIWISHSIQIGNRNQIEACNQSVITYENNTWVNQTYVNISNTNFAVGQSVVPVKLAGNSSLCPVSGWAIYSKDNSIRIGSKGDVFVIREPFISCSPLECRTFFLTQGALLNDKHSNGTIKDRSPYRTLMSCPIGEVPSPYNSRFESVAWSASACHDGINWLTIGISGPDNGAVAVLKYNGIITDTIKSWRNNILRTQESECVCVNGSCFTVMTDGPSNGQASYKIFRIEKGKIVKSVEMNAPNYHYEECSCYPDSSEITCVCRDNWHGSNRPWVSFNQNLEYQIGYICSGIFGDNPRPNDKTGSCGPVPSNGANGVKGFSFKYGNGVWIGRTKSISSRNGFEMIWDPNGWTETDNDFSIKQDIVGINEWSGYSGSFVQHPELTGLDCIRPCFWVELIRGRPKENTIWTSGSSISFCGVNSNTVDWSWPDGAELPFTIDK

SEQ ID NO: 25820 - protein, 469 aa, synthetic construct
  REGION 1..469: note = neuraminidase__InfluenzaA__AIW60703
MNPNQKIITIGSVSLTIATICFLMQIVILVTTVTLHFKQYECNSPPNNQVMLCEPTIIERNITEIVYLTNTTIEKEICPKLAEYRNWSKPQCKITGFAPFSKDNSIRLSAGGDIWVTREPYVSCDPDKCYQFALGQGTTLNNRHSNDTVHDRTPYRTLLMNELGVPFHLGTKQVCIAWSSSSCHDGKAWLHVCVTGHDENATASFIYDGRLVDSIGSWSKKILRTQESECVCINGTCTVVMTDGSASGRADTKILFIEEGKIVHISPLSGSAQHVEECSCYPQYSGVRCVCRDNWKGSNRPIVDINVKDYSIVSSYVCSGLVGDTPRKNDSSSSSHCLNPNNEEGGHGVKGWAFDDGNDVWMGRTISEKLRSGYETFKVIGGWSKPNSKLQINRQVIVDRGNRSGYSGIFSVEGKNCINRCFYVELIRGRKQETEVWWTSNSIVVFCGTSGTYGTGSWPDGADINLMPI

SEQ ID NO: 25821 - protein, 469 aa, synthetic construct
  REGION 1..469: note = neuraminidase__InfluenzaA__AIW60704
MNPNQKIITIGSVSLTIATICFLMQIVILVTTVTLHFKQYECNSPPNNQVMLCEPTIIERNITEIVYLTNTTIEKEICPKLAEYRNWSKPQCKITGFAPFSKDNSIRLSAGGDIWVTREPYVSCDPDKCYQFALGQGTTLNNRHSNDIVHDRTPYRTLLMNELGVPFHLGTKQVCIAWSSSSCHDGKAWLHVCVTGHDENATASFIYDGRLVDSIGSWSKKILRTQESECVCINGTCTVVMTDGSASGRADTKILFIEEGKIVHISPLSGSAQHVEECSCYPQYSGVRCVCRDNWKGSNRPIVDINVKDYSIVSSYVCSGLVGDTPRKNDSSSSSHCLNPNNEEGGHGVKGWAFDDGNDVWMGRTISEKLRSGYETFKVIGGWSKPNSKLQINRQVIVDRGNRSGYSGIFSVEGKNCINRCFYVELIRGRKQETEVWWTSNSIVVFCGTSGTYGTGSWPDGADINLMPI

SEQ ID NO: 25822 - protein, 469 aa, synthetic construct
  REGION 1..469: note = neuraminidase__InfluenzaA__AIW60705
MNPNQKIITIGSVSLTIATICFLMQIAILVTTVTLHFKQYECNSPPNNQVMLCEPTIIERNITEIVYLTNTTIEKEICPKLAEYRNWSKPQCKITGFAPFSKDNSIRLSAGGDIWVTREPYVSCDPDKCYQFALGQGTTLNNRHSNDTVHDRTPYRTLLMNELGVPFHLGTKQVCIAWSSSSCHDGKAWLHVCVTGHDENATASFIYDGRLVDSIGSWSKKILRTQESECVCINGTCTVVMTDGSASGRADTKILFIEEGKIVHISPLSGSAQHVEECSCYPRYSGVRCVCRDNWKGSNRPIVDINVKDYSIVSSYVCSGLVGDTPRKNDSSSSSHCLNPNNEEGGHGVKGWAFDDGNDVWMGRTISEKFRSGYETFKVIGGWSKPNSKLQINRQVIVDRGNRSGYSGIFSVEGKSCINRCFYVELIRGRKQETEVWWTSNSIVVFCGTSGTYGTGSWPDGADINLMPI

SEQ ID NO: 25823 - protein, 469 aa, synthetic construct; identical to SEQ ID NO: 25822
  REGION 1..469: note = neuraminidase__InfluenzaA__AIW60706

SEQ ID NO: 25824 - protein, 469 aa, synthetic construct
  REGION 1..469: note = neuraminidase__InfluenzaA__AIW60708
MNPNQKIITIGSVSLTIATICFLMQIAILVTTVTLHFKQYECNSPPNNQVMLCEPTIIERNITEIVYLTNTTIEKEICPKLAEYRNWSKPQCNITGFAPFSKDNSIRLSAGGDIWVTREPYVSCDPDKCYQFALGQGTTLNNRHSNDTVHDRTPYRTLLMNELGVPFHLGTKQVCIAWSSSSCHDGKAWLHVCVTGHDENATASFIYNGRLVDSIGSWSKKILRTQESECVCINGTCTVVMTDGSASGKADTKILFIEEGKIVHISPLSGSAQHVEECSCYPRYPGVRCVCRDNWKGSNRPIVDINVKDYSIVSSYVCSGLVGDTPRKNDSSSSSHCLNPNNEEGGHGVKGWAFDDGNDVWMGRTISEKLRSGYETFKVIEGWSNPNSKLQINRQVIVDRGNSSGYSGIFSVEGKSCINRCFYVELIRGRKQETEVWWTSNSIVVLCGTSGTYGTGSWPDGADINLMPI

SEQ ID NO: 25825 - protein, 469 aa, synthetic construct
  REGION 1..469: note = neuraminidase__InfluenzaA__AIW60710
MNPNQKIITIGSVSLTIATICFLMQIAILVTTVTLHFKQYECNSPPNNQVMLCEPTIIERNITEIVYLTNTTIEKEICPKLAEYRNWSKPQCNITGFAPFSKDNSIRLSAGGDIWVTREPYVSCDPDKCYQFALGQGTTLNNGHSNDTVHDRTPYRTLLMNELGVPFHLGTKQVCIAWSSSSCHDGKAWLHVCVTGDDENATASFIYNGRLVDSIGSWSKKILRTQESECVCINGTCTVVMTDGSASGKADTKILFIEEGKIVHTSSLSGSAQHVEECSCYPRYPGVRCVCRDNWKGSNRPTVDINVKDYSIVSSYVCSGLVGDTPRKNDSSSSSHCLDPNNEEGGHGVKGWAFDDGNDVWMGRTISEKLRSGYETFKVIEGWSKPNSKLQINRQVIVDRGNRSGYSGIFSVESKSCINRCFYVELIRGRKQETEVLWTSNSIVVFCGTSGTYGTGSWPDGADINLMPI

SEQ ID NO: 25826 - protein, 469 aa, synthetic construct; identical to SEQ ID NO: 14591
  REGION 1..469: note = neuraminidase__InfluenzaA__AIW60711

SEQ ID NO: 25827 - protein, 469 aa, synthetic construct; identical to SEQ ID NO: 14591
  REGION 1..469: note = neuraminidase__InfluenzaA__AIW60712

SEQ ID NO: 25828 - protein, 469 aa, synthetic construct
  REGION 1..469: note = neuraminidase__InfluenzaA__AIW60713
MNPNQKIITIGSVSLTISTICFFMQIAILITTVTLHFKQYEFSSPPNNQVMLCEPTIIERNITEIVYLTNTTIEKEICPKLAEYRNWSKPQCDITGFAPFSKDNSIRLSAGGDIWVTREPYVSCDPDKCYQFALGQGTTLNNVHSNDTVHDRTPYRTLLMNELGVPFHLGTKQVCIAWSSSSCHDGKAWLHVCVTGDDKNATASFIYNGRLVDSIVSWSKEILRTQESECVCINGTCTVVMTDGSASGKADTKILFIEEGKIVHTSTLSGSAQHVEECSCYPRYPGVRCVCRDNWKGSNRPIVDINIKDYSIASSYVCSGLVGDTPRKNDSSSSSHCLDPNNEEGGHGVKGWAFDDGNDVWMGRTISEKLRSGYETFKVIEGWSNPNSKLQINRQVIVDRGNRSGYSGIFSVEGKSCINRCFYVELIRGRKEETEVLWTSNSIVVFCGTSGTYGTGSWPDGADINLMPI

SEQ ID NO: 25829 - protein, 469 aa, synthetic construct
  REGION 1..469: note = neuraminidase__InfluenzaA__AIW60714
MNPNQKIITIGSVSLTISTICFFMQIAILITTVTLHFKQYEFSSPPNNQVMLCEPTIIERNITEIVYLTNTTIEKEICPKLAEYRNWSKPQCDITGFAPFSKDNSIRLSAGGDIWVTREPYVSCDPDKCYQFALGQGTTLNNVHSNDTVHDRTPYRTLLMNELGVPFHLGTKQVCIAWSSSSCHDGKAWLHVCVTGDDKNATASFIYNGRLVDSIVSWSKEILRTQESECVCINGTCTVVMTDGSASGKADTKILFIEEGKIVHTSTLSGSAQHVEECSCYPRYPGVRCVCRDNWKGSNRPIVDINIKDYSIASSYVCSGLVGDTPRKNDSSSSSHCLDPNNEEGGHGVKGWAFDDGNDVWMGRTISEKLRSGYETFKVIEGWSNPNSKLQINRQVIVGRGNRSGYSGIFSVEGKSCINRCFYVELIRGRKEETEVLWTSNSIVVFCGTSGTYGTGSWPDGADINLMPI

SEQ ID NO: 25830 - protein, 469 aa, synthetic construct
  REGION 1..469: note = neuraminidase__InfluenzaA__AIW60715
MNPNQKIITIGSVSLTISTICFFMQIAILITTVTLHFKQYEFNSPPNNQVMLCEPTIIERNITEIVYLTNTTIEKEICPKLAEYRNWSKPQCDITGFAPFSKDNSIRLSAGGDIWVTREPYVSCDPDKCYQFALGQGTTLNNVHSNDTVRDRTPYRTLLMNELGVPFHLGTKQVCIAWSSSSCHDGKAWLHVCITGDDKNATASFIYNGRLVDSIVSWSKKILRTQESECVCINGTCTVVMTDGSASGKADTKILFIEEGKIVHTSTLSGSAQHVEECSCYPRYPGVRCVCRDNWKGSNRPIVDINIKDHSIVSSYVCSGLVGDTPRKNDSSSSSHCLDPNNEEGGHGVKGWAFDDGNDVWMGRTISEKSRLGYETFKVIEGWSNPKSKLQINRQVIVDRGNRSGYSGIFSVEGKSCINRCFYVELIRGRKEETEVLWTSNSIVVFCGTSGTYGTGSWPDGADINLMPI

SEQ ID NO: 25831 - protein, 469 aa, synthetic construct; identical to SEQ ID NO: 16511
  REGION 1..469: note = neuraminidase__InfluenzaA__AIW60716

SEQ ID NO: 25832 - protein, 469 aa, synthetic construct
  REGION 1..469: note = neuraminidase__InfluenzaA__AIY54970
MNPNQKIITIGSVSLTISTICFFMQIAILITTVTLHFKQYEFNSPPNNQVMLCEPTIIERNITEIVYLTNTTIEKEICPKLAEYRNWSKPQCNITGFAPFSKDNSIRLSAGGDIWVTREPYVSCDPDKCYQFALGQGTTLNNVHSNDTVHDRTPYRTLLMNELGVPFHLGTKQVCIAWSSSSCHDGKAWLHVCVTGDDENATASFIYNGRLVDSIVSWSKKILRTQESECVCINGTCTVVMTDGSASGKADTKILFIEEGKIVHTSTLSGSAQHVEECSCYPRYPGVRCVCRDNWKGSNRPIVDINIKDYSIVSSYVCSGLVGDTPRKTDSSSSSHCLDPNNEEGGHGVKGWAFDDGNDLWMGRTISQNLRSGYETFKVIEGWSNPNSKLQINRQVIVDRGNRSGYSGIFSVEGKSCINRCFYVELIRGRKQETEVLWTSNSIVVFCGTSGTYGTGSWPDGADINLMPI

SEQ ID NO: 25833 - protein, 469 aa, synthetic construct
  REGION 1..469: note = neuraminidase__InfluenzaA__AIY54974
MNPNQKIITIGSVSLTISTICFFMQIAILITTVTLHFKQYEFNSPPNNQVMLCEPTIIERNITEIVYLTNTTIEKEICPKLAEYRNWSKPQCDITGFAPFSKDNSIRLSAGGDIWVTREPYVSCDPDKCYQFALGQGTTLNNVHSNDTVHDRTPYRTLLMSELGVPFHLGTKQVCIAWSSSSCHDGKAWLHVCVTGDDKNATASFIYNGRLVDSIVSWSKKILRTQESECVCINGTCTVVMTDGSASGKADTKILFIEEGKIVHTSTLSGSAQHVEECSCYPRYPGVRCVCRDNWKGSNRPIVDINIKDYSIVSSYVCSGLVGDTPRKNDSSSSSHCLDPNNEEGGHGVKGWAFDDGNDVWMGRTISEKLRSGYETFKVIEGWSNPNSKLQINRQVKVDRGNRSGYSGIFSVEGKSCINRCFYVELIRGRKEETKVLWTSNSIVVFCGTSGTYGTGSWPDGADINLMPI

SEQ ID NO: 25834 - protein, 469 aa, synthetic construct
  REGION 1..469: note = neuraminidase__InfluenzaA__AIY54982
MNPNQKIITIGSVSLTISTICFFMQIAILITTVTLHFKQYEFNSPPNNQVMLCEPTIIERNITEIVYLTNTTIEKEICPKLAEYRNWSKPQCDITGFAPFSKDNSIRLSAGGDIWVTREPYVSCDPDKCYQFALGQGTTLNNVHSNDTVHDRTPYRTLLMNELGVPFHLGTKQVCIAWSSSSCHDGKAWLHVCVTGDDKNATASFIYNGRLVDSIVSWSKEILRTQESECVCINGTCTVVMTDGSASGKADTKILFIEEGKIVHTSTLSGSAQHVEECSCYPRYPGVRCVCRDNWKGSNRPIVDINIKDYSIVSSYVCSGLVGDTPRKNDSSSSSHCLDPNNEEGGHGVKGWAFDDGNDVWMGRTISEKFRSGYETFKVIEGWSNPNSKLQINRQVIVDRGNRSGYSGIFSVEGKSCINRCFYVELIRGRKEETEVLWTSNSIVVFCGTSGTYGTGSWPDGADINLMPI

SEQ ID NO: 25835 - protein, 469 aa, synthetic construct
  REGION 1..469: note = neuraminidase__InfluenzaA__AIY54990
MNPNQKIITIGSVSLTISTICFFMQIAILITTVTLHFKQYEFSSPPNNQVMLCEPTIIERNITEIVYLTNTTIEKEICPKLAEYRNWSKPQCGITGFAPFSKDNSIRLSAGGDIWVTREPYVSCDPDKCYQFALGQGTTLNNVHSNDTVHDRTPYRTLLMNELGVPFHLGTKQVCIAWSSSSCHDGKAWLHVCVTGDDKNATASFIYNGRLVDSIVSWSKEILRTQESECVCINGTCTVVMTDGSASGKADTKILFIEEGKIVHTSTLSGSAQHVEECSCYPRYPGVRCVCRDNWKGSNRPIVDINIKDYSIVSRYVCSGLVGDTPRKNDSSSSSHCLDPNNEEGGHGVKGWAFDDGNDVWMGRTISEKSRSGYETFKVIEGWSNPNSKLQINRQVIVDRGNRSGYSGIFSVEGKSCINRCFYVELIRGRKEETEVLWTSNSIVVFCGTSGTYGTGSWPDGADINLMPI

SEQ ID NO: 25836 - protein, 466 aa, synthetic construct
  REGION 1..466: note = neuraminidase__InfluenzaA__AJD78177
MNPNQKIIAIGSVSLIIAVICLLMQIAILTTTMTLHFMQNECSNPSNNQVMPCEPIIIERNTVHLNNTTIEREICPKAAEYKNWSKPQCQITGFAPFSKDNSIRLSAGGDIWVTREPYVSCSLDKCYQFALGQGTTLKNKHSNGTTHDRTPHRTLLMNELGVPFHLGTKQVCIAWSSSSCYDGKAWLHICVTGDDKNATASIIYDGMLVDSIGSWSKNILRTQESECVCINGTCAVVMTDGSASGKADTRVLFIREGKIINISPLSGSAQHVEECSCYPRYPEVRCVCRDNWKGSNRPILYINMADYSIESSYVCSGLVGDTPRNDDSSSSSNCRDPNNERGAPGVKGWAFDDGNDVWMGRTIKNGSRSGYETFRVVNGWTMANSKSQINRQVIVDSDDWSGYSGIFSVEGKKCINRCFYVELIRGRPQEPRVWWTSNSIIVFCGTSGTYGTGSWPDGANINFMPI

SEQ ID NO: 25837 - protein, 466 aa, synthetic construct
  REGION 1..466: note = neuraminidase__InfluenzaA__AJD78189
MNPNQKIIAIGSVSLIIAIICLLMQIAILTTTMTLHFRQNECNNSSNNQVMPCEPIIIERNTVHLNSTTIEREICPKVAEYKNWSKPQCQITGFAPFSKDNSIRLSAGGDIWVTREPYVSCSLDKCYQFALGQGTTLKNKHSNGTTHDRTSHRTLLMNELGVPFHLGTKQVCIAWSSSSCYDGKAWLHICVTGDDKNATASIIYNGMLVDSIGSWSKNILRTQESECVCINGTCAVVMTDGSASGKADTRVLFIREGKIINISPLSGSAQHVEECSCYPRYPEVRCVCRDNWKGSNRPILYINMADYSIESSYVCSGLVGDTPRNDDSSSSSNCKDPNSERGAPGVKGWAFDDGNDVWMGRTIKNGSRSGYETFRVLNGWTVANSKSQINRQVIVDSDDWSGYSGIFSVEGKKCINRCFYVELIRGRPQEPRVWWTSNSIIVFCGTSGTYGTGSWPDGANINFMPI

SEQ ID NO: 25838 - protein, 466 aa, synthetic construct
  REGION 1..466: note = neuraminidase__InfluenzaA__AJD78201
MNPNQKITAIGSVSLIIAIICLLMQIAILTTTMTLHFRQKECSNPSNNQVMPCEPIIIERNTVHLNSTTIEREICPKVAEYKNWSKPQCLITGFAPFSKDNSIRLSAGGDIWVTREPYVSCSPDKCYQFALGQGTTLKNKHSNGTTHDRTPHRTLLMNELGVPFHLGTKQVCIAWSSSSCYDGKAWLHICVTGDDKNATASIIYDGMLVDSIGSWSKNILRTQESECVCINGTCAVVMTDGSASGVADTRVLFIREGKIINIRPLSGSAQHVEECSCYPRYPEVRCVCRDNWKGSNRPIIYINMADYSIESSYVCSGLVGDTPRNDDSSSSSNCRDPNNERGAPGVKGWAFDDGNDVWMGRTIKNGSRSGYETFRVINGWTMANSKSQINRQVIVDSDDWSGYSGIFSVEGKKCINRCFYVELIRGRPQEPRVWWTSNSIIVFCGTSGTYGTGSWPDGANINFMPI

SEQ ID NO: 25839 - protein, 466 aa, synthetic construct
  REGION 1..466: note = neuraminidase__InfluenzaA__AJD78213
MNPNQKITAIGSVSLIIAIICLFMQIAILTTTMTLHFRQKECSNPSNNQVMPCEPIIIERNTVHLNSTTIEREICPKVAEYKNWSKPQCLITGFAPFSKDNSIRLSAGGDIWVTREPYVSCSPDKCYQFALGQGTTLKNKHSNGTTHDRTPHRTLLMNELGVPFHLGTKQVCIAWSSSSCYDGKAWLHICVTGDDKNATASIIYDGMLVDSIGSWSKNILRTQESECVCINGTCAVVMTDGSASGVADTRVLFIREGKIINIRPLSGSAQHVEECSCYPRYPEVRCVCRDNWKGSNRPIIYINMADYSIESSYVCSGLVGDTPRNDDSSSSSNCRDPNNERGAPGVKGWAFDDGNDVWMGRTIKNGSRSGYETFRVINGWTMANSKSQINRQVIVDSDDWSGYSGIFSVEGKKCINRCFYVELIRGRPQEPRVWWTSNSIIVFCGTSGTYGTGSWPDGANINFMPI

SEQ ID NO: 25840 - protein, 469 aa, synthetic construct; identical to SEQ ID NO: 22922
  REGION 1..469: note = neuraminidase__InfluenzaA__AJI80140

SEQ ID NO: 25841 - protein, 469 aa, synthetic construct; identical to SEQ ID NO: 22922
  REGION 1..469: note = neuraminidase__InfluenzaA__AJI80152

SEQ ID NO: 25842 - protein, 469 aa, synthetic construct; identical to SEQ ID NO: 25698
  REGION 1..469: note = neuraminidase__InfluenzaA__AJI80164

SEQ ID NO: 25843 - protein, 469 aa, synthetic construct; identical to SEQ ID NO: 25637
  REGION 1..469: note = neuraminidase__InfluenzaA__AJI80175

SEQ ID NO: 25844 - protein, 469 aa, synthetic construct; identical to SEQ ID NO: 25637
  REGION 1..469: note = neuraminidase__InfluenzaA__AJI80187

SEQ ID NO: 25845 - protein, 469 aa, synthetic construct; identical to SEQ ID NO: 25637
  REGION 1..469: note = neuraminidase__InfluenzaA__AJI80199

SEQ ID NO: 25846 - protein, 469 aa, synthetic construct; identical to SEQ ID NO: 25637
  REGION 1..469: note = neuraminidase__InfluenzaA__AJI80211

SEQ ID NO: 25847 - protein, 469 aa, synthetic construct; identical to SEQ ID NO: 23871
  REGION 1..469: note = neuraminidase__InfluenzaA__AJI80223

SEQ ID NO: 25848 - protein, 469 aa, synthetic construct; identical to SEQ ID NO: 25637
  REGION 1..469: note = neuraminidase__InfluenzaA__AJI80235

SEQ ID NO: 25849 - protein, 469 aa, synthetic construct; identical to SEQ ID NO: 23871
  REGION 1..469: note = neuraminidase__InfluenzaA__AJI80247

SEQ ID NO: 25850 - protein, 469 aa, synthetic construct; identical to SEQ ID NO: 25656
  REGION 1..469: note = neuraminidase__InfluenzaA__AJI80259

SEQ ID NO: 25851 - protein, 469 aa, synthetic construct; identical to SEQ ID NO: 22146
  REGION 1..469: note = neuraminidase__InfluenzaA__AJI80271

SEQ ID NO: 25852 - protein, 469 aa, synthetic construct; identical to SEQ ID NO: 25637
  REGION 1..469: note = neuraminidase__InfluenzaA__AJI80283

SEQ ID NO: 25853 - protein, 469 aa, synthetic construct
  REGION 1..469: note = neuraminidase__InfluenzaA__AJI80306
MNPNQKIITIGSVSLTISTICFFMQIAILITTVTLHFKQYEFNSPPNNQVMLCEPTIIERNITEIVYLTNTTIEKEICPKPAEYRNWSKPQCGITGFAPFSKDNSIRLSAGGDIWVTREPYVSCDPDKCYQFALGQGTTLNNVHSNNTVLDRTPYRTLLMNELGVPFHLGTKQVCIAWSSSSCHDGKAWLHVCITGDDKNATASFIYNGRLVDSVVSWSKEILRTQESECVCINGTCTVVMTDGSASGKADTKILFIEEGKIVHTSTLSGSAQHVEECSCYPRYPGVRCVCRDNWKGSNRPIVDINIKDHSIVSSYVCSGLVGDTPRKNDSSSSSHCLDPNNEEGGHGVKGWAFDDGNDVWMGRTINETSRLGYETFKVIEGWSNPKSKLQINKQVIVDRGDRSGYSGIFSVEGKSCINRCFYVELIRGRKEETEVLWTSNSIVVFCGTSGTYGTGSWPDGADLNLMPI

SEQ ID NO: 25854 - protein, 469 aa, synthetic construct
  REGION 1..469: note = neuraminidase__InfluenzaA__AJI80318
MNPNQKIITIGSVCMTIGMANLILQIGNIISIWISHSIQLGNQSQIEACNQNVITYENNTWVNQTYVNISNTNFATGQSVVSVKLAGNSSLCPVSGWAIYSKDNSVRIGSKGDVFVIREPFISCSPLECRTFFLTQGALLNDKHSNGTIKDRSPYRTLMSCPIGEVPSPYNSRFESVAWSASACHDGINWLTIGISGPDSGAVAVLKYNGIITDTIKSWKNNILRTQESECACVNGSCFTIMTDGPSDGQASYKIFRIEKGKIVKSVEMNAPNYHYEECSCYPDSSEITCVCRDNWHGSNRPWVSFNQNLEYQIGYICSGVFGDNPRPNDKTGSCGPVSSNGANGVKGFSFKYGNGVWIGRTKSISSRKGFEMIWDPNGWTGTDNNFSIKQDIVGINEWSGYSGSFVQHPELTGLDCIRPCFWVELIRGRPKENTIWTSGSSISFCGVNSDTVGWSWPDGAELPFTIDK

SEQ ID NO: 25855 - protein, 469 aa, synthetic construct
  REGION 1..469: note = neuraminidase__InfluenzaA__AJI80329
MNPNQKIITIGSVCMTIGMANLILQIGNIISIWISHSIQLGNQSQIETCNQSVITYENNTWVNQTYVNISNTNFAAGQSVVSVKLAGNSSLCPVSGWAIYSKDNSVRIGSKGDVFVIREPFISCSPLECRTFFLTQGALLNDKHSNGTIKDRSPYRTLMSCPIGEVPSPYNSRFESVAWSASACHDGINWLTIGISGPDSGAVAVLKYNGIITDTIKSWKNNILRTQESECACVNGSCFTIMTDGPSDGQASYKIFRIEKGKIVKSVEMNAPNYHYEECSCYPDSSEITCVCRDNWHGSNRPWVSFNQNLEYQIGYICSGVFGDNPRPNDKTGSCGPVSSNGANGVKGFSFKYGNGVWIGRTKSISSRKGFEMIWDPNGWTGTDNNFSIKQDIVGINEWSGYSGSFVQHPELTGLDCIRPCFWVELIRGRPKENTIWTSGSSISFCGVNSDTVGWSWPDGAELPFTIDK

SEQ ID NO: 25856 - protein, 469 aa, synthetic construct
  REGION 1..469: note = neuraminidase__InfluenzaA__AJI80340
MNPNQKIITIGSVCMTIGMANLILQIGNIISIWISHSIQLGNQSQIETCNQSVITYENNTWVNQTYVNISNTNFAAGQSVVSVKLAGNSSLCPVSGWAIYSKDNSIRIGSKGDVFVIREPFISCSPLECRTFFLTQGALLNDKHSNGTIKDRSPYRTLMSCPIGEVPSPYNSRFESVAWSASACHDGINWLTIGISGPDSGAVAVLKYNGIITDTIKSWKNNILRTQESECACVNGSCFTIMTDGPSDGQASYKIFRIEKGKIVKSVEMNAPNYYYEECSCYPDSSEITCVCRDNWHGSNRPWVSFNQNLEYQIGYICSGIFGDNPRPNDKTGSCGPVSSNGANGVKGFSFKYGNGVWIGRTKSISSRKGFEMIWDPNGWTGTDNNFSIKQDIVGINEWSGYSGSFVQHPELTGLDCIRPCFWVELIRGRPKENTIWTSGSSISFCGVNSDTVGWSWPDGAELPFTIDK

SEQ ID NO: 25857 - protein, 469 aa, synthetic construct; identical to SEQ ID NO: 22146
  REGION 1..469: note = neuraminidase__InfluenzaA__AJI80351

SEQ ID NO: 25858 - protein, 469 aa, synthetic construct
  REGION 1..469: note = neuraminidase__InfluenzaA__AJI80363
MNPNQKIITIGSVSLTISTICFFMQIAILITTVTLHFKQYEFNSLPNNQVMLCEPTIIERNITEIVYLTNTTIEKEICPKPAEYRNWSKPQCGITGFAPFSKDNSIRLSAGGDIWVTREPYVSCDPDKCYQFALGQGTTLNNVHSNNTARDRTPYRTLLMNELGVPFHLGTKQVCIAWSSSSCHDGKAWLHVCITGDDKNATASFIYNGRLVDSVVSWSKEILRTQESECVCINGTCTVVMTDGSASGKADTKILFIEEGKIVHTSTLSGGAQHVEECSCYPRYPGVRCVCRDNWKGSNRPIVDINIKDHSIVSSYVCSGLVGDTPRKNDSSSSSHCLNPNNEEGGHGVKGWAFDDGNDVWMGRTINETSRLGYETFKVIEGWSNPKSKLQINRQVIVDRGDRSGYSGIFSVEGKSCINRCFYVELIRGRKEETEVLWTSNSIVVFCGTSGTYGTGSWPDGADLNLMPI

SEQ ID NO: 25859 - protein, 469 aa, synthetic construct
  REGION 1..469: note = neuraminidase__InfluenzaA__AJI80375
MNPNQKIITIGSVSLTISTICLFMQIAILITTVTLHFKQHEFNSPPNNQVMLCEPTIIERNITEIVYLTNTTIEKEICPKPAEYRNWSKPQCGITGFAPFSKDNSIRLSAGGDIWVTREPYVSCDPDKCYQFALGQGTTLNNVHSNNTVRDRTPYRTLLMNELGVPFHLGTKQVCIAWSSSSCHDGKAWLHVCITGDDKNATASFIYNGRLVDSVVSWSKEILRTQESECVCINGTCTVVMTDGSASGKADTKILFIEEGKIVHTSTLSGSAQHVEECSCYPRYPGVRCVCRDNWKGSNRPIVDINIKDHSIVSSYVCSGLVGDTPRKNDSSSSSHCLDPNNEEGGHGVKGWAFDDGNDVWMGRTINETSRLGYETFKVIEGWSNPKSKLQINRQVIVDRGDRSGYSGIFSVEGKSCINRCFYVELIRGRKEETEVLWTSNSIVVFCGTSGTYGTGSWPDGADLNLMPI

SEQ ID NO: 25860 - protein, 469 aa, synthetic construct; identical to SEQ ID NO: 25676
  REGION 1..469: note = neuraminidase__InfluenzaA__AJI80387

SEQ ID NO: 25861 - protein, 469 aa, synthetic construct; identical to SEQ ID NO: 25676
  REGION 1..469: note = neuraminidase__InfluenzaA__AJI80398

SEQ ID NO: 25862 - protein, 469 aa, synthetic construct; identical to SEQ ID NO: 25676
  REGION 1..469: note = neuraminidase__InfluenzaA__AJI80409

SEQ ID NO: 25863 - protein, 469 aa, synthetic construct; identical to SEQ ID NO: 25676
  REGION 1..469: note = neuraminidase__InfluenzaA__AJI80420

SEQ ID NO: 25864 - protein, 469 aa, synthetic construct; identical to SEQ ID NO: 25676
  REGION 1..469: note = neuraminidase__InfluenzaA__AJI80431

SEQ ID NO: 25865 - protein, 469 aa, synthetic construct; identical to SEQ ID NO: 25671
  REGION 1..469: note = neuraminidase__InfluenzaA__AJI80442

SEQ ID NO: 25866 - protein, 469 aa, synthetic construct; identical to SEQ ID NO: 25676
  REGION 1..469: note = neuraminidase__InfluenzaA__AJI80454

SEQ ID NO: 25867 - protein, 469 aa, synthetic construct; identical to SEQ ID NO: 25671
  REGION 1..469: note = neuraminidase__InfluenzaA__AJI80465

SEQ ID NO: 25868 - protein, 469 aa, synthetic construct; identical to SEQ ID NO: 25676
  REGION 1..469: note = neuraminidase__InfluenzaA__AJI80477

SEQ ID NO: 25869 - protein, 469 aa, synthetic construct; identical to SEQ ID NO: 25676
  REGION 1..469: note = neuraminidase__InfluenzaA__AJI80488

SEQ ID NO: 25870 - protein, 469 aa, synthetic construct; identical to SEQ ID NO: 25698
  REGION 1..469: note = neuraminidase__InfluenzaA__AJI80499

SEQ ID NO: 25871 - protein, 469 aa, synthetic construct; identical to SEQ ID NO: 25676
  REGION 1..469: note = neuraminidase__InfluenzaA__AJI80510

SEQ ID NO: 25872 - protein, 469 aa, synthetic construct; identical to SEQ ID NO: 25698
  REGION 1..469: note = neuraminidase__InfluenzaA__AJI80521

SEQ ID NO: 25873 - protein, 469 aa, synthetic construct
  REGION 1..469: note = neuraminidase__InfluenzaA__AJJ98767
MNPNQKIITIGSVSLTISTICFFMQIAILITTVTLHFKQYEFNSPSNNQVMLCEPTIIERNITEIVYLTNTTIEKEKCPKPAEYRNWSKPQCDITGFAPFSKDNSIRLSAGGDIWVTREPYVSCDPDKCYQFALGQGTTLNNVHSNNTVRDRTPYRTLLMNELGVPFHLGTKQVCIAWSSSSCHDGKAWLHVCITGDDKNATASFIYNGRLVDSVVSWSKEILRTQESECVCINGTCTVVMTDGSASGKADTKILFIEEGKIVHTSTLSGSAQHVEECSCYPRYPGVRCVCRDNWKGSNRPIVDINIKDHSIVSSYVCSGLVGDTPRKNDSSSSSHCLDPNNEEGGHGVKGWAFDDGDDVWMGRTISEKSRLGYETFKVIEGWSNPKSKLQINRQVIVDRGNRSGYSGIFSVEGKSCINRCFYVELIRGRKEETDVLWTSNSIVVFCGTSGTYGTGSWPDGADINLMPI

SEQ ID NO: 25874 - protein, 469 aa, synthetic construct
  REGION 1..469: note = neuraminidase__InfluenzaA__AJJ98779
MNPNQKIITIGSVSLTISTICFFMQTAILITTVTLHFKQYEFNSPPNNQVMLCEPTIIERNITEIVYLTNTTIEKEICPKPAEYRNWSKPQCDITGFAPFSKDNSIRLSAGGDIWVTREPYVSCDPDKCYQFALGQGTTLNNVHSNDTVRDRTPYRTLLMNELGVPFHLGTKQVCIAWSSSSCHDGKAWLHVCITGDDKNATASFIYNGRLVDSIVSWTKEILRTQESECVCINGTCTVVMTDGSASGKADTKILFIEEGKIVHTSTLSGSAQHVEECSCYPRYPGVRCVCRDNWKGSNRPIVDINIKDHSIVSSYVCSGLVGDTPRKNDSSSSSHCLDPNNEEGGHGVKGWAFDDGNDVWMGRTISEKSRLGYETFKVIEGWSNPKSKLQINRQVIVDRGNRSGYSGIFSVEGKSCINRCFYVELIRGRKEETEVLWTSNSIVVFCGTSGTYGTGSWPDGADINLMPI

SEQ ID NO: 25875 - protein, 469 aa, synthetic construct; identical to SEQ ID NO: 22146
  REGION 1..469: note = neuraminidase__InfluenzaA__AJJ98791

SEQ ID NO: 25876 - protein, 469 aa, synthetic construct
  REGION 1..469: note = neuraminidase__InfluenzaA__AJJ98803
MNPNQKIITIGSVSLTISTICFFMQIAILITTVTLHFKQYEFNSPPNNQVMLCEPTIIERNITEIVYLTNTTIEKEICPKPAEYRNWSKPQCGITGFAPFSKDNSIRLSAGGDIWVTREPYVSCDPDKCYQFALGQGTTLNNVHSNNKVRDRTPYRTLLMNELGVPFHLGTKQVCIAWSSSSCHDGKAWLHVCITGDDKNATASFIYNGRLVDSVVSWSKEILRTQESECVCINGTCTVVMTDGSASGKADTKILFIEEGKIVHTSTLSGSAQHVEECSCYPRYPGVRCVCRDNWKGSNRPIVDINIKDHSIVSSYVCSGLVGDTPRKNDSSSSSHCLDPNNEEGGHGVKGWAFDDGNDVWMGRTINETSRLGYETFKVIEGWSNPKSKLQINRQVIVDRGDRSGYSGIFSVEGKSCINRCFYVELIRGRKEETEVLWTSNSIVVFCGTSGTYGTGSWPDGADLNLMPI

SEQ ID NO: 25877 - protein, 469 aa, synthetic construct; identical to SEQ ID NO: 22146
  REGION 1..469: note = neuraminidase__InfluenzaA__AJJ98815

SEQ ID NO: 25878 - protein, 469 aa, synthetic construct
  REGION 1..469: note = neuraminidase__InfluenzaA__AJJ98827
MNPNQKIITIGSVSLTISTICFFMQIAILITTVTLHFKQYEFNSPPNNQVMLCEPTIIERNITEIVYLTNTTIEKEICPKPAEYRNWSKPQCGITGFAPFSKDNSIRLSAGGDIWVTREPYVSCDPDKCYQFALGQGTTLNNVHSNNTVRDRTPYRTLLMNELGVPFHLGTKQVCIAWSSSSCHDGKAWLHVCITGDDKNATASFIYNGRLVDSVVSWSKEILRTQESECVCINGTCTVVMTDGSASGKADTKILFIEEGKIVHTSTLSGSAQHVEECSCYPRYPGVRCVCRDNWKGSNRPIVDINIKDHNIVSSYVCSGLVGDTPRKNDSSSSSHCLDPNNEEGGHGVKGWAFDDGNDVWMGRTINETSRLGYETFKVIEGWSNPKSKLQINRQVIVDRGDRSGYSGIFSVEGKSCINRCFYVELIRGRKEETEVLWTSNSIVVFCGTSGTYGTGSWPDGADLNLMPI

SEQ ID NO: 25879 - protein, 469 aa, synthetic construct; identical to SEQ ID NO: 21143
  REGION 1..469: note = neuraminidase__InfluenzaA__AJJ98839

SEQ ID NO: 25880 - protein, 469 aa, synthetic construct; identical to SEQ ID NO: 19518
  REGION 1..469: note = neuraminidase__InfluenzaA__AJJ98851

SEQ ID NO: 25881 - protein, 469 aa, synthetic construct
  REGION 1..469: note = neuraminidase__InfluenzaA__AJJ98863
MNPNQKIITIGSVSLTISTICFFMQIAILITTVTLHFKQYEFNSPPNNQVMLCEPTIIERNITEIVYLTNTTIEKEICPKPAEYRNWSKPQCDITGFAPFSKDNSIRLSAGGDIWVTREPYVSCDPDKCYQFALGQGTTLNNVHSNNTVRERTPYRTLLMNELGVPFHLGTKQVCIAWSSSSCHDGKAWLHVCITGDDKNATASFIYNGRLVDSVVSWSKEILRTQESECICINGTCTVVMTDGSASGKADTKILFIEEGKIVHTSTLSGSAQHVEECSCYPRYPGVRCVCRDNWKGSNRPIVDINMKDHSIVSSYVCSGLVGDTPRKNDSSSSSHCLDPNNEEGGHGVKGWAFDDGNDVWMGRTISEKSRLGYETFKVIEGWSNPKSKLQINRQVIVDRGNRSGYSGIFSVEGKSCINRCFYVELIRGRKEETEVLWTSNSIVVFCGTSGTYGTGSWPDGADINLMPI

SEQ ID NO: 25882 - protein, 469 aa, synthetic construct
  REGION 1..469: note = neuraminidase__InfluenzaA__AJJ98875
MNPNQKIITIGSVSLTISTICFFMQIAILITTVTLHFKQYEFNSPPNNQVMLCEPTIIERNITEIVYLTNTTIEKEICPKPAEYRNWSKPQCDITGFAPFSKDNSIRLSAGGDIWVTREPYVSCDPDKCYQFALGQGTTLNNVHSNDTVRNRTPYRTLLMNELGVPFHLGTKQVCIAWSSSSCHDGKAWLHVCITGDDKNATASFIYNGRLVDSVVSWSKEILRTQESECVCINGTCTVVMTDGSASGKADTKILFIEEGKIVHTSTLSGSAQHVEECSCYPRYPGVRCVCRDNWKGSNRPIVDINIKDHSIVSSYVCSGLVGDTPRKNDSSSSSHCLDPNNEEGGHGVKGWAFDDGNDVWMGRTISEKSRLGYETFKVIEGWSNPKSKLQINRQVIVDRGNRSGYSGIFSVEGKSCINRCFYVELIRGRKEETEVLWTSNSIVVFCGTSGTYGTGSWPDGADINLMPI

SEQ ID NO: 25883 - protein, 469 aa, synthetic construct
  REGION 1..469: note = neuraminidase__InfluenzaA__AJJ98887
MNPNQKIITIGSVSLTISTICFFMQIAILITTVTLHFKQYEFNSPPNNQVMLCEPTIIERNITEIVYLTNTTIEKEICPKLAEYRNWSKPQCDITGFAPFSKDNSIRLSAGGDIWVTREPYVSCDPDKCYQFALGQGTTLNNVHSNNTVRNRTPYRTLLMNELGVPFHLGTKQVCIAWSSSSCHDGKAWLHVCITGDDKNATASFIYNGRLVDSIVSWSKEILRTQESECVCINGTCTVVMTDGSASGKADTKILFIEEGKIVHTSTLSGSAQHVEECSCYPRYPGVRCVCRDNWKGSNRPIVDINIKDHSIVSSYVCSGLVGDTPRKNDSSSSSHCLDPNNEEGGHGVKGWAFDDGNDVWMGRTISEKSRLGYETFKVIEGWSNPKSKLQINRQVIVDRGNRSGYSGIFSVEGKSCINRCFYVELIRGRKEETDVLWTSNSIVVFCGTSGTYGTGSWPDGADINLMPI

SEQ ID NO: 25884 - protein, 469 aa, synthetic construct
  REGION 1..469: note = neuraminidase__InfluenzaA__AJJ98899
MNPNQKIITIGSVSLTISTICFFMQTAILITTVTLHFKQYEFNSPPNNQVMLCEPTIIERNITEIVYLTNTTIEKEICPKLAEYRNWSKPQCDITGFAPFSKDNSIRLSAGGDIWVTREPYVSCDPDKCYQFALGQGTTLNNVHSNNTVRNRTPYRTLLMNELGVPFHLGTKQVCIAWSSSSCHDGKAWLHVCITGDDKNATASFIYNGRLVDSIVSWSKEILRTQESECVCINGTCTVVMTDGSASGKADTKILFIEEGKIVHTSTLSGSAQHVEECSCYPRYPGVRCVCRDNWKGSNRPIVDINIKDHSIVSSYVCSGLVGDTPRKNDSSSSSHCLDPNNEEGGHGVKGWAFDDGNDVWMGRTISEKSRLGYETFKVIEGWSNPKSKLQINRQVIVDRGNRSGYSGIFSVEGKSCINRCFYVELIRGRKEETEVLWTSNSIVVFCGTSGTYGTGSWPDGADINLMPI

SEQ ID NO: 25885 - protein, 469 aa, synthetic construct; identical to SEQ ID NO: 22146
  REGION 1..469: note = neuraminidase__InfluenzaA__AJJ98911

SEQ ID NO: 25886 - protein, 469 aa, synthetic construct; identical to SEQ ID NO: 22922
  REGION 1..469: note = neuraminidase__InfluenzaA__AJJ98923

SEQ ID NO: 25887 - protein, 469 aa, synthetic construct
  REGION 1..469: note = neuraminidase__InfluenzaA__AJJ98935
MNPNQKIITIGSVSLTISTICFFMQIAILITTVTLHFKRYEFNSPPNNQVMLCEPTIIERNITEIVYLTNTTIEKEICPKPAEYRNWSKPQCGITGFAPFSKDNSIRLSAGGDIWVTREPYVSCDPDKCYQFALGQGTTLNNVHSNNTVRDRTPYRTLLMNELGVPFHLGTKQVCIAWSSSSCHDGKAWLHVCITGDDKNATASFIYNGRLVDSVVSWSKEILRTQESECVCINGTCTVVMTDGSASGKADTKILFIEEGKIVHTSTLSGSAQHVEECSCYPRYPGVRCVCRDNWKGSNRPIVDINIKDHSIVSSYVCSGLVGDTPRKNDSSSSSHCLDPNNEEGGHGVKGWAFDDGNDVWMGRTINETSRLGYETFKVIEGWSNPKSKLQINRQVIVDRGDRSGYSGIFSVEGKSCINRCFYVELIRGRKEETEVLWTSNSIVVFCGTSGTYGTGSWPDGADLNLMPI

SEQ ID NO: 25888 - protein, 469 aa, synthetic construct
  REGION 1..469: note = neuraminidase__InfluenzaA__AJJ98947
MNPNQKIITIGSVSLTISTICFFMQIAILITTVTLHFKQYEFNSPPNNQVTLCEPTIIERNITEIVYLTNTTIEKEICPKLAEYRNWSKPQCDITGFAPFSKDNSIRLSAGGDIWVTREPYVSCDPDKCYQFALGQGTTLNNVHSNNTVRDRTPYRTLLMNELGVPFHLGTKQVCIAWSSSSCHDGKAWLHVCITGNDKNATASFIYNGRLVDSVVSWSKEILRTQESECVCINGTCTVVMTDGSASGKADTKILFIEEGKIVHTSTLSGSAQHVEECSCYPRYPGVRCVCRDNWKGSNRPIVDINIKDHSIVSSYVCSGLVGDTPRKNDSSSSSHCLDPNNEEGGHGVKGWAFDDGNDVWMGRTINETSRLGYETFKVIEGWSNPKSKLQINRQVIVDRGNRSGYSGIFSVEGKSCINRCFYVELIRGRKEETEVLWTSNSIVVFCGTSGTYGTGSWPDGADLNLMPI

SEQ ID NO: 25889 - protein, 469 aa, synthetic construct
  REGION 1..469: note = neuraminidase__InfluenzaA__AJJ98971
MNPNQKIITIGSVSLTISTICFFMQIAILITTVTLHFKQYEFNSPPNNQVMLCEPTIIERNITEIVYLTNTTIEKEICPKLAEYRNWSKPQCDITGFAPFSKDNSIRLSAGGDIWVTREPYVSCDPDKCYQFALGQGTTLNNVHSNDTVRNRTPYRTLLMNELGVPFHLGTKQVCIAWSSSSCHDGKAWLHVCITGDDKNATASFIYNGRLVDSVVSWSKEILRTQESECVCINGTCTVVMTDGSASGKADTKILFIEEGKIVHTSTLSGSAQHVEECSCYPRYPGVRCVCRDNWKGSNRPIVDINIKDHSIVSSYVCSGLVGDTPRKNDSSSSSHCLDPNNEEGGHGVKGWAFDDGNDVWMGRTISEKSRLGYETFKVIEGWSNPKSKLQINRQVIVDRGNRSGYSGIFSVEGKSCINRCFYVELIRGRKEETEVLWTSNSIVVFCGTSGTYGTGSWPDGADINLMPI

SEQ ID NO: 25890 - protein, 469 aa, synthetic construct
  REGION 1..469: note = neuraminidase__InfluenzaA__AJJ98995
MNPNQKIITIGSVSLTISTICFFMQIAILITTVTLHFKQYEFNSPPNNQVMLCEPTIIERNMTEIVYLTNTTIEKEICPKPAEYRNWSKPQCDITGFAPFSKDNSIRLSAGGDIWVTREPYVSCDPDKCYQFALGQGTTLNNVHSNNIVRDRTPYRTLLMNELGVPFHLGTKQVCIAWSSSSCHDGKAWLHVCITGDDKNATASFIYNGRLVDSVVSWSKEILRTQESECVCINGTCTVVMTDGSASGKADTKILFIEEGKIVHTSTLSGSAQHVEECSCYPRYPGVRCVCRDNWKGSNRPIVDINIKDHSIVSSYVCSGLVGDTPRKNDSSSSSHCLDPNNEEGGHGVKGWAFDDGNDVWMGRTINETSRLGYETFKVIEGWSNPKSKLQINRQVIVDRSDRSGYSGIFSVEGKSCINRCFYVELIRGRKEETEVLWTSNSIVVFCGTSGTYGTGSWPDGADLNLMPI

SEQ ID NO: 25891 - protein, 469 aa, synthetic construct; identical to SEQ ID NO: 21143
  REGION 1..469: note = neuraminidase__InfluenzaA__AJJ99007

SEQ ID NO: 25892 - protein, 469 aa, synthetic construct
  REGION 1..469: note = neuraminidase__InfluenzaA__AJJ99019
MNPNQKIITIGSVSLTISTICFFMQTAILITTVTLHFKQCEFNSPPNNQVMLCEPTIIERNITEIVYLTNTTIEKEICPKLAEYRNWSKPQCDITGFAPFSKDNSIRLSAGGDIWVTREPYVSCDPDKCYQFALGQGTTLNNVHSNNTVRDRTPYRTLLMNELGVPFHLGTKQVCIAWSSSSCHDGKAWLHVCITGDDKNATASFIYNGRLVDSVVSWSKEILRTQESECVCINGTCTVVMTDGSASGKADTKILFIEEGKIVHTSTLSGSAQHVEECSCYPRYPGVRCVCRDNWKGSNRPIVDINIKDHSIVSNYVCSGLVGDTPRKNDSSSSSHCLDPNNEEGGHGVKGWAFDDGNDVWMGRTISEKSRFGYETFKVIEGWSNPKSKLQINRQVIVDRGNRSGYSGIFSVEGKSCINRCFYVELIRGRKEETEVLWTSNSIVVFCGTSGTYGTGSWPDGADINLMPI

SEQ ID NO: 25893 - protein, 469 aa, synthetic construct
  REGION 1..469: note = neuraminidase__InfluenzaA__AJJ99031
MNPNQKIITIGSVSLTISTICFFMQIAILITTVTLHFKQYEFNSPPNNQVMLCEPTIIERNITEIVYLTNTTIEKEICPKLAEYRNWSKPQCDITGFAPFSKDNSIRLSAGGDIWVTREPYVSCDPDKCYQFALGQGTTINNVHSNDTVRDRTPYRTLLMNELGVPFHLGTKQVCIAWSSSSCHDGKAWLHVCITGDDKNATASFIYNGRLVDSVVSWSKEILRTQESECVCINGTCTVVMTDGSASGKADTKILFIEEGKIVHTSTLSGSAQHVEECSCYPRYPGVRCVCRDNWKGSNRPIVDINIKDHSIVSSYVCSGLVGDTPRKNDSSSSSHCLDPNNEEGGHGVKGWAFDDGNDVWMGRTISEKSRLGYETFKVIEGWSNPKSKLQINRQVIVDRGNRSGYSGIFSVEGKSCINRCFYVELIRGRKEETEVLWTSNSIVVFCGTSGTYGTGSWPDGADINLMPI

SEQ ID NO: 25894 - protein, 469 aa, synthetic construct
  REGION 1..469: note = neuraminidase__InfluenzaA__AJJ99043
MNPNQKIITIGSVSLTISTICFFMQIAILITTVTLHFKQYEFNSPPNNQVMLCEPTIIERNITEIVYLTNTTIEKEICPKLAEYRKWSKPQCNITGFAPFSKDNSIRLSAGGDIWVTREPYVSCDPDKCYQFALGQGTTLNNVHSNDTVRDRTPYRTLLMNELGVPFHLGTKQVCIAWSSSSCHDGKAWLHVCVTGDDKNATASFIYNGRLVDSIVSWSKEILRTQESECVCINGTCTVVMTDGSASGKADTKILFIEEGKIVHTSTLSGSAQHVEECSCYPRYPGVRCVCRDNWRGSNRPIVDINMKDYSIVSSYVCSGLVGDTPRKNDSSSSGHCLDPNNEEGGHGVKGWAFDDGNDVWMGRTISEKSRSGYETFKVIEGWSNPNSKLQINRQVIVDRGNRSGYSGIFSVEGKSCINRCFYVELIRGRKEETEVLWTSNSIVVFCGTSGTYGTGSWPDGADINLMPI

SEQ ID NO: 25895 - protein, 469 aa, synthetic construct
  REGION 1..469: note = neuraminidase__InfluenzaA__AJJ99067
MNPNQKIITIGSVSLTISTICFFMQIAILITTVTLHFKQYEFNSPPNNQVMLCEPTIIERNITEIVYLTNTTIEKEICPKPAEYRNWSKPQCGITGFAPFSKDNSIRLSAGGDIWVTREPYVSCDPDKCYQFALGQGTTLNNVHSNNTVRGRTPYRTLLMNELGVPFHLGTKQVCIAWSSSSCHDGKAWLHVCITGDDKNATASFIYNGRLVDSVVSWSKDILRTQESECVCINGTCTVVMTDGSASGKADTKILFIEEGKIVHTSTLSGSAQHVEECSCYPRYPGVRCVCRDNWKGSNRPIVDINIKDHSIVSSYVCSGLVGDTPRKNDSSSSSHCLDPNNEEGGHGVKGWAFDDGNDVWMGRTINETSRLGYETFKVIEGWSNPKSKLQINRQVIVDRGDRSGYSGIFSVEGKSCINRCFYVELIRGRKEETEVLWTSNSIVVFCGTSGTYGTGSWPDGADLNLMPI

SEQ ID NO: 25896 - protein, 469 aa, synthetic construct
  REGION 1..469: note = neuraminidase__InfluenzaA__AJJ99079
MNPNQKIITIGSVSLTISTICFFMQIAILITTVTLHFKQYEFNSPPNNQVMLCEPTIIERNITEIVYLTNTTIEKEICPKPAEYRNWSKPQCGITGFAPFSKDNSIRLSAGGDIWVTREPYVSCDPDKCYQFALGQGTTLNNVHSNNTVRNRTPYRTLLMNELGVPFHLGTKQVCIAWSSSSCHDGKAWLHVCITGDDKNATASFIYNGRLVDSVVSWSKEILRTQESECVCINGTCTVVMTDGSASGKADTKILFIEEGKIVHTSTLSGSAQHVEECSCYPRYPGVRCVCRDNWKGSNRPIVDINIKDHSIVSSYVCSGLVGDTPRKNDSSSSSHCLDPNNEEGGHGVKGWAFDDGNDVWMGRTINETSRLGYETFKVIEGWSNPKSKLQINRQVIVDRGDRSGYSGIFSVEGKSCINRCFYVELIRGRKEETEVLWTSNSIVVFCGTSGTYGTGSWPDGADLNLMPI

SEQ ID NO: 25897 - protein, 469 aa, synthetic construct
  REGION 1..469: note = neuraminidase__InfluenzaA__AJJ99091
MNPNQKIITIGSVSLTISTICFFMQIAILITTVTLHFKQYEFNSPPNNQVMLCEPTIIERNITEIVYLTNTTIEKEICPKPAEYRNWSKPQCGITGFAPFSKDNSIRLSAGGDIWVTREPYVSCDPDKCYQFALGQGTTLNNVHSNNTVRDRTPYRTLLMNELGVPFHLGTKQVCIAWSSSSCHDGKAWLHVCITGDDKNATASFIYNGRLVDSVVSWSKEILRTQESECVCINGTCTVVMTDGSASGKADTKILFIEEGKIVHTSTLSGSAQHVEECSCYPRYPGVRCVCRDNWKGSNRPIVDINIKDHSIVSSYVCSGLVGDTPRKNDSSSSSHCLDPNNEEGGHGVKGWAFDDGNDLWMGRTINETSRLGYETFKVIEGWSNPKSKLQINRQVIVDRGDRSGYSGIFSVEGKSCINRCFYVELIRGRKEETEVLWTSNSIVVFCGTSGTYGTGSWPDGADLNLMPI

SEQ ID NO: 25898 - protein, 469 aa, synthetic construct
  REGION 1..469: note = neuraminidase__InfluenzaA__AJJ99103
MNPNQKIITIGSVSLTISTICFFMQIAILITTVTLHFKQYEFNSPPNNQVMLCEPTIIERNMTEIVYLTNTTIEKEICPKPAEYRNWSKPQCDITGFAPFSKDNSIRLSAGGDIWVTREPYVSCDPDKCYQFALGQGTTLNNVHSNNTVRNRTPYRTLLMNELGVPFHLGTKQVCIAWSSSSCHDGKAWLHVCITGDDKNATASFIYNGRLVDSVVSWSKEILRTQESECVCINGTCTVVMTDGSASGKADTKILFIEEGKIVHTSTLSGSAQHVEECSCYPRYPGVRCVCRDNWKGSNRPIVDINIKDHSIVSSYVCSGLVGDTPRKNDSSSSSHCLDPNNEEGGHGVKGWAFDDGNDVWMGRTINETSRLGYETFKVIEGWSNPKSKLQINRQVIVDRSDRSGYSGIFSVEGKSCINRCFYVELIRGRKEETEVLWTSNSIVVFCGTSGTYGTGSWPDGADLNLMPI

SEQ ID NO: 25899 - protein, 469 aa, synthetic construct; identical to SEQ ID NO: 25365
  REGION 1..469: note = neuraminidase__InfluenzaA__AJJ99115

SEQ ID NO: 25900 - protein, 469 aa, synthetic construct; identical to SEQ ID NO: 24285
  REGION 1..469: note = neuraminidase__InfluenzaA__AJJ99127

SEQ ID NO: 25901 - protein, 469 aa, synthetic construct; identical to SEQ ID NO: 25573
  REGION 1..469: note = neuraminidase__InfluenzaA__AJJ99139

SEQ ID NO: 25902 - protein, 469 aa, synthetic construct
  REGION 1..469: note = neuraminidase__InfluenzaA__AJJ99151
MNPNQKIITIGSVSLTISTICFFMQIAILITTVTLHFKQYEFNSPPNNQVMLCEPTIIERNITEIVYLTNTTIEKEICPKPAEYRNWSKPQCDITGFAPFSKDNSIRLSAGGDIWVTREPYVSCDPDKCYQFALGQGTTLNNVHSNNTVRDRTPYRTLLMNELGVPFHLGTKQVCIAWSSSSCHDGKAWLHVCITGDDKNATASFIYNGRLVDSVVSWSKEILRTQESECVCINGTCTVVMTDGSASGKADTKILFIEEGKIVHTSTLSGSAQHVEECSCYPRYPGVRCVCRDNWKGSNRPIVDINIKDHSIVSSYVCSGLVGDTPRKNDSSSSSHCLDPNNEEGGHGVKGWAFDDGNDVWMGRTISEKSRLGYETFKVIEGWSNPKSKLQINRQVIVDRGNRSGYSGIFSVEGKSCINRCFYVELIRGRKEETEVLWTSNSIVVFCGTSGTYGTGSWPDGADINLMPI

SEQ ID NO: 25903 - protein, 469 aa, synthetic construct; identical to SEQ ID NO: 16599
  REGION 1..469: note = neuraminidase__InfluenzaA__AJJ99163

SEQ ID NO: 25904 - protein, 469 aa, synthetic construct
  REGION 1..469: note = neuraminidase__InfluenzaA__AJJ99175
MNPNQKIITIGSVSLTISTICLFMQIAILITTVTLHFKQYEFNSPPNNQVMLCEPTIIERNITEIVYLTNTTIEKEICPKLAEYRNWSKPQCDITGFAPFSKDNSIRLSAGGDIWVTREPYVSCDPDKCYQFALGQGTTLNNVHSNNTVRDRTPYRTLLMNELGVPFHLGTKQVCIAWSSSSCHDGKAWLHVCITGDDKNATASFIYNGRLVDSVVSWSKEILRTQESECVCINGTCTVVMTDGSASGKADTKILFIEEGKIVHTSTLSGSAQHVEECSCYPRYPGVRCVCRDNWKGSNRPIVDINIKDHSIVSSYVCSGLVGDTPRKNDSSSSSHCLDPNNEEGGHGVKGWAFDDGNDVWMGRTISEKSRLGYETFKVIEGWSNPKSKLQINRQVIVDRGNRSGYSGIFSVEGKSCINRCFYVELIRGRKEETEVLWTSNSIVVFCGTSGTYGTGSWPDGTDINLMPI

SEQ ID NO: 25905 - protein, 469 aa, synthetic construct
  REGION 1..469: note = neuraminidase__InfluenzaA__AJJ99199
MNPNQKIITIGSVSLTISTICFFMQIAILITTVTLHFKQYEFNSPPNNQVMLCEPTIIERNITEIVYLTNTTIEKEICPKLAEYRNWSKPQCDITGFAPFSKDNSIRLSAGGDIWVTREPYVSCDPDKCYQFALGQGTTLNNVHSNDTVRNRTPYRTLLMNELGVPFHLGTKQVCIAWSSSSCHDGKAWLHVCITGDDKNATASFIYNGRLVDSIVSWSKEILRTQESECVCINGTCTVVMTDGSASGKADTKILFIEEGKIVHTSTLSGSAQHVEECSCYPRYPGVRCVCRDNWKGSNRPIVDINIKDHSIVSSYVCSGLVGDTPRKNDSSSSSHCLDPNNEEGGHGVKGWAFDDGNDVWMGRTISEKSRLGYETFKVIEGWSNPKSKLQINRQVIVDRGNRSGYSGIFSVEGKSCINRCFYVELIRGRKEETEVLWTSNSIVVFCGTSGTYGTGSWPDGADINLMPI

SEQ ID NO: 25906 - protein, 469 aa, synthetic construct; identical to SEQ ID NO: 16743
  REGION 1..469: note = neuraminidase__InfluenzaA__AJJ99211

SEQ ID NO: 25907 - protein, 469 aa, synthetic construct
  REGION 1..469: note = neuraminidase__InfluenzaA__AJJ99223
MNPNQKIITIGSVSLTISTICFFMQIAILITTVTLHFKQYEFNSPPNNQVMLCEPTIIERNITEIVYLTNTTIEKEICPKLAEYRNWSKPQCDITGFAPFSKDNSIRLSAGGDIWVTREPYVSCDPDKCYQFALGQGTTLNNVHSNDTVRNRTPYRTLLMNELGVPFHLGTKQVCIAWSSSSCHDGKAWLHVCITGDDKNATASFIYNGRLVDSIVSWSKEILRTQESECVCINGTCTVVMTDGSASGEADTKILFIEEGKIVHTSTLSGSAQHVEECSCYPRYPGVRCVCRDNWKGSNRPIVDINIKDHSIVSSYVCSGLVGDTPRKNDSSSSSHCLDPNNEEGGHGVKGWAFDDGNDVWVGRTISEKSRLGYETFKVIEGWSNPKSKLQINRQVIVDRGNRSGYSGIFSVEGKSCINRCFYVELIRGRKEETEVLWTSNSIVVFCGTSGTYGTGSWPDGADINLMPI

SEQ ID NO: 25908 - protein, 469 aa, synthetic construct
  REGION 1..469: note = neuraminidase__InfluenzaA__AJJ99235
MNPNQKIITIGSVSLTISTICFFMQIAILITTVTLHFKQYEFNSPPNNQVMLCEPTIIERNITEIVYLTNTTIEKEICPKPAEYRNWSKPQCDITGFAPFSKDNSIRLSAGGDIWVTREPYVSCDPDKCYQFALGQGTTLNNVHSNDTVRDRTPYRTLLMNELGVPFHLGTKQVCIAWSSSSCHDGKAWLHVCITGDDKNATASFIYNGRLVDSIVSWSKEILRTQESECVCINGTCTVVMTDGSASGEADTKILFIEEGKIVHTSTLSGSAQHVEECSCYPRYPGVRCVCRDNWKGSNRPIVDINIKDHSIVSSYVCSGLVGDTPRKNDSSSSSHCLDPNNEEGGHGVKGWAFDDGNDVWMGRTISEKSRLGYETFKVIEGWSNPKSKLQINRQVIVDRGNRSGYSGIFSVEGKSCINRCFYVELIRGRKEETEVLWTSNSIVVFCGTSGTYGTGSWPDGADINLMPI

SEQ ID NO: 25909 - protein, 469 aa, synthetic construct
  REGION 1..469: note = neuraminidase__InfluenzaA__AJJ99246
MNPNQKIITIGSVCMTIGMANLILQIGNIISIWISHSIQLGNQSQIETCNQNVITYENNTWVNQTYVNISNTNFAAGQSVVSVKLAGNSSLCPVSGWAIYSKDNSVRIGSKGDVFVIREPFISCSPLECRTFFLTQGALLNDKHSNGTIKDRSPYRTLMSCPIGEVPSPYNSRFESVAWSASACHDGINWLTIGISGPDSGAVAVLKYNGIITDTIKSWRNNILRTQESECACLNGSCFTIMTDGPSDGQASYKIFRIEKGKIVKSVEMNAPNYHYEECSCYPDSSEITCVCRDNWHGSNRPWVSFNQNLEYQIGYICSGIFGDNPRPNDKTGSCGPVSSSGANGVKGFSFKYGNGVWIGRTKSISSRKGFEMIWDPNGWTGTDNNFSIKQDIVGINEWSGYSGSFVQHPELTGLDCIRPCFWVELIRGRPKENTIWTSGSSISFCGVNSDTVGWSWPDGAELPFTIDK

SEQ ID NO: 25910 - protein, 469 aa, synthetic construct
  REGION 1..469: note = neuraminidase__InfluenzaA__AJJ99257
MNPNQKIITIGSVCMTIGMANLILQIGNIISIWISHSIQLGNQNQIETCNQSVITYENNTWVNQTYVNISNTNFAAGQSVVSVKLAGNSSLCPVSGWAIYSKDNSIRIGSKGDVFVIREPFISCSPLECRTFFLTQGALLNDKHSNGTIKDRSPYRTLMSCPIGEVPSPYNSRFESVAWSASACHDGINWLTIGISGPDNGAVAVLKYNGIITDTIKSWRNNILRTQESECACVNGSCFTIMTDGPSDGQASYKIFRIEKGKIVKSVEMNAPNYHYEECSCYPDSSEITCVCRDNWHGSNRPWVSFNQNLEYQIGYICSGIFGDNPRPNDKTGSCGPVPSNGANGVKGFSFKYGNGVWIGRTKSISSRKGFEMIWDPNGWTGTDNSFSIKQDIVGTNEWSGYSGSFVQHPELTGLDCIRPCFWVELIRGRPKENTIWTSGSSISFCGVNSGTVGWSWPDGAELPFTIDK

SEQ ID NO: 25911 - protein, 470 aa, synthetic construct; identical to SEQ ID NO: 16632
  REGION 1..470: note = neuraminidase__InfluenzaA__AJJ99269

SEQ ID NO: 25912 - protein, 469 aa, synthetic construct; identical to SEQ ID NO: 20958
  REGION 1..469: note = neuraminidase__InfluenzaA__AJJ99280

SEQ ID NO: 25913 - protein, 469 aa, synthetic construct; identical to SEQ ID NO: 20709
  REGION 1..469: note = neuraminidase__InfluenzaA__AJJ99291

SEQ ID NO: 25914 - protein, 470 aa, synthetic construct
  REGION 1..470: note = neuraminidase__InfluenzaA__AJJ99303
MNPNQKIITIGSISIAIGIISLMLQIGNIISIWASHSIQTGSQNNTGICNQRIITYENSTWVNHTYVNINNTNVVAGEDKTSVTLAGNSSLCSISGWAIYTKDNSIRIGSKGDVFVIREPFISCSHLECRTFFLTQGALLNDKHSNGTVKDRSPYRALMSCPLGEAPSPYNSKFESVAWSASACHDGMGWLTIGISGPDNGAVAVLKYNGIITGTIKSWKKQILRTQESECVCMNGSCFTIMTDGPSNKAASYKIFKIEKGKVTKSMELNAPNFHYEECSCYPDTGIVMCVCRDNWHGSNRPWVSFNQNLDYQIGYICSGVFGDNPRPEDGEGSCNPVTVDGANGVKGFSYKYDNGVWIGRTKSNRLRKGFEMIWDPNGWTNTDSDFSVKQDVVAITDWSGYSGSFVQHPELTGLDCIRPCFWVELVRGLPRENTTIWTSGSSISFCGVNSDTANWSWPDGAELPFTIDK

SEQ ID NO: 25915 - protein, 469 aa, synthetic construct
  REGION 1..469: note = neuraminidase__InfluenzaA__AJJ99314
MNPNQKIITIGSACMTIGMANLILQIGNIISIWISHSIQLGNQNQIETCNQSVITYENNTWVNQTYVNISNTNFAAGQSVVSVKLAGNSSLCPVSGWAIYSKDNSIRIGSKGDVFVIREPFISCSPLECRTFFLTQGALLNDKHSNGTIKDRSPYRTLMSCPIGEVPSPYNSRFESVAWSASACHDGINWLTIGISGPDNGAVAVLKYNGIITDTIKSWRNNILRTQESECACVNGSCFTVMTDGPSDGQASYKIFRIEKGKIVKSVEMNAPNYHYEECSCYPDSSEITCVCRDNWHGSNRPWVSFNQNLEYQIGYICSGIFGDNPRPNDKTGSCGPVSSNGANGVKGFSFKYGNGVWIGRTKSISSRNGFEMIWDPNGWTGTDNNFSIKQDIVGINEWSGYSGSFVQHPELTGLDCIRPCFWVELIRGRPKENTIWTSGSSISFCGVNSDTVGWSWPDGAELPFTIDK

SEQ ID NO: 25916 - protein, 470 aa, synthetic construct
  REGION 1..470: note = neuraminidase__InfluenzaA__AJJ99326
MNPNQKIITIGSISIAIGIISLMLQIGNIISIWASHSIQTGSQNNTGICNQRIITYENSTWVNHTYVNINNTNVVAGEDKTSVTLAGNSSLCSISGWAIYTKDNSIRIGSKGDVFVIREPFISCSHLECRTFFLTQGALLNDKHSNGTVKDRSPYRALMSCPLGEAPSPYNSKFESVAWSASACHDGLGWLTIGISGPDNGAVAVLKYNGIITGTIKSWKKQILRTQESECVCMNGSCFTIMTDGPSNKAASYKIFKIEKGKVTKSIELNAPNFYYEECSCYPDTGIVMCVCRDNWHGSNRPWVSFNQNLDYQIGYICSGVFGDNPRPEDGEGSCNPVTVDGANGVKGFSYKYGNGVWIGRTKSNRLRKGFEMIWDPNGWTNTDSDFSVKQDVVAITDWSGYSGSFVQHPELTGLDCIRPCFWVELVRGLPRENTTIWTSGSSISFCGVNSDTANWSWPDGAELPFTIDK

SEQ ID NO: 25917 - protein, 469 aa, synthetic construct; identical to SEQ ID NO: 18382
  REGION 1..469: note = neuraminidase__InfluenzaA__AJJ99337

SEQ ID NO: 25918 - protein, 469 aa, synthetic construct; identical to SEQ ID NO: 17845
  REGION 1..469: note = neuraminidase__InfluenzaA__AJJ99348

SEQ ID NO: 25919 - protein, 469 aa, synthetic construct; identical to SEQ ID NO: 16738
  REGION 1..469: note = neuraminidase__InfluenzaA__AJJ99359

SEQ ID NO: 25920 - protein, 469 aa, synthetic construct
  REGION 1..469: note = neuraminidase__InfluenzaA__AJJ99370
MNPNQKIITIGSVCMIIGMANLILQIGNIISIWISHSIQLGNQSQIETCNQSVITYENNTWVNQTYVNISNTNFAAGQSVVSVKLAGNSSLCPVSGWAIYSKDNSIRIGSKGDVFVIREPFISCSPLECRTFFLTQGALLNDKHSNGTIKDRSPHRTLMSCPIGEVPSPYNSRFESVAWSASACHDGINWLTIGISGPDNGAVAVLKYNGIITDTIKSWRNNILRTQESECACVNGSCFTIMTDGPSDRQASYKIFRIEKGKIVKSVEMNAPNYHYEECSCYPDSSEITCVCRDNWHGSNRPWVSFNQNLEYQIGYICSGIFGDNPRPNDKTGSCGPVSSNGANGVKGFSFKYGNGVWIGRTKSISSRKGFEMIWDPNGWTGTDNNFSIKQDIVGINEWSGYSGSFVQHPELTGLDCIRPCFWVELIRGRPKENTIWTSGSSISFCGVNSDTVGWSWPDGAELPFTIDK

SEQ ID NO: 25921 - protein, 469 aa, synthetic construct; identical to SEQ ID NO: 20257
  REGION 1..469: note = neuraminidase__InfluenzaA__AJJ99381

SEQ ID NO: 25922 - protein, 469 aa, synthetic construct
  REGION 1..469: note = neuraminidase__InfluenzaA__AJJ99392
MNPNQKIITIGSVCMTIGMANLILQIGNIISIWISHSIQLGNQNQIETCNQSVITYENNTWVNQTYVNISNTNFAAGQSVVSVKLAGNSSLCPVSGWAIYSKDNSIRIGSKGDVFVIREPFISCSPLECRTFFLTQGALLNDKHSNGTIKDRSPYRTLMSCPIGEVPSPYNSRFESVAWSASACHDGINWLTIGISGPDNGAVAVLKYNGIITDTIKSWRNNILRTQESECACVNGSCFTVMTDGPSDGQASYKIFRIEKGKIVKSVEMNAPNYHYEECSCYPDSSEITCVCRDNWHGSNRPWVSFNQNLEYQIGYICSGIFGDNPRPNDKTGSCGPVSPNGANGVKGFSFKYGNGVWIGRTKSISSRNGFEMIWDPNGWTGTDNNFSIKQDIVGINEWSGYSGSFVQHPELTGLDCIRPCFWVELIRGRPKENTIWTSGSSISFCGVNSDTVGWSWPDGAKLPFTIDK

SEQ ID NO: 25923 - protein, 469 aa, synthetic construct; identical to SEQ ID NO: 16738
  REGION 1..469: note = neuraminidase__InfluenzaA__AJJ99403

SEQ ID NO: 25924 - protein, 470 aa, synthetic construct; identical to SEQ ID NO: 17461
  REGION 1..470: note = neuraminidase__InfluenzaA__AJJ99415

SEQ ID NO: 25925 - protein, 470 aa, synthetic construct
  REGION 1..470: note = neuraminidase__InfluenzaA__AJJ99427
MNPNQKIITIGSISIAIGIISLMLQIGNIISIWASHSIQTGSQNNTGICNQRIITYENSTWVNHTYVNINNTNVVAGEDKTSVTLAGNSSLCSISGWAVYTKDNSIRIGSKGDVFVIREPFISCSHLECRTFFLTQGALLNDKHSNGTVKDRSPYRALMSCPLGEAPSPYNSKFESVAWSASACHDGMGWLTIGISGPDNGAVAVLKYNGIITGTIKSWKKQILRTQESECVCMNGSCFTIMTDGPSDKAASYKIFKIEKGKVTKSIELNAPNFYYEECSCYPDTGIVMCVCRDNWHGSNRPWVSFNQNLDYQIGYICSGVFGDNPRPEDGEGSCNPVTVDGANGVKGFSYKYGNGVWIGRTKSNRLRKGFEMIWDPNGWINTDSDFSVKQDVVAITDWSGYSGSFVQHPELTGLDCIRPCFWVELVRGLPRENTTIWTSGSSISFCGVNSDTANWSWPDGAELPFTIDK

SEQ ID NO: 25926 - protein, 470 aa, synthetic construct
  REGION 1..470: note = neuraminidase__InfluenzaA__AJJ99439
MNPNQKIITIGSISIAIGIISLMLQIGNIISIWASHSIQTGSQNNTGICNQRIITYENSTWVNHTYVNINNTNVVAGEDKTSVTLAGNSSLCSTSGWAIYTKDNSIRIGSKGDVFVIREPFISCSHLECRTFFLTQGALLNDKHSNGTVKDRSPYRALMSCPLGEAPSPYNSKFESVAWSASACHDGMGWLTIGISGPDNGAVAVLKYNGIITGTIKSWKKQILRTQESECVCMNGSCFTIMTDGPSNKAASYKIFKIEKGKVTKSIELNAPNFYYEECSCYPDTGIVMCVCRDNWHGSNRPWVSFNQNLDYQIGYICSGVFGDNPRPEDGEGSCNPVTVDGANGVKGFSYKYGNGVWIGRTKSNRLRKGFEMIWDPNGWTNTDSDFSVKQDVVAITDWSGYSGSFVQHPELTGLDCIRPCFWVELVRGLPRENTTIWTSGSSISFCGVNSDTANWSWPDGAELPFTIDK

SEQ ID NO: 25927 - protein, 470 aa, synthetic construct
  REGION 1..470: note = neuraminidase__InfluenzaA__AJJ99451
MNPNQKIITIGSISIAIGIISLMLQIGNIISIWASHSIQTGSQNNTGICNQRIITYENSTWVNHTYVNINNTNVVAGEDKTSVTLAGNSSLCSISGWAIYTKDNSIRIGSKGDVFVIREPFISCSHLECRTFFLTQGALLNDKHSNRTVKDRSPYRALMSCPLGEAPSPYNSKFESVAWSASACHDGMGWLTIGISGPDNGAVAVLKYNGIITGTIKSWKKQILRTQESECVCMNGSCFTIMTDGPSNKAASYKIFKIEKGKVTKSIELNAPNFHYEECSCYPDTGIVMCVCRDNWHGSNRPWVSFNQNLDYQIGYICSGVFGDNPRPEDGEGSCNPVTVDGANGVKGFSYKYDNGVWIGRTKSNRLRKGFEMIWDPNGWTNTDSDFSVKQDVVAITDWSGYSGSFVQHPELTGLDCIRPCFWVELVRGLPRENTTIWTSGSSISFCGVNSDTANWSWPDGAELPFTIDK

SEQ ID NO: 25928 - protein, 470 aa, synthetic construct; identical to SEQ ID NO: 16632
  REGION 1..470: note = neuraminidase__InfluenzaA__AJJ99463

SEQ ID NO: 25929 - protein, 469 aa, synthetic construct
  REGION 1..469: note = neuraminidase__InfluenzaA__AJJ99474
MNPNQKIITIGSVCMTIGIANLILQIGNIISIWISHSIQLGNQNQIETCNQSVIIYENNTWVNQTYVNISNTNFAAGQSVVSVKLAGNSSLCPVSGWAIYSKDNSIRIGSKGDVFVIREPFISCSPLECRTFFLTQGALLNDKHSNGTIKDRSPYRTLMSCPIGEVPSPYNSRFESVAWSASACHDGINWLTIGISGPDNGAVAVLKYNGIITDTIKSWRNNILRTQESECACVNGSCFTIMTDGPSDGQASYKIFRIEKGKIIKSVEMNAPNYHYEECSCYPDSSEITCVCRDNWHGSNRPWVSFNQNLEYQIGYICSGIFGDNPRPNDKTGSCGPVSSNGANGVKGFSFKYGNGVWIGRTKSISSRKGFEMIWDPNGWTGTDNSFSIKQDIVGINEWSGYSGSFVQHPELTGLDCIRPCFWVELIRGRPKENTIWTSGSSISFCGVNSGTVGWSWPDGAELPFTIDK

SEQ ID NO: 25930 - protein, 469 aa, synthetic construct; identical to SEQ ID NO: 20709
  REGION 1..469: note = neuraminidase__InfluenzaA__AJJ99496

SEQ ID NO: 25931 - protein, 469 aa, synthetic construct
  REGION 1..469: note = neuraminidase__InfluenzaA__AJJ99507
MNPNQKIITIGSVCMTIGMANLILQIGNIISIWISHSIQLGNQNQIETCNQSVITYENNTWVNQTYVNISNTNFAAGQSVVSVKLAGNSSLCPVSGWAIYSKDNSIRIGSKGDVFVIREPFISCSPLECRTFFLTQGALLNDKHSNGTIKDRSPYRTLMSCPIGEVPSPYNSRFESVAWSASACHDGINWLTIGISGPDNGAVAVLKYNGIITDTIKSWRNNILRTQESECACVNGSCFTVMTDGPSDGQASYKIFRIEKGKIVKSVEMNAPNYHYEECSCYPDSSEITCVCRDNWHGANRPWVSFNQNLEYQIGYICSGIFGDNPRPNDKTGSCGPVSSNGANGVKGFSFKYDNGVWIGRTKSISSRNGFEMIWDPNGWTGTDNDFSIKQDIVGINEWSGYSGSFVQHPELTGLDCIRPCFWVELIRGRPKENTIWTSGSSISFCGVNSDTVGWSWPDGAELPFTIDK

SEQ ID NO: 25932 - protein, 469 aa, synthetic construct; identical to SEQ ID NO: 16738
  REGION 1..469: note = neuraminidase__InfluenzaA__AJJ99518

SEQ ID NO: 25933 - protein, 469 aa, synthetic construct
  REGION 1..469: note = neuraminidase__InfluenzaA__AJJ99529
MNPNQKIITIGSVCMTIGMANLILQVGNIISIWISHSIQLGNQNQIETCNQSVITYENNTWVNQTYVNISNTNFAAGQSVVSVKLAGNSSLCPVSGWAIYSKDNSIRIGSKGDVFVIREPFISCSPLECRTFFLTQGALLNDKHSNGTIKDRSPYRTLMSCPIGEVPSPYNSRFESVAWSASACHDGFNWLTIGISGPDNGAVAVLKYNGIITDTIKSWRNNILRTQESECACVNGSCFTIMTDGPSDGQASYKIFRIEKGKIIKSVEMNAPNYHYEECSCYPDSSEITCVCRDNWHGSNRPWVSFNQNLEYQIGYICSGIFGDNPRPNDKTGSCGPVSSNGANGVKGFSFKYGNGVWIGRTKSISSRKGFEMIWDPNGWTGTDNSFSIKQDIVGINEWSGYSGSFVQHPELTGLDCIRPCFWVELIRGRPKENTIWTSGSSISFCGVNSGTVGWSWPDGAELPFTIDK

SEQ ID NO: 25934 - protein, 469 aa, synthetic construct
  REGION 1..469: note = neuraminidase__InfluenzaA__AJJ99540
MNPNQKIITIGSVCMTIGMANLILQIGNIISIWISHSIQLGNQNQIETCNQSVITYENNTWVNQTYVNISNTNFAAGQSVVSVKLAGNSSLCPVSGWAIYSKDNSIRIGSKGDVFVIREPFISCSPLECRTFFLTQGALLNDKHSNGTIKDRSPYRTLMSCPIGEVPSPYNSRFESVAWSASACHDGINWLTIGISGPDNGAVAVLKYNGIITDTIKSWRNNILRTQESECACVNGSCFTIMTDGPSDGQASYKIFRIEKGKIVKSVEMNAPNYHYEECSCYPDSSKITCVCRDNWHGSNRPWVSFNQNLEYQIGYICSGIFGDNPRPNDKTGSCGPVSSNGANGVKGFSFKYGNGIWIGRTKSISSRKGFEMIWDPNGWTGTDNNFSIKQDIVGINEWSGYSGSFVQHPELTGLDCIRPCFWVELIRGRPKENTIWTSGSSISFCGVNSDTVGWSWPDGAELPFTIDK

SEQ ID NO: 25935 - protein, 469 aa, synthetic construct
  REGION 1..469: note = neuraminidase__InfluenzaA__AJJ99551
MNPNQKIITIGSVCMTIGMANLILQIGNIISIWISHSIQLGNQSQTETCNQSVITYENNTWVNQTYVNISNTNPAAGQSVVSVKLAGNSSLCPVSGWAIYSKDNSIRIGSKGDVFVIREPFISCSSLECRTFFLTQGALLNDKHSNGTIKDRSPYRTLMSCPIGEVPSPYNSRFESVAWSASACHDGINWLTIGISGPDNGAVAVLKYNGIITDTIKSWRNNILRTQESECACVNGSCFTIMTDGPSDGQASYKIFRIEKGKIVKSVEMNAPNYHYEECSCYPDSSEITCVCRDNWHGSNRPWVSFNQNLEYQIGYICSGIFGDNPRPNDKTGSCGPVSSNGANGVKGFSFKYGNGVWIGRTKSISSRKGFEMIWDPNGWTGTDNNFSIKQDIVGINEWSGYSGSFVQHPELTGLDCIRPCFWVELIRGRPKENTIWTSGSSISFCGVNSDTVGWSWPDGAELPFTIDK

SEQ ID NO: 25936 - protein, 469 aa, synthetic construct; identical to SEQ ID NO: 20725
  REGION 1..469: note = neuraminidase__InfluenzaA__AJJ99562

SEQ ID NO: 25937 - protein, 469 aa, synthetic construct
  REGION 1..469: note = neuraminidase__InfluenzaA__AJJ99573
MNPNQKIITIGSVCMTIGMANLILQIGNIISIWISHSIQLGNQSQIETCNQSVITYENNTWVNQTYVNISNTNFAAGQSVVSVKLAGNSSLCPVSGWAIYSKDNSIRIGSKGDVFVIREPFISCSPLECRTFFLTQGALLNDKHSNGTIKDRSPYRTLMSCPIGEVPSPYNSRFESVAWSASACHDGINWLTIGISGPDNGAVAVLKYNGIITDTIKSWRNNILRTQESECACVNGSCFTIMTDGPSDGQASYKIFRIEKGKIVKSVEMNAPNYHYEECSCYPDSSEITCVCRDNWHGSNRPWVSFNQNLEYQIGYICSGIFGDNPRPNDKTGSCGPVSSNGANGVKGFSFKYGNGVWIGRTKSISSRKGFEMIWDPNGWTGTDNNFSIKQDVVGINEWSGYSGSFVQHPELTGLDCIRPCFWVELIRGRPKENTIWTSGSSISFCGVNSDTVGWSWPDGAELPFTIDK

SEQ ID NO: 25938 - protein, 469 aa, synthetic construct; identical to SEQ ID NO: 25915
  REGION 1..469: note = neuraminidase__InfluenzaA__AJJ99584

SEQ ID NO: 25939 - protein, 469 aa, synthetic construct
  REGION 1..469: note = neuraminidase__InfluenzaA__AJJ99595
MNPNQKIITIGSVCMTIGMANLIFQIGNIISIWISHSIQLGNQNQIETCNQSVITYENNTWVNQTYVNISNTNFAAGQSVVSVKLAGNSSLCPVSGWAIYSKDNSIRIGSKGDVFVIREPFISCSPLECRTFFLTQGALLNDKHSNGTIKDRSPYRTLMSCPIGEVPSPYNSRFESVAWSASACHDGINWLTIGISGPDNGAVAVLKYNGIITDTIKSWRNNILRTQESECACVNGSCFTVMTDGPSDGQASYKIFRIEKGKIVKSVEMNAPNYHYEECSCYPDSSEITCVCRDNWHGSNRPWVSFNQNLEYQIGYICSGIFGDNPRPNDKTGSCGPVSSNGANGVKGFSFKYGNGVWIGRTKSISSRNGFEMIWDPNGWTGTDNNFSIKQDIVGINEWSGYSGSFVQHPELTGLDCIRPCFWVELIRGRPKENTIWTSGSSISFCGVNSDTVGWSWPDGAELPFTIDK

SEQ ID NO: 25940 - protein, 469 aa, synthetic construct
  REGION 1..469: note = neuraminidase__InfluenzaA__AJJ99606
MNPNQKIITIGSVCMTIGMANLILQIGNIISIWISHSIQLGNQNQIETCNQSVITYENNTWVNQTYVNISNTNFAAGQSVVSVKLAGNSSLCPVSGWAIYSKDNSIRIGSKGDVFVIREPFISCSPLECRTFFLTQGALLNDKHSNGTIKDRSPYRTLMSCPIGEVPSPYNSRFESVAWSASACHDGINWLTIGISGPDNGAVAVLKYNGVITDTIKSWRNNILRTQESECACVNGSCFTVMTDGPSDGQASYKIFRIEKGKIVKSVEMNAPNYHYEECSCYPDSSEITCVCRDNWHGSNRPWVSFNQNLEYQIGYICSGIFGDNPRPNDKTGSCGPVSSNGANGVKGFSFKYGNGVWIGRTKSISSRNGFEMIWDPNGWTGTDNNFSIKQDIVGINEWSGYSGSFVQHPELTGLDCIRPCFWVELIRGRPKENTIWTSGSSISFCGVNSDTVGWSWPDGAELPFTIDK

SEQ ID NO: 25941 - protein, 470 aa, synthetic construct; identical to SEQ ID NO: 17461
  REGION 1..470: note = neuraminidase__InfluenzaA__AJJ99618

SEQ ID NO: 25942 - protein, 470 aa, synthetic construct
  REGION 1..470: note = neuraminidase__InfluenzaA__AJJ99630
MNPNQKIITIGSISIAIGIISLMLQIGNIISIWASHSIQTGSQNNTGICNQRIITYENSTWVNHTYVNINNTNVVAGEDKTSVTLAGNSSLCSISGWAIYTKDNSIRIGSKGDVFVIREPFISCSHLECRTFFLTQGALLNDKHSNGTVKDRSPYRALMSCPLGEAPSPYNSKFESVAWSASACHDGMGWLTIGISGPDNGAVAVLKYNGIITGTIKSWKKQILRTQESECVCMNGSCFTIMTDGPSNKAASYKIFKIEKGKVTKSIELNAPNFYYEECSCYPDTGIVMCVCRDNWHGSNRPWVSFNQNLDYQIGYICSGVFGDNPRPEDGEGSCNPVTVDGANGVKGFSYKYGNGVWIGRTKSNRLRKGFEMIWDPNGWTNTDSDFSMKQNVVAITDWSGYSGSFVQHPELTGLDCIRPCFWVELVRGLPRENTTIWTSGSSISFCGVNSDTANWSWPDGAELPFTIDK

SEQ ID NO: 25943 - protein, 470 aa, synthetic construct; identical to SEQ ID NO: 17461
  REGION 1..470: note = neuraminidase__InfluenzaA__AJJ99642

SEQ ID NO: 25944 - protein, 470 aa, synthetic construct; identical to SEQ ID NO: 17461
  REGION 1..470: note = neuraminidase__InfluenzaA__AJJ99654

SEQ ID NO: 25945 - protein, 470 aa, synthetic construct
  REGION 1..470: note = neuraminidase__InfluenzaA__AJJ99666
MNPNQKIITIGSISIAIGIISLMLQIGNIISIWASHSIQTGSQNNTGICNQRIITYENSTWVNHTYVNINNNNVVAGEDKTSVTLAGNSSLCSISGWAIYTKDNSIRIGSKGDVFVIREPFISCSHLECRTFFLTQGALLNDKHSNGTVKDRSPYRALMSCPLGEAPSPYNSKFESVAWSASACHDGMGWLTIGISGPDNGAVAVLKYNGIITGTIKSWKKQILRTQESECVCMNGSCFTIMTDGPSNKAASYKIFKIEKGKVTKSIELNAPNFHYEECSCYPDTGIVMCVCRDNWHGSNRPWVSFNQNLDYQIGYICSGVFGDNPRPEDGEGSCNPVTVDGANGVKGFSYKYDNGVWIGRTKSNRLRKGFEMIWDPNGWTNTDSDFSVKQDVVAITDWSGYSGSFVQHPELTGLDCIRPCFWVELVRGLPRENTTIWTSGSSISFCGVNSDTANWSWPDGAELPFTIDK

SEQ ID NO: 25946 - protein, 469 aa, synthetic construct
  REGION 1..469: note = neuraminidase__InfluenzaA__AJJ99677
MNPNQKIITIGSVCMTIGMANLILQIGNIISIWISHSIQLGNQNQIETCNQSVITYENNTWVNQTYVNISNTNFAAGQSVVSVKLAGNSSLCPVSGWAIYSKDNSIRIGSKGDVFVIREPFISCSPLECRTFFLTQGALLNDKHSNGTIKDRSPYRTLMSCPIGEVPSPYNSRFESVAWSASACHDGINWLTIGISGPDNGAVAVLKYNGIITDTIKSWRNNILRTQESECACVNGSCFTIMTDGPSDGQASYKIFRIEKGKIIKSVEMNAPNYHYEECSCYPDSSEITCVCRDNWHGSNRPWVSFNQNLEYQIGYICSGIFGDNPRPNDKTGSCGPVSSNGANGVKGFSFKYGNGVWIGRTKSISSRKGFEMIWDPNGWTGTDNSFSIKQDIVGMNEWSGYSGSFVQHPELTGLDCIRPCFWVELIRGRPKENTIWTSGSSISFCGVNSGTVGWSWPDGAELPFTIDK

SEQ ID NO: 25947 - protein, 469 aa, synthetic construct
  REGION 1..469: note = neuraminidase__InfluenzaA__AJJ99688
MNPNQKIITIGSVCMTIGMANLILQIGNIISIWISHSIQLGNQNQIETCNQSVITYENNTWVNQTYVNISNTNFAAGQSVVSVKLAGNSSLCPVSGWAIYSKDNSIRIGSKGDVFVIREPFISCSPLECRTFFLTQGALLNDKHSNGTIKDRSPYRTLMSCPIGEVPSPYNSRFESVAWSASACHDGINWLTIGISGPDNGAVAVLKYNGIITDTIKSWRNNILRTQESECACVNGSCFTIMTDGPSDGQASYKIFRIEKGKIIKSVEMNAPNYHYEECSCYPDSSEITCVCRDNWHGSNRPWVSFNQNLEYQIGYICSGIFGDNPRPNDKTGSCGPVSSNGANGVKGFSFKYGNGVWIGRTKSISSRKGFEMIWDPNGWTGTDNSFSIKQDIVGINEWSGYSGSFVQHPELTGLDCIRPCFWVELIRGRPKENTIWTSGSSISFCGVNSGTVGWSWPDGAELPFTIDK

SEQ ID NO: 25948 - protein, 469 aa, synthetic construct
  REGION 1..469: note = neuraminidase__InfluenzaA__AJJ99710
MNPNQKIITIGSVCMTIGMANLILQIGNIISIWISHSIQLGNQSQIETCNQSVITYENNTWVNQTYVNISNTNFAAGQSVVSVKLAGNSSLCPVSGWAIYSKDNSIRIGSKGDVFVIREPFISCSPLECRTFFLTQGALLNDKHSNGTIKDRSPYRTLMSCPIGEVPSPYNSRFESVAWSASACHDGINWLTIGISGPDNGAVAVLKYNGIITDTIKSWRNNILRTQESECACVNGSCFTIMTDGPSDGQASYKIFRIEKGKIVKSVEMNAPNYHYEECSCYPDSSKITCVCRDNWHGSNRPWVSFNQNLEYQIGYICSGIFGDNPRPNDKTGSCGPVSSNGANGVKGFSFKYGNGVWIGRTKSISSRKGFEMIWDPNGWTGTDNNFSIKQDIVGINEWSGYSGSFVQHPELTGLDCIRPCFWVELIRGRPKENTIWTSGSSISFCGVNSDTVGWSWPDGAELPFTIDK

SEQ ID NO: 25949 - protein, 469 aa, synthetic construct; identical to SEQ ID NO: 20257
  REGION 1..469: note = neuraminidase__InfluenzaA__AJJ99721

SEQ ID NO: 25950 - protein, 469 aa, synthetic construct; identical to SEQ ID NO: 20257
  REGION 1..469: note = neuraminidase__InfluenzaA__AJJ99732

SEQ ID NO: 25951 - protein, 469 aa, synthetic construct; identical to SEQ ID NO: 20957
  REGION 1..469: note = neuraminidase__InfluenzaA__AJJ99743

SEQ ID NO: 25952 - protein, 469 aa, synthetic construct; identical to SEQ ID NO: 18291
  REGION 1..469: note = neuraminidase__InfluenzaA__AJJ99754

SEQ ID NO: 25953 - protein, 469 aa, synthetic construct
  REGION 1..469: note = neuraminidase__InfluenzaA__AJJ99765
MNPNQKIITIGSVCMTIGMANLILQIGNIISIWISHSIQLGNQNQIETCNQSVITYENNTWVNQTYVNISNTNFATGQSVVSVKLAGNSSLCPVSGWAIYSKDNSIRIGSKGDVFVIREPFISCSPLECRTFFLTQGALLNDKHSNGTIKDRSPYRTLMSCPIGEVPSPYNSRFESVAWSASACHDGINWLTIGISGPDNGAVAVLKYNGIITDTIKSWRNNILRTQESECACVNGSCFTVMTDGPSDGQASYKIFRIEKGKIVKSVEMNAPNYHYEECSCYPDSSEITCVCRDNWHGSNRPWVSFNQNLEYQIGYICSGIFGDNPRPNDKTGSCGPVSSNGANGVKGFSFKYGNGVWIGRTKSISSRNGFEMIWDPNGWTGTDNNFSIKQDIVGINEWSGYSGSFVQHPELTGLDCIRPCFWVELIRGRPKENTIWTSGSSISFCGVNSDTVGWSWPDGAELPFTIDK

SEQ ID NO: 25954 - protein, 470 aa, synthetic construct
  REGION 1..470: note = neuraminidase__InfluenzaA__AJJ99777
MNPNQKIITIGSISIAIGIISLILQIGNIISIWASHSIQTGSQNNTGICNQRIITYENSTWVNHTYVNINNTNVVAGEDKTSVTLAGNSSLCSISGWAIYTKDNSIRIGSKGDVFVIREPFISCSHLECRTFFLTQGALLNDKHSNGTVKDRSPYRALMSCPLGEAPSPYNSKFESVAWSASACHDGMGWLTIGISGPDNGAVAVLKYNGIITGTIKSWKKQILRTQESECVCMNGSCFTIMTDGPSNKAASYKIFKIEKGKVTKSIELNAPNFYYEECSCYPDTGIVMCVCRDNWHGSNRPWVSFNQNLDYQIGYICSGVFGDNPRPEDGEGSCNPVTVDGANGVKGFSYKYGNGVWIGRTKSNRLRKGFEMIWDPNGWTNTDSDFSVKQDVVAITDWSGYSGSFVQHPELTGLDCIRPCFWVELVRGLPRENTAVWTSGSSISFCGVNSDTANWSWPDGAELPFTIDK

SEQ ID NO: 25955 - protein, 469 aa, synthetic construct; identical to SEQ ID NO: 16738
  REGION 1..469: note = neuraminidase__InfluenzaA__AJJ99788

SEQ ID NO: 25956 - protein, 470 aa, synthetic construct
  REGION 1..470: note = neuraminidase__InfluenzaA__AJJ99800
MNPNQKIITIGSISIAIGIISLMLQIGNIISIWASHSIQTGSQNNTGICNQRIITYENSTWVNHTYVNINNTNVVAGEDKTSVTLAGNSSLCSISGWAIYTKDNSIRIGSKGDVFVIREPFISCSHLECRTFFLTQGALLNDKHSNGTVKDRSPYRALMSCPLGEAPSPYNSKFESVAWSASACHDGMGWLTIGISGPDNGAVAVLKYNGIITGTIKSWKKQILRTQESECVCMNGSCFTIMTDGPSNKAASYKIFKIEKGKVTKSIELNAPNFYYEECSCYPDTGIVMCVCRDNWHGSNRPWVSFNQNLDYQIGYICSGVFGDNPRPEDGEGSCNPVTVDGANGVKGFSYKYGNGVWIGRTKSNRLRKGFEMIWDPNGWTNTDSDFSVKQDVVAITDWSGYSGSFVQHPELTGLDCIRPCFWVELVRGLPRENTTIWTSGSSISFCGVNSDTANWSWPDGAELPFIIDK

SEQ ID NO: 25957 - protein, 470 aa, synthetic construct; identical to SEQ ID NO: 17461
  REGION 1..470: note = neuraminidase__InfluenzaA__AJJ99812

SEQ ID NO: 25958 - protein, 470 aa, synthetic construct
  REGION 1..470: note = neuraminidase__InfluenzaA__AJJ99824
MNPNQKIITIGSISIAIGTISLMLQIGNIISIWASHSIQTGSQNNTGICNQRIITYENSTWVNHTYVNINNTNVVAGEDKTSVTLAGNSSLCSISGWAIYTKDNSIRIGSKGDVFVIREPFISCSHLECRTFFLTQGALLNDKHSNGTVKDRSPYRALMSCPLGEAPSPYNSKFESVAWSASACHDGMGWLTIGISGPDNGAVAVLKYNGIITGTIKSWKKQILRTQESECVCMNGSCFTIMTDGPSNKAASYKIFKIEKGKVTKSIELNAPNFHYEECSCYPDTGIVMCVCRDNWHGSNRPWVSFNQNLDYQIGYICSGVFGDNPRPEDGEGSCNPVTVDGANGVKGFSYKYDNGVWIGRTKSNRLRKGFEMIWDPNGWTNTDSDFSVKQDVVAITDWSGYSGSFVQHPELTGLDCIRPCFWVELVRGLPRENTTIWTSGSSISFCGVNSDTANWSWPDGAELPFTIDK

SEQ ID NO: 25959 - protein, 469 aa, synthetic construct; identical to SEQ ID NO: 25947
  REGION 1..469: note = neuraminidase__InfluenzaA__AJJ99835

SEQ ID NO: 25960 - protein, 469 aa, synthetic construct; identical to SEQ ID NO: 20257
  REGION 1..469: note = neuraminidase__InfluenzaA__AJJ99846

SEQ ID NO: 25961 - protein, 469 aa, synthetic construct; identical to SEQ ID NO: 20257
  REGION 1..469: note = neuraminidase__InfluenzaA__AJJ99857

SEQ ID NO: 25962 - protein, 469 aa, synthetic construct
  REGION 1..469: note = neuraminidase__InfluenzaA__AJJ99868
MNPNQKIITIGSVCMTIGMANLILQIGNIISIWISHSIQLGNQNQIETCNQSVITYENNTWVNQTYVNISNTNFAAGQSVVSVKLAGNSSLCPVSGWAIYSKDNSIRIGSKGDVFVIREPFISCSPLECRTFFLTQGALLNDKHSNGTIKDRSPYRTLMSCPIGEVPSPYNSRFESVAWSASACHDGINWLTIGISGPDNGAVAVLKYNGIITDTIKSWRNNILRTQESECACVNGSCFTVMTDGPSDGQASYKIFRIEKGKIVKSVEMNAPNYHYEECSCYPDSSVITCVCRDNWHGSNRPWVSFNQNLEYQIGYICSGIFGDNPRPNDKTGSCGPVSSNGANGVKGFSFKYGNGVWIGRTKSISSRNGFEMIWDPNGWTGTDNNFSIKQNIVGINEWSGYSGSFVQHPELTGLDCIRPCFWVELIRGRPKENTIWTSGSSISFCGVNSDTVGWSWPDGAELPFTIDK

SEQ ID NO: 25963 - protein, 469 aa, synthetic construct; identical to SEQ ID NO: 19157
  REGION 1..469: note = neuraminidase__InfluenzaA__AJJ99879

SEQ ID NO: 25964 - protein, 469 aa, synthetic construct; identical to SEQ ID NO: 16738
  REGION 1..469: note = neuraminidase__InfluenzaA__AJJ99890

SEQ ID NO: 25965 - protein, 469 aa, synthetic construct
  REGION 1..469: note = neuraminidase__InfluenzaA__AJJ99901
MNPNQKIITIGSVCMTIGMANLILQIGNIISIWISHSIQLGNQNQIETCNQSVITYENNTWVNQTYVNISNTNFAAGQSVVSVKLAGNSSLCPVSGWAIYSKDNSIRIGSKGDVFVIREPFISCSPLECRTFFLTQGALLNDKHSNGTIKDRSPYRTLMSCPIGEVPSPYNSRFESVAWSASACHDGINWLTIGISGPDNGAVAVLKYNGIITDTIKSWRNNILRTQESECACVNGSCFTIMTDGPSDGQASYKIFRIEKGKIVKSVEMNAPNYHYEECSCYPDSSEITCVCRDNWHGSNRPWVSFNQNLEYQIGYICSGIFGDNPRPNDKTGSCGPVSSNGANGVKGFSFKYGNGVWIGRTKSISSRKGFEMIWDPNGWTGTDNSFSIKQDIVGINEWSGYSGSFVQHPELTGLDCIRPCFWVELIRGRPKENTIWTSGSSISFCGVDSGTVGWSWPDGAELPFTIDK

SEQ ID NO: 25966 - protein, 469 aa, synthetic construct
  REGION 1..469: note = neuraminidase__InfluenzaA__AJJ99912
MNPNQKIITIGSVCMTIGMANLILQIGNIISIWISHSIQLGNQSQIETCNQSVITYENNTWVNQTYVNISNTNFAAGQSVVSVKLAGNSSLCPVSGWAIYSKDNSIRIGSKGDVFVIREPFISCSPLECRTFFLTQGALLNDKHSNGTIKDRSPYRTLMSCPIGEVPSPYNSRFESVAWSASACHDGINWLTIGISGPDNGAVAVLKYNGIITDTIKSWRNNILRTQESECACVNGSCFTIMTDGPSDGQASYKIFRIEKGKIVKSVEMNAPNYHYEECSCYPDSSKITCVCRDNWHGSNRPWVSFNQNLEYQIGYICSGIFGDNPRPKDKTGSCGPVSSNGANGVKGFSFKYGNGVWIGRTKSISSRKGFEMIWDPNGWTGTDNNFSIKQDIVGINEWSGYSGSFVQHPELTGLDCIRPCFWVELIRGRPKENTIWTSGSSISFCGVNSDTVGWSWPDGAELPFTIDK

SEQ ID NO: 25967 - protein, 469 aa, synthetic construct; identical to SEQ ID NO: 20257
  REGION 1..469: note = neuraminidase__InfluenzaA__AJJ99923

SEQ ID NO: 25968 - protein, 469 aa, synthetic construct; identical to SEQ ID NO: 20709
  REGION 1..469: note = neuraminidase__InfluenzaA__AJJ99934

SEQ ID NO: 25969 - protein, 469 aa, synthetic construct; identical to SEQ ID NO: 20257
  REGION 1..469: note = neuraminidase__InfluenzaA__AJJ99945

SEQ ID NO: 25970 - protein, 469 aa, synthetic construct
  REGION 1..469: note = neuraminidase__InfluenzaA__AJJ99956
MNPNQKIITIGSVCMTIGMANLILQIGNIISIWISHSIQLGNQNQIETCNQSVITYENNTWVNQTYVNISNTNFAAGQSVVSVKLAGNSSLCPVSGWAIYSKDNSIRIGSKGDVFVIREPFISCSPLECRTFFLTQGALLNDKHSNGTIKDRSPYRTLMSCPIGEVPSPYNSRFESVAWSASACHDGINWLTIGISGPDNGAVAVLKYNGIITDTIKSWRNNILRTQESECACVNGSCFTVMTDGPSDGQASYKIFRIEKGKIVKSVEMNAPNYHYEECSCYPDSSEITCVCRDNWHGSNRPWVSFNQNLEYQIGYICSGIFGDNPRPNDKTGSCGPVLSNGANGVKGFSFKYGNGVWIGRTKSISSRNGFEMIWDPNGWTGTDNNFSIKQDIVGINEWSGYSGSFVQHPELTGLDCIRPCFWVELIRGRPKENTIWTSGSSISFCGVNSDTVGWSWPDGAELPFTIDK

SEQ ID NO: 25971 - protein, 469 aa, synthetic construct; identical to SEQ ID NO: 16738
  REGION 1..469: note = neuraminidase__InfluenzaA__AJJ99967

SEQ ID NO: 25972 - protein, 470 aa, synthetic construct
  REGION 1..470: note = neuraminidase__InfluenzaA__AJJ99991
MNPNQKIITIGSISIAIGIISLMLQIGNIISIWASHSIQTGSQNNTGICNQRIITYENCTWVNHTYVNINNTNVVAGEDKTSVTLAGNSSLCSISGWAIYTKDNSIRIGSKGDVFVIREPFISCSHLECRTFFLTQGALLNDKHSNGTVKDRSPYRALMSCPLGEAPSPYNSKFESVAWSASACHDGMGWLTIGISGPDNGAVAVLKYNGIITGTIKSWKKQILRTQESECVCMNGSCFTIMTDGPSNKAASYKIFKIEKGKVTKSIELNAPNFHYEECSCYPDTGIVMCVCRDNWHGSNRPWVSFNQNLDYQIGYICSGVFGDNPRPEDGEGSCNPVTVDGANGVKGFSYKYDNGVWIGRTKSNRLRKGFEMIWDPNGWTNTDSDFSVKQDVVAITDWSGYSGSFVQHPELTGLDCIRPCFWVELVRGLPRENTTIWTSGSSISFCGVNSDTANWSWPDGAELPFTIDK

SEQ ID NO: 25973 - protein, 469 aa, synthetic construct; identical to SEQ ID NO: 25947
  REGION 1..469: note = neuraminidase__InfluenzaA__AJK00003

SEQ ID NO: 25974 - protein, 469 aa, synthetic construct
  REGION 1..469: note = neuraminidase__InfluenzaA__AJK00014
MNPNQKIITIGSVCMTIGMANLILQIGNIISIWISHSIQLGNQSQIETCNQSVITYENNTWVNQTYVNISNTNFAAGQSVVSVKLAGNSSLCPVSGWAIYSKDNSIRIGSKGDVFVIREPFISCSPLECRTFFLTQGALLNDKHSNGTIKDRSPYRTLMSCPIGEVPSPYNSRFESVAWSASACHDGINWLTIGISGPDNGAVAVLKYNGVITDTIKSWRNNILRTQESECACVNGSCFTIMTDGPSDGQASYKIFRIEKGKIVKSVEMNAPNYHYEECSCYPDSSEITCVCRDNWHGSNRPWVSFNQNLEYQIGYICSGIFGDNPRPNDKTGSCGPVSSNGANGVKGFSFKYGNGVWIGRTKSISSRKGFEMIWDPNGWTGTDNNFSTKQDIVGINEWSGYSGSFVQHPELTGLDCIRPCFWVELIRGRPKENTIWTSGSIISFCGVNSDTVGWSWPDGAELPFTIDN

SEQ ID NO: 25975 - protein, 469 aa, synthetic construct
  REGION 1..469: note = neuraminidase__InfluenzaA__AJK00025
MNPNQKIITIGSVCMTIGMANLILQIGNIISIWISHSIQLGNQNQIETCNQSVITYENNTWVNQTYVNISNTNFAAGQSVVSVKLAGNSSLCPVSGWAIYSKDNSIRIGSKGDVFVIREPFISCSPLECRTFFLTQGALLNDKHSNGTIKDRSPYRTLMSCPIGEVPSPYNSRFESVAWSASACHDGINWLTIGISGPDNGAVAVLKYNGIITDTIKSWRNNILRTQESECACVNGSCFTIMTDGPSDGQASYKIFRIEKGKIVKSVEMNAPNYHYEECSCYPDSSEITCVCRDNWHGSNRPWVSFNQNLEYQIGYICSGIFGDNPRPNDKTGSCGPVSSNGANGVKGFSFKYGNGVWIGRTKSISSRKGFEMIWDPNGWTGTDNSFSIKQDIVGINEWSGYSGSFVQHPELTGLDCIRPCFWVELIRGRPKENTIWTSGSSISFCGVNSGTVGWSWPDGAELPFTIDK

SEQ ID NO: 25976 - protein, 469 aa, synthetic construct
  REGION 1..469: note = neuraminidase__InfluenzaA__AJK00036
MNPNQKIITIGSVCMTIGMANLILQIGNIISIWISHSIQLGNQSQIETCNQSVITYENNTWVNQTYVNISNINFAAGQSVVSVKLAGNSSLCPVSGWAIYSKDNSIRIGSKGDVFVIREPFISCSPLECRTFFLTQGALLNDKHSNGTIKDRSPYRTLMSCPIGEVPSPYNSRFESVAWSASACHDGINWLTIGISGPDNGAVAVLKYNGIITDTIKSWRNNILRTQESECACVNGSCFTIMTDGPSDGQASYKIFRIEKGKIVKSVEMNAPNYHYEECSCYPDSSEITCVCRDNWHGSNRPWVSFNQNLEYQIGYICSGIFGDNPRPNDKTGSCGPVSSNGANGVKGFSFKYGNGVWIGRTKSISSRKGFEMIWDPNGWTGTDNNFSIKQDIVGINEWSGYSGSFVQHPELTGLDCIRPCFWVELIRGRPKENTIWTSGSSISFCGVNSDTVGWSWPDGAELPFTIDK

SEQ ID NO: 25977 - protein, 469 aa, synthetic construct; identical to SEQ ID NO: 20957
  REGION 1..469: note = neuraminidase__InfluenzaA__AJK00047

SEQ ID NO: 25978 - protein, 469 aa, synthetic construct; identical to SEQ ID NO: 20957
  REGION 1..469: note = neuraminidase__InfluenzaA__AJK00058

SEQ ID NO: 25979 - protein, 469 aa, synthetic construct
  REGION 1..469: note = neuraminidase__InfluenzaA__AJK00069
MNPNQKIITIGSVCMTIGMANLILQIGNIISIWISHSIQLGNQNQIETCNQSVITYENNTWVNQTYFNISNTNFAAGQSVVSVKLAGNSSLCPVSGWAIYSKDNSIRIGSKGDVFVIREPFISCSPLECRTFFLTQGALLNDKHSNGTIKDRSPYRTLMSCPIGEVPSPYNSRFESVAWSASACHDGINWLTIGISGPDNGAVAVLKYNGIITDTIKSWRNNILRTQESECACVNGSCFTVMTDGPSDGQASYKIFRIEKGKIVKSVEMNAPNYHYEECSCYPDSSEITCVCRDNWHGSNRPWVSFNQNLEYQIGYICSGIFGDNPRPNDKTGSCGPVSSNGANGVKGFSFKYGNGVWIGRTKSISSRNGFEMIWDPNGWTGTDNNFSIKQDIVGINEWSGYSGSFVQHPELTGLDCIRPCFWVELIRGRPKENTIWTSGSSISFCGVNSDTVGWSWPDGAELPFTIDK

SEQ ID NO: 25980 - protein, 470 aa, synthetic construct; identical to SEQ ID NO: 17461
  REGION 1..470: note = neuraminidase__InfluenzaA__AJK00081

SEQ ID NO: 25981 - protein, 470 aa, synthetic construct; identical to SEQ ID NO: 16632
  REGION 1..470: note = neuraminidase__InfluenzaA__AJK00093

SEQ ID NO: 25982 - protein, 470 aa, synthetic construct
  REGION 1..470: note = neuraminidase__InfluenzaA__AJK00105
MSPNQKIITIGSISIAIGIISLMLQIGNTISIWASHSIQTGSQNNTGICNQRIITYENSTWVNHTYVNINNTNVVAGEDKTSVTLAGNSSLCSISGWAIYTKDNSIRIGSKGDVFVIREPFISCSHLECRTFFLTQGALLNDKHSNGTVKDRSPYRALMSCPLGEAPSPYNSKFESVAWSASACHDGMGWLTIGISGPDNGAVAVLKYNGIITGTIKSWKKQILRTQESECVCMNGSCFTIMTDGPSNKAASYKIFKIEKGKVTKSIELNAPNFHYEECSCYPDTGIVMCVCRDNWHGSNRPWVSFNQNLDYQIGYICSGVFGDNPRPEDGEGSCNPVTVDGANGVKGFSYKYDNGVWIGRTKSNRLRKGFEMIWDPNGWTNTDSDFSVKQDVVAITDWSGYSGSFVQHPELTGLDCIRPCFWVELVRGLPRENTTIWTSGSSISFCGVNSDTANWSWPDGAELPFTIDK

SEQ ID NO: 25983 - protein, 469 aa, synthetic construct; identical to SEQ ID NO: 19013
  REGION 1..469: note = neuraminidase__InfluenzaA__AJK00116

SEQ ID NO: 25984 - protein, 469 aa, synthetic construct; identical to SEQ ID NO: 17845
  REGION 1..469: note = neuraminidase__InfluenzaA__AJK00127

SEQ ID NO: 25985 - protein, 469 aa, synthetic construct; identical to SEQ ID NO: 16738
  REGION 1..469: note = neuraminidase__InfluenzaA__AJK00138

SEQ ID NO: 25986 - protein, 449 aa, synthetic construct
  REGION 1..449: note = neuraminidase__InfluenzaA__AJK00152
MNPNQKIITIGSICMVTGIVSLMLQIGNIISMWVSHSIQTRNQHQTEPIRNTNFLTENAVASVTLAGNSSLCPIRGWAVHSKDNSIRIGSKGDVFVIREPFISCSHLECRTFFLTQGALINDKHSNGTVKDRSPHRTLMSCPVGEAPSPYNSRFESVAWSASACHDGTSWLTIGISGPDNGAVAVLKYNGIITDTIKSWRNNILRTQESECACVNGSCFTVMTDGPSNGQASYKIFKMEKGKVVKSVELNAPNYHYEECSCYPDAGEITCVCRDNWHGSNRPWVSFNQNLEYQIGYICSGVFGDNPRPNDGTGSCGPVSPNGAYGIKGFSFKYGNGVWIGRTKSTNSRSGFEMIWDPNGWTGTDSDFSVKQDIVEITDWSGYSGSFVQHPELTGLDCIRPCFWVELIRGRPKESTIWTSGSSISFCGVNSDTVSWSWPDGAELPFTIDK

SEQ ID NO: 25987 - protein, 449 aa, synthetic construct
  REGION 1..449: note = neuraminidase__InfluenzaA__AJK00167
MNPNQKIITIGSICMVIGIVSLMLQIGNMISIWVSHSIQTGNQHQAEPIRNANFLTENAVASVTLAGNSSLCPVRGWAVHSKDNSIRIGSKGDVFVIREPFISCSHLECRTFFLTQGALLNDKHSNGTVKDRSPHRTLMSCPVGEAPSPYNSRFESVAWSASACHDGTSWLTIGISGPDNGAVAVLKYNGIITDTIKSWRNNILRTQESECACVNGSCFTVMTDGPSNGQASYKIFKMEKGKVVKSVELNAPNYHYEECSCYPDAGEITCVCRDNWHGSNRPWVSFNQNLEYQIGYICSGVFGDNPRPNDGTGSCGPVSPNGAYGIKGFSFKYGNGVWIGRTKSTNSRSGFEMIWDPNGWTETDSNFSVKQDIVAITDWSGYSGSFVQHPELTGLDCIRPCFWVELIRGRPKESTIWTSGSSISFCGVNSDTVSWSWPDGAELPFTIDK

SEQ ID NO: 25988 - protein, 449 aa, synthetic construct
  REGION 1..449: note = neuraminidase__InfluenzaA__AJK00178
MNPNQKIITIGSICMVIGIVSLMLQIGNMISIWASHSIRTGNQNQVEPIINTNFPTEKAAASITLAGNSSLCPIRGWAIHSKDNSIRIGSKGDVFVIREPFISCSHLECRTFFLTQGALLNDKHSNGTVKDRSPHRTLMSCPVGEAPSPYNSRFESVAWSASACHDGTSWLTIGISGPDNGAVAVLKYNGIITDTIKTWRNNILRTQESECACVNGSCFTVMTDGPSDGQASYKIFKMEKGKVIKSVELDAPNYHYEECSCYPDAGEITCVCRDNWHGSNRPWVSFNQNLEYQIGYICSGVFGDNPRPTDGTGSCGPVSHNGAYGVKGFSFKYGNGVWIGRTKSPNSRSGFEMIWDPNGWSETDSSFSVKQDIVAITDWSGYSGSFVQHPELTGLDCIRPCFWVELIRGRPKESTVWTSGSSISFCGVNSDTVSWSWPDGAELPFTIDK

SEQ ID NO: 25989 - protein, 449 aa, synthetic construct
  REGION 1..449: note = neuraminidase__InfluenzaA__AJK00199
MNPNQKIITIGSICMVIGIVSLMLQIGNMISIWVSHSIQTGNQNQVEPIINTNFLTEKAVVSITLAGNSSLCPIRGWAIHSKDNSIRIGSKGDVFVIREPFISCSHLECRTFFLTQGALLNDKHSNGTVKDRSPHRTLMSCPVGEAPSPYNSRFESVAWSASACHDGTSWLTIGISGPDNGAAAVLKYNGIITDTIKSWRNNILRTQESECACVNGSCFTVMTDGPSDGQASYKIFKMEKGKVIKSVELDAPNYHYEECSCYPDAGEITCVCRDNWHGSNRPWVSFNQNLEYQIGYICSGVFGDNPRPNDGTGSCSPVSHNGAYGVKGFSFKYGNGVWIGRTKSPNSRSGFEMIWDPNGWSETDSSFSVKQDIVAITDWSGYSGSFVQHPELTGLDCIRPCFWVELIRGRPKESTVWTSGSSISFCGVNSDTVSWSWPDGAELPFTIDK

SEQ ID NO: 25990 - protein, 449 aa, synthetic construct
  REGION 1..449: note = neuraminidase__InfluenzaA__AJK00208
MNPNQKIITIGSICMVTGIVSLMLQIGNIISMWVSHSIQTRNQHQTEPIRNTNFLTENAVASVTLAGNSSLCPIRGWAVHSKDNSIRIGSKGDVFVIREPFISCSHLECRTFFLTQGALLNDKHSNGTVKDRSPHRTLMSCPVGEAPSPYNSRFESVAWSASACHDGTSWLTIGISGPDNGAVAVLKYNGIITDTIKSWRNNILRTQESECACVNGSCFTVMTDGPSNGQASYKIFKMEKGKVVKSVELNAPNYHYEECSCYPDAGEIICVCRDNWHGSNRPWVSFNQNLEYQIGYICSGVFGDNPRPNDGTGSCGPVSPNGAYGIKGFSFKYGNGVWIGRTKSTNSRSGFEMIWDPNGWTGTDSDFSVKQDIVEITDWSGYSGSFVQHPELTGLDCIRPCFWVELIRGRPKESTIWTSGSSISFCGVNSDTVSWSWPDGAELPFTIDK

SEQ ID NO: 25991 - protein, 449 aa, synthetic construct
  REGION 1..449: note = neuraminidase__InfluenzaA__AJK00219
MNPNQKIITIGSICMVTGIVSLMLQIGNIISMWVSHSIQTRNQHQAEPIRNTNFLTENAVASVTLAGNLSLCPIRGWAVHSKDNNIRIGSKGDVFVIREPFISCSHLECRTFFLTQGALLNDKHSNGTVKDRSPHRTLMSCPVGEAPSPYNSRFESVAWSASACHDGTSWLTIGISGPDNGAVAVLKYNGIITDTIKSWRNNILRTQESECACVNGSCFTVMTDGPSNGQASYKIFKMEKGKVVKSVELNAPNYHYEECSCYPDAGEIICVCRDNWHGSNRPWVSFNQNLEYQIGYICSGVFGDNPRPNDGTGSCGPVSPNGAYGIKGFSFKYGNGVWIGRTKSTNSRSGFEMIWDPNGWTGTDSDFSVKQDIVEITDWSGYSGSFVQHPELTGLDCIRPCFWVELIRGRPKESTIWTSGSSISFCGVNSDTVSWSWPDGAELPFTIDK

SEQ ID NO: 25992 - protein, 449 aa, synthetic construct
  REGION 1..449: note = neuraminidase__InfluenzaA__AJK00230
MNPNQKIITIGSICMVTGIVSLMLQIGNIISMWVSHSIQTRNQHQTEPIRNTNFLTENAVASVTLAGNSSLCPIRGWAVHSKDNSIRIGSKGDVFVIREPFISCSHLECRTFFLTQGALINDKHSNGTVKDRSPHRTLMSCPVGEAPSPYNSRFESVAWSASACHDGTSWLTIGISGPDNGAVAVLKYNGIITDTIKSWRNNILRTQESECACVNGSCFTVMTDGPSNGQASYKIFKMEKGKVVKSVELNAPNYHYEECSCYPDAGEIICVCRDNWHGSNRPWVSFNQNLEYQIGYICSGVFGDNPRPNDGTGSCGPVSPNGAYGIKGFSFKYGNGVWIGRTKSTNSRSGFEMIWDPNGWTGTDSDFSVKQDIVEITDWSGYSGSFVQHPELTGLDCIRPCFWVELIRGRPKESTIWTSGSSISFCGVNSDTVSWSWPDGAELPFTIDK

SEQ ID NO: 25993 - protein, 459 aa, synthetic construct
  REGION 1..459: note = neuraminidase__InfluenzaA__AJS18470
MNPNQKITCISATGVTLSVVSLLIGIANLGLNIGLHYKVDDSTTINIPNMNETNPTITNITNIIVNKNEERTFLNLTKPLCEVNSWHILSKDNAIRIGEDAHILVTREPYLSCDPQGCRMFALSQGTTLRGRHANGTIHDRSPFRALISWEMGQAPSPYNTRVECIGWSSTSCHDGISRMSICISGPNNNASAVVWYRGRPVTEIPSWVGNILRTQESECVCHKGICPVVMTDGPANNKAATKIIYFKEGKIQKIEELQGNAQHVEECSCYGAAGMIKCVCRDNWKGANRPIITIDPEMMTHTSKYLCSKILTDTSRPNDPTNGNCDAPIIGGSPDPGVKGFAYLDGENSWLGRTISKDSRSGYEMLKVPNAETDTQSGPTSYQLIVNNQNWSGYSGAFIDYWANKGCFNPCFYVELIRGRPKEIDVLWTSNSMVALCGSRERLGSWSWHDGAEIIYFK

SEQ ID NO: 25994 - protein, 459 aa, synthetic construct
  REGION 1..459: note = neuraminidase__InfluenzaA__AJS18481
MNPNQKITCISATGVTLSVVSLLIGIANLGLNIGLHYKVSDSTTINSPNMNETNPTTTNITNIIVNKNEERTFLNLTKPLCEVNSWHILSKDNAIRIGEEAHILVTREPYLSCDPQGCRMFALSQGTTLRGRHANGTIHDRSPFRALISWEMGQAPSPYNTRVECIGWSSTSCHDGISRMSICISGPNNNASAVVWYRGRPVTEIPSWAGNILRTQESECVCHKGICPVVMTDGPANNKAATKIIYFREGKIQKIEELQGNAQHIEECSCYGAAGMIKCACRDNWKGANRPIITIDPEMMTHTSKYLCSKILTDTSRPNDPTNGNCDAPVTGGSPDPGIKGFAFLDGENSWLGRTISKNSRSGYEMLKVPNAETDTQSGPTSYQLIVNNQNWSGYSGAFIDYWANKECFNPCFYVELIRGRPKESDVLWTSNSMVALCGSRERLGSWSWHDGAEIIYFK

SEQ ID NO: 25995 - protein, 469 aa, synthetic construct
  REGION 1..469: note = neuraminidase__InfluenzaA__AKA59350
MNPNQKIITIGSVCMTIGVANLILQIGNIISIWISHSIQLGNQNQIETCNQSVITYENNTWVNQTDVNISNTNFAAGQSVVSVKLAGNSSLCPVSGWAIYSKDNSIRIGSKGDVFVIREPFISCSPLECRTFFLTQGALLNDKHSNGTIKDRSPYRTLMSCPIGEVPSPYNSRFESVAWSASACHDGINWLTIGISGPDNGAVAVLKYNGIITDTIKSWRNNILRTQESECVCVNGSCFTVMTDGPSNGQASYKIFRIEKGKIVKSVEMNAPNYHYEECSCYPDSSEITCVCRDNWHGSNRPWVSFNQNLEYQIGYICSGIFGDNPRPNDKTGSCGPVSSNGANGVKGFSFKYGNGVWIGRTKSISSRNGFEMIWDPNGWTGTDNNFSIKQDIVGINEWSGYSGSFVQHPELTGLDCIRPCFWVELIRGRPKENTVWTSGSSISFCGVNSDTVGWSWPDGAELPFTIDK

SEQ ID NO: 25996 - protein, 469 aa, synthetic construct
  REGION 1..469: note = neuraminidase__InfluenzaA__AKA59352
MNPNQKIITIGSVCMTIGMANLMLQIGNIISIWISHSIQLGNQNQIETCNQSVITYENNTWVNQTYVNISNTNLAVGQSVVSTKLAGNSSLCPVSGWAIYSKDNSIRIGSKGDVFVIREPFISCSPLECRTFFLTQGALLNDKHSNGTIKDRSPYRTLMSCPIGEVPSPYNSRFESVAWSASACHDGINWLTIGISGPDNGAVAVLKYNGIITDTIKSWRNNILRTQESECACVNGSCFTVMTDGPSDGQASYKIFRIEKGKIVKSVEMNAPNYHYEECSCYPDSSEITCVCRDNWHGSNRPWVSFNQNLEYQIGYICSGIFGDNPRPNDKTGSCGPVSSNGANGVKGFSFKYGNGVWIGRTKSISSRNGFEMIWDPNGWTGTDNNFSIKQDIVGINEWSGYSGSFVQHPELTGLDCIRPCFWVELIRGRPKENTIWTSGSSISFCGVNSDTVGWSWPDGAELPFTIDK

SEQ ID NO: 25997 - protein, 469 aa, synthetic construct
  REGION 1..469: note = neuraminidase__InfluenzaA__AKA59354
MNPNQKIITIGSVCMTIGVANLILQIGNIISIWISHSIQLGNQNQIETCNQSVITYENNTWANQTYVNISNTNFAAGQSVVSVKLAGNSSLCPVSGWAIYSKDNSIRIGSKGDVFVIREPFISCSPLECRTFFLTQGALLNDKHSNGTIKDRSPYRTLMSCPIGEVPSPYNSRFESVAWSASACHDGINWLTIGISGPDNGAVAVLKYNGIITDTIKSWRNNILRTQESECVCVNGSCFTVMTDGPSNGQASYKIFRIEKGKIVKSVEMNAPNYHYEECSCYPDSSEITCVCRDNWHGSNRPWVSFNQNLEYQIGYICSGIFGDNPRPNDKTGSCGPVSSNGANGVKGFSFKYGNGVWIGRTKSISSRNGFEMIWDPNGWTETDNNFSIKQDIVGINEWSGYSGSFVQHPELTGLDCIRPCFWVELIRGRPKENTVWTSGSSISFCGVNSDTVGWSWPDGAELPFTIDK

SEQ ID NO: 25998 - protein, 459 aa, synthetic construct
  REGION 1..459: note = neuraminidase__InfluenzaA__AKS48026
MNPNQKITCISATGVTLSVVSLLIGIANLGLNIGLHYKVSDSTTINIPNMNETNPTTTNITNIIVNKNEERTFLNLTKPLCEVNSWHILSKDNAIRIGEDAHILVTREPYLSCDPQGCRMFALSQGTTLRGRHANGTIHDKSPFRALISWEMGQAPSPYNTRVECIGWSSTSCHDGISRMSICISGPNNNASAVVWYRGRPVTEIPSWVGNILRTQESECVCHKGICPVVMTDGPANNKAATKIIYFKEGKIQKIEELQGNAQHIEECSCYGAAGMIKCVCRDNWKGANRPIITIDPEMMTHTSKYLCSKILTDTSRPNDPTNGNCDEPITGGSPDPGVKGFAFLDGENSWLGRTISKDSRSGYEMLKVPNAETDTQSGPTSYQLIVNNQNWSGYSGAFIDYWANKECFNPCFYVELIRGRPKEIDVLWASNSMVALCGSRERLGSWSWHDGAEIIYFK

SEQ ID NO: 25999 - protein, 459 aa, synthetic construct
  REGION 1..459: note = neuraminidase__InfluenzaA__AKS48040
MNPNQKITCISATGMTLSVVSLLIGIANLGLNIGLHYKVSDSTTINIPNMNETNPTTTNITNIIVNKNEERTFLNLTKPLCEVNSWHILSKDNAIRIGEDAHILVTREPYLSCDPQGCRMFALSQGTTLRGRHANGTIHDRSPFRALISWEMGQAPSPYNTRVECIGWSSTSCHDGISRMSICISGPNNNASAVVWYRGRPVTEIPSWVGNILRTQESECVCHKGICPVVMTDGPANNKAATKIIYFKEGKIQKIEELQGNAQHIEECSCYGAAGMIKCVCRDNWKGANRPIITIDPEMMTHTSKYLCSKILTDTSRPNDPTNGNCDAPITGGSPDPGVKGFAFLDGENSWLGRTISKDSRSGYEMLKVPNAETDTQSGPTSYQLIVNNQNWSGYSGAFIDYWANKECFNPCFYVELIRGRPKEIDVLWASNSMVALCGSRERLGSWSWHDGAEIIYFK

SEQ ID NO: 26000 - protein, 459 aa, synthetic construct
  REGION 1..459: note = neuraminidase__InfluenzaA__ALO75898
MNPNQKITCISATGVTLSVVSLLIGIANLGLNIGLHYKVSDSTTINIPNMNETNPTTTNITNIIVNKNEERTFLNLTKPLCEVNSWHILSKDNAIRIGEDAHILVTREPYLSCDPQGCRMFALSQGTTLRGRHANGTIHDRSPFRALISWEMGQAPSPYNTRVECIGWSSTSCHDGISRMSICISGPNNNASAVVWYRGRPVTEIPSWVGNILRTQESECVCHKGICPVVMTDGPANNKAATKIIYFKEGKIQKIEELQGNAQHIEECSCYGAAGMIKCVCRDNWKGANRPIITIDPEMMTHTSKYLCSKILTDTSRPNDPTNGNCDAPITGGSPDPGVKGFAFLDGENSWLGRTISKDSRSGYEMLKVPNAETDTQSGPTSYQLIVNNQNWSGYSGAFIDYWANKECFNPCFYVELIRGRPKEIDVLWASNSMVALCGSRERLGSWSWHDGAEIIYFK

SEQ ID NO: 26001 - protein, 459 aa, synthetic construct; identical to SEQ ID NO: 26000
  REGION 1..459: note = neuraminidase__InfluenzaA__ALO75910

SEQ ID NO: 26002 - protein, 459 aa, synthetic construct
  REGION 1..459: note = neuraminidase__InfluenzaA__ALO75922
MNPNQKITCISATGVTLSVVSLLIGIANLGLNIGLHYKVSDSTTINIPNMNETNPTTTNITNIIVNKNEERTFLNLTKPLCEVNSWHILSKDNAIRIGEDAHILVTREPYLSCDPQGCRMFALSQGTTLRGRHANGTIHDRSPFRALISWEMGQAPSPYNTRVECIGWSSTSCHDGISRMSICISGPNNNASAVVWYRGRPVTEIPSWVGNILRTQESECVCHKGICPVVMTDGPANNKAATKIIYFKEGKIQKIEELQGNAQHIEECSCYGAAGMIKCVCRDNWKGANRPIITIDPEMMTHTSKYLCSKILTDTSRPNDPTNGNCDEPITGGSPDPGVKGFAFLDGENSWLGRTISKDSRSGYEMLKVPNAETDTQSGPTSYQLIVNNQNWSGYSGAFIDYWANKECFNPCFYVELIRGRPKEIDVLWASNSMVALCGSRERLGSWSWHDGAEIIYFK

SEQ ID NO: 26003 - protein, 466 aa, synthetic construct
  REGION 1..466: note = neuraminidase__InfluenzaA__ALT20083
MNPNQRITAIGSVSLIIAIICLLMQIAILTTTMTLHFRQNECSNPSNNQVMPCEPIIIERNTVHLNSTTIEREICPKVAEYKNWSKPQCQITGFAPFSKDNSIRLSASGDIWVTREPYVSCSLNKCYQFALGQGTTLKNKHSNGTTHDRTPHRTLLMNELGVPFHLGTKQVCIAWSSSSCYDGKAWLHVCVTGDDKNATASIIYDGMLVDSIGSWSKNILRTQESECVCINGTCAVVMTDGSASGKADTRVLFIREGKIINISPLSGSAQHVEECSCYPRYPEVRCVCRDNWKGSNRPILYINMADYSIESSYVCSGLVGDTPRNDDSSSSSNCRDPNNERGAPGVKGWAFDDGNDVWMGRTIKNGSRSGYETFRVVNGWTMANSKSQINRQVIVDSNDWSGYSGIFSVEGKKCINRCFYVELIRGRPQEPRVWWTSNSIIVFCGTSGTYGTGSWPDGANINFMPI

SEQ ID NO: 26004 - protein, 469 aa, synthetic construct
  REGION 1..469: note = neuraminidase__InfluenzaA__AMA65392
MNPNQKIITIGSVCMTIGMANLILQIGNIISIWVSHSIQIGNQSQIETCNQSVITYENNTWVNQTYVNISNTNFAAGQSVVSVKLAGNSSLCPVSGWAIYSKDNSVRIGSRGDVFVIREPFISCSPLECRTFFLTQGALLNDKHSNGTIKDRSPYRTLMSCPIGEVPSPYNSRFESVAWSASACHDGINWLTIGISGPDSGAVAVLKYNGIITDTIKSWRNNILRTQESECACVNGSCFTIMTDGPSDGQASYKIFRIEKGKIIKSVEMKAPNYHYEECSCYPDSSEITCVCRDNWHGSNRPWVSFNQNLEYQMGYICSGVFGDNPRPNDKTGSCGPVSSNGANGVKGFSFKYGNGVWIGRTKSISSRKGFEMIWDPNGWTGTDNKFSIKQDIVGINEWSGYSGSFVQHPELTGLDCIRPCFWVELIRGRPEENTIWTSGSSISFCGVNSDTVGWSWPDGAELPFTIDK

SEQ ID NO: 26005 - protein, 469 aa, synthetic construct
  REGION 1..469: note = neuraminidase__InfluenzaA__AMA65394
MNPNQKIITIGSVCMTIGMANLILQIGNIISIWVSHSIQIGNQSQIETCNQSVITYENNTWVNQTYVNISNTNFAAGQSVVSVKLAGNSSLCPVSGWAIYSKDNSVRIGSKGDVFVIREPFISCSPLECRTFFLTQGALLNDKHSNGTIKDRSPYRTLMSCPIGEVPSPYNSRFESVAWSASACHDGINWLTIGISGPDSGAVAVLKYNGIITDTIKSWRNNILRTQESECACVNGSCFTIMTDGPSDGQASYKIFRIEKGKIIKSVEMKAPNYHYEECSCYPDSSEITCVCRDNWHGSNRPWVSFNQNLEYQMGYICSGVFGDNPRPNDKTGSCGPVSSNGANGVKGFSFKYGNGVWIGRTKSISSRKGFEMIWDPNGWTGTDNKFSIKQDIVGINEWSGYSGSFVQHPELTGLDCIRPCFWVELIRGRPEENTIWTSGSSISFCGVNSDTVGWSWPDGAELPFTIDK

SEQ ID NO: 26006 - protein, 469 aa, synthetic construct
  REGION 1..469: note = neuraminidase__InfluenzaA__BAA00618
MNPNQKIITMGSVSIIIAIVCLLMQIAILVTTVTLHFRQHESDSPPSNQVIPCEPIIIERNITEIVYLNNTTIEKETCPKSVEYRNWSKPQCKITGFAPFSKDNSIRLSAGGDIWVTREPYVSCDPGKCYQFALGQGTTLDNKHSNDTIHDRIPHRTLLMNELGVPFHLGTRQVCIAWSSSSCHDGKAWLHVCVTGDDKNATASFIYNGRLVDSIGSWSQNILRTQESECVCINGTCTVVMTDGSASGRADTRILFIEEGKIVHISPLSGSAQHVEECSCYPRYPDVRCICRDNWKGSNSPVVDINMKDYSIDSSYVCSGLVGDTPRNDDRSSKSNCRNPNNERGNHGVKGWAFDNGDDVWMGRTISKDLRSGYETFKVIGGWSTPNSKSQTNRQVIVDSNNWSGYSGIFSVEGKSCINRCFYVELIRGRKQETRVWWTSNSIVVFCGTSGTYGTGSWPDGANIDFMPI

SEQ ID NO: 26007 - protein, 469 aa, synthetic construct
  REGION 1..469: note = neuraminidase__InfluenzaA__BAA00619
MNPNQKIITIGSVSLTFAAICFLMQIAILVTTVTLNFKQYECDPPATNQVMPCEPIIIERNITEIVYLTNTTIEREICPKLVEYRNWSKPQCKITGFAPFSKDNSIRLSAGGDIWVTREPYVSCDPGRCYQFALGQGTTLDNKHSNDTIHDRTPHRTLLMNELGVPFHLGTRQVCIAWSSSSCHDGKAWLHVCITGYDKNATASFIYDGRLVDSIGSWSKNILRTQESECVCINGTCTVVMTDGSASGRADTRILFIEEGRIVHISPLSGSAQHVEECSCYPRYPGVRCICRDNWKGSNRPVVDINVKDYSINSSYVCSGLVGDTPRNNDRSSNSYCQNPNNEKGNHGVKGWAFDDGNDVWMGRTISEDSRSGYQTFKVIGGWSTPNSKLQINRQVIVDSDNRSGYSGIFSVEGKSCINRCFYVELIRGRRQETRVWWTSNSIVVFCGTSGTYGTGSWPDGADINLMPI

SEQ ID NO: 26008 - protein, 469 aa, synthetic construct
  REGION 1..469: note = neuraminidase__InfluenzaA__BAA00620
MNPNQKIMTIGSVSLIIAAVCFLMQIAILVTTVTLHFKQCECDSPSNNQVKPCEPIIIERNITEIVYLNNTTIEKETCPKLVEYRNWSKPQCKITGFAPFSKDNSIRLSAGGDIWVTREPYVSCDPGKCYQFALGQGTTLDNKHSNDTIHDRIPHRTLLMNELGVPFHLGTRQVCIAWSSSSCHDGKAWLHVCVTGDDKNATASFIYDGRLVDSIGSWSQNILRTQESECVCINGTCTVVMTDGSASGRADTRILFIEEGKIVHISPLSGSAQHVEECSCYPRYPNVRCICRDNWKGSNRPIVDINMKDYSIDSSYVCSGLVGDTPRNDDRSSKSNCRNPNNEKGNHGVKGWAFDNGDDVWMGRTISKDLRSGYETFKVIGGWFTPNSKSQVNRQVIVDSDNRSGYSGIFSVEGKSCINRCFYVELIRGRGQETRVWWTSNSIVVFCGTSGTYGKGSWPDGANINFMPI

SEQ ID NO: 26009 - protein, 469 aa, synthetic construct
  REGION 1..469: note = neuraminidase__InfluenzaA__BAA00621
MNPNQKIITIGSVSLTIATICFLMQIAILVTTVTLHFKQYECDSPANNQVMPCEPIIIERNITEIVYLTNTTIEKEICPKLVEYRNWSKPQCKITGFAPFSKDNSIRLSAGGDIWVTREPYVSCDPGKCYQFALGQGTTLDNKHSNDTIHDRTPHRTLLMNELGVPFHLGTRQVCIAWSSSSCHDGKAWLHVCVTGYDKNATASFIYDGRLVDSIGSWSQNILRTQESECVCINGTCTVVMTDGSASGRADTKILFIEEGKIVHTSPLSGSAQHVEECSCYPRYPGVRCICRDNWKGSNRPVVDINVKDYSIDSSYVCSGLVGDTPRKNDRSSSSYCRNPNNEKGTHGVKGWAFDDGNDVWMGRTISEDSRSGYETFKVIGGWSTPNSKLQINRQVIVDSNDRSGYSGIFSVEGKSCINRCFYVELIRGREQETRVWWTSNSIVVFCGTSGTYGTGSWPDGADINLMPI

SEQ ID NO: 26010 - protein, 470 aa, synthetic construct
  REGION 1..470: note = neuraminidase__InfluenzaA__BAA06714
MNPNQKIITIGSISMAIGIISLILQIGNIISIWVSHSIQTGSQNHTGICNQRIITYENSTWVNQTYVNINNTNVVAGKDKTSVTLAGNSSLCPIRGWAIYTKDNSIRIGSKGDVFVIREPFISCSHLECRTFFLTQGALLNDKHSNGTVKDRSPYRRLMSCPLGEAPSPYNSRFESIAWSASACHDGMGWLTIGISGPDDGAVAVLKYNGIITETIKSWKKRILRTQESECVCVNGSCFTIMTDGPSNGQASYRIFKIEKGKVTKSIELDAPNSHYEECSCYPDTGTVMCVCRDNWHGSNRPWVSFNQNLDYQIGYICSGVFGDNPPPKDGKGSCDPVTVDGADGVKGFSYRYGNGVWIGRTKSNRFRKGFEMIWDPNGWTDTDSDFLVKQDVVAMTDWSGYSGSFVQHPELTGLDCMRPCFWVELVRGRPRENTTIWTSGSSISFCGVNSDTANWSWPDGAELPFTIDK

SEQ ID NO: 26011 - protein, 470 aa, synthetic construct
  REGION 1..470: note = neuraminidase__InfluenzaA__BAA06715
MNPNQKIITIGSISMAIGIISLILQIGNIISIWASHSIQTGSQNHTGICNQRIITYENSTWVNQTYVNINNTNVVAGKDKTSVTLAGNSSLCPIRGWAIYTKDNSIRIGSKGDVFVIREPFISCSHLECRTFFLTQGALLNDKHSNGTVKDRSPYRALMSCPLGEAPSPYNSRFESVAWSASACHDGMGWLTIGISGPDNGAVAVLKYNGIITETIKSWKKRILRTQESECVCVNGSCFTIMTDGPSNGAASYRIFKIEKGKVTKSIELDAPNYHYEECSCYPDTGTVMCVCRDNWHGSNRPSVSFNQNLDYQIGYICSGVFGDNPRPKDGEGSCNPVTVDGADGVKGFSYRYGNGVWIGRTKSNRLRKGFEMIWDPNGWTDTDSDFSVKQDVVAMTDWSGYSGSFVQHPELTGLDCMRPCFWVELIRGRPREKTTIWTSGSSISFCGVNSDTANWSWPDGAELPFTIDK

SEQ ID NO: 26012 - protein, 469 aa, synthetic construct
  REGION 1..469: note = neuraminidase__InfluenzaA__BAA06716
MNTNQRIITIGTICLIVGIISLLLQIGNIILLWMSHSIQTGEKSHPKVCNQSVITYENNTWVNQTYVNISNTNIAAGQGVTPIILAGNSSLCPISGWAIYSKDNSIRIGSKGDIFVMREPFISCSHLECRTFFLTQGALLNDRHSNGTVKDRSPYRTLMSCPIGEAPSPYNSRFESVAWSASACHDGMGWLTIGISGPDNGAVAVLKYNGIITDTIKSWRNKILRTQESECVCINGSCFTIMTDGPSNGQASYKLFKMEKGKIIKSIELDAPNYHYEECSCYPDTGKVVCVCRDNWHASNRPWVSFDQNLDYQIGYICSGVFGDNPRSNDGKGNCGPVLSNGANGVKGFSFRYGNGVWIGRTKSISSRRGFEMIWDPNGWTETDSSFSMKQDIIALTDWSGYSGSFVQHPELTGMNCIRPCFWVELIRGQPKESTIWTSGSSISFCGVNSGTASWSWPDGADLPFTIDK

SEQ ID NO: 26013 - protein, 470 aa, synthetic construct
  REGION 1..470: note = neuraminidase__InfluenzaA__BAA06717
MNPNQKIITIGSISMAIGIISLILQIGNIISIWASHSIQTGSQNHTGICNQRMITYENSTWVNQTYVNISNTNVVAGKDKTSVTLAGNSSLCPIRGWAIYTKDNSIRIGSKGDVFVIREPFISCSHLECRTFFLTQGALLNDKHSNGTVKDRSPYRALMSCPLGEAPSPYNSRFESVAWSASACHDGMGWLTIGISGPDDGAVAVLKYNGIITETIKSWRKQILRTQESECVCVNGSCFTIMTDGPSDGPASYRIFKIEKGKVTKSIELDAPNYHYEECSCYPDTGTVMCVCRDNWHGSNRPWVSFNQNLDYQIGYICSGVFGDNPRPKDGEGSCNPVTVDGADGVKGFSYRYGNGVWIGRTKSNRLRKGFEMIWDPNGWTDTDSDFSVKQDVVAMTDWSGYSGSFVQHPELTGLDCMRPCFWVELIRGRPREKTTIWTSGSSISFCGVNSDTANWSWPDGAELPFTIDK

SEQ ID NO: 26014 - protein, 470 aa, synthetic construct
  REGION 1..470: note = neuraminidase__InfluenzaA__BAA06718
MNPNQKIITIGSICMAIGIISLILQIGNIVSIWISHSIQTGSQNYTGICNQRIITYENSTWVNQTYVNINNTNVVAGQDTTSVALAGNSSLCPISGWAIYSKDNSIRIGSKGDVFVIREPFISCSHLECRTFFLTQGALLNDKHSNGTVKDRSPYRRLMSCPIGEAPSPYNSRFESVAWSASACHDGMGWLTIGISGPDDGAVAVLKYNGIITETIKSWRKRILRTQESECVCVNGSCFTIMTDGPNNGPASYRIFKIEKGKITKSIELDAPNSHYEECSCYPDAGTVMCVCRDNWHGSNRPWVSFNQNLDYQIGYICSGVFGDNPRPKDGKGSCDPVTVDGADGVKGFSYRYGNGVWIGRTKSNSSRRGFEMIWDPNGWTDTDSKFLVKQDVVAMTDWSGYSGSFVQHPELTGLDCMRPCFWVELVRGRPRENTTIWTSGSSISFCGVNGDTANWSWPDGAELPFTIDK

SEQ ID NO: 26015 - protein, 470 aa, synthetic construct
  REGION 1..470: note = neuraminidase__InfluenzaA__BAA06720
MNPNQKIITIGSISMAIGIISLILQIGNIISIWVSHSIQTGSQNHTGICNQRIITYENSTWVNQTYVNINNTNVVAGKDKTSVTLAGNSSLCPILGWAIYTKDNSIRIGSKGDVFVIREPFISCSHLECRTFFLTQGALLNDKHSNGTVKDRSPYRRLMSCPLGEAPSPYNSRFESVAWSASACHDGMGWLTIGISGPDDGAVAVLKYNGIITETIKSWKKRILRTQESECVCVNGSCFTIMTDGPSNGAASYRIFKIEKGKVTKSIELDAPNSHYEECSCYPDTGTVMCVCRDNWHGSNRPWVSFNQNLDYQIGYICSGVFGDNPPPKDGKGSCNPVTVDGADGVKGFSYRYGNGVWIGRTKSNRFRKGFEMIWDPNGWTDTDSDFSVKQDVVAMTDWSGYSGSFVQHPELTGLDCMRPCFWVELVRGRPRENTTIWTSGSSISFCGVNSDTANWSWPDGAELPFTIDK

SEQ ID NO: 26016 - protein, 469 aa, synthetic construct
  REGION 1..469: note = neuraminidase__InfluenzaA__BAD16637
MNPNQKIITIGSVSLTIATVCFLMQIAILATTVTLHFKQHECDSPASNQVMPCEPIIIERNITEIVYLNNTTIEKEICPEVVEYRNWSKPQCQITGFAPFSKDNSIRLSAGGDIWVTREPYVSCDPGKCYQFALGQGTTLDNKHSNGTIHDRIPHRTLLMNELGVPFHLGTKQVCVAWSSSSCHDGKAWLHVCVTGDDRNATASFIYDGRLVDSIGSWSQNILRTQESECVCINGTCTVVMTDGSASGRADTRILFIKEGKIVHISPLSGSAQHIEECSCYPRYPDVRCICRDNWKGSNRPVIDINMEDYSIDSSYVCSGLVGDTPRNDDSSSNSNCRDPNNERGNPGVKGWAFDNGDDVWMGRTISKDSRSGYETFKVIGGWSTPNSKSQVNRQVIVGNNNWSGYSGIFSVEGKSCINRCFYVELIRGMPQETRVWWTSNSIVVFCGTSGTYGTGSWPDGANINFMPI

SEQ ID NO: 26017 - protein, 469 aa, synthetic construct
  REGION 1..469: note = neuraminidase__InfluenzaA__BAD16638
MNPNQKIITIGSVSLTIATVCFLMQIAILATTVTLHFKQHECDSPASNQVMPCEPIIIERNITEIVYLNNTTIEKEICPEVVEYRNWSKPQCQITGFAPFSKDNSIRLSAGGDIWVTREPYVSCDPGKCYQFALGQGTTLDNKHSNGTIHDRIPHRTLLMNELGVPFHLGTKQVCVAWSSSSCHDGKAWLHVCVTGDDRNATASFIYDGRLVDSIGSWSQNILRTHESECVCINGTCTVVMTDGSASGRADTRILFIKEGKIVHISPLSGSAQHIEECSCYPRYPDVRCICRDNWKGSNRPVIDINMEDYSIDSSYVCSGLVGDTPRNDDSSSNSNCRDPNNERGNPGVKGWAFDNGDDVWMGRTINKDSRSGYETFKVIGGWSTPNSKSQVNRQVIVDNNNWSGYSGIFSVEGKSCINRCFYVELIRGRPQETRVWWTSNSIVVFCGTSGTYGTGSWPDGANINFMPI

SEQ ID NO: 26018 - protein, 469 aa, synthetic construct; identical to SEQ ID NO: 23197
  REGION 1..469: note = neuraminidase__InfluenzaA__BAD16639

SEQ ID NO: 26019 - protein, 469 aa, synthetic construct
  REGION 1..469: note = neuraminidase__InfluenzaA__BAD16640
MNPNQKIITIGSVSLTIATVCFLMQIAILVTTVTLHFKQHECDSPASNQVMPCEPIIIERNITEIVYLNNTTIEKEICPEVVEYRNWSKPQCQITGFAPFSKDNSIRLSAGGDIWVTREPYVSCDPGKCYQFALGQGTTLDNKHSNDTIHDRIPHRTLLMNELGVPFHLGTRQVCVAWSSSSCHDGKAWLHVCVTGDDKNATASFIYDGRLMDSIGSWSQNILRTQESECVCINGTCTVVMTDGSASGRADTRILFIEEGKIVHISPLSGSAQHVEECSCYPRYPDVRCICRDNWKGSNRPVIDINMEDYSIDSSYVCSGLVGDTPRNDDRSSNSNCRNPNNERGNPGVKGWAFDNGDDVWMGRTISKDLRSGYETFKVIGGWSTPNSKSQINRQVIVDSNNWSGYSGIFSVEGKSCINRCFYVELIRGRQQETRVWWTSNSIVVFCGTSGTYGTGSWPDGANINFMPI

SEQ ID NO: 26020 - protein, 469 aa, synthetic construct
  REGION 1..469: note = neuraminidase__InfluenzaA__BAD16641
MNPNQKIITIGSASLTIATVCFLMQIAILVTTVTLHFKQHECDSPASNQVMPCEPIIIERNTTEIVYLNNTTIEKEICPKVVEYRNWSKPQCKITGFAPFSKDNSIRLSAGGDIWVTREPYVSCDPGKCYQFALGQGTTLDNKHSNDTIHDRIPHRTLLMNELGVPFHLGTRQVCIAWSSSSCHDGKAWLHVCVTGDDKNATASFIYDGRLVDSIGSWSQNILRTQESECVCINGTCTVVMTDGSASGRADTRILFIEEGKIVHISPLSGSAQHVEECSCYPRYPDVRCICRDNWKGSNRPVVDINMEDYSIDSSYVCSGLVGDTPRNDDRSSNSNCRNPNNEKGNQGVKGWAFDNGDDVWMGRTISKDLRSGYETFKVIGGWSTPNSKSQINRQVIVDSDNRSGYSGIFSVEGKSCINRCFYVELIRGRKQETRVWWTSNSIVVFCGTSGTYGTGSWPDGANINLMPI

SEQ ID NO: 26021 - protein, 469 aa, synthetic construct
  REGION 1..469: note = neuraminidase__InfluenzaA__BAD16642
MNPNQKIITIGSVSLTIATVCFLMQIAILVTTVTLHFKQYECDSPASNQVMPCEPIIIERNITEIVYLNNTTIDKEKCPKVVEYRNWSKPQCQITGFAPFSKDNSIRLSAGGDIWVTREPYVSCDHGKCYQFALGQGTTLDNKHSNDTIHDRIPHRTLLMNELGVPFHLGTRQVCIAWSSSSCHDGKAWLHVCITGDDKNATASFIYDGRLVDSIGSWSQNILRTQESECVCINGTCTVVMTDGSASGRADTRILFIEEGKIVHISPLSGSAQHVEECSCYPRYPGVRCICRDNWKGSNRPVVDINMEDYSIDSSYVCSGLVGDTPRNDDRSSNSNCRNPNNERGNQGVKGWAFDNGDDVWMGRTISKDLRSGYETFKVIGGWSTPNSKSQINRQVIVDSDNRSGYSGIFSVEGKSCINRCFYVELIRGRKQETRVWWTSNSIVVFCGTSGTYGTGSWPDGANINFMPI

SEQ ID NO: 26022 - protein, 469 aa, synthetic construct
  REGION 1..469: note = neuraminidase__InfluenzaA__BAD16643
MNPNQKIITIGSVSLTIATICFLMQIAILVTTVTLHFKQYECDSPANNQVMPCEPIIIERNITEIVYLTNTTIEKEICPKLVEYRNWSKPQCKITGFAPFSKDNSIRLSAGGDIWVTREPYVSCDPGKCYQFALGQGTTLDNKHSNDTIHDRTPHRTLLMNELGVPFHLGTRQVCIAWSSSSCHDGKAWLHVCVTGYDKNATASFIYDGRLVDSIGSWSQNILRTQESECVCINGTCTVVMTDGSASGRADTKILFIEEGKIVHISPLSGSAQHVEECSCYPRYPGVRCICRDNWKGSNRPVVDINVKDYSIDSSYVCSGLVGDTPRNNDRSSNSYCRNPNNEKGNHGVKGWAFDDGNDVWMGRTISEDSRSGYETFKVIGGLFTPNSKLQINRQVIVDSDNRSGYSGIFSVEGKSCINRCFYVELIRGREQETRVWWTSNSIVVFCGTSGTYGTGSWPDGADINLMPI

SEQ ID NO: 26023 - protein, 469 aa, synthetic construct
  REGION 1..469: note = neuraminidase__InfluenzaA__BAD16644
MNPNQKIITIGSVSLTIATICFLMQIAILVTTVTLHFKQYECDSPPNNQVMPCEPIIIERNITEIVYLTNTTIEKEICPKLVEYRNWSKPQCKITGFAPFSKDNSIRLSAGGDIWVTREPYVSCDPGKCYQFALGQGTTLDNKHSNDTIHDRTPHRTLLMNELGVPFHLGTRQVCIAWSRSSCHDGKAWLHVCVTGYDKNATASFIYDGRLVDSIGSWSKNILRTQESECVCINGTCTVVMTDGSASGRADTKILFIEEGKIVHISPLSGSAQHVEECSCYPRYPGVRCICRDNWKGSNRPVVDINVKDYSIDSSYVCSGLVGDTPRNNDRSSNSYCRNPNNEKGNHGVKGWAFDDGNDVWMGRTISEDSRSGCETFKVIGGWSTPNSKLQINRQVIVDSDNRSGYSGIFSVEGKSCINRCFYVELIRGREQETRVWWTSNSIVVFCGTSGTYGTGSWPDGADINLMPI

SEQ ID NO: 26024 - protein, 469 aa, synthetic construct; identical to SEQ ID NO: 14576
  REGION 1..469: note = neuraminidase__InfluenzaA__BAD16645

SEQ ID NO: 26025 - protein, 469 aa, synthetic construct; identical to SEQ ID NO: 22544
  REGION 1..469: note = neuraminidase__InfluenzaA__BAD16646

SEQ ID NO: 26026 - protein, 469 aa, synthetic construct; identical to SEQ ID NO: 14576
  REGION 1..469: note = neuraminidase__InfluenzaA__BAD16647

SEQ ID NO: 26027 - protein, 469 aa, synthetic construct
  REGION 1..469: note = neuraminidase__InfluenzaA__BAD16648
MNPNQKIITIGSVSLTIATICFLMQIAILVTTVTLHFKQYECSSPPNNQVMPCEPIIIERNITEIVYLTNTTIEKEICPKLVEYRNWSKPQCKITGFAPFSKDNSIRLSAGGDIWVTREPYVSCDPGKCYQFALGQGTTLDNKHSNDTIHDRTPYRTLLMNELGVPFHLGTRQVCIAWSSSSCHDGKAWLHVCVTGYDKNATASFIYDGRLVDSIGSWSKNILRTQESECVCIYGTCTVVMTDGSASERAETKILFIEEGKIVHISPLSGSAQHVEECSCYPRYPGVRCVCRDNWKGSNRPVVDINVKDYSIVSSYVCSGLVGDTPRKNDRSSSSYCRNPNNEKGNHGVKGWAFDDGNDVWMGRTISEESRSGYETFKVIGGWSTPNSKLQINRQVIVDSDNRSGYSGIFSVEGKSCINRCFYVELIRGREQETRVWWTSNSIVVFCGTSGTYGTGSWPDGADINLMPI

SEQ ID NO: 26028 - protein, 469 aa, synthetic construct
  REGION 1..469: note = neuraminidase__InfluenzaA__BAE07203
MNPNQKITTIGSICMVIGIVSLMLQIGNIISIWVSHSIQTGNQHQAEPCNQSIITYENNTWVNQTYVNISNTNFLTEKAVASVTLAGNSSLCPISGWAVYSKDNGIRIGSKGDVFVIREPFISCSHLECRTFFLTQGALLNDKHSNGTVKDRSPHRTLMSCPVGEAPSPYNSRFESVAWSASACHDGTSWLTIGISGPDNGAVAVLKYNGIITDTIKSWRNNIMRTQESECACVNGSCFTVMTDGPSNGQASYKIFRIEKGKVVKSAELNAPNYHYEECSCYPDAGEITCVCRDNWHGSNRPWVSFNQNLEYRIGYICSGVFGDNPRPNDGTGSCGPVSPKGAYGIKGFSFKYGNGVWIGRTKSTNSRSGFEMIWDPNGWTGTDSNFSVKQDIVAITDWSGYSGSFVQHPELTGLDCIRPCFWVELIRGRPKESTIWTSGSSISFCGVNSDTVGWSWPDGAELPFTIDK

SEQ ID NO: 26029 - protein, 469 aa, synthetic construct
  REGION 1..469: note = neuraminidase__InfluenzaA__BAF46322
MNPNPKIITIGSVSLTISTICFFMQIAILITTVTLHFKQYEFNSPPNNQVMLCEPTIIERNITEIVYLTNTTIEKEICPKLAEYRNWSKPQCDITGFAPFSKDNSIRLSAGGDIWVTREPYVSCDPDKCYQFALGQGTTLNNVHSNDTVHDRTPYRTLLMNELGVPFHLGTKQVCIAWSSSSCHDGKAWLHVCVTGDDKNATASFIYNGRLVDSIVSWSKKILRTQESECVCINGTCTVVMTDGSASGKADTKILFIEEGKIVHTSTLSGSAQHVEECSCYPRYPGVRCVCRDNWKGSNRPIVDINIKDYSIVSSYVCSGLVGDTPRKNDSSSSSHCLDPNNEEGGHGVKGWAFDDGNDVWMGRTISEKLRSGYETFKVIEGWSNPNSKLQINRQVIVDRGNRSGYSGIFSVEGKSCINRCFYVELIRGRKEETEVLWTSNSIVVFCGTSGTYGTGSWPDGADINLMPI

SEQ ID NO: 26030 - protein, 469 aa, synthetic construct; identical to SEQ ID NO: 14714
  REGION 1..469: note = neuraminidase__InfluenzaA__BAF46323

SEQ ID NO: 26031 - protein, 469 aa, synthetic construct
  REGION 1..469: note = neuraminidase__InfluenzaA__BAF46324
MNPNQKIITIGSVSLTISTICFFMQIAILITTVTLHFKQYEFNSPPNNQVMLCEPTIIERNITEIVYLTNTTIEKEICPKLAEYRNWSKPQCDITGFAPFSKDNSIRLSAGGDIWVTREPYVSCDPDKCYQFALGQGTTLNNVHSNDIVHDRTPYRTLLMNELGVPFHLGTKQVCIAWSSSSCHDGKAWLHVWVTGDDKNATASFIYNGRLVDSIVSWSKKILRTQESECVCINGTCTVVMTDGSASGKADTKILFIEEGKIVHTSTLSGSAQHVEECSCYPRYPGVRCVCRDNWKGSNRPIVDINIKDYSIVSSYVCSGLVGDTPRKNDSSSSSHCLDPNNEEGGHGVKGWAFDDGNDVWMGRTISEKLRSGYETFKVIEGWSNPNSKLQINRQVIVDRGNRSGYSGIFSVEGKSCINRCFYVELIRGRKEETEVLWTSNSIVVFCGTSGTYGTGSWPDGADINLMPI

SEQ ID NO: 26032 - protein, 469 aa, synthetic construct
  REGION 1..469: note = neuraminidase__InfluenzaA__BAF46332
MNPNQKIITIGSVSLTISTICFFMQIAILITTVTLHFKQYEFNSPPNNQVMLCEPTIIERNITEIVYLTNTTIEKEICPKLAEYRKWSKPQCNITGFAPFSKDNSIRLSAGGDIWVTREPYVSCDPDKCYQFALGQGTTLNNVHSNDTVRDRTPYRTLLMNELGVPFHLGTKQVCIAWSSSSCHDGKAWLHVCVTGDDKNATASFIYNGRLVDSIVSWSKEILRTQESECVCINGTCTVVMTDGSASGKADTKILFIEEGKIVHTSTLSGSAHHVEECSCYPRYPGVRCVCRDNWKGSNRPIVDINIKDYSIVSSYVCSGLVGDTPRKNDSSSSSHCLDPNNEEGGHGVKGWAFDDGNDVWMGRTISEKLRSGYETFKVIEGWSNPNSKLQINRQVIVDRGNRSGYSGIFSVEGKSCINRCFYVELIRGRKEETEVLWTSNSIVVFCGTSGTYGTGSWPDGADINLMPI

SEQ ID NO: 26033 - protein, 469 aa, synthetic construct
  REGION 1..469: note = neuraminidase__InfluenzaA__BAF46334
MNPNQKIITIGSVSLTISTICFFMQIAILITTVTLHFKQYEFNSPPNNQVMLCEPTIIERNITEIVYLTNTTIEKEICPKLAEYRKWSKPQCNITGFAPFSKDNSIRLSAGGDIWVTREPYVSCDPDKCYQFALGQGTTLNNVHSNDTVRDRTPYRTLLMNELGVPFHLGTKQVCIAWSSSSCHDGKAWLHVCVTGDDKNATASFIYNGRLVDSIVSWSKEILRTQESECVCINGTCTVVMTDGSASGKADTKILFIEEGKIVHTSTLSGSAQHVEECSCYPRYPGVRCVCRDNWKGSNRPIVDINIKDYSIVSSYVCSGLVGDTPRKNDSSSSSHCLDPNNEEGGHGVKGWAFDDGNDVWMGRTISEKLRSGYETFKVIEGWSNPNSKLQINRQVIVDRGNRSGYSGIFSVEGKSCINRCFYVELIRGRKEETEVLWTSNSIVVFCGTSGTYGTGSWPDGADINLMPI

SEQ ID NO: 26034 - protein, 469 aa, synthetic construct; identical to SEQ ID NO: 26033
  REGION 1..469: note = neuraminidase__InfluenzaA__BAF46335

SEQ ID NO: 26035 - protein, 469 aa, synthetic construct
  REGION 1..469: note = neuraminidase__InfluenzaA__BAF46337
MNPNQKIITIGSVSLTISTICFFMQIAILITTVTLHFKQYEFNSPPNNQVMLCEPTIIERNITEIVYLTNTTIEKEICPKLAEYRKWSKPQCNITGFAPFSKDNSIRLSAGGDIWVTREPYVSCDPDKCYQFALGQGTTLNNVHSNDTVRVRTPYRTLLMNELGVPFHLGTKQVCIAWSSSSCHDGKAWLHVCVTGDDKNATASFIYNGRLVDSIVSWSKEILRTQESECVCINGTCTVVMTDGSASGKADTKILFIEEGKIVHTSTLSGSAQHVEECSCYPRYPGVRCVCRDNWKGSNRPIVDINIKDYSIVSSYVCSGLVGDTPRKNDSSSSSHCLDPNNEEGGHGVKGWAFDDGNDVWMARTISEKLRSGYETFKVIEGWSNPNSKLQINRQVIVDRGNRSGYSGIFSVEGKSCINRCFYVELIRGRKEETEVLWTSNSIVVFCGTSGTYGTGSWPDGADINLMPI

SEQ ID NO: 26036 - protein, 469 aa, synthetic construct; identical to SEQ ID NO: 26033
  REGION 1..469: note = neuraminidase__InfluenzaA__BAF46345

SEQ ID NO: 26037 - protein, 469 aa, synthetic construct
  REGION 1..469: note = neuraminidase__InfluenzaA__BAF46346
MNPNQKIITIGSVSLTISTICFFMQIAILITTVTLHFKQYEFNSPPNNQVMLCEPTIIERNITEIVYLTNTTIEKEICPKLAEYRKWSKPQCNIAGFAPFSKDNSIRLSAGGDIWVTREPYVSCDPDKCYQFALGQGTTLNNVHSNDTVRDRTPYRTLLMNELGVPFHLGTKQVCIAWSSSSCHDGKAWLHVCVTGDDKNATASFIYNGRLVDSIVSWSKEILRTQESECVCINGTCTVVMTDGSASGKADTKILFIEEGKIVHTSTLSGSAQHVEECSCYPRYPGVICVCRDNWKGSNRPIVDINIKDYSIVSSYVCSGLVGDTPRKNDSSSSSHCLDPNNEEGGHGVKGWAFDDGNDVWMGRTISEKLRSGYETFKVIEGWSNPNSKLQINRQVIVDRGNRSGYSGIFSVEGKSCINRCFYVELIRGRKEETEVLWTSNSIVVFCGTSGTYGTGSWPDGADINLMPI

SEQ ID NO: 26038 - protein, 469 aa, synthetic construct
  REGION 1..469: note = neuraminidase__InfluenzaA__BAF46347
MNPNQKIITIGSVSLTISTICFFMQIAILITTVTLHFKQYEFNSPPNNQVMLCEPTIIERNITEIVYLTNTTIEKEICPKLAEYRKWSKPQCNITGFAPFSKDNSIRLSAGGDIWVTREPYVSCDPDKCYQFALGQGTTLNNVHSNDTVRDRTPYRTLLMNELGVPFHLGTKQVCIAWSSSSCHDGKAWLHVCVTGDDKNATATFIYNGRLVDSIVSWSKEILRTQESECVCINGTCTVVMTDGSASGKADTKILFIEEGKIVHTSTLSGSAQHVEECSCYPRYPGVRCVCRDNWKGSNRPIVDINIKDYSIVSSYVCSGLVGDTPRKNDSSSSSHCLDPNNEEGGHGVKGWAFDDGNDVWMGRTISEKLRSGYETFKVIEGWSNPNSKLQINRQVIVDRGNRSGYSGIFSVEGKSCINRCFYVELIRGRKEETEVLWTSNSIVVFCGTSGTYGTGSWPDGADINLMPI

SEQ ID NO: 26039 - protein, 469 aa, synthetic construct
  REGION 1..469: note = neuraminidase__InfluenzaA__BAF46349
MNPNQKIITIGSVSLTISTICFFMQIAILITTVTLHFKQYEFNSPPNNQVMLCEPTIIERNITEIVYLTNTTIEKEICPKLAEYRKWSKPQCNITGFAPFSKDNSIRLSAGGDIWVTREPYVSCDPDKCYQFALGQGTTLNNVHSNDTVRARTPYRTLLMNELGVPFHLGTKQVCIAWSSSSCHDGKAWLHVCVTGDDKNATASFIYNGRLVDSIVSWSKEILRTQESECVCINGTCTVVMTDGSASGKADTKILFIEEGKIVHTSTLSGSAQHVEECSCYPRYPGVRCVCRDNWKGSNRPIVDINIKDYSIVSSYVCSGLVGDTPRKNDSSSSSHCLDPNNEEGGHGVKGWAFDDGNDVWMGRTISEKLRSGYETFKVFEGWSNPNSKLQINRQVIVDRGNRSGYSGIFSVEGKSCINRCFYVELIRGRKEETEVLWTSNSIVVFCGTSGTYGTGSWPDGADINLMPI

SEQ ID NO: 26040 - protein, 469 aa, synthetic construct; identical to SEQ ID NO: 26033
  REGION 1..469: note = neuraminidase__InfluenzaA__BAF46350

SEQ ID NO: 26041 - protein, 469 aa, synthetic construct
  REGION 1..469: note = neuraminidase__InfluenzaA__BAF46351
MNPIQKIITIGSVSLTISTICFFMQIAILITTVTLHFKQYEFNSPPNNQVMLCEPTIIERNITEIVYLTNTTIEKEICPKLAEYRKWSKPQCNITGFAPFSKDNSIRLSAGGDIWVTREPYVSCDPDKCYQFALGQGTTLNNVHSNDTVRDRTPYRTLLMNELGVPFHLGTKQVCIAWSSSSCHDGKAWLHVCVTGDDKNATASFIYNGRLVDSIVSWSKEILRTQESECVCINGTCTVVMTDGSASGKADTKILFIEEGKIVHTSTLSGSAQHVEECSCYPRYPGVRCVCRDNWKGSNRPMVDINIKDYSIVSSYVCSGLVGDTPRKNDSSSSSHCLDPNNEEGGHGVKGWAFDDGNDVWMGRTISEKLRSGYETFKVIEGWSNPNSKLQINRQVIVDRGNRSGYSGIFSVEGKSCINRCFYVELIRGRKEETEVLWTSNSIVVFCGTSGTYGTGSWPDGADINLMPI

SEQ ID NO: 26042 - protein, 469 aa, synthetic construct
  REGION 1..469: note = neuraminidase__InfluenzaA__BAF46368
MNPNQKIITIGSVSLTISTICFFMQIAILITTVTLHFKQYEFNSPPNNQVMLCEPTIIERNITEIVYLTNTTIEKEICPKLAEYRNWSKPQCNITGFAPFSKDNSIRLSAGGDIWVTREPYVSCDPDKCYQFALGQGTTLNNVHSNDTVRERTPYRTLLMNELGVPFHLGTKQVCIAWSSSSCHDGKAWLHVCVTGDDKNATASFIYNGRLVDSIVSWSKEILRTQESECVCINGTCTVVMTDGSASGKADTKILFIEEGKIVHTSTLSGSAQHVEECSCYPRYPGVRCVCRDNWKGSNRPIVDINIKDYSIVSSYVCSGLVGDTPRKNDSSSSSHCLDPNNEEGGHGVKGWAFDDGNDVWMGRTISEKLRSGYETFKVIEGWSNPNSKLQINRQVIVDRGNRSGYSGIFSVEGKSCINRCFYVELIRGRKEETEVLWTSNSIVVFCGTSGTYGTGSWPDGADINLMPI

SEQ ID NO: 26043 - protein, 469 aa, synthetic construct
  REGION 1..469: note = neuraminidase__InfluenzaA__BAF46369
MNPNQKIITIGSVSLTISTICFFMQIAILITTVTLHFKQYEFNSPPNNQVMLCEPTIIERNITEIVYLTNTTIEKEICPKLAEYRNWSKPQCNITGFAPFSKDNSIRLSAGGDIWVTREPYVSCDPDKCYQFALGQGTTLNNVHSNDTVHDRTPYRTLLMNELGVPFHLGTKQVCIAWSSSSCHDGKAWLHVCVTGDDKNATASFIYNGKLVDSIVSWSKEILRTQESECVCINGTCTVVMTDGSASGKADTKILFIEEGKIVHTSTLSGSAQHVEECSCYPRYPGVRCVCRDNWKGSNRPIVDINIKDYSIVSSYVCSGLVGDTPRKNDSSSSSHCLDPNNEEGGHGVKGWAFDDGNDVWMGRTISEKSRSGYETFQVIEGWSNSNSKLQINRQVIVDRGNRSGYSGIFSVEGKSCINRCFYVELIRGRKEETEVLWTSNSIVVFCGTSGTYGTGSWPDGADINLMPI

SEQ ID NO: 26044 - protein, 469 aa, synthetic construct
  REGION 1..469: note = neuraminidase__InfluenzaA__BAF46370
MNPNQKIITIGSVSLTISTICFFMQIAILITTVTLHFKQYEFNSLPNNQVMLCEPTIIERNITEIVYLTNTTIEKEICPKLAEYRNWSKPQCNITGFAPFSKDNSIRLSAGGDIWVTREPYVSCDPDKCYQFALGQGTTLNNVHSNDTVHDRTPYRTLLMNELGVPFHLGTKQVCIAWSSSSCHDGKAWLHVCVTGDDKNATASFIYNGRLVDSIVSWSKEILRTQESECVCINGTCTVVMTDGSASGKADTKILFIEEGKIVHTSTLSGSAQHVEECSCYPRYPGVRCVCRDNWKGSNRPIVDINIKDYSIVSSYVCSGLVGDTPRKNDSSSSSHCLDPNNEEGGHGVKGWAFDDGNDVWMGRTISEKLRSGYETFKVIEGWSNPNSKLQINRQVIVDRGNRSGYSGIFSVEGKSCINRCFYVELIRGRKEETEVLWTSTSIVVFCGSSGTYGTGSWPDGADINLMPI

SEQ ID NO: 26045 - protein, 469 aa, synthetic construct
  REGION 1..469: note = neuraminidase__InfluenzaA__BAF46371
MNPNQKIITIGSVSLTISTICFFMQIAILITTVTLHFKQYEFNSPPNNQVMLCEPTIIERNITEIVHLTNTTIEKEICPKLAEYRNWSKPQCNITGFAPFSKDNSIRLSAGGDIWVTREPYVSCDPDKCYQFALGQGTTLNNVHSNDTVHDRTPYRTLLMNELGVPFHLGTKQVCIAWSSSSCHDGKAWLHVCVTGDDKNATASFIYNGRLVDSIVSWSKEILRTQESECVCINGTCTVVMTDGSASGKADTKILFIEEGKIVHTSTLSGSAQHVEECSCYPRYPGVRCVCRDNWKGSNRPIVDINIKDYSIVSSYVCSGLVGDTPRKNDSSSSSHCLDPNNEEGGHGVKGWAFDDGNDVWMGRTISEKLRSGYETFKVIEGWSNPNSKLQTNRQVIVDRSNRSGYSGIFSVEGKSCINRCFYVELIRGRKEETEVLWTSNSIVVFCGTSGTYGTGSWPDGADINLMPI

SEQ ID NO: 26046 - protein, 469 aa, synthetic construct
  REGION 1..469: note = neuraminidase__InfluenzaA__BAF46372
MNPNQKIITIGSVSLTISTICFFMQIAILITTVTLHFKQYEFNSPPNNQVMLCEPTIIERNITEIVYLTNTTIEKEICPKLAEYRNWSKPQCDIAGFAPFSKDNSIRLSAGGDIWVTREPYVSCDPDKCYQFALGQGTTLNNVHSNDTVHDRTPYRTLLMNELGVPFHLGTKQVCIAWSSSSCHDGKAWLHVCVTGDDKNATASFIYNGRLVDSIVSWSKKILRTQESECVCINGTCTVVMTDGSASGKADTKILFIEEGKIVHTSTLSGSAQHVEECSCYPRYPGVRCVCRDNWKGSNRPIVDINIKDYSIVSSYVCSGLVGDTPRKNDSSSSSHCLDPNNEEGGHGVKGWAFDDGNDVWMGRTISEKLRSGYETFKVIEGWSNPNSKLQINRQVIVDRGNRSGYSGIFSVEGKSCINRCFYVELIRGRKEETEVLWTSNSIVVFCGTSGTYGTGSWPDGADINLMPI

SEQ ID NO: 26047 - protein, 469 aa, synthetic construct
  REGION 1..469: note = neuraminidase__InfluenzaA__BAF46385
MNPNQKIITIGSVSLTISTICFFMQIAILITTVTLHFKQYEFNSPPNNQVMLCEPTIIERNITEIVYLTNTTIEKEICPKLAEYRNWSKPQCNITGFAPFSKDNSIRLSAGGDIWVTREPYVSCDPDKCYQFALGQGTTLNNVHSNDTVHDRTPYRTLLMNELGVPFHLGTKQVCIAWSSSSCPDGKAWLHVCVTGDDKNATASFIYNGRLVDSIVSWSKEILRTQESECVCINGTCTVVMTDGSASGKADTKILFIEEGKIVHTSTLSGSAQHVEECSCYPRYPGARCVCRDNWKGSNRPIVDINIKDYSIVSSYVCSGLVGDTPRKNDSSSSSHCLDPNNEEGGHGVKGWAFDDGNDVWMGRTISEKLRSGYETFKVIEGWSNPNSKLQTNRQVIVDRGNRSGYSGIFSVEGKSCINRCFYVELIRGRKEETEVLWTSNSIVVFCGTSSTYGTGSWPDGADINLMPI

SEQ ID NO: 26048 - protein, 469 aa, synthetic construct
  REGION 1..469: note = neuraminidase__InfluenzaA__BAF46386
MNPNQKIITIGSVSLTISTICFFMQIAILITTVTLHFKQYEFNSPPNNQVMLCEPTIIERNITEIVYLTNTTIEKEICPKLAEYRNWSKPQCNITGFAPFSKDNSIRLSAGGDIWVTREPYVSCDPDKCYQFALGQGTTLNNVHSNDTVHDRTPYRTLLMNELGVPFHLGTKQVCIAWSSSSCHDGKAWLHVCVTGDDKNATASFIYNGRLVDSIVSWSKEILRTQESECVCINGTCTVVMTDGSASGKADTKILFIEEGKIVHTSTLSGSAQHVEECSCYPRYPGVRCVCRDNWKGSNRPIVDINIKDYSIVSSYVCSGLVGDTPRKNDSSSSSHCLDPNNEEGGHGVKGWAFDDGNDVWMGRTISEKLRSGYETFKVIEGWSNPNSKLQTNRQVIVDRGNRSGYSGIFSVEGKSCINRCFYVELIRGRKEETEVLWTSNSIVVFCGTSSTYGTGSWPDGADINLMPI

SEQ ID NO: 26049 - protein, 469 aa, synthetic construct; identical to SEQ ID NO: 16564
  REGION 1..469: note = neuraminidase__InfluenzaA__BAF46387

SEQ ID NO: 26050 - protein, 469 aa, synthetic construct
  REGION 1..469: note = neuraminidase__InfluenzaA__BAF46388
MNPNQKIITIGSVSLTISTICFFMQIAILITTVTLHFKQYEFNSPPNNQVMLCEPTIIERNITEIVYLTNTTIEKEICPKLAEYRNWSKPQCNITGFAPFSKDNSIRLSAGGDIWVTREPYVSCDPDKCYQFALGQGTTLNNVHSNDTVHDRTPYRTLLMNELGVPFHLGTKQVCIAWSSSSCHDGKAWLHVCVTGDDKNATASFIYNGRLVDSIVSWSKEILRTQESECVCINGTCTVVMTDGSASGKADTKILFIEEGKIVHTSTLSGSAQHVEECSCYPRYPGVRCVCRDNWKGSNRPIVDINIKDYSIVSSYVCSGLVGDTPRKNDSSSSSHCLDPNNEEGGHGVKGWAFDDGNDVWMGRTISEKLRSGYETFKVIEGWSNPNSKLQINRQDIVDRGNRSGYSGIFSVEGKSCINRCFYVELIRGRKEENEVLWTSNSIVVFCGTSGTYGTGSWPDGADINLMPI

SEQ ID NO: 26051 - protein, 469 aa, synthetic construct
  REGION 1..469: note = neuraminidase__InfluenzaA__BAF47922
MNPNQKIITIGSVSLTISTICFFMQIAILITTVTLHFKQYEFNSPPNIQVMLCEPTIIERNITEIVYLTNTTIEKEICPKLAEYRNWSKPQCDITGFAPFSKDNSIRLSAGGDIWVTREPYVSCDPDKCYQFALGQGTTLNNVHSNDTVHDRTPYRTLLMNELGVPFHLGTKQVCIAWSSSSCHDGKAWLHVCVTGDDKNATASFIYNGRLVDSIVSWSKEILRTQESECVCINGTCTVVMTDGSASGKADTKILFIEEGKIVHTSTLSGSAQHVEECSCYPRYPGVRCVCRDNWKGSNRPIVDINIKDYSIASSYVCSGLVGDTPRKNDSSSSSHCLDPNNEEGGHGVKGWAFDDGNDVWMGRTISEKLRSGYETFKVIEGWSNPNSKLQINRQVIVDRGNRSGYSGIFSVEGKSCINRCFYVELIRGRKEETEVLWTSNSIVVFCGTSGTYGTGSWPDGADINLMPI

SEQ ID NO: 26052 - protein, 469 aa, synthetic construct; identical to SEQ ID NO: 14694
  REGION 1..469: note = neuraminidase__InfluenzaA__BAF47923

SEQ ID NO: 26053 - protein, 469 aa, synthetic construct
  REGION 1..469: note = neuraminidase__InfluenzaA__BAF47924
MNPNQKIITIGSVSLTISTICFFMQIAILITTVTLHFKQYEFNSPPNNQVMLCEPTIIERNITEIVYLTNTTIEKEICPKLAEYRNWSKPQCNITGFAPFSKDNSIRLSAGGDIWVTREPYVSCDPDKCYQFALGQGTTLNNVHSNDTVHDRTPYRTLLMNELGVPFHLGTKQVCIAWSSSSCHDGKAWLHVCVTGDDKNATASFIYNGRLVDSIVSWSKEILRTQESECVCINGTCTVVMTDGSASGKADTKILFIEEGKIVHTSTLSGSAQHVEECSCYPRYPGVRCVCRDNWKGSNRPIVDINIKDYSIVSSYVCSGLVGDTPRKNDSSSSSHCLDPNSEEGGHGVKGWAFDDGNDVWMGRTISEKLRSGYETFKVIEGWSNPNSKLQTNRQVIVDRGNRSGYSGIFSVEGKSCINRCFYVELIRGRKEETEVLWTSNSIVVFCGTSGTYGTGSWPDGADINLMPI

SEQ ID NO: 26054 - protein, 469 aa, synthetic construct; identical to SEQ ID NO: 14712
  REGION 1..469: note = neuraminidase__InfluenzaA__BAF47925

SEQ ID NO: 26055 - protein, 469 aa, synthetic construct; identical to SEQ ID NO: 14712
  REGION 1..469: note = neuraminidase__InfluenzaA__BAF47926

SEQ ID NO: 26056 - protein, 469 aa, synthetic construct; identical to SEQ ID NO: 20699
  REGION 1..469: note = neuraminidase__InfluenzaA__BAF47927

SEQ ID NO: 26057 - protein, 469 aa, synthetic construct; identical to SEQ ID NO: 16564
  REGION 1..469: note = neuraminidase__InfluenzaA__BAF47928

SEQ ID NO: 26058 - protein, 469 aa, synthetic construct
  REGION 1..469: note = neuraminidase__InfluenzaA__BAF47929
MNPNQKIITIGSVSLTISTICFFMQIAILITTVTLHFKQYEFNSPPNNQVMLCEPTIIERNITEIVYLTNTTTEKEICPKLAEYRNWSKPQCNITGFAPFSKDNSIRLSAGGDIWVTREPYVSCDPDKCYQFALGQGTTLNNVHSDDTVHDRTPYRTLLMNELGVPFHLGTKQVCIAWSSSSCHDGKAWLHVCVTGDDKNATASFIYNGRLVDSIVSWSKEILRTQESECVCINGTCTVVMTDGSASGKADTKILFIEEGKIVHTSTLSGSAQHVEECSCYPRYPGVRCVCRDNWKGSNRPIVDINIKDYSIVSSYVCSGLVGDTPRKNDSSSSSHCLDPNNEEGGHGVKGWAFDDGNDVWMGRTISEKLRSGYETFKVIEGWSNPNSKLQINRQVIVDRGNRSGYSGIFSVEGKSCINRCFYVELIRGRKEENEVLWTSNSIVVFCGTSGTYGTGSWPDGADINLMPI

SEQ ID NO: 26059 - protein, 469 aa, synthetic construct
  REGION 1..469: note = neuraminidase__InfluenzaA__BAF47930
MNPNQKIITIGSVSLTISTICFFMQIAILITTVTLHFKQYEFNSPPNNQVMLCEPTIIERNITEIVYLTNTTIEKEICPKLAEYRNWSKPQCNITGFAPFSKDNSIRLSAGGDIWVTREPYVSCDPDKCYQFALGQGTTLNNVHSNDTVHGRTPYRTLLMNELGVPFHLGTKQVCIAWSSSSCHDGKAWLHVCVTGDDKNATASFIYNGRLVDSIVSWSKEILRTQESECVCINGTCTVVMTDGSASGKADTKILFIEEGKIVHTSTLSGSAQHVEECSCYPRYPGVRCVCRDNWKGSNRPIVDINIKDYSTVSSYVCSGLVGDTPRKNDSSSSGHCLDPNNEEGGHGVKGWAFDDGNDVWMGRTISEKLRSGYETFKVIEGWSNPNSKLQINRQVIVDRGNRSGYSGIFSVEGKSCINRCFYVELIRGRKEETEVLWTSNSIVVFCGTSGTYGTGSWPDGADINLMPI

SEQ ID NO: 26060 - protein, 469 aa, synthetic construct; identical to SEQ ID NO: 20699
  REGION 1..469: note = neuraminidase__InfluenzaA__BAF47931

SEQ ID NO: 26061 - protein, 469 aa, synthetic construct
  REGION 1..469: note = neuraminidase__InfluenzaA__BAF47932
MNPNQKIITIGSVSLTISTICFFMQIAILITTVTLHFKQYEFNSPPNNQVMLCEPTIIERNITEIVYLTNTTIEKEICPKLAEYRNWSKPQCNITGFAPFSKDNSIRLSAGGDIWVTREPYVSCDPDKCYQFALGQGTTLNNVHSNDTVHDRTPYRTLLMNELGVPFHLGTKQVCIAWSSSSCHDGKAWLHVCVTGDDKNATASFIYNGRLVDSIVSWSKEILRTQESECVCINGTCTVVMTDGSASGKADTKILFIEEGKIVHTSTLSGSAQHVEECSCYPRYPGVRCVCRDNWKGSNRPIVDINIKDYSIVSSYVCSGLVGDTPRKNDSSSSGHCLDPNNEEGGHGVKGWAFDDGNDVWMGRTISEKLRSGYETFKVIEGWSNPNSKLQINRQVIVDRGNRSGYSGIFSVEGKSCINRCFYVELIRGRKEETEVLWTSNSIVVFCGTSGTYGTGSWPDGADINLMPI

SEQ ID NO: 26062 - protein, 469 aa, synthetic construct; identical to SEQ ID NO: 14712
  REGION 1..469: note = neuraminidase__InfluenzaA__BAF47933

SEQ ID NO: 26063 - protein, 469 aa, synthetic construct; identical to SEQ ID NO: 14714
  REGION 1..469: note = neuraminidase__InfluenzaA__BAF47934

SEQ ID NO: 26064 - protein, 469 aa, synthetic construct; identical to SEQ ID NO: 14714
  REGION 1..469: note = neuraminidase__InfluenzaA__BAF47935

SEQ ID NO: 26065 - protein, 469 aa, synthetic construct
  REGION 1..469: note = neuraminidase__InfluenzaA__BAF47936
MNPNQKIITIGSVSLTISTICFFMQIAILITTVTLHFKQYEFNSPPNNQVMLCEPTIIERNITEIVYLTNTTIEKEICPKLAEYRNWSKPQCNITGFAPFSKDNSIRLSAGGDIWVTREPYVSCDPDKCYQFALGQGTTLNNVHSNDTVHDRTPYRTLLMNELGVPFHLGTKQVCIAWSSSSCHDGKAWLHVCITGDDKNATASFIYNGRLVDSIVSWSKEILRTQESECVCINGTCTVVMTDGSASGKADTKILFIEEGKIVHTSTLSGSAQHVEECSCYPRYPGVRCVCRDNWKGSNRPIVDINIKDYSIVSSYVCSGLVGDTPRKNDSSSSGHCLDPNNEEGGHGVKGWAFDDGNDVWMGRTISEKLRSGYETFKVIEGWSNPNSKLQINRQVIVDRGNRSGYSGIFSVEGKSCINRCFYVELIRGRKEETEVLWTSNSIVVFCGTSGTYGTGSWPDGADINLMPI

SEQ ID NO: 26066 - protein, 469 aa, synthetic construct
  REGION 1..469: note = neuraminidase__InfluenzaA__BAF47937
MNPNQKIITIGSVSLTISTICFFMQIAILITTVTLHFKQYEFNSPPNNQVMLCEPTIIERNITEIVYLTNTTIEKEICPKLAEYRNWSKPQCNITGFAPFSKDNSIRLSAGGDIWVTREPYVSCGPDKCYQFALGQGTTLNNVHSNDTVHDRTPYRTLLMNELGVPFHLGTKQVCIAWSSSSCHDGKAWLHVCVTGDDKNATASFIYNGRLVDSIVSWSKEILRTQESECVCINGTCTVVMTDGSASGKADTKILFIEEGKIVHTSTLSGSAQHVEECSCYPRYPGVRCVCRDNWKGSNRPIVDINIKDYSIVSSYVCSGLVGDTPRKNDSSSSSHCLDPNNEEGGHGVKGWAFDDGNDVWMGRTISEKLRSGYETFKVIEGWSNPNSKLQINRQVIVDRGNRSGYSGIFSVEGKSCINRCFYVELIRGRKEETEVLWTSNSIVVFCGTSGTYGTGSWPDGADINLMPI

SEQ ID NO: 26067 - protein, 469 aa, synthetic construct
  REGION 1..469: note = neuraminidase__InfluenzaA__BAF47938
MNPNQKIITIGSVSLTISTICFFMQIAILITTVTLHFKQYEFNSLPNNQVMLCEPTIIERNITEIVYLTNTTIEKEICPKLAEYRNWSKPQCNITGFAPFSKDNSIRLSAGGDIWVTREPYVSCDPDKCYQFALGQGTTLNNVHSNDTVHGRTPYRTLLMNELGVPFHLGTKQVCIAWSSSSCHDGKAWLHVCVTGDDKNATASFIYNGRLVDSIVSWSKEILRTQESECVCINGTCTVVMTDGSASGKADTKILFIEEGKIVHTSTLSGSAQHVEECSCYPRYPGVRCVCRDNWKGSNRPIVDINIKDYSIVSSYVCSGLVGDTPRKTDSSSSSHCLDPNNEEGGHGVKGWAFDDGNDVWMGRTISEKLRSGYETFKVIEGWSNPNSKLQINRQVIVDRGNRSGYSGIFSVEGKSCINRCFYVELIRGRKEETEVLWTSNSIVVFCGTSGTYGTGSWPDGADINLMPI

SEQ ID NO: 26068 - protein, 469 aa, synthetic construct; identical to SEQ ID NO: 14714
  REGION 1..469: note = neuraminidase__InfluenzaA__BAF47939

SEQ ID NO: 26069 - protein, 469 aa, synthetic construct
  REGION 1..469: note = neuraminidase__InfluenzaA__BAF47940
MNPNQKIITIGSVSLTISTICFFMQIAILITTVTLHFKQYEFNSPPNNQVMLCEPTIIERNITEIVYLTNTTIEKEICPKLAEYRNWSKPQCDITGFAPFSKDNSIRLSAGGDIWVTREPYVSCDPDKCYQFALGQGTTLNNVHSNDTVHDRTPYRTLLMNELGVPFHLGTKQVCIAWSSSSCHDGKAWLHVCVTGDDKNATASFIYNGRLVDSIVSWSKKILRTQESECVCINGTCTVVMTDGSASGKADTKILFIEEGKIVHTSTLSGSAQHVEECSCYPRYPGVRCVCRDNWKGSNRPIVDINIKDYSIVSSYVCSGLVGDTPRKNDSSSSSHCLDPNNEEGGHGVKGWAFDDGNDVWMGRTISEKLRSGYETFKVIEGWSNPNSKLQINRQVIVDRGNRSGYSGIFSVEGKSCINRCFYVELIRGRKEKTEVLWTSNSIVVFCGTSGTYGTGSWPDGADINLMPI

SEQ ID NO: 26070 - protein, 469 aa, synthetic construct; identical to SEQ ID NO: 14712
  REGION 1..469: note = neuraminidase__InfluenzaA__BAF47941

SEQ ID NO: 26071 - protein, 469 aa, synthetic construct
  REGION 1..469: note = neuraminidase__InfluenzaA__BAF47943
MNPNQKIITIGSVSLTISTICFFMQIAILITTVTLHFKQYEFNSPPNNQVMLCEPTIIERNITEIVYLTNTTIEKEICPKLAEYRNWSKPQCNITGFAPFSKDNSIRLSAGGDIWVTREPYVSCDPDKCYQFALGQGTTLNNVHSNDTVHDRTPYRTLLMIELGVPFHLGTKQVCIAWSSSSCHDGKAWLHVCVTGDDKNATASFIYNGRLVDSIVSWSKEILRTQESECVCINGTCTVVMTDGSASGKADTKILFIEEGKIVHTSTLSGSAQHVEECSCYPRYPGVRCVCRDNWKGSNRPIVDINIKDYSIVSSYVCSGLVGDTPRKNDSSSSSHCLDPNNEEGGHGVKGWAFDDGNDVWMGRTISEKLRSGYETFKVIEGWSNPNSKLQTNRQVIVDRGNRSGYSGIFSVEGKSCINRCFYVELIRGRKEETEVLWTSNSIVVFCGTSGTYGTGSWPDGADINLMPI

SEQ ID NO: 26072 - protein, 469 aa, synthetic construct
  REGION 1..469: note = neuraminidase__InfluenzaA__BAF47944
MNPNQKIITIGSVSLTISTICFFMQIAILITTVTLHFKQYEFNSPPNNQVMLCEPTIIERNITEIVYLTNTTIEKEICPKLTEYRNWSKPQCNITGFAPFSKDNSIRLSAGGDIWVTREPYVSCDPDKCYQFALGQGTTLNNVHSNDPVHDRTPYRTLLMNELGVPFHLGTKQVCIAWSSSSCHDGKAWLHVCVTGDDKNATASFIYNGRLVDSIVSWSKEILRTQESECVCINGTCTVVMTDGSASGKADTKILFIEEGKIVHTSTLSGSAQHVEECSCYPRYPGVRCVCRDNWKGSNRPIVDINIKDYSIVSSYVCSGLVGDTPRKNDSSSSSHCLDPNNEEGGHGVKGWAFDDGNDVWMGRTISEKLRSGYETFKVIEGWSNPNSKLQTNRQVIVDRGNRSGYSGIFSVEGKSCINRCFYVELIRGRKEETEVLWTSNSIVVFCGTSGTYGTGSWPDGADINLMPI

SEQ ID NO: 26073 - protein, 469 aa, synthetic construct
  REGION 1..469: note = neuraminidase__InfluenzaA__BAF47945
MNPNQKIITIGSVSLTISTICFFMQIAILITTVTLHFKQYEFNSPPNNQVKLCEPTIIERNITEIVYLTNTTIEKEICPKLAEYRNWSKPQCNITGFAPFSKDNSIRLSAGGDIWVTREPYVSCDPDKCYQFALGQGTTLNNVHSNDTVHDRTPYRTLLMNELGVPFHLGTKQVCIAWSSSSCHDGKAWLHVCVTGDDKNATASFIYNGRLVDSIVSWSKEILRTQESECVCINGTCTVVMTDGSASGKADTKILFIEEGKIVHTSTLSGSAQHVEECSCYPRYPGVRCVCRDNWKGSNRPIVDINIKDYSIVSSYVCSGLVGDTPRKNDSSSSSHCLDPNNEEGGHGVKGWAFDDGNDVWMGRTISEKLRSGYETFKVIEGWSNPNSKLQTNRQVIVDRGNRSGYSGIFSVEGKSCINRCFYVELIRGRKEETEVLWTSNSIVVFCGTSGTYGTGSWPDGADINLMPI

SEQ ID NO: 26074 - protein, 469 aa, synthetic construct
  REGION 1..469: note = neuraminidase__InfluenzaA__BAF47946
MNPNQKIITIGSVSLTISTICFFMQIAILITTVTLHFKQYEFNSPPNNQVMLCEPTIIERNITEIVYLTNTTIEKEICPKLAEYRNWSKPQCNITGFAPFSKDNSIRLSAGGDIWVTREPYVSCDPDKCYQFALGQGTTLNNVHSNDTVHDRTPYRTLLMNELGVPFHLGTKQVCIAWSSSSCHDGKAWLHVCVTGDDKNATASFIYNGRLVDSIVSWSKEILRTQESECVCINGTCTVVMTDGSASGKADTKILFIEEGKIVHTSTLSGSAQHVEECSCYPRYPGVRCVCRDNWKGSNRPIVDINIKDYSIVSSYVCSGLVGDTPRKNDSSSSSHCLDPNNEEGGHGVKGWAFDDGNDVWMGRTISEKLRSGYETFKVLEGWSNPNSKLQTNRQVIVDRGNRSGYSGIFSVEGKSCINRCFYVELIRGRKEETEVLWTSNSIVVFCGTSGTYGTGSWPDGADINLMPI

SEQ ID NO: 26075 - protein, 469 aa, synthetic construct
  REGION 1..469: note = neuraminidase__InfluenzaA__BAF47948
MNPNQKIITIGSVSLTISTICFFMQIAILITTVTLHFKQYEFNSPPNNQVMLCEPTIIERNITEIVYLTNTTIEKEICPKLAEYRNWSKPQCDITGFAPFSKDNSIRLSAGGDIWVTREPYVSCDPDKCYQFALGQGTTLNNVHSNDKVHDRTPYRTLLMNELGVPFHLGTKQVCIAWSSSSCHDGKAWLHVCVTGDDKNATASFIYNGRLVDSIVSWSKKILRTQESECVCINGTCTVVMTDGSASGKADTKILFIEEGKIVHTSTLSGSAQHVEECSCYPRYPGVRCVCRDNWKGSNRPIVDINIKDYSIVSSYVCSGLVGDTPRKNDSSSSSHCLDPNNEEGGHGVKGWAFDDGNDVWMGRTISEKLRSGYETFKVIEGWSNSNSKLQINRQVIVDRGNRSGYSGIFSVEGKSCINRCFYVELIRGRKEETEVLWTSNSIVVFCGTSGTYGTGSWPDGADINLMPI

SEQ ID NO: 26076 - protein, 469 aa, synthetic construct
  REGION 1..469: note = neuraminidase__InfluenzaA__BAF47949
MNPNQKIITIGSVSLTISTICFFMQIAILITTVTLHFKQYEFNSPPNNQVMLCEPTIIERNITEIVYLTNTTIEKEICPKLAEYRNWSKPQCDITGFAPFSKDNSIRLSAGGDIWVTREPYVSCDPDKCYQFALGQGTTLNNVHSNDKVHDRTPYRTLLMNELGVPFHLGTKQVCIAWSSSSCHDGKAWLHVCVTGDDKNATASFIYNGRLVDSIVSWSKKILRTQESECVCINGTCTVVMTDGSASGKADTKILFIEEGKIVHTSTLSGSAQHVEECSCYPRYPGVRCVCRDNWKGSNRPIVDINIKDYSIVSSYVCSGLVGDTPRKNDSSSSSHCLDPNNEEGGHGVKGWAFDDGNDVWMGRTISEKLRSGYETFKVIEGWSNPNSKLQINRQVIVDRGNRSGYSGIFSVEGKSCINRCFYVELIRGRKEETEVLWTSNSIVVFCGTSGTYGTGSWPDGADINLMPI

SEQ ID NO: 26077 - protein, 469 aa, synthetic construct; identical to SEQ ID NO: 14714
  REGION 1..469: note = neuraminidase__InfluenzaA__BAF47950

SEQ ID NO: 26078 - protein, 469 aa, synthetic construct
  REGION 1..469: note = neuraminidase__InfluenzaA__BAF47951
MNPNQKIITIGSVSLTISTICFFMQIAILITTVTLHFKQYEFNSPPNNQVMLCEPTIIERNITEIVYLTNTTIEKEICPKLAEYRNWSKPQCDITGFAPFSKDNSIRLSAGGDIWVTREPYVSCDPDKCYQFALGQGTTLNNVHSNDTVHDRTPYRTLLMNELGVPFHLGTKQVCIAWSSSSCHDGKAWLHVCVTGDDKNATASFIYNGRLVDSIVSWSKKILRTQESECVCINGTCTVVMTDGSASGKADTKILFIEEGKIVHTSTLSGSAQHVEECSCYPRYPGVRCVCRDNWKGSNRPIVDINIKDYSIVSSYVCSGLVGDTPRKNDSSSSSHCLDPNNEEGGHGVKGWAFDDGNDVWMGRTISEKLRSGYETFKVIEGWSNSNSKLQINRQVIVDRGNRSGYSGIFSVEGKSCINRCFYVELIRGRKEETEVLWTSNSIVVFCGTSGTYGTGSWPDGADINLMPI

SEQ ID NO: 26079 - protein, 469 aa, synthetic construct
  REGION 1..469: note = neuraminidase__InfluenzaA__BAF47952
MNPNQKIITIGSVSLTISTICFFMQIAILITTVTLHFKQYEFNSPPNNQVMLCEPTIIERNITEIVYLTNTTIEKEICPKLAEYRNWSKPQCNITGFAPFSKDNSIRLSAGGDIWVTREPYVSCDPDKCYQFALGQGTTLNNVHSNDTVHDRTPYRTLLMNELGVPFHLGTKQVCIAWSSSSCHDGKAWLHVCVTGDDKNATASFIYNGRLVDSIVSWSKEILRTQESECVCINGTCTVVMTDGSASGKADTKILFIEEGKIVHTSTLSGSAQHVEECSCYPRYPGVRCVCRDNWKGSNRPIVDINIKDYSIVSSYVCSGLVGDTPRKNDSSSSSHCLDPNNEEGGHGVKGWAFDDGNDVWMGRTISEKLRSGYETFKVIEGWSNPNSKLQTNRQVIVDRGNRSGYSGIFSVEGKSCINRCFYVELIRGRKEETEVLWTSNSIVVFCGTSGTYGTGSWPDGANINLMPI

SEQ ID NO: 26080 - protein, 469 aa, synthetic construct
  REGION 1..469: note = neuraminidase__InfluenzaA__BAF47953
MNPNQKIITIGSVSLTISTICFFMQIAILITTVTLHFKQYEFNSPPNNQVMLCEPTIIERNITEIVYLTNTTIEKEICPKLAEYRNWSKPQCDITGFAPFSKDNSIRLSAGGDIWVTREPYVSCDPDKCYQFALGQGTTLNNVHSNDTVHDRTPYRTLLMNELGVPFHLGTKQVCIAWSSSSCHDGKAWLHVCVTGDDENATASFIYNGRLVDSIVSWSKKILRTQESECVCINGTCTVVMTDGSASGKADTKILFIEEGKIVHTSTLSGSAQHVEECSCYPRYPGVRCVCRDNWKGSNRPIVDINIKDYSIVSSYVCSGLVGDTPRKNDSSSSSHCLDPNNEEGGHGVKGWAFDDGNDVWMGRTISEKLRSGYETFKVIEGWSNPNSKLQINRQVIVDRGNRSGYSGIFSVEGKSCINRCFYVELIRGRKEETEVLWTSNSIVVFCGTSGTYGTGSWPDGADINLMPI

SEQ ID NO: 26081 - protein, 469 aa, synthetic construct; identical to SEQ ID NO: 26033
  REGION 1..469: note = neuraminidase__InfluenzaA__BAF47954

SEQ ID NO: 26082 - protein, 469 aa, synthetic construct; identical to SEQ ID NO: 26033
  REGION 1..469: note = neuraminidase__InfluenzaA__BAF47955

SEQ ID NO: 26083 - protein, 469 aa, synthetic construct
  REGION 1..469: note = neuraminidase__InfluenzaA__BAF47956
MNPNQKIITIGSVSLTISTICFFMQIAILITTVTLHFKQYEFNSPPNNQVMLCEPTIIERNITEIVYLTNTTIEKEICPKLAEYRKWSKPQCNITGFAPFSKDNSIRLSAGGDIWVTREPYVSCDPDKCYQFALGQGTTLNNVHSNDTVRDRTPYRTLLMNELGVPFHLGTKQVCIAWSSSSCHDGKAWLHVCVTGDDKNATASFIYNGRLVDSIVSWSKEILRTQESECVCINGTCTVVMTDGSASGKADTKILFIEEGKIVHTSTLSGSAQHVEECSCYPRYPGVRCVCRDNWKGSNRPIVDINIKDYSIVSSYVCSGLVGDTPRKNDSSSSSHCLDPNNEEGGHGVKGWAFDDGNDVWMGRTISEKLRSGYETFKVIEGWSNPNSKLQINRQVIVDRGNRSGYSGIFSVEGKSCINRCFYVELIRGRKEETEVLWTSNSIVVFCGTSGTYGTGSWPDGADINFMPI

SEQ ID NO: 26084 - protein, 469 aa, synthetic construct
  REGION 1..469: note = neuraminidase__InfluenzaA__BAF47958
MNPNQKIITIGSVSLTISTICFFMQIAILITTVTLHFKQYEFNSPPNNQVMLCEPTIIERNITEIVYLTNTTIEKEICPKLAEYRKWSKPQCNITGFAPFSKDNSIRLSAGGDIWVTREPYVSCDPDKCYQFALGQGTTLNNVHSNDTVRDRTPYRTLMMNELGVPFHLGTKQVCIAWSSSSCHDGKAWLHVCVTGDDKNATASFIYNGRLVDSIVSWSKEILRTQESECVCINGTCTVVMTDGSASGKADTKILFIEEGKIVHTSTLSGSAQHVEECSCYPRYPGVRCVCRDNWKGSNRPIVDINIKDYSIVSSYVCSGLVGDTPRKNDSSSSSHCLDPNNEEGGHGVKGWAFDDGNDVWMGRTISEKLRSGYETFKVIEGWSNPNSKLQINRQVIVDRGNRSGYSGIFSVEGKSCINRCFYVELIRGRKEETEVLWTSNSIVVFCGTSGTYGTGSWTDGADINFMPI

SEQ ID NO: 26085 - protein, 469 aa, synthetic construct
  REGION 1..469: note = neuraminidase__InfluenzaA__BAF47959
MNPNQKIITIGSVSLTISTICFFMQIAILITTVTLHFKQYEFNSPPNNQVMLCEPTIIERNITEIVYLTNTTIEKEICPKLAEYRNWSKPQCNITGFAPFSKDNSIRLSAGGDIWVTREPYVSCDPDKCYQFALGQGTTLNNVHSNYTVHDRTPYRTLLMNELGVPFHLGTKQVCIAWSSSSCHDGKAWLHVCVTGDDKNATASFIYNGRLVDSIVSWSKEILRTQESECVCINGTCTVVMTDGSASGKADTKILFIEEGKIVHTSTLSGSAQHVEECSCYPRYPGVRCVCRDNWKGSNRPIVDINIKDYSIVSSYVCSGLVGDTPRKNDSSSSGHCLDPNNEEGGHGVKGWAFDDGNDVWMGRTISEKLRSGYETFKVIEGWSNPNSKLQINRQVIVDRGNRSGYSGIFSVEGKSCINRCFYVELIRGRKEETEVLWTSNSIVVFCGTSGTYGTGSWPDGADINLMPI

SEQ ID NO: 26086 - protein, 469 aa, synthetic construct
  REGION 1..469: note = neuraminidase__InfluenzaA__BAF47960
MNPNQKIITIGSVSLTISTICFFMQIAILITTVTLHFKQYEFNSPPNNQVMLCEPTIIERNITEIVYLTNTTIEKEICPKLAEYRNWSKPQCNITGFAPFSKDNSIRLSAGGDIWVTREPYVSCDPDKCYQFALGQGTTLNNVHSNDTVHNRTPYRTLLMNELGVPFHLGTKQVCIAWSSSSCHDGKAWLHVCVTGDDKNATASFIYNGRLVDSIVSWSKEILRTQESECVCINGTCTVVMTDGSASGKADTKILFIEEGKIVHTSTLSGSAQHVEECSCYPRYPGVRCVCRDNWKGSNRPIVDINIKDYSIVSSYVCSGLVGDTPRKNDSSSSGHCLDPNNEEGGHGVKGWAFDDGNDVWMGRTISEKLRSGYETFKVIEGWSNPNSKLQINRQVIVDRGNRSGYSGIFSVEGKSCINRCFYVELIRGRKEETEVLWTSNSIVVFCGTSGTYGTGSWPDGADINLMPI

SEQ ID NO: 26087 - protein, 469 aa, synthetic construct
  REGION 1..469: note = neuraminidase__InfluenzaA__BAF47975
MNPNQKIITIGSVSLTISTICFFMQIAILITTVTLHFKQYEFNSPPNNQVMLCEPTIIERNITEIVYLTNTTIEKEICPKLAEYRKWSKPQCNITGFAPFSKDNSIRLSAGGDIWVTREPYVSCDPDKCYQFALGQGTTLNNVHSNDTVRDRTPYRTLLMNELGVPFHLGTKQVCIAWSSSSCHDGKAWLHVCVTGDDKNATASFIYNGRLVDSIVSWSKEILRTQESECVCINGTCTVVMTDGSASGKADTKILFIEEGKIVHTSTLSGSAQHVEECSCYPRYPGVRCVCRDNWKGSNRPIVDINIKDYSIVSSYVCSGLVGDTPRKNDSSSSSHCLDPNNEEGGHGVKGWAFDDGNDVWMGRTISEKLRSGYETFKVIEGWSNPNSKLQINRQVIVDRGNRSGYSGIFSVEGKSCINRCFYVELIRGRKEETEVLWTSNSIVVFCGTSGTYGTGSWPDGADINHMPI

SEQ ID NO: 26088 - protein, 469 aa, synthetic construct; identical to SEQ ID NO: 14712
  REGION 1..469: note = neuraminidase__InfluenzaA__BAF47976

SEQ ID NO: 26089 - protein, 469 aa, synthetic construct
  REGION 1..469: note = neuraminidase__InfluenzaA__BAF47977
MNPNQKIITIGSVSLTISTICFFMQIAILITTVTLQFKQYEFNSPPNNQVMLCEPTIIERNITEIVYLTNTTIEKEICPKLAEYRNWSKPQCNITGFAPFSKDNSIRLSAGGDIWVTREPYVSCDPDKCYQFALGQGTTLNNVHSNDTVHGRTPYRTLLMNELGVPFHLGTKQVCIAWSSSSCHDGKAWLHVCVTGDDKNATASFIYNGRLVDSIVSWSKEILRTQESECVCINGTCTVVMTDGSASGKADTKILFIEEGKIVHTSTLSGSAQHVEECSCYPRYPGVRCVCRDNWKGSNRPIVDINIKDYSIVSSYVCSGLVGDTPRKNDSSSSSHCLDPNNEEGGHGVKGWAFDDGNDVWMGRTISEKLRSGYETFKVIEGWSNPNSKLQTNRQVIVDRGNRSGYSGIFSVEGKSCINRCFYVELIRGRKEETEVLWTSNSIVVFCGTSGTYGTGSWPDGADINLMPI

SEQ ID NO: 26090 - protein, 469 aa, synthetic construct
  REGION 1..469: note = neuraminidase__InfluenzaA__BAF47978
MNPNQKIITIGSVSLTISTICFFMQIAILVTTVTLHFKQYEFNSPPNNQVMLCEPTIIERNITEIVYLTNTTIEKEICPKLAEYRNWSKPQCNITGFAPFSKDNSIRLSAGGDIWVTREPYVSCDPDKCYQFALGQGTTLNNVHSNDTVHDRTPYRTLLMNELGVPFHLGTKQVCIAWSSSSCHDGKAWLHVCVTGDDKNATASFIYNGRLVDSIVSWSKEILRTQESECVCINGTCTVVMTDGSASGKADTKILFIEEGKIVHTSTLSGSAQHVEECSCYPRYPGVRCVCRDNWKGSNRPIVDINIKDYSIVSSYVCSGLVGDTPRKNDSSSSSHCLDPNNEEGGHGVKGWAFDDGNDAWMGRTISEKLRSGYETFKVIEGWSNPNSKLQINRQVIVDRGNRSGYSGIFSVEGKSCINRCFYVELIRGRKEETEVLWTSNSIVVFCGTSGTYGTGSWPDGADINLMPI

SEQ ID NO: 26091 - protein, 469 aa, synthetic construct
  REGION 1..469: note = neuraminidase__InfluenzaA__BAF47979
MNPNQKIITIGSVSLTISTICFFMQIAILITTVTLHFKQYEFNSPPNNQVMLCEPTIIERNITEIVYLTNTTIEKEICPKLAEYRNWSKPQCNITGFAPFSKDNSIRLSAGGDIWVTREPYVSCDPDKCYQFALGQGTTLNNVHSNDTVHNRTPYRTLLMNELGVPFHLGTKQVCIAWSSSSCHDGKAWLHVCVTGDDKNATASFIYNGRLVDSIVSWSKEILRTQESECVCINGTCTVVMTDGSASGKADTKILFIEEGKIVHTSTLSGSAQHVEECSCYPRYPGVRCVCRDNWKGSNRPIVDINIKDYSIVSSYVCSGLVGDTPRKNDSSSSSHCLDPNNEEGGHGVKGWAFDDGNDVWMGRTISEKLRSGYETFKVIEGWSNPNSKLQTNRQVIVDRGNRSGYSGIFSVEGKSCINRCFYVELIRGRKEETEVLWTSNSIVVFCGTSGTYGTGSWPDGADINLMPI

SEQ ID NO: 26092 - protein, 469 aa, synthetic construct; identical to SEQ ID NO: 16564
  REGION 1..469: note = neuraminidase__InfluenzaA__BAF47980

SEQ ID NO: 26093 - protein, 469 aa, synthetic construct
  REGION 1..469: note = neuraminidase__InfluenzaA__BAF47981
MNPNQKIITIGSVSLTISTICLFMQIAILITTVTLHFKQYEFNSPPNNQVMLCEPTIIERNITEIVYLTNTTIEKEICPKLAEYRKWSKPQCNITGFAPFSKDNSIRLSAGGDIWVTREPYVSCDPDKCYQFALGQGTTLNNVHSNDTVRNRTPYRTLLMNELGVPFHLGTKQVCIAWSSSSCHDGKAWLHVCVTGDDKNATASFIYNGRLVDSIVSWSKEILRTQESECVCINGTCTVVMTDGSASGKADTKILFIEEGKIVHTSTLSGSAQHVEECSCYPRYPGVRCVCRDNWKGSNRPIVDINIKDYSIVSSYVCSGLVGDTPRKNDSSSSSHCLDPNNEEGGHGVKGWAFDDGNDVWMGRTISEKLRSGYETFKVIEGWSNPNSKLQINRQVIVDRGNRSGYSGIFSVEGKSCINRCFYVELIRGRKEETEVLWTSNSIVVFCGTSGTYGTGSWPDGADINLMPI

SEQ ID NO: 26094 - protein, 469 aa, synthetic construct
  REGION 1..469: note = neuraminidase__InfluenzaA__BAF47982
MNPNQKIITIGSVSLTISTICFFMQIAILITTVTLHFKQYEFNSPPNNQVMLCEPTIIERNITEIVYLTNTTIEKEICPKLAEYRKWSKPQCNITGFAPFSKDNSIRLSAGGDIWVTREPYVSCDPDKCYQFALGQGTTLNNVHSNDTVRNRTPYRTLLMNELGVPFHLGTKQVCIAWSSSSCHDGKAWLHVCVTGDDKNATASFIYNGRLVDSIVSWSKEILRTQESECVCINGTCTVVMTDGSASGKADTKILFIEEGKIVHTSTLSGSAQHVEECSCYPRYPGVRCVCRDNWKGSNRPIVDINIKDYSIVSSYVCSGLVGDTPRKNDSSSSSHCLDPNNEEGGHGVKGWAFDDGNDVWMGRTISEKLRSGYETFKVIEGWSNPNSKLQINRQVIVDRGNRSGYSGIFSVEGKSCINRCFYVELIRGRKEETEVLWTSNSIVVFCGTSGTYGTGSWPDGADINLMPI

SEQ ID NO: 26095 - protein, 469 aa, synthetic construct; identical to SEQ ID NO: 16564
  REGION 1..469: note = neuraminidase__InfluenzaA__BAF47983

SEQ ID NO: 26096 - protein, 469 aa, synthetic construct
  REGION 1..469: note = neuraminidase__InfluenzaA__BAF47984
MNPNQKIITIGSVSLTISTICFFMQIAILITTVTLHFKQYEFNSPPNNQVMLCEPTIIERNITEIVYLTNTTIEKEICPKLAEYRNWSKPQCNITGFAPFSKDNSIRLSAGGDIWVTREPYVSCDPDKCYQFALGQGTTLNNVHSNDTVHGRTPYRTLLMNELGVPFHLGTKQVCIAWSSSSCHDGKAWLHVCVTGDDKNATASFIYNGRLVDSIVSWSKEILRTQESECVCINGTCTVVMTDGSASGKADTKILFIEEGKIVHTSTLSGSAQHVEECSCYPRYPGVRCVCRDNWKGSNRPIVDINIKDYSIVSSYVCSGLVGDTPRKNDSSSSSHCLDPNNEEGDHGVKGWAFDDGNDVWMGRTISEKLRSGYETFKVIEGWSNPNSKLQINRQVIVDRGNRSGYSGIFSVEGKSCINRCFYVELIRGRKEETEVLWTSNSIVVFCGTSGTYGTGSWPDGADINLMPI

SEQ ID NO: 26097 - protein, 469 aa, synthetic construct
  REGION 1..469: note = neuraminidase__InfluenzaA__BAF47985
MNPNQKIITIGSVSLTISTICFFMQIAILITTVTLHFKQYEFNFPPNNQVMLCEPTIIERNITEIVYLTNTTIEKEICPKLAEYRNWSKPQCDITGFAPFSKDNSIRLSAGGDIWVTREPYVSCDPDKCYQFALGQGTTLNNVHSNDTVHDRTPYRTLLMNELGVPFHLGTKQVCIAWSSSSCHDGKAWLHVCVTGDDKNATASFIYNGRLVDSIVSWSKKILRTQESECVCINGTCTVVMTDGSASGKADTKILFIEEGKIVHTSTLSGSAQHVEECSCYPRYPGVRCVCRDNWKGSNRPIVDINIKDYSIVSSYVCSGLVGDTPRKNDSSSSSHCLDPNNEEGGHGVKGWAFDDGNDVWMGRTISEKLRSGYETFKVIEGWSNPNSKLQINRQVIVDRGNRSGYSGIFSVEGKSCINRCFYVELIRGRKEETEVLWTSNSIVVFCGTSGTYGTGSWPDGADINLMPI

SEQ ID NO: 26098 - protein, 469 aa, synthetic construct
  REGION 1..469: note = neuraminidase__InfluenzaA__BAF47986
MNPNQKIITIGSVSLTISTICFFMQIAILITTVTLHFKQYEFNFPPNNQVMLCEPTIIERNITEIVYLTNTTIEKEICPKLAEYRNWSKPQCDITGFAPFSKDNSIRLSAGGDIWVTREPYVSCDPDKCYQFALGQGTTLNNVHSNDTVHDRTPYRTLLMNELGVPFHLGTKQVCIAWSSSSCHDGKAWLHVCVTGDDKNATASFIYNGRLVDSIVSWSKKILRTQESECVCINGTCTVVMTDGSASGKADTKILFIEEGKIVHTSTLSGSAQHVEECSCYPRYPGVRCVCRDNWKGSNRPIVDINIKDYSIVSSYVCSGLVGDTPRKNDSSSSSHCLDPNNEEGGHGVKGWAFDDGNDVWMGRTISEKLRSGYETFKVIEGWSNPNSKLQINRQVIVDRGNRSGYSGIFSVEGKSCINRRFYVELIRGRKEETEVLWTSNSIVVFCGTSGTYGTGSWPDGADINLMPI

SEQ ID NO: 26099 - protein, 469 aa, synthetic construct
  REGION 1..469: note = neuraminidase__InfluenzaA__BAF47987
MNPNQKIITIGSVSLTISTICFFMQIAILITTVTLHFKQYEFNFPPNNQVMLCEPTIIERNITEIVYLTNTTIEKEICPKLAEYRNWSKPQCDITGFAPFSKDNSIRLSAGGDIWVTREPYVSCDPDKCYQFALGQGTTLNNVHSNDKVHDRTPYRTLLMNELGVPFHLGTKQVCIAWSSSSCHDGKAWLHVCVTGDDKNATASFIYNGRLVDSIVSWSKKILRTQESECVCINGTCTVVMTDGSASGKADTKILFIEEGKIVHTSTLSGSAQHVEECSCYPRYPGVRCVCRDNWKGSNRPIVDINIKDYSIVSSYVCSGLVGDTPRKNDSSSSSHCLDPNNEEGGHGVKGWAFDDGNDVWMGRTISEKLRSGYETFKVIEGWSNPNSKLQINRQVIVDRGNRSGYSGIFSVEGKSCINRCFYVELIRGRKEETEVLWTSNSIVVFCGTSGTYGTGSWPDGADINLMPI

SEQ ID NO: 26100 - protein, 469 aa, synthetic construct; identical to SEQ ID NO: 14714
  REGION 1..469: note = neuraminidase__InfluenzaA__BAF47988

SEQ ID NO: 26101 - protein, 469 aa, synthetic construct; identical to SEQ ID NO: 14714
  REGION 1..469: note = neuraminidase__InfluenzaA__BAF47989

SEQ ID NO: 26102 - protein, 469 aa, synthetic construct
  REGION 1..469: note = neuraminidase__InfluenzaA__BAF47990
MNPNQKIITIGSVSLTISTICFFMQIAILITTVTLHFKQYEFNSPPNNQVMLCEPTIIERNITEIVYLTNTTIEKEICPKLAEYRNWSKPQCNITGFAPFSKDNSIRLSAGGDIWVTREPYVSCDPDKCYQFALGQGTTLNNVHSNDTVHDRTPYRTLLMNELGVPFHLGTKQVCIAWSSSSCHDGKAWLHVCVTGDDKNATASFIYNGRLVDSIVSWSKEILRTQESECVCINGTCTVIMTDGSASGKADTKILFIEEGKIVHTSTLSGSAQHVEECSCYPRYPGVRCVCRDNWKGSNRPIVDINIKDYSIVSSYVCSGLVGDTPRKNDSSSSSHCLDPNNEEGGHGVKGWAFDDGNDVWMGRTVSEKLRSGYETFKVIEGWSNPNSKLQINRQVIVDRGNRSGYSGIFSVEGKSCINRCFYVELIRGRKEETEVLWTSNSIVVFCGTSGTYGTGSWPDGADINLMPI

SEQ ID NO: 26103 - protein, 469 aa, synthetic construct
  REGION 1..469: note = neuraminidase__InfluenzaA__BAF47991
MNPNQKIITIGSVSLTISTICFFMQIAILITTVTLHFKQYEFNSPPNNQVMLCEPTIIERNITEIVYLTNTTIEKEICPKLAEYRNWSKPQCDITGFAPFSKDNSIRLSAGGDIWVTREPYVSCDPDKCYQFALGQGTTLNNVHSNDIVHDRTPYRTLLMNELGVPFHLGTKQVCIAWSSSSCHDGKAWLHVCVTGDDKNATASFIYNGRLVDSIVSWSKKILRTQESECVCINGTCTVVMTDGSASGKADTKILFIEEGKIVHTSTLSGSAQHVEECSCYPRYPGIRCVCRDNWKGSNRPIVDINIKDYSIVSSYVCSGLVGDTPRKNDSSSSSHCLDPNNEEGGHGVKGWAFDDGNDVWMGRTISEKLRSGYETFKVIEGWSNPNSKLQINRQVIVDRGNRSGYSGIFSVEGKSCINRCFYVELIRGRKEETEVLWTSNSIVVFCGTSGTYGTGSWPDGADINLMPI

SEQ ID NO: 26104 - protein, 469 aa, synthetic construct
  REGION 1..469: note = neuraminidase__InfluenzaA__BAF47992
MNPNQKIITIGSVSLTISTICFFMQIAILITTVTLHFKQYEFNSPPNNQVMLCEPTIIERNITEIVYLTNTTIEKEICPKLAEYRNWSKPQCNITGFAPFSKDNSIRLSAGGDIWVTREPYVSCEPDKCYPFALVQGTTLNNVHSNDTVHDRTPYRTLLMNELGVPFHLGTKQVCIAWSSSSCHDGKAWLHVCVTGDDKNATASFIYNGRLVDSIVSWSKEILRTQESECVCINGTCTVVMTDGSASGKADTKILFIEEGKIVHTSTLSGSAQHVEECSCYPRYPGVRCVCRDNWKGSNRPIVDINIKDYSIVSSYVCSGLVGDTPRKNDSSSSGHCLDPNNEEGGHGVKGWAFDDGNDVWMGRTISEKLRSGYETFKVIEGWSNPNSKLQINRQVIVDRGNRSGYSGIFSVEGKSCINRCFYVELIRGRKEETEVLWTSNSFVVFCGTSGTYGTGSWPDGADINLMPI

SEQ ID NO: 26105 - protein, 469 aa, synthetic construct; identical to SEQ ID NO: 26061
  REGION 1..469: note = neuraminidase__InfluenzaA__BAF47993

SEQ ID NO: 26106 - protein, 469 aa, synthetic construct; identical to SEQ ID NO: 14712
  REGION 1..469: note = neuraminidase__InfluenzaA__BAF47994

SEQ ID NO: 26107 - protein, 469 aa, synthetic construct
  REGION 1..469: note = neuraminidase__InfluenzaA__BAF47995
MNPNQKIITIGSVSLTISTICFFMQIAILITTVTLHFKQYEFNSPPNNQVMLCEPTIIERNITEIVYLTNTTIEKEICPKLAEYRNWSKPQCNITGFAPFSKDNSIRLSAGGDIWVTREPYVSCDPDKCYQFALGQGTTLNNVHSNDTVHGRTPYRTLLMNELGVPFHLGTKQVCIAWSSSSCHDGKAWLHVCVTGDDKNATASFIYNGRLVDSIVSWSKEILRTQESECVCINGTCTVVMTDGSASGKADTKILFIEEGKIVHTSTLSGSAQHVEECSCYPRYPGVRCVCRDNWKGSNRPIVDINIKDYSIVSSYVCSGLVGDTPRKNDSSSSSHCLDPNNEEGGHGVKGWAFDDGNDVWMGRTISEKLRSGYETFKVIEGWSNPNSKLQINRQVIVDRGNRSGYSGIFSVEGKSCINRCFYVELIRGRKEETEVLWTSNSIVVFCGTSGTYGTGSWPDGADINLMPI

SEQ ID NO: 26108 - protein, 469 aa, synthetic construct; identical to SEQ ID NO: 26107
  REGION 1..469: note = neuraminidase__InfluenzaA__BAF47996

SEQ ID NO: 26109 - protein, 469 aa, synthetic construct; identical to SEQ ID NO: 14714
  REGION 1..469: note = neuraminidase__InfluenzaA__BAF47997

SEQ ID NO: 26110 - protein, 469 aa, synthetic construct
  REGION 1..469: note = neuraminidase__InfluenzaA__BAF57504
MNPNQKIITIGSVSLTISTICFFMQIAILITTVTLHFKQYEFNPPPNNQVMLCEPTIIERNITEIVYLTNTTIEKEICPKLAEYRNWSKPQCNITGFAPFSKDNSIRLSAGGDIWVTREPYVSSDPDKCYQFALGQGTTLNNVHSNDTVHDRTPYRTLLMKELGVPFHLGTKQVCIAWSSSSCHDGKAWLHVCVTGDDENATASFIYNGRLVDSVVSWSKKILRTQESECVCINGTCTVVMTDGSASGKADTKILFIEEGKIVHTSSLSGSAQHVEECSCYPRYPGVRCVCRDNWKGSNRPIVDINIKDYSIVSSYVCSGLVGDTPRKNDSSSSSHCLDPNNEEGGHGVKGWAFDDGNDVWMGRTISEKLRSGYETFKVIEGWSNPNSKLQINRQVIVDRGNRSGYSGIFSVEGKSCINRCFYVELIRGRKQETEVLWTSNSIVVFCGTSGTYGTGSWPDGADINLMPI

SEQ ID NO: 26111 - protein, 469 aa, synthetic construct
  REGION 1..469: note = neuraminidase__InfluenzaA__BAF57508
MNPNQKIITIGSVSLTISTICFFMQIAILITTLTLHFKQYEFNSPPNNQVMLCEPTIIERNITEIVYLTNTTIEKEICPKLAEYRNWSKPQCNITGFAPFSKDNSIRLSAGGDIWVTREPYVSCDPDKCYQFALGQGTTLNNVHSNDTVHDRTPYRTLLMNELGVPFHLGTKQVCIAWSSSSCHDGKAWLHVCVTGDDENATASFIYNGRLVDSIVSWSKKILRTQESECVCINGTCTVVMTDGSASGKADTKILFIEEGKIVHTSTLSGSAQHVEECSCYPRYPGVRCVCRDNWKGSNRPIVDINIKDYSIVSSYVCSGLVGDTPRKNDSSSSSHCLDPNNEEGGHGVKGWAFDDGNDVWMGRTISEKLRSGYETFKVIEGWSNPNSKLQINRQVIVDRGNRSGYSGIFSVEGKSCINRCFYVELIRGRKQETEVLWTSNSIVVFCGTSGTYGTGSWPDGADINLMPI

SEQ ID NO: 26112 - protein, 469 aa, synthetic construct; identical to SEQ ID NO: 15929
  REGION 1..469: note = neuraminidase__InfluenzaA__BAF57511

SEQ ID NO: 26113 - protein, 469 aa, synthetic construct
  REGION 1..469: note = neuraminidase__InfluenzaA__BAF57515
MNPNQRIITIGSVSLTISTICFFMQIAILITTVTLHFKQYEFNSPPNNQVMLCEPTIIERNITEIVYLTNTTIEKEICPKLAEYRNWSKPQCNITGFAPFSKDNSIRLSAGGDIWVTREPYVSCDPDKCYQFALGQGTTLNNVHSNDKVHDRTPYRTLLMNELGVPFHLGTKQVCIAWSSSSCHDGKAWLHVCVTGDDENATASFIYNGRLVDSIVSWSKKILRTQESECVCINGTCTVVMTDGSASGKADTKILFIEEGKIVHTSTLSGSAQHVEECSCYPRYPGVRCVCRDNWKGSNRPIVDINIKDYSIVSSYLCSGLVGDTPRKNDSSSSSHCLDPNNEEGGHGVKGWAFDDGNDVWMGRTISEKLRSGYETFKVIEGWSHPNSQLQINRQVIVDRGNRSGYSGIFSVEGKSCINRCFYVELIRGRKQETEVLWTSNSIVVFCGTSGTYGTGSWPDGADINLMPI

SEQ ID NO: 26114 - protein, 469 aa, synthetic construct
  REGION 1..469: note = neuraminidase__InfluenzaA__BAF57522
MNPNQKIITIGSVSLTISTICFFMQIAILITTVTLHFKQYEFNSPPNNQVMLCEPTIIERNITEIVYLTNTIIEKEICPKLAEYRNWSKPQCNITGFAPFSKDNSIRLSAGGDIWVTREPYVSCDPDKCYQFALGQGTTLNNVHSNDTVHDRTPYRTLLMNELGVPFHLGTKQVCIAWSSSSCHDGKAWLHVCVTGDDENATASFIYNGRLVDSIVSWSKKILRTQESECVCINGTCTVVMTDGSASGKADTKILFIEEGKIVHTSTLSGSAQHVEECSCYPRYPGVRCVCRDNWKGSNRPIVDINIKDYSIVSSYVCSGLVGDTPRKNDRSRSSHCLDPNNEEGGHGVKGWAFDDGNDVWMGRTISEKLRSGYETFKVIEGWSKPNSKLQINRQVIVDRGNRTGYSGIFSVEGKSCINRCFYVELIRGRKQETEVLWTSNSIVVFCGTSGTYGTGSWPDGADINLMPI

SEQ ID NO: 26115 - protein, 469 aa, synthetic construct
  REGION 1..469: note = neuraminidase__InfluenzaA__BAF57529
MNPNQKIITIGSVSLTISTICFFMQIAILITTVTLHFKQYEFNSPPNNQVMLCEPTIIERNITEIVYLTNTTIEKEICPKLAEYRNWSKPQCDITGFAPFSKDNSIRLSAGGDIWVTREPYVSCDPDKCYQFALGQGTTLNNVHSNDKVHERTPYRTLLMNELGVPFHLGTKQVCIAWSSSSCHDGKAWLHVCVTGDDKNATASFIYNGRLVDSIVSWSKKILRTQESECVCINGTCTVVMTDGSASGKADTKILFIEEGKIVHTSTLSGSAQHVEECSCYPRYPGVRCVCRDNWKGSNRPIVDINIKDYSIVSSYVCSGLVGDTPRKNDSSSSSHCLDPNNEEGGHGVKGWAFDDGNDVWMGRTISEKLRSGYETFKVIEGWSNPNSKLQINRQVIVDRGNRSGYSGIFSVEGKSCINRCFYVELIRGRKEETEVLWTSNSIVVFCGTSGTYGTGSWPDGADINLMPI

SEQ ID NO: 26116 - protein, 469 aa, synthetic construct; identical to SEQ ID NO: 21551
  REGION 1..469: note = neuraminidase__InfluenzaA__BAF57532

SEQ ID NO: 26117 - protein, 469 aa, synthetic construct; identical to SEQ ID NO: 21551
  REGION 1..469: note = neuraminidase__InfluenzaA__BAF57536

SEQ ID NO: 26118 - protein, 469 aa, synthetic construct
  REGION 1..469: note = neuraminidase__InfluenzaA__BAF57539
MNPNQKIITIGSVSLTISTICFFMQIAILITTVTLHFKQYEFNSPPNNQVMLCEPTIIERNITEIVYLTNTTIEKEICPKLAEYRNWSKPQCDITGFAPFSKDNSIRLSAGGDIWVTREPYVSCDPDKCYQFALGQGTTLNNVHSNDTVHDRTPYRTLLMNELGVPFHLGTKQVCIAWSSSSCHDGKAWLHVCVTGDDKNATASFIYNGRLIDSIVSWSKKILRTQESECVCINGTCTVVMTDGSASGKADTKILFIEEGKIVHTSTLSGSAQHVEECSCYPRYPGVRCVCRDNWKGSNRPIVDINIKDYSIVSSYVCSGLVGDTPRKNDSSSSSHCLDPNNEEGGHGVKGWAFDDGNDVWMGRTISEKLRSGYETFKVIEGWSNPNSKLQINRQVIVDRGNRSGYSGIFSVEGKSCINRCFYVELIRGRKEKTEVLWTSNSIVVFCGTSGTYGTGSWPDGADINLMPI

SEQ ID NO: 26119 - protein, 469 aa, synthetic construct
  REGION 1..469: note = neuraminidase__InfluenzaA__BAF57543
MNPNQKIITIGSVSLTISTICFFMQIAILITTVTLHFKQYEFNSPPNNQVMLCEPTIIERNITEIVYLTNTTIEKEICPKLAEYRNWSKPQCDITGFAPFSKDNSIRLSAGGDIWVTREPYVSCDPDKCYQFALGQGTTLNNVHSNDTVHDRTPYRTLLMNELGVPFHLGTKQVCIAWSSSSCHDGKAWLHVCVTGDDKNATASFIYNGRLVDSIVSWSKKILRTQESECVCINGTCTVVMTDGSASGKADTKILFIEEGKIVHTSTLSGSAQHVEECSCYPRYPGVRCVCRDNWKGSNRPIVDINIKDYSIVSSYVCSGLVGDTPRKNDSSSSSHCLDPNNEEGGHGVKGWAFDDGNDVWMGRTISEKLRSGYETFKVIEGWSNPNSKLQINRQVIVDRGNRSGYSAIFSVEGKSCINRCFYVELIRGRKEETEVLWTSNSIVVFCGTSGTYGTGSWPDGADINLMPI

SEQ ID NO: 26120 - protein, 469 aa, synthetic construct
  REGION 1..469: note = neuraminidase__InfluenzaA__BAF57547
MNPNQKIITIGSVSLTISTICFFMQIAILITTVTLHFKQYEFNSPPNNQVMLCEPTIIERNITEIVYLTNTTIEKEICPKLAEYRNWSKPQCDITGFAPFSKDNSIRLSAGGDIWVTREPYVSCDPDKCYQFALGQGTTLNNVHSNDTVHDRTPYRTLLMNELGVPFHLGTKQVCIAWSSSSCHDGKAWLHVCVTGDDKNATASFIYNGRLVDSIVSWSKKILRTQESECVCINGTCTVVMTDGSASGKADTKILFIEEGKIVHTSTLSGSAQHVEECSCYPRYPGVRCVCRDNWKGSNRPIVDINIKDYSIVSSYVCSGLVGDTPRKNDSSSSSHCLDPNNEEGGHGVKGWAFDDGNDVWMGRTISEKLRSGYETFKVIEGWSNPNSKLQINRQVIVDRGNRSGYSGIFSVEGKSCINRCFYVELIRGRKEETEALWTSNSIVVFCGTSGTYGTGSWPDGADINLMPI

SEQ ID NO: 26121 - protein, 469 aa, synthetic construct; identical to SEQ ID NO: 14714
  REGION 1..469: note = neuraminidase__InfluenzaA__BAF57551

SEQ ID NO: 26122 - protein, 469 aa, synthetic construct; identical to SEQ ID NO: 14714
  REGION 1..469: note = neuraminidase__InfluenzaA__BAF57555

SEQ ID NO: 26123 - protein, 469 aa, synthetic construct; identical to SEQ ID NO: 14712
  REGION 1..469: note = neuraminidase__InfluenzaA__BAF57559

SEQ ID NO: 26124 - protein, 469 aa, synthetic construct
  REGION 1..469: note = neuraminidase__InfluenzaA__BAF57563
MNPNQKIITIGSVSLTISTICFFMQIAILITTVTLHFKQYEFNSPPNNQVMLCEPTIIERNITEIVYLTNTTIEKEICPKLAEYRNWSKPQCDITGFAPFSKDNSIRLSAGGDIWVTREPYVSCDPDKCYQFALGQGTTLNNVHSNDIVHDRTPYRTLLMNELGVPFHLGTKQVCIAWSSSSCHDGKAWLHVCVTGDDKNATASFIYNGRLVDSIVSWSKEILRTQESECVCINGTCTVVMTDGSASGKADTKILFIEEGKIVHTSTLSGSAQHVEECSCYPRYPGVRCVCRDNWKGSNRPIVDINIKDYSIVSSYVCSGLVGDTPRKNDSSSSSHCLDPNNEEGGHGVKGWAFDDGNDVWMGRTISEKLRSGYETFKVIEGWSNPNSKLQINRQVIVDRGNRSGYSGIFSVEGKSCINRCFYVELIRGRKEETEVLWTSNSIVVFCGTSGTYGTGSWPDGADINLMPI

SEQ ID NO: 26125 - protein, 469 aa, synthetic construct; identical to SEQ ID NO: 14712
  REGION 1..469: note = neuraminidase__InfluenzaA__BAF57571

SEQ ID NO: 26126 - protein, 469 aa, synthetic construct; identical to SEQ ID NO: 21456
  REGION 1..469: note = neuraminidase__InfluenzaA__BAF57575

SEQ ID NO: 26127 - protein, 469 aa, synthetic construct; identical to SEQ ID NO: 14327
  REGION 1..469: note = neuraminidase__InfluenzaA__BAF57579

SEQ ID NO: 26128 - protein, 469 aa, synthetic construct
  REGION 1..469: note = neuraminidase__InfluenzaA__BAF57583
MNPNQKIITIGSVSLTISTICFFMQIAILITTVTLHFKQYEFNSPPNNQVMLCEPTIIERNITEIVYLTNTTIEKEICPKLAEYRNWSKPQCNITGFAPFSKDNSIRLSAGGDIRVTREPYVSCDPDKCYQFALGQGTTLNNVHSNDTVHDRTPYRTLLMNELGVPFHLGTKQVCIAWSSSSCHDGKAWLHVCVTGDDKNATASFIYNGRLVDSIVSWSKEILRTQESECVCINGTCTVVMTDGSASGKADTKILFIEEGKIVHTSTLSGSAQHVEECSCYPRYPGVRCVCRDNWKGSNRPIVDINIKDYSIVSSYVCSGLVGDTPRKNDSSSSSHCLDPNNEEGGHGVKGWAFDDGNDVWMGRTISEKLRSGYETFKVIEGWSNPNSKLQINRQVIVDRGNRSGYSGIFSVEGKSCINRCFYVELIRGRKEETEVLWTSNSIVVFCGTSGTYGTGSWPDGADINLMPI

SEQ ID NO: 26129 - protein, 469 aa, synthetic construct
  REGION 1..469: note = neuraminidase__InfluenzaA__BAF57587
MNPNQKIITIGSVSLTISTICFFMQIAILITTVTLHFKQCEFNSPPNNQVMLCEPTIIERNITEIVYLTNTTIEKEICPKLAEYRNWSKPQCNITGFAPFSKDNSIRLSAGGDIWVTREPYVSCDPDKCYQFALGQGTTLNNVHSNDTVHDRTPYRTLLMNELGVPFHLGTKQVCIAWSSSSCHDGKAWLHVCVTGDDKNATASFIYNGRLVDSIVSWSKEILRTQESECVCINGTCTVVMTDGSASGKADTKILFIEEGKIVHTSTLSGSAQHVEECSCYPRYPGVRCVCRDNWKGSNRPIVDINIKDYSIVSSYVCSGLVGDTPRKNDSSSSSHCLDPNNEEGGHGVKGWAFDDGNDVWMGRTISEKLRSGYETFKVIEGWSNPNSKLQINRQVIVDRGNRSGYSGIFSVEGKSCINRCFYVELIRGRKEETEVLWTSNSIVVFCGTSGTYGTGSWPDGADINLMPI

SEQ ID NO: 26130 - protein, 469 aa, synthetic construct
  REGION 1..469: note = neuraminidase__InfluenzaA__BAF57591
MNPNQKIITIGSVSLTISTICFFMQIAILITTVTLHFKQYEFNSPPNNQVMLCEPTIIERNITEIVYLTNTTIEKEICPKLAEYRNWSKPQCDITGFAPFSKDNSIRLSAGGDIWVTREPYVSCDPDKCYQFALGQGTTLNNVHSNDTVHDRTPYRTLLMNELGVPFHLGTKQVCIAWSSSSCHDGKAWLHVCVTGDDKNATASFIYNGRLVDSIVSWSKEILRTQESECVCINGTCTVVMTDGSASGKADTKILFIEEGKIVHTSTLSGSAQHVEECSCYPRYPGVRCVCRDNWKGSNRPIVHINIKDYSIVSSYVCSGLVGDTPRKNDSSSSSHCLNPNNEEGGHGVKGWAFDDGNDVWMGRTISEKLRLGYETFKVIEGWSNPNSKLQINRQVIVDRGNRSGYSGIFSVEGKSCINRCFYVELIRGRKEETEVLWTSNSIVVFCGTSGTYGTGSWPDGADINLMPI

SEQ ID NO: 26131 - protein, 469 aa, synthetic construct
  REGION 1..469: note = neuraminidase__InfluenzaA__BAF57595
MNPNQKIITIGSVSLTISTICFFMQIAILITTVTLHFKQYEFNSPPNNQVMLCEPTIIERNITEIVYLTNTTIEKEICPKIAEYRNWSKPQCNITGFAPFSKDNSIRLSAGGDIWVTREPYVSCDPDKCYQFALGQGTTLNNVHSNDTVHDRTPYRTLLMNELGVPFHLGTKQVCIAWSSSSCHDGKAWLHVCVTGDDKNATASFIYNGRLVDSIVSWSKEILRTQESECVCVNGTCTVVMTDGSASGKADTKILFIEEGKIVHTSTLSGSAQHVEECSCYPRYPGVRCVCRDNWKGSNRPIVDINIKDYSIVSSYVCSGLVGDTPRKNDSSSSSHCLDPNNEEGGHGVKGWAFDDGNDVWMGRTISEKLRSGYETFKVIEGWSNPNSKLQINRQVIVDRGNRSGYSGIFSVEGKSCINRCFYVELIRGRKEETEVLWTSNSIVVFCGTSGTYGTGSWPDGADINLMPI

SEQ ID NO: 26132 - protein, 469 aa, synthetic construct; identical to SEQ ID NO: 21456
  REGION 1..469: note = neuraminidase__InfluenzaA__BAF57599

SEQ ID NO: 26133 - protein, 469 aa, synthetic construct
  REGION 1..469: note = neuraminidase__InfluenzaA__BAF57603
MNPNQKIITIGSVSLTISTICFFMQIAILITTVTLHFKQYEFNSPPNNQVMLCEPTIIERNITEIVYLTNTTIEKEICPKLAEYRNWSKPQCNITGFAPFSKDNSIRLSAGGDIWVTREPYVSCDPDKCYQFALGQGTTLNNVHSNDTVHDRTPYRTLLMNELGVPFHLGTKQVCIAWSSSSCHDGKAWLHVCVTGDDKNATASFIYNGRLVDSIVSWSKEILRTQESECVCINGTCTVVMTDGSASGKADTKILFIEEGKIVHTSTLSGSAQHVEECSCYPRYPGVRCVCRDNWKGSNRPIVDINIKDYSIVSSYVCSGLVGDTPRKNDSSSSSHCLDPNNEEGGHGVKGWAFDDGNDVWMGRTISEKLRSGYETFKVIEGWSNPDSKLQINRQVIVDRGNRSGYSGIFSVEGKSCINRCFYVELIRGRKEETEVLGTSNSIVVFCGTSGTYGTGSWPDGADINLMPI

SEQ ID NO: 26134 - protein, 469 aa, synthetic construct; identical to SEQ ID NO: 21551
  REGION 1..469: note = Neuraminidase__InfluenzaA__BAF62620

SEQ ID NO: 26135 - protein, 470 aa, synthetic construct
  REGION 1..470: note = neuraminidase__InfluenzaA__BAF63036
MNPNQKIITIGSISIAIGIISLMLQIGNIISIWASHSIQTGSQNHTGICNQRIITYENSTWVNHTYVTINNTNVVAGKDKTSVTLAGNSSLCSISGWAIYTKDNSIRIGSKGDVFVIREPFISCSHLECRTFFLTQGALLNDKHSNGTVKDRSPYRALMSCPLGEAPSPYNSKFESVAWSASACHDGMGWLTIGISGPDNGAVAVLKYNGIITETIKSWKKRILRTQESECVCVNGSCFTIMTDGPSNGAASYKIFKIEKGKVTKSIELNAPNFHYEECSCYPDTGTVMCVCRDNWHGSNRPWVSFNQNLDYQIGYICSGVFGDNPRPKDGKGSCNPVTVDGADGVKGFSYKYGNGVWIGRTKSNRLRKGFEMIWDPNGWTDTDSDFSVKQDVVAITDWSGYSGSFVQHPELTGLDCIRPCFWVELVRGLPRENTTIWTSGSSISFCGVNSDTANWSWPDGAELPFTIDK

SEQ ID NO: 26136 - protein, 470 aa, synthetic construct; identical to SEQ ID NO: 21441
  REGION 1..470: note = neuraminidase__InfluenzaA__BAF63040

SEQ ID NO: 26137 - protein, 470 aa, synthetic construct
  REGION 1..470: note = neuraminidase__InfluenzaA__BAF63047
MNPNQKIITIGSISIAIGIISLVLQIGNIISIWASHSIQTGSQNHTGICNQRIITYENSTWVNHTYVNINNTNVVAGKDKTSVTLAGNSSLCSISGWAIYTKDNSIRIGSKGDVFVIREPFISCSHLECRTFFLTQGALLNDKHSNGTVKDRSPYRALMSCPLGEAPSPYNSKFESVAWSASACHDGMGWLTIGISGPDNGAVAVLKYNGIITETIKSWKKRILRTQESECVCVNGSCFTIMTDGPSNGAASYKIFKIEKGKVTKSIELNAPNFHYEECSCYPDTGTVMCVCRDNWHGSNRPWVSFNQNLDYQIGYICSGVFGDNPRPKDGEGSCNPVTVDGADGVKGFSYKYGNGVWIGRTKSNRLRKGFEMIWDPNGWTDTDSDFSVKQDVVAITDWSGYSGSFVQHPELTGLDCIRPCFWVELVRGLPRENTTIWTSGSSISFCGVNSDTADWSWPDGAELPFTIDK

SEQ ID NO: 26138 - protein, 470 aa, synthetic construct
  REGION 1..470: note = neuraminidase__InfluenzaA__BAF63058
MNPNQKIITIGSISIAIGIISLMLQIGNIISIWASHSIQTGSQNHTGICNQRIITYENSTWVNHTYVNINNTNVVAGKDKTSVTLAGNSSLCAISGWAIYTKDNSIRIGSKGDVFVIREPFISCSHLECRTFFLTQGALLNDKHSNGTVKDRSPYRALMSCPLGEAPSPYNSKFESVAWSASACHDGMGWLTIGISGPDNGAVAVLKYNGIITETIKSWKKRILRTQESECVCVNGSCFTIMTDGPSNEAASYKIFKIEKGKVTKSIELNAPNFHYEECSCYPDTGTVMCVCRDNWHGSNRPWVSFNPNLDYQIGYICSGVFGDNPRPKDGEGSCNPVTVDGADGVKGFSYKYGNGVWIGRTKSNRLRKGFEMVWDPNGWTDTDSDFSVKQDVVAITDWSGYSGSFVQHPELTGLDCIRPCFWVELVRGLPKENTTIWTSGSSISFCGVNSDTANWSWPDGAELPFTIDK

SEQ ID NO: 26139 - protein, 470 aa, synthetic construct; identical to SEQ ID NO: 21441
  REGION 1..470: note = neuraminidase__InfluenzaA__BAF63065

SEQ ID NO: 26140 - protein, 470 aa, synthetic construct; identical to SEQ ID NO: 21441
  REGION 1..470: note = neuraminidase__InfluenzaA__BAF63069

SEQ ID NO: 26141 - protein, 470 aa, synthetic construct; identical to SEQ ID NO: 21441
  REGION 1..470: note = neuraminidase__InfluenzaA__BAF63079

SEQ ID NO: 26142 - protein, 470 aa, synthetic construct; identical to SEQ ID NO: 21441
  REGION 1..470: note = neuraminidase__InfluenzaA__BAF63092

SEQ ID NO: 26143 - protein, 470 aa, synthetic construct; identical to SEQ ID NO: 21441
  REGION 1..470: note = neuraminidase__InfluenzaA__BAF63098

SEQ ID NO: 26144 - protein, 470 aa, synthetic construct
  REGION 1..470: note = neuraminidase__InfluenzaA__BAF63104
MNPNQKIITIGSISIAIGIISLMLQVGIVVSIWASHSIQTGSQNHTGICNQRIITYENSTWVNHTYVNINNTNVVAGKDKTSVALAGNSSLCSISGWAIYTKDNSIRIGSKGDVFVIREPFISCSHLECRTFFLTQGALLNDKHSNGTVKDRSPYRALMSCPLGEAPSPYNSKFESVAWSASACHDGMGWLTIGISGPDNGAVAVLKYNGIITETIKSWKKRILRTQESECVCVNGSCFTIMTDGPSNGAASYKIFKIEKGQVTKSVELNAPNFHYEECSCYPDTGTVMCVCRDNWHGSNRPWVSFNQNLDYQIGYICSGVFGDNPRPKDGKGSCNPVTVDGADGVKGFSYKYGNGVWIGRTKSNRLRKGFEMIWDPNGWTDTDSDFSVKQDVVAITDWSGYSGSFVQHPELTGLDCIRPCFWVELVRGLPRENTTIWTSGSSISFCGVDSDTANWSWPDGAELPFTIDK

SEQ ID NO: 26145 - protein, 470 aa, synthetic construct
  REGION 1..470: note = neuraminidase__InfluenzaA__BAF63112
MNPNQKIITIGSISIAIGIISLMLQVGNIISIWASHSIQTGSQNHTGICNQRIITYENSTWVNHTYVNINNTNVVAGKDKTSVALAGNSSLCSISGWAIYTKDNSIRIGSKGDVFVIREPFISCSHLECRTFFLTQGALLNDKHSNGTVKDRSPYRALMSCPLGEAPSPYNSKFESVAWSASACHDGMGWLTIGISGPDNGAVAVLKYNGIITETIKSWKKRILRTQESECVCVNGSCFTIMTDGPSNGAASYKIFKIEKGQVTKSVELNAPNFHYEECSCYPDTGTVMCVCRDNWHGSNRPWVSFNQNLDYQIGYICSGVFGDNPRPKDGKGSCNPVTVDGADGVKGFSYKYGNGVWIGRTKSNRLRKGFEMIWDPNGWTDTDSDFSVKQDVVAITDWSGYSGSFVQHPELTGLDCIRPCFWVELVRGLPRENTTIWTSGSSISFCGVDSDTANWSWPDGAELPFTIDK

SEQ ID NO: 26146 - protein, 470 aa, synthetic construct
  REGION 1..470: note = neuraminidase__InfluenzaA__BAF63116
MNPNQKIITIGSISIAIGIISLMLQVGNIISIWASHSIQTGSQNHTGICNQRIITYENSTWVNHTYVNINNTNVVAGKDKTSVALAGNSSLCSISGWAIYTKDNSIRIGSKGDVFVIREPFISCSHLECRTFFLTQGALLNDKHSNGTVKDRSPYRALMSCPLGEAPSPYNSKFESVAWSASACHDGLGWLTIGISGPDNGAVAVLKYNGIITETIKSWKKRILRTQESECVCVNGSCFTIMTDGPSNGAASYKIFKIEKGQVTKSVELNAPNFHYEECSCYPDTGTVMCVCRDNWHGSNRPWVSFNPDLDYQIGYICSGVFGDNPRPKDGKGSCNPVTVDGADGVKGFSYKYGNGVWIGRTKSNRLRKGFEMIWDPNGWTDTDSDFSVKQDVVAITDWSGYSGSFVQHPELTGLDCIRPCFWVELVRGLPRENTTIWTSGSSISFCGVDSDTANWSWPDGAELPFTIDK

SEQ ID NO: 26147 - protein, 470 aa, synthetic construct
  REGION 1..470: note = neuraminidase__InfluenzaA__BAF63124
MNPNQKIITIGSISIAIGIISLMLQIGNIISIWASHSIQTGSQNHTGICNQRIITYENSTWVNHTYVNINNTNVVAGKDKTSVTLAGNSSLCSISGWAIYTKDNSIRIGSKGDVFVIREPFISCSHLECRTFFLTQGALLNDKHSNGTVKDRSPYRALMSCPLGEAPSPYNSKFESVAWSASACHDGMGWLTIGISGPDNGAVAVLKYNGIITETIKSWKKRILRTQESECVCVNGSCFTIMTDGPSNGAASYKIFKIEKGKVTKSRELNAPNFHYEECSCYPDTGTVMCVCRDNWHGSNRPWVSFNPNLDYQIGYICSGVVGDNPRPKDGKGSCNPVTADGADGVKGFSYKYGNGVWIGRTKSNRLRKGFEMIWDPNGWTDTDSDFSVKQDVVAITDWSGYSGSFVQHPELTGLDCIRPCFWVELVRGLPRENTTIWTSGSSISFCGVDSDTANWSWPDGAELPFTIDK

SEQ ID NO: 26148 - protein, 470 aa, synthetic construct; identical to SEQ ID NO: 21503
  REGION 1..470: note = neuraminidase__InfluenzaA__BAF63132

SEQ ID NO: 26149 - protein, 470 aa, synthetic construct
  REGION 1..470: note = neuraminidase__InfluenzaA__BAF63136
MNPNQKIITIGSISIAIGIISLMLQIGNIISIWASHSIQTGSQNHTGICNQRIITYENSTWVNHTYVNINNTNVVAGKDKTSVTLAGNSSLCSISGWAIYTKDNSIRIGSKGDVFVIREPFISCSHLECKTFFLTQGALLNDKHSNGTVKDRSPYRALMSCPLGEAPSPYNSKFESVAWSASACHDGMGWLTIGISGPDNGAVAVLKYNGIITGTIKSWKKQILRTQESECVCMNGSCFTIMTDGPSNGAASYKIFKIEKGKVTKSIELNAPNFHYEECSCYPDTGTVMCVCRDNWHGSNRPWVSFNQNLDYQIGYICSGVFGDNPRPKDGEGSCNPVTVDGANGVKGFSYKYGNGVWIGRTKSNRLRKGFEMIWDPNGWTNTDSDFSVKQDVVAITDWSGYSGSFVQHPELTGLDCIRPCFWVELVRGLPRENTTIWTSGSSISFCGVNSDTANWSWPDGAELPFTIDK

SEQ ID NO: 26150 - protein, 449 aa, synthetic construct
  REGION 1..449: note = neuraminidase__InfluenzaA__BAH24021
MNPNQKIITIGSICMVIGIVSLMLQIGNMVSLWVSHSIQTGNQHQVEPISNTNFLTEKAVASVTLAGNSSLCPIRGWAVHSKDNSIRIGSKGDVFVIREPFISCSHLECRTFFLTQGALLNDKHSNGTVKDRSPHRTLMSCPVGEAPSPYNSRFESVAWSASACHDGTSWLTIGISGPDNGAVAVLKYNGMITDTIKSWRNNILRTQESECACVNGSCFTVMTDGPSNGQASYKIFKMEKGKVVKSVELDAPNYHYEECSCYPDAGEITCVCRDNWHGSNRPWVSFNQNLEYQIGYICSGVFGDNPRPNGGTGSCGPVSPNGAYGVKGFSFKYGNGVWIGRTKSPSSRSGFEMIWDPNGWTETDSSFSVKQDIVAITDWSGYSGSFVQHPELTGLDCIRPCFWVELIRGRPKESTIWTSGSSISFCGVNSDTVSWSWPDGAELPFTIDK

SEQ ID NO: 26151 - protein, 469 aa, synthetic construct; identical to SEQ ID NO: 16893
  REGION 1..469: note = neuraminidase__InfluenzaA__BAH95825

SEQ ID NO: 26152 - protein, 469 aa, synthetic construct; identical to SEQ ID NO: 16728
  REGION 1..469: note = neuraminidase__InfluenzaA__BAH95826

SEQ ID NO: 26153 - protein, 469 aa, synthetic construct
  REGION 1..469: note = neuraminidase__InfluenzaA__BAJ07994
MNPNQKITTIGSICMVIGIVSLMLQIGNIISIWVSHSIQTGNQHQAEPCNQSIITYENNTWVNQTYVNISNTNFLTEKAVASVTLAGNSSLCPISGWAVYSKDNGIRIGSKGDVFVIREPFISCSHLECRIFFLTQGALLNDKHSNGTVKDRSPHRTLMSCPVGEAPSPYNSRFESVAWSASACHDGTSWLTIGISGPDNGAVAVLKYNGIITDTIKSWRNNIMRTQESECACVNGSCFTVMTDGPSNGQASYKIFRIEKGKVVKSAELNAPNYHYEECSCYPDAGEITCVCRDNWHGSNRPWVSFNQNLEYRIGYICSGVFGDNPRPNDGTGSCGPVSPKGAYGIKGFSFKYGNGVWIGRTKSTNSRSGFEMIWDPNGWTGTDSNFSVKQDIVAITDWSGYSGSFVQHPELTGLDCIRPCFWVELIRGRPKESTIWTSGSSISFCGVNSDTVGWSWPDGAELPFTIDK

SEQ ID NO: 26154 - protein, 449 aa, synthetic construct
  REGION 1..449: note = neuraminidase__InfluenzaA__BAK23415
MNPNQKIITIGSVCMIIGIVSLMLQIGNMISIWVGHSIQTGNQCHAEPISNTKFPTEKAAASVTLAGNSSLCPISGWAVYSKDNSIRIGSRGDVFVIREPFISCSHLECRTFFLTQGALLNDKHSNGTVKDRSPHRTLMSCPVGEAPSPYNSRFESVAWSASACHDGTSWLTIGISGPDNGAVAVLKYNGIITDTIKSWRNNILRTQESECACINGSCFTVMTDGPSSGQASYKIFKMEKGKVVKSVELDAPNYHYEECSCYPDAGEITCVCRDNWHGSNRPWVSFNQNLEYQIGYICSGVFGDNPRPNDGTGSCGPVSPNGAYGVKGFSFKYGNGVWIGRTKSTNSRSGFEMIWDPNGWTGTDSSFSVKQDIVAITDWSGYSGSFVQHPELTGLDCIRPCFWVELIRGRPKESTIWTSGSSISFCGVNSDTVSWSWPDGAELPFTIDK

SEQ ID NO: 26155 - protein, 449 aa, synthetic construct
  REGION 1..449: note = neuraminidase__InfluenzaA__BAK23416
MNPNQKIITIGSICMVIGIVSLMLQIGNMISIWVSHSIQTGNQCQAEPISNTKFLTEKAVASVTLAGNSSLCPISGWAVYSKDNSIRIGSRGDVFVIREPFISCSHLECRTFFLTQGALLNDKHSNGTVKDRSPHRTLMSCPVGEAPSPYNSRFESVAWSASACHDGTSWLTIGISGPDNGAVAVLKYNGIITDTIKSWRNNILRTQESECACVNGSCFTVMTDGPSSGQASYKIFKMEKGKVVKSVELDAPNYHYEECSCYPDAGEITCVCRDNWHGSNRPWVSFNQNLEYQIGYICSGVFGDNPRPNDGTGSCGPASPNGAYGVKGFSFKYGNGVWIGRTKSTNSRSGFEMIWDPNGWTGTDSSFSVKQDIVAITDWSGYSGSFVQHPELTGLDCIRPCFWVELIRGRPKESTIWTSGSSISFCGVNSDTVSWSWPDGAELPFTIDK

SEQ ID NO: 26156 - protein, 449 aa, synthetic construct
  REGION 1..449: note = neuraminidase__InfluenzaA__BAK23417
MNPNQKIITIGSICMVIGIVSLMLQIGNMISIWVSHSIQTGNQCQSEPISNTKFLTEKAVASVTLAGNSSLCPISGWAVYSKDNSIRIGSRGDVFVIREPFISCSHLECRTFFLTQGALLNDKHSNGTVKDRSPHRTLMSCPVGEAPSPYNSRFESVAWSASACHDGISWLTIGISGPDNGAVAVLKYNGIITDTIKSWRNNILRTQESECACVNGSCFTVMTDGPSSGQASYKIFKMEKGKVVKSVELDAPNYHYEECSCYPDAGEITCVCRDNWHGSNRPWVSFNQNLEYQIGYICSGVFGDNPRPNDGTGSCGPVSPNGAYGVKGFSFKYGNGVWIGRTKSTNSRSGFEMIWDPNGWTGTDSSFSVKQDIVAITDWSGYSGSFVQHPELTGLDCIRPCFWVELIRGRPKESTIWTSGSSISFCGVNGDTVSWSWPDGAELPFTIDK

SEQ ID NO: 26157 - protein, 449 aa, synthetic construct
  REGION 1..449: note = neuraminidase__InfluenzaA__BAK23418
MNPNQTIITIGSICMVIGIVSLMLQIGNMISIWVSHSIQTGNQCQAEPISNTKFLTEKAVASVTLAGNSSLCPISGWAVYSKDNSIRIGSRGDVFVIREPFISCSHLECRTFFLTQGALLNDKHSNGTVKDRSPHRTLMSCPVGEAPSPYNSRFESVAWSASACHDGTSWLTIGISGPDNGAVAVLKYNGIITDTIKSWRNNILRTQESECACVNGSCFTVMTDGPSSGQASYKIFKMEKGKVVKSVELDAPNYHYEECSCYPDAGEITCVCRDNWHGSNRPWVSFNQNLEYQIGYICSGVFGDNPRPNDGTGSCGPVSPNGAYGVKGFSFKYGNGVWIGRTKSTNSRSGFEMIWDPNGWTGTDSSFSVKQDIVAITDWSGYSGSFVQHPELTGLDCIRPCFWVELIRGRPKESTIWTSGSSISFCGVNSDTVSWSWPDGAELPFTIDK

SEQ ID NO: 26158 - protein, 449 aa, synthetic construct; identical to SEQ ID NO: 16577
  REGION 1..449: note = neuraminidase__InfluenzaA__BAK23420

SEQ ID NO: 26159 - protein, 449 aa, synthetic construct; identical to SEQ ID NO: 16577
  REGION 1..449: note = neuraminidase__InfluenzaA__BAK23421

SEQ ID NO: 26160 - protein, 449 aa, synthetic construct
  REGION 1..449: note = neuraminidase__InfluenzaA__BAK23422
MNPNQKIITIGSVCMVIGIVSLMLQIGNMISIWVGHSIQTGNQCHAEPISNTKFPTEKAAASVTLAGNSSLCPISGWAVYSKDNSIRIGSRGDVFVIREPFISCSHLECRTFFLTQGALLNDKHSNGTVKDRSPHRTLMSCPVGEAPSPYNSRFESVAWSASACHDGTSWLTIGISGPDNGAVAVLKYNGIITDTIKSWRNNILRTQESECACVNGSCFTVMTDGPSSGQASYKIFKMEKGKVVKSVELDAPNYHYEECSCYPDAGEITCVCRDNWHGSNRPWVSFNQNLEYQIGYICSGVFGDNPRPNDGTGSCGPVSPNGAYGVKGFSFKYGNGVWIGRTKSTNSRSGFEMIWDPNGWTGTDSSFSVKQDIVAITDWSGYSGSFVQHPELTGLDCIRPCFWVELIRGRPKESTIWTSGSSISFCGVNSDTVSWSWPDGAELPFTIDK

SEQ ID NO: 26161 - protein, 449 aa, synthetic construct
  REGION 1..449: note = neuraminidase__InfluenzaA__BAK23423
MNPNQKIITIGSICMVIGIVSLMLQIGNMISIWVSHSIQTGNQCQAEPISTTKFLTEKAVASVTLAGNSSLCPISGWAVYSKDNSIRIGPRGDVFVIREPFISCSHLECRTFFLTQGALLNDKHSNGTVKDRSPHRTLMSCPVGEAPSPYNSRFESVAWSASACHDGISWLTIGISGPDNGAVAVLKYNGIITDTIKSWRNNILRTQESECACVNGSCFTVMTDGPSSGQASYKIFKMEKGKVVKSVELDAPNYHYEECSCYPDAGEITCVCRDNWHGSNRPWVSFNQNLEYQIGYICSGVFGDNPRPNDGTGSCGPVSPNGAYGVKGFSFKYGNGVWIGRTKSTNSRSGFEMIWDPNGWTGTDSSFSVKQDIVAITDWSGYSGSFVQHPELTGLDCIRPCFWVELIRGRPKESTIWTSGSSISFCGVNSDTVSWSWPDGAELPFTIDK

SEQ ID NO: 26162 - protein, 449 aa, synthetic construct
  REGION 1..449: note = neuraminidase__InfluenzaA__BAK23424
MNPNQKIITIGSICMVIGIVSLMLQIGNMISIWVSHSIQTGNQCQGEPISNTKFLTEKAVASVTLAGNSSLCPISGWAVYSKDNSIRIGSRGDVFVIREPFISCSHLECRTFFLTQGALLNDKHSNGTVKDRSPHRTLMSCPVGEAPSPYNSRFESVAWSASACHDGTSWLTIGISGPDNGAVAVLKYNGIITDTIKSWRNNILRTQESECACVNGSCFTVMTDGPSSGQASYKIFKMEKGKVVKSVELDAPNYHYEECSCYPDAGEITCVCRDNWHGSNRPWVSFNQNLEYQIGYICSGVFGDNPRPNDGTGSCGPVFSNGAYGVKGFSFKYGNGVWIGRTKSTNSRSGFEMIWDPNGWTGTDSSFSGKQDIVAITDWSGYSGSFVQHPELTGLDCIRPCFWVELIRGRPKESTIWTSGSSISFCGVNSDTVSWSWPDGAELPFTIDK

SEQ ID NO: 26163 - protein, 449 aa, synthetic construct
  REGION 1..449: note = neuraminidase__InfluenzaA__BAK23425
MNPNQKIITIGSICMVIGIVSLMLQIGNMISIWVSHSIQTGNQCQAEPISNTKFLTEKAVASVTLAGNSSLCPISGWAVYSKDNSIRIGSRGDVFVIREPFISCSHLECRTFFLTQGALLNDKHSNGTVKDRSPHRTLMSCPVGEAPSPYNSRFESVAWSASACHDGISWLTIGISGPDNGAVAVLKYNGIITDTIKSWRNNILRTQESECACVNGSCFTVMTDGPSSGQASYKIFKMEKGKVVKSVELDAPNYHYEECSCYPDAGEITCVCRDNWHGSNRPWVSFNQNLEYQIGYICSGVFGDNPRPNDGTGSCGPVSPNGAYGVKGFSFKYGNGVWIGRTKSTNSRSGFEMIWDPNGWIGTDSSFSVKQDIVAITDWSGYSGSFVQHPELTGLDCIRPCFWVELIRGRPKESTIWTSGSSISFCGVNSDTVSWSWPDGAELPFTIDK

SEQ ID NO: 26164 - protein, 449 aa, synthetic construct
  REGION 1..449: note = neuraminidase__InfluenzaA__BAK23426
MNPNQKIITIGSICMVIGIVSLMLQIGNMISIWVSHSIQTGNQCQAEPISNTKFFTEKAVASVTLAGNSSLCPISGWAVYSKDNSIRIGSRGDVFIIREPFISCSHLECRTFFLTQGALLNDKHSNGTVKDRSPHRTLMSCPVGEAPSPYNSRFESVAWSASACHDGTSWLTIGISGPDNGAVAVLKYNGIITDTIKSWRNNILRTQESECACVNGSCFTVMTDGPSSGQASYKIFKMEKGKVVKSVELDAPNYHYEECSCYPDAGEITCVCRDNWHGSNRPWVSFNQNLEYQIGYICSGVFGDNPRPNDGTGSCGPVSPNGAYGVKGFSFKYGNGVWIGRTKSTNSRSGFEMIWDPNGWTGTDSSFSVKQDIVAITDWSGYSGSFVQHPELTGLDCIRPCFWVELIRGRPKESTIWTSGSSISFCGVNSDTVSWSWPDGAELPFTIDK

SEQ ID NO: 26165 - protein, 449 aa, synthetic construct; identical to SEQ ID NO: 26163
  REGION 1..449: note = neuraminidase__InfluenzaA__BAK23427

SEQ ID NO: 26166 - protein, 449 aa, synthetic construct
  REGION 1..449: note = neuraminidase__InfluenzaA__BAK23428
MNPNQKIITIGSICMVIGIVSLMLQIGNMISIWVSHSIQTGNQCQAEPISNTKFLTEKAVASVTLAGNSSLCPISGWAVYSKDNSIRIGSRGDVFVIREPFISCSHLECRTFFLTQGALLNDKHSNGTVKDRSPHRTLMSCPVGEAPSPYNSRFESVAWSASACHDGTSWLTIGISGPDNGAVAVLKYNGIITDTIKSWRNNILRTQESECACVNGSCFTVMTDGPSSGQASYKIFKMEKGKVVKSVELDAPNYHYEECSCYPDAGEITCVCRDNWHGSNRPWVSFNQNLEYQIGYICSGVFGDNPRPNDGTGSCGPVSPNGAYGVKGFSFKYGNGVWIGRTKSTNSRSGFEMIWDPNGWTGTDSSVSVKQDIVAITDWSGYSGSFVQHPELTGLDCIRPCFRVELIRGRPKESTIWTSGSSISFCGVNSDTVSWSWPDGAELPFTIDK

SEQ ID NO: 26167 - protein, 449 aa, synthetic construct; identical to SEQ ID NO: 26163
  REGION 1..449: note = neuraminidase__InfluenzaA__BAK23429

SEQ ID NO: 26168 - protein, 449 aa, synthetic construct
  REGION 1..449: note = neuraminidase__InfluenzaA__BAK23430
MNPNQKIITIGSICMVIGIVSLMLQIGNMISIWVSHSIQTGNQCQAEPISNTKFLTEKAVASVTLAGNSSLCPISGWAVYSKDNSIRIGSRGDVFVIREPFISCSHLECRTFFLTQGALLNDKHSNGTVKDRSPHRTLMSCPVGEAPSPYNSRFESVAWSASACHDGISWLTIGISGPDNGAVAVLKYNGIITDTIKSWRNNILRTQESECACVNGSCFTVMTDGPSSGQASYKIFKMEKGKVVKSVELDAPNYHYEECSCYPDAGEITCVCRDNWHGSNRPWVSFNQNLEYQIGYICSGVFGDNPRPNDGTGSCGPVSPNGAYGVKGFSFKYGNGVWIGRTKSTNSRSGFEMIWDPNGWIGTDSSFSVKQDIVAITDWSGYSGSFVQHPELTGLDCMRPCFWVELIRGRPKESTIWTSGSSISFCGVNSDTVSWSWPDGAELPFTIDK

SEQ ID NO: 26169 - protein, 449 aa, synthetic construct
  REGION 1..449: note = neuraminidase__InfluenzaA__BAK23431
MNPNQKIITIGSICMVIGIVSLMLQIGNMISIWVSHSIQTGNQCQAEPISNTKFLTEKAVASVTLAGNSSLCPISGWAVYSKDNSIRIGSRGDVFVIREPFISCSHLECRTFFLTQGALLNDKHSNGTVKDRSPHRTLMSCPVGEAPSPYNSRFESVAWSASACHDGTSWLTIGISGPDNGAVAVLKYNGIITDTIKSWRNNILRTQESECACVNGSCFTVMTDGPSSGQASYKIFKMEKGKVVKSVELDAPNYHYEECSCYPDAGEITCVCRDNWHGSNRPWVSFNQNLEYQIGYICSGVFGDNPRPNDGTGSCGPVSPNGAYGVKGFSFKYGNGVWIGRTKSTNSRSGFEMIWGPNGWTGTDSSFSVKQDIVAITDWSGYSGSFVQHPELTGLDCIRPCFWVELIRGRPKESTIWTSGSSISFCGVNSDTVSWSWPDGAELPFTIDK

SEQ ID NO: 26170 - protein, 449 aa, synthetic construct; identical to SEQ ID NO: 26163
  REGION 1..449: note = neuraminidase__InfluenzaA__BAK23432

SEQ ID NO: 26171 - protein, 449 aa, synthetic construct; identical to SEQ ID NO: 26163
  REGION 1..449: note = neuraminidase__InfluenzaA__BAK23433

SEQ ID NO: 26172 - protein, 469 aa, synthetic construct
  REGION 1..469: note = neuraminidase__InfluenzaA__BAM65748
MNPNQKIITIGSVSLTISTICFFMQIAILITTVTLHFKQYEFNSPPNNQVMLCEPTIIERNITEIVYLTNTTIEKEICPKLAEYRNWSKPQCDITGFAPFSKDNSIRLSAGGDIWVTREPYVSCDPDKCFQFALGQGTTLNNVHSNDTVHDRTPYRTLLMNELGVPFHLGTKQVCIAWSSSSCHDGKAWLHVCVTGDDKNATASFIYNGRLVDSIVSWSKKILRTQESECVCINGTCTVVMTDGSASGKADTKILFIEEGKIVHTSTLSGSAQHVEECSCYPRYPGVRCVCRDNWKGSNRPIVDINIKDYSIVSSYVCSGLVGDTPRKTDSSSSSHCLDPNNEEGGHGVKGWAFDDGNDVWMGRTISEKSRLGYETFKVIGGWSNPNSKSQINRQVIVDMGNRSGYSGIFSVEGKSCINRCFYVELIRGRKDETEVLWTSNSIVVFCGTSGTYGTGSWPDGADIKLMSI

SEQ ID NO: 26173 - protein, 449 aa, synthetic construct
  REGION 1..449: note = neuraminidase__InfluenzaA__BAM85817
MNPNQKIITIGSICMVTGIVSLMLQIGNMISIWVSHSIHTGNQHQSEPISNTNFLTEKAVASVKLAGNSSLCPINGWAVYSKDNSIRIGSKGDVFVIREPFISCSHLECRTFFLTQGALLNDKHSNGTVKDRSPHRTLMSCPVGEAPSPYNSRFESVAWSASACHDGTSWLTIGISGPDNGAVAVLKYNGIITDTIKSWRNNILRTQESECACVNGSCFTVMTDGPSNGQASHKIFKMEKGKVVKSVELDAPNYHYEECSCYPNAGEITCVCRDNWHGSNRPWVSFNQNLEYQIGYICSGVFGDNPRPNDGTGSCGPVSSNGAYGVKGFSFKYGNGVWIGRTKSTNSRSGFEMIWDPNGWTETDSSFSVKQDIVAITDWSGYSGSFVQHPELTGLDCIRPCFWVELIRGRPKESTIWTSGSSISFCGVNSDTVGWSWPDGAELPFTIDK

SEQ ID NO: 26174 - protein, 449 aa, synthetic construct
  REGION 1..449: note = neuraminidase__InfluenzaA__BAM85818
MNPNQKIITIGSICMVIGIVSLMLQIGNMISIWVSHSIQTGNQHQAEPIRNTNFLTENAVASVTLAGNSSLCPIRGWAVHSKDNSIRIGSKGDVFVIREPFISCSHLECRTFFLTQGALLNDKHSNGTVKDRSPHRTLMSCPVGEAPSPYNSRFESVAWSASACHDGTSWLTIGISGPDNGAVAVLKYNGIITDTIKSWRNNILRTQESECACVNGSCFTVMTDGPSNGQASYKIFKMEKGKVVKSVELNAPNYHYEECSCYPDAGEIICVCRDNWHGSNRPWVSFNQNLEYQIGYICSGVFGDNPRPNDGTGSCGPVSPNGAYGIKGFSFKYGNGVWIGRTKSTNSRSGFEMIWDPNGWTGTDSNFSVKQDIVAITDWSGYSGSFVQHPELTGLDCIRPCFWVELIRGRPKESTIWTSGSSISFCGVNSDTVSWSWPDGAELPFTIDK

SEQ ID NO: 26175 - protein, 449 aa, synthetic construct
  REGION 1..449: note = neuraminidase__InfluenzaA__BAM85819
MNPNQKIITIGSICMVIGIVSLMLQIGNMISIWVSHSIQTGNQNQVEPIINTNFLTEKAVASITLAGNSSLCPIRGWAIHSKDNSIRIGSKGDVFVIREPFISCSHLECRTFFLTQGALLNDKHSNGTVKDRSPHRTLMSCPVGEAPSPYNSRFESVAWSASACHDGTSWLTIGISGPDNGAVAVLKYNGIITDTIKSWRNNILRTQESECACVNGSCFTVMTDGPSDGQASYKIFKMEKGKVIKSVELDAPNYHYEECSCYPDAGEITCVCRDNWHGSNRPWVSFNQNLEYQIGYICSGVFGDNPRPNDGTGSCGPVSHNGAYGVKGFSFKYGNGVWIGRTKSPNSRSGFEMIWDPNGWSETDSSFSVKQDIVAITDWSGYSGSFVQHPELTGLDCIRPCFWVELIRGRPKESTVWTSGSSISFCGVSSDTVSWSWPDGAELPFTIDK

SEQ ID NO: 26176 - protein, 449 aa, synthetic construct
  REGION 1..449: note = neuraminidase__InfluenzaA__BAM85820
MNPNQKIITIGSICMVIGIVSLMLQIGNMISIWVSHSIQTGNQHQAEPISNTNFLTEKAVASVTLAGNSSLCPIRGWAVHSKDNSIRIGSKGDVFVIREPFISCSHLECRTFFLTQGALLNDKHSNGTVKDRSPHRTLMSCPVGEAPSPYNSRFESVAWSASACHDGTSWLTIGISGPDNGAVAVLKYNGIITDTIKSWRNNILRTQESECACVNGSCFTVMTDGPSNGQASYKIFKMEKGKVVKSVELDAPNYHYEECSCYPDAGEITCVCRDNWHGSNRPWVSFNQNLEYQIGYICSGVFGDNPRPNDGTGSCGPVSPNGAYGVKGFSFKYGNGVWIGRTKSTNSRSGFEMIWDPNGWTGTDSSFSVKQDIVAITDWSGYSGSFVQHPELTGLDCIRPCFWVELIRGRPKESTIWTSGSSISFCGVNSDTVSWSWPDGAELPFTIDK

SEQ ID NO: 26177 - protein, 449 aa, synthetic construct; identical to SEQ ID NO: 15008
  REGION 1..449: note = neuraminidase__InfluenzaA__BAM85821

SEQ ID NO: 26178 - protein, 449 aa, synthetic construct
  REGION 1..449: note = neuraminidase__InfluenzaA__BAM85822
MNPNQKIITIGSICMVTGIVSLMLQIGNMISIWVSHSIHTGNQHQSEPISNTNFLTEKAVASVKLAGNSSLCPINGWAVYSKDNSIRIGSKGDVFVIREPFISCSHLECRTFFLTQGALLNDKHSNGTVKDRSPHRTLMSCPVGEAPSPYNSRFESVAWSASACHDGTSWLTIGISGPDNGAVAVVKYNGIITDTIKSWRNNILRTQESECACVNGSCFTVMTDGPSNSQASHKIFKMEKGKVVKSVELDAPNYHYEECSCYPDAGEITCVCRDNWHGSNRPWVSFNQNLEYQIGYICSGVFGDNPRPNDGTGSCGPVSSNGAYGVKGFSFKYGNGVWIGRTKSTNSRSGFEMIWDPNGWTETDSSFSVKQDIVAITDWSGYSGSFVQHPELTGLDCIRPCFWVELIRGRPKESTIWTSGSSISFCGVNSDTVGWSWPDGAELPFTIDK

SEQ ID NO: 26179 - protein, 469 aa, synthetic construct
  REGION 1..469: note = neuraminidase__InfluenzaA__BAM85823
MNPNQKITTIGSICMVIGIVSLMLQIGNIISIWVSHSIQTGNQHQAGPCNQSIITYENNTWVNQTYVNISNTNFLTEKTVASVTLAGNSSLCPISGWAVYSKDNGIRIGSKGDVFVIREPFISCSHLECRTFFLTQGALLNDKHSNGTVKDRSPHRTLMSCPVGEAPSPYNSRFESVAWSASACHDGINWLTIGISGPDNGAVAVLKYNGIITDTIKSWRNNILRTQESECACVNGSCFTIMTDGPSNGQASYKIFRIEKGKVVKSVELNAPNYHYEECSCYPDAGEITCVCRDNWHGSNRPWVSFNQNLEYQIGYICSGIFGDNPRPNDGTGSCGPVSPNGAYGIKGFSFKYGNGVWIGRTKSTNSRSGFEMIWDPNGWTGTDSNFSVKQDIVAITDWSGYSGSFVQHPELTGLDCIRPCFWVELIRGRPKESTIWTSGSSISFCGVNSDTVGWSWPDGAELPFTIDK

SEQ ID NO: 26180 - protein, 449 aa, synthetic construct
  REGION 1..449: note = neuraminidase__InfluenzaA__BAM85824
MNPNQKIITIGSICMVIGIVSLLLQIGNMISIWISHSIQTGNQHQAESISNTNPLTEKAVASVTLAGNSSLCPIRGWAVHSKDNSIRIGSKGDVFVIREPFISCSHLECRTFFLTQGALLNDKHSNGTVKDRSPHRTLMSCPVGEAPSPYNSRFESVAWSASACHDGTSWLTIGISGPDNGAVAVLKYNGIITDTIKSWRNNILRTQESECACVNGSCFTVMTDGPSNGQASYKIFKMEKGKVVKSVELDAPNYHYEECSCYPDASEITCVCRDNWHGSNRPWVSFNQNLEYQIGYICSGVFGDNPRPNDGTGSCGPMFPNGAYGIKGFSFKYGNGVWIGRTKSTNSRSGFEMIWDPNGWTGTDSSFSVKQDIVAITDWSGYSGSFVQHPELTGLDCIRPCFWVELIRGRPKESTIWTSGSSISFCGVNSDTVSWSWPDGAELPFTIDK

SEQ ID NO: 26181 - protein, 449 aa, synthetic construct
  REGION 1..449: note = neuraminidase__InfluenzaA__BAM85825
MNPNQKIITIGSICMVIGIVSLMLQIGNMISIWVSHSIQTGNQNQVEPIINTNFLTEKAVASITLAGNSSLCPIRGWAIHSKDNSIRIGSKGDVFVIREPFISCSHLECRTFFLTQGALLNDKHSNGTVKDRSPHRTLMSCPVGEAPSPYNSRFESVAWSASACHDGTSWLTIGISGPDNGAVAVLKYNGIITDTIKSWRNNILRTQESECACVNGSCFTVMTDGPSNGQASYKIFKMEKGKVIKSVELDAPNYHYEECSCYPDAGEITCVCRDNWHGSNRPWVSFNQNLEYQIGYICSGVFGDNPRPNDGTGSCGPVSHNGAYGVKGFSFKYGNGVWIGRTKSPNSRSGFEMIWDPNGWSETDSSFSVKQDIVAITDWSGYSGSFVQHPELTGLDCIRPCFWVELIRGRPKESTVWTSGSSISFCGVNSDTVSWSWPDGAELPFTIDK

SEQ ID NO: 26182 - protein, 449 aa, synthetic construct
  REGION 1..449: note = neuraminidase__InfluenzaA__BAM85826
MNPNQKIITIGSICMVIGIVSLMLQIGNMISIWVSHSIQTGNQRQAEPISNTKFLTEKAVASVTLAGNSSLCPISGWAVYSKDNSIRIGSRGDVFVIREPFISCSHLECRTFFLTQGALLNDKHSNGTVKDRSPHRTLMSCPVGEAPSPYNSRFESVAWSASACHDGTSWLTIGISGPDNGAVAVLKYNGIITDTIKSWRNNILRTQESECACVNGSCFTVMTDGPSNGQASYKIFKMEKGKVVKSVELDAPNYHYEECSCYPDAGEITCVCRDNWHGSNRPWVSFNQNLEYQIGYICSGVFGDNPRPNDGTGSCGPVSLNGAYGVKGFSFKYGNGVWIGRTKSTNSRSGFEMIWDPNGWTGTDSSFSVKQDIVAITDWSGYSGSFVQHPELTGLDCIRPCFWVELIRGRPKESTIWTSGSSISFCGVNSDTVSWSWPDGAELPFTIDK

SEQ ID NO: 26183 - protein, 449 aa, synthetic construct
  REGION 1..449: note = neuraminidase__InfluenzaA__BAM85827
MNPNQKIITIGSICMVIGVVSLMLQTGNIISIWVSHSIQKGNQHQAESISNTNPLTEKAVASVTLAGNSSLCPIRGWAVHSKDNNIRIGSKGDVFVIREPFISCSHLECRTFFLTQGALLNDKHSNGTVKDRSPHRTLMSCPVGEAPSPYNSRFESVAWSASACHDGTSWLTIGISGPDNEAVAVLKYNGIITDTIKSWRNNILRTQESECACVNGSCFTVMTDGPSNGQASYKIFKMEKGKVVKSVELDAPNYHYEECSCYPDAGEITCVCRDNWHGSNRPWVSFNQNLEYQIGYICSGVFGDNPRPNDGTGSCGPMSPNGAYGVKGFSFKYGNGVWIGRTKSTTSRSGFEMIWDPNGWTGTDSSFSVKQDIVAITDWSGYSGSFVQHPELTGLDCIRPCFWVELIRGRPKESTIWTSGSSISFCGVDSDTVSWSWPDGAELPFTIDK

SEQ ID NO: 26184 - protein, 449 aa, synthetic construct
  REGION 1..449: note = neuraminidase__InfluenzaA__BAM85828
MNPNQKIITIGSICMVIGIVSLMLQIGNMISIWVSHSIQTGNQRQAEPISNTKFLTEKAVASVTLAGNSSLCPISGWAVYSKDNSIRIGSRGDVFVIREPFISCSHLECRTFFLTQGALLNDKHSNGTVKDRSPHRTLMSCPVGEAPSPYNSRFESVAWSASACHDGTSWLTIGISGPDNGAVAVLKYNGIITDTIKSWRNNILRTQESECACVNGSCFTVMTDGPSNGQASYKIFKMEKGKVVKSVELDAPNYHYEECSCYPDAGEITCVCRDNWHGSNRPWVSFNQNLEYQIGYICSGVFGDNPRPNDGTGSCGPVSPNGAYGVKGFSFKYGNGVWIGRTKSTNSRSGFEMIWDPNGWTGTDSSFSVKQDIVAITDWSGYSGSFVQHPELTGLDCIRPCFWVELIRGRPKESTIWTSGSSISFCGVNSDTVSWSWPDGAELPFTIDK

SEQ ID NO: 26185 - protein, 449 aa, synthetic construct
  REGION 1..449: note = neuraminidase__InfluenzaA__BAM85829
MNPNQKIITIGSICMIIGIVSLMLQIGNIISIWVSHSIQTGNQHQAEPISDTNFLTEKAVASVILAGNSSLCHISGWAVHSKDNSIRIGSKGDVFVIREPFISCSHLECRTFFLTQGALLNDKHSNGTVKDRSPHRTLMSCPVGEAPSPYNSRFESVAWSASACHDGTSWLTIGISGPDNGAVAVLKYNGIITDTIKSWRNYILRTQESECACVNGSCFTVMTDGPSNGQASYKIFKIEKGKVVKSVELDAPNYHYEECSCYPDAGEITCVCRDNWHGSNRPWVSFNQNLEYQIGYICSGVFGDTPRPNDGTGSCGPVSPNGAYGVKGFSFKYGNGVWIGRTKSTNSRSGFEMIWDPNGWTGTDSSFSVKQDLVAITDWSGYSGSFVQHPELTGLDCIRPCFWVELIRGRPKESTIWTSGSSISFCGVNSDTVGWSWPDGAELPFTIDK

SEQ ID NO: 26186 - protein, 470 aa, synthetic construct
  REGION 1..470: note = neuraminidase__InfluenzaA__BAM85830
MNPNQKIITIGSICMAIGTISLILQIGNIISIWISHSIQTGSQNHTGICNQRIITYENNTWVNQTYVNISNTNVVAGKDTTSMILAGNSSLCPIRGWAIYSKDNSIRIGSKGDVFVIREPFISCSHLECRTFFLTQGALLNDKHSNGTVKDRSPYRALMSCPIGEAPSPYNSRFESVAWSASACHDGMGWLTIGISGPDDGAVAVLKYNGIITEIIKSWRKQILRTQESECVCVNGSCFTIMTDGPSNGPASYRIFKIKKGKITKSIELDAPNSHYEECSCYPDTGKVMCVCRDNWHGSNRPWVSFNQNLDYQIGYICSGVFGDNPRPKDGKGSCDPVNVDGADGVKGFSYRYGNGVWIGRTKSNSSRKGFEMIWDPNGWTDTDGNFLVKQDVVAMTDWSGYSGSFVQHPELTGLDCMRPCFWVELIRGQPREKTTIWTSGSSISFCGVNSDTVNWSWPDGAELPFTIDK

SEQ ID NO: 26187 - protein, 470 aa, synthetic construct
  REGION 1..470: note = neuraminidase__InfluenzaA__BAM85831
MNPNQKIITIGSISIAIGIISLMLQIGNIISIWASHSIQTGSQNHTGVCNQRIITYENSTWVNHTYVNINNTNVIAGKDKTSVTLAGNSSLCSISGWAIYTKDNSIRIGSKGDVFVIREPFISCSHLECRTFFLTQGALLNDKHSNGTVKDRSPYRALMSCPLGEAPSPYNSKFESVAWSASACHDGIGWLTIGISGPDNGAVAVLKYNGIITETIKSWKKQILRTQESECVCVNGSCFTIMTDGPSNGAASYKIFKIEKGKVTKSIELNAPNFHYEECSCYPDTGTVMCVCRDNWHGSNRPWVSFNQNLDYQIGYICSGVFGDNPRPRDGEGSCNPVTADGANGVKGFSYKYGNGVWIGRTKSNRLRKGFEMIWDPNGWTDTDSDFSVKQDVVAITDWSGYSGSFVQHPELTGLGCIRPCFWVELVRGLPRENTTIWTSGSSISFCGVNSDTANWSWPDGAELPFTIDK

SEQ ID NO: 26188 - protein, 470 aa, synthetic construct; identical to SEQ ID NO: 21508
  REGION 1..470: note = neuraminidase__InfluenzaA__BAM85832

SEQ ID NO: 26189 - protein, 469 aa, synthetic construct
  REGION 1..469: note = neuraminidase__InfluenzaA__BAM85833
MNPNQKIITIGSTCMVIGIISLILQIGNIISIWVSHSIQTGNQNQPETCNQSVITYENKTWVNQTYVNISNTNLVIERDVISVALLGNSSLCPISGWAIYSKDNGIRIGSKGDVFVIREPFISCSHLECRTFFLTQGALLNDKHSNGTVKDRSPYRTLMSCPVGEAPSPYNSRFESVAWSASACHDGISWLTVGISGPDNGAVAVLKYNGIITDTVKSWRNNILRTQESECACINGSCFTIMTDGPSNGQASYKIFKIEKGKVVKSVELNAPNYHYEECSCYPDASEIMCVCRDNWHGSNRPWVSFNRNLEYQIGYICSGVFGDNPRPNDGTGSCGPVSSNGAYGVKGFSFKYGKGVWIGRTKSTSSRSGFEMIWDPNGWTETDSSFSVKQDIVAITDWSGYSGSFVQHPELTGLDCIRPCFWVELIRGRPKENTIWTSGSSISFCGVNSDTVGWSWPDGAELPFTIDK

SEQ ID NO: 26190 - protein, 469 aa, synthetic construct
  REGION 1..469: note = neuraminidase__InfluenzaA__BAM85834
MNPNQKIITIGSVSLTVATVCFLMQIAILTTTVTLHFKQNECSIPANNQVMPCEPIVIERNITEIVYLNNTTIEKEICLKAAEYRNWSKPQCQITGFAPFSKDNSIRLSAGGDIWVTREPYVSCDPSKCYQFALGQGTTLENKHSNGTIHDRIPHRTLLMNELGVPFHLGTKQVCIAWSSSSCHDGKAWLHVCVTGDDRNATASFIYDGMLVDSIGSWSQNILRTQESECVCINGTCAVVMTDGSASGRADTRILFIREGKIVHISPLSGSAQHIEECSCYPRYPIIRCVCRDNWKGSNRPVIDINMADYSIDSSYVCSGLVGDTPRNDDSSSSSNCRDPNNERGNPGVKGWAFDNGNDVWMGRTISKDSRSGYETFRVIGGWATANSKSQTNRQVIVDNNNWSGYSGIFSVESKSCINRCFYVELIRGRPQETRVWWTSNSIVVFCGTSGTYGTGSWPDGANINFMPI

SEQ ID NO: 26191 - protein, 469 aa, synthetic construct
  REGION 1..469: note = neuraminidase__InfluenzaA__BAM85835
MNPNQKIITIGSVSLTIATVCFLMQIAILATTVTLHFKQNECSIPANNQVVPCEPIIIERNITEIVYLNNTTIEKEICSKAVDYRNWSKPQCQITGFAPFSKDNSIRLSAGGDIWVTREPYVSCDTSKCYQFALGQGTTLDNKHSNGTIHDRIPHRTLLMNELGVPFHLGTKQVCIAWSSSSCHDGKAWLHVCVTGDDRNATASFIYNGMLVDSIGSWSQNILRTQESECVCINGSCTVVMTDGSASGKADTRILFVKEGKIIHISPLSGSAQHIEECSCYPRYPNVRCVCRDNWRGSNRPVIDINMADYSIDSSYVCSGLVGDTPRNDDNSSSSNCRDPNNERGNPGVKGWAFDSGDDVWMGRTISRDSRSGYETFKVIGGWATANSKSQTSRQVIVDNNNWSGYSGVFSVEHKSCINRCFYVELIRGRPQETRVWWTSNSIVVFCGTSGTYGTGSWPDGANINFMPI

SEQ ID NO: 26192 - protein, 469 aa, synthetic construct
  REGION 1..469: note = neuraminidase__InfluenzaA__BAM85836
MNPNQKIITIGSVSLTIATICFLMQIAILATTVTLHFKQNGCSIPSNNQVVPCEPIIVERNITEIVYLNNTTIEKELCPKVLEYRDWSKPQCQITGFAPFSKDNSIRLSAGGDIWVTREPYVSCSPDKCYQFALGQGTTLDNRHSNGTIHDRIPHRTLLMNELGVPFHLGTKQVCIAWSSSSCHDGRAWLHVCVTGDDRNATASFIYDGMLVDSIGSWSQNILRTQESECVCINGTCTVVMTDGSASGRADTRILFVKEGKIVHISPLSGSAQHIEECSCYPRYPDVRCVCRDNWKGSNRPIIDINMADYSIGSSYVCSGLVGDTPRNDDSSSNSNCRDPNNERGNPGVKGWAFDYGNDVWMGRTISKDSRSGYETFRVIGGWTTANSKSQVNRQVIVDNSNWSGYSGIFSVEGKSCINRCFYVELIRGRPQETRVWWTSNSIVVFCGTSGTYGTGSWPDGANINFMPI

SEQ ID NO: 26193 - protein, 469 aa, synthetic construct
  REGION 1..469: note = neuraminidase__InfluenzaA__BAO79717
MNPNQKIITIGSVSLTISTICFFMQIAILITTVTLHFKQYEFNSPPNNQVMLCEPTIIERNITEIVYLTNTTIEKEICPKPAEYRNWSKPQCGITGFAPFSKDNSIRLSAGGDIWVTREPYVSCDPDKCYQFALGQGTTLNNVHSNNTVRDRTPYRTLLMNELGVPFHLGTKQVCIAWSSSSCHDGKAWLHVCITGDDKNATASFIYNGRLVDSVVSWSKDILRTQESECVCINGTCTVVMTDGSASGKADTKILFIEEGKIVHTSTLSGSAQHVEECSCYPRYPGVRCVCRDNWKGSNRPIVDINIKDHSIVSSYVCSGLVGDTPRKNDSSSSSHCLDPNNEEGGHGVKGWAFDDGNDVWMGRTINETSRLGYETFKVIEGWSNPKSKLQINRQVIVDRGDRSGYSGIFSVEGKNCINRCFYVELIRGRKEETEVLWTSNSIVVFCGTSGTYGTGSWPDGADLNLMPI

SEQ ID NO: 26194 - protein, 470 aa, synthetic construct; identical to SEQ ID NO: 15059
  REGION 1..470: note = neuraminidase__InfluenzaA__CAA33354

SEQ ID NO: 26195 - protein, 467 aa, synthetic construct
  REGION 1..467: note = Neuraminidase__InfluenzaA__CAB95858
MNPNQKIIALGSVSITIATICLLMQIAILATTMTLHFNECTNPSNNQAMPCEPIIIERNITEIVHLNNTTIEKESCPKVAEYKNWSKPQCQITGFAPFSKDNSIRLSAGGDIWVTREPYVSCGLGNCYQFALGQGTTLNNKHSNGTIHDRSPHRTLLMNELGVPFHLGTKQVCIAWSSSSCHDGKAWLHVCVTGDDRNATASIIYDGMLTDSIGSWSKNILRTQESECVCINGTCTVVMTDGSASGRADTKILFIREGKIVHISPLSGSAQHVEECSCYPRYPEVRCVCRDNWKGSNRPVLYINVADYSVDSSYVCSGLVGDTPRNDDSSSSSNCRDPNNERGGPGVKGWAFDNGNDVWMGRTIKKDSRSGYETFRVVGGWTTANSKSQINRQVIVDSDNWSGYSGIFSVEGKTCINRCFYVELIRGRPQETRVWWTSNSIIVFCGTSGTYGTGSWPDGANINFMSI

SEQ ID NO: 26196 - protein, 467 aa, synthetic construct
  REGION 1..467: note = neuraminidase__InfluenzaA__CAB95859
MNPNQKIIALGSVSITIATICLLMQIAILATTMTLHFNECTNPSNNQAVPCEPIIIERNITEIVHLNNTTIEKESCPKVAEYKNWSKPQCQITGFAPFSKDNSIRLSAGGDIWVTREPYVSCGLGKCYQFALGQGTTLNNKHSNGTIHDRSPHRTLLMNELGVPFHLGTKQVCIAWSSSSCHDGKAWLHVCVTGDDRNATASIIYDGMLTDSIGSWSKNILRTQESECVCINGTCTVVMTDGSASGRADTKILFIREGKIVHIGPLSGSAQHVEECSCYPRYPEVRCVCRDNWKGSNRPVLYINVADYSVDSSYVCSGLVGDTPRNDDSSSSSNCRDPNNERGGPGVKGWAFDNGNDVWMGRTIKKDSRSGYETFRVVGGWTTANSKSQINRQVIVDSDNWSGYSGIFSVEGKTCINRCFYVELIRGRPQETRVWWTSNSIIVFCGTSGTYGTGSWPDGANINFMSI

SEQ ID NO: 26197 - protein, 469 aa, synthetic construct; identical to SEQ ID NO: 14573
  REGION 1..469: note = Neuraminidase__InfluenzaA__CAC19707

SEQ ID NO: 26198 - protein, 469 aa, synthetic construct
  REGION 1..469: note = neuraminidase__InfluenzaA__CAD29959
MNPNQKIITIGSVSLTIATICFLMQIAILVTTVTLHFKQYECNSPPNNQVMLCEPTIIERNITEIVYLTNTTIEKEICPKLAEYRNWSKPQCNITGFAPFSKDNSIRLSAGGDIWVTREPYVSCDPDKCYQFALGQGTTLNNGHSNDTVHDRTPYRTLLMNELGVPFHLGTKQVCIAWSSSSCHDGKAWLHVCVTGDDENATASFIYNGRLVDSIGSWSKKILRTQESECVCINGTCTVVMTDGSASGKADTKILFIEEGKIVHTSPLSGSAQHVEECSCYPRYPGVRCVCRDNWKGSNRPIVDINVKDYSIVSSYVCSGLVGDTPRKNDSSSSSHCLNPNNEEGGHGVKGWAFDDGNDVWMGRTISEKLRSGYETFKVIEGWSKPNSKLQINRQVIVDRGNRSGYSGIFSVEGKSCINRCFYVELIRGRKQETEVLWTSNSIVVFCGTSGTYGTGSWPDGADINLMPI

SEQ ID NO: 26199 - protein, 469 aa, synthetic construct
  REGION 1..469: note = neuraminidase__InfluenzaA__CAD29960
MNPNQKIITIGSVSLTIATICFLMQIAILVTTVTLHFKQYECNPPPNNQVMLCEPTIIERNITEIVYLTNTTIEKEICPKLAEYRNWSKPQCNITGFAPFSKDNSIRLSAGGDIWVTREPYVSCDPDKCYQFALGQGTTLNNGHSNDTVHVRTPYRTLLMNELGVPFHLGTKQVCIAWSSSSCHDGKAWLHVCVTGDDENATASFIYNGRLVDSIGSWSKKILRTQESECVCINGTCTVVMTDGSASGKADTKILFIEEGKIVHTSPLSGSAQHVEECSCYPRYPGVRCVCRDNWKGSNRPIVDINVKDYSIVSSYVCSGLVGDTPRKNDSSSSSHCLNPNNEEGGHGVKGWAFDDGNDVWMGRTISEKLRSGYETFKVIEGWSKPNSKLQINRQVIVDRGNRSGYSGIFSVEGKSCINRCFYVELIRGRKQETEVLWTSNSIVVFCGTSGTYGTGSWPDGADINLMPI

SEQ ID NO: 26200 - protein, 469 aa, synthetic construct
  REGION 1..469: note = neuraminidase__InfluenzaA__CAD29961
MNPNQKIITIGSVSLTISTICFFMQIAILVTTVTLHFKQYECNSPPNNQVMLCEPTIIERNTTEIVYLTNTTIEKEICPKLAEYRNWSKPQCNITGFAPFSKDNSIRLSAGGDIWVTREPYVSCDPDKCYQFALGQGTTLNNGHSNDTVHDRTPYRTLLMNELGVPFHLGTKQVCIAWSSSSCHDGKAWLHVCVTGDDENATASFIYNGRLVDSIGSWSKKILRTQESECVCINGTCTVVMTDGSASGKADTKILFIEEGKIVHTSTLSGSAQHVEECSCYPRYPGVRCVCRDNWKGSNRPIVDINIKDYSIVSSYVCSGLVGDTPRKNDSSSSSHCLDPNNEEGGHGVKGWAFDDGNDVWMGRTISEKLRSGYETFKVIEGWSKPNSKLQINRQVIVDRGNRSGYSGIFSVEGKSCINRCFYVELIRGRKQETEVLWTSNSIVVFCGTSGTYGTGSGPDGADINLMPI

SEQ ID NO: 26201 - protein, 469 aa, synthetic construct; identical to SEQ ID NO: 21545
  REGION 1..469: note = neuraminidase__InfluenzaA__CAD29962

SEQ ID NO: 26202 - protein, 469 aa, synthetic construct; identical to SEQ ID NO: 14284
  REGION 1..469: note = neuraminidase__InfluenzaA__CAD29963

SEQ ID NO: 26203 - protein, 469 aa, synthetic construct; identical to SEQ ID NO: 14284
  REGION 1..469: note = neuraminidase__InfluenzaA__CAD29964

SEQ ID NO: 26204 - protein, 469 aa, synthetic construct; identical to SEQ ID NO: 14284
  REGION 1..469: note = neuraminidase__InfluenzaA__CAD29965

SEQ ID NO: 26205 - protein, 469 aa, synthetic construct; identical to SEQ ID NO: 14284
  REGION 1..469: note = neuraminidase__InfluenzaA__CAD29966

SEQ ID NO: 26206 - protein, 469 aa, synthetic construct; identical to SEQ ID NO: 14040
  REGION 1..469: note = neuraminidase__InfluenzaA__CAD29967

SEQ ID NO: 26207 - protein, 469 aa, synthetic construct; identical to SEQ ID NO: 14040
  REGION 1..469: note = neuraminidase__InfluenzaA__CAD29968

SEQ ID NO: 26208 - protein, 469 aa, synthetic construct; identical to SEQ ID NO: 14573
  REGION 1..469: note = neuraminidase__InfluenzaA__CAD29969

SEQ ID NO: 26209 - protein, 469 aa, synthetic construct
  REGION 1..469: note = neuraminidase__InfluenzaA__CAD29970
MNPNQKIITIGSVSLTIATICFLMQIAILVTTVTLHFKQYECNSPPNNQVMLCEPTIIERNITEIVYLTNTTIEKEICPKLAEYRNWSKPQCKITGFAPFSKDNSIRLSAGGDIWVTREPYVSCDPDKCYQFALGQGTTLNNRHSNDTVHDRTPYRTLLMNELGVPFHLGTKQVCIAWSSSSCHDGKAWLHVCVTGHDENATASFIYDGRLVDSIGSWSKKILRTQESECVCINGTCTVVMTDGSASGRADTKILFIEEGKIVHISPLSGSAQHVEECSCYPRYPGIRCVCRDNWKGSNRPIVDINVKDYSIVSSYVCSGLVGDTPRKNDSSSSSHCLNPNNEEGGHGVKGWAFDDGNDVWMGRTISEKLRSGYETFKVIEGWSKPNSKLQINRQVIVDRGNRSGYSGIFSVEGKSCINRCFYVELIRGRKQETEVWWTSNSIVVFCGTSGTYGTGSWPDGADINLMPI

SEQ ID NO: 26210 - protein, 469 aa, synthetic construct; identical to SEQ ID NO: 16555
  REGION 1..469: note = neuraminidase__InfluenzaA__CAD29971

SEQ ID NO: 26211 - protein, 469 aa, synthetic construct
  REGION 1..469: note = neuraminidase__InfluenzaA__CAD29972
MNPNQKIITIGSVSLTIATICFLMQIVILVTTVTLHFKQYECNSPPNNQVMLCEPTIIERNITEIVYLTNTTIEKEICPKLAEYRNWSKPQCNITGFAPFSKDNSIRLSAGGDIWVTREPYVSCDPDKCYQFALGQGTTLNNGHSNDTVHDRTPYRTLLMNELGVPFHLGTKQVCIAWSSSSCHDGKAWLHVCVTGDDKNATASFIYNGRLVDSIGSWSKKILRTQESECVCINGTCAVVMTDGSASGKADTKILFIEEGKIGHTSLLSGSAQHVEECSCYPRYPGVRCVCRDNWKGSNRPIVDINVKDYSIVSSYVCSGLVGDTPRKNDSSSSSHCLDPNNEEGGHGVKGWAFDDGNDVWMGRTISEKLRSGYETFKVIEGWSKPNSKLQINRQVIVDRGNRSGYSGIFSVEGKSCINRCFYVELIRGRNQETEILWTSNSIVVFCGTSGTYGTGSWPDGADINLMPI

SEQ ID NO: 26212 - protein, 469 aa, synthetic construct
  REGION 1..469: note = neuraminidase__InfluenzaA__CAD29973
MNPNQKIITIGSVSLTIATICFLMQIAILVTTVTLHFKQYECNSPPNNQVMLCEPTIIERNITEIVYLTNTTIEKEICPKLAEYRNWSKPQCKITGFAPFSKDNSIRLSAGGDIWVTREPYVSCDPGKCYQFALGQGTTLNNRHSNDTVHDRTPYRTLLMNELGVPFHLGTKQVCIAWSSSSCHDGKAWLHVCVTGHDENATASFIYDGRLVDSIGSWSKKILRTQESECVCINGTCTVVMTDGSASGRADTKILFIEEGKIVHISPLSGSAQHVEECSCYPRYSGVRCVCRDNWKGSNRPIVDINVKDYSIVSSYVCSGLVGDTPRKNDSSSSSHCLNPNNEEGGHGVKGWAFDDGNDVWMGRTISEKLRSGYETFKVIGGWSKPNSKLQINRQVIVDRGNRSGYSGIFSVEGKSCINRCFYVELIRGRKQETEVWWTSNSIVVFCGTSGTYGTGSWPDGADINLMPI

SEQ ID NO: 26213 - protein, 469 aa, synthetic construct; identical to SEQ ID NO: 22584
  REGION 1..469: note = neuraminidase__InfluenzaA__CAD29974

SEQ ID NO: 26214 - protein, 469 aa, synthetic construct
  REGION 1..469: note = neuraminidase__InfluenzaA__CAD29984
MNPNQKIITIGSVSLTIATICFLMQIAILVTTVTLHFKQYECNSPPNNQVMLCEPTIIERNITEIVYLTNTTIEKEICPKLAEYRNWSKPQCNITGFAPFSKDNSIRLSAGGDIWVTREHYVSCDRDKCYQFALGQGTTLNNGHSNDTVHDRTPYRTLLMNELGVPFHLGTKQVCIAWSSSSCHHGKAWLHVCVTGDDENATASFIYNGRLVDSIGSWSKKILRTQESECVCINGTCTVVMTDGSASGKADTKILFIKEGKIVHTSSLSGSAQHVEECSCYPRYPGVRCVCRDNWKGSNRPIVDINVKDYSIVSSYVCSGLVGDTPRKNDSSSSSHCLDPNNEEGGHGVKGWAFDDGNDVWMGRTISEKLRSGYETFKVIEGWSKANSKLQINRQVIVDRGNRSGYSGIFSVESKSCINRCFYVELIRGRKQETEVLWTSNSIVVFCGTSGTYGTGSWPDGADINLMPI

SEQ ID NO: 26215 - protein, 469 aa, synthetic construct
  REGION 1..469: note = neuraminidase__InfluenzaA__CAD29985
MNPNQKIITIGSVSLTIATICFLMQIAILVTTVTLHFKQYECNSPPNNQVMLCEPTIIERNITEIVYLTNTTIEKEICPKLAEYRNWSKPQCNITGFAPFSKDNSIRLSAGGDIWVTREPYVSCDPDKCYQFALGQGTTLNNGHSNDTVHDRTPYRTLLMNELGVPFHLGTKQVCIAWSSSSCHDGKAWLHVCVTGDDENATASFIYNGRLVDSIGSWSKKILRTQESECVCINGTCTVVMTDGSASGKADTKILFIEEGKIVHISTLSGSAQHVEECSCYPRYPGVRCVCRDNWKGSNRPIVDINVKDYSIVSSYVCSGLVGDTPRKNDSFSSSHCLDPNNEEGGHGVKGWAFDDGNDVWMGRTISEKLRSGYETFKVIEGWSKPNSKLQINRQVIVERGNRSGYSGIFSVEGKSCINRCFYVELIRGRKEETEVWWTSNSIVVFCGTSRTYGTGSWPDGADINLMPI

SEQ ID NO: 26216 - protein, 469 aa, synthetic construct
  REGION 1..469: note = neuraminidase__InfluenzaA__CAD29988
MNPNQKIITIGSVSLTIATICFLMQIAILVTTVTLHFKQYECNSPPNNQVMLCEPTIIERNITEIVYLTNTTIEKEICPKLAEYRNWSKPQCNITGFAPFSKDNSIRLSAGGDIWVTREPYVSCDPDKCYQFALGQGTTLNNGHSNDTVHDRTPYRTLLMNELGVPFHLGTRQVCIAWSSSSCHDGKAWLHVCVTGDDENATASFIYNGRLVDSIGSWSKKILRTQESECVCINGTCTVVMTDGSASEKADTKILFIEEGKIVHISTLSGSAQHVEECSCYPRYPGVRCVCRDNWKGSNRPIVDINVKDYSIVSSYVCSGLVGDTPRKNDSFSSSHCLDPNNEEGGHGVKGWAFDDGNDVWMGRTISEKLRSGYETFKVIEGWSKPNSKLQINRQVIVERGNRSGYSGIFSVEGKSCINRCFYVELIRGRKEETEVWWTSNSIVVFCGTSGTYGTGSWPDGADINLMPI

SEQ ID NO: 26217 - protein, 469 aa, synthetic construct
  REGION 1..469: note = neuraminidase__InfluenzaA__CAD29990
MNPNQKIITIGSVSLTIATICFLMQIAILVTTVTLHFKQYECNSPPNNQVMLCEPTIIERNITEIVYLTNTTIEKEICPKLAEYRNWSKPQCNITGFAPFSKDNSIRLSAGGDIWVTREPYVSCDPDKCYQFALGQGTTLNNGHSNDTVHGRTPYRTLLMNELGVPFHLGTKQVCIAWSSSSCHDGKAWLHVCVTGDDENATASFIYNGRLVDSIGSWSKKILRTQESECVCINGTCTVVMTDGSASGKADTKILFIEEGKIVHTSLLSGSAQHVEECSCYPRYPGVRCVCRDNWKGSNRPIVDINVKDYSIVSSYVCSGLVGDTPRKNDNSSSSHCLDPNNEEGGHGVKGWAFDDGNDVWMGRTISEKLRSGYETFKVIEGWSKPNSKLQINRQVIVDRGNRSGYSGIFSVEGKSCINRCFYVELIRGRKQETEVLWTSNSIVVFCGTSGTYGTGSWPDGADINLMPI

SEQ ID NO: 26218 - protein, 469 aa, synthetic construct; identical to SEQ ID NO: 14061
  REGION 1..469: note = neuraminidase__InfluenzaA__CAD29991

SEQ ID NO: 26219 - protein, 469 aa, synthetic construct
  REGION 1..469: note = neuraminidase__InfluenzaA__CAD29992
MNPNQKIITIGSVSLTIATICFLMQIAILVTTVTLHFKQYECNSPPNNQVMLCEPTIIERNITEIVYLTNTTIEKEICPKLAEYRNWSKPQCNITGFAPFSKDNSIRLSAGGDIWVTREPYVSCDPDKCYQFALGQGTTLNNGHSNDTVHDRTPYRTLLMNELGVPFHLGTKQVCIAWSSSSCHDGKAWLHVCVTGDDENATASFIYNGRLVDSIGSWSKKILRTQESECVCINGTCTVVMTDGSASGKADTKILFIEEGKIVHTSLLSGSAQHVEECSCYPRYPGVRCVCRDNWKGSNRPIVDINVKDRSIVSSYVCSGLVGDTPRKNDSSSSSHCLDPNNEEGGHGVKGWAFDDGNDVWMGRTISEKLRSGYETFKVIEGWSKPNSKLQINRQVIVDRGNRSGYSGIFSVEGKSCINRCFYVELIRGRKQETEVLWTSNSIVVFCGTSGTYGTGSWPDGADINLMPI

SEQ ID NO: 26220 - protein, 469 aa, synthetic construct
  REGION 1..469: note = neuraminidase__InfluenzaA__CAD29993
MNPNQKIITIGSVSLTIATTCFLMQIAILVTTVTLHFKQYECNSPPNNQVMLCEPTIIERNITEIVYLTNTTIEKEICPKLAEYRNWSKPQCNITGFAPFSKDNSIRLSAGGDIWVTREPYVSCDPDKCYQFALGQGTTLNNGHSNDTVHDRTPYRTLLMNELGVPFHLGTKQVCIAWSSSSCHDGKAWLHVCVTGDDENATASFIYNGRLVDSIGSWSKKILRTQESECVCINGTCTVVMTDGSASGKADTKILFIEEGKIVHTSPLSGSAQHVEECSCYPRYPGVRCVCRDNWKGSNRPIVDINVKDYSIVSSYVCSGLVGDTPRKNDSSSSSHCLDPNNEEGGHGVKGWAFDDGNDVWMGRTISEKLRSGYETFKVIEGWSKPNSKLQINRQVIVDRGNRSGYSGIFSVEGKSCINRCFYVELIRGRKQETEVLWTSNSIVVFCGTSGTYGTGSWPDGADINLMPI

SEQ ID NO: 26221 - protein, 469 aa, synthetic construct; identical to SEQ ID NO: 15749
  REGION 1..469: note = neuraminidase__InfluenzaA__CAD29994

SEQ ID NO: 26222 - protein, 470 aa, synthetic construct; identical to SEQ ID NO: 16453
  REGION 1..470: note = neuraminidase__InfluenzaA__CAD57252

SEQ ID NO: 26223 - protein, 470 aa, synthetic construct
  REGION 1..470: note = neuraminidase__InfluenzaA__CAD57253
MNPNQKIITIGSIRIAIGIISLMLQIGNIISIWASHSIQTGSQNHTGVCNQRIITYENSTWVNHTYVNINNTNVIAGKDKTSVTLAGNSSLCSISGWAIYTKDNSIRIGSKGDVFVIREPFISCSHLECRTFFLTQGALLNDKHSNGTVKDRSPYRALMSCPLGEAPSPYNSKFESVAWSASACHDGMGWLTIGISGPDNGAVAVLKYNGIITETIKSWKKQILRTQESECVCVNGSCFTIMTDGPSNGAASYKIFKIEKGKITKSIELNAPNFHYEECSCYPDTGTVMCVCRDNWHGSNRPWVSFNQNLDYQIGYICSGVFGDNPRPKDGEGSCNPVTVDGANGVKGFSYKYGNGVWIGRTKSNRLRKGFEMIWDPNGWTDTDSDFSVKQDVVAITDWSGYSGSFVQHPELTGLDCIRPCFWVELVRGLPKENTTIWTSGSSISFCGVNSDTANWSWPDGAELPFTIDK

SEQ ID NO: 26224 - protein, 470 aa, synthetic construct; identical to SEQ ID NO: 14396
  REGION 1..470: note = neuraminidase__InfluenzaA__CAD57255

SEQ ID NO: 26225 - protein, 470 aa, synthetic construct
  REGION 1..470: note = neuraminidase__InfluenzaA__CAD57256
MNPNQKIITIGSISVAIGIISLMLQIGNIISIWASHSIQTGSQNHTGICNQRIITYENSTWVNHTYVNINNTNVVAGKDKTSVTLAGNSSLCSISGWAIYTKDNSIRIGSKGDVFVIREPFISCSHLECRTFFLTQGALLNDKHSNGTVKDRSPYRALMSCPLGEAPSPYNSKFESVAWSASACHDGMGWLTIGISGPDNGAVAVLKYNGIITETIKSWKKRILRTQESECVCVNGSCFTIMTDGPSNGAASYRIFKIEKGRVTKSIELDAPNYHYEECSCYPDTGTVMCVCRDNWHGSNRPWVSFNQNLDYQIGYICSGVFGDNPRPKDGEGSCNPVTVDGADGVKGFSYKYGNGVWIGRTKSNRLRKGFEMIWDPNGWTDTDSDFSVKQDVVAITDWSGYSGSFVQHPELTGLDCIRPCFWVELVRGRPRENTTIWTSGSSISFCGVNSDTANWSWPDGAELPFTIDK

SEQ ID NO: 26226 - protein, 470 aa, synthetic construct
  REGION 1..470: note = neuraminidase__InfluenzaA__CAD57257
MNPNQKIITIGSISIAIGIISLMLQIGNIISIWASHSIQTGSQNHTGICNQRIITYENSTWVNHTYVNINNTNVVAGKDKTSVTLAGNSSLCSISGWAIYTKDNSIRIGSKGDVFVIREPFISCSHLECRTFFLTQGALLNDKHSNGTVKDRSPYRALMSCPLGEAPSPYNSKFESVAWSASACHDGMGWLTIGISGPDNGAVAVLKYNGIITETIKSWKKRILRTQESECVCVNGSCFTIMTDGPSNGAASYKIFKIEKGKVTKSIELNAPNSHYEECSCYPDTGTVMCVCRDNWHGSNRPWVSFNQNLDYQIGYICSGVFGDNPRPKDGEGSCNPVTVDGADGVKGFSYRYGNGVWIGRTKSNRLRKGFEMIWDPNGWTDTDSDFSMKQDVVAMTDWSGYSGSFVQHPELTGLDCIRPCFWVELVRGRPRENTTIWTSGSSISFCGVNSDTANWSWPDGAELPFTIDK

SEQ ID NO: 26227 - protein, 470 aa, synthetic construct
  REGION 1..470: note = neuraminidase__InfluenzaA__CAD57258
MNPNQKIITIGSISVAIGIISLILQIGNIISIWASHSIQTGSQNYTGICNQRIITYENSTWVNQTYVNINNTNVVAGKDKTSMVLAGNSSLCPIRGWAIYTKDNSIRIGSKGDIFVIREPFISCSHLECRTFFLTQGALLNDKHSNGTVKDRSPYRALMSCPLGEAPSPYNSRFESVAWSASACHDGLGWLTIGISGPDNGAVAVLKYNGIITETIKSWKKQILRTQESECVCVNGSCFTIMTDGPSNRAASYRIFKIEKGRVTKSIELDAPNYHYEECSCYPDTGTVMCVCRDNWHGSNRPWVSFNQNLDYQIGYICSGVFGDNPRPKDGEGSCNPVTVDGADGVKGFSYRYGNGVWIGRTKSNRLRKGFEMIWDPNGWTDTDSDFSMKQDVVAMTDWSGYSGSFVQHPELTGLDCMRPCFWVELVRGLPRENTTIWTSGSSISFCGVNSETANWSWPDGAELPFTIDK

SEQ ID NO: 26228 - protein, 470 aa, synthetic construct
  REGION 1..470: note = neuraminidase__InfluenzaA__CAD57259
MNPNQKIITIGSISIAIGIISLILQIGNIISIWASHSIQTESQNHTGICNQRIITYENSTWVNQTYVNINNTNVAAGKDKTSMTLAGNSSLCPIRGWAIYTKDNSIRIGSKGDIFVIREPFISCSHLECRTFFLTQGALLNDKHSNGTVKDRSPYRALMSCPLGEAPSPYNSRFESVAWSASACHDGLGWLTIGISGPDNGAVAVLKYNGIITETIKSWKKRILRTQESECVCMNGSCFTIMTDGPSNGAASYRIFKIEKGRVTKSIELDAPNYHYEECSCYPETGTVMCVCRDNWHGSNRPWVSFNQNLDYQIGYICSGVFGDNPRPKDGEGSCNPVTVDGADGVKGFSYRYGNGVWIGRTKSNRLRKGFEMIWDPNGWTDTDSDFSMKQDIVAMTDWSGYSGSFVQHPELTGLDCMRPCFWVELVRGLPRENTTIWTSGSSISFCGVNSDTANWSWPDGAELPFTIDK

SEQ ID NO: 26229 - protein, 470 aa, synthetic construct
  REGION 1..470: note = neuraminidase__InfluenzaA__CAD57264
MNPNQKIITIGSISVAIGIISLILQIGNIISIWASHSIQTGSQNYTGICNQRIITYENSTWVNQTYVNINNTNVVAGKDKTSMTLAGNSSLCPIRGWAIYTKDNSIRIGSKGDVFVIREPFISCSHLECRTFFLTQGALLNDKHSNGTVKDRSPYRALMSCPLGEAPSPYNSRFESVAWSASACHDGLGWLTIGISGPDNGAVAVLKYNGIITETIKSWKKQILRTQESECVCVNGSCFTIMTDGPSNGAASYRIFKIEKGRVTKSIELDAPNYHYEECSCYPDTGTVMCVCRDNWHGSNRPWVSFNQNLDYQIGYICSGVFGDNPRPKDGEGSCNPVTVDGANGVKGFSYRYGNGVWIGRTKSNRLRKGFEMIWDPNGWTDTDSDFSMKQDVVAMTDWSGYSGSFVQHPELTGLDCMRPCFWVELVRGLPRENTTIWTSGSSISFCGVNSETANWSWPDGAELPFTIDK

SEQ ID NO: 26230 - protein, 449 aa, synthetic construct
  REGION 1..449: note = neuraminidase__InfluenzaA__CBW54819
MNPNQKIITIGSICMVIGIVSLMLQIGNMISIWVSHSIQTGNQCQAEPISNTKFLTEKAVASVTLAGNSSLCPISGWAVYSKDNSIRIGSRGDVFVIREPFISCSHLECRTFFLTQGALLNDKHSNGTVKDRSPHRTLMSCPVGEAPSPYNSRFESVAWSASACHDGISWLTIGISGPDNGAVAVLKYNGIITDTIKSWRNNILRTQESECACVNGSCFTVMTDGPSSGQASYKIFKMEKGKVVKSVELDAPNYHYEECSCYPDAGEITCVCRDNWHGSNRPWVSFNQNLEYRIGYICSGVFGDNPRPNDGTGSCGPVSPNGAYGVKGFSFKYGDGVWIGRTKSTNSRSGFEMVWDPNGWTGTDSSFSVKQDIVAITDWSGYSGSFVQHPELTGLDCIRPCFWVELIRGRPKESTIWTSGSSISFCGVNSDTVSWSWPDGAELPFTIDK

SEQ ID NO: 26231 - protein, 449 aa, synthetic construct
  REGION 1..449: note = neuraminidase__InfluenzaA__CBW54821
MNPNQKIITIGSICIVIGIVSLMLQIGNMISIWVSHSIQTGNQCQAEPISNTKFLTEKAVASVTLAGNSSLCPISGWAVYSKDNSIRIGSRGDVFVIREPFISCSHLECRTFFLTQGALLNDKHSNGTVKDRSPHRTLMSCPVGEAPSPYNSRFESVAWSASACHDGISWLTIGISGPDNGAVAVLKYNGIITDTIKSWRNNILRTQESECACINGSCFTVMTDGPSSGQASYKIFKMEKGKVVKSVELDAPNYHYEECSCYPDAGEITCVCRDNWHGSNRPWVSFNQNLEYQIGYICSGVFGDNPRPNDGTGSCGPVSPNGAYGVKGFSFKYGNGVWIGRTKSTNSRSGFEMIWDPNGWTGTDSSFSVKQDIVAITDWSGYSGSFVQHPELTGLDCIRPCFWVELIRGQPKESTIWTSGSSISFCGVNSDTVSWSWPDGAELPFTIDK

SEQ ID NO: 26232 - protein, 469 aa, synthetic construct
  REGION 1..469: note = neuraminidase__InfluenzaA__CCG47912
MNPNQKIITIGSVSLTIATMCLFMQIAILITTVTLHFKQYECDSPANNQVMPCEPIIIEKNITKIVYLTNTTIEKEVCPKLGEYRNWSKPQCRITGFAPFSKDNSIRLSAGGAIWVTREPYVSCDPNKCYQFALGQGTTLDNRHSNDTIHDRTPYRTLLMNELGVPFHLGTRQVCIAWSSSSCHDGKAWLHVCVTGHDKNATASFIYDGKLVDSISSWSQNILRTQESECVCINGICTVVMTDGSASGKADTKILFIEEGKVIHISPLLGSAQHVEECSCYPRYPDVRCICRDNWKGSNRPIVDIRMKDYSIGSSYMCSGLVGDTPRNNDGSSNSNCRNPNNERGNHGVKGWAFDDGNDIWMGRTISKDSRLGYETFKVVGGWSQPNSKFQINRQVIVDSDNRSGYSGIFSVEGKSCINRCFYVELIRGRRQETRVWWTSNSIVVFCGTSGTYGSGSWPDGADINFMPI

SEQ ID NO: 26233 - protein, 450 aa, synthetic construct
  REGION 1..450: note = neuraminidase_subtype_1__InfluenzaA__AAF74321
MNPNQKIITIGSICMVVGIISLMLQIGNIISVWVSHTIQTWHPNQPEPCNQSINFYTEQAAASVTLAGNSSLCPISGWAIYSKDNSIRIGSKGDVFVIREPFISCSHLECRTFFLTQGALLNDKHSNGTVKDRSPYRTLMSCPVGEAPSPYNSRFESVAWSASACHDGISWLTIGISGPDNGAVAVLKYNGIITDTIKSWRNNILRTQESECACVNGSCFTVMTDGPSNEQASYKIFKIEKGRVVKSVELNAPNYHYQECSCYPDAGEITCVCRDNWHGSNRPWVSFNQNLEYQIGYICSGVFGDSPRPNDGTGSCGPVSLNGAYGVKGFSFKYGNGVWIGRTKSTSSRSGFEMIWDPNGWTETDSSFSLKQDIIAITDWSGYSGSFIQHPELTGLNCMRPCFWVELIRGRPKEKTIWTSGSSISFCGVNSDTVGWSWPDGAELPFTIDK

SEQ ID NO: 26234 - protein, 450 aa, synthetic construct
  REGION 1..450: note = neuraminidase_subtype_1__InfluenzaA__AAF74322
MNPNQKIITIGSICMVVGIISLMLQIGNTISVWVSHIIKTWHPNQPEPCNQSINFYTEQAAASVTLAGNSSLCPISGWAIYSKDNSIRIGSKGDVFVIREPFISCSHLECRTFFLTQGALLNDKHSNGTVKDRSPYRTLMSCPVGEAPSPYNSRFESVAWSASACHDGISWLTIGISGPDNGAVAVLKYNGIITDTIKSWRNNTLRTQESECACVNGSCFTVMTDGPSNEQASYKIFKIEKGRVVKSVELNAPNYHYEECSCYPDAGEITCVCRDNWHGSNRPWVSFNQNLEYQIGYICSGVFGDSPRPNDGTGSCGPVSLNGAYGVKGFSFKYGNGVWIGRTKSTSSRSGFEMIWDPNGWTETDSSFSLKQDIIAITDWSGYSGSFIQHPELTGLNCMRPCFWVELIRGRPKEKTIWTSGSSISFCGVNSDTVGWSWPDGAELPFTIDK

SEQ ID NO: 26235 - protein, 450 aa, synthetic construct
  REGION 1..450: note = neuraminidase_subtype_1__InfluenzaA__AAF74323
MNPNQKIITIGSICMVVGIISLMLQIGNIISVWISHIIQTWHPNQPEPCNQSINFYTEQAAASVTLAGNSSLCPISGWAIYSKDNSIRIGSKGDVFVIREPFISCSHLECRTFFLTQGALLNDKHSNGTVKDRSPYRTLMSCPVGEAPSPYNSRFESVAWSASACHDGISWLTIGISGPDNEAVAVLKYNGIITDTIRSWRNNILRTQESECACVNGSCFTVMTDGPSNEQASYKIFKIEKGRVVKSVELNAPNYHYEECSCYPDAGEITCVCRDNWHGSNRPWVSFNQNLEYQIGYICSGVFGDSPRPNDGTGSCGPVSLNGAYGVKGFSFKYGNGVWIGRTKSTSSRSGFEMIWDPNGWTETDSSFSLKQDIIAVTDWSGYSGSFIQHPELTGLNCMRPCFWVELIRGRPKEKTIWTSGSSISFCGVNSDTVGWSWPDGAELPFTIDK

SEQ ID NO: 26236 - protein, 450 aa, synthetic construct
  REGION 1..450: note = neuraminidase_subtype_1__InfluenzaA__AAF74324
MNPNQKIITIGSICMVVGIISLMLQIGNIISVWVSHIIQTWHPNQPEPCNQSINFYTEQAAASVTLAGNSSLCPISGWAIYSKDNSIRIGSKGDVFVIREPFISCSHLECRTFFLTQGALLNDKHSNGTVKDRSPYRTLMSCPVGEAPSPYNSRFESVAWSASACHDGISWLTIGISGPDNGAVAVLKYNGIITDTIKSWRNNILRTQESECACVNGSCFTVMTDGPSNEQASYKIFKIEKGRVVKSVELNAPNYHYEECSCYPDAGEITCVCRDNWHGSNRPWVSFNQNLEYQIGYICSGVFGDSPRPNDGTGSCGPVSLNGAYGVKGFSFKYGNGVWIGRTKSTSSRSGFEMIWDPNGWTETDSSFSLKQDIIAITDWSGYSGSFIQHPELTGLNCMRPCFWVELIRGRPKEKTIWTSGSSVSFCGVNSDTMGWSWPDGAELPFTIDK

SEQ ID NO: 26237 - protein, 450 aa, synthetic construct
  REGION 1..450: note = neuraminidase_subtype_1__InfluenzaA__AAF74325
MNPNQKIITIGSICMVVGIISLMLQIGNTISVWVSHIIKTWHPNQPEPCNQSINFYTEQAAASVTLAGNSSLCPISGWAIYSKDNSIRIGSKGDVFVIREPFISCSHLECRTFFLTQGALLNDKHSNGTVKDRSPYRTLMSCPVGEAPSPYNSRFESVAWSASACHDGISWLTIGISGPDNGAVAVLKYNGIITDTIKSWRNNTLRTQESECACVNGSCFTVMTDGPSNEQASYKIFKIEKGRVVKSVELNAPNYHYEECSCYPDAGEITCVCRDNWHGSNRPWVSFNQNLEYQIGYICSGVFGDSPRPNDGTGSCGPVSLNGAYGVKGFSFKYGNGVWIGRTKSTSSRSGFEMIWDPNGWTETDSSFSLKQDIIAITDWSGYSGSFIQHPELTGLNCMRPCFWVELIRGRPKEKTIWTSGSSISFCGVNSDTVGWSWPDGAELPYTIDK

SEQ ID NO: 26238 - protein, 469 aa, synthetic construct; identical to SEQ ID NO: 16728
  REGION 1..469: note = neuraminidase__InfluenzaA__EPI239900

SEQ ID NO: 26239 - protein, 469 aa, synthetic construct; identical to SEQ ID NO: 17077
  REGION 1..469: note = neuraminidase__InfluenzaA__EPI221062

SEQ ID NO: 26240 - protein, 469 aa, synthetic construct; identical to SEQ ID NO: 16728
  REGION 1..469: note = neuraminidase__InfluenzaA__EPI534079

SEQ ID NO: 26241 - protein, 469 aa, synthetic construct; identical to SEQ ID NO: 16728
  REGION 1..469: note = neuraminidase__InfluenzaA__AGM53851

SEQ ID NO: 26242 - protein, 469 aa, synthetic construct
  REGION 1..469: note = neuraminidase__InfluenzaA__EPI731464
MNPNQKIITIGSVCMTIGMANLILQIGNIISIWISHSIQLGNQNQIETCNQSVITYENNTWVNQTYVNISNTNFAAGQSVVSVKLAGGSSLCPVSGWAIYSKDNSVRIGSKGDVFVIREPFISCSPLECRTFFLTQGALLNDKHSNGTIKDRSPYRTLMSCPIGEVPSPYNSRFESVAWSASACHDGINWLTIGISGPDNGAVAVLKYNGIITDTIKSWRNNILRTQESECACVNGSCFTVMTDGPSNGQASYKIFRIEKGKIVKSVEMNAPNYHYEECSCYPDSSEITCVCRDNWHGSNRPWVSFNQNLEYQIGYICSGIFGDNPRPNDKTGSCGPVSSNGANGVKGFSFKYGNGVWIGRTKSISSRNGFEMIWDPNGWTGTDNNFSIKQDIVGINEWSGYSGSFVQHPELTGLDCIRPCFWVELIRGRPKENTIWTSGSSISFCGVNSDTVGWSWPDGAELPFTIDK

SEQ ID NO: 26243 - protein, 469 aa, synthetic construct; identical to SEQ ID NO: 16728
  REGION 1..469: note = neuraminidase__InfluenzaA__EPI696973

SEQ ID NO: 26244 - protein, 469 aa, synthetic construct
  REGION 1..469: note = neuraminidase__InfluenzaA__EPI662593
MNPNQKIITIGSICMTIGMANLILQIGNIISIWVSHSIQIGNQSQIETCNQSVITYENNTWVNQTYVNISNTNFAAGQSVVSVKLAGNSSLCPVSGWAIYSKDNSVRIGSKGDVFVIREPFISCSPLECRTFFLTQGALLNDKHSNGTIKDRSPYRTLMSCPIGEVPSPYNSRFESVAWSASACHDGINWLTIGISGPDSGAVAVLKYNGIITDTIKSWRNNILRTQESECACVNGSCFTIMTDGPSDGQASYKIFRIEKGKIIKSVEMKAPNYHYEECSCYPDSSEITCVCRDNWHGSNRPWVSFNQNLEYQMGYICSGVFGDNPRPNDKTGSCGPVSSNGANGVKGFSFKYGNGVWIGRTKSISSRKGFEMIWDPNGWTGTDNKFSIKQDIVGINEWSGYSGSFVQHPELTGLDCIRPCFWVELIRGRPEENTIWTSGSSISFCGVNSDTVGWSWPDGAELPFTIDK

SEQ ID NO: 26245 - protein, 469 aa, synthetic construct; identical to SEQ ID NO: 26244
  REGION 1..469: note = neuraminidase__InfluenzaA__EPI830229

SEQ ID NO: 26246 - protein, 469 aa, synthetic construct; identical to SEQ ID NO: 23837
  REGION 1..469: note = neuraminidase__InfluenzaA__AGU92879

SEQ ID NO: 26247 - protein, 469 aa, synthetic construct; identical to SEQ ID NO: 23836
  REGION 1..469: note = neuraminidase__InfluenzaA__AGU92857

SEQ ID NO: 26248 - protein, 469 aa, synthetic construct; identical to SEQ ID NO: 23835
  REGION 1..469: note = neuraminidase__InfluenzaA__AGU92846

SEQ ID NO: 26249 - protein, 469 aa, synthetic construct; identical to SEQ ID NO: 23846
  REGION 1..469: note = neuraminidase__InfluenzaA__AGU92835

SEQ ID NO: 26250 - protein, 469 aa, synthetic construct; identical to SEQ ID NO: 23822
  REGION 1..469: note = neuraminidase__InfluenzaA__AGU92703

SEQ ID NO: 26251 - protein, 469 aa, synthetic construct
  REGION 1..469: note = neuraminidase__InfluenzaA__EPI643117
MNPNQKIITIGSVSLTISTICFFMQIAILITTVTLHFKQYEFNSPPNNQVMLCEPTIIERNITEIVYLTNTTIEKEICPKPAEYRNWSKPQCGITGFAPFSKDNSIRLSAGGDIWVTREPYVSCDPDKCYQFALGQGTTLNNVHSNNTVRDRTPYRTLLMNELGVPFHLGTKQVCIAWSSSSCHDGKAWLHVCITGDDKNATASFIYNGRLVDSVVSWSKDILRTQESECICINGTCTVVMTDGSASGKADTKILFIEEGKIVHTSTLSGSAQHVEECSCYPRYPGVRCVCRDNWKGSNRPIVDINIKDHSIVSSYVCSGLVGDTPRKNDSSSSSHCLDPNNEEGGHGVKGWAFDDGNDVWMGRTINETSRLGYETFKVIEGWSNPKSKLQTNRQVIVDRGDRSGYSGIFSVEGKSCINRCFYVELIRGRKEETEVLWTSNSIVVFCGTSGTYGTGSWPDGADLNLMPI

SEQ ID NO: 26252 - protein, 469 aa, synthetic construct
  REGION 1..469: note = neuraminidase__InfluenzaA__EPI675797
MNPNQKIITIGSVSLTISTICFFMQIAILITTVTLHFKQYEFNSPPNNQVMLCEPTIIERNITEIVYLTNTTIEKEICPKPAEYRNWSKPQCGITGFAPFSKDNSIRLSAGGDIWVTREPYVSCDPDKCYQFALGQGTTLNNVHSNNKVRDRTPYRTLLMNELGVPFHLGTKQVCIAWSSSSCHDGKAWLHVCITGDDKNATASFIYNGRLVDSVVSWSKDILRTQESECICINGTCTVVMTDGSASGKADTKILFIEEGKIVHTSTLSGSAQHVEECSCYPRYPGVRCVCRDNWKGSNRPIVDINIKDHSIVSSYVCSGLVGDTPRKNDSSSSSHCLDPNNEEGGHGVKGWAFDDGNDVWMGRTINETSRLGYETFKVIEGWSNPKSKLQTNRQVIVDRGDRSGYSGIFSVEGKSCINRCFYVELIRGRKEETEVLWTSNSIVVFCGTSGTYGTGSWPDGADLNLMPI

SEQ ID NO: 26253 - protein, 469 aa, synthetic construct; identical to SEQ ID NO: 26251
  REGION 1..469: note = neuraminidase__InfluenzaA__EPI578429

SEQ ID NO: 26254 - protein, 469 aa, synthetic construct; identical to SEQ ID NO: 26251
  REGION 1..469: note = neuraminidase__InfluenzaA__EPI614405

SEQ ID NO: 26255 - protein, 449 aa, synthetic construct; identical to SEQ ID NO: 26173
  REGION 1..449: note = neuraminidase__InfluenzaA__AAT73329

SEQ ID NO: 26256 - protein, 449 aa, synthetic construct; identical to SEQ ID NO: 26173
  REGION 1..449: note = neuraminidase__InfluenzaA__AAW80723

SEQ ID NO: 26257 - protein, 449 aa, synthetic construct; identical to SEQ ID NO: 26173
  REGION 1..449: note = neuraminidase__InfluenzaA__EF541467

SEQ ID NO: 26258 - protein, 465 aa, synthetic construct; identical to SEQ ID NO: 23454
  REGION 1..465: note = neuraminidase__InfluenzaA__EPI439509

SEQ ID NO: 26259 - protein, 469 aa, synthetic construct
  REGION 1..469: note = neuraminidase__InfluenzaA__EPI482776
MNTNQRIITIGTVCMIVGIISLLLQIGNIVSLWISHSIQTGWENHTVMCNQSVITYVNNTWVNRTYVNISNIKIATIQDVTSIILAGNSSLCPVSGWAVYSKDNSIRIGSKGDIFVIREPFISCSQLECRTFFLTQGALLNDKHSNGTVKDRSPYRTLMSCPIGEAPSPYNSRFESVAWSASACHDGMGWLTIGISGPDNGAVAVLKYNGIITDTIKSWRNKILRTQESECVCMNGSCFTVLTDGPSNGQASYKIFKVEKGKIIKSIELDAPNYHYEECSCYPDTGKVMCVCRDNWHASNRPWVSFNQNLDYQIGYICSGVFGDNPRSNDGKGNCGPVLSNGANGVKGFSYRYGNGVWIGRTKSINSRSGFEMIWDPNGWTETDSSFSMKQDIIALNDWSGYSGSFVQHPELTGMNCIRPCFWVELIRGQPKESTIWASGSSISFCGVNSETASWSWPDGADLPFTIDK

SEQ ID NO: 26260 - protein, 469 aa, synthetic construct
  REGION 1..469: note = neuraminidase__InfluenzaA__EPI745533
MNPNQKIITIGSVCITIGMANLILQIGNIISIWISHSIQLGNQNQIETCNQSVITYENNTWVNQTYVNISNTNFAAGQSVVSVKLAGNSSLCPVSGWAIYSKDNSIRIGSKGDVFVIREPFISCSPLECRTFFLTQGALLNDKHSNGTIKDRSPYRTLMSCPIGEVPSPYNSRFESVAWSASACHDGISWLTIGISGPDNGAVAVLKYNGIITDTIKSWRNNILRTQESECACVNGSCFTVMTDGPSDGQASYKIFRIEKGKIVKSVEMNAPNYHYEECSCYPDSSEITCVCRDNWHGSNRPWVSFNQNLEYQIGYICSGIFGDNPRPNDKTGSCGPVSSNGANGVKGFSFKYGNGVWIGRTKSISSRNGFEMIWDPNGWTGTDNNFSIKQDIVGINEWSGYSGSFVQHPELTGLDCIKPCFWVELIRGRPKENTIWTSGSSISFCGVNSDTVGWSWPDGAELPFTIDK

SEQ ID NO: 26261 - protein, 469 aa, synthetic construct; identical to SEQ ID NO: 16728
  REGION 1..469: note = neuraminidase__InfluenzaA__AEE69012

SEQ ID NO: 26262 - protein, 469 aa, synthetic construct; identical to SEQ ID NO: 16728
  REGION 1..469: note = neuraminidase__InfluenzaA__EPI176609

SEQ ID NO: 26263 - protein, 469 aa, synthetic construct; identical to SEQ ID NO: 16728
  REGION 1..469: note = neuraminidase__InfluenzaA__EPI176472

SEQ ID NO: 26264 - protein, 469 aa, synthetic construct
  REGION 1..469: note = neuraminidase__InfluenzaA__EPI280340
MNPNQKIITIGSVCITIGMANLILQIGNIISIWISHSIQLGNQNQIETCNQSVITYENNTWVNQTYVNISNTNFAAGQSVVSVKLAGNSSLCPVSGWAIYSKDNSIRIGSKGDVFVIREPFISCSPLECRTFFLTQGALLNDKHSNGTIKDRSPYRTLMSCPIGEVPSPYNSRFESVAWSASACHDGISWLTIGISGPDNGAVAVLKYNGIITDTIKSWRNNILRTQESECACVNGSCFTVMTDGPSDGQASYKIFRIEKGKIVKSVEMNAPNYHYEECSCYPDSSEITCVCRDNWHGSNRPWVSFNQNLEYQIGYICSGIFGDNPRPNDKTGSCGPVSSNGANGVKGFSFKYGNGVWIGRTKSISSRNGFEIIWDPNGWTGTDNNFSIKQDIVGINEWSGYSGSFVQHPELTGLDCIRPCFWVELIRGRPKENTIWTSGSSISFCGVNSDTVGWSWPDGAELPFTIDK

SEQ ID NO: 26265 - protein, 469 aa, synthetic construct; identical to SEQ ID NO: 16728
  REGION 1..469: note = neuraminidase__InfluenzaA__EPI240318

SEQ ID NO: 26266 - protein, 469 aa, synthetic construct; identical to SEQ ID NO: 16728
  REGION 1..469: note = neuraminidase__InfluenzaA__EPI183133

SEQ ID NO: 26267 - protein, 469 aa, synthetic construct; identical to SEQ ID NO: 16728
  REGION 1..469: note = neuraminidase__InfluenzaA__EPI369141

SEQ ID NO: 26268 - protein, 469 aa, synthetic construct
  REGION 1..469: note = neuraminidase__InfluenzaA__EPI482787
MNTNQRIITIGTVCLIVGIVSLLLQIGNIVSLWISHSIQTGKRSHPETCSQNVITYENNTWVNQTYVNISNTNIVDGQGVTSIILAGNSPLCPISGWAIYSKDNSIRIGSKGDIFVIREPFISCSHLECRTFFLTQGALLNDRHSNGTVKDRSPYRTLMSCPIGEAPSPYNSRFESVAWSASACHDGMGWLTIGISGPDNGAVAVLKYNGIITDTIKSWRNKILRTQESECVCINGSCFTIMTDGPSNGQASYKIFKMEKGKIIKSVELDAPNYHYEECSCYPDTGKVVCVCRDNWHASNRPWVTFDQNLNYQIGYICSGVFGDNPRSNDGKGNCGPVPSNGANGVKGFSFRYGNGVWIGRTKSISSRSGFEMIWDPNGWTETDSSFSIKQDIIALTDWSGYSGSFVQHPELTGMNCIKPCFWVELIRGQPKESTIWTSGSSISFCGVDSETVSWSWPDGADLPFTIDK

SEQ ID NO: 26269 - protein, 469 aa, synthetic construct
  REGION 1..469: note = neuraminidase__InfluenzaA__EPI482790
MNTNQRIITIGTVCLIVGIISLLLQIGNMVSLWISHSIQTGGKNHTEMCNQNVITYVNNTWVNRTYVNISNTKIVNVQDVVSVILTGNSSLCPISGWAIYSKDNSIRIGSKGDIFVIREPFISCSHLECRTFFLTQGALLNDKHSNGTVKDRSPYRTLMSCPVGEAPSPYNSRFESVAWSASACHDGMGWLTIGISGPDNGAVAVLKYNGIITDTIKSWRNKILRTQESECVCMNGSCFTVLTDGPSNGQASYKIFKMEKGKIIKSIELDAPNYHYEECSCYPDAGKVMCVCRDNWHASNRPWVSFDQNLDYQIGYICSGVFGDNPRSNDGKGNCGPVHSNGANGVKGFSYRYGNGVWIGRTKSINSRSGFEMIWDPNGWTGTDSSFSMKQDIIALTDWSGYSGSFVQHPELTGMNCIRPCFWVELIRGQPKENTIWASGSSISFCGVNGETASWSWPDGADLPFTIDK

SEQ ID NO: 26270 - protein, 469 aa, synthetic construct
  REGION 1..469: note = neuraminidase__InfluenzaA__EPI291797
MNTNQRIITIGTVCMIVGIISLLLQIGNIVSLWISHSIQTGWENHTEMCNQSVITYVNNTWVNRTYVNISNTNIATIQDVTSIILAGNSSLCPVSGWAIYSKDNSIRIGSKGDIFVIREPFISCSQLECRTFFLTQGALLNDKHSNGTVKDRSPYRTLMSCPIGEAPSPYNSRFESVAWSASACHDGMGWLTIGISGPDNGAVAVLKYNGIITDTIKSWRNKILRTQESECVCMNGSCFTVLTDGPSNGQASYKIFKVEKGKIIKSIELDAPNYHYEECSCYPDTGKVMCVCRDNWHASNRPWVSFNQNLDYQIGYICSGVFGDNPRSNDGKGNCGPVLSNGANGVKGFSYRYGNGVWIGRTKSINSRSGFEMIWDPNGWTETDSSFSMKQDIIALTDWSGYSGSFVQHPELTGMNCIRPCFWVELIRGQPKESTIWASGSSISFCGVNSETASWSWPDGADLPFTIDK

SEQ ID NO: 26271 - protein, 469 aa, synthetic construct; identical to SEQ ID NO: 26270
  REGION 1..469: note = neuraminidase__InfluenzaA__EPI482798

SEQ ID NO: 26272 - protein, 469 aa, synthetic construct
  REGION 1..469: note = neuraminidase__InfluenzaA__EPI638969
MNTNQRIITIGTVCMIVGMISLLLQIGSIVSLWISHSIQTGWENHTGVCNQSVITYVNNTWVNRTYVNISNIKIATIQDVTPIILAGNSSLCPVNGWAVYSKDNSIRIGSKGDIFVIREPFISCSQLECRTFFLTQGALLNDKHSNGTVKDRSPYRTLMSCPIGEAPSPYNSRFESVAWSASACHDGMGWLTIGISGPDNGAVAVLKYNGIITDTIKSWRNKILRTQESECVCMNGSCFTVLTDGPSNGQASYKIFKVEKGKIIKSIELDAPNYHYEECSCYPDTGKVMCVCRDNWHASNRPWVSFNQNLDYQIGYICSGVFGDNPRSTDGKGNCGPVLSNGANGVKGFSYRYGNGVWIGRTKSINSRSGFEMIWDPNGWTETDSSFSMKQDIIALNDYSGYSGSFVQHPELTGMNCIRPCFWVELIRGQPKESTIWASGSSISFCGVNSETASWSWPDGADLPFAIDK

SEQ ID NO: 26273 - protein, 469 aa, synthetic construct
  REGION 1..469: note = neuraminidase__InfluenzaA__ABI19012
MNTNQRIITIGTVCLIVGIISLLLQIGNMVSLWISHSIQTGGKNHTEMCNQNVITYVNNTWVNRTYVNISNTKIVNVQDVVSVILTGNSSLCPISGWAIYSKDNSIRIGSKGDIFVIREPFISCSHLECRTFFLTQGALLNDKHSNGTVKDRSPYRTLMSCPIGEAPSPYNSRFESVAWSASACHDGMGWLTIGISGPDNGAVAVLKYNGIITDTIKSWRNKILRTQESECVCMNGSCFTVLTDGPSNGQASYKIFKMEKGKIIKSIELDAPNYHYEECSCYPDAGKVMCVCRDNWHASNRPWVSFDQNLDYQIGYICSGVFGDNPRSNDGKGNCGPVHSNGANGVKGFSYRYGNGVWIGRTKSINSRSGFEMIWDPNGWTGTDSSFSMKQDIIALTDWSGYSGSFVRHPELTGMNCIRPCFWVELIRGQPKENTIWASGSSISFCGVNGETASWSWPDGADLPFTIDK

SEQ ID NO: 26274 - protein, 469 aa, synthetic construct
  REGION 1..469: note = neuraminidase__InfluenzaA__EPI687791
MNPNQKIITIGSICMTIGMANLILQIGNIISIWVSHSIQIGNQSQIETCNQSVITYENNTWVNQTYVNISNTNFAARQSVVSVKLAGNSSLCPVSGWAIYSKDNSVRIGSKGDVFVIREPFISCSPLECRTFFLTQGALLNDKHSNGTIKDRSPYRTLMSCPIGEVPSPYNSRFESVAWSASACHDGINWLTIGISGPDSGAVAVLKYNGIITDTIKSWRNNILRTQESECACVNGSCFTIMTDGPSDGQASYKIFRIEKGKIIKSVEMKAPNYHYEECSCYPDSSEITCVCRDNWHGSNRPWVSFNQNLEYQMGYICSGVFGDNPRPNDKTGSCGPVSSNGANGVKGFSFKYGNGVWIGRTKSISSRKGFEMIWDPNGWTGTDNKFSIKQDIVGINEWSGYSGSFVQHPELTGLDCIRPCFWVELIRGRPEENTIWTSGSSISFCGVNSDTVGWSWPDGAELPFTIDK

SEQ ID NO: 26275 - protein, 469 aa, synthetic construct
  REGION 1..469: note = neuraminidase__InfluenzaA__EPI841266
MNPNQKIITIGSICMTIGMANLILQIGNIISIWVSHSIQIGNQSQIETCNQSVITYENNTWVNQTYVNISNTNFAARQSVVSVKLAGNSSLCPVSGWAIYSKDNSVRIGSKGDVFVIREPFISCSPLECRTFFLTQGALLNDKHSNGTIKDRSPYRTLMSCPIGEVPSPYNSRFESVAWSASACHDGINWLTIGISGPDSGAVAVLKYNGIITDTIKSWRNNILRTQESECACVNGSCFTIMTDGPSDGQASYKIFRIEEGKIIKSVEMKAPNYHYEECSCYPDSSEITCVCRDNWHGSNRPWVSFNQNLEYQMGYICSGVFGDNPRPNDKTGSCGPVSSNGANGVKGFSFKYGNGVWIGRTKSISSRKGFEMIWDPNGWTGTDNKFSIKQDIVGINEWSGYSGSFVQHPELTGLDCIRPCFWVELIRGRPEENTIWTSGSSISFCGVNSDTVGWSWPDGAELPFTIDK

SEQ ID NO: 26276 - protein, 469 aa, synthetic construct
  REGION 1..469: note = neuraminidase__InfluenzaA__EPI291844
MNTNQRIITIGTVCLIVGIISLLLQIGTMVSLWISHSIQTGGKNHTEMCNQNVITYVNNTWVNRTYVNISNTKIVNVQDVVSVILTGNSSLCPISGWAIYSKDNSIRIGSKGDIFVIREPFISCSHLECRTFFLTQGALLNDKHSNGTVKDRSPYRTLMSCPIGEAPSPYNSRFESVAWSASACHDGMGWLTIGISGPDNGAVAVLKYNGIITDTIKSWRNKILRTQESECVCMNGSCFTVLTDGPSNGQASYKIFKMEKGKIIKSIELDAPNYHYEECSCYPDAGKVMCVCRDNWHASNRPWVSFDQNLDYQIGYICSGVFGDNPRSNDGKGNCGPVHSNGANGVKGFSYKYGNGVWIGRTKSINSRSGFEMIWDPNGWTGTDSSFSMKQDIIALTDWSGYSGSFVQHPELTGMNCIRPCFWVELIRGQPKENTIWASGSSISFCGVNGETASWSWPDGADLPFTIDK

SEQ ID NO: 26277 - protein, 469 aa, synthetic construct
  REGION 1..469: note = neuraminidase__InfluenzaA__EPI558120
MNTNQRIITIGTVCMIVGIISLLLQIGNIVSLWISHSIQTGWENHTEMCNQSVITYVNNTWMNRTYVNISNIKIATIQDVTSIVLAGNSSLCPVSGWAVYSKDNSIRIGSKGDIFVIREPFISCSQLECRTFFLTQGALLNDKHSNGTVKDRSPYRTLMSCPIGEAPSPYNSRFESVAWSASACHDGMGWLTIGISGPDNGAVAVLKYNGIITDTIKSWRNKILRTQESECVCINGSCFTVLTDGPSNGQASYKIFKVEKGKIIKSIELDAPNYHYEECSCYPDTGKVMCICRDNWHASNRPWVSFDQNLDYQIGYICSGVFGDNPRSNDGKGNCGPVLSNGANGVKGFSYRYGNGVWIGRTKSINSRSGFEMIWDPNGWTETDSSFSMKQDIIALNDWSGYSGSFVQHPELTGMNCIRPCFWVELIRGQPKESTIWASGSSISFCGVNSETASWSWPDGADLPFTIDK

SEQ ID NO: 26278 - protein, 469 aa, synthetic construct
  REGION 1..469: note = neuraminidase__InfluenzaA__EPI564138
MNPNQKIITIGSVSLTISTICFFMQIAILITTVTLHFKQYEFNSPPNNQVMLCEPTIIERNITEIVYLTNTTIEKEICPKPAEYRNWSKPQCGITGFAPFSKDNSIRLSAGGDIWVTREPYVSCDPDKCYQFALGQGTTLNNVHSNNTVRDRTPYRTLLMNELGVPFHLGTKQVCIAWSSSSCHDGKAWLHVCITGDDKNATASFIYNGRLVDSVVSWSKDILRTQESECVCINGTCTVVMTDGSASGKADTKILFIEEGKIVHTSKLSGSAQHVEECSCYPRYPGVRCVCRDNWKGSNRPIVDINIKDHSIVSSYVCSGLVGDTPRKNDSSSSSHCLDPNNEEGGHGVKGWAFDDGNDVWMGRTINETSRLGYETFKVVEGWSNPKSKLQINRQVIVDRGDRSGYSGIFSVEGKSCINRCFYVELIRGRKEETEVLWTSNSIVVFCGTSGTYGTGSWPDGADLNLMPI

SEQ ID NO: 26279 - protein, 469 aa, synthetic construct
  REGION 1..469: note = neuraminidase__InfluenzaA__ANM92825
MNPNQKIITIGSICMTIGMANLILQIGNIISIWVSHSIQIGNQSQIETCNQSVITYENNTWVNQTYVNISNTNFAAGQSVVSVKLAGNSSLCPVSGWAIYSKDNSVRIGSKGDVFVIREPFISCSPLECRTFFLTQGALLNDKHSNGTIKDRSPYRTLMSCPIGEVPSPYNSRFESVAWSASACHDGINWLTIGISGPDSGAVAVLKYNGIITDTIKSWRNNILRTQESECACVNGSCFTIMTDGPSDGQASYKIFRIEKGKIIKSVEMKAPNYHYEECSCYPDSSEITCVCRDNWHGSNRPWVSFNQNLEYQMGYICSGVFGDNPRPNDKTGNCGPVSSNGANGVKGFSFKYGNGVWIGRTKSISSRKGFEMIWDPNGWTGTDNKFSIKQDIVGINEWSGYSGSFVQHPELTGLDCIRPCFWVELIRGRPEENTIWTSGSSISFCGVNSDTVGWSWPDGAELPFTIDK

SEQ ID NO: 26280 - protein, 469 aa, synthetic construct
  REGION 1..469: note = neuraminidase__InfluenzaA__EPI291694
MNTNQRIITIGTVCLIVGIVSLLLQIGNIVSLWISHSIQTGEKNHSEVCNQNIITYENKTWVNQTYVNISNTNIAEGQGVTSIILAGNSSLCPVSGWAIYSKDNSIRIGSKGDIFVIREPFISCSHLECRTFFLTQGALLNDRHSNGTVKDRSPYRTLMSCLTGEAPSPYNSRFESVAWSASACHDGMGWLTIGISGPDNGAVAVLKYNGIITDTIKSWRNKILRTQESECVCINGSCFTIMTDGPSNGQASYKIFKMEKGKIIKSVELDAPNYHYEECSCYPDTGKVVCVCRDNWHASNRPWVSFDQNLDYQIGYICSGVFGDNPRSNDGKGNCGPVPSNGANGVKGFSFRYGNGVWIGRTKSIISRSGFEMIWDPNGWTETDSSFSIKQDIIALTDWSGYSGSFVQHPELTGMNCIRPCFWVELIRGQPKESTIWTSGSSISFCGVDSETASWSWPDGADLPFTIDK

SEQ ID NO: 26281 - protein, 469 aa, synthetic construct; identical to SEQ ID NO: 17214
  REGION 1..469: note = neuraminidase__InfluenzaA__EPI241027

SEQ ID NO: 26282 - protein, 469 aa, synthetic construct; identical to SEQ ID NO: 16738
  REGION 1..469: note = neuraminidase__InfluenzaA__EPI177405

SEQ ID NO: 26283 - protein, 469 aa, synthetic construct; identical to SEQ ID NO: 16738
  REGION 1..469: note = neuraminidase__InfluenzaA__EPI242475

SEQ ID NO: 26284 - protein, 469 aa, synthetic construct
  REGION 1..469: note = neuraminidase__InfluenzaA__EPI590131
MNANQRIITIGTVCLIIGIISLLLQIGNMVSLWISHSIQTGGKNHTEMCNQNVITYVNNTWVNRTYVNISNTKIVNVQDVVSVILTGNSSLCSISGWAIYSKDNSIRIGSKGDIFVIREPFISCSHLECRTFFLTQGALLNDKHSNGTVKDRSPYRTLMSCPIGEAPSPYNSRFESVAWSASACHDGIGWLTIGISGPDNGAVAVLKYNGIITDTIKSWRNKILRTQESECVCMNGSCFAVLTDGPSNGQASYKIFKVKQGKIIKSIELDAPNYHYEECSCYPDAGKVMCVCRDNWHASNRPWVSFDQDLNYQIGYICSGVFGDNPRSNDGKGNCGPVHSNGANGVKGFSYRYGNGVWIGRTKSIHSRSGFEMIWDPNGWTGTDSSFSMKQDIIALTDWSGYSGSFVQHPELTGMNCIRPCFWVELIRGQPKENTIWASGSSISFCGVNGETASWSWPDGADLPFTIDK

SEQ ID NO: 26285 - protein, 469 aa, synthetic construct
  REGION 1..469: note = neuraminidase__InfluenzaA__EPI68596
MNTNQRIITIGTVCLIVGIVSLLLQIGNIVSLWISHSIQTGEKNHSEICSQNVITYENNTWVNQTYVNISNTNIADGQGVTSIILAGNSSLCPISGWAIYSKDNSIRIGSKGDIFVIREPFISCSHLECRTFFLTQGALLNDRHSNGTVKDRSPYRTLMSCPIGEAPSPYNSRFESVAWSASACHDGMGWLTIGISGPDNGAVAVLKYNGIITDTIKSWRNKILRTQESECVCINGSCFTIMTDGPSNGQASYKIFKMEKGKIIKSVELDAPNYHYEECSCYPDTGKVVCVCRDNWHASNRPWVSFDQNLDYQIGYICSGVFGDNPRSNDGKGNCGPVLSNGANGVKGFSFRYGNGVWIGRTKSISSRSGFEMIWDPNGWTETDSSFSIKQDIIALTDWSGYSGSFVQHPELTGMNCIRPCFWVELIRGQPKESTIWTSGSSISFCGVDSETASWSWPDGADLPFTIDK

SEQ ID NO: 26286 - protein, 454 aa, synthetic construct; identical to SEQ ID NO: 15719
  REGION 1..454: note = neuraminidase__InfluenzaA__EPI115409

SEQ ID NO: 26287 - protein, 454 aa, synthetic construct; identical to SEQ ID NO: 15719
  REGION 1..454: note = neuraminidase__InfluenzaA__ABD77678/m1

SEQ ID NO: 26288 - protein, 469 aa, synthetic construct; identical to SEQ ID NO: 16728
  REGION 1..469: note = neuraminidase__InfluenzaA__EPI185224

SEQ ID NO: 26289 - protein, 469 aa, synthetic construct; identical to SEQ ID NO: 26244
  REGION 1..469: note = neuraminidase__InfluenzaA__EPI697745

SEQ ID NO: 26290 - protein, 469 aa, synthetic construct; identical to SEQ ID NO: 26244
  REGION 1..469: note = neuraminidase__InfluenzaA__EPI768524

SEQ ID NO: 26291 - protein, 469 aa, synthetic construct
  REGION 1..469: note = neuraminidase__InfluenzaA__EPI726929
MNPNQKIITIGSISMTIGMANLILQIGNIISIWVSHSIQIGNQSQIETCNQSVITYENNTWVNQTYVNISNTNFAAGQSVVSVKLAGNSSLCPVSGWAIYSKDNSVRIGSKGDVFVIREPFISCSPLECRTFFLTQGALLNDKHSNGTIKDRSPYRTLMSCPIGEVPSPYNSRFESVAWSASACHDGINWLTIGISGPDSGAVAVLKYNGIITDTIKSWRNNILRTQESECACVNGSCFTIMTDGPSDGQASYKIFRIEKGKIIKSVEMKAPNYHYEECSCYPDSSEITCVCRDNWHGSNRPWVSFNQNLEYQMGYICSGVFGDNPRPNDKTGSCGPVSSNGANGVKGFSFKYGNGVWIGRTKSISSRKGFEMIWDPNGWTGTDNKFSIKQDIVGINEWSGYSGSFVQHPELTGLDCIRPCFWVELIRGRPEENTIWTSGSSISFCGVNSDTVGWSWPDGAELPFTIDK

SEQ ID NO: 26292 - protein, 469 aa, synthetic construct; identical to SEQ ID NO: 26291
  REGION 1..469: note = neuraminidase__InfluenzaA__EPI813816

SEQ ID NO: 26293 - protein, 469 aa, synthetic construct
  REGION 1..469: note = neuraminidase__InfluenzaA__EPI466627
MNPNQKIITIGSVCMTIGMANLILQIGNIISIWVSHSIQLGNQSQIETCNQSVITYENNTWVNQTYVNISNTNFAAGQSVVSVKLAGNSSLCPVSGWAIYSKDNSVRIGSKGDVFVIREPFISCSPLECRTFFLTQGALLNDKHSNGTIKDRSPYRTLMSCPIGEVPSPYNSRFESVAWSASACHDGINWLTIGISGPDSGAVAVLKYNGIITDTIKSWRNNILRTQESECACVNGSCFTIMTDGPSDGQASYKIFRIEKGKIVKSVEMNAPNYHYEECSCYPDSSEITCVCRDNWHGSNRPWVSFNQNLEYQIGYICSGVFGDNPRPNDKTGSCGPVSSNGANGVKGFSFKYGNGVWIGRTKSISSRKGFEMIWDPNGWTGTDNNFSIKQDIVGINEWSGYSGSFVQHPELTGLDCIRPCFWVELIRGRPEENTIWTSGSSISFCGVNSDTVGWSWPDGAELPFTIDK

SEQ ID NO: 26294 - protein, 469 aa, synthetic construct
  REGION 1..469: note = neuraminidase__InfluenzaA__EPI541965
MNPNQKIITIGSVCMTIGMANLILQIGNIISIWVSHSIQLGNQSQIETCNQSVITYENNTWVNQTYVNISNTNFAAGQPVVSVKLAGNSSLCPVSGWAIYSKDNSVRIGSKGDVFVIREPFISCSPLECRTFFLAQGALLNDKHSNGTIKDRSPYRTLMSCPIGEVPSPYNSRFESVAWSASACHDGINWLTIGISGPDSGAVAVLKYNGIITDTIKSWRNNILRTQESECACVNGSCFTIMTDGPSDGQASYKIFRIEKGKIVKSVEMNAPNYHYEECSCYPDSSEITCVCRDNWHGSNRPWVSFNQNLEYQIGYICSGVFGDNPRPNDKTGSCGPVSSNGANGVKGFSFKYGNGVWIGRTKSISSRKGFEMIWDPNGWTGTDNNFSIKQDIVGINEWSGYSGSFVQHPELTGLDCIRPCFWVELIRGRPEENTIWTSGSSISFCGVNSDTVGWSWPDGAELPFTIDK

SEQ ID NO: 26295 - protein, 469 aa, synthetic construct
  REGION 1..469: note = neuraminidase__InfluenzaA__EPI652004
MNPNQKIITIGSVCMTIGMANLILQIGNIISIWVSHSIQIGNQSQIETCNQSVITYENNTWVNQTYVNISNTNFAAGQSVVSVKLAGNSSLCPVSGWAIYSKDNSVRIGSKGDVFVIREPFISCSPLECRTFFLAQGALLNDKHSNGTIKDRSPYRTLMSCPIGEVPSPYNSRFESVAWSASACHDGINWLTIGISGPDSGAVAVLKYNGIITDTIKSWRNNILRTQESECACVNGSCFTIMTDGPSDGQASYKIFRIEKGKIVKSVEMNAPNYHYEECSCYPDSSEITCVCRDNWHGSNRPWVSFNQNLEYQIGYICSGVFGDNPRPNDKTGSCGPVSSNGANGVKGFSFKYGNGVWIGRTKSISSRKGFEMIWDPNGWTGTDNNFSIKQDIVGINEWSGYSGSFVQHPELTGLDCIRPCFWVELIRGRPEENTIWTSGSSISFCGVNSDTVGWSWPDGAELPFTIDK

SEQ ID NO: 26296 - protein, 469 aa, synthetic construct
  REGION 1..469: note = neuraminidase__InfluenzaA__EPI62526
MNTNQRIITIGTVCLIVGIVSLLLQIGNIVSLWISHSIQTGEKNHPEICSQNVITYENNTWVNQTYVNISNTNIVDGQGVTSIILAGNSSLCPISGWAIYSKDNSIRIGSKGDIFVIREPFISCSHLECRTFFLTQGALLNDRHSNGTVKDRSPYRTLMSCPIGEAPSPYNSRFESVAWSASACHDGMGWLTIGISGPDNGAVAVLKYNGIITDTIKSWRNKILRTQESECVCINGSCFTIMTDGPSNGQASYKIFKMEKGKIIKSVELDAPNYHYEECSCYPDTGKVVCVCRDNWHASNRPWVSFDQNLDYQIGYICSGVFGDNPRSNDGKGNCGPVLSNGANGVKGFSFRYGNGVWIGRTKSISSRSGFEMIWDPNGWTETDSSFSIKQDIIALTDWSGYSGSFVQHPELTGMNCIRPCFWVELIRGQPKESTIWTSGSSISFCGVDSETASWSWPDGADLPFTIDK

SEQ ID NO: 26297 - protein, 469 aa, synthetic construct; identical to SEQ ID NO: 16728
  REGION 1..469: note = neuraminidase__InfluenzaA__EPI189183

SEQ ID NO: 26298 - protein, 469 aa, synthetic construct; identical to SEQ ID NO: 16728
  REGION 1..469: note = neuraminidase__InfluenzaA__EPI180576

SEQ ID NO: 26299 - protein, 469 aa, synthetic construct
  REGION 1..469: note = neuraminidase__InfluenzaA__EPI346918
MNTNQRIITIGTVCMIVGIISLLLQIGNIVSLWISHSIQTGWENHTEMCNQNVITYVNNTWVNRTYVNVSNTNIATIQDVTSIVLAGNSSLCPVSGWAIYSKDNSIRIGSKGDIFVIREPFISCSQLECRTFFLTQGALLNDKHSNGTVKDRSPYRTLMSCPIGEAPSPYNSRFESVAWSASACHDGMGWLTIGISGPDNGAVAVLKYNGIITDTIKSWRNKILRTQESECVCMNGSCFTVLTDGPSNGQASYKIFKVEKGRIIKSIELDAPNYHYEECSCYPDTGKVMCVCRDNWHASNRPWVSFNQNLDYQIGYICSGVFGDNPRSNDGKGNCGPVLSNGANGVKGFSYRYGNGVWIGRTKSINSRRGFEIIWDPNGWTETDSSFSMKQDIIALTDWSGYSGSFVQHPELTGMNCIRPCFWVELIRGQPKESTIWASGSSISFCGVNSETASWSWPDGADLPFTIDK

SEQ ID NO: 26300 - protein, 469 aa, synthetic construct; identical to SEQ ID NO: 17316
  REGION 1..469: note = neuraminidase__InfluenzaA__EPI240976

SEQ ID NO: 26301 - protein, 469 aa, synthetic construct; identical to SEQ ID NO: 14095
  REGION 1..469: note = neuraminidase__InfluenzaA__EPI3165

SEQ ID NO: 26302 - protein, 469 aa, synthetic construct; identical to SEQ ID NO: 26021
  REGION 1..469: note = neuraminidase__InfluenzaA__EPI957

SEQ ID NO: 26303 - protein, 469 aa, synthetic construct; identical to SEQ ID NO: 22146
  REGION 1..469: note = neuraminidase__InfluenzaA__EPI507593

SEQ ID NO: 26304 - protein, 469 aa, synthetic construct; identical to SEQ ID NO: 22146
  REGION 1..469: note = neuraminidase__InfluenzaA__EPI461954

SEQ ID NO: 26305 - protein, 469 aa, synthetic construct; identical to SEQ ID NO: 22146
  REGION 1..469: note = neuraminidase__InfluenzaA__EPI461954

SEQ ID NO: 26306 - protein, 469 aa, synthetic construct
  REGION 1..469: note = neuraminidase__InfluenzaA__EPI668104
MNPNQKIITIGSVSLTISTICFFMQIAILITTVTLHFKQYEFNSPPNNQVMLCEPTIIERNITEIVYLTNTTIEKEICPKPAEYRNWSKPQCGITGFAPFSKDNSIRLSAGGDIWVTREPYVSCDPDKCYQFALGQGTTLNNVHSNNTVRDRTPYRTLLMNELGVPFYLGTKQVCIAWSSSSCHDGKAWLHVCITGDDKNATASFIYNGRLVDSVVSWSKDILRTQESECVCINGTCTVVMTDGNASGKADTKILFIEEGKIVHTSKLSGSAQHVEECSCYPRYPGVRCVCRDNWKGSNRPIVDINIKDHSIVSSYVCSGLVGDTPRKNDSSSSSHCLDPNNEEGGHGVKGWAFDDGNDVWMGRTINETSRLGYETFKVVEGWSNPKSKLQINRQVIVDRGDRSGYSGIFSVEGKSCINRCFYVELIRGRKEETEVLWTSNSIVVFCGTSGTYGTGSWPDGADLNLMPI

SEQ ID NO: 26307 - protein, 469 aa, synthetic construct
  REGION 1..469: note = neuraminidase__InfluenzaA__EPI578445
MNPNQKIITIGSVSLTISTICFFMQIAILITTVTLHFKQYEFNSPPNNQVMLCEPTIIERNITEIVYLTNTTIEKEICPKPAEYRNWSKPQCGITGFAPFSKDNSIRLSAGGDIWVTREPYVSCDPDKCYQFALGQGTTLNNVHSNNTVRDRTPYRTLLMNELGVPFHLGTKQVCIAWSSSSCHDGKAWLHVCITGDDKNATASFIYNGRLVDSVVSWSKDILRTQESECVCINGTCTVVMTDGNASGKADTKILFIEEGKIVHTSKLSGSAQHVEECSCYPRYPGVRCVCRDNWKGSNRPIVDINIKDHSIVSSYVCSGLVGDTPRKNDSSSSSHCLDPNNEEGGHGVKGWAFDDGNDVWMGRTINETSRLGYETFKVVEGWSNPKSKLQINRQVIVDRGDRSGYSGIFSVEGKSCINRCFYVELIRGRKEETEVLWTSNSIVVFCGTSGTYGTGSWPDGADLNLMPI

SEQ ID NO: 26308 - protein, 469 aa, synthetic construct; identical to SEQ ID NO: 26307
  REGION 1..469: note = neuraminidase__InfluenzaA__EPI551883

SEQ ID NO: 26309 - protein, 469 aa, synthetic construct
  REGION 1..469: note = neuraminidase__InfluenzaA__EPI344388
MNPNQKIITIGSVSLIIATICFLMQIAILVTTVTLHFKQHDYNSPPNNQAMLCEPTIIERNTTEIVYLTNTTIEKEICPKLAEYRNWSKPQCNITGFAPFSKDNSIRLSAGGDIWVTREPYVSCDPDKCYQFALGQGTTLNNGHSNNTVHDRTPYRTLLMNELGVPFHLGTRQVCMAWSSSSCHDGKAWLHVCITGNDNNATASFIYNGRLVDSIGSWSKNILRTQESECVCINGTCTVVMTDGSASGKADTKILFVEEGKIVHISTLSGSAQHVEECSCYPRFPGVRCVCRDNWKGSNRPIVDINVKNYSIVSSYVCSGLVGDTPRKSDSVSSSYCLDPNNEKGGHGVKGWAFDDGNDVWMGRTINETLRLGYETFKVIEGWSKANSKLQTNRQVIVEKGDRSGYSGIFSVEGKSCINRCFYVELIRGRKEETKVWWTSNSIVVFCGTSGTYGTGSWPDGADINLMPI

SEQ ID NO: 26310 - protein, 469 aa, synthetic construct; identical to SEQ ID NO: 26309
  REGION 1..469: note = neuraminidase__InfluenzaA__EPI347601

SEQ ID NO: 26311 - protein, 469 aa, synthetic construct
  REGION 1..469: note = neuraminidase__InfluenzaA__EPI642512
MNPNQKIITIGSISLIIATICFLMQIAILVITVTLHFKQHNCDSSPNNQVMFCEPTIIERNKTEIVYLINTTVEKEICPKPTEYRNWSKPQCNITGFAPFSKDNSIRLSAGGDIWVTREPYVSCDPDKCYQFALGQGTTLNNGHSNDTVHDRTPYRTLLMNELGVPFHLGTRQVCIAWSSSSCHDGKAWLHVCITGDDGNATASFIYNGRLVDSIGSWSKNILRTQESECVCINGTCTVVMTDGSASGKADTKILFIEEGKIIHISTLSGSAQHVEECSCYPRYPGVRCVCRDNWKGSNRPIVDINVKDYSIVSSYVCSGLVGDTPRKNDSFSSSHCLDPNNEEGGHGVKGWAFDDGNDVWMGRTISEKSRLGYETFKVVKGWSEPNSKLQTNRQVIVGRGNRSGYSGIFSIEGKNCINRCFYVELIRGRKEETKVWWTSNSIVVFCGTSGTYGTGSWPDGADINLMPI

SEQ ID NO: 26312 - protein, 469 aa, synthetic construct
  REGION 1..469: note = neuraminidase__InfluenzaA__AIE52540
MNPNQKIITIGSVSLIIATICFLMQIAILVTTVTLHFKQHDYNSPPNNQVMLCEPTIIERNTTEIVYLTNITIEKEICPKLAEYRNWSKPQCNITGFAPFSKDNSIRLSAGGDIWVTREPYVSCDPDKCYQFALGQGTTLNNRHSNNTVHDRSPYRTLLMNELGVPFHLGTRQVCIAWSSSSCHDGKAWLHVCITGDDNNATASFIYNGRLVDSIGSWSKNILRTQESECVCINGTCTVVMTDGSASGKADTKILFIEEGKIVHISTLSGSAQHVEECSCYPRYPGVRCVCRDNWKGSNRPIVDINMKDYSIASSYVCSGLVGDTPRKNDSFSSSHCLDPNNEKGGHGVKGWAFDDGNDVWMGRTISEEFRLGYETFKVIKGWSNPNSKLQTNRQVIVEKGNRSGYSGVFSIEDKSCINRCFYVELIRGRKEETKVWWTSNSIVVFCGTSGTYGTGSWPDGADINLMPI

SEQ ID NO: 26313 - protein, 469 aa, synthetic construct; identical to SEQ ID NO: 26312
  REGION 1..469: note = neuraminidase__InfluenzaA__EPI465399

SEQ ID NO: 26314 - protein, 469 aa, synthetic construct; identical to SEQ ID NO: 26312
  REGION 1..469: note = neuraminidase__InfluenzaA__EPI328899

SEQ ID NO: 26315 - protein, 469 aa, synthetic construct; identical to SEQ ID NO: 26312
  REGION 1..469: note = neuraminidase__InfluenzaA__EPI328901

SEQ ID NO: 26316 - protein, 469 aa, synthetic construct
  REGION 1..469: note = neuraminidase__InfluenzaA__EPI574645
MNPNQKIITIGSVSLTISTICFFMQIAILITTVTLHFKQYEFNSPPNNQVVLCEPTIIERNITEIVYLTNTTIEKEICPKPAEYRNWSKPQCGITGFAPFSKDNSIRLSAGGDIWVTREPYVSCDPDKCYQFALGQGTTLNNGHSNNTVRDRTPYRTLLMNELGVPFHLGTKQVCIAWSSSSCHDGKAWLHVCITGDDKNATASFIYNGRLVDSVVSWSKDILRTQESECVCINGTCTVVMTDGSASGKADTKILFIEEGKIIHTSTLSGSAQHVEECSCYPRYPGVRCVCRDNWKGSNRPIVDINIKDHSIVSSYVCSGLVGDTPRKNDSSSSSHCLDPNNEEGGHGVKGWAFDDGNDVWMGRTINETSRLGYETFKVIEGWSNPKSKLQINRQVIVDRGDRSGYSGIFSVEGKSCINRCFYVELIRGRKEENEVLWTSNSIVVFCGTSGTYGTGSWPDGADLNLMPI

SEQ ID NO: 26317 - protein, 469 aa, synthetic construct
  REGION 1..469: note = neuraminidase__InfluenzaA__EPI563214
MNPNQKIITIGSVSLTISTICFFMQIAILITTVTLHFKQYEFNSPPNNQVMLCEPTIIERNITEIVYLTNTTIEKEICPKPAEYRNWSKPQCSITGFAPFSKDNSIRLSAGGDIWVTREPYVSCDPDKCYQFALGQGTTLNNVHSNNTVRDRTPYRTLLMNELGVPFHLGTKQVCIAWSSSSCHDGKAWLHVCITGDDKNATASFIYNGRLVDSVVSWSKDILRTQESECVCINGTCTVVMTDGSASGKADTKILFIEEGKIVYTSKLSGSAQHVEECSCYPRYPGVRCVCRDNWKGSNRPIVDINIKDHSIVSSYVCSGLVGDTPRKNDSSSSSHCLDPNNEEGGHGVKGWAFDDGNDVWMGRTINETSRLGYETFKVVEGWSNPKSKLQINRQVIVDRGDRSGYSGIFSVEGKSCINRCFYVELIRGRKEETEVLWTSNSIVVFCGTSGTYGTGSWPDGADLNLMPI

SEQ ID NO: 26318 - protein, 469 aa, synthetic construct; identical to SEQ ID NO: 26317
  REGION 1..469: note = neuraminidase__InfluenzaA__EPI553998

SEQ ID NO: 26319 - protein, 469 aa, synthetic construct
  REGION 1..469: note = neuraminidase__InfluenzaA__EPI551568
MNPNQKIITIGSVSLTISTICFFMQIAILITTVTLHFKQYEFNSPPNNQVMLCEPTIIERNITEIVYLTNTTIEKEICPKPAEYRNWSKPQCSITGFAPFSKDNSIRLSAGGDIWVTREPYVSCDPDKCYQFALGQGTTLNNVHSNNIVRDRTPYRTLLMNELGVPFHLGTKQVCIAWSSSSCHDGKAWLHVCITGDDKNATASFIYNGRLVDSVVSWSKDILRTQESECVCINGTCTVVMTDGSASGKADTKILFIEEGKIVYTSKLSGSAQHVEECSCYPRYPGVRCVCRDNWKGSNRPIVDINIKDHSIVSSYVCSGLVGDTPRKNDSSSSSHCLDPNNEEGGHGVKGWAFDDGNDVWMGRTINETSRLGYETFKVVEGWSNPKSKLQINRQVIVDRGDRSGYSGIFSVEGKSCINRCFYVELIRGRKEETEVLWTSNSIVVFCGTSGTYGTGSWPDGADLNLMPI

SEQ ID NO: 26320 - protein, 469 aa, synthetic construct
  REGION 1..469: note = neuraminidase__InfluenzaA__EPI629737
MNPNQKIIAIGSVSLTISTICFFMQIAILITTVTLHFKQYEFNSPPNNQVMLCEPTIIERNITEIVYLTNTTIEKEICPKPAEYRNWSKPQCSITGFAPFSKDNSIRLSAGGDIWVTREPYVSCDPDKCYQFALGQGTTLNNVHSNNTVRDRTPYRTLLMNELGVPFHLGTKQVCIAWSSSSCHDGKAWLHVCITGDDKNATASFIYNGRLVDSVVSWSKDILRTQESECVCINGTCTVVMTDGSASGKADTKILFIEEGKIVYTSKLSGSAQHVEECSCYPRYPGVRCVCRDNWKGSNRPIVDINIKDHSIVSSYVCSGLVGDTPRKNDSSSSSHCLDPNNEEGGHGVKGWAFDDGNDVWMGRTINETSRLGYETFKVVEGWSNPKSKLQINRQVIVDRGDRSGYSGIFSVEGKSCINRCFYVELIRGRKEETEVLWTSNSIVVFCGTSGTYGTGSWPDGADLNLMPI

SEQ ID NO: 26321 - protein, 469 aa, synthetic construct; identical to SEQ ID NO: 26317
  REGION 1..469: note = neuraminidase__InfluenzaA__EPI631886

SEQ ID NO: 26322 - protein, 469 aa, synthetic construct; identical to SEQ ID NO: 26317
  REGION 1..469: note = neuraminidase__InfluenzaA__EPI577025

SEQ ID NO: 26323 - protein, 469 aa, synthetic construct; identical to SEQ ID NO: 23871
  REGION 1..469: note = neuraminidase__InfluenzaA__EPI404926

SEQ ID NO: 26324 - protein, 469 aa, synthetic construct; identical to SEQ ID NO: 23871
  REGION 1..469: note = neuraminidase__InfluenzaA__EPI492687

SEQ ID NO: 26325 - protein, 469 aa, synthetic construct
  REGION 1..469: note = neuraminidase__InfluenzaA__EPI530648
MNPNQKIITIGSVSLTISTICFFMQIAILITTVTLHFKQYEFNSPPNNQVMLCEPTIIERNITEIVYLTNTTIEKEICPKPAEYRNWSKPQCGITGFAPFSKDNSIRLSAGGDIWVTREPYVSCDPDKCYQFALGQGTTLNNVHSNNTVRDRTPYRTLLMNELGVPFHLGTKQVCIAWSSSSCHDGKAWLHVCITGDDKNATASFIYNGRLVDSVVSWSKDILRTQESECVCINGTCTVVMTDGSASGKADTKILFIEEGKIVHTSTLSGSAQHVEECSCYPRYPGVRCVCRDNWKGSNRPIVDINIKDHSIVSSYVCSGLVGDTPRKNDSSSSSHCLDPNNEEGGHGVKGWAFDDGNDVWMGRTINETSRLGYETFKVIEGWSNPKSKLQTNRQVIVDRGDRSGYSGIFSVEGKSCINRCFYVELIRGRKEETEVLWTSNSIVVFCGTSGTYGTGSWPDGADLNLMPI

SEQ ID NO: 26326 - protein, 469 aa, synthetic construct; identical to SEQ ID NO: 26307
  REGION 1..469: note = neuraminidase__InfluenzaA__EPI684314

SEQ ID NO: 26327 - protein, 469 aa, synthetic construct
  REGION 1..469: note = neuraminidase__InfluenzaA__EPI614459
MNPNQKIITIGSVSLTISTICFFMQIAILITTVTLHFKQYKFNSPPNNQVMLCEPTIIERNITEIVYLTNTTIEKEICPKPAEYRNWSKPQCGITGFAPFSKDNSIRLSAGGDIWVTREPYVSCDPDKCYQFALGQGTTLNNVHSNNTVRDRTPYRTLLMNELGVPFHLGTKQVCIAWSSSSCHDGKAWLHVCITGDDKNATASFIYNGRLVDSVVSWSKDILRTQESECVCINGTCTVVMTDGSASGKADTKILFIEEGKIVHTSTLSGSAQHVEECSCYPRYPGVRCVCRDNWKGSNRPIVDINIKDHSIVSSYVCSGLVGDTPRKNDSSSSSHCLDPNNEEGGHGVKGWAFDDGNDVWMGRTINETSRLGYETFKVIEGWSNPKSKLQTNRQVIVDRGDRSGYSGIFSVEGKSCINRCFYVELIRGRKEETEVLWTSNSIVVFCGTSGTYGTGSWPDGADLNLMPI

SEQ ID NO: 26328 - protein, 469 aa, synthetic construct; identical to SEQ ID NO: 26327
  REGION 1..469: note = neuraminidase__InfluenzaA__EPI541466

SEQ ID NO: 26329 - protein, 469 aa, synthetic construct; identical to SEQ ID NO: 26327
  REGION 1..469: note = neuraminidase__InfluenzaA__EPI696968

SEQ ID NO: 26330 - protein, 469 aa, synthetic construct; identical to SEQ ID NO: 26327
  REGION 1..469: note = neuraminidase__InfluenzaA__EPI674598

SEQ ID NO: 26331 - protein, 469 aa, synthetic construct; identical to SEQ ID NO: 26325
  REGION 1..469: note = neuraminidase__InfluenzaA__EPI530678

SEQ ID NO: 26332 - protein, 469 aa, synthetic construct
  REGION 1..469: note = neuraminidase__InfluenzaA__EPI530680
MNPNQKIITIGSVSLTISTICFFMQIAILITTVTLHFKQYEFNSPPNNQVMLCEPTIIERNITEIVYLTNTTIEKEICPKPAEYRNWSKPQCGITGFAPFSKDNSIRLSAGGDIWVTREPYVSCDPDKCYQFALGQGTTLNNVHSNNTVRDRTPYRTLLMNELGVPFHLGTKQVCIAWSSSSCHDGKAWLHVCITGDDKNATASFIYNGRLVDSVVSWSKDILRTQESECVCINGTCTVVMTDGSASGKADTKILFIEEGKIVHTSTLSGSAQHVEECSCYPRYPGVRCVCRDNWKGSNRPIVDINIKDHSIVSSYVCSGLVGDTPRKNDSSSSSHCLDPNNEEGGHGVKGWAFDDGNGVWMGRTINETSRLGYETFKVIEGWSNPKSKLQTNRQVIVDRGDRSGYSGIFSVEGKSCINRCFYVELIRGRKEETEVLWTSNSIVVFCGTSGTYGTGSWPDGADLNLMPI

SEQ ID NO: 26333 - protein, 469 aa, synthetic construct; identical to SEQ ID NO: 14038
  REGION 1..469: note = neuraminidase__InfluenzaA__EPI7603

SEQ ID NO: 26334 - protein, 469 aa, synthetic construct; identical to SEQ ID NO: 26325
  REGION 1..469: note = neuraminidase__InfluenzaA__EPI814527

SEQ ID NO: 26335 - protein, 469 aa, synthetic construct; identical to SEQ ID NO: 26325
  REGION 1..469: note = neuraminidase__InfluenzaA__EPI674737

SEQ ID NO: 26336 - protein, 469 aa, synthetic construct; identical to SEQ ID NO: 26325
  REGION 1..469: note = neuraminidase__InfluenzaA__EPI614443

SEQ ID NO: 26337 - protein, 469 aa, synthetic construct; identical to SEQ ID NO: 26325
  REGION 1..469: note = neuraminidase__InfluenzaA__EPI551812

SEQ ID NO: 26338 - protein, 469 aa, synthetic construct; identical to SEQ ID NO: 26325
  REGION 1..469: note = neuraminidase__InfluenzaA__EPI696961

SEQ ID NO: 26339 - protein, 469 aa, synthetic construct; identical to SEQ ID NO: 26325
  REGION 1..469: note = neuraminidase__InfluenzaA__EPI740789

SEQ ID NO: 26340 - protein, 469 aa, synthetic construct
  REGION 1..469: note = neuraminidase__InfluenzaA__EPI377498
MNPNQKIITIGSVSLTISTICFFMQIAILITTVTLHFKQYEFNSPPNNQVMLCEPTIIERNITEIVYLTNTTIEKEICPKPAEYRNWSKPQCGITGFAPFSKDNSIRLSAGGDIWVTREPYVSCDPDKCYQFALGQGTTLNNVHSNNTVHDRTPYRTLLMNELGVPFHLGTKQVCIAWSSSSCHDGKAWLHVCITGDDKNATASFIYNGRLVDSVVSWSKEILRTQESECVCINGTCTVVMTDGSASGKADTKILFIEEGKIVHTSTLSGSAQHVEECSCYPRYPGVRCVCRDNWKGSNRPIVDINIKDHSIVSSYVCSGLVGDTPRKNDSSSSSHCLDPNNEEGGHGVKGWAFDDGNDVWMGRTINETSRLGYETFKVIEGWSNPKSKLQINRQVIVDRGDRSGYSGIFSVEGKSCINRCFYVELIRGRKEETEVLWTSNSIVVFCGTSGTYGTGSWPDGADLNLMPI

SEQ ID NO: 26341 - protein, 469 aa, synthetic construct; identical to SEQ ID NO: 26340
  REGION 1..469: note = neuraminidase__InfluenzaA__EPI377498

SEQ ID NO: 26342 - protein, 469 aa, synthetic construct; identical to SEQ ID NO: 26340
  REGION 1..469: note = neuraminidase__InfluenzaA__EPI391246

SEQ ID NO: 26343 - protein, 469 aa, synthetic construct; identical to SEQ ID NO: 26340
  REGION 1..469: note = neuraminidase__InfluenzaA__EPI407122

SEQ ID NO: 26344 - protein, 469 aa, synthetic construct; identical to SEQ ID NO: 26340
  REGION 1..469: note = neuraminidase__InfluenzaA__EPI407125

SEQ ID NO: 26345 - protein, 469 aa, synthetic construct; identical to SEQ ID NO: 26307
  REGION 1..469: note = neuraminidase__InfluenzaA__EPI562038

SEQ ID NO: 26346 - protein, 469 aa, synthetic construct; identical to SEQ ID NO: 26307
  REGION 1..469: note = neuraminidase__InfluenzaA__EPI562038

SEQ ID NO: 26347 - protein, 469 aa, synthetic construct; identical to SEQ ID NO: 22617
  REGION 1..469: note = neuraminidase__InfluenzaA__EU716525

SEQ ID NO: 26348 - protein, 449 aa, synthetic construct
  REGION 1..449: note = neuraminidase__InfluenzaA__EPI232422
MNPNQKIITIGSICMVIGIVSLMLQIGNMISIWVSHSIQTGNQRQAEPISNTKFLTEKAVASVTLAGNSSLCPISGWAVYSKDNSIRIGSRGDVFVIREPFISCSHLECRTFFLTQGALLNDKHSNGTVKDRSPHRTLMSCPVGEAPSPYNSRFESVAWSASACHDGTSWLTIGISGPDNGAVAVLKYNGIITDTIKSWRNNILRTQESECACVNGSCFTVMTDGPSSGQASYKIFKMEKGKVVKSVELDAPNYHYEECSCYPDAGEITCVCRDNWHGSNRPWVSFNQNLEYQIGYICSGVFGDNPRPNDGTGSCGPVSPNGAYGVKGFSFKYGNGVWIGRTKSTNSRSGFEMIWDPNGWTGTDSSFSVKQDIVAITDWSGYSGSFVQHPELTGLDCIRPCFWVELIRGRPKESTIWTSGSSISFCGVNSDTVSWSWPDGAELPFTIDK

SEQ ID NO: 26349 - protein, 449 aa, synthetic construct; identical to SEQ ID NO: 26184
  REGION 1..449: note = neuraminidase__InfluenzaA__EPI227593

SEQ ID NO: 26350 - protein, 449 aa, synthetic construct
  REGION 1..449: note = neuraminidase__InfluenzaA__EPI435658
MNPNQKIVTIGSICMVIGIISLMLQIGNIISIWVSHSIQTGNQHQTEPIRNTNFLTENAVASVTLAGNSSLCPIRGWAVHSKDNSIRIGSKGDVFVIREPFISCSHLECRTFFLTQGALLNDKHSNGTVKDRSPHRTLMSCPIGEAPSPYNSRFESVAWSASACHDGTSWLIIGISGPDNGAVAVLKYNGIITDTIKSWRNNILRTQESECACVNGSCFTVMTDGPSNGQASYKIFKIEKGKVVKSVELNAPNYHYEECSCYPDAGEIICVCRDNWHGSNRPWVSFNQNLEYQIGYICSGVFGDNPRPNDGTGSCGPVSPNGAYGVKGFSFKYGNGVWIGRTKSTHSRSGFEMIWDPNGWTGTDSEFSMKQDIVAITDWSGYSGSFVQHPELTGLDCIRPCFWVELIRGRPKESTIWTSGSSISFCGVNSDTVSWSWPDGAELPFTIDK

SEQ ID NO: 26351 - protein, 449 aa, synthetic construct; identical to SEQ ID NO: 26350
  REGION 1..449: note = neuraminidase__InfluenzaA__EPI492513

SEQ ID NO: 26352 - protein, 449 aa, synthetic construct; identical to SEQ ID NO: 19697
  REGION 1..449: note = neuraminidase__InfluenzaA__EPI165066

SEQ ID NO: 26353 - protein, 449 aa, synthetic construct
  REGION 1..449: note = neuraminidase__InfluenzaA__EPI531308
MNPNQKIITIGSICMVTGVVSLMLQVGNMISIWISHSIHTGNQHQAEPISNTNFHTEKAVVSAKLAGNSSLCPINGWAVYSKDNSIRIGSKGDVFVIREPFISCSHLECRTFFLTQGALLNDKHSNGTAKDRSPHRTLMSCPVGEAPSPYNSRFESVAWSASACHDGTSWLTIGISGPDNGAVAVLKYNGIITDTIKSWRNNVLRTQESECACVNGYCFTVMTDGPSNGQASHKIFKMEKGKVIKSVELDAPNYHYEECSCYPDAGEITCVCRDNWHGSNRPWISFNQNLEYQIGYICSGVFGDNPRPNDGKGSCGPVSSNGAYGVKGFSFKYGNGVWIGRTKSTNSRSGFEMIWDPNGWTETDSSFSVKQDIVAITDWSGYSGSFVQHPELTGLDCIRPCFWVELIRGRPKEGTIWTSGSSISFCGVSGDTVGWSWPDGAELPFTIDK

SEQ ID NO: 26354 - protein, 449 aa, synthetic construct
  REGION 1..449: note = neuraminidase__InfluenzaA__EPI433308
MNPNQKIITIGSICMVIGIVSLMLQIGNLISIWVSHSIQRGNLNQVEPISNTSFPTEKAVASVTLAGNSSLCPIRGWAVHSKDNSIRIGSKGDVFVIREPFISCSHLECRTFFLTQGALLNDKHSNGTVKDRSPHRTLMSCPVGEAPSPYNSRFESVAWSASACHDGTSWLTIGISGPDNGAVAVVKYNGIITDTIKSWGNNILRTQESECACVNGSCFTVMTDGPSNGQASYKIFKMEKGKVIKSVELDAPNYHYEECSCYPDAGEITCVCRDNWHGSNRPWVSFNQNLEYQIGYICSGVFGDNPRPNDGTGSCGPVSPNGAYGVKGFSFKYGNGVWIGRTKSPNSRSGFEMIWDPNGWSETDSSFSVKQDILAVTDWSGYSGSFVQHPELTGLDCIRPCFWVELIRGRPEESTIWTSGSSISFCGVNSDTVSWSWPDGAELPFTIDK

SEQ ID NO: 26355 - protein, 449 aa, synthetic construct
  REGION 1..449: note = neuraminidase__InfluenzaA__EPI114974
MNPNQKIITIGSICMVIGIVSLMLQIGNMISIWVSHSIQTGNQRQAEPISNTKFLTEKAVASVTLAGNSSLCPISGWAVYSKDNSIRIGSRGDVFVIREPFISCSHLECRTFFLTQGALLNDKHSNGTVKDRSPHRTLMSCPVGEAPSPYNSRFESVAWSASACHDGTSWLTIGISGPDNGAVAVLKYNGIITDTIKSWRNNILRTQESECACVNGSCFTVMTDGPSNGQASYKIFKMEKGKVVKSIELDAPNYHYEECSCYPDAGEITCVCRDNWHGSNRPWVSFNQNLEYQIGYICSGVFGDNPRPNDGTGSCGPVSPNGAYGVKGFSFKYGNGVWIGRTKSTNSRSGFEMIWDPNGWTGTDSSFSVKQDIVAITDWSGYSGSFVQHPELTGLDCIRPCFWVELIRGRPKESTIWTSGSSISFCGVNSDTVSWSWPDGAELPFTIDK

SEQ ID NO: 26356 - protein, 449 aa, synthetic construct
  REGION 1..449: note = neuraminidase__InfluenzaA__EPI622495
MNPNQKITTIGSICMVIGIVSLMLQIGNMVSIWVSHSIQTRNQRQAEPISNTRSLTEKAVASVTLAGNSSLCPISGWAVYSKDNSIRIGSKGDVFVIREPFISCSHLECRTFFLTQGALLNDKHSNGTVKDRSPHRTLMSCPVGEAPSPYNSRFESVAWSASACHDGTSWLTIGISGPDNGAVAVVKYNGIITDTIKSWRNNILRTQESECVCVNGSCFTVMTDGPSNKQASYKIFKMEKGKVVKSIELDAPNYHYEECSCYPDAGEITCVCRDNWHGSNRPWLSFNQNLEYQIGYICSGVFGDNPRPNDGTGSCGPVSSNGAYGVKGFSFKYGNGVWIGRTKSTNSRSGFEMIWDPNGWTGTDSSFSMKQDIVAITDWSGYSGSFVQHPELTGLDCIRPCFWVELVRGRPKEGTIWTSGSSISFCGVNSDTVSWSWPDGAELPFTIDK

SEQ ID NO: 26357 - protein, 449 aa, synthetic construct
  REGION 1..449: note = neuraminidase__InfluenzaA__EPI349847
MNPNQKITTIGSICMVIGIVSLMLQIGNMVSIWVSHSIQTRNQRQAEPISNTRSLTEKAVASVTLAGNSSLCPISGWAVYSKDNSIRIGSKGDVFVIREPFISCSHLECRTFFLTQGALLNDKHSNGTVKDRSPHRTLMSCPVGEAPSPYNSRFESVAWSASACHDGTSWLTIGISGPDNGAVAVVKYNGIITDTIKSWRNNILRTQESECVCVNGSCFTVMTDGPSNKQASYKIFKMEKGKVVKSIELDAPNYHYEECSCYPDAGEITCVCRDNWHGSNRPWLSFNQNLEYQIGYICSGVFGDNPRPNDGTGSCGPVSHNGAYGVKGFSFKYGNGVWIGRTKSTNSRSGFEMIWDPNGWTGTDSSFSMKQDIVAITDWSGYSGSFVQHPELTGLDCIRPCFWVELVRGRPKEGTIWTSGSSISFCGVNSDTVSWSWPDGAELPFTIDK

SEQ ID NO: 26358 - protein, 449 aa, synthetic construct
  REGION 1..449: note = neuraminidase__InfluenzaA__EPI174804
MNPNQKIITIGSICMVIGIVSLMLQIGNMVSIWVSHSIQTRNQRQAEPISNTKSLTEKAVASVTLAGNSSLCPISGWAVYSKDNSIRIGSKGDVFVIREPFISCSHLECRTFFLTQGALLNDKHSNGTIKDRSPHRTLMSCPVGEAPSPYNSRFESVAWSASACHDGTSWLTIGISGPDNGAVAVLKYNGIITDTIKSWRNNILRTQESECACVNGSCFAVMTDGPSNRQASYKIFKMEKGKVVKSIELDAPNYHYEECSCYPDAGEITCVCRDNWHGSNRPWLSFNQNLEYQIGYICSGVFGDNPRPNDGTGSCGPVSSNGAYGVKGFSFKYGNGVWIGRTKSTNSRSGFEMIWDPNGWTETDSSFSMKQDIVAITDWSGYSGSFVQHPELTGLDCIRPCFWVELVRGRPKESTIWTSGSSISFCGVNSDTVSWSWPDGAELPFTIDK

SEQ ID NO: 26359 - protein, 449 aa, synthetic construct
  REGION 1..449: note = neuraminidase__InfluenzaA__EPI492441
MNPNQKIMAIGSVCMVIGIVSLMLQIGNTISIWVSHSFQTRVQHQAEPIRNTNFLTENAVASVTLAGNSSLCPIRGWAVHSKDNSIRIGSKGDVFVIREPFISCSHLECRTFFLTQGALLNDKHSNRTVKDRSPHRTLMSCPVGEVPSPYNSRFESVAWSASACHDGTSWLTIGISGPDNGAVAVLKYNGIITDTIKSWRNNILRTQESECACVNGFCFTVMTDGPSNGQASYKIFKMKKGKVVKSVELNAPNYHYEECSCYPDAGEIMCVCRDNWHGSNRPWVSFNQNLEYQIGYICSGVFGDNPRPNDGTGSCGPVSPNGAYGIKGFSFKYGNGVWIGRTKSTNSRSGFEMVWDPNGWTDTDSDFSIKQDIVAITDWSGYSGSFVQHPELTGLDCIRPCFWVELIRGRPKESTIWTSGSSISFCGVNSETVSWSWPDGAELPFTIDK

SEQ ID NO: 26360 - protein, 449 aa, synthetic construct; identical to SEQ ID NO: 25987
  REGION 1..449: note = neuraminidase__InfluenzaA__EPI164142

SEQ ID NO: 26361 - protein, 449 aa, synthetic construct
  REGION 1..449: note = neuraminidase__InfluenzaA__EPI827076
MNPNQKIVTIGSICMVIGIISLMLQIGNIISIWVSHSIQTGNQHQTEPIRNTNFLTENAVASVTLAGNSSLCPIKGWAVHSKDNSIRIGSKGDVFVIREPFISCSHLECRTFFLTQGALLNDKHSNGTVKDRSPHRTLMSCPIGEAPSPYNSRFESVAWSASACHDGTSWLIIGISGPDNGAVAVLKYNGIITDTIKSWRNNILRTQESECACVNGSCFAVMTDGPSNGQASYKIFKIEKGKVVKSVELNAPNYHYEECSCYPDAGEIICVCRDNWHGSNRPWVSFNQNLEYQIGYICSGVFGDNPRPNDGTGSCGPVSSNGAYGVKGFSFKYGNGVWIGRTKSTHSRSGFEMIWDPNGWTGTDSEFSMKQDIVAITDWSGYSGSFVQHPELTGLDCIRPCFWVELIRGRPKESTIWTSGSSISFCGVNSDTVSWSWPDGAELPFTIDK

SEQ ID NO: 26362 - protein, 449 aa, synthetic construct; identical to SEQ ID NO: 16579
  REGION 1..449: note = neuraminidase__InfluenzaA__EPI168491

SEQ ID NO: 26363 - protein, 449 aa, synthetic construct
  REGION 1..449: note = neuraminidase__InfluenzaA__EPI827078
MNPNQKIITIGSICMVIGIASLMLQIGNIISIWISHSIQTGNQCQNESISNTKFLAEKAVASVTLAGNSSLCPVSGWAVYSKDNSIRIGSKGDVFVIREPFISCSHLECRTFFLTQGALLNDKHSNGTVKDRSPHRTLMSCPVGEAPSPYNSRFESVAWSASACHDGTSWLTIGISGPDSGAVAVLKYNGIITDTIKSWRNNIMRTQESECACVNGSCFTIMTDGPSSGQASYKIFKMEKGKVIKSVELDAPNYHYEECSCYPDAGEITCVCRDNWHGSNRPWISFNQNLEYQIGYICSGVFGDNPRPNDGTGSCGPVFPNGAYGVKGFSFKYGNGVWIGRTKSTNSRSGFEMIWDPNGWTGTDSSFSVKQDIVAITEWSGYSGSFVQHPELTGLDCIRPCFWVELIRGRPKESTIWTSGSSISFCGVNGDTVSWSWPDGAELPFTIDK

SEQ ID NO: 26364 - protein, 449 aa, synthetic construct
  REGION 1..449: note = neuraminidase__InfluenzaA__EPI594521
MNPNQKIITIGSICVGIGIVSLMLQIGNMVSIWVNHSIQTENQCQAESISNTKFLTEKAVAPVTLMGNSSLCPISGWAVHSKDNSIRIGSKGDVFVIREPFISCSHLECRTFFLTQGALLNDKHSNGTVKDRSPHRALMSCPVGEAPSPYNSRFESVAWSASACHDGTGWLTIGISGPDNGAVAVLKYNGIITDTIKSWRNNILRTQESECACVNGSCFTVMTDGPSNGQASYKIFKLEKGKVVKSVELDAPNYHYEECSCYPDAGEITCVCRDNWHGSNRPWVSFNQNLEYQIGYICSGVFGDNPRPNDGTGSCGPVSPNGAYGVKGFSFKYGNGVWIGRTKSTNSRSGFEMIWDPNGWTETDSSFSVKQDIVAITDWSGYSGSFVQHPELTGLDCIRPCFWVELIRGRPKESTIWTSGSSISFCGVNSDTVGWSWPDGAEVPFTIDK

SEQ ID NO: 26365 - protein, 469 aa, synthetic construct
  REGION 1..469: note = neuraminidase__InfluenzaA__EPI5787
MNPNQKIITIGSICMVVGIISLMLQIGNIISIWVSHSIQTGNQHQAEPCNQSIITYENNTWVNQTYVNISNTNFLTEKAVASVTLAGNSSLCPISGWAVHSKDNGIRIGSKGDVFVIREPFISCSHLECRTFFLTQGALLNDKHSNGTVKDRSPHRTLMSCPVGEAPSPYNSRFESVAWSASACHDGTSWLTIGISGPDNGAVAVLKYNGIITDTIKSWRNNILRTQESECACVNGSCFTVMTDGPSNGQASYKIFKMEKGKVVKSVELNAPNYHYEECSCYPDAGEITCVCRDNWHGSNRPWVSFNQNLEYQIGYICSGVFGDNPRPNDGTGSCGPVSPNGAYGVKGFSFKYGNGVWIGRTKSTNSRSGFEMIWDPNGWTGTDSSFSVKQDIVAITDWSGYSGSFVQHPELTGLDCIRPCFWVELIRGRPKESTIWTSGSSISFCGVNSDTVGWSWPDDAELPFTIDK

SEQ ID NO: 26366 - protein, 469 aa, synthetic construct; identical to SEQ ID NO: 26365
  REGION 1..469: note = neuraminidase__InfluenzaA__EPI5787

SEQ ID NO: 26367 - protein, 449 aa, synthetic construct; identical to SEQ ID NO: 21065
  REGION 1..449: note = neuraminidase__InfluenzaA__EPI267031

SEQ ID NO: 26368 - protein, 449 aa, synthetic construct; identical to SEQ ID NO: 22645
  REGION 1..449: note = neuraminidase__InfluenzaA__EPI376539

SEQ ID NO: 26369 - protein, 449 aa, synthetic construct
  REGION 1..449: note = neuraminidase__InfluenzaA__EPI124069
MNPNQKIITIGSICMVIGIVSLMLQIGNMISIWVSHSIQTGNQHQAESISNTNPLTEKAVASVTLAGNSSLCPIRGWAVHSKDNNIRIGSKGDVFVIREPFISCSHLECRTFFLTQGALLNDKHSNGTVKDRSPHRTLMSCPVGEAPSPYNSRFESVAWSASACHDGTSWLTIGISGPDNEAVAVLKYNGIITDTIKSWRNNILRTQESECACVNGSCFTVMTDGPSDGQASYKIFKMEKGKVVKSVELDAPNYHYEECSCYPDAGEITCVCRDNWHGSNRPWVSFNQNLEYQIGYICSGVFGDNPRPNDGTGSCGPMSPNGAYGVKGFSFKYGNGVWIGRTKSTNSRSGFEMIWDPNGWTGTDSSFSVKQDIVAITDWSGYSGSFVQHPELTGLDCIRPCFWVELIRGRPKESTIWTSGSSISFCGVNSDTVSWSWPDGAELPFTIDK

SEQ ID NO: 26370 - protein, 449 aa, synthetic construct
  REGION 1..449: note = neuraminidase__InfluenzaA__EPI342499
MNPNQKIITIGSICMVIGIVSLMLQIGNMISIWISHSIQKGNQHRTESISNTNPLTEKAVASVTLTGNSSLCPIRGWAVHSKDNNIRIGSKGDVFVIREPFISCSHLECRTFFLTQGALLNDKHSNGTVKDRSPHRTLMSCPLGEAPSPYNSRFESVAWSASACHDGTGWLTIGISGPDNEAVAVLKYNGIITDTIKSWRNNILRTQESECACVNGSCFTVMTDGPSNGQASYKIFKMRKGKVVKSVELDAPNYHYEECSCYPDTGEITCVCRDNWHGSNRPWISFNQNLEYQIGYICSGIFGDNPRPNDGTGSCGPMSPNGAYGVKGFSFKYGNGVWIGRTKSTNSRSGFEMIWDPNGWTETDSSFSVKQDIVAITDWSGYSGSFVQHPELTGLDCIRPCFWVELIRGRPKESTIWTSGSSISFCGVNSDTVSWSWPDGAELPFTIDK

SEQ ID NO: 26371 - protein, 449 aa, synthetic construct
  REGION 1..449: note = neuraminidase__InfluenzaA__EPI103069
MNPNQKIITIGSICMVIGIVSLMLQIGNMISIWVSHSIQTGNQRQAEPISNTKFLTEKAVASVTLAGNSSLCPISGWAVYSKDNSIRIGSRGDVFVIREPFISCSHLECRTFFLTQGALLNDKHSNGTIKDRSPHRTLMSCPVGEAPSPYNSRFESVAWSASACHDGTSWLTIGISGPDNGAVAVLKYNGIITDTIKSWRNNILRTQESECACVNGSCFTVMTDGPSSGQASYKIFKMEKGKVVKSVELDAPNYHYEECSCYPDAGEITCVCRDNWHGSNRPWVSFNQNLEYQIGYICSGVFGDNPRPNDGTGSCGPVSPNGAYGVKGFSFKYGNGVWIGRTKSTNSRSGFEMIWDPNGWTGTDSSFSVKQDIVAITDWSGYSGSFVQHPELTGLDCIRPCFWVELIRGRPKESTIWTSGSSISFCGVNSDTVSWSWPDGAELPFTIDK

SEQ ID NO: 26372 - protein, 449 aa, synthetic construct; identical to SEQ ID NO: 26348
  REGION 1..449: note = neuraminidase__InfluenzaA__EPI227595

SEQ ID NO: 26373 - protein, 469 aa, synthetic construct
  REGION 1..469: note = neuraminidase__InfluenzaA__EPI569385
MNPNQKIITIGSVSLTIATVCFLMQIAILATTVTLHFKQNECSIPPNNQVVPCEPIIIEKNITEIVYLNNTTIEKEVCPEVPEYRNWSKPQCQITGFAPFSKDNSIRLSAGGDIWVTREPYVSCSPGKCYQFALGQGTTLNNKHSNGTIHDRIPHRTLLMSELGVPFHLGTKQVCIAWSSSSCHDGKAWLHVCVTGDDRNATASFIYDGMLADSIGSWSQNILRTQESECVCINGTCTVVMTDGSASGRADTRILFIKEGKIVHISPLSGSAQHIEECSCYPRYPDVRCVCRDNWKGSNRPVIDINMADYSIDSSYVCSGLVGDTPRNDDSSSSSNCRDPNNERGNPGVKGWAFDNGNDVWMGRTISEDSRSGYETFRVTDGWTTANSKSQVNRQIIVDNNNWSGYSGIFSVEGKSCINRCFYVELIRGRPQETRVWWTSNSIVVFCGTSGTYGTGSWPDGANINFMPI

SEQ ID NO: 26374 - protein, 459 aa, synthetic construct
  REGION 1..459: note = neuraminidase__InfluenzaA__EPI736916
MNPNQKITCISATGVTLSVVSLLIGIANLGLNIGLHYKVSDSTTISIPNMNETNPTTTNITNIIVNKNEERTFLNLTKPLCEVNSWHILSKDNAIRIGEDAHILVTREPYLSCDPQGCRMFALSQGTTLRGRHANGTIHDRSPFRALISWEMGQAPSPYNTRVECIGWSSTSCHDGISRMSICISGPNNNASAVVWYRGRPVTEIPSWAGNILRTQESECVCHKGICPVVMTDGPANNKAATKIIYFKEGKVQKIEELQGNAQHIEECSCYGAAGMIKCVCRDNWKGANRPIITIDPEMMTHTSKYLCSKILTDTSRPNDPTNGNCDAPITGGSPDPGVKGFAFLDGENSWLGRTISKDSRSGYEMLKVPNAETDTQSGPTSYQLIVNNQNWSGYSGAFIDYWANKECFNPCFYVELIRGRPKESDVLWTSNSMVALCGSRERLGSWSWHDGAEIIYFK

SEQ ID NO: 26375 - protein, 459 aa, synthetic construct; identical to SEQ ID NO: 25994
  REGION 1..459: note = neuraminidase__InfluenzaA__EPI593891

SEQ ID NO: 26376 - protein, 459 aa, synthetic construct
  REGION 1..459: note = neuraminidase__InfluenzaA__EPI691380
MNPNQKIVCISVTGVTLSVVSLLIGITNLGLNIGLHYKVSDSTTINIPNMNETNPTTTNITNIIMNKNEERTFLKLTKPLCEVNSWHILSKDNAIRIGEDAHILVTREPYLSCDPQGCRMFALSQGTTLRGQHANGTIHDRSPFRALISWEMGQAPSPYNTRVECIGWSSTSCHDGISRMSICISGPNNNASAVVWYRGRPVTEIPSWAGNILRTQESECVCHKGICPVVMTDGPANNKAATKIIYFKEGKIQKTEELQGNAQHIEECSCYGAAGMIKCVCRDNWKGANRPIITIDPEMMTHTSKYLCSKILTDTSRPNDPTNGNCDAPITGGSPDPGVKGFAFLDGENSWLGRTISKDSRSGYEMLKVPNAEIDIQSGPISYQLVVNNQNWSGYSGAFIDYWANKECFNPCFYVELIRGRPKESGVLWTSNSMVALCGSRERLGSWSWHDGAEIIYFK

SEQ ID NO: 26377 - protein, 470 aa, synthetic construct
  REGION 1..470: note = neuraminidase__InfluenzaA__EPI533584
MNPNQKITCISATGMTLSVVSMLIGIANLGLNIGLHYKVSDSTNINIPNMNETSPTTTIINNHPQNNFTNITNIIVTKNEEGHLLNLTKPLCEVNSWHILSKDNAIRIGEDAHIIVTREPYLSCDPQGCRMFALSQGTTLRGKHANGTIHDRSPFRALVSWEMGQAPSPYNTRVECIGWSSTSCHDGISRMSICISGPNNNASAVVWYGGRPVTEIPSWAGNILRTQESECVCHGGICPVVMTDGPANNRAETKIIYFKEGKIKKIEELKGDAQHIEECSCYGASEMIKCICRDNWKGANRPVITIDPEMMTHTSKYLCSKILTDTSRPNDPTNGKCEAPITGGSPDPGVKGFAFLDGENSWLGRTISKDSRSGYEMLKVPNAETDTQSGAISHQIIVNNQNWSGYSGAFIDYWANKECFNPCFYVELIRGRPKESSVLWTSNSIVALCGSKERLGSWSWHDGAEIIYFK

SEQ ID NO: 26378 - protein, 459 aa, synthetic construct; identical to SEQ ID NO: 25998
  REGION 1..459: note = neuraminidase__InfluenzaA__EPI641400

SEQ ID NO: 26379 - protein, 459 aa, synthetic construct; identical to SEQ ID NO: 25998
  REGION 1..459: note = neuraminidase__InfluenzaA__EPI587620

SEQ ID NO: 26380 - protein, 469 aa, synthetic construct
  REGION 1..469: note = neuraminidase__InfluenzaA__EPI569392
MNPNQKIVTIGSLSLGLVVFNVLLHAVSIILTVLALGKSENNGICNGTVVREYNETVRIEKVTQWYNTSVVEYVPHWNEGTYINNTEPICDVKGFAPFSKDNGIRVGSRGHIFVIREPFVSCSPVGCRTFFLTQGSLLNDKHSNGTVKDRSPFRTLMSVEVGQSPNVYQARFEAVAWSATACHDGKKWMAIGVTGPDSKAVAVVHYGGVPTDVVNSWAGDILRTQESSCTCIQGNCYWVMTDGPANRQAQYRIYKANQGKIIGRKDVSFSGGHIEECSCYPNDGKVECVCRDNWTGTNRPVLIISPDLSYRVGYLCAGLPSDTPRGEDTQFVGSCTSPMGNQGYGVKGFGFRQGTDVWVGRTISRTSRSGFEIIRIKNGWTQTSKEQIRRQVVVDNSNWSGYSGSFTLPVELSGRECLVPCFWVEMIRGRPEERTIWTSSSSIVMCGVDYEIADWSWHDGAILPFDIDK

SEQ ID NO: 26381 - protein, 455 aa, synthetic construct
  REGION 1..455: note = neuraminidase__InfluenzaA__EPI459857
MNPNQKIITIGSICMVIGTVSLIVQVGNIILIWVNHSIQTCITYENNTWVNQTYVSNTNFLTGQAVASVTLAGNSSLCPISGWAIYSKDNGIRIGSKGDVFVIREPFISCSHLECRTFFLTQGALLNDKHSNGTIKDRSPYRTLMSCPVGEAPSPYNSRFESVAWSASACHDGINWLTIGISGPDNEAVAVLKYNGVITDTIKSWRNNILRTQESECACVNGSCFTVMTDGPSNGQASYKIFKIEKGKVVRSVELDAPNYHYEECSCYPDAGEITCVCRDNWHGSNRPWVSFNQNLEYQTGYICSGVFGDSPRPNDGTGSCGPVSSNGAFGVKGFSFKYGNGVWIGRTKTTNSRSGFEMIWDPNGWTETDSSFSMKQDIIAITDWSGYSGSFVQHPELTGLNCMRPCFWVELIRGQPRENTIWTSGSSISFCGVNSETVGWSWPDGAELPFTIDK

SEQ ID NO: 26382 - protein, 471 aa, synthetic construct
  REGION 1..471: note = neuraminidase__InfluenzaA__EPI242204
MNPNQKLFALSGVAIALSVLNLLIGISNVGLNVSLHLKGEGVKQENNLTCTTITQNNTTVVENTYVNNTTIINKGTNLKAPNYLLLNKSLCSVEGWVVIAKDNAIRFGESEQIIVTREPYVSCDPSGCKMYALHQGTTIRNKHSNGTIHDRTTFRGLISTPLGTPPTVSNSDFICVGWSSTSCHDGVGRMTICIQGNNDNATATVYYNRRLTTTIKTWAKNILRTQESECVCHNGTCAVVMTDGPASSQAYTKIMYFHKGLIIKEEPLRGSARHIEECSCYGHDQKVSCVCRDNWQGANRPIIEIDMSTLEHTSRYVCTGVLTDTSRPGDKPNGDCSNPITGSPGAPGVKGFGFLNGDNTWLGRTISPRSRSGFEMLKIPNAETDPNSRIIERQEIVDNSNWSGYSGSFIDYWDEANECYNPCFYVELIRGRPEEAKYVWWTSNSLIALCGSPVSVGSGSFPDGAQIQYFS

SEQ ID NO: 26383 - protein, 471 aa, synthetic construct
  REGION 1..471: note = neuraminidase__InfluenzaA__EPI408029
MNPNQKLFALSGVAIALSVLNLLIGISNVGLNMSLHLKGEGVKQENNLTCTTITQNNTTVVENTYVNNTTIINKGTNLKAPNYLLLNKSLCSVEGWVVIAKDNAIRFGESEQIIVTREPYVSCDPSGCKMYALHQGTTIRNKHSNGTIHDRTTFRGLLSTPLGTPPTVSNSDFICVGWSSTSCHDGVGRMTICIQGNNDNATATVYYNRRLTTTIKTWAKNILRTQESECVCHNGTCAVVMTDGPASSQAYTKIMYFHKGLIIKEEPLRGSARHIEECSCYGHDQKVSCVCRDNWQGANRPIIEIDMSTLEHTSRYVCTGVLTDTSRPGDKPNGDCSNPITGSPGAPGVKGFGFLNGDNTWLGRTISPRSRSGFEMLKIPNAETDPNSRIIERQEIVDNSNRSGYSGSFIDYWDEANECYNPCFYVELIRGRPEEAKYVWWTSNSLIALCGSPVSVGSGSFPDGAQIQYFS

SEQ ID NO: 26384 - protein, 465 aa, synthetic construct; identical to SEQ ID NO: 23454
  REGION 1..465: note = neuraminidase__InfluenzaA__EPI439509

SEQ ID NO: 26385 - protein, 449 aa, synthetic construct; identical to SEQ ID NO: 25987
  REGION 1..449: note = neuraminidase__InfluenzaA__EPI164223

SEQ ID NO: 26386 - protein, 465 aa, synthetic construct; identical to SEQ ID NO: 23454
  REGION 1..465: note = neuraminidase__InfluenzaA__EPI486493

SEQ ID NO: 26387 - protein, 465 aa, synthetic construct
  REGION 1..465: note = neuraminidase__InfluenzaA__EPI740737
MNPNQKILCTSATAITISAIAVLIGIANLGLNIGLHLKPGCNCSHSQPETTNTSQTIINNYYNETNITNIQIEERTSRNFNNLTKGLCTINSWHIYGKDNAVRIGESSDVLVTREPYVSCDPDECRFYALSQGTTIRGKHSNGTIHDRSQYRALISWPLSSPPTVHNSRVECIGWSSTSCHDGKSRMSICISGPNNNASAVVWYNRRPVAEINTWARNILRTQESECVCHNGVCPVVFTDGPATGPADTRIYYFKEGKILKWESLTGTAKHIEECSCYGERTGITCTCRDNWQGSNRPVVQIDPVAMTHTSQYICSPVLTDSPRPNDPNIGKCNDPYPGNNNNGVKGFSYLDGANTWLGRTISTASRSGYEMLKVPNALTDDRSKPIQGQTIVLNADWSGYSGSFMDYWAEGDCYRACFYVELIRGRPKEDKVWWTSNSIVSMCSSTEFLGQWNWPDGAKIEYFL

SEQ ID NO: 26388 - protein, 465 aa, synthetic construct
  REGION 1..465: note = neuraminidase__InfluenzaA__EPI730494
MNPNQKILCTSATAITIGAIAVLIGIANLGLNIGLHLKPGCNCSHSQPEITNTSQTIINNYYSETNITNIQMEERTSKNFNNLTKGLCTINSWHIYGKDNAVRIGESSDVLVTREPYVSCDPDECRFYALSQGTTIRGKHSNGTIHDRSQYRALISWPLSSPPTVYNSRVECIGWSSTSCHDGKSRMSICISGPNNNASAVVWYNRRPVAEINTWARNILRTQESECVCHNGVCPVVFTDGSATGPADTRIYYFKEGKILKWESLTGTAKHIEECSCYGERTGITCTCRDNWQGSNRPVIQIDPVAMTHTSQYICSPVLTDNPRPNDPNIGKCNDPYPGNNNNGIKGFSYLDGANTWLGRTISTASRSGYEMLKVPNALTDDRSKPIQGQTIVLNADWSGYSGSFMDYWAEGDCYRACFYVELIRGRPKEDKVWWTSNSIVSMCSSTEFLGQWNWPDGAKIEYFL

SEQ ID NO: 26389 - protein, 465 aa, synthetic construct
  REGION 1..465: note = neuraminidase__InfluenzaA__EPI712925
MNPNQKILCTSATAITIGAIAVLIGIANLGLNIGLHLKPGCNCSHSQPETTNTSQTIINNYYNETNITNIQIEERTSRNFNNLTKGLCTINSWHIYGKDNAVRIGESSDVLVTREPYVSCDPDECRFYALSQGTTIRGKHSNGTIHDRSQYRALISWPLSSPPTVHNSRVECIGWSSTSCHDGKSRMSICISGPNNNASAVVWYNRRPVAEINTWARNILRTQESECVCHNGVCPVVFTDGPATGPADTRIYYFKEGKILKWESLTGTAKHIEECSCYGERTGITCTCRDNWQGSNRPVVQIDPVAMTHTSQYICSPVLTDSPRPNDPNIGKCNDPYPGNNNNGVKGFSYLDGANTWLGRTISTASRSGYEMLKVPNALTDDRSKPIQGQTIVLNADWSGYSGSFMDYWAEGDCYRACFYVELIRGRPKEDKVWWTSNSIVSMCSSTEFLGQWNWPDGAKIEYFL

SEQ ID NO: 26390 - protein, 465 aa, synthetic construct
  REGION 1..465: note = neuraminidase__InfluenzaA__EPI448938
MNPNQKILCTSATAIIIGAIAVLIGMANLGLNIGLHLKPGCNCSHSQPETTNTSQTIINNYYNETNITNIQMEERTSRNFNNLTKGLCTINSWHIYGKDNAVRIGESSDVLVTREPYVSCDPDECRFYALSQGTTIRGKHSNGTIHDRSQYRALISWPLSSPPTVYNSRVECIGWSSTSCHDGKSRMSICISGPNNNASAVVWYNRRPVAEINTWARNILRTQESECVCHNGVCPVVFTDGSATGPADTRIYYFKEGKILKWESLTGTAKHIEECSCYGERTGITCTCRDNWQGSNRPVIQIDPVAMTHTSQYICSPVLTDNPRPNDPNIGKCNDPYPGNNNNGVKGFSYLDGANTWLGRTISTASRSGYEMLKVPNALTDDRSKPIQGQTIVLNADWSGYSGSFMDYWAEGDCYRACFYVELIRGRPKEDKVWWTSNSIVSMCSSTEFLGQWNWPDGAKIEYFL

SEQ ID NO: 26391 - protein, 469 aa, synthetic construct
  REGION 1..469: note = neuraminidase__InfluenzaA__EPI445995
MNPNQKIIALGSASLTIAIICLLIQIAILATTMTLHFMQNEHTNSTRNKVVPCESIIIERNITEIVHLNGTIIEKESCPKAVEYKNWSKPQCQITGFAPFSKDNSIRLSAGGDIWVTREPYVSCSLSKCYQFALGQGTTLNNRHSNGTTHDRSPYRTLLMSELGVPFHLGTKQVCIAWSSSSCHDGRAWLHVCVTGDDKNATASVIYGGMLTDSIGSWSKNILRTQESECVCINGTCTVVMTDGSASGRADTRILFIREGKIVHISPLSGSAQHVEECSCYPRYPEVRCVCRDNWKGSNRPVLYINVADYSIDSSYVCSGLVGDTPRNEDSSSSSNCRDPNNERGGPGVKGWAFDNGDDVWMGRTIKKDSRAGYETFRVVDGWTLANSKSQTNRQVIVDSDNWSGYSGMFSVEGKTCINRCFYVELIRGRPQETRVWWTSNSIIVFCGTSGTYGTGSWPDGADINFMSI

SEQ ID NO: 26392 - protein, 469 aa, synthetic construct
  REGION 1..469: note = neuraminidase__InfluenzaA__EPI470861
MNPNQKIIAIGSVSLTIATICLLMQIAILATTMTLHFKQNECINSSNNQVVPCEPIIIERNITEIVHLNSTTLEKEICPKVADYRNWSKPQCQITGFAPFSKDNSIRLSAGGDIWVTREPYVSCGLGKCYQFALGQGTTLENKHSNGTAHDRTPHRTLLMNELGVPFHLATKQVCIAWSSSSCHDGKAWLHVCVTGDDRNATASIIYDGILVDSIGSWSKNILRTQESECVCINGTCAVVMTDGSASGRADTRILFIREGKIAHISPLSGSAQHVEECSCYPRYPEVRCVCRDNWKGSNRPVLYINMANYSIDSSYVCSGLVGDTPRNDDRSSSSNCRDPNNERGAPGVKGWAFDNGNDIWMGRTIKKDSRSGYETFRVIGGWTTANSKSQINRQVIVDSDNSSGYSGIFSVEGKSCINRCFYVELIRGRPKETRVWWTSNSIIVFCGTSGTYGTGSWPDGANINFMPI

SEQ ID NO: 26393 - protein, 466 aa, synthetic construct
  REGION 1..466: note = neuraminidase__InfluenzaA__EPI498036
MNPNQKIIAIGSVSLIIAIICLLMQIAILTTTMTLHFRQNECSNPSNNQVMPCEPIILERNTVHLNSTIIEREICPKVADYKNWSKPQCQITGFAPFSKDNSIRLSAGGDIWVTREPYVSCSLDKCYQFALGQGTTLKNKHSNGTTHDRTPHRTLLMNELGVPFHLGTKQVCIAWSSSSCYDGKAWLHICVTGDDKNATASIIYDGMLVDSIGSWSKNILRTQESECVCINGTCAVVMTDGSASGKADTRVLFIREGKIINISPLSGSAQHVEECSCYPRYPEVRCVCRDNWKGSNRPILYINMADYSIESSYVCSGLVGDTPRNDDSSSSSNCRDPNNERGAPGVKGWAFDDGNDVWMGRTIKNGSRSGYETFRVVNGWTMANSKSQINRQVIVDSDDWSGYSGIFSVEGKKCINRCFYVELIRGRPQEPRVWWTSNSIIVFCGTSGTYGTGSWPDGANINFMPV

SEQ ID NO: 26394 - protein, 469 aa, synthetic construct
  REGION 1..469: note = neuraminidase__InfluenzaA__EPI470902
MNPNQKIVAIGSASLTIATMCLLMQIALFATTMTLHFKQTGCTNSSDNQAVPCGPIIIERNITEIVHLNSTTLEKETCPKSAGYRNWSKPQCQITGFAPFSKDNSIRLAAAGDIWVTREPYVSCGLGKCYQFALGQGTTLDNKHSNGTTHDRTPHRTLLMNELGVPFHLATKQVCIAWSSSSCHDGKAWLHVCVTGDDKNATASIIYDGILVDSIASWSKNILRTQESECVCINGTCTVVMTDGSASGRADTRILFIREGKIVHISPLSGSAQHVEECSCYPRYPEVRCVCRDNWKGSNRPVLFINMADYSIDSSYVCSGLVGDTPRNDDRSSSSNCRDPNNERGAPGVKGWAFDSGNDIWMGRTIEKDSRSGYETFRVIGGWSTANSKSQINRQVIVDRDNSSGYSGIFSVEGKSCINRCFYVELIRGRPKENRVWWTSNSIIVFCGTSGTYGTGSWPDGANINLMPI

SEQ ID NO: 26395 - protein, 466 aa, synthetic construct
  REGION 1..466: note = neuraminidase__InfluenzaA__EPI838241
MNPNQKITAIGSVSLIIAIICLLMQIAILTTTMTLHFRQNECSNSSNNQVMPCEPIIIERNTVHLNSTTIEREICPKVAEYKNWSKPQCQITGFAPFSKDNSIRLSASGDIWVTREPYVSCSLDKCYQFALGQGTTLKNKHSNGTAHDRTPHRTLLMNELGVPFHLGTKQVCIAWSSSSCYDGKAWLHVCVTGDDKNATASIIYDGMLVDSIGSWSKNILRTQESECVCINGTCAVVMTDGSASGKADTRVLFIREGKIINISPLSGSAQHVEECSCYPRYPEVRCVCRDNWKGSNRPILYINMADYSIESSYVCSGLVGDTPRNDDSSSSSNCRDPNNERGAPGVKGWAFDDGNDVWMGRTIKNGSRSGYETFRVVNGWTMANSKSQINRQVIVESDDWSGYSGIFSVEGKKCINRCFYVELIRGRPQEPRVWWTSNSIIVFCGTSGTYGTGSWPDGANINFMPI

SEQ ID NO: 26396 - protein, 466 aa, synthetic construct; identical to SEQ ID NO: 26395
  REGION 1..466: note = neuraminidase__InfluenzaA__EPI680525

SEQ ID NO: 26397 - protein, 466 aa, synthetic construct; identical to SEQ ID NO: 26003
  REGION 1..466: note = neuraminidase__InfluenzaA__EPI690481

SEQ ID NO: 26398 - protein, 584 aa, synthetic construct
  REGION 1..584: note = hemagglutinin__InfluenzaB__ABL76276
MKAIIVLLMVVTSNADRICTGITSSNSPHVVKTATQGEVNVTGVIPLTTTPTKSHFANLKGTKTRGKLCPTCLNCTDLDVALGRPMCVGITPSAKASILHEVRPVTSGCFPIMHDRTKIRQLPNLLRGYEKIRLSTQNVINAEKAPGGPYRLGTSGSCPNATSRSGFFATMAWAVPRDNNKTATNPLTVEVPHICTKEEDQITVWGFHSDNKTQMKNLYGDSNPQKFTSSANGVTTHYVSQIGGFPDQTEDGGLPQSGRIVVDYMVQKPGKTGTIVYQRGILLPQKVWCASGRSKVIKGSLPLIGEADCLHEKYGGLNKSKPYYTGEHAKAIGNCPIWVKTPLKLANGTKYRPPAKLLKERGFFGAIAGFLEGGWEGMIAGWHGYTSHGAHGVAVAADLKSTQEAINKITKNLNSLSELEVKNLQRLSGAMDELHNEILELDEKVDDLRADTISSQIELAVLLSNEGIINSEDEHLLALERKLKKMLGPSAVDIGNGCFETKHKCNQTCLDRIAAGTFNAGEFSLPTFDSLNITAASLNDDGLDNHTILLYYSTAASSLAVTLMIAIFIVYMISRDNVSCSICL

SEQ ID NO: 26399 - protein, 584 aa, synthetic construct
  REGION 1..584: note = hemagglutinin__InfluenzaB__ABL76287
MKAIIVLLMVVTSNADRICTGITSSNSPHVVKTATQGEVNVTGVIPLTTTPTKSHFANLKGTKTRGKLCPTCLNCTDLDVALGRPMCVGVTPSAKASILHEVRPVTSGCFPIMHDRTKIRQLPNLLRGYEKIRLSTQNVINAEKAPGGPYRLGTSGSCPNATSRSGFFATMAWAVPRDNNKTATNPLTIEVPHICTKEEDQITVWGFHSDNKIQMKNLYGDSNPQKFTSSANGVTTHYVSQIGGFPDQTEDGGLPQSGRIVVDYMVQKPGKTGTIVYQRGILLPQKVWCASGRSKVIKGSLPLIGEADCLHEKYGGLNKSKPYYTGEHAKAIGNCPIWVKTPLKLANGTKYRPPAKLLKERGFFGAIAGFLEGGWEGMIAGWHGYTSHGAHGVAVAADLKSTQEAINKITKNLNSLSELEVKNLQRLSGAMDELHNEILELDEKVDDLRADTISSQIELAVLLSNEGIINSEDEHLLALERKLKKMLGPSAVDIGNGCFETKHKCNQTCLDRIAAGTFNAGEFSLPTFDSLNITAASLNDDGLDNHTILLYYSTAASSLAVTLMIAIFIVYMISRDNVSCSICL

SEQ ID NO: 26400 - protein, 584 aa, synthetic construct
  REGION 1..584: note = hemagglutinin__InfluenzaB__ABL76298
MKAIIVLLMVVTSNADRICTGITSSNSPHVVKTATQGEVNVTGVIPLTTTPTKSHFANLKGTKTRGKLCPTCLNCTDLDVALGRPMCVGVTPSAKASILHEVRPVTSGCFPIMHDRTKIRQLPNLLRGYEKIRLSTQNVINAEKAPGGPYRLGTSGSCPNATSRSGFFATMAWAVPRDNNKTATNPLTVEVPHICTKEEDQITVWGFHSDNKTQMKNLYGDSNPQKFTSSANGVTTHYVSQIGGFPDQTEDGGLPQSGRIVVDYMVQKPGKTGTIVYQRGILLPQKVWCASGRSKVIKGSLPLIGEADCLHEKYGGLNKSKPYYTGEHAKAIGNCPIWVKTPLKLANGTKYRPPAKLLKERGFFGAIAGFLEGGWEGMIAGWHGYTSHGAHGVAVAADLKSTQEAINKITKNLNSLSELEVKNLQRLSGAMDELHNEILELDEKVDDLRADTISSQIELAVLLSNEGIINSEDEHLLALERKLKKMLGPSAVDIGNGCFETKHKCNQTCLDRIAAGTFNAGEFSLPTFDSLNITAASLNDDGLDNHTILLYYSTAASSLAVTLMIAIFIVYMVSRDNVSCSICL

SEQ ID NO: 26401 - protein, 584 aa, synthetic construct
  REGION 1..584: note = hemagglutinin__InfluenzaB__ABL76309
MKAIIVLLMVVTSNADRICTGITSSNSPHVVKTATQGEVNVTGVIPLTTTPTKSHFANLKGTKTRGKLCPTCLNCTDLDVALGRPMCVGVTPSAKASILHEVRPVTSGCFPIMHDRTKIRQLPNLLRGYEKIRLSTQNVINAEKAPGGPYRLGTSGSCPNATSRSGFFATMAWAVPRDNNKTATNPLTVEVPHICTKEEDQITVWGFHSDNKTQMKNLYGDSNPQKFTSSANGVTTHYVSQIGGFPDQTEDGGLPQSGRIVVDYMVQRPGKTGTIVYQRGILLPQKVWCASGRSKVIKGSLPLIGEADCLHEKYGGLNKSKPYYTGEHAKAIGNCPIWVKTPLKLANGTKYRPPAKLLKERGFFGAIAGFLEGGWEGMIAGWHGYTSHGAHGVAVAADLKSTQEAINKITKNLNSLSELEVKNLQRLSGAMDELHNEILELDEKVDDLRADTISSQIELAVLLSNEGIINSEDEHLLALERKLKKMLGPSAVDIGNGCFETKHKCNQTCLDRIAAGTFNAEEFSLPTFDSLNITAASLNDDGLDNHTILLYYSTAASSLAVTLMIAIFIVYMISRDNVSCSICL

SEQ ID NO: 26402 - protein, 584 aa, synthetic construct
  REGION 1..584: note = hemagglutinin__InfluenzaB__ABL76331
MKAIIVLLMVVTSNADRICTGITSSNSPHVVKTATQGEVNVTGVIPLTTTPTKSHFANLKGTKTRGKLCPTCLNCTDLDVALGRPMCVGITPSAKASILHEVRPVTSGCFPIMHDRTKIRQLPNLLRGYEKIRLSTQNVINAEKAPGGPYRLGTSGSCPNATSRSGFFATMAWAVPRDNNKTATNPLTIEVPHICTKEEDQITVWGFHSDNKTQMKNLYGDSNPQKFTSSANGVTTHYVSQIGGFPDQTEDGGLPQSGRIVVDYMVQKPGKTGTIVYQRGILLPQKVWCASGRSKVIKGSLPLIGEADCLHEKYGGLNKSKPYYTGEHAKAIGNCPIWVKTPLKLANGTKYRPPAKLLKERGFFGAIAGFLEGGWEGMIAGWHGYTSHGAHGVAVAADLKSTQEAINKITKNLNSLSELEVKNLQRLSGAMDELHNEILELDEKVDDLRADTISSQIELAVLLSNEGIINSEDEHLLALERKLKKMLGPSAVDIGNGCFETKHKCNQTCLDRIAAGTFNAGEFSLPTFDSLNITAASLNDDGLDNHTILLYYSTAASSLAVTLMIAIFIVYMISRDNVSCSICL

SEQ ID NO: 26403 - protein, 584 aa, synthetic construct
  REGION 1..584: note = hemagglutinin__InfluenzaB__ABL76342
MKAIIVLLMVVTSNADRICTGITSSNSPHVVKTATQGEVNVTGVIPLTTTPTKSHFANLKGTKTRGKLCPTCLNCTDLDVALGRPMCVGVTPSAKASILHEVRPVTSGCFPIMHDRTKIRQLPNLLRGYEKIRLSTQNVINAEKAPGGPYRLGTSGSCPNATSRSGFFATMAWAVPRDNNKTATNPLTVEVPHICTKEEDQITVWGFHSDNKTQMKNLYGDSNPQKFTSSANGVTTHYVSQIGDFPDQTEDGGLPQSGRIVVDYMVQKPGKTGTIVYQRGILLPQKVWCASGRSKVIRGSLPLIGEADCLHEKYGGLNKSKPYYTGEHAKAIGNCPIWVKTPLKLANGTKYRPPAKLLKERGFFGAIAGFLEGGWEGMIAGWHGYTSHGAHGVAVAADLKSTQEAINKITKNLNSLSELEVKNLQRLSGAMDELHNEILELDEKVDDLRADTISSQIELAVLLSNEGIINSEDEHLLALERKLKKMLGPSAVDIGNGCFETKHKCNQTCLDRIAAGTFNAGDFSLPTFDSLNITAASLNDDGLDNHTILLYYSTAASSLAVTLMIAIFIVYMISRDNVSCSICL

SEQ ID NO: 26404 - protein, 584 aa, synthetic construct
  REGION 1..584: note = hemagglutinin__InfluenzaB__ABL76353
MKAIIVLLMVVTSNADRICTGITSSNSPHVVKTATQGEVNVTGVIPLTTTPTKSHFANLKGTKTRGKLCPTCLNCTDLDVALGRPMCVGVTPSAKASILHEVRPVTSGCFPIMHDRTKIRQLPNLLRGYEKIRLSTQNVINAEKAPGGPYRLGTSGSCPNATSRSGFFATMAWAVPRDNNKTATNPLTVEVPHICTKEEDQITVWGFHSDNKTQMKNLYGDSNPQKFTSSANGVTTHYVSQIGGFPDQTEDGGLPQSGRIVVDYMVQKPGKTGTIVYQRGILLPQKVWCASGRSKVIRGSLPLIGEADCLHEKYGGLNKSKPYYTGEHAKAIGNCPIWVKTPLKLANGTKYRPPAKLLKERGFFGAIAGFLEGGWEGMIAGWHGYTSHGAHGVAVAADLKSTQEAINKITKNLNSLSELEVKNLQRLSGAMDELHNEILELDEKVDDLRADTISSQIELAVLLSNEGIINSEDEHLLALERKLKKMLGPSAVDIGNGCFETKHKCNQTCLDRIAAGTFNAGDFSLPTFDSLNITAASLNDDGLDNHTILLYYSTAASSLAVTLMIAIFIVYMISRDNVSCSICL

SEQ ID NO: 26405 - protein, 584 aa, synthetic construct
  REGION 1..584: note = hemagglutinin__InfluenzaB__ABL76375
MKAIIVLLMVVTSNADRICTGITSSNSPHVVKTATQGEVNVTGAIPLTTTPTKSHFANLKGTKTRGKLCPTCLNCTDLDVALGRPMCVGITPSAKASILHEVRPVTSGCFPIMHDRTKIRQLPNLLRGYEKIRLSTQNVINAEKAPGGPYRLGTSGSCPNATSKSGFFATMAWAVPRDNNKTATNPLTVEVPHICTKEEDQITVWGFHSDNKTQMKNLYGDSNPQKFTSSANGITTHYVSQIGGFPDQTEDGGLPQSGRIVVDYMVQKPGKTGTIVYQRGILLPQKVWCASGRSKVIKGSLPLIGEADCLHEKYGGLNKSKPYYTGEHAKAIGNCPIWVKTPLKLANGTKYRPPAKLLKERGFFGAIAGFLEGGWEGMIAGWHGYTSHGAHGVAVAADLKSTQEAINKITKNLNSLSELEVKNLQRLSGAMDELHNEILELDEKVDDLRADTISSQIELAVLLSNEGIINSEDEHLLALERKLKKMLGPSAVDIGNGCFETKHKCNQTCLDRIAAGTFNAGEFSLPTFDSLNITAASLNDDGLDNHTILLYYSTAASSLAVTLMIAIFIVYMISRDNVSCSICL

SEQ ID NO: 26406 - protein, 584 aa, synthetic construct; identical to SEQ ID NO: 26405
  REGION 1..584: note = hemagglutinin__InfluenzaB__ABL76386

SEQ ID NO: 26407 - protein, 584 aa, synthetic construct
  REGION 1..584: note = hemagglutinin__InfluenzaB__ABL76408
MKAIIVLLMVVTSNADRICTGITSSNSPHVVKTATQGEVNVTGAIPLTTTPTKSHFANLKGTKTRGKLCPTCFNCTDLDVALGRPMCVGITPSAKASILHEVRPVTSGCFPIMHDRTKIRQLPNLLRGYEKIRLSTQNVIDAEKAPGGPYRLGTSGSCPNATSKSGFFATMAWAVPRGNNKTATNPLTVEVPHICTKEEDQITVWGFHSDNKTQMKNLYGDSNPQKFTSSANGITTHYVSQIGGFPDQTEDGGLPQSGRIVVDYMVQKPGKTGTIVYQRGILLPQKVWCASGRSKVIKGSLPLIGEADCLHEKYGGLNKSKPYYTGEHAKAIGNCPIWVKTPLKLANGTKYRPPAKLLKERGFFGAIAGFLEGGWEGMIAGWHGYTSHGAHGVAVAADLKSTQEAINKITKNLNSLSELEVKNLQRLSGAMDELHNEILELDEKVDDLRADTISSQIELAVLLSNEGIINSEDEHLLALERKLKKMLGPSAVDIGNGCFETKHKCNQTCLDRIAAGTFNAGEFSLPTFDSLNITAASLNDDGLDNHTILLYYSTAASSLAVTLMIAIFIVYMISRDNVSCSICL

SEQ ID NO: 26408 - protein, 584 aa, synthetic construct
  REGION 1..584: note = hemagglutinin__InfluenzaB__ABL76419
MKAIIVLLMVVTSNADRICTGITSSNSPHVVKTATQGEVNVTGAIPLTTTPTKSHFANLKGTKTRGKLCPTCFNCTDLDVALGRPMCVGITPSAKASILHEIRPVTSGCFPIMHDRTKIRQLPNLLRGYEKIRLSTQNVIDAEKAPGGPYRLGTSGSCPNATSKSGFFATMAWAVPRGNNKTATNPLTVEVPHICTKEEDQITVWGFHSDNKTQMKNLYGDSNPQKFTSSANGITTHYVSQIGGFPDQTEDGGLPQSGRIVVDYMVQKPGKTGTIVYQRGILLPQKVWCASGRSKVIKGSLPLIGEADCLHEKYGGLNKSKPYYTGEHAKAIGNCPIWVKTPLKLANGTKYRPPAKLLKERGFFGAIAGFLEGGWEGMIAGWHGYTSHGAHGVAVAADLKSTQEAINKITKNLNSLSELEVKNLQRLSGAMDELHNEILELDEKVDDLRADTISSQIELAVLLSNEGIINSEDEHLLALERKLKKMLGPSAVDIGNGCFETKHKCNQTCLDRIAAGTFNAGEFSLPTFDSLNITAASLNDDGLDNHTILLYYSTAASSLAVTLMIAIFIVYMISRDNVSCSICL

SEQ ID NO: 26409 - protein, 585 aa, synthetic construct
  REGION 1..585: note = hemagglutinin__InfluenzaB__ABL76441
MKAIIVLLMVVTSNADRICTGITSSNSPHVVKTATQGEVNVTGVIPLTTTPTKSHFANLKGTKTRGKLCPKCLNCTDLDVALGRPKCTGNIPSAKVSILHEVRPVTSGCFPIMHDRTKIRQLPNLLRGYEHIRLSTHNVINAEKAPGGPYKIGTSGSCPNVTNGNGFFATMAWAVPKNDNNKTATNSLTIEVPYICTEGEDQITVWGFHSDNETQMAKLYGDSKPQKFTSSANGVTTHYVSQIGGFPNQTEDGGLPQSGRIVVDYMVQKSGKPGTITYQRGILLPQKVWCASGRSKVIKGSLPLIGEADCLHEKYGGLNKSKPYYTGEHAKAIGNCPIWVKTPLKLANGTKYRPPAKLLKERGFFGAIAGFLEGGWEGMIAGWHGYTSHGAHGVAVAADLKSTQEAINKITKNLNSLSELEVKNLQRLSGAMDELHNEILELDEKVDDLRADTISSQIELAVLLSNEGIINSEDEHLLALERKLKKMLGPSAVEIGNGCFETKHKCNQTCLDRIAAGTFDAGEFSLPTFDSLNITAASLNDDELDNHTILLYYSTAASSLAVTLMIAIFVVYMVSRDNVSCSICL

SEQ ID NO: 26410 - protein, 585 aa, synthetic construct
  REGION 1..585: note = hemagglutinin__InfluenzaB__ABL76463
MKAIIVLLMVVTSNADRICTGITSSNSPHVVKTATQGEVNVTGVIPLTTTPTKSHFANLKGTKTRGKLCPKCLNCTDLDVALGRPKCTGNIPSAKVSILHEVRPVTSGCFPIMHDRTKIRQLPNLLRGYEHIRLSTHNVINAEKAPGGPYKIGTSGSCPNVTNGNGFFATMAWAVPKNDNNKTATNSLTIEVPYICTEGEDQITVWGFHSDNETQMAKLYGDSKPQKFTSSANGVTTHYVSQIGGFPNQTEDGGLPQSGRIVVDYMVQKSGKTGTITYQRGILLPQKVWCASGRSKVIKGSLPLIGEADCLHEKYGGLNKSKPYYTGEHAKAIGNCPIWVKTPLKLANGTKYRPPAKLLKERGFFGAIAGFLEGGWEGMIAGWHGYTSHGAHGVAVAADLKSTQEAINKITKNLNSLSELEVKNLQRLSGAMDELHNEILELDEKVNDLRADTISSQIELAVLLSNEGIINSEDEHLLALERKLKKMLGPSAVEIGNGCFETKHKCNQTCLDRIAAGTFDAGEFSLPTFDSLNITAASLNDDGLDNHTILLYYSTAASSLAVTLMIAIFVVYMVSRDNVSCSICL

SEQ ID NO: 26411 - protein, 585 aa, synthetic construct
  REGION 1..585: note = hemagglutinin__InfluenzaB__ABL76474
MKAIIVLLMVVTSNADRICTGITSSNSPHVVKTATQGEVNVTGVIPLTTTPTKSHFANLKGTKTRGKLCPKCLNCTDLDVALGRPKCTGNIPSAKVSILHEVRPVTSGCFPIMHDRTKIRQLPNLLRGYEHIRLSTHNVINAEKAPGGPYKIGTSGSCPNVTNGNGFFATMAWAVPKNDNNKTATNSLTIEVPYICTEGEDQITVWGFHSDNETQMAKLYGDSKPQKFTSSANGVTTHYVSQIGGFPNQTEDGGLPQSGRIVVDYMVQKSGKTGTITYQRGILLPQKVWCASGRSKVIKGSLPLIGEADCLHEKYGGLNKSKPYYTGEHAKAIGNCPIWVKTPLKLANGTKYRPPAKLLKERGFFGAIAGFLEGGWEGMIAGWHGYTSHGAHGVAVAADLKSTQEAINKITKNLNSLSELEVKNLQRLSGAMDELHNEILELDEKVDDLRADTISSQIELAVLLSNEGIINSEDEHLLALERKLKKMLGPSAVEIGNGCFETKHKCNQTCLDRIAAGTFDAGEFSLPTFDSLNITAASLNDDELDNHTILLYYSTAASSLAVTLMIAIFVVYMVSRDNVSCSICL

SEQ ID NO: 26412 - protein, 585 aa, synthetic construct
  REGION 1..585: note = hemagglutinin__InfluenzaB__ABL76485
MKAIIVLLMVVTSNADRICTGITSSNSPHVVKTATQGEVNVTGVIPLTTTPTKSHFANLKGTKTRGKLCPKCLNCTDLDVALGRPKCTGNIPSAEVSILHEVRPVTSGCFPIMHDRTKIRQLPNLLRGYEHIRLSTHNVINAEKAPGGPYKIGTSGSCPNVTNGNGFFVTMAWAVPKNDNNKTATNSLTIEVPYICTEGEDQITVWGFHSDNETQMAKLYGDSKPQKFTSSANGVTTHYVSQIGGFPNQTEDGGLPQSGRIVVDYMVQKSGKTGTITYQRGILLPQKVWCASGRSKVIKGSLPLIGEADCLHEKYGGLNKSKPYYTGEHAKAIGNCPIWVKTPLKLANGTKYRPPAKLLKERGFFGAIAGFLEGGWEGMIAGWHGYTSHGAHGVAVAADLKSTQEAINKITKNLNSLSELEVKNLQRLSGAMDELHNEILELDEKVDDLRADTISSQIELAVLLSNEGIINSENEHLLALERKLKKMLGPSAVEIGNGCFETKHKCNQTCLDRIAAGTFDAGEFSLPTFDSLNITAASLNDDGLDNHTILLYYSTAASSLAVTLMIAIFVVYMVSRDNVSCSICL

SEQ ID NO: 26413 - protein, 585 aa, synthetic construct
  REGION 1..585: note = hemagglutinin__InfluenzaB__ABL76507
MKAIIVLLMVVTSNADRICTGITSSNSPHVVKTATQGEVNVTGVIPLTTTPTKSHFANLKGTKTRGKLCPKCLNCTDLDVALGRPKCTGNIPSAEVSILHEVRPVTSGCFPIMHDRTKIRQLPNLLRGYEHIRLSTHNVINAEKAPGGPYKIGTSGSCPNVTNGNGFFATMAWAVPKNDNNKTATNSLTIEVPYICTEGEDQITVWGFHSDNEIQMAKLYGDSKPQKFTSSANGVTTHYVSQIGGFPNQTEDGGLPQSGRIVVDYMVQKSGKTGTITYQRGILLPQKVWCASGRSKVIKGSLPLIGEADCLHEKYGGLNKSKPYYTGEHAKAIGNCPIWVKTPLKLANGTKYRPPAKLLKERGFFGAIAGFLEGGWEGMIAGWHGYTSHGAHGVAVAADLKSTQEAINKITKNLNSLSELEVKNLQRLSGAMDELHNEILELDEKVDDLRADTISSQIELAVLLSNEGIINSEDEHLLALERKLKKMLGPSAVEIGNGCFETKHKCNQTCLDRIAAGTFDAGEFSLPTFDSLNITAASLNDDGLDNHTILLYYSTAASSLAVTLMIAIFVVYMVSRDNVSCSICL

SEQ ID NO: 26414 - protein, 585 aa, synthetic construct
  REGION 1..585: note = hemagglutinin__InfluenzaB__ABL76518
MKAIIVLLMVVTSNADRICTGITSSNSPHVVKTATQGEVNVTGVIPLTTTPTKSHFANLKGTKTRGKLCPKCLNCTDLDVALGRPKCTGNIPSAEVSILHEVRPVTSGCFPIMHDRTKIRQLPNLLRGYEHIRLSTHNVINAEKAPGGPYKIGTSGSCPNVTNGNGFFATMAWAVPKNDNNKTATNSLTIEVPYICTEGEDQITVWGFHSDNENQMAKLYGDSKPQKFTSSANGVTTHYVSQIGGFPNQTEDGGLPQSGRIVVDYMVQKSGKTGTITYQRGILLPQKVWCASGRSKVIKGSLPLIGEADCLHEKYGGLNKSKPYYTGEHAKAIGNCPIWVKTPLKLANGTKYRPPAKLLKERGFFGAIAGFLEGGWEGMIAGWHGYTSHGAHGVAVAADLKSTQEAINKITKNLNSLSELEVKNLQRLSGAMDELHNEILELDEKVDDLRADTISSQIELAVLLSNEGIINSEDEHLLALERKLKKMLGPSAVEIGNGCFETKHKCNQTCLDRIAAGTFDAGEFSLPTFDSLNITAASLNDDGLDNHTILLYYSTAASSLAVTLMIAIFVVYMVSRDNVSCSICL

SEQ ID NO: 26415 - protein, 585 aa, synthetic construct
  REGION 1..585: note = hemagglutinin__InfluenzaB__ABL76529
MKAIIVLLMVVTSNADRICTGITSSNSPHVVKTATQGEVNVTGVIPLTTTPTKSHFANLKGTKTRGKLCPKCLNCTDLDVALGRPKCTGNIPSAEVSILHEVRPVTSGCFPIMHDRTKIRQLPNLLRGYEHIRLSTHNVINAEKAPGGPYKIGTSGSCPNVTNGNGFFVTMAWAVPKNDNNKTATNSLTIEVPYICTEGEDQITVWGFHSDNETQMAKLYGDSKPQKFTSSANGVTTHYVSQIGGFPNQTEDGGLPQSGRIVVDYMVQKSGKTGTITYQRGILLPQKVWCASGRSKVIKGSLPLIGEADCLHEKYGGLNKSKPYYTGEHAKAIGNCPIWVKTPLKLANGTKYRPPAKLLKERGFFGAIAGFLEGGWEGMIAGWHGYTSHGAHGVAVAADLKSTQEAINKITKNLNSLSELEVKNLQRLSGAMDELHNEILELDEKVDDLRADTISSQIELAVLLSNEGIINSEDEHLLALERKLKKMLGPSAVEIGNGCFETKHKCNQTCLDRIAAGTFDAGEFSLPTFDSLNITAASLNDDGLDNHTILLYYSTAASSLAVTLMIAIFVVYMVSRDNVSCSICL

SEQ ID NO: 26416 - protein, 585 aa, synthetic construct
  REGION 1..585: note = hemagglutinin__InfluenzaB__ABL76540
MKAIIVLLMVVTSNADRICTGITSSNSPHVVKTATQGEVNVTGVIPLTTTPTKSHFANLKGTKTRGKLCPKCLNCTDLDVALGRPKCTGNIPSAEVSILHEVKPVTSGCFPIMHDRTKIRQLPNLLRGYEHIRLSTHNVINAEKAPGGPYKIGTSGSCPNVTNGNGFFATMAWAVPKNDNNKTATNSLTIEVPYICTEGEDQITVWGFHSDNETQMAKLYGDSKPQKFTSSANGVTTHYVSQIGGFPNQTEDGGLPQSGRIVVDYMVQKSGKTGTITYQRGILLPQKVWCASGRSKVIKGSLPLIGEADCLHEKYGGLNKSKPYYTGEHAKAIGNCPIWVKTPLKLANGTKYRPPAKLLKERGFFGAIAGFLEGGWEGMIAGWHGYTSHGAHGVAVAADLKSTQEAINKITKNLNSLSELEVKNLQRLSGAMDELHNEILELDEKVDDLRADTISSQIELAVLLSNEGIINSEDEHLLALERKLKKMLGPSAVEIGNGCFETKHKCNQTCLDRIAAGTFDAGEFSLPTFDSLNITAASLNDDGLDNHTILLYYSTAASSLAVTLMIAIFVVYMVSRDNVSCSICL

SEQ ID NO: 26417 - protein, 585 aa, synthetic construct
  REGION 1..585: note = hemagglutinin__InfluenzaB__ABL76551
MKAIIVLLMVVTSNADRICTGITSSNSPHVVKTATQGEVNVTGVIPLTTTPTKSHFANLKGTKTRGKLCPKCLNCTDLDVALGRPKCTGNIPSAEVSILHEVRPVTSGCFPIMHDRTKIRQLPNLLRGYEHIRLSTHNVINAEKAPGGPYKIGTSGSCPNVTNGNGFFATMAWAVPKNDNNKTATNSLTIEVPYICTEGEDQITVWGFHSDNETQMAKLYGDSKPQKFTSSANGVTTHYVSQIGGFPNQTEDGGLPQSGRIVVDYMVQKSGKTGTITYQRGILLPQKVWCASGRSKVIKGSLPLIGEADCLHEKYGGLNKSKPYYTGEHAKAIGNCPIWVKTPLKLANGTKYRPPAKLLKERGFFGAIAGFLEGGWEGMIAGWHGYTSHGAHGVAVAADLKSTQEAINKITKNLNSLSELEVKNLQRLSGAMDELHNEILELDEKVDDLRADTISSQIELAVLLSNEGIINSEDEHLLALERKLKKMLGPSAVEIGNGCFETKHKCNQTCLDRIAAGTFDAGEFSLPTFDSLNITAASLNDDGLDNHTILLYYSTAASSLAVTLMMAIFVVYMVSRDNVSCSICL

SEQ ID NO: 26418 - protein, 585 aa, synthetic construct
  REGION 1..585: note = hemagglutinin__InfluenzaB__ABL76562
MKAIIVLLMVVTSNADRICTRITSSNSPHVVKTATQGEVNVTGVIPLTTTPTKSHFANLKGTKTRGKLCPKCLNCTDLDVALGRPKCTGNIPSAEVSILHEVRPVTSGCFPIMHDRTKIRQLPNLLRGYEHIRLSTHNVINAEKAPGGPYKIGTSGSCPNVTNGNGFFATMAWAVPKNDNNKTATNSLTIEVPYICTEGEDQITVWGFHSDNETQMAKLYGDSKPQKFTSSANGVTTHYVSQIGGFPNQTEDGGLPQSGRIVVDYMVQKSGKTGTITYQRGILLPQKVWCASGRSKVIKGSLPLIGEADCLHEKYGGLNKSKPYYTGEHAKAIGNCPIWVKTPLKLANGTKYRPPAKLLKERGFFGAIAGFLEGGWEGMIAGWHGYTSHGAHGVAVAADLKSTQEAINKITKNLNSLSELEVKNLQRLSGAMDELHNEILELDEKVDDLRADTISSQIELAVLLSNEGIINSEDEHLLALERKLKKMLGPSAVEIGNGCFETKHKCNQTCLDRIAAGTFDVGEFSLPTFDSLNITAASLNDDGLDNHTILLYYSTAASSLAVTLMIAIFVVYMVSRDNVSCSICL

SEQ ID NO: 26419 - protein, 585 aa, synthetic construct
  REGION 1..585: note = hemagglutinin__InfluenzaB__ABL76573
MKAIIVLLMVVTSNADRICTGITSSNSPHVVKTATQGEVNVTGVIPLTTTPTKSHFANLKGTKTRGKLCPKCLNCTDLDVALGRPKCTGNIPSAEVSILHEVRPVTSGCFPIMHDRTKIRQLPNLLRGYEHIRLSTHNVINAEKAPGGPYKIGTSGSCPNVTNGNGFFATMAWAVPKNDNNKTATNSLTIEVPYICTEGEDQITVWGFHSDNETQMAKLYGDSKPQKFTSSANGVTTHYVSQIGGFPNQTEDGGLPQSGRIVVDYMVQKSGKTGTITYQRGILLPQKVWCASGRSKVIKGSLPLIGEADCLHEKYGGLNKSKPYYTGEHAKAIGNCPIWVKTPLKLANGTKYRPPAKLLKERGFFGAIAGFLEGGWEGMIAGWHGYTSHGAHGVAVAADLKSTQEAINKITKNLNSLSELEVKNLQRLSGAMDELHNEILELDEKVDDLRADTISSQIELAVLLSNEGIINSEDEHLLALERKLKKMLGPSAVEIGNGCFETKHKCNQTCLDRIAAGTFDAGEFSLPTFDSLNITAASLNDDGLDNHTILLYYSTAASSLAVTLMIAIFVVYMVSRDNVSCSICL

SEQ ID NO: 26420 - protein, 585 aa, synthetic construct; identical to SEQ ID NO: 26419
  REGION 1..585: note = hemagglutinin__InfluenzaB__ABL76584

SEQ ID NO: 26421 - protein, 585 aa, synthetic construct; identical to SEQ ID NO: 26419
  REGION 1..585: note = hemagglutinin__InfluenzaB__ABL76595

SEQ ID NO: 26422 - protein, 585 aa, synthetic construct; identical to SEQ ID NO: 26419
  REGION 1..585: note = hemagglutinin__InfluenzaB__ABL76606

SEQ ID NO: 26423 - protein, 585 aa, synthetic construct
  REGION 1..585: note = hemagglutinin__InfluenzaB__ABL76617
MKAIIVLLMVVTSNADRICTGITSSNSPHVVKTATQGEVNVTGVIPLTTTPTKSHFANLKGTETRGKLCPKCLNCTDLDVALGRPKCTGNIPSAKVSILHEVRPVTSGCFPIMHDRTKIRQLPNLLRGYEHIRLSTHNVINAEKAPGGPYKIGTSGSCPNVTNGNGFFATMAWAVPKNDNNKTATNSLTIEVPYICTEGEDQITVWGFHSDNETQMAKLYGDSKPQKFTSSANGVTTHYVSQIGGFPNQTEDGGLPQSGRIVVDYMVQKSGKTGTITYQRGILLPQKVWCASGRSKVIKGSLPLIGEADCLHEKYGGLNKSKPYYTGEHAKAIGNCPIWVKTPLKLANGTKYRPPAKLLKERGFFGAIAGFLEGGWEGMIAGWHGYTSHGAHGVAVAADLKSTQEAINKITKNLNSLSELEVKNLQRLSGAMDELHNEILELDEKVDDLRADTISSQIELAVLLSNEGIINSEDEHLLALERKLKKMLGPSAVEIGNGCFETKHKCNQTCLDRIAAGTFDAGEFSLPTFDSLNITAASLNDDGLDNHTILLYYSTAASSLAVTLMIAIFVVYMVSRDNVSCSICL

SEQ ID NO: 26424 - protein, 584 aa, synthetic construct
  REGION 1..584: note = hemagglutinin__InfluenzaB__ABL76628
MKAIIVLLMVVTSNADRICTGITSSNSPHVVKTATQGEVNVTGVIPLTTTPTKSYFANLKGTRTRGKLCPDCLNCTDLDVALGRPMCVGTTPSAKASILHEVRPVTSGCFPIMHDRTKIRQLANLLRGYENIRLSTQNVIDAEKAPGGPYRLGTSGSCPNATSKSGFFATMAWAVPKDNNKNATNPLTVEVPHICTEGEDQITVWGFHSDNKTQMKNLYGDSNPQKFTSSANGVTTHYVSQIGGFPDQTEDGGLPQSGRIVVDYMMQKPGKTGTIVYQRGVLLPQKVWCASGRSKVIKGSLPLIGEADCLHEKYGGLNKSKPYYTGEHAKAIGNCPIWVKTPLKLANGTKYRPPAKLLKERGFFGAIAGFLEGGWEGMIAGWHGYTSHGAHGVAVAADLKSTQEAINKITKNLNSLSELEVKNLQRLSGAMDELHNEILELDEKVDDLRADTISSQIELAVLLSNEGIINSEDEHLLALERKLKKMLGPSAVDIGNGCFETKHKCNQTCLDRIAAGTFNAGEFSLPTFDSLNITAASLNDDGLDNHTILLYYSTAASSLAVTLMLAIFIVYMVSRDNVSCSICL

SEQ ID NO: 26425 - protein, 584 aa, synthetic construct
  REGION 1..584: note = hemagglutinin__InfluenzaB__ABL76639
MKAIIVLLMVVTSNADRICTGITSSNSPHVVKTATQGEVNVTGVIPLTTTPTKSYFANLKGTRTRGKLCPDCLNCTDLDVALGRPMCVGTTPSAKASILHEVRPVTSGCFPIMHDRTKIRQLANLLRGYENIRLSTQNVIDAEKAPGGPYRLGTSGSCPNATSKSGFFATMAWAVPKDNNKNATNPLTVEVPYICTEGEDQITVWGFHSDNKTQMKNLYGDSNPQKFTSSANGVTTHYVSQIGGFPDQTEDGGLPQSGRIVVDYMMQKPGKAGTIVYQRGVLLPQKVWCASGRSKVIKGSLPLIGEADCLHEKYGGLNKSKPYYTGEHAKAIGNCPIWVKTPLKLANGTKYRPPAKLLKERGFFGAIAGFLEGGWEGMIAGWHGYTSHGAHGVAVAADLKSTQEAINKITKNLNSLSELEVKNLQRLSGAMDELHNEILELDEKVDDLRADTISSQIELAVLLSNEGIINSEDEHLLALERKLKKMLGPSAVDIGNGCFETKHKCNQTCLDRIAAGTFNAGEFSLPTFDSLNITAASLNDDGLDNHTILLYYSTAASSLAVTLMLAIFIVYMVSRDNVSCSICL

SEQ ID NO: 26426 - protein, 584 aa, synthetic construct
  REGION 1..584: note = hemagglutinin__InfluenzaB__ABL76683
MKAIIVLLMVVTSNADRICTGITSSNSPHVVKTATQGEVNVTGVIPLTTTPTKSYFANLKGTRTRGKLCPDCLNCTDLDVALGRPMCVGTTPSAKASILHEVRPVTSGCFPIMHDRTKIRQLANLLRGYENIRLSTQNVIDAEKAPGGPYRLGTSGSCPNATSKSGFFATMAWAVPKDNNKNATNPLTVEVPYICTEGEDQITVWGFHSDNKTQMKNLYGDSNPQKFTSSANGVTTHYVSQIGGFPDQTEDGGLPQSGRIVVDYMMQKPGKTGTIVYQRGVLLPQKVWCASGRSKVIKGSLPLIGEADCLHEKYGGLNKSKPYYTGEHAKAIGNCPIWVKTPLKLANGTKYRPPAKLLKERGFFGAIAGFLEGGWEGMIAGWHGYTSHGAHGVAVAADLKSTQEAINKITKNLNSLSELEVKNLQRLSGAMDELHNEILELDEKVDDLRADTISSQIELAVLLSNEGIINSEDEHLLALERKLKKMLGPSAVDIGNGCFETKHKCNQTCLDRIAAGTFNAGEFSLPTFDSLNITAASLNDDGLDNHTILLYYSTAASSLAVTLMLAIFIVYMVSRDNVSCSICL

SEQ ID NO: 26427 - protein, 583 aa, synthetic construct
  REGION 1..583: note = hemagglutinin__InfluenzaB__ABL76694
MKAIIVLLMVVTSNADRICTGITSSNSPHVVKTATQGEVNVTGVIPLTTTPTKSHFANLKGTKTRGKLCPNCLNCTDLDVALGRPMCVGTTPSAKASILHEVRPVTSGCFPIMHDRTKIRQLPNLLRGYENIRLSTQNVINAERAPGGPYRLGTSGSCPNVTSRDGFFATMAWAVPRDNKTATNPLTVEVPYICTKGEDQITVWGFHSDNKTQMKNLYGDSNPQKFTSSANGVTTHYVSQIGGFPNQTEDGGLPQSGRIVVDYMVQKPGKTGTIVYQRGVLLPQKVWCASGRSKVIKGSLPLIGEADCLHEKYGGLNKSKPYYTGEHAKAIGNCPIWVKTPLKLANGTKYRPPAKLLKERGFFGAIAGFLEGGWEGMIAGWHGYTSHGAHGVAVAADLKSTQEAINKITKNLNSLSELEVKNLQRLSGAMDELHNEILELDEKVDDLRADTISSQIELAVLLSNEGIINSEDEHLLALERKLKKMLGPSAVDIGNGCFETKHKCNQTCLDRIAAGTFNAGEFSLPTFDSLNITAASLNDDGLDNHTILLYYSTAASSLAVTLMIAIFIVYMVSRDNVSCSICL

SEQ ID NO: 26428 - protein, 585 aa, synthetic construct
  REGION 1..585: note = hemagglutinin__InfluenzaB__ABL76716
MKAIIVLLMVVTSNADRICTGITSSNSPHVVKTATQGEVNVTGVIPLTTTPTKSHFANLKGTETRGKLCPKCLNCTDLDVALGRPKCTGNIPSARVSILHEVRPVTSGCFPIMHDRTKIRQLPNLLRGYEHIRLSTHNVINAENAPGGPYKIGTSGSCPNVTNGNGFFATMAWAVPKNDNNKTATNSLTIEVPYICTEGEDQITVWGFHSDNETQMAKLYGDSKPQKFTSSANGVTTHYVSQIGGFPNQTEDGGLPQSGRIVVDYMVQKSGKTGTITYQRGILLPQKVWCASGRSKVIKGSLPLIGEADCLHEKYGGLNKSKPYYTGEHAKAIGNCPIWVKTPLKLVNGTKYRPPAKLLKERGFFGAIAGFLEGGWEGMIAGWHGYTSHGAHGVAVAADLKSTQEAINKITKNLNSLSELEVKNLQRLSGAMDELHNEILELDEKVDDLRADTISSQIELAVLLSNEGIINSEDEHLLALERKLKKMLGPSAVEIGNGCFETKHKCNQTCLDRIAAGTFDAGEFSLPTFDSLNITAASLNDDGLDNHTILLYYSTAASSLAVTLMIAIFVVYMVSRDNVSCSICL

SEQ ID NO: 26429 - protein, 584 aa, synthetic construct
  REGION 1..584: note = hemagglutinin__InfluenzaB__ABL76760
MKAIIVLLMVVTSNADRICTGITSSNSPHVVKTATQGEVNVTGVIPLTTTPTKSHFANLKGTKTRGKLCPTCLNCTDLDVALGRPMCVGVTPSAKASILHEVRPVTSGCFPIMHDRTKIRQLPNLLRGYEKIRLSTQNVINAEKAPGGPYRLGTSGSCPNATSRSGFFATMAWAVPRDNNKTATNPLTIEVPHICTKEEDQITVWGFHSDNKTQMKNLYGDSNPQKFTSSANGVTTHYVSQIGGFPDQTEDGGLPQSGRIVVDYMVQKPGKTGTIVYQRGILLPQKVWCASGRSKVIKGSLPLIGEADCLHEKYGGLNKSKPYYTGEHAKAIGNCPIWVKTPLKLANGTKYRPPAKLLKERGFFGAIAGFLEGGWEGMIAGWHGYTSHGAHGVAVAADLKSTQEAINKITKNLNSLSELEVKNLQRLSGAMDELHNEILELDEKVDDLRADTISSQIELAVLLSNEGIINSEDEHLLALERKLKKMLGPSAVDIGNGCFETKHKCNQTCLDRIAAGTFDAGEFSLPTFDSLNITAASLNDDGLDNHTILLYYSTAASSLAVTLMIAIFIVYMISRDNVSCSICL

SEQ ID NO: 26430 - protein, 584 aa, synthetic construct
  REGION 1..584: note = hemagglutinin__InfluenzaB__ABL76771
MKAIIVLLMVVTSNADRICTGITSSNSPHVVKTATQGEVNVTGVIPLTTTPTKSHFANLKGTKTRGKLCPTCLNCTDLDVALGRPMCVGVTPSAKASILHEVRPVTSGCFPIMHDRTKIRQLPNLLRGYEKIRLSTQNVINAEKAPGGPYRLGTSGSCPNATSRSGFFATMAWAVPRDNNKTATNPLTIEVPHICTKEEDQITVWGFHSDDKTQMKNLYGDSNPQKFTSSANGVTTHYVSQIGGFPDQTEDGGLPQSGRIVVDYMVQKPGKTGTIVYQRGILLPQKVWCASGRSKVIKGSLPLIGEADCLHEKYGGLNKSKPYYTGEHAKAIGNCPIWVKTPLKLANGTKYRPPAKLLKERGFFGAIAGFLEGGWEGMIAGWHGYTSHGAHGVAVAADLKSTQEAINKITKNLNSLSELEVKNLQRLSGAMDELHNEILELDEKVDDLRADTISSQIELAVLLSNEGIINSEDEHLLALERKLKKILGPSAVDIGNGCFETKHKCNQTCLDRIAAGTFDAGEFSLPTFDSLNITAASLNDDGLDNHTILLYYSTAASSLAVTLMIAIFIVYMISRDNVSCSICL

SEQ ID NO: 26431 - protein, 584 aa, synthetic construct
  REGION 1..584: note = hemagglutinin__InfluenzaB__ABL76782
MKAIIVLLMVVTSNADRICTGITSSNSPHVVKTATQGEVNVTGVIPLTTTPTKSHFANLKGTKTRGKLCPTCLNCTDLDVALGSPMCVGITPSAKASILHEVRPVTSGCFPIMHDRTKIRQLPNLLRGYEKIRLSTQNVINIEKAPGGPYRLGTSGSCPNATSRSGFFATMAWAVPRDNNKTATNPLTVEVPHICTKEEDQITVWGFHSDNKAQMKNLYGDSNPQKFTSSANGVTTHYVSQIGGFPDQTEDGGLPQSGRIVVDYMVQKPGKTGTIVYQRGILLPQKVWCASGRSKVIKGSLPLIGEADCLHEKYGGLNKSKPYYTGEHAKAIGNCPIWVKTPLKLANGTKYRPPAKLLKERGFFGAIAGFLEGGWEGMIAGWHGYTSHGAHGVAVAADLKSTQEAINKITKNLNSLSELEVKNLQRLSGAMDELHNEILELDEKVDDLRADTISSQIELAVLLSNEGIINSEDEHLLALERKLKKMLGPSAVDIGNGCFETKHKCNQTCLDRIAAGTFNAGEFSLPTFDSLNITAASLNDDGLDNHTILLYYSTAASSLAVTLMIAIFIVYMISRDNVSCSICL

SEQ ID NO: 26432 - protein, 584 aa, synthetic construct; identical to SEQ ID NO: 26405
  REGION 1..584: note = hemagglutinin__InfluenzaB__ABL76793

SEQ ID NO: 26433 - protein, 584 aa, synthetic construct; identical to SEQ ID NO: 26405
  REGION 1..584: note = hemagglutinin__InfluenzaB__ABL76815

SEQ ID NO: 26434 - protein, 585 aa, synthetic construct
  REGION 1..585: note = hemagglutinin__InfluenzaB__ABL76826
MKAIIVLLMVVTSNADRICTGITSSNSPHVVKTATQGEVNVTGVIPLTTTPTKSHFANLKGTKTRGKLCPECLNCTDLDVALGRPKCTGNIPSAKVSILHEVRPVTSGCFPIMHDRTKIRQLPNLLRGYEHIRLSTHNVINAEKAPGGPYKIGTSGSCPNVTNGNGFFATMAWAVPKNDNNKTATNSLTIEVPYICTEGEDQITVWGFHSDNETQMAKLYGDSKPQKFTSSANGVTTHYVSQIGGFPNQTEDGGLPQSGRIVVDYMVQKSGKTGTITYQRGILLPQKVWCASGRSKVIKGSLPLIGEADCLHEKYGGLNKSKPYYTGEHAKAIGNCPIWVKTPLKLANGTKYRPPAKLLKERGFFGAIAGFLEGGWEGMIAGWHGYTSHGAHGVAVAADLKSTQEAINKITKNLNSLSELEVKNLQRLSGAMDELHNEILELDEKVDDLRADTISSQIELAVLLSNEGIINSEDEHLLALERKLKKMLGPSAVEIGNGCFETKHKCNQTCLDRIAAGTFDAGEFSLPTFDSLNITAASLNDDGLDNHTILLYYSTAASSLAVTLMIAIFVVYMVSRDNVSCSICL

SEQ ID NO: 26435 - protein, 585 aa, synthetic construct
  REGION 1..585: note = hemagglutinin__InfluenzaB__ABL76837
MKAIIVLLMVVTSNADRICTGITSSNSPHVVKTATQGEVNVTGVIPLTTTPTKSHFANLKGTKTRGKLCPKCLNCTDLDVALGRPKCTGNIPSAEVSILHEVRPVTSGCFPIMHDRTKVRQLPNLLRGYEHIRLSTHNVINAEKAPGGPYKIGTSGSCPNVTNGNGFFATMAWAVPKNDNNKTATNSLTVEVPYICTEGEDQITVWGFHSDSETQMAKLYGDSKPQKFTSSSNGVTTHYVSQIGGFPNQTEDGGLPQSGRIVVDYMVQKSGKTGTITYQRGILLPQKVWCASGRSKVIKGSLPLIGEADCLHERYGGLNKSKPYYTGEHAKAIGNCPIWVKTPLKLANGTKYRPPAKLLKERGFFGAIAGFLEGGWEGMIAGWHGYTSHGAHGVAVAADLKSTQEAINKITKNLNSLSELEVKNLQRLSGAMDELHNEILELDEKVDDLRADTISSQIELAVLLSNEGIINSEDEHLLALERKLKKMLGPSAVEIGNGCFETKHKCNQTCLDRIAAGTFDAGEFSLPTFDSLNITAASLNDDGLDNHTILLYYSTAASSLAVTLMIAIFVVYMVSRDNVSCSICL

SEQ ID NO: 26436 - protein, 584 aa, synthetic construct
  REGION 1..584: note = hemagglutinin__InfluenzaB__ABL76848
MKAIIVLLMVVTSNADRICTGITSSNSSHVVKTATQGEVNVTGAIPLTTTPTKSHFANLKGTKTRGKLCPTCLNCTDLDVALGRPMCVGITPPAKASILHEVRPVTSGCFPIMHDRTKIRQLPNLLRGYEKIRLSTQNVINAEKAPGGPYRLGTSGSCPNATSKSGFFATMAWAVPRDNNKTATNPLTVEVPHICTKEEDQITVWGFHSDNKTQMKNLYGDSNPQKFTSSANGITTHYVSQIGGFPDQTEDGGLPQSGRIVVDYMVQKPGKTGTIVYQRGILLPQKVWCASGRSKVIKGSLPLIGEADCLHEKYGGLNKSKPYYTGEHAKAIGNCPIWVKTPLKLANGTKYRPPAKLLKERGFFGAIAGFLEGGWEGMIAGWHGYTSHGAHGVAVAADLKSTQEAINKITKNLNSLSELEVKNLQRLSGAMDELHNEILELDEKVDDLRADTISSQIELAVLLSNEGIINSEDEHLLALERKLKKMLGPSAVDIGNGCFETKHKCNQTCLDRIAAGTFNAGEFSLPTFDSLNITAASLNDDGLDNHTILLYYSTAASSLAVTLMIAIFIVYMISRDNVSCSICL

SEQ ID NO: 26437 - protein, 584 aa, synthetic construct; identical to SEQ ID NO: 26405
  REGION 1..584: note = hemagglutinin__InfluenzaB__ABL76859

SEQ ID NO: 26438 - protein, 584 aa, synthetic construct
  REGION 1..584: note = hemagglutinin__InfluenzaB__ABL76881
MKAIIVLLMVVTSNADRICTGITSSNSPHVVKTATQGEVNVTGVIPLTTTPTKSHFANLKGTRTRGKLCPDCLNCTDLDVALGRPMCVGTTPSAKASILHEVRPVTSGCFPIMHDRTKIRQLPNLLRGYENIRLSTQNVIDAEKASGGPYRLGTSGSCPNATSKSGFFATMAWAVPKDNNKNATNPLTVEVPYICTEGEDQITVWGFHSDNETQMKNLYGDSNPQKFTSSANGVTTHYVSQIGGFPDQKEDGGLPQSGRIVVDYMVQKPGKTGTIVYQRGVLLPQKVWCASGRSKVIKGSLPLIGEADCLHEKYGGLNKSKPYYTGEHAKAIGNCPIWVKTPLKLANGTKYRPPAKLLKERGFFGAIAGFLEGGWEGMIAGWHGYTSHGAHGVAVAADLKSTQEAINKITKNLNSLSELEVKNLQRLSGAMDELHNEILELDEKVDDLRADTISSQIELAVLLSNEGIINSEDEHLLALERKLKKMLGPSAVDIGNGCFETKHKCNQTCLDRIAAGTFNAGEFSLPTFDSLNITAASLNDDGLDNHTILLYYSTAASSLAVTLMLAIFIVYMVSRDNVSCSICL

SEQ ID NO: 26439 - protein, 584 aa, synthetic construct
  REGION 1..584: note = hemagglutinin__InfluenzaB__ABL76892
MKAIIVLLMVVTSNADRICTGITSSNSPHVVKTATQGEVNVTGVIPLTTTPTKSHFANLKGTRTRGKLCPDCLNCTDLDVALGRPMCVGTTPSAKASILHEVRPVTSGCFPIMHDRTKIRQLPNLLRGYENIRLSTQNVIDAEKAPGGPYRLGTSGSCPNATSKSGFFATMAWAVPKDNNKNATNPLTVEVPYVCTEGEDQITVWGFHSDNKTQMKNLYGDSNPQKFTSSANGVTTHYVSQIGGFPDQTEDGGLPQSGRIVVDYMVQKPGKTGTIVYQRGVLLPQKVWCASGRSKVIKGSLPLIGEADCLHEKYGGLNKSKPYYTGEHAKAIGNCPIWVKTPLKLANGTKYRPPAKLLKERGFFGAIAGFLEGGWEGMIAGWHGYTSHGAHGVAVAADLKSTQEAINKITKNLNSLSELEVKNLQRLSGAMDELHNEILELDEKVDDLRADTISSQIELAVLLSNEGIINSEDEHLLALERKLKKMLGPSAVDIGNGCFETKHKCNQTCLDRIAAGTFNAGEFSLPTFDSLNITAASLNDDGLDNHTILLYYSTAASSLAVTLMLAIFIVYMVSRDNVSCSICL

SEQ ID NO: 26440 - protein, 584 aa, synthetic construct
  REGION 1..584: note = hemagglutinin__InfluenzaB__ABL76903
MKAIIVLLMVVTSNADRICTGITSSNSPHVVKTATQGEVNVTGVIPLTTTPTKSYFANLKGTRTRGKLCPDCLNCTDLDVALGRPMCVGTTPSAKASILHEVRPVTSGCFPIMHDRTKIRQLPNLLRGYENIRLSTQSVIDAEKAPGGPYRLGTSGSCPNATSKSGFFATMAWAVPKDNNKNATNPLTVEVPYICTEGEDQITVWGFHSDDKTQMKNLYGDSNPQKFTSSANGVTTHYVSQIGGFPDQTEDGGLPQSGRIVVDYMIQKPGKTGTIVYQRGVLLPQKVWCASGRSKVIKGSLPLIGEADCLHEKYGGLNKSKPYYTGEHAKAIGNCPIWVKTPLKLANGTKYRPPAKLLKERGFFGAIAGFLEGGWEGMIAGWHGYTSHGAHGVAVAADLKSTQEAINKITKNLNSLSELEVKNLQRLSGAMDELHNEILELDEKVDDLRADTISAQIELAVLLSNEGIINSEDEHLLALERKLKKMLGPSAVDIGNGCFETKHKCNQTCLDRIAAGTFNAGEFSLPTFDSLNITAASLNDDGLDNHTILLYYSTAASSLAVTLMLAIFIVYMVSRDNVSCSICL

SEQ ID NO: 26441 - protein, 585 aa, synthetic construct
  REGION 1..585: note = hemagglutinin__InfluenzaB__ABL76914
MKAIIVLLMVVTSNADRICTGITSSNSPHVVKTATQGEVNVTGVIPLTTTPTKSHFANLKGTKTRGKLCPKCLNCTDLDVALGRPKCTGNIPSAEVSILHEVRPVTSGCFPIMHDRTKIRQLPNLLRGYEHIRLSTHNVINAEKAPGGPYKIGTSGSCPNVTNGNGFFATMAWAVPKNDNNKTATNSLTIEVPYICTEGEDQITVWGFHSDNEAQMAKLYGDSKPQKFTSSSNGVTTHYVSQIGGFPNQTEDGGLPQSGRIVVDYMVQKSGKTGTITYQRGILLPQKVWCASGRSKVIKGSLPLIGEADCLHERYGGLNKSKPYYTGEHAKAIGNCPIWVKTPLKLANGTKYRPPAKLLKERGFFGAIAGFLEGGWEGMIAGWHGYTSHGAHGVAVAADLKSTQEAINKITKNLNSLSELEVKNLQRLSGAMDELHNEILELDEKVDDLRADTISSQIELAVLLSNEGIINSEDEHLLALERKLKKMLGPSAVEIGNGCFETKHKCNQTCLDRIAAGTFDAGEFSLPTFDSLNITAASLNDDGLDNHTILLYYSTAASSLAVTLMIAIFVVYMVSRDNVSCSICL

SEQ ID NO: 26442 - protein, 584 aa, synthetic construct
  REGION 1..584: note = hemagglutinin__InfluenzaB__ABL76936
MKAIIVLLMVVTSNADRICTGITSSNSPHVVKTATQGEVNVTGVIPLTTTPTKSHFANLKGTKTRGKLCPTCLNCTDLDVALGRPMCVGTTPSAKASILHEVRPVTSGCFPIMHDRTKIRQLPNLLRGYEKIRLSTQNVINAEKAPGGPYRLGTSGSCPNATSRSGFFATMAWAVPRDNNKTATNPLTVEVPYICTKEEDQITVWGFHSDDKTQMKNLYGDSNPQKFTSSANGVTTHYVSQIGGFPDQTEDGGLPQSGRIVVDYMVQKPGKTGTIVYQRGVLLPQKVWCASGRSKVIKGSLPLIGEADCLHEKYGGLNKSKPYYTGEHAKAIGNCPIWVKTPLKLANGTKYRPPAKLLKERGFFGAIAGFLEGGWEGMIAGWHGYTSHGAHGVAVAADLKSTQEAINKITKNLNSLSELEVKNLQRLSGAMDELHNEILELDEKVDDLRADTISSQIELAVLLSNEGIINSEDEHLLALERKLKKMLGPSAVDIGNGCFETKHKCNQTCLDRIAAGTFNAGEFSLPTFDSLNITAASLNDDGLDNHTILLYYSTAASSLAVTLMIAIFIVYMVSRDNVSCSICL

SEQ ID NO: 26443 - protein, 584 aa, synthetic construct
  REGION 1..584: note = hemagglutinin__InfluenzaB__ABL76947
MKAIIVLLMVVTSNADRICTGITSSNSPHVVKTATQGEVNVTGAIPLTTTPTKSHFANLKGTKTRGKLCPTCLNCTDLDVALGRPMCVGITPSAKASILHEVRPVTSGCFPIMHDRTKIRQLPNLLRGYEKIRLSTQNVINAEKAPGGPYRLGTSGSCPNATSRSGFFATMAWAVPRDNNKTATNPLTVEVPHICTKEEDQITVWGFHSDDKTQMKNLYGDSNPQKFTSSTNGITTHYVSQIGGFPDQTEDGGLPQSGRIVVDYMVQKPGKTGTIVYQRGILLPQKVWCASGRSKVIKGSLPLIGEADCLHEKYGGLNKSKPYYTGEHAKAIGNCPIWVKTPLKLANGTKYRPPAKLLKERGFFGAIAGFLEGGWEGMIAGWHGYTSHGAHGVAVAADLKSTQEAINKITKNLNSLSELEVKNLQRLSGAMDELHNEILELDEKVDDLRADTISSQIELAVLLSNEGIINSEDEHLLALERKLKKMLGPSAVDIGNGCFETKHKCNQTCLDRIAAGTFNAGEFSLPTFDSLNITAASLNDDGLDNHTILLYYSTAASSLAVTLMIAIFIVYMISRDNVSCSICL

SEQ ID NO: 26444 - protein, 585 aa, synthetic construct
  REGION 1..585: note = hemagglutinin__InfluenzaB__ABL76958
MKAIIVLLMVVTSNADRICTGITSSNSPHVVKTATQGEVNVTGVIPLTTTPTKSHFANLKGTKTRGKLCPKCLNCTDLDVALGRPKCTGNIPSAKVSILHEVRPVTSGCFPIMHDRTKIRQLPNLLRGYEHIRLSTHNVINAEKAPGGPYKIGTSGSCPNVTNGNGFFATMAWAVPKNDNNKTATNSLTIEVPYICTEGEDQITVWGFHSDNEAQMAKLYGDSKPQKFTSSANGVTTHYVSQIGGFPNQTEDGGLPQSGRIVVDYMVQKSGKTGTITYQRGILLPQKVWCASGRSKVIKGSLPLIGEADCLHEKYGGLNKSKPYYTGEHAKAIGNCPIWVKTPLKLANGTKYRPPAKLLKERGFFGAIAGFLEGGWEGMIAGWHGYTSHGAHGVAVAADLKSTQEAINKITKNLNSLSELEVKNLQRLSGAMDELHNEILELDEKVDDLRADTISSQIELAVLLSNEGIINSEDEHLLALERKLKKMLGPSAVEIGNGCFETKHKCNQTCLDRIAAGTFNAGEFSLPTFDSLNITAASLNDDGLDNHTILLYYSTAASSLAVTLMIAIFVVYMVSRDNISCSICL

SEQ ID NO: 26445 - protein, 585 aa, synthetic construct
  REGION 1..585: note = hemagglutinin__InfluenzaB__ABL76969
MKAIIVLLMVVTSNADRICTGITSSNSPHVVKTATQGEVNVTGVIPLTTTPTKSHFANLKGTRTRGKLCPKCLNCTDLDVALGRPKCTGNIPSAKVSILHEVRPVTSGCFPIMHDRTKIRQLPNLLRGYEHIRLSIHNVINAEKAPGGPYKIGTSGSCPNVTNGNGFFATMAWAVPKNDNNKTATNSLTIEVPYICTEGEDQITVWGFHSDNEAQMAKLYGDSKPQKFTSSANGVTTHYVSQIGGFPNQTEDGGLPQSGRIVVDYMVQKSGKTGTITYQRGILLPQKVWCASGRSKVIKGSLPLIGEADCLHEKYGGLNKSKPYYTGEHAKAIGNCPIWVKTPLKLANGTKYRPPAKLLKERGFFGAIAGFLEGGWEGMIAGWHGYTSHGAHGVAVAADLKSTQEAINKITKNLNSLSELEVKNLQRLSGAMDELHNEILELDEKVDDLRADTISSQIELAVLLSNEGIINSEDEHLLALERKLKKMLGPSAVEIGNGCFETKHKCNQTCLDRIAAGTFDAGEFSLPTFDSLNITAASLNDDGLDNHTILLYYSTAASSLAVTLMIAIFVVYMVSRDNVSCSICL

SEQ ID NO: 26446 - protein, 584 aa, synthetic construct
  REGION 1..584: note = hemagglutinin__InfluenzaB__ABL76980
MKAIIVLLMVVTSNADRICTGITSSNSPHVVKTATQGEVNVTGVIPLTTTPTKSHFANLKGTKTRGKLCPTCLNCTDLDVALGRPMCVGITPSAKASILHEVRPVTSGCFPIMHDRTKIRQLPNLLRGYEKIRLSTQNVINAEKAPGGPYRLGTSGSCPNATSKSGFFATMAWAVPRDNNKTATNPLTVEVPYICTKEEDQITVWGFHSDNKTQMKNLYGDSDPQKFTSSANGVTTHYVSQIGGFPDQTEDGGLPQSGRIVVDYMVQKPGKTGTIVYQRGILLPQKVWCASGRSKVIKGSLPLIGEADCLHEKYGGLNKSKPYYTGEHAKAIGNCPIWVKTPLKLANGTKYRPPAKLLKERGFFGAIAGFLEGGWEGMIAGWHGYTSHGAHGVAVAADLKSTQEAINKITKNLNSLSELEVKNLQRLSGAMDELHNEILELDEKVDDLRADTISSQIELAVLLSNEGIINSEDEHLLALERKLKKMLGPSAVDIGNGCFETKHKCNQTCLDRIAAGTFNAGEFSLPTFDSLNITAASLNDDGLDNHTILLYYSTAASSLAVTLMIAIFIVYMISRDNVSCSICL

SEQ ID NO: 26447 - protein, 583 aa, synthetic construct
  REGION 1..583: note = hemagglutinin__InfluenzaB__ABL76991
MKAIIVLLMVVTSNADRICTGITSSNSPHVVKTATQGEVNVTGVIPLTTTPTKSHFANLKGTKTRGKLCPNCLNCTDLDVALGRPMCIGITPSAKASILHEVRPVTSGCFPIMHDRTKIRQLPNLLRGYEHIRLSTHNVINAERAPGGPYRLGTSGSCPNVTSRSGFFATMAWAVPRDNKTATNPLTVEVPYICTKGEDQITVWGFHSDNKIQMKNLYGDSNPQKFTSSANGITTHYVSQIGGFPNQTEDGGLPQSGRIVVDYMVQKPGKTGTIVYQRGVLLPQKVWCASGRSKVIKGSLPLIGEADCLHEKYGGLNKSKPYYTGEHAKAIGNCPIWVKTPLKLANGTKYRPPAKLLKEKGFFGAIAGFLEGGWEGMIAGWHGYTSHGAHGVAVAADLKSTQEAINKITKNLNSLSELEVKNLQRLSGAMDELHNEILELDEKVDDLRADTISSQIELAVLLSNEGIINSEDEHLLALERKLKKMLGPSAVDIGNGCFETKHKCNQTCLDRIAAGTFNAGEFSLPTFDSLNITAASLNDDGLDNHTILLYYSTAASSLAVTLMIAIFIVYMVSRDNVSCSICL

SEQ ID NO: 26448 - protein, 584 aa, synthetic construct
  REGION 1..584: note = hemagglutinin__InfluenzaB__ABL77002
MKAIIVLLMVVTSNADRICTGITSSNSPHVVKTATQGEVNVTGVIPLTTTPTKSHFANLKGTKTRGKLCPTCLNCTDLDVALGRPMCVGVTPSAKASILHEVRPVTSGCFPIMHDRTKIRQLPNLLRGYEKIRLSTQNVINAEKAPGGPYRLGTSGSCPNATSRSGFFATMAWAVPRDNNKTATNPLTIEVPHICTKEEDQITIWGFHSDDKTQMKNLYGDSNPQKFTSSANGVTTHYVSQIGGFPDQTEDGGLPQSGRIVVDYMVQKPGKTGTIVYQRGILLPQKVWCASGRSKVIKGSLPLIGEADCLHEKYGGLNKSKPYYTGEHAKAIGNCPIWVKTPLKLANGTKYRPPAKLLKERGFFGAIAGFLEGGWEGMIAGWHGYTSHGAHGVAVAADLKSTQEAINKITKNLNSLSELEVKNLQRLSGAMDELHNEILELDEKVDDLRADTISSQIELAVLLSNEGIINSEDEHLLALERKLKKMLGPSAVDIGNGCFETKHKCNQTCLDRIAAGTFDAGEFSLPTFDSLNITAASLNDDGLDNHTILLYYSTAASSLAVTLMIAIFIVYMISRDNVSCSICL

SEQ ID NO: 26449 - protein, 584 aa, synthetic construct
  REGION 1..584: note = hemagglutinin__InfluenzaB__ABL77013
MKAIIVLLMVVTSNADRICTGITSSNSPHVVKTATQGEVNVTGVIPLTTTPTKSYFANLKGTKTRGKLCPTCLNCTDLDVALGRPMCVGITPSAKASILHEVRPVTSGCFPIMHDRTKIRQLPNLLRGYEKIRLSTQNVINAEKAPGGPYRLGTSGSCPNATSKSGFFATMAWAVPRDNNKTATNPLTVEVPYICTKEEDQITVWGFHSDNKNQMKNLYGDSDPQKFTSSANGVTTHYVSQIGGFPDQTEDGGLPQSGRIVVDYMVQKPGKTGTIVYQRGILLPQKVWCASGRSKVIKGSLPLIGEADCLHEKYGGLNKSKPYYTGEHAKAIGNCPIWVKTPLKLANGTKYRPPAKLLKERGFFGAIAGFLEGGWEGMIAGWHGYTSHGAHGVAVAADLKSTQEAINKITKNLNSLSELEVKNLQRLSGAMDELHNEILELDEKVDDLRADTISSQIELAVLLSNEGIINSEDEHLLALERKLKKMLGPSAVDIGNGCFETKHKCNQTCLDRIAAGTFNAGEFSLPTFDSLNITAASLNDDGLDNHTILLYYSTAASSLAVTLMIAIFIVYMISRDNVSCSICL

SEQ ID NO: 26450 - protein, 584 aa, synthetic construct
  REGION 1..584: note = hemagglutinin__InfluenzaB__ABL77024
MKAIIVLLMVVTSNADRICTGITSSNSPHVVKTATQGEVNVTGAIPLTTTPTKSHFANLKGTKTRGKLCPTCLNCTDLDVALGRPMCVGITPSAKASILHEVRPVTSGCFPIMHDRTKIRQLPNLLRGYEKIRLSTQNVINAEKAPGGPYRLGTSGSCPNATSKSGFFATMAWAVPRDNNKTATNPLTVEVPHICTKEEDQITVWGFHSDDKTQMKNLYGDSNPQKFTSSANGITTHYVSQIGGFPDQTEDGGLPQSGRIVVDYMVQKPGKTGTIVYQRGILLPQKVWCASGRSKVIKGSLPLIGEADCLHEKYGGLNKSKPYYTGEHAKAIGNCPIWVKTPLKLANGTKYRPPAKLLKERGFFGAIAGFLEGGWEGMIAGWHGYTSHGAHGVAVAADLKSTQEAINKITKNLNSLSELEVKNLQRLSGAMDELHNEILELDEKVDDLRADTISSQIELAVLLSNEGIINSEDEHLLALERKLKKMLGPSAVDIGNGCFETKHKCNQTCLDRIAAGTFNAGEFSLPTFDSLNITAASLNDDGLDNHTILLYYSTAASSLAVTLMIAIFIVYMISRDNVSCSICL

SEQ ID NO: 26451 - protein, 584 aa, synthetic construct
  REGION 1..584: note = hemagglutinin__InfluenzaB__ABL77035
MKAIIVLLMVVTSNADRICTGITSSNSPHVVKTATQGEVNVTGAIPLTTTPTKSHFANLKGTKTRGKLCPTCLNCTDLDVALGRPMCVGITPSAKASILHEVRPVTSGCFPIMHDRTKIRQLPNLLRGYEKIRLSTQNVINAEKAPGGPYRLGTSGSCPNATSRSGFFATMAWAVPRDNNKTATNPLTVEVPHICTKEEDQITVWGFHSDDKTQMKNLYGDSNPQKFTSSANGVTTHYVSQIGGFPDQTEDGGLPQSGRIVVDYMVQKPGKTGTIVYQRGILLPQKVWCASGRSKVIKGSLPLIGEADCLHEKYGGLNKSKPYYTGEHAKAIGNCPIWVKTPLKLANGTKYRPPAKLLKERGFFGAIAGFLEGGWEGMIAGWHGYTSHGAHGVAVAADLKSTQEAINKITKNLNSLSELEVKNLQRLSGAMDELHNEILELDEKVDDLRADTISSQIELAVLLSNEGIINSEDEHLLALERKLKKMLGPSAVDIGNGCFETKHKCNQTCLDRIAAGTFNAGEFSLPTFDSLNITAASLNDDGLDNHTILLYYSTAASSLAVTLMIAIFIVYMISRDNVSCSICL

SEQ ID NO: 26452 - protein, 584 aa, synthetic construct
  REGION 1..584: note = hemagglutinin__InfluenzaB__ABL77046
MKAIIVLLMVVTSNADRICTGITSSNSPHVVKTATQGEVNVTGAIPLTTTPTKSHFANLKGTKTRGKLCPTCLNCTDLDVALGRPMCVGITPSAKASILHEVRPVTSGCFPIMHDRTKIRQLPNLLRGYEKIRLSTQNVINAEKAPGGPYRLGTSGSCPNATSKSGFFATMAWAVPRDNNKTATNPLTVEVPHICTKEEDQITVWGFHSDDKTQMKNLYGDSNPQKFTSSANGITTHYVSQIGGFPDQTEDGGLPQSGRIVVDYMVQKPGKTGTIVYQRGILLPQKVWCASGRSKVIKGSLPLIGEADCLHEKYGGLNKSKPYYTGEHAKAIGNCPIWVKTPLKLANGTKYRPPAKLLKERGFFGAIAGFLEGGWEGMIAGWHGYTSHGAHGVAVAADLKSTQEAINKITKNLNSLSELEVKNLQRLSGAMDELHNEILELDEKVDDLRADTISSQIELAVLLSNEGIINSEDEHLLALERKLKKMLGPSAIDIGNGCFETKHKCNQTCLDRIAAGTFNAGEFSLPTFDSLNITAASLNDDGLDNHTILLYYSTAASSLAVTLMIAIFIVYMISRDNVSCSICL

SEQ ID NO: 26453 - protein, 584 aa, synthetic construct
  REGION 1..584: note = hemagglutinin__InfluenzaB__ABL77057
MKAIIVLLMVVTSKADRICTGITSSNSPHVVKTATQGEVNVTGAIPLTTTPTKSHFANLKGTKTRGKLCPTCLNCTDLDVALGRPMCVGITPSAKASILHEVKPVTSGCFPIMHDRTKIRQLPNLLRGYEKIRLSTQNVINAEKAPGGPYRLGTSGSCPNATSKSGFFATMAWAVPRDNNKTATNPLTVEVPHICTKEEDQITVWGFHSDNKPQMKNLYGDSNPQKFTSSANGITTHYVSQIGGFPEQTEDGGLPQSGRIVVDYMVQKPGKTGTIVYQRGILLPQKVWCASGRSKVIKGSLPLIGEADCLHEKYGGLNKSKPYYTGEHAKAIGNCPIWVKTPLKLANGTKYRPPAKLLKERGFFGAIAGFLEGGWEGMIAGWHGYTSHGAHGVAVAADLKSTQEAINKITKNLNSLSELEVKNLQRLSGAMDELHNEILELDEKVDDLRADTISSQIELAVLLSNEGIINSEDEHLLALERKLKKMLGPSAVDIGNGCFETKHKCNQTCLDRIAAGTFNAGEFSLPTFDSLNITAASLNDDGLDNHTILLYYSTAASSLAVTLMIAIFIVYMISRDNVSCSICL

SEQ ID NO: 26454 - protein, 585 aa, synthetic construct
  REGION 1..585: note = hemagglutinin__InfluenzaB__ABL77068
MKAIIVLLMVVTSNADRICTGITSSNSPHVVKTATQGEVNVTGVIPLTTTPTKSHFANLKGTKTRGKLCPKCLNCTDLDVALGRPKCTGNIPSAKVSILHEVRPVTSGCFPIMHDRTKIRQLPNLLRGYERIRLSNHNVINAEKAPGGPYKIGTSGSCPNVTNGNGFFATMAWAVPKNENNKTATNSLTIEVPYICTEGEDQITVWGFHSDNENQMAKLYGDSKPQKFTSSANGVTTHYVSQIGGFPNQTEDGGLPQSGRIVVDYMVQKSGKTGTITYQRGILLPQKVWCASGRSKVIKGSLPLIGEADCLHEKYGGLNKSKPYYTGEHAKAIGNCPIWVKTPLKLANGTKYRPPAKLLKERGFFGAIAGFLEGGWEGMIAGWHGYTSHGAHGVAVAADLKSTQEAINKITKNLNSLSELEVKNLQRLSGAMDELHNEILELDEKVDDLRADTISSQIELAVLLSNEGIINSEDEHLLALERKLKKMLGPSAVEIGNGCFETKHKCNQTCLDRIAAGTFNAGEFSLPTFDSLNITAASLNDDGLDNHTILLYYSTAASSLAVTLMIAIFVVYMVSRDNVSCSICL

SEQ ID NO: 26455 - protein, 585 aa, synthetic construct
  REGION 1..585: note = hemagglutinin__InfluenzaB__ABL77090
MKAIIVLLMVVTSNADRICTGITSSNSPHVVKTATQGEVNVTGVIPLTTTLTKSHFANLKGTKTRGKLCPKCLNCTDLDVALGRPKCTGNIPSAKVSILHEVRPVTSGCFPIMHDRTKIRQLPNLLRGYERIRLSNHNVINAEKAPGGPYKIGTSGSCPNVTNGNGFFATMAWAVPKNENNKTATNSLTIEVPYICTEGEDQITVWGFHSDNEIQMVKLYGDSKPQKFTSSANGVTTHYVSQIGGFPNQIEDGGLPQSGRIVVDYMVQKSGKTGTITYQRGILLPQKVWCASGRSKIIKGSLPLIGEADCLHEKYGGLNKSKPYYTGEHAKAIGNCPIWVKTPLKLANGTKYRPPAKLLKERGFFGAIAGFLEGGWEGMIAGWHGYTSHGAHGVAVAADLKSTQEAINKITKNLNSLSELEVKNLQRLSGAMDELHNEILELDEKVDDLRADTISSQIELAVLLSNEGIINSEDEHLLALERKLKKMLGPSAVEIGNGCFETKHKCNQTCLDRIAAGTFNAGEFSLPTFDSLNITAASLNDDGLDNHTILLYYSTAASSLAVTLMIAIFVVYMVSRDNVSCSICL

SEQ ID NO: 26456 - protein, 584 aa, synthetic construct
  REGION 1..584: note = hemagglutinin__InfluenzaB__ABL77101
MKAIIVLLMVVTSKADRICTGITSSNSPHVVKTATQGEVNVTGAIPLTTTPTKSHFANLKGTKTRGKLCPTCLNCTDLDVALGRPMCVGITPSAKASILHEVKPVTSGCFPIMHDRTKIRQLPNLLRGYEKIRLSTQNVINAEKAPGGPYRLGTSGSCPNATSKSGFFATMAWAVPRDNNKTATNPLTVEVPHICTKEEDQITVWGFHSDDKTQMKNLYGDSNPQKFTSSANGITTHYVSQIGGFPEQTEDGGLPQSGRIVVDYMVQKPGKTGTIVYQRGILLPQKVWCASGRSKVIKGSLPLIGEADCLHEKYGGLNKSKPYYTGEHAKAIGNCPIWVKTPLKLANGTKYRPPAKLLKERGFFGAIAGFLEGGWEGMIAGWHGYTSHGAHGVAVAADLKSTQEAINKITKNLNSLSELEVKNLQRLSGAMDELHNEILELDEKVDDLRADTISSQIELAVLLSNEGIINSEDEHLLALERKLKKMLGPSAVDIGNGCFETKHKCNQTCLDRIAAGTFNAGEFSLPTFDSLNITAASLNDDGLDNHTILLYYSTAASSLAVTLMIAIFIVYMISRDNVSCSICL

SEQ ID NO: 26457 - protein, 585 aa, synthetic construct
  REGION 1..585: note = hemagglutinin__InfluenzaB__ABL77134
MKAIIVLLMVVTSNADRICTGITSSNSPHVVKTATQGEVNVTGVIPLTTTPTKSHFANLKGTKTRGKLCPKCLNCTDLDVALGRPKCTGNIPSAKVSILHEVRPVTSGCFPIMHDRTKIRQLPNLLRGYERIRLSNHNVINAEKAPGGPYKIGTSGSCPNVTNGNGFFATMAWAVPKNENNKTATNSLTIEVPYICTEGEDQITVWGFHSDNEAQMAKLYGDSKPQKFTSSANGVTTHYVSQIGGFPNQTEDGGLPQSGRIVVDYMVQKSGKTGTITYQRGILLPQKVWCASGRSKVIKGSLPLIGEADCLHEKYGGLNKSKPYYTGEHAKAIGNCPIWVKTPLKLANGTKYRPPAKLLKERGFFGAIAGFLEGGWEGMIAGWHGYTSHGAHGVAVAADLKSTQEAINKITKNLNSLSELEVKNLQRLSGAMDELHNEILELDEKVDDLRADTISSQIELAVLLSNEGIINSEDEHLLALERKLKKMLGPSAVEIGNGCFETKHKCNQTCLDRIAAGTFNAGEFSLPTFDSLNITAASLNDDGLDNHTILLYYATAASSLAVTLMIAIFVVYMVSRDNVSCSICL

SEQ ID NO: 26458 - protein, 585 aa, synthetic construct
  REGION 1..585: note = hemagglutinin__InfluenzaB__ABL77145
MKAIIVLLMVVTSNADRICTGITSSNSPHVVKTATQGEVNVTGVIPLTTTPTKSHFANLKGTKTRGKLCPKCLNCTDLDVALGRPKCTGNIPSAKVSILHEVRPVTSGCFPIMHDRTKIRQLPNLLRGYERIRLSNHNVINAEEAPGGPYKIGTSGSCPNVTNGNGFFATMAWAVPKNENNKTATNSLTIEVPYICTEGEDQITVWGFHSDSETQMAKLYGDSKPQKFTSSANGVTTHYVSQIGGFPNQTEDGGLPQSGRIVVDYMVQKSGKTGTITYQRGILLPQKVWCASGRSKVIKGSLPLIGEADCLHEKYGGLNKSKPYYTGEHAKAIGNCPIWVKTPLKLANGTKYRPPAKLLKERGFFGAIAGFLEGGWEGMIAGWHGYTSHGAHGVAVAADLKSTQEAINKITKNLNSLSELEVKNLQRLSGAMDELHNEILELDEKVDDLRADTISSQIELAVLLSNEGIINSEDEHLLALERKLKKMLGPSAVEIGNGCFETKHKCNQTCLDRIAAGTFNAGEFSLPTFDSLNITAASLNDDGLDNHTILLYYSTAASSLAVTLMIAIFVVYMVSRDNVSCSICL

SEQ ID NO: 26459 - protein, 584 aa, synthetic construct
  REGION 1..584: note = hemagglutinin__InfluenzaB__ABL77156
MKAIIVLLMVVTSNADRICTGITSSNSPHVVKTATQGEVNVTGVIPLTTTPTKSYFANLKGTRTRGKLCPDCLNCTDLDVALGRPMCVGTTPSAKASILHEVRPVTSGCFPIMHDRTKIRQLPNLLRGYENIRLSTQNVIDAEKAPGGPYRLGTSGSCPNATSKSGFFATMAWAVPKDNNKNATNPLTVEVPYVCTEGEDQITVWGFHSDDKTQMKNLYGDSNPQKFTSSANGVTTHYVSQIGGFPDQTEDGGLPQSGRIVVDYMVQKPGKTGTIVYQRGVLLPQKVWCASGRSKVIKGSLPLIGEADCLHEKYGGLNKSKPYYTGEHAKAIGNCPIWVKTPLKLANGTKYRPPAKLLKERGFFGAIAGFLEGGWEGMIAGWHGYTSHGAHGVAVAADLKSTQEAINKITKNLNSLSELEVKNLQRLSGAMDELHNEILELDEKVDDLRADTISSQIELAVLLSNEGIINSEDEHLLALERKLKKMLGPSAVDIGNGCFETKHKCNQTCLDRIAAGTFNAGEFSLPTFDSLNITAASLNDDGLDNHTILLYYSTAASSLAVTLMLAIFIVYMVSRDNVSCSICL

SEQ ID NO: 26460 - protein, 585 aa, synthetic construct
  REGION 1..585: note = hemagglutinin__InfluenzaB__ABL77178
MKAIIVLLMVVTSNADRICTGITSSNSPHVVKTATQGEVNVTGVIPLTTTPTKSHFANLKGTKTRGKLCPKCLNCTDLDVALGRPKCTGNIPSAKVSILHEVRPVTSGCFPIMHDRTKIRQLPNLLRGYERIRLSNHNVINAEKAPGGPYKIGTSGSCPNVTNGNGFFATMAWAVPKNENNKTATNSLTIEVPYICTEGEDQITVWGFHSDSETQMAKLYGDSKPQKFTSSANGVTTHYVSQIGGFPNQTEDGGLPQSGRIVVDYMVQKSGKTGTITYQRGILLPQKVWCASGRSKVIKGSLPLIGEADCLHEKYGGLNKSKPYYTGEHAKAIGNCPIWVKTPLKLANGTKYRPPAKLLKERGFFGAIAGFLEGGWEGMIAGWHGYTSHGAHGVAVAADLKSTQEAINKITKNLNSLSELEVKNLQRLSGAMDELHNEILELDEKVDDLRADTISSQIELAVLLSNEGIINSEDEHLLALERKLKKMLGPSAVEIGNGCFETKHKCNQTCLDRIAAGTFNAGEFSLPTFDSLNITAASLNDDGLDNHTILLYYSTAASSLAVTLMIAIFVVYMVSRDNVSCSICL

SEQ ID NO: 26461 - protein, 584 aa, synthetic construct
  REGION 1..584: note = hemagglutinin__InfluenzaB__ABL77189
MKAIIVLLMVVTSNADRICTGITSSNSPHVVKTATQGEVNVTGVIPLTTTPTKSYFANLKGTRTRGKLCPDCLNCTDLDVALGIPMCVGTTPSAKASILHEVRPVTSGCFPIMHDRTKIRQLPNLLRGYENIRLSTQNVIDAEKAPGGPYRLGTSGSCPNATSKSGFFATMAWAVPKDNNKNATNPLTVEVPYVCTEGEDQITVWGFHSDNKIQMKNLYGDSNPQKFTSSANGVTTHYVSQIGGFPDQTEDGGLPQSGRIVVDYMVQKPGKTGTIVYQRGVLLPQKVWCASGRSKVIKGSLPLIGEADCLHEKYGGLNKSKPYYTGEHAKAIGNCPIWVKTPLKLANGTKYRPPAKLLKERGFFGAIAGFLEGGWEGMIAGWHGYTSHGAHGVAVAADLKSTQEAINKITKNLNSLSELEVKNLQRLSGAMDELHNEILELDEKVDDLRADTISSQIELAVLLSNEGIINSEDEHLLALERKLKKMLGPSAVDIGNGCFETKHKCNQTCLDRIAAGTFNAGEFSLPTFDSLNITAASLNDDGLDNHTILLYYSTAASSLAVTLMLAIFIVYMVSRDNVSCSICL

SEQ ID NO: 26462 - protein, 585 aa, synthetic construct
  REGION 1..585: note = hemagglutinin__InfluenzaB__ABL77200
MKAIIVLLMVVTSNADRICTGITSSNSPHVVKTATQGEVNVTGVIPLTTTPTKSHFANLKGTKTRGKLCPKCLNCTDLDVALGRPKCMGNIPSAKVSILHEVRPVTSGCFPIMHDRTKIRQLPNLLRGYEHIRLSTHNVINAEKAPGGPYKIGTSGSCPNVTNGNGFFATMAWAVPKNDNNKTATNSLTIEVPYICTEGEDQITVWGFHSDNETQMAKLYGDSKPQKFTSSANGVTTHYVSQIGGFPNQTEDGGLPQSGRIVVDYMVQKSGKAGTITYQRGILLPQKVWCASGRSKVIKGSLPLIGEADCLHEKYGGLNKSKPYYTGEHAKAIGNCPIWVKTPLKLANGTKYRPPAKLLKERGFFGAIAGFLEGGWEGMIAGWHGYTSHGAHGVAVAADLKSTQEAINKITKNLNSLSELEVKNLQRLSGAMDELHNEILELDGKVDDLRADTISSQIELAVLLSNEGIINSEDEHLLALERKLKKMLGPSAVEIGNGCFETKHKCNQTCLDRIAAGTFDAGEFSLPTFDSLNITAASLNDDGLDNHTILLYYSTAASSLAVTLMIAIFVVYMVSRDNVSCSICL

SEQ ID NO: 26463 - protein, 584 aa, synthetic construct
  REGION 1..584: note = hemagglutinin__InfluenzaB__ABL77222
MKAIIVLLMVVTSNADRICTGITSSNSPHVVKTATQGEVNVTGVIPLTTTPTKSYFANLKGTRTRGKLCPDCLNCTDLDVALGRPMCVGTTPSAKASILHEVRPVTSGCFPIMHDRTKIRQLANLLRGYENIRLSTQNVIDAEKAPGGPYRLGTSGSCPNATSKSGFFATMAWAVPKDNNKNATNPLTVEVPYICTEGEDQITVWGFHSDSKTQMKNLYGDSNPQKFTSSANGVTTHYVSQIGGFPDQTEDGGLPQSGRIVVDYMMQKPGKTGTIVYQRGVLLPQKVWCASGRSKVIKGSLPLIGEADCLHEKYGGLNKSKPYYTGEHAKAIGNCPIWVKTPLKLANGTKYRPPAKLLKERGFFGAIAGFLEGGWEGMIAGWHGYTSHGAHGVAVAADLKSTQEAINKITKNLNSLSELEVKNLQRLSGAMDELHNEILELDEKVDDLRADTISSQIELAVLLSNEGIINSEDEHLLALERKLKKMLGPSAVDIGNGCFETKHKCNQTCLDRIAAGTFNAGEFSLPTFDSLNITAASLNDDGLDNHTILLYYSTAASSLAVTLMLAIFIVYMVSRDNVSCSICL

SEQ ID NO: 26464 - protein, 585 aa, synthetic construct
  REGION 1..585: note = hemagglutinin__InfluenzaB__ABL77233
MKAIIVLLMVVTSNADRICTGITSSNSPHVVKTATQGEVNVTGVIPLTTTPTKSHFANLKGTKTRGKLCPKCLNCTDLDVALGRPKCTGNIPSAEVSILHEVRPVTSGCFPIMHDRTKIRQLPNLLRGYEHIRLSTHNVINAEKAPGGPYKIGTSGSCPNVTNGNGFFATMAWAVPKNDNNKTATNSLTIEVPYICTEGEDQITIWGFHSDNEAQMAKLYGDSKPQKFTSSANGVTTHYVSQIGGFPNQTEDGGLPQSGRIVVDYMVQKSRKTGTITYQRGILLPQKVWCASGRSKVIKGSLPLIGEADCLHEKYGGLNKSKPYYTGEHAKAIGNCPIWVKTPLKLANGTKYRPPAKLLKERGFFGAIAGFLEGGWEGMIAGWHGYTSHGAHGVAVAADLKSTQEAINKITKNLNSLSELEVKNLQRLSGAMDELHNEILELDEKVDDLRADTISSQIELAVLLSNEGIINSEDEHLLALERKLKKMLGPSAVEIGNGCFETKHKCNQTCLDRIAAGTFDAGEFSLPTFDSLNITAASLNDDGLDNHTILLYYSTAASSLAVTLMIAIFVVYMVSRDNVSCSICL

SEQ ID NO: 26465 - protein, 585 aa, synthetic construct
  REGION 1..585: note = hemagglutinin__InfluenzaB__ABL77244
MKAIIVLLMVVTSNADRICTGITSSNSPHVVKTATQGEVNVTGVIPLTTTPTKSHFANLKGTKTRGKLCPKCLNCTDLDVALGRPKCTGTIPSAKASILHEVKPVTSGCFPIMHDRTKIRQLPNLLRGYEHIRLSTHNVINAETAPGGPYKVGTSGSCPNVTNGNGFFATMAWAVPKNDNNKTATNPLTVEVPYICTEGEDQITVWGFHSDNEAQMVKLYGDSKPQKFTSSANGVTTHYVSQIGGFPNQAEDGGLPQSGRIVVDYMVQKSGKTGTITYQRGILLPQKVWCASGRSKVIKGSLPLIGEADCLHEKYGGLNKSKPYYTGEHAKAIGNCPIWVKTPLKLANGTKYRPPAKLLKEKGFFGAIAGFLEGGWEGMIAGWHGYTSHGAHGVAVAADLKSTQEAINKITKNLNSLSELEVKNLQRLSGAMDELHNKILELDEKVDDLRADTISSQIELAVLLSNEGIINSEDEHLLALERKLKKMLGPSAVEIGNGCFETKHKCNQTCLDRIAAGTFNAGEFSLPTFDSLNITAASLNDDGLDNHTILLYYSTAASSLAVTLMIAIFIVYMVSRDNVSCSICL

SEQ ID NO: 26466 - protein, 583 aa, synthetic construct
  REGION 1..583: note = hemagglutinin__InfluenzaB__ABL77255
MKAIIVLLMVVTSNADRICTGITSSNSPHVVKTATQGEVNVTGVIPLTTTPTKSHFANLKGTKTRGKLCPNCLNCTDLDVALGRPMCMGTIPSAKASILHEVRPVTSGCFPIMHDRTKIRQLPNLLRGYENIRLSTHNVINAERAPGGPYRLGTSGSCPNVTSRNGFFATMAWAVPRDNKTATNPLTVEVPYICTKGEDQITVWGFHSDDKTQMKNLYGDSNPQKFTSSANGVTTHYVSQIGDFPNQTEDGGLPQSGRIVVDYMVQKPGKTGTIVYQRGVLLPQKVWCASGRSKVIKGSLPLIGEADCLHEKYGGLNKSKPYYTGEHAKAIGNCPIWVKTPLKLANGTKYRPPAKLLKERGFFGAIAGFLEGGWEGMIAGWHGYTSHGAHGVAVAADLKSTQEAINKITKNLNSLSELEVKNLQRLSGAMDELHNEILELDEKVDDLRADTISSQIELAVLLSNEGIINSEDEHLLALERKLKKMLGPSAVDIGNGCFETKHKCNQTCLDRIAAGTFNAGEFSLPTFDSLNITAASLNDDGLDNHTILLYYSTAASSLAVTLMIAIFIVYMVSRDNVSCSICL

SEQ ID NO: 26467 - protein, 583 aa, synthetic construct
  REGION 1..583: note = hemagglutinin__InfluenzaB__ABL77266
MKAIIVLLMVVTSNADRICTGITSSNSPHVVKTATQGEVNVTGVIPLTTTPTKSHFANLKGTKTRGKLCPNCLNCTDLDVALGRPMCVGTTPSAKASILHEVRPVTSGCFPIMHDRTKIRQLPNLLRGYENIRLSTQNVINAERAPGGPYRLGTSGSCPNVTSRDGFFATMAWAVPRDNKTATNPLTVEVPYICTKGEDQITVWGFHSDSKTQMKNLYGDSNPQKFTSSANGVTTHYVSQIGGFPNQTEDGGLPQSGRIVVDYMVQKPGKTGTIVYQRGVLLPQKVWCASGRSKVIKGSLPLIGEADCLHEKYGGLNKSKPYYTGEHAKAIGNCPIWVKTPLKLANGTKYRPPAKLLKERGFFGAIAGFLEGGWEGMIAGWHGYTSHGAHGVAVAADLKSTQEAINKITKNLNSLSELEVKNLQRLSGAMDELHNEILELDEKVDDLRADTISSQIELAVLLSNEGIINSEDEHLLALERKLKKMLGPSAVDIGNGCFETKHKCNQTCLDRIAAGTFNAGEFSLPTFDSLNITAASLNDDGLDNHTILLYYSTAASSLAVTLMIAIFIVYMVSRDNVSCSICL

SEQ ID NO: 26468 - protein, 583 aa, synthetic construct
  REGION 1..583: note = hemagglutinin__InfluenzaB__ABL77277
MKAIIVLLMVVTSNADRICTGITSSNSPHVVKTATQGEVNVTGVIPLTTTPTKSHFANLKGTKTRGKLCPNCLNCTDLDVALGRPMCVGNTPSAKASILHEVRPVTSGCFPIMHDRTKIRQLPNLLRGYENIRLSTQNVINAERAPGGPYRLGTSGSCPNVTNRDGFFATMAWAVPRDNKTATNPLTVEVPYICTKGEDQITVWGFHSDNKIQMKNLYGDSNPQKFTSSANGVTTHYVSQIGGFPNQTEDGGLPQSGRIVVDYMVQKPGKTGTIVYQRGVLLPQKVWCASGRSKVIKGSLPLIGEADCLHEKYGGLNKSKPYYTGEHAKAIGNCPIWVKTPLKLANGTKYRPPAKLLKERGFFGAIAGFLEGGWEGMIAGWHGYTSHGAHGVAVAADLKSTQEAINKITKNLNSLSELEVKNLQRLSGAMDELHNEILELDEKVDDLRADTISSQIELAVLLSNEGIINSEDEHLLALERKLKKMLGPSAVDIGNGCFETKHKCNQTCLDRIAAGTFNAGEFSLPTFDSLNITAASLNDDGLDNHTILLYYSTAASSLAVTLMIAIFIVYMVSRDNVSCSICL

SEQ ID NO: 26469 - protein, 583 aa, synthetic construct
  REGION 1..583: note = hemagglutinin__InfluenzaB__ABL77288
MKAIIVLLMVVTSNADRICTGITSSNSPHVVKTATQGEVNVTGVIPLTTTPTKSHFANLKGTKTRGKLCPNCLNCTDLDVALGRPMCVGTTPSAKASILHEVRPVTSGCFPIMHDRTKIRQLPNLLRGYEHIRLSTQNVINAEKAPGGPYKLGTSGSCPNATSRSGFFATMAWAVPRDNKTATNPLTVEVPYICTKGEDQITVWGFHSDTKTQMKNLYGDSNPQKFTSSANGVTTHYVSQIGGFPDQTEDGGLPQSGRIVVDYMVQKPGKTGTIVYQRGVLLPQKVWCASGRSKVIKGSLPLIGEADCLHEKYGGLNKSKPYYTGEHAKAIGNCPIWVKTPLKLANGTKYRPPAKLLKERGFFGAIAGFLEGGWEGMIAGWHGYTSHGAHGVAVAADLKSTQEAINKITKNLNSLSELEVKNLQRLSGAMDELHNEILELDEKVDDLRADTISSQIELAVLLSNEGIINSEDEHLLALERKLKKMLGPSAVDIGNGCFETKHKCNQTCLDRIAAGTFNAGEFSLPTFDSLNITAASLNDDGLDNHTILLYYSTAASSLAVTLMIAIFIVYMVSRDNVSCSICL

SEQ ID NO: 26470 - protein, 583 aa, synthetic construct
  REGION 1..583: note = hemagglutinin__InfluenzaB__ABL77299
MKAIIVLLMVVTSNADRICTGITSSNSPHVVKTATQGEVNVTGVIPLTTTPTKSHFANLKGTKTRGKLCPNCLNCTDLDVALGRPMCIGNIPSAKASILHEVRPVTSGCFPIMHDRTKIRQLPNLLRGYEHIRLSTHNVINAERAPGGPYRLGTSGSCPNVTSRSGFFATMAWAVPRDNKTATNPLTVEVPYICTKGEDQITVWGFHSDNETQMKNLYGDSNPQKFTSSANGITTHYVSQIGGFPNQTEDGGLPQSGRIVVDYMVQKPGKTGTIVYQRGVLLPQKVWCASGRSKVIKGSLPLIGEADCLHEKYGGLNKSKPYYTGEHAKAIGNCPIWVKTPLKLANGTKYRPPAKLLKERGFFGAIAGFLEGGWEGMIAGWHGYTSHGAHGVAVAADLKSTQEAINKITKNLNSLSELEVKNLQRLSGAMDELHNEILELDEKVDDLRADTISSQIELAVLLSNEGIINSEDEHLLALERKLKKMLGPSAVDIGNGCFETKHKCNQTCLDRIAAGTFNAGEFSLPTFDSLNITAASLNDDGLDNHTILLYYSTAASSLAVTLMIAIFIVYMVSRDNVSCSICL

SEQ ID NO: 26471 - protein, 583 aa, synthetic construct
  REGION 1..583: note = hemagglutinin__InfluenzaB__ABL77310
MKAIIVLLMVVTSNADRICTGITSSNSPHVVKTATQGEVNVTGVIPLTTTPTKSHFANLKGTKTRGKLCPNCLNCTDLDVALGRPMCIGTIPSAKASILHEVRPVTSGCFPIMHDRTKIRQLPNLLRGYEHIRLSTHNVINAERAPGGPYRLGTSGSCPNVTSRSGFFATMAWAVPRDNKTATNPLTVEVPYICTKGEDQITVWGFHSDNKNQMKNLYGDSNPQKFTSSANGVTTHYVSQIGGFPNQTEDGGLPQSGRIVVDYMVQKPGKTGTIVYQRGVLLPQKVWCVSGRSKVIKGSLPLIGEADCLHEKYGGLNKSKPYYTGEHAKAIGNCPIWVKTPLKLANGTKYRPPAKLLKERGFFGAIAGFLEGGWEGMIAGWHGYTSHGAHGVAVAADLKSTQEAINKITKNLNSLSELEVKNLQRLSGAMDELHNEILELDEKVDDLRADTISSQIELAVLLSNEGIINSEDEHLLALERKLKKMLGPSAVDIGNGCFETKHKCNQTCLDRIAAGTFNAGEFSLPTFDSLNITAASLNDDGLDNHTILLYYSTAASSLAVTLMIAIFIVYMVSRDNVSCSICL

SEQ ID NO: 26472 - protein, 585 aa, synthetic construct
  REGION 1..585: note = hemagglutinin__InfluenzaB__ABL77321
MKAIIVLLMVVTSNADRICTGITSSNSPHVVKTATQGEVNVTGVIPLTTTPTKSHFANLKGTKTRGKLCPKCLNCTDLDVALGRPKCTGTIPSAKVSILHEVKPVTSGCFPIMHDRTKIRQLPNLLRGYEHIRLSTHNVINAEKAPGGPYKIGTSGSCPNITNGNGFFATMAWAVPKNDNNKTATNSLTVEVPYICTEGEDQITVWGFHSDNETQMAKLYGDSKPQKFTSSANGVTTHYVSQIGGFPNQAEDGGLPQSGRIVVDYMVQKSGKTGTITYQRGILLPQKVWCASGRSKVIKGSLPLIGEADCLHEKYGGLNKSKPYYTGEHAKAIGNCPIWVKTPLNLANGTKYRPPAKLLKERGFFGAIAGFLEGGWEGMIAGWHGYTSHGAHGVAVAADLKSTQEAINKITKNLNSLSELEVKNLQRLSGAMDELHNEILELDEKVDDLRADTISSQIELAVLLSNEGIINSEDEHLLALERKLKKMLGPSAVEIGNGCFETKHKCNQTCLDRIAAGTFNAGEFSLPTFDSLNITAASLNDDGLDNHTILLYYSTAASSLAVTLMIAIFIVYMVSRDNVSCSICL

SEQ ID NO: 26473 - protein, 584 aa, synthetic construct
  REGION 1..584: note = hemagglutinin__InfluenzaB__ABL77332
MKAIIVLLMVVTSNADRICTGITSSNSPHVVKTATQGEVNVTGVIPLTTTPTKSHFANLKGTKTRGKLCPNCLNCTDLDVALGRPMCVGTTPSAKASILHEVRPVTSGCFPIMHDRTKIRQLPNLLRGYENIRLSTQNVINAEKAPGGPYKLGTSGSCPNATSRSGFFATMAWAVPRDNNKTATNPLTVEVPYICTKGEDQITVWGFHSDDKTQMKNLYGDSNPQKFTSSANGVTTHYVSQIGGFPDQTEDGGLPQSGRIVVDYMVQKPGKTGTIVYQRGVLLPQKVWCASGRSKVIKGSLPLIGEADCLHEKYGGLNKSKPYYTGEHAKAIGNCPIWVKTPLKLANGTKYRPPAKLLKERGFFGAIAGFLEGGWEGMIAGWHGYTSHGAHGVAVAADLKSTQEAINKITKNLNSLSELEVKNLQRLSGAMDELHNEILELDEKVDDLRADTISSQIELAVLLSNEGIINSEDEHLLALERKLKKMLGPSAVDIGNGCFETKHKCNQTCLDRIAAGTFNAGEFSLPTFDSLNITAASLNDDGLDNHAILLYYSTAASSLAVTLMIAIFIVYMVSRDNVSCSICL

SEQ ID NO: 26474 - protein, 584 aa, synthetic construct
  REGION 1..584: note = hemagglutinin__InfluenzaB__ABL77343
MKAIIVLLMVVTSNADRICTGITSSNSPHVVKTATQGEVNVTGVIPLTTTPTKSHFANLKGTKTRGKLCPNCLNCTDLDVALGRPMCVGTTPSAKASILHEVRPVTSGCFPIMHDRTKIRQLPNLLRGYENIRLSTQNVINAEKAPGGPYRLGTSGSCPNATSRSGFFATMAWAVPRDNNKTATNPLTVEVPYICTKGEDQITVWGFHSDNKIQMKNLYGDSNPQKFTSSANGVTTHYVSQIGGFPDQTEDGGLPQSGRIVVDYMVQKPGKTGTIVYQRGVLLPQKVWCASGRSKVVKGSLPLIGEADCLHEKYGGLNKSKPYYTGEHAKAIGNCPIWVKTPLKLANGTKYRPPAKLLKERGFFGAIAGFLEGGWEGMIAGWHGYTSHGAHGVAVAADLKSTQEAINKITKNLNSLSELEVKNLQRLSGAMDELHNEILELDEKVDDLRADTISSQIELAVLLSNEGIINSEDEHLLALERKLKKMLGPSAVDIGNGCFETKHKCNQTCLDRIAAGTFNAGEFSLPTFDSLNITAASLNDDGLDNHTILLYYSTAASSLAVTLMIAIFIVYMVSRDNVSCSICL

SEQ ID NO: 26475 - protein, 584 aa, synthetic construct
  REGION 1..584: note = hemagglutinin__InfluenzaB__ABL77365
MKAIIVLLMVVTSNADRICTGITSSNSPHVVKTATQGEVNVTGVIPLTTTPTKSHFANLKGTKTRGKLCPNCLNCTDLDVALGRPMCVGTTPSAKASILHEVRPVTSGCFPIMHDRTKIRQLPNLLRGYENIRLSTQNVINAEKAPGGPYRLGTSGSCPNATSRSGFFATMAWAVPRDNNKTATNPLTVEVPYVCTEGEDQITVWGFHSDNKTQMKNLYGDSNPQKFTSSANGVTTHYVSQIGGFPDQAEDGGLPQSGRIVVDYMVQKPGKTGTIVYQRGVLLPQKVWCASGRSKVIKGSLPLIGEADCLHEKYGGLNKSKPYYTGEHAKAIGNCPIWVKTPLKLANGTKYRPPAKLLKERGFFGAIAGFLEGGWEGMIAGWHGYTSHGAHGVAVAADLKSTQEAINKITKNLNSLSELEVKNLQRLSGAMDELHNEILELDEKVDDLRADTISSQIELAVLLSNEGIINSEDEHLLALERKLKKMLGPSAVDIGNGCFETKHKCNQTCLDRIAAGTFNAGEFSLPTFDSLNITAASLNDDGLDNHTILLYYSTAASSLAVTLMIAIFIVYMVSRDNVSCSICL

SEQ ID NO: 26476 - protein, 584 aa, synthetic construct
  REGION 1..584: note = hemagglutinin__InfluenzaB__ABL84340
MKAIIVLLMVVTSNADRICTGITSSNSPHVVKTATQGEVNVTGVIPLTTTPTKSHFANLKGTKTRGKLCPTCLNCTDLDVALGRPMCVGITPSAKASILHEVRPVTSGCFPIMHDRTKIRQLPNLLRGYEKIRLSTQNVINAEKAPGGPYRLGTSGSCPNTTSKSGFFATMAWAVPRDNNKTATNPLTVEVPHICTKEEDQITVWGFHSDNKTQMKNLYGDSNPQKFTSSANGVTTHYVSQIGGFPDQTEDGGLPQSGRIVVDYMVQKPGKTGTIVYQRGILLPQKVWCASGRSKVIKGSLPLIGEADCLHEKYGGLNKSKPYYTGEHAKAIGNCPIWVKTPLKLANGTKYRPPAKLLKERGFFGAIAGFLEGGWEGMIAGWHGYTSHGAHGVAVAADLKSTQEAINKITKNLNSLSELEVKNLQRLSGAMDELHNEILELDEKVDDLRADTISSQIELAVLLSNEGIINSEDEHLLALERKLKKMLGPSAVDIGNGCFETKHKCNQTCLDRIAAGTFNAGEFSLPTFDSLNITAASLNGDGLDNHTILLYYSTAASSLAVTLMIAIFIVYMISRDNVSCSICL

SEQ ID NO: 26477 - protein, 584 aa, synthetic construct; identical to SEQ ID NO: 26398
  REGION 1..584: note = hemagglutinin__InfluenzaB__ABN50382

SEQ ID NO: 26478 - protein, 584 aa, synthetic construct; identical to SEQ ID NO: 26398
  REGION 1..584: note = hemagglutinin__InfluenzaB__ABN50393

SEQ ID NO: 26479 - protein, 584 aa, synthetic construct
  REGION 1..584: note = hemagglutinin__InfluenzaB__ABN50404
MKAIIVLLMVVTSNADRICTGITSSNSPHVVKTATQGEVNVTGVIPLTTTPTKSHFANLKGTKTRGKLCPTCLNCTDLDVALGRPMCVGVTPSAKASILHEVRPVTSGCFPIMHDRTKIRQLPNLLRGYEKIRLSTQNVINAEKAPGGPYRLGTSGSCPNATSRSGFFATMAWAVPRDNNKTATNPLTVEVPHICTKEEDQITVWGFHSDNKTQMKNLYGDSNPQKFTSSANGVTTHYVSQIGGFPDQTEDGGLPQSGRIVVDYMVQKPGKTGTIVYQRGILLPQKVWCASGRSKVIKGSLPLIGEADCLHEKYGGLNKSKPYYTGEHAKAIGNCPIWVKTPLKLANGTKYRPPAKLLKERGFFGAIAGFLEGGWEGMIAGWHGYTSHGAHGVAVAADLKSTQEAINKITKNLNSLSELEVKNLQRLSGAMDELHNEILELDEKVDDLRADTISSQIELAVLLSNEGIINSEDEHLLALERKLKKMLGPSAVDIGNGCFETKHKCNQTCLDRIAAGTFNAGEFSLPTFDSLNITAASLNDDGLDNHTILLYYSTAASSLAVTLMIAIFIVYMISRDNVSCSICL

SEQ ID NO: 26480 - protein, 584 aa, synthetic construct; identical to SEQ ID NO: 26407
  REGION 1..584: note = hemagglutinin__InfluenzaB__ABN50415

SEQ ID NO: 26481 - protein, 584 aa, synthetic construct; identical to SEQ ID NO: 26407
  REGION 1..584: note = hemagglutinin__InfluenzaB__ABN50426

SEQ ID NO: 26482 - protein, 584 aa, synthetic construct
  REGION 1..584: note = hemagglutinin__InfluenzaB__ABN50437
MKAIIVLLMVVTSNADRICTGITSSNSPHVVKTATQGEVNVTGVIPLTTTPTKSYFANLKGTRTRGKLCPDCLNCTDLDVALGRPMCVGTTPSAKASILHEVRPVTSGCFPIMHDRTKIRQLPNLLRGYENIRLSTQNVIDAEKAPGGPYRLGTSGSCPNATSKSGFFATMAWAVPKDNNKNATNPLTVEVPYICTEGEDQITVWGFHSDNKTQMKNLYGDPNPQKFTSSANGVTTHYVSQIGGFPDQTEDGGLPQSGRIVVDYMMQKPGKTGTIVYQRGVLLPQKVWCASGKSKVIKGSLPLIGEADCLHEKYGGLNKSKPYYTGEHAKAIGNCPIWVKTPLKLANGTKYRPPAKLLKERGFFGAIAGFLEGGWEGMIAGWHGYTSHGAHGVAVAADLKSTQEAINKITKNLNSLSELEVKNLQRLSGAMDELHNEILELDEKVDDLRADTISSQIELAVLLSNEGIINSEDEHLLALERKLKKMLGPSAVDIGNGCFETKHKCNQTCLDRIAAGTFNAGEFSLPTFDSLNITAASLNDDGLDNHTILLYYSTAASSLAVTLMLAIFIVYMVSRDNVSCSICL

SEQ ID NO: 26483 - protein, 585 aa, synthetic construct
  REGION 1..585: note = hemagglutinin__InfluenzaB__ABN50459
MKALIVLLMVVTSNADRICTGITSSNSPHVVKTATQGEVNVTGVIPLTTTPTKSHFANLKGTKTRGKLCPKCLNCTDLDVALGRPKCTGNIPSAEVSILHEVRPVTSGCFPIMHDRTKIRQLPNLLRGYEHIRLSTHNVINAEKAPGGPYKIGTSGSCPNVTNGNGFFATMAWAVPKNDNNKTATNSLTIEVPYICTEGEDQITIWGFHSDNEIQMAKLYGDSKPQKFTSSANGVTTHYVSQIGGFPNQTEDGGLPQSGRIVVDYMVQKSGKTGTITYQRGILLPQKVWCASGRSKVIKGSLPLIGEADCLHEKYGGLNKSKPYYTGEHAKAIGNCPIWVKTPLKLANGTKYRPPAKLLKERGFFGAIAGFLEGGWEGMIAGWHGYTSHGAHGVAVAADLKSTQEAINKITKNLNSLSELEVKNLQRLSGAMDELHNEILELDEKVDDLRADTISSQIELAVLLSNEGIINSEDEHLLALERKLKKMLGPSAVEIGNGCFETKHKCNQTCLDRIAAGTFDAGEFSLPTFDSLNITAASLNDDGLDNHTILLYYSTAASSLAVTLMIAIFVVYMVSRDNVSCSICL

SEQ ID NO: 26484 - protein, 585 aa, synthetic construct
  REGION 1..585: note = hemagglutinin__InfluenzaB__ABN50470
MKAIIVLLMVVTSNADRICTGITSSNSPHVVKTATQGEVNVTGVIPLTTTPTKSHFANLKGTKTRGKLCPKCLNCTDLDVALGRPKCTGNIPSAKVSILHEVRPVTSGCFPIMHDRTKIRQLPNLLRGYERIRLSNHNVINAEKAPGGPYKIGTSGSCPNVTNGNGFFATMAWAVPKNENNKTATNSLTIEVPYICTEGEDQITVWGFHSDNEIQMAKLYGDSKPQKFTSSANGVTTHYVSQIGGFPNQTEDGGLPQSGRIVVDYMVQKSGKTGTITYQRGILLPQKVWCASGRSKVIKGSLPLIGEADCLHEKYGGLNKSKPYYTGEHAKAIGNCPIWVKTPLKLANGTKYRPPAKLLKERGFFGAIAGFLEGGWEGMIAGWHGYTSHGAHGVAVAADLKSTQEAINKITKNLNSLSELEVKNLQRLSGAMDELHNEILELDEKVDDLRADTISSQIELAVLLSNEGIINSEDEHLLALERKLKKMLGPSAVEIGNGCFETKHKCNQTCLDRIAAGTFNAGEFSLPTFDSLNITAASLNDDGLDNHTILLYYSTAASSLAVTLMIAIFVVYMVSRDNVSCSICL

SEQ ID NO: 26485 - protein, 584 aa, synthetic construct
  REGION 1..584: note = hemagglutinin__InfluenzaB__ABN50481
MKAIIVLLLVVTSNADRICTGITSSNSPHVVKTATQGEVNVTGAIPLTTTPTKSHFANLKGTKTRGKLCPTCFNCTDLDVALGRPMCVGITPSAKASILHEVRPVTSGCFPIMHDRTKIRQLPNLLRGYEKIRLSTQNVIDAEKAPGGPYRLGTSGSCPNATSKSGFFATMAWAVPRDNNKTATNPLTVEVPHICTKEEDQITVWGFHSDNKTQMKNLYGDSNPQKFTSSANGITTHYVSQIGGFPDQTEDGGLPQSGRIVVDYMVQKPGKTGTIVYQRGILLPQKVWCASGRSKVIKGSLPLIGEADCLHEKYGGLNKSKPYYTGEHAKAIGNCPIWVKTPLKLANGTKYRPPAKLLKERGFFGAIAGFLEGGWEGMIAGWHGYTSHGAHGVAVAADLKSTQEAINKITKNLNSLSELEVKNLQRLSGAMDELHNEILELDEKVDDLRADTISSQIELAVLLSNEGIINSEDEHLLALERKLKKMLGPSAVDIGNGCFETKHKCNQTCLDRIAAGTFNAGEFSLPTFDSLNITAASLNDDGLDNHTILLYYSTAASSLAVTLMIAIFIVYMISRDNVSCSICL

SEQ ID NO: 26486 - protein, 584 aa, synthetic construct
  REGION 1..584: note = hemagglutinin__InfluenzaB__ABN50503
MKAIIVLLMVVTSNADRICTGITSSNSPHVVKTATQGEVNVTGVIPLTTTPTKSHFANLKGTKTRGKLCPTCLNCTDLDVALGRPMCVGVTPSAKASILHEVRPVTSGCFPIMHDRTKIRQLPNLLRGYEKIRLSTQNVINAEKAPGGPYRLGTSGSCPNATSRSGFFATMAWAVPKDNNKTATNPLTVEVPHICTKEEDQITVWGFHSDDKTQMKNLYGDSNPQKFTSSANGVTTHYVSQIGGFPDQTEDGGLPQSGRIVVDYMVQKPGKTGTIVYQRGILLPQKVWCASGRSKVIKGSLPLIGEADCLHEKYGGLNKSKPYYTGEHAKAIGNCPIWVKTPLKLANGTKYRPPAKLLKERGFFGAIAGFLEGGWEGMIAGWHGYTSHGAHGVAVAADLKSTQEAINKITKNLNSLSELEVKNLQRLSGAMDELHNEILELDEKVDDLRADTISSQIELAVLLSNEGIINSEDEHLLALERKLKKMLGPSAVDIGNGCFETKHKCNQTCLDRIAAGTFNAGEFSLPTFDSLNITAASLNDDGLDNHTILLYYSTAASSLAVTLMIAIFIVYMISRDNVSCSICL

SEQ ID NO: 26487 - protein, 584 aa, synthetic construct
  REGION 1..584: note = hemagglutinin__InfluenzaB__ABN50514
MKAIIVLLMVATSNADRICTGITSSNSPHVVKTATQGEVNVTGVIPLTTTPTKSYFANLKGTRTRGKLCPDCLNCTDLDVALGRPMCVGTTPSAKASILHEVRPVTSGCFPIMHDRTKIRQLPNLLRGYENIRLSTQNVIDAEKAPGGPYRLGTSGSCPNATSKSGFFATMAWAVPKDNNKNATNPLTVEVPYVCTEGEDQITVWGFHSDNKPQMKNLYGDSNPQKFTSSANGVTTHYVSQIGGFPDQTEDGGLPQSGRIVVDYMVQKPGKTGTIVYQRGVLLPQKVWCASGRSKVIKGSLPLIGEADCLHEKYGGLNKSKPYYTGEHAKAIGNCPIWVKTPLKLANGTKYRPPAKLLKERGFFGAIAGFLEGGWEGMIAGWHGYTSHGAHGVAVAADLKSTQEAINKITKNLNSLSELEVKNLQRLSGAMDELHDEILELDEKVDDLRADTISSQIELAVLLSNEGIINSEDEHLLALERKLKKMLGPSAVDIGNGCFETKHKCNQTCLDRIAAGTFNAGEFSLPTFDSLNITAASLNDDGLDNHTILLYYSTAASSLAVTLMLAIFIVYMVSRDNVSCSICL

SEQ ID NO: 26488 - protein, 584 aa, synthetic construct
  REGION 1..584: note = hemagglutinin__InfluenzaB__ABN50525
MKAIIVLLMVVTSNADRICTGITSSNSPHVVKTATQGEVNVTGVIPLTTTPTKSYFANLKGTRTRGKLCPDCLNCTDLDVALGRPMCVGTTPSAKASILHEVRPVTSGCFPIMHDRTKIRQLPNLLRGYENIRLSTQNVIDAEKAPGGPYRLGTSGSCPNATSKSGFFSTMAWAVPKDNNKNATNPLTVEVPYVCTEGEDQITVWGFHSDNKTQMKNLYGDSNPQKFTSSANGVTTHYVSQIGGFPDQTEDGGLPQSGRIVVDYMVQKPGKTGTIVYQRGVLLPQKVWCASGRSKVIKGSLPLIGEADCLHEKYGGLNKSKPYYTGEHAKAIGNCPIWVKTPLKLANGTKYRPPAKLLKERGFFGAIAGFLEGGWEGMIAGWHGYTSHGAHGVAVAADLKSTQEAINKITKNLNSLSELEVKNLQRLSGAMDELHNEILELDEKVDDLRADTISSQIELAVLLSNEGIINSEDEHLLALERKLKKMLGPSAVDIGNGCFETKHKCNQTCLDRIAAGTFNAGEFSLPTFDSLNITAASLNDDGLDNHTILLYYSTAASSLAVTLMLAIFIVYMVSRDNVSCSICL

SEQ ID NO: 26489 - protein, 585 aa, synthetic construct
  REGION 1..585: note = hemagglutinin__InfluenzaB__ABN50536
MKAIIVLLMVVTSNADRICTGITSSNSPHVVKTATQGEVNVTGVIPLTTTPTKSHFANLKGTKTRGKLCPKCLNCTDLDVALGRPKCTGNIPSAKVSILHEVRPVTSGCFPIMHDRTKIRQLPNLLRGYERIRLSNHNVINAEEAPGGPYKIGTSGSCPNVTNGNGFFATMAWAVPKNENNKTATNSLTIEVPYICTEGEDQITVWGFHSDNEIQMAKLYGDSKPQKFTSSANGVTTHYVSQIGGFPNQTEDGGLPQSGRIVVDYMVQKSGKTGTITYQRGILLPQKVWCASGRSKVIKGSLPLIGEADCLHEKYGGLNKSKPYYTGEHAKAIGNCPIWVKTPLKLANGTKYRPPAKLLKERGFFGAIAGFLEGGWEGMIAGWHGYTSHGAHGVAVAADLKSTQEAINKITKNLNSLSELEVKNLQRLSGAMDELHNEILELDEKVDDLRADTISSQIELAVLLSNEGIINSEDEHLLALERKLKKMLGPSAVEIGNGCFETKHKCNQTCLDRIAAGTFNAGEFSLPTFDSLNITAASLNDDGLDNHTILLYYSTAASSLAVTLMIAIFVVYMVSRDNVSCSICL

SEQ ID NO: 26490 - protein, 585 aa, synthetic construct
  REGION 1..585: note = hemagglutinin__InfluenzaB__ABN50547
MKAIIVLLMVVTSNADRICTGITSSNSPHVVKTATQGEVNVTGVIPLTTTPTKSHFANLKGTKTRGKLCPKCLNCTDLDVALGRPKCTGNIPSAKVSILHEVRPVTSGCFPIMHDRTKIRQLPNLLRGYEHIRLSTHNVINAEKAPGGPYKIGTSGSCPNVTNGNGFFATMAWAVPKNDNNKTATNSLTIEVPYICTEGEDQLTVWGFHSDNENQMAKLYGDSKPQKFTSSANGVTTHYVSQIGGFPNQTEDGGLPQSGRIVVDYMVQKSGKTGTITYQRGILLPQKVWCASGRSKVIKGSLPLIGEADCLHEKYGGLNKSKPYYTGEHAKAIGNCPIWVKTPLKLANGTKYRPPAKLLKERGFFGAIAGFLEGGWEGMIAGWHGYTSHGAHGVAVAADLKSTQEAINKITKNLNSLSELEVKNLQRLSGAMDELHNEILELDEKVDDLRADTISSQIELAVLLSNEGIINSEDEHLLALERKLKKMLGPSAVEIGNGCFETKHKCNQTCLDRIAAGTFDAGEFSLPTFDSLNITAASLNDDGLDNHTILLYYSTAASSLAVTLMIAIFVVYMVSRDNVSCSICL

SEQ ID NO: 26491 - protein, 585 aa, synthetic construct
  REGION 1..585: note = hemagglutinin__InfluenzaB__ABN50558
MKAIIVLLMVVTSNADRICTGITSSNSPHVVKTATQGEVNVTGVIPLTTTPTKSHFANLKGTKTRGKLCPKCLNCTDLDVALGRPKCTGNIPSAKVSILHEVRPVTSGCFPIMHDRTKIRQLPNLLRGYEHIRLSTHNVINAEKAPGGPYKIGTSGSCPNVTNGNGFFATMAWAVPKNDNNKTATNSLTIEVPYICTEGEDQITVWGFHSDKETQMAKLYGDSKPQKFTSSANGVTTHYVSQIGGFPNQTEDGGLPQSGRIVVDYMMQKSGKTGTITYQRGILLPQKVWCASGRSKVIKGSLPLIGEADCLHEKYGGLNKSKPYYTGEHAKAIGNCPIWVKTPLKLANGTKYRPPAKLLKERGFFGAIAGFLEGGWEGMIAGWHGYTSHGAHGVAVAADLKSTQEAINKITKNLNSLSELEVKNLQRLSGAMDELHNEILELDEKVDDLRADTISSQIELAVLLSNEGIINSEDEHLLALERKLKKMLGPSAVEIGNGCFETKHKCNQTCLDRIAAGTFDAGEFSLPTFDSLNITAASLNDDGLDNHTILLYYSTAASSLAVTLMIAIFVVYMVSRDNVSCSICL

SEQ ID NO: 26492 - protein, 584 aa, synthetic construct; identical to SEQ ID NO: 26407
  REGION 1..584: note = hemagglutinin__InfluenzaB__ABN50569

SEQ ID NO: 26493 - protein, 585 aa, synthetic construct; identical to SEQ ID NO: 26419
  REGION 1..585: note = hemagglutinin__InfluenzaB__ABN50580

SEQ ID NO: 26494 - protein, 585 aa, synthetic construct
  REGION 1..585: note = hemagglutinin__InfluenzaB__ABN50591
MKAIIVLLMVVTSNADRICTGITSSNSPHVVKTATQGEVNVTGVIPLTTTPTKSHFANLKGTKTRGKLCPKCLNCTDLDVALGRPKCTGNIPSAKVSILHEVRPVTSGCFPIMHDRTKIRQLPNLLRGYERIRLSNHNVINAEKAPGGPYKIGTSGSCPNVTNGNGFFATMAWAVPKNENNKTATNSLTIEVPYICTEGEDQITVWGFHSDNEAQMAKLYGDSKPQKFTSSANGVTTHYVSQIGGFPNQTEDGGLPQSGRIVVDYMVQKSGKTGTITYQRGILLPQKVWCASGRSKVIKGSLPLIGEADCLHEKYGGLNKSKPYYTGEHAKAIGNCPIWVKTPLKLANGTKYRPPAKLLKERGFFGAIAGFLEGGWEGMIAGWHGYTSHGAHGVAVAADLKSTQEAINKITKNLNSLSELEVKNLQRLSGAMDELHNEILELDEKVDDLRADTISSQIELAVLLSNEGIINSEDEHLLALERKLKKMLGPSAVEIGNGCFETKHKCNQTCLDRIAAGTFNAGEFSLPTFDSLNITAASLNDDGLDNHTILLYYSTAASSLAVTLMIAIFVVYMVSRDNVSCSICL

SEQ ID NO: 26495 - protein, 585 aa, synthetic construct
  REGION 1..585: note = hemagglutinin__InfluenzaB__ABN50602
MKAIIVLLMVVTSNADRICTGITSSNSPHVVKTATQGEVNVTGVIPLTTTPTKSHFANLKGTKTRGKLCPKCLNCTDLDVALGRPKCMGTIPSAKASILHEVKPVTSGCFPIMHDRTKIRQLPNLLRGYENIRLSTHNVINAETAPGGPYKIGTSGSCPNITNGNGFFATMAWAVPKNDNNKTATNPLTVEVPYICTEGEDQITVWGFHSDNETQMVKLYGDSKPQKFTSSANGVTAHYVSQIGGFPNQAEDGGLPQSGRIVVDYMVQKSGKTGTITYQRGILLPQKVWCASGRSKVIKGSLPLIGEADCLHEKYGGLNKSKPYYTGEHAKAIGNCPIWVKTPLKLANGTKYRPPAKLLKERGFFGAIAGFLEGGWEGMIAGWHGYTSHGAHGVAVAADLKSTQEAINKITKNLNSLSELEVKNLQRLSGAMDELHNEILELDEKVDDLRADTISSQIELAVLLSNEGIINSEDEHLLALERKLKKMLGPSAVDIGNGCFETKHKCNQTCLDRIAAGTFNAGEFSLPTFDSLNITAASLNDDGLDNHTILLYYSTAASSLAVTLMIAIFIVYMVSRDNVSCSICL

SEQ ID NO: 26496 - protein, 583 aa, synthetic construct
  REGION 1..583: note = hemagglutinin__InfluenzaB__ABN50624
MKAIIVLLMVVTSNADRICTGITSSNSPHVVKTATQGEVNVTGVIPLTTTPTKSHFANLKGTKTRGKLCPNCLNCTDLDVALGRPMCIGTIPSAKASILHEVRPVTSGCFPIMHDRTKIRQLPNLLRGYENIRLSTHNVINAERAPGGPYRLGTSGSCPNVTSKSGFFATMAWAVPRDNKTATNPLTVEVPYICTKGEDQITVWGFHSDNKNQMKNLYGDSNPQKFTSSVNGVTTHYVSQIGGFPNQTEDGGLPQSGRIVVDYMVQKPGKTGTIVYQRGVLLPQKVWCASGRSKVIKGSLPLIGEADCLHEKYGGLNKSKPYYTGEHAKAIGNCPIWVKTPLKLANGTKYRPPAKLLKERGFFGAIAGFLEGGWEGMIAGWHGYTSHGAHGVAVAADLKSTQEAINKITKNLNSLSELEVKNLQRLSGAMDELHNEILELDEKVDDLRADTISSQIELAVLLSNEGIINSEDEHLLALERKLKKMLGPSAVDIGNGCFETKHKCNQTCLDRIAAGTFNAGEFSLPTFDSLNITAASLNDDGLDNHTILLYYSTAASSLAVTLMIAIFIVYMVSRDNVSCSICL

SEQ ID NO: 26497 - protein, 583 aa, synthetic construct
  REGION 1..583: note = hemagglutinin__InfluenzaB__ABN50635
MKAIIVLLMVVTSNADRICTGITSSNSPHVVKTATQGEVNVTGVIPLTTTPTKSHFANLKGTKTRGKLCPNCLNCTDLDVALGRPMCIGTIPSAKASILHEVRPVTSGCFPIMHDRTKIRQLPNLLRGYEHIRLSTHNVINAERAPGGPYRLGTSGSCPNVTSRSGFFATMAWAVPRDNKTATNPLTVEVPYICTKGEDQITVWGFHSDSKTQMKNLYGDSNPQKFTSSANGVTTHYVSQIGGFPNQTEDGGLPQSGRIVVDYMVQKPGKTGTIVYQRGVLLPQKVWCASGRSKVIKGSLPLIGEADCLHEKYGGLNKSKPYYTGEHAKAIGNCPIWVKTPLKLANGTKYRPPAKLLKERGFFGAIAGFLEGGWEGMIAGWHGYTSHGAHGVAVAADLKSTQEAINKITKNLNSLSELEVKNLQRLSGAMDELHNEILELDEKVDDLRADTISSQIELAVLLSNEGIINSEDEHLLALERKLKKMLGPSAVDIGNGCFETKHKCNQTCLDRIAAGTFNAGEFSLPTFDSLNITAASLNDDGLDNHTILLYYSTAASSLAVTLMIAIFIVYMVSRDNVSCSICL

SEQ ID NO: 26498 - protein, 583 aa, synthetic construct
  REGION 1..583: note = hemagglutinin__InfluenzaB__ABN50646
MKAIIVLLMVVTSNADRICTGITSSNSPHVVKTATQGEVNVTGVIPLTTTPTKSHFANLKGTKTRGKLCPNCLNCTDLDVALGRPMCIGTIPSAKASILHEVRPVTSGCFPIMHDRTKIRQLPNLLRGYEHIRLSTHNVINAERAPGGPYRLGTSGSCPNVTSRSGFFATMAWAVPRDNKTATNPLTVEVPYICTKGEDQITVWGFHSDNKNQMKNLYGDSNPQKFTSSANGVTTHYVSQIGGFPNQTEDGGLPQSGRIVVDYMVQKPGKTGTIVYQRGVLLPQKVWCASGRSKVIKGSLPLIGEADCLHEKYGGLNKSKPYYTGEHAKAIGNCPIWVKTPLKLANGTKYRPPAKLLKERGFFGAIAGFLEGGWEGMIAGWHGYTSHGAHGVAVAADLKSTQEAINKITKNLNSLSELEVKNLQRLSGAMDELHNEILELDEKVDDLRADTISSQIELAVLLSNEGIINSEDEHLLALERKLKKMLGPSAVDIGNGCFETKHKCNQTCLDRIAAGTFNAGEFSLPTFDSLNITAASLNDDGLDNHTILLYYSTAASSLAVTLMIAIFIVYMVSRDNVSCSICL

SEQ ID NO: 26499 - protein, 583 aa, synthetic construct
  REGION 1..583: note = hemagglutinin__InfluenzaB__ABN50657
MKAIIVLLMVVTSNADRICTGITSSNSPHVVKTATQGEVNVTGVIPLTTTPTKSHFANLKGTKTRGKLCPNCLNCTDLDVALGRPMCVGITPSAKASILHEVRPVTSGCFPIMHDRTKIRQLPNLLRGYENIRLSTQNVINAEKAPGGPYRLGTSGSCPNVTSRTGFFATMAWAVPRDNKTATNPLTVEVPYICTKGEDQITVWGFHSDNKTQMKNLYGDSNPQKFTSSANGVTTHYVSQIGGFPDQTEDGGLPQSGRIVVDYMVQKPGKTGTIVYQRGILLPQKVWCASGRSKVIKGSLPLIGEADCLHEKYGGLNKSKPYYTGEHAKAIGNCPIWVKTPLKLANGTKYRPPAKLLKERGFFGAIAGFLEGGWEGMIAGWHGYTSHGAHGVAVAADLKSTQEAINKITKNLNSLSELEVKNLQRLSGAMDELHNEILELDEKVDDLRADTISSQIELAVLLSNEGIINSEDEHLLALERKLKKMLGPSAVDIGNGCFETKHKCNQTCLDRIAAGTFNAGEFSLPTFDSLNITAASLNDDGLDNHTILLYYSTAASSLAVTLMIAIFIVYMVSRDNVSCSICL

SEQ ID NO: 26500 - protein, 584 aa, synthetic construct
  REGION 1..584: note = hemagglutinin__InfluenzaB__ABN50679
MKAIIVLLMVVTSNADRICTGITSSNSPHVVKTATQGEVNVTGVIPLTTTPTKSHFANLKGTKTRGKLCPNCLNCTDLDVALGRPMCVGTTPSAKASILHEVRPVTSGCFPIMHDRTKIRQLPNLLRGYENIRLSTQNVINAEKAPGGPYRLGTSGSCPNATSRSGFFATMAWAVPRDNNKTATNPLTVEVPYICTKGEDQITVWGFHSDDKTQMKNLYGDSNPQKFTSSANGVTTHYVSQIGGFPDQTEDGGLPQSGRIVVDYMVQKPGKTGTIVYQRGVLLPQKVWCASGRSKVIKGSLPLIGEADCLHEKYGGLNKSKPYYTGEHAKAIGNCPIWVKTPLKLANGTKYRPPAKLLKERGFFGAIAGFLEGGWEGMIAGWHGYTSHGAHGVAVAADLKSTQEAINKITKNLNSLSELEVKNLQRLSGAMDELHNEILELDEKVDDLRADTISSQIELAVLLSNEGIINSEDEHLLALERKLKKMLGPSAVDIGNGCFETKHKCNQTCLDRIAAGTFNAGEFSLPTFDSLNITAASLNDDGLDNHTILLYYSTAASSLAVTLMIAIFIVYMVSRDNVSCSICL

SEQ ID NO: 26501 - protein, 584 aa, synthetic construct
  REGION 1..584: note = hemagglutinin__InfluenzaB__ABN50690
MKAIIVLLMVVTSNADRICTGITSSNSPHVVKTATQGEVNVTGVIPLTTTPTKSHFANLKGTKTRGKLCPNCLNCTDLDVALGRPMCVGTTPSAKASILHEVRPVTSGCFPIMHDRTKIRQLPNLLRGYENIRLSTQNVINAEKAPGGPYRLGTSGSCPNATSRSGFFATMAWAVPRDNNKTATNPLTVEVPYVCTEGEDQITVWGFHSDNKTQMKNLYGDSNPQKFTSSANGVTTHYVSQIGGFPDQTEDGGLPQSGRIVVDYMVQKPGKTGTIVYQRGVLLPQKVWCASGRSKVIKGSLPLIGEADCLHEKYGGLNKSKPYYTGEHAKAIGNCPIWVKTPLKLANGTKYRPPAKLLKERGFFGAIAGFLEGGWEGMIAGWHGYTSHGAHGVAVAADLKSTQEAINKITKNLNSLSELEVKNLQRLSGAMDELHNEILELDEKVDDLRADTISSQIELAVLLSNEGIINSEDEHLLALERKLKKMLGPSAVDIGNGCFETKHKCNQTCLDRIAAGTFNAGEFSLPTFDSLNITAASLNDDGLDNHTILLYYSTAASSLAVTLMIAIFIVYMVSRDNVSCSICL

SEQ ID NO: 26502 - protein, 583 aa, synthetic construct
  REGION 1..583: note = hemagglutinin__InfluenzaB__ABN50701
MKAIIVLLMVVTSNADRICTGITSSNSPHVVKTATQGEVNVTGVIPLTTTPTKSHFANLKGTKTRGKLCPNCLNCTDLDVALGRPMCVGITPSAKASILHEVRPVTSGCFPIMHDRTKIRQLPNLLRGYENIRLSTQNVINAEKAPGGPYRLGTSGSCPNVTSRTGFFATMAWAVPRDNKTATNPLTVEVPYICTKGEDQITVWGFHSDNKAQMKNLYGDSNPQKFTSSANGVTTHYVSQIGGFPDQTEDGGLPQSGRIVVDYMVQKPGKTGTIVYQRGILLPQKVWCASGRSKVIKGSLPLIGEADCLHEKYGGLNKSKPYYTGEHAKAIGNCPIWVKTPLKLANGTKYRPPAKLLKERGFFGAIAGFLEGGWEGMIAGWHGYTSHGAHGVAVAADLKSTQEAINKITKNLNSLSELEVKNLQRLSGAMDELHNEILELDEKVDDLRADTISSQIELAVLLSNEGIINSEDEHLLALERKLKKMLGPSAVDIGNGCFETKHKCNQTCLDRIAAGTFNAGEFSLPTFDSLNITAASLNDDGLDNHTILLYYSTAASSLAVTLMIAIFIVYMVSRDNVSCSICL

SEQ ID NO: 26503 - protein, 584 aa, synthetic construct; identical to SEQ ID NO: 26501
  REGION 1..584: note = hemagglutinin__InfluenzaB__ABN50712

SEQ ID NO: 26504 - protein, 584 aa, synthetic construct
  REGION 1..584: note = hemagglutinin__InfluenzaB__ABN50723
MKAIIVLLMVVTSNADRICTGITSSNSPHVVKTATQGEVNVTGVIPLTTTPTKSHFANLRGTKTRGKLCPTCLNCTDLDVALGRPMCVGTTPSAKASILHEVRPVTSGCFPIMHDRTKIRQLPNLLRGYEKIRLSTQNVINAEKAPGGPYRLGTSGSCPNATSRSGFFATMAWAVPRDNNKTATNPLTVEVPYICTKEEDQITVWGFHSDNKTQMKNLYGDSNPQKFTSSANGVTTHYVSQIGGFPDQTEDGGLPQSGRIVVDYMVQKPGKTGTIVYQRGILLPQKVWCASGRSKVIKGSLPLIGEADCLHEKYGGLNKSKPYYTGEHAKAIGNCPIWVKTPLKLANGTKYRPPAKLLKERGFFGAIAGFLEGGWEGMIAGWHGYTSHGAHGVAVAADLKSTQEAINKITKNLNSLSELEVKNLQRLSGAMDELHNEILELDEKVDDLRADTISSQIELAVLLSNEGIINSEDEHLLALERKLKKMLGPSAVDIGNGCFETKHKCNQTCLDRIAAGTFNAGEFSLPTFDSLNITAASLNDDGLDNHTILLYYSTAASSLAVTLMIAIFIVYMISRDNVSCSICL

SEQ ID NO: 26505 - protein, 584 aa, synthetic construct
  REGION 1..584: note = hemagglutinin__InfluenzaB__ABN50734
MKAIIVLLMVVTSNADRICTGITSSNSPHVVKTATQGEVNVTGAIPLTTTPTKSHFANLKGTKTRGKLCPTCLNCTDLDVALGRPMCVGITPSAKASILHEVRPVTSGCFPIMHDRTKIRQLPNLLRGYEKIRLSTQNVINAEKAPGGPYRLGTSGSCPNATSRSGFFTTMAWAVPRDNNKTATNPLTVEVPHICTKEEDQITVWGFHSDDKTQMKNLYGDSNPQKFTSSTNGITTHYVSQIGGFPDQTEDGGLPQSGRIVVDYMVQKPGKTGTIVYQRGILLPQKVWCASGRSKVIKGSLPLIGEADCLHEKYGGLNKSKPYYTGEHAKAIGNCPIWVKTPLKLANGTKYRPPAKLLKERGFFGAIAGFLEGGWEGMIAGWHGYTSHGAHGVAVAADLKSTQEAINKITKNLNSLSELEVKNLQRLSGAMDELHNEILELDEKVDDLRADTISSQIELAVLLSNEGIINSEDEHLLALERKLKKMLGPSAVDIGNGCFETKHKCNQTCLDRIAAGTFNAGEFSLPTFDSLNITAASLNDDGLDNHTILLYYSTAASSLAVTLMIAIFIVYMISRDNVSCSICL

SEQ ID NO: 26506 - protein, 585 aa, synthetic construct
  REGION 1..585: note = hemagglutinin__InfluenzaB__ABN50745
MKAIIVLLMVVTSNADRICTGITSSNSPHVVKTATQGEVNVTGVIPLTTTPTKSHFANLKGTKTRGKLCPKCLNCTDLDVALGRPKCTGNIPSAKVSILHEVRPVTSGCFPIMHDRTKIRQLPNLLRGYEHIRLSTHNVINAEKAPGGPYKIGTSGSCPNITNGNGFFATMAWAVPKNDNNKTATNSLTIEVPYICTEGEDQITVWGFHSDNETQMAKLYGDSKPQKFTSSANGVTTHYVSQIGGFPNQTEDGGLPQSGRIVVDYMVQKSGKTGTITYQRGILLPQKVWCASGRSKVIKGSLPLIGEADCLHEKYGGLNKSKPYYTGEHAKAIGNCPIWVKTPLKLANGTKYRPPAKLLKERGFFGAIAGFLEGGWEGMIAGWHGYTSHGAHGVAVAADLKSTQEAINKITKNLNSLSELEVKNLQRLSGAMDELHNEILELDEKVDDLRADTISSQIELAVLLSNEGIINSEDEHLLALERKLKKMLGPSAVEIGNGCFETKHKCNQTCLDRIAAGTFNAGEFSLPTFDSLNITAASLNDDGLDNHTILLYYSTAASSLAVTLMIAIFVVYMVSRDNVSCSICL

SEQ ID NO: 26507 - protein, 583 aa, synthetic construct
  REGION 1..583: note = hemagglutinin__InfluenzaB__ABN51184
MKAIIVLLMVVTSNADRICTGITSSNSPHVVKTATQGEVNVTGVIPLTTTPTKSHFANLKGTKTRGKLCPNCLNCTDLDVALGRPMCIGTIPSAKASILHEVRPVTSGCFPIMHDRTKIRQLPNLLRGYENIRLSTHNVINAERAPGGPYRLGTSGSCPNVTSKSGFFATMAWAVPRDNKTATNPLTVEVPYICTKGEDQITVWGFHSDNKIQMKNLYGDSNPQKFTSSANGVTTHYVSQIGGFPNQTEDGGLPQSGRIVVDYMVQKPGKTGTIVYQRGVLLPQKVWCASGRSKVIKGSLPLIGEADCLHEKYGGLNKSKPYYTGEHAKAIGNCPIWVKTPLKLANGTKYRPPAKLLKERGFFGAIAGFLEGGWEGMIAGWHGYTSHGAHGVAVAADLKSTQEAINKITKNLNSLSELEVKNLQRLSGAMDELHNEILELDEKVDDLRADTISSQIELAVLLSNEGIINSEDEHLLALERKLKKMLGPSAVDIGNGCFETKHKCNQTCLDRIAAGTFNAGEFSLPTFDSLNITAASLNDDGLDNHTILLYYSTAASSLAVTLMIAIFIVYMVSRDNVSCSICL

SEQ ID NO: 26508 - protein, 583 aa, synthetic construct
  REGION 1..583: note = hemagglutinin__InfluenzaB__ABN51195
MKAIIVLLMVVTSNADRICTGITSSNSPHVVKTATQGEVNVTGVIPLTTTPTKSHFANLKGTKTRGKLCPNCLNCTDLDVALGRPMCIGTIPSAKASILHEVRPVTSGCFPIMHDRTKIRQLPNLLRGYENIRLSTHNVINAERAPGGPYRLGTSGSCPNVTSRSGFFATMAWAVPRDNKTATNPLTVEVPYICTKGEDQITVWGFHFDNKIQMKNLYGDSNPQKFTSSANGVTTHYVSQIGGFPNQTEDGGLPQSGRIVVDYMVQKPGKTGTIVYQRGVLLPQKVWCASGRSKVIKGSLPLIGEADCLHEKYGGLNKSKPYYTGEHAKAIGNCPIWVKTPLKLANGTKYRPPAKLLKERGFFGAIAGFLEGGWEGMIAGWHGYTSHGAHGVAVAADLKSTQEAINKITKNLNSLSELEVKNLQRLSGAMDELHNEILELDEKVDDLRADTISSQIELAVLLSNEGIINSEDEHLLALERKLKKMLGPSAVDIGNGCFETKHKCNQTCLDRIAAGTFNAGEFSLPTFDSLNITAASLNDDGLDNHTILLYYSTAASSLAVTLMIAIFIVYMVSRDNVSCSICL

SEQ ID NO: 26509 - protein, 585 aa, synthetic construct
  REGION 1..585: note = hemagglutinin__InfluenzaB__ABN58661
MKAIIVLLMVVTSNADRICTGITSSNSPHVVKTATQGEVNVTGVIPLTTTPTKSHFANLKGTKTRGKLCPKCLNCTDLDVALGRPKCTGTIPSAKVSILHEVKPVTSGCFPIMHDRTKIRQLPNLLRGYEHIRLSTHNVINAEKAPGGPYKIGTSGSCPNVTNGNGFFATMAWAVPKNDNNKTATNSLTVEVPYICTEGEDQITVWGFHSDNETQMAKLYGDSKPQKFTSSANGVTTHYVSQIGGFPNQAEDGGLPQSGRIVVDYMVQKSGKTGTITYQRGILLPQKVWCASGRSKVIKGSLPLIGEADCLHEKYGGLNKSKPYYTGEHAKAIGNCPIWVKTPLKLANGTKYRPPAKLLKERGFFGAIAGFLEGGWEGMIAGWHGYTSHGAHGVAVAADLKSTQEAINKITKNLNSLSELEVKNLQRLSGAMDELHNEILELDEKVDDLRADTISSQIELAVLLSNEGIINSEDEHLLALERKLKKMLGPSAVEIGNGCFETKHKCNQTCLDRIAAGTFNAGEFSLPTFDSLNITAASLNDDGLDNHTILLYYSTAASSLAVTLMIAIFIVYMVSRDNVSCSICL

SEQ ID NO: 26510 - protein, 584 aa, synthetic construct; identical to SEQ ID NO: 26398
  REGION 1..584: note = hemagglutinin__InfluenzaB__ABN59445

SEQ ID NO: 26511 - protein, 584 aa, synthetic construct
  REGION 1..584: note = hemagglutinin__InfluenzaB__ABO72377
MKAIIVLLMVVTSNADRICTGITSSNSPHVVKTATQGEVNVTGAIPLTTTPTKSHFANLKGTKTRGKLCPTCFNCTDLDVALGRPMCVGITPSAKASILHEVRPVTSGCFPIMHDRTKIRQLPNLLRGYEKIRLSTQNVIDAEKAPGGPYRLGTSGSCPNATSKSGFFATMAWAVPRDNNKTATNPLTVEVPHICTKEEDQITVWGFHSDNKTQMKNLYGDSNPQKFTSSANGITTHYVSQIGGFPDQTEDGGLPQSGRIVVDYMVQKPGKTGTIVYQRGILLPQKVWCASGRSKVIKGSLPLIGEADCLHEKYGGLNKSKPYYTGEHAKAIGNCPIWVKTPLKLANGTKYRPPAKLLKERGFFGAIAGFLEGGWEGMIAGWHGYTSHGAHGVAVAADLKSTQEAINKITKNLNSLSELEVKNLQRLSGAMDELHNEILELDEKVDDLRADTISSQIELAVLLSNEGIINSEDEHLLALERKLKKMLGPSAVDIGNGCFETKHKCNQTCLDRIAAGTFNAGEFSLPTFDSLNITAASLNDDGLDNHTILLYYSTAASSLAVTLMIAIFIVYMISRDNVSCSICL

SEQ ID NO: 26512 - protein, 584 aa, synthetic construct; identical to SEQ ID NO: 26405
  REGION 1..584: note = hemagglutinin__InfluenzaB__ABR15973

SEQ ID NO: 26513 - protein, 583 aa, synthetic construct
  REGION 1..583: note = hemagglutinin__InfluenzaB__ABR15995
MKAIIVLLMVVTSNADRICTGITSSNSPHVVKTATQGEVNVTGVIPLTTTPTKSHFANLKGTKTRGKLCPNCLNCTDLDVALGRPMCIGITPSAKASILHEVRPVTSGCFPIMHDRTKIRQLPNLLRGYEHIRLSTHNVINAERAPGGPYRLGTSGSCPNVTSRSGFFATMAWAVPRDNKTATNPLTVEVPYICTKGEDQITVWGFHSDYKTQMKNLYGDSNPQKFTSSANGITTHYVSQIGGFPNQTEDGGLPQSGRIVVDYMVQKPGKTGTIVYQRGVLLPQKVWCASGRSKVIKGSLPLIGEADCLHEKYGGLNKSKPYYTGEHAKAIGNCPIWVKTPLKLANGTKYRPPAKLLKERGFFGAIAGFLEGGWEGMIAGWHGYTSHGAHGVAVAADLKSTQEAINKITKNLNSLSELEVKNLQRLSGAMDELHNEILELDEKVDDLRADTISSQIELAVLLSNEGIINSEDEHLLALERKLKKMLGPSAVDIGNGCFETKHKCNQTCLDRIAAGTFNAGEFSLPTFDSLNITAASLNDDGLDNHTILLYYSTAASSLAVTLMIAIFIVYMVSRDNVSCSICL

SEQ ID NO: 26514 - protein, 585 aa, synthetic construct
  REGION 1..585: note = hemagglutinin__InfluenzaB__ABR16017
MKAIIVLLMVVTSNADRICTGITSSNSPHVVKTATQGEVNVTGVIPLTTTPTKSHFANLKGTETRGKLCPKCLNCTDLDVALGRPKCTGNIPSARVSILHEVRPVTSGCFPIMHDRTKIRQLPNLLRGYEHIRLSTHNVINAENAPGGPYKIGTSGSCPNVTNGNGFFATMAWAVPKNDNNKTATNSLTIEVPYICTEGEDQITVWGFHSDNETQMAKLYGDSKPQKFTSSANGVTTHYVSQIGGFPNQTEDGGLPQSGRIVVDYMVQKSGKTGTITYQRGILLPQKVWCASGRSKVIKGSLPLIGEADCLHEKYGGLNKSKPYYTGEHAKAIGNCPIWVKTPLKLANGTKYRPPAKLLKERGFFGAIAGFLEGGWEGMIAGWHGYTSHGAHGVAVAADLKSTQEAINKITKNLNSLSELEVKNLQRLSGAMDELHNEILELDEKVDDLRADTISSQIELAVLLSNEGIINSEDEHLLALERKLKKMLGPSAVEIGNGCFETKHKCNQTCLDRIAAGTFDAGEFSLPTFDSLNITAASLNDDGLDNHTILLYYSTAASSLAVTLMIAIFVVYMVSRDNVSCSICL

SEQ ID NO: 26515 - protein, 585 aa, synthetic construct; identical to SEQ ID NO: 26514
  REGION 1..585: note = hemagglutinin__InfluenzaB__ACA64899

SEQ ID NO: 26516 - protein, 585 aa, synthetic construct
  REGION 1..585: note = hemagglutinin__InfluenzaB__ACA64932
MKAIIVLLMVVTSNADRICTGITSSNSPHVVKTATQGEVNVTGVIPLTTTPTKSHFSNLKGTETRGKLCPKCLNCTDLDVALGRPKCTGNIPSARVSILHEVRPVTSGCFPIMHDRTKIRQLPNLLRGYEHIRLSTHNVINAENAPGGPYKIGTSGSCPNVTNGNGFFATMAWAVPKNDINKTATNSLTIEVPYICTEGEDQITVWGFHSDNETQMAKLYGDSKPQKFTSSANGVTTHYVSQIGGFPNQTEDGGLPQSGRIVVDYMVQKSGKTGTITYQRGILLPQKVWCASGRSKVIKGSLPLIGEADCLHEKYGGLNKSKPYYTGEHAKAIGNCPIWVKTPLKLANGTKYRPPAKLLKERGFFGAIAGFLEGGWEGMIAGWHGYTSHGAHGVAVAADLKSTQEAINKITKNLNSLSELEVKNLQRLSGAMDELHNEILELDEKVDDLRADTISSQIELAVLLSNEGIINSEDEHLLALERKLKKMLGPSAVEIGNGCFETKHKCNQTCLDKIAAGTFDAGEFSLPTFDSLNITAASLNDDGLDNHTILLYYSTAASSLAVTLMIAIFVVYMVSRDNVSCSICL

SEQ ID NO: 26517 - protein, 585 aa, synthetic construct; identical to SEQ ID NO: 26514
  REGION 1..585: note = hemagglutinin__InfluenzaB__ACA64943

SEQ ID NO: 26518 - protein, 585 aa, synthetic construct
  REGION 1..585: note = hemagglutinin__InfluenzaB__ACA64954
MKAIIVLLMVVTSNADRICTGITSSNSPHVVKTATQGEVNVTGVIPLTTTPTKSHFANLKGTETRGKLCPKCLNCTDLDVALGRPKCTGNIPSARVSILHEVRPVTSGCFPIMHDRTKIRQLPNLLRGYEHIRLSTHNVINAENAPGGPYKIGTSGSCPNVTNGNGFFATMAWAVPKNDNNKTATSSLTIEVPYICTEGEDQITVWGFHSDNETQMAKLYGDSKPQKFTSSANGVTTHYVSQIGGFPNQTEDGGLPQSGRIVVDYMVQKSGKTGTITYQRGILLPQKVWCASGRSKVIKGSLPLIGEADCLHEKYGGLNKSKPYYTGEHAKAIGNCPIWVKTPLKLANGTKYRPPAKLLKERGFFGAIAGFLEGGWEGMIAGWHGYTSHGAHGVAVAADLKSTQEAINKITKNLNSLSELEVKNLQRLSGAMDELHNEILELDEKVDDLRADTISSQIELAVLLSNEGIINSEDEHLLALERKLKKMLGPSAVEIGNGCFETKHKCNQTCLDRIAAGTFDAGEFSLPTFDSLNITAASLNDDGLDNHTILLYYSTAASSLAVTLMIAIFVVYMVSRDNVSCSICL

SEQ ID NO: 26519 - protein, 585 aa, synthetic construct; identical to SEQ ID NO: 26514
  REGION 1..585: note = hemagglutinin__InfluenzaB__ACA64965

SEQ ID NO: 26520 - protein, 585 aa, synthetic construct
  REGION 1..585: note = hemagglutinin__InfluenzaB__ACA64998
MKAIIVLLMVVTSNADRICTGITSSNSPHVVKTATQGEVNVTGVIPLTTTPTKSHFANLKGTETRGKLCPKCFNCTDLDVALGRPKCTGNIPSARVSILHEVRPVTSGCFPIMHDRTKIRQLPNLLRGYEHIRLSTHNVINAENAPGGPYKIGTSGSCPNVTNGNGFFATMAWAVPKNDNNKTATNSLTIEVPYICTEGEDQITVWGFHSDNETQMAKLYGDSKPQKFTSSANGVTTHYVSQIGGFPNQTEDGGLPQSGRIVVDYMVQKSGKTGTITYQRGILLPQKVWCASGRSKVIKGSLPLIGEADCLHEKYGGLNKSKPYYTGEHAKAIGNCPIWVKTPLKLANGTKYRPPAKLLKERGFFGAIAGFLEGGWEGMIAGWHGYTSHGAHGVAVAADLKSTQEAINKITKNLNSLSELEVKNLQRLSGAMDELHNEILELDEKVDDLRADTISSQIELAVLLSNEGIINSEDEHLLALERKLKKMLGPSAVEIGNGCFETKHKCNQTCLDRIAAGTFDAGEFSLPTFDSLNITAASLNDDGLDNHTILLYYSTAASSLAVTLMIAIFVVYMVSRDNVSCSICL

SEQ ID NO: 26521 - protein, 585 aa, synthetic construct
  REGION 1..585: note = hemagglutinin__InfluenzaB__ACA65020
MKAIIVLLMVVTSNADRICTGITSSNSPHVVKTATQGEVNVTGVIPLTTTPTKSHFSNLKGTETRGKLCPKCLNCTDLDVALGRPKCTGNIPSARVSILHEVRPVTSGCFPIMHDRTKIRQLPNLLRGYEHIRLSTHNVINAENAPGGPYKIGTSGSCPNVTNGNGFFATMAWAVPKNDNNKTATNSLTIEVPYICTEGEDQITIWGFHSDNETQMAKLYGDSKPQKFTSSANGVTTHYVSQIGGFPNQTEDGGLPQSGRIVVDYMVQKSGKTGTITYQRGILLPQKVWCASGRSKVIKGSLPLIGEADCLHEKYGGLNKSKPYYTGEHAKAIGNCPIWVKTPLKLANGTKYRPPAKLLKERGFFGAIAGFLEGGWEGMIAGWHGYTSHGAHGVAVAADLKSTQEAINKITKNLNSLSELEVKNLQRLSGAMDELHNEILELDEKVDDLRADTISSQIELAVLLSNEGIINSEDEHLLALERKLKKMLGPSAVEVGNGCFETKHKCNQTCLDRIAAGTFDAGEFSLPTFDSLNITAASLNDDGLDNHTILLYYSTAASSLAVTLMIAIFVVYMVSRDNVSCSICL

SEQ ID NO: 26522 - protein, 585 aa, synthetic construct; identical to SEQ ID NO: 26520
  REGION 1..585: note = hemagglutinin__InfluenzaB__ACA65031

SEQ ID NO: 26523 - protein, 585 aa, synthetic construct
  REGION 1..585: note = hemagglutinin__InfluenzaB__ACA65042
MKAIIVLLMVVTSNADRICTGITSSNSPHVVKTATQGEVNVTGVIPLTTTPTKSHFSNLKGTETRGKLCPKCLNCTDLDVALGRPKCTGNIPSARVSILHEVRPVTSGCFPIMHDRTKIRQLPNLLRGYEHIRLSTHNVINAENAPGGPYKIGTSGSCPNVTNGNGFFATMAWAVPKNDNNKTATNSLTIEVPYICTEGEDQITVWGFHSDNETQMAKLYGDSKPQKFTSSANGVTTHYVSQIGGFPNQTEDGGLPQSGRIIVDYMVQKSGKTGTITYQRGILLPQKVWCASGRSKVIKGSLPLIGEADCLHEKYGGLNKSKPYYTGEHAKAIGNCPIWVKTPLKLANGTKYRPPAKLLKERGFFGAIAGFLEGGWEGMIAGWHGYTSHGAHGVAVAADLKSTQEAINKITKNLNSLSELEVKNLQRLSGAMDELHNEILELDEKVDDLRADTISSQIELAVLLSNEGIINSEDEHLLALERKLKKMLGPSAVEIGNGCFETKHKCNQTCLDRIAAGTFDAGEFSLPTFDSLNITAASLNDDGLDNHTILLYYSTAASSLAVTLMIAIFVVYMVSRDNVSCSICL

SEQ ID NO: 26524 - protein, 585 aa, synthetic construct
  REGION 1..585: note = hemagglutinin__InfluenzaB__ACA65053
MKAIIVLLMVVTSNADRICTGITSSNSPHVVKTATQGEVNVTGVIPLTTTPTKSHFANLKGTETRGKLCPKCLNCTDLDVALGRPKCTGNIPSARVSILHEVRPVTSGCFPIMHDRTKIRQLPNLLRGYEHIRLSTRNVINAENAPGGPYKIGTSGSCPNVTNGNGFFATMAWAVPKNDNNKTATNSLTIEVPYICTEGEDQITVWGFHSDNETQMAKLYGDSKPQKFTSSANGVTTHYVSQIGGFPNQTEDGGLPQSGRIVVDYMVQKSGKTGTITYQRGILLPQKVWCASGRSKVIKGSLPLIGEADCLHEKYGGLNKSKPYYTGEHAKAIGNCPIWVKTPLKLANGTKYRPPAKLLKERGFFGAIAGFLEGGWEGMIAGWHGYTSHGAHGVAVAADLKSTQEAINKITKNLNSLSELEVKNLQRLSGAMDELHNEILELDEKVDDLRADTISSQIELAVLLSNEGIINSEDEHLLALERKLKKMLGPSAVEIGNGCFETKHKCNQTCLDRIAAGTFDAGEFSLPTFDSLNITAASLNDDGLDNHTILLYYSTAASSLAVTLMIAIFVVYMVSRDNVSCSICL

SEQ ID NO: 26525 - protein, 585 aa, synthetic construct
  REGION 1..585: note = hemagglutinin__InfluenzaB__ACA65075
MKAIIVLLMVVTSNADRICTGITSSNSPHVVKTATQGEVNVTGVIPLTTTPTKSHFANLKGTETRGKLCPKCLNCTDLDVALGRPKCTGNIPSARVSILHEVRPVTSGCFPIMHDRTKIRQLPNLLRGYEHIRLSTHNVINAENAPGGPYKIGTSGSCPNITNGNGFFATMAWAVPKNDNNKTATNSLTIEVPYICTEGEDQITVWGFHSDNETQMAKLYGDSKPQKFTSSANGVTTHYVSQIGGFPNQTEDGGLPQSGRIVVDYMVQKSGKTGTITYQRGILLPQKVWCASGRSKVIKGSLPLIGEADCLHEKYGGLNKSKPYYTGEHAKAIGNCPIWVKTPLTLANGTKYRPPAKLLKERGFFGAIAGFLEGGWEGMIAGWHGYTSHGAHGVAVAADLKSTQEAINKITKNLNSLSELEVKNLQRLSGAMDELHNEILELDEKVDDLRADTISSQIELAVLLSNEGIINSEDEHLLALERKLKKMLGPSAVEIGNGCFETKHKCNQTCLDRIAAGTFDAGEFSLPTFDSLNITAASLNDDGLDNHTILLYYSTAASSLAVTLMIAIFVVYMVSRDNVSCSICL

SEQ ID NO: 26526 - protein, 585 aa, synthetic construct; identical to SEQ ID NO: 26514
  REGION 1..585: note = hemagglutinin__InfluenzaB__ACA65086

SEQ ID NO: 26527 - protein, 585 aa, synthetic construct; identical to SEQ ID NO: 26514
  REGION 1..585: note = hemagglutinin__InfluenzaB__ACA65097

SEQ ID NO: 26528 - protein, 585 aa, synthetic construct; identical to SEQ ID NO: 26514
  REGION 1..585: note = hemagglutinin__InfluenzaB__ACA96552

SEQ ID NO: 26529 - protein, 585 aa, synthetic construct; identical to SEQ ID NO: 26514
  REGION 1..585: note = hemagglutinin__InfluenzaB__ACA96563

SEQ ID NO: 26530 - protein, 585 aa, synthetic construct; identical to SEQ ID NO: 26514
  REGION 1..585: note = hemagglutinin__InfluenzaB__ACA96574

SEQ ID NO: 26531 - protein, 585 aa, synthetic construct; identical to SEQ ID NO: 26514
  REGION 1..585: note = hemagglutinin__InfluenzaB__ACA96585

SEQ ID NO: 26532 - protein, 585 aa, synthetic construct
  REGION 1..585: note = hemagglutinin__InfluenzaB__ACA96596
MKAIIVLLMVVTSNADRICTGITSSNSPHVVKTATQGEVNVTGVIPLTTTPTKSHFANLKGTETRGKLCPKCLNCTDLDVALGRPKCTGNIPSARVSILHEVRPVTSGCFPIMHDRTKIRQLPNLLRGYEHIRLSTHNVINAENAPGGPYKIGTSGSCPNVTNGNGFFATMAWAVPKNDNNKTATNSLTIEVPYICTEGEDQITVWGFHSDNETQMAKLYGDSKPQKFTSSANGVTTHYVSQIGGFPNQTEDGGLPQSGRIVVDYMVQKSGKTGTITYQRGILLPQKVWCASGRSKVIKGSLPLIGEADCLHEKYGGLNKSKPYYTGEHAKAIGNCPIWVKTPLKLANGTKYRPPAKLLKERGFFGAIAGFLEGGWEGMIAGWHGYTSHGAHGVAVAADLKSTQEAIDKITKNLNSLSELEVKNLQRLSGAMDELHNEILELDEKVDDLRADTISSQIELAVLLSNEGIINSEDEHLLALERKLKKMLGPSAVEIGNGCFETKHKCNQTCLDRIAAGTFDAGEFSLPTFDSLNITAASLNDDGLDNHTILLYYSTAASSLAVTLMIAIFVVYMVSRDNVSCSICL

SEQ ID NO: 26533 - protein, 585 aa, synthetic construct; identical to SEQ ID NO: 26514
  REGION 1..585: note = hemagglutinin__InfluenzaB__ACA96607

SEQ ID NO: 26534 - protein, 585 aa, synthetic construct
  REGION 1..585: note = hemagglutinin__InfluenzaB__ACA96618
MKAIIVLLMVVTSNADRICTGITSSNSPHVVKTATQGEVNVTGVIPLTTTPTKSHFANLKGTETRGKLCPKCLNCTDLDVALGRPKCTGNIPSARVSILHEVRPVTSGCFPIMHDRTKIRQLPNLLRGYEHIRLSTHNVINAENAPGGPYKIGTSGSCPNVTNGNGFFATMAWAVPKNDNNKTATNSLTIEVPYICTEGEDQITVWGFHSDNETQMAKLYGDSKPQKFTSSANGVTTHYVSQIGGFPNQTEDGGLPQSGRIVVDYMVQKSGKTGTITYQRGILLPQKVWCASGRSKVIKGSLPLIGEADCLHEKYGGLNKSKPYYTGEHAKAIGNCPIWVKTPLKLANGTKYRPPAKLLKERGFFGAIAGFLEGGWEGMIAGWHGYTSHGAHGVAVAADLKSTQEAINKITKNLNSLSELEVKNLQRLSGAMDELHNEILELDEKVDDLRADTISSQIELAVLLSNEGIINSEDEHLLALERKLKKMLGPSAVEIGNGCFETKHKCNQTCLDRIAAGTFDAGEFFLPTFDSLNITAASLNDDGLDNHTILLYYSTAASSLAVTLMIAIFVVYMVSRDNVSCSICL

SEQ ID NO: 26535 - protein, 585 aa, synthetic construct; identical to SEQ ID NO: 26514
  REGION 1..585: note = hemagglutinin__InfluenzaB__ACA96629

SEQ ID NO: 26536 - protein, 585 aa, synthetic construct; identical to SEQ ID NO: 26520
  REGION 1..585: note = hemagglutinin__InfluenzaB__ACA96640

SEQ ID NO: 26537 - protein, 584 aa, synthetic construct
  REGION 1..584: note = hemagglutinin__InfluenzaB__ACD56566
MKAIIVLLMVVTSNADRICTGITSSNSPHVVKTATQGEVNVTGVIPLTTTPTKSYFANLKGTRTRGKLCPDCLNCTDLDVALGRPMCVGTTPSAKASILHEVRPVTSGCFPIMHDRTKIRQLPNLLRGYENIRLSTQNVVDAENAPGGPYRLGTSGSCPNATSKSGFFATMAWAVPKDNNKNATNPLTVEVPYVCTEGEDQITVWGFHSDNKTQMKNLYGDSNPQKFTSSANGVTTHYVSQIGGFPAQTEDGGLPQSGRIVVDYMVQKPRKTGTIVYQRGVLLPQKVWCASGRSKVIKGSLPLIGEADCLHEKYGGLNKSKPYYTGEHAKAIGNCPIWVKTPLKLANGTKYRPPAKLLKERGFFGAIAGFLEGGWEGMIAGWHGYTSHGAHGVAVAADLKSTQEAINKITKNLNSLSELEVKNLQRLSGAMDELHNEILELDEKVDDLRADTISSQIELAVLLSNEGIINSEDEHLLALERKLKKMLGPSAVDIGNGCFETKHKCNQTCLDKIAAGTFNAGEFSLPTFDSLNITAASLNDDGLDNHTILLYYSTAASSLAVTLMLAIFIVYMVSRDNVSCSICL

SEQ ID NO: 26538 - protein, 584 aa, synthetic construct
  REGION 1..584: note = hemagglutinin__InfluenzaB__ACD56577
MKAIIVLLMVVTSNADRICTGITSSNSPHVVKTATQGEVNVTGVIPLTTTPTKSYFANLKGTRTRGKLCPDCLNCTDLDVALGRPMCVGTTPSAKASILHEVRPVTSGCFPIMHDRTKIRQLPNLLRGYENIRLSTQNVIDAENAPGGPYRLGTSGSCPNATSKSGFFATMAWAVPKDNNKNATNPLTVEVPYICTEGEDQITVWGFHSDNKAQMKNLYGDSNPQKFTSSANGVTTHYVSQIGGFPAQTEDGGLPQSGRIVVDYMVQKPRKTGTIVYQRGVLLPQKVWCASGRSKVIKGSLPLIGEADCLHEKYGGLNKSKPYYTGEHAKAIGNCPIWVKTPLKLANGTKYRPPAKLLKERGFFGAIAGFLEGGWEGMIAGWHGYTSHGAHGVAVAADLKSTQEAINKITKNLNSLSELEVKNLQRLSGAMDELHNEILELDEKVDDLRADTISSQIELAVLLSNEGIINSEDEHLLALERKLKKMLGPSAVDIGNGCFETKHKCNQTCLDRIAAGTFNAGEFSLPTFDSLNITAASLNDDGLDNHTILLYYSTAASSLAVTLMLAIFIVYMVSRDNVSCSICL

SEQ ID NO: 26539 - protein, 585 aa, synthetic construct; identical to SEQ ID NO: 26520
  REGION 1..585: note = hemagglutinin__InfluenzaB__ACF41658

SEQ ID NO: 26540 - protein, 585 aa, synthetic construct
  REGION 1..585: note = hemagglutinin__InfluenzaB__ACF54136
MKAIIVLLMVVTSNADRICTGITSSNSPHVVKTATQGEVNVTGVIPLTTTPTKSHFANLKGTETRGKLCPKCLNCTDLDVALGRPKCTGNIPSARVSILHEVRPVTSGCFPIMHDRTKIRQLPNLLRGYEHIRLSTHNVINAENAPGGPYKIGTSGSCPNVTNGNGFFATMAWAVPKNDNNKTATNSLTIEVPYICTEGEDQITVWGFHSDNKTQMAKLYGDSKPQKFTSSANGVTTHYVSQIGGFPNQTEDGGLPQSGRIVVDYMVQKSGKTGTITYQRGILLPQKVWCASGRSKVIKGSLPLIGEADCLHEKYGGLNKSKPYYTGEHAKAIGNCPIWVKTPLKLANGTKYRPPAKLLKERGFFGAIAGFLEGGWEGMIAGWHGYTSHGAHGVAVAADLKSTQEAINKITKNLNSLSELEVKNLQRLSGAMDELHNEILELDEKVDDLRADTISSQIELAVLLSNEGIINSEDEHLLALERKLKKMLGPSAVEIGNGCFETKHKCNQTCLDRIAAGTFDAGEFSLPTFDSLNITAASLNDDGLDNHTILLYYSTAASSLAVTLMIAIFVVYMVSRDNISCSICL

SEQ ID NO: 26541 - protein, 585 aa, synthetic construct; identical to SEQ ID NO: 26514
  REGION 1..585: note = hemagglutinin__InfluenzaB__ACF54147

SEQ ID NO: 26542 - protein, 584 aa, synthetic construct
  REGION 1..584: note = hemagglutinin__InfluenzaB__ACF54158
MKAIIVLLMVVTSNADRICTGITSSNSPHVVKTATQGEVNVTGVIPLTTTPTKSYFANLKGTRTRGKLCPDCLNCTDLDVALGRPMCVGTTPSAKASILHEVRPVTSGCFPIMHDRTKIRQLANLLRGYENIRLSTQNVIDAEKAPGGPYRLGTSGSCPNATSKSGFFATMAWAVPKDNNKNATNPLTVEVPYICTEGEDQITVWGFHSDNKTQMKNLYGDSNPQKFTSSANGVTTHYVSQIGGFPDQTEDGGLPQSGRIVVDYMMQKPGKTGTIVYQRGVLLPQKVWCASGRSKVIKGSLPLIGEADCLHEKYGGLNKSRPYYTGEHAKAIGNCPIWVKTPLKLANGTKYRPPAKLLKERGFFGAIAGFLEGGWEGMIAGWHGYTSHGAHGVAVAADLKSTQEAINKITKNLNSLSELEVKNLQRLSGAMDELHNEILELDEKVDDLRADTISSQIELAVLLSNEGIINSEDEHLLALERKLKKMLGPSAVDIGNGCFETKHKCNQTCLDRIAAGTFNAGEFSLPTFDSLNITAASLNDDGLDNHTILLYYSTAASSLAVTLMLAIFIVYMVSRDNVSCSICL

SEQ ID NO: 26543 - protein, 584 aa, synthetic construct
  REGION 1..584: note = hemagglutinin__InfluenzaB__ACF54169
MKAIIVLLMVVTSNADRICTGITSSNSPHVVKTATQGEVNVTGVIPLTTTPTKSYFANLKGTRTRGKLCPDCLNCTDLDVALGRPMCVGTTPSAKASILHEVRPVTSGCFPIMHDRTKIRQLPNLLRGYENIRLSTQNVIDAENAPGGPYRLGTSGSCPNATSKSGFFATMAWAVPKDNNKNATNPLTVEVPYVCTEGEDQITVWGFHSDNKTPMKNLYGDSNPQKFTSSANGVTTHYVSQIGGFPAQTEDEGIPQSGRIVVDYMVQKPRKTGTIVYQRGVLLPQKVWCASGRSKVIKGSLPLIGEADCLHEKYGGLNKSKPYYTGEHAKAIGNCPIWVKTPLKLANGTKYRPPAKLLKERGFFGAIAGFLEGGWEGMIAGWHGYTSHGAHGVAVAADLKSTQEAISKITKNLNSLSELEVKNLQRLSGAMDELHNEILELDEKVDDLRADTISSQIELAVLLSNEGIINSEDEHLLALERKLKKMLGPSAVDIGNGCFETKHKCNQTCLDRIAAGTFNAGEFSLPTFDSLNITAASLNDDGLDNHTILLYYSTAASSLAVTLMLAIFIVYMVSRDNVSCSICL

SEQ ID NO: 26544 - protein, 584 aa, synthetic construct
  REGION 1..584: note = hemagglutinin__InfluenzaB__ACF54180
MKAIIVLLMVVTSNADRICTGITSSNSPHVVKTATQGEVNVTGVIPLTTTPTKSYFANLKGTRTRGKLCPDCLNCTDLDVALGRPMCVGTTPSAKASILHEVRPVTSGCFPIMHDRTKIRQLPNLLRGYENIRLSTQNVIDAENAPGGPYRLGTSGSCPNATSKSGFFATMAWAVPKDNNKNATNPLTVEVPYVCTEGEDQITVWGFHSDNKTPMKNLYGDSNPQKFTSSANGVTTHYVSQIGGFPAQTEDGGLPQSGRIVVDYMVQKPRKTGTIVYQRGVLLPQKVWCASGRSKVIKGSLPLIGEADCLHEKYGGLNKSKPYYTGEHAKAIGNCPIWVKTPLKLANGTKYRPPAKLLKERGFFGAIAGFLEGGWEGMIAGWHGYTSHGAHGVAVAADLKSTQEAINKITKNLNSLSELEVKNLQRLSGAMDELHNEILELDEKVDDLRADTISSQIELAVLLSNEGIINSEDEHLLALERKLKKMLGPSAVDIGNGCFETKHKCNQTCLDRIAAGTFNAGEFSLPTFDSLNITAASLNDDGLDNHTILLYYSTAASSLAVTLMLAIFIVYMVSRDNVSCSICL

SEQ ID NO: 26545 - protein, 584 aa, synthetic construct
  REGION 1..584: note = hemagglutinin__InfluenzaB__ACF54202
MKAIIVLLMVVTSNADRICTGITSSNSPHVVKTATQGEVNVTGVIPLTTTPTKSYFANLKGTRTRGKLCPDCLNCTDLDVALGRPMCVGTTPSAKASILHEVRPVTSGCFPIMHDRTKIRQLPNLLRGYENIRLSTQNVIDAENAPGGPYRLGTSRSCPNATSKSGFFATMAWAVPKDNNKNATNPLTVEVPYVCTEGEDQITVWGFHSDNKTQMKNLYGDSNPQKFTSSANGVTTHYVSQIGGFPAQTEDEGLPQSGRIVVDYMVQKPRKTGTIVYQRGVLLPQKVWCASGRSKVIKGSLPLIGEADCLHEKYGGLNKSKPYYTGEHAKAIGNCPIWVKTPLKLANGTKYRPPAKLLKERGFFGAIAGFLEGGWEGMIAGWHGYTSHGAHGVAVAADLKSTQEAINKITKNLNSLSELEVKNLQRLSGAMDELHNEILELDEKVDDLRADTISSQIELAVLLSNEGIINSEDEHLLALERKLKKMLGPSAVDIGNGCFETKHKCNQTCLDRIAAGTFNAGEFSLPTFDSLNITAASLNDDGLDNHTILLYYSTAASSLAVTLMLAIFIVYMVSRDNVSCSICL

SEQ ID NO: 26546 - protein, 584 aa, synthetic construct
  REGION 1..584: note = hemagglutinin__InfluenzaB__ACF54213
MKAIIVLLMVVTSNADRICTGITSSNSPHVVKTATQGEVNVTGVIPLTTTPTKSYFANLKGTRTRGKLCPDCLNCTDLDVALGRPMCVGTTPSAKASILHEVRPVTSGCFPIMHDRTKIRQLPNLLRGYENIRLSTQNVIDAEKAPGGPYRLGTSGSCPNATSKSGFFATMAWAVPKDNNKNATNPLTVEVPYICTEGEDQITVWGFHSDDKTQMKNLYGDSNPQKFTSSANGVTTHYVSQIGGFPDQTEDGGLPQSGRIVVDYMMQKPGKTGTIVYQRGVLLPQKVWCASGRSKVIKGSLPLIGEADCLHEKYGGLNKSKPYYTGEHAKAIGNCPIWVKTPLKLANGTKYRPPAKLLKERGFFGAIAGFLEGGWEGMIAGWHGYTSHGAHGVAVAADLKSTQEAINKITKNLNSLSELEVKNLQRLSGAMDELHNEILELDEKVDDLRADTISSQIELAVLLSNEGIINSENEHLLALERKLKKMLGPSAVDIGNGCFETKHKCNQTCLDRIAAGTFNAGEFSLPTFDSLNITAASLNDDGLDNHTILLYYSTAASSLAVTLMLAIFIVYMVSRDNVSCSICL

SEQ ID NO: 26547 - protein, 585 aa, synthetic construct
  REGION 1..585: note = hemagglutinin__InfluenzaB__ACF54224
MKAIIVLLMVVTSNADRICTGITSSNSPHVVKTATQGEVNVTGVIPLTTTPTKSHFANLKGTKTRGKLCPKCLNCTDLDVALGRPKCTGNIPSAEVSILHEVRPVTSGCFPIMHDRTKIRQLPNLLRGYEHIRLSTHNVINAEKAPGGPYKIGTSGSCPNVTNGNGFFATMAWAVPKNDNNKTATNSLTIEVPYICTEGEDQITVWGFHSDNETQMAKLYGDSKPQKFTSSSNGVTTHYVSQIGGFPNQTEDGGLPQSGRIVVDYMVQKSGKTGTITYQRGILLPQKVWCASGRSKVIKGSLPLIGEADCLHERYGGLNKSKPYYTGEHAKAIGNCPIWVKTPLKLANGTKYRPPAKLLKERGFFGAIAGFLEGGWEGMIAGWHGYTSHGAHGVAVAADLKSTQEAINKITKNLNSLSELEVKNLQRLSGAMDELHNEILELDEKVDDLRADTISSQIELAVLLSNEGIINSEDEHLLALERKLKKMLGPSAVEIGNGCFETKHKCNQTCLDRIAAGTFDAGEFSLPTFDSLNITAASLNDDGLDNHTILLYYSTAASSLAVTLMIAIFVVYMVSRDNVSCSICL

SEQ ID NO: 26548 - protein, 584 aa, synthetic construct
  REGION 1..584: note = hemagglutinin__InfluenzaB__ACF54257
MKAIIVLLMVVTSNADRICTGITSSNSPHVVKTATQGEVNVTGAIPLTTTPTKSHFANLKGTKTRGKLCPTCLNCTDLDVALGRPMCVGITPSAKASILHEVRPVTSGCFPIMHDRTKIRQLPNLLRGYEKIRLSTQNVIDAEKAPGGPYRLGTSGSCPNATSKSGFFATMAWAVPRENNKTATNPLTVEVPHICTKEEDQITVWGFHSDNKPQMKNLYGDSNPQKFTSSANGITTHYVSQIGGFPDQTEDGGLPQSGRIVVDYMVQKPGKTGTIVYQRGILLPQKVWCASGRSKVIKGSLPLIGEADCLHEKYGGLNKSKPYYTGEHAKAIGNCPIWVKTPLKLANGTKYRPPAKLLKERGFFGAIAGFLEGGWEGMIAGWHGYTSHGAHGVAVAADLKSTQEAINKITKNLNSLSELEVKNLQRLSGAMDELHNEILELDEKVDDLRADTISSQIELAVLLSNEGIINSEDEHLLALERKLKKMLGPSAVDIGNGCFETKHKCNQTCLDRIAAGTFNAGEFSLPTFDSLNITAASLNDDGLDNHTILLYYSTAASSLAVTLMIAIFIVYMISRDNVSCSICL

SEQ ID NO: 26549 - protein, 584 aa, synthetic construct
  REGION 1..584: note = hemagglutinin__InfluenzaB__ACF54268
MKAIIVLLMVVTSNADRICTGITSSNSPHVVKTATQGEVNVTGAIPLTTTPTKSHFANLKGTKTRGKLCPTCLNCTDLDVALGRPMCVGITPSAKASILHEVRPVTSGCFPIMHDRTKIRQLPNLLRGYEKIRLSTQNVIDAEKAPGGPYRLGTSGSCPNATSKSGFFATMAWAVPRENNKTATNPLTVEVPHICTKEEDQITVWGFHSDNKIQMKNLYGDSNPQKFTSSANGITTHYVSQIGGFPDQTEDGGLPQSGRIVVDYMVQKPGKTGTIVYQRGILLPQKVWCASGRSKVIKGSLPLIGEADCLHEKYGGLNKSKPYYTGEHAKAIGNCPIWVKTPLKLANGTKYRPPAKLLKERGFFGAIAGFLEGGWEGMIAGWHGYTSHGAHGVAVAADLKSTQEAINKITKNLNSLSELEVKNLQRLSGAMDELHNEILELDEKVDDLRADTISSQIELAVLLSNEGIINSEDEHLLALERKLKKMLGPSAIDIGNGCFETKHKCNQTCLDRIAAGTFNAGEFSLPTFDSLNITAASLNDDGLDNHTILLYYSTAASSLAVTLMIAIFIVYMISRDNVSCSICL

SEQ ID NO: 26550 - protein, 584 aa, synthetic construct
  REGION 1..584: note = hemagglutinin__InfluenzaB__ACF54279
MKAIIVLLMVVTSNADRICTGITSSNSPHVVKTATQGEVNVTGAIPLTTTPTKSHFANLKGTKTRGKLCPTCLNCTDLDVALGRPMCVGITPSAKASILHEVRPVTSGCFPIMHDRTKIRQLPNLLRGYEKIRLSTQNVIDAEKAPGGPYRLGTSGSCPNATSKSGFFATMAWAVPRENNKTATNPLTVEVPHICTKEEDQITVWGFHSDNKTQMKNLYGDSNPQKFTSSANGITTHYVSQIGGFPDQTEDGGLPQSGRIVVDYMVQKPGKTGTIVYQRGILLPQKVWCASGRSKVIKGSLPLIGEADCLHEKYGGLNKSKPYYTGEHAKAIGNCPIWVKTPLKLANGTKYRPPAKLLKERGFFGAIAGFLEGGWEGMIAGWHGYTSHGAHGVAVAADLKSTQEAINKITKNLNSLSELEVKNLQRLSGAMDELHNEILELDEKVDDLRADTISSQIELAVLLSNEGIINSEDEHLLALERKLKKMLGPSAVDIGNGCFETKHKCNQTCLDRIAAGTFNAGEFSLPTFDSLNITAASLNDDGLDNHTILLYYSTAASSLAVTLMIAIFIVYMISRDNVSCSICL

SEQ ID NO: 26551 - protein, 584 aa, synthetic construct
  REGION 1..584: note = hemagglutinin__InfluenzaB__ACF54290
MKAIIVLLMVVTSNADRICTGITSSNSPHVVKTATQGEVNVTGVIPLTTTPTKSYFANLKGTRTRGKLCPDCLNCTDLDVALGRPMCVGTTPSAKASILHEVRPVTSGCFPIMHDRTKIRQLPNLLRGYENIRLSTQNVVDAENAPGGPYRLGTSGSCPNATSKSGFFATMAWAVPKDNNKNATNPLTVEVPYVCTEGEDQITVWGFHSDKKTQMKNLYGDSNPQKFTSSANGVTTHYVSQIGGFPAQTEDGGLPQSGRIVVDYMVQKPRKTGTIVYQRGVLLPQKVWCASGRSKVIKGSLPLIGEADCLHEKYGGLNKSKPYYTGEHAKAIGNCPIWVKTPLKLANGTKYRPPAKLLKERGFFGAIAGFLEGGWEGMIAGWHGYTSHGAHGVAVAADLKSTQEAINKITKNLNSLSELEVKNLQRLSGAMDELHNEILELDEKVDDLRADTISSQIELAVLLSNEGIINSEDEHLLALERKLKKMLGPSAVDIGNGCFETKHKCNQTCLDKIAAGTFNAGEFSLPTFDSLNITAASLNDDGLDNHTILLYYSTAASSLAVTLMLAIFIVYMVSRDNVSCSICL

SEQ ID NO: 26552 - protein, 585 aa, synthetic construct
  REGION 1..585: note = hemagglutinin__InfluenzaB__ACF54312
MKAIIVLLMVVTSNADRICTGITSSNSPHVVKTATQGEVNVTGVIPLTTTPTKSHFANLKGTKTRGKLCPKCLNCTDLDVALGRPKCTGNIPSAEVSILHEVRPVTSGCFPIMHDRTKIRQLPNLLRGYEHIRLSTHNVINAEKAPGGPYKIGTSGSCPNVTNGNGFFATMAWAVPKNDNNKTATNSLTIEVPYICTEGEDQITVWGFHSDSETQMAKLYGDSKPQKFTSSSNGVTTHYISQIGGFPNQTEDGGLPQSGRIVVDYMVQKSGKTGTITYQRGILLPQKVWCASGRSKVIKGSLPLIGEADCLHEKYGGLNKSKPYYTGEHAKAIGNCPIWVKTPLKLANGTKYRPPAKLLKERGFFGAIAGFLEGGWEGMIAGWHGYTSHGAHGVAVAADLKSTQEAINKITKNLNSLSELEVKNLQRLSGAMDELHNEILELDEKVDDLRADTISSQIELAVLLSNEGIINSEDEHLLALERKLKKMLGPSAIEIGNGCFETKHKCNQTCLDRIAAGTFDAGEFSLPTFDSLNITAASLNDDGLDNHTILLYYSTAASSLAVTLMIAIFVVYMVSRDNVSCSICL

SEQ ID NO: 26553 - protein, 585 aa, synthetic construct
  REGION 1..585: note = hemagglutinin__InfluenzaB__ACF54323
MKAIIVLLMVVTSNADRICTGITSSNSPHVVKTATQGEVNVTGVIPLTTTPTKSHFANLKGTETRGKLCPKCLNCTDLDVALGRPKCTGNIPSARVSILHEVRPVTSGCFPIMHDRTKIRQLPNLLRGYEHIRLSTRNVINAENAPGGPYKIGTSGSCPNVTNGNGFFATMAWAVPKNDNNKTATNSLTIEVPYICTEGEDQITVWGFHSDNEAQMAKLYGDSKPQKFTSSANGVTTHYVSQIGGFPNQTEDGGLPQSGRIVVDYMVQKSGKTGTITYQRGILLPQKVWCASGRSKVIKGSLPLIGEADCLHEKYGGLNKSKPYYTGEHAKAIGNCPIWVKTPLKLANGTKYRPPAKLLKERGFFGAIAGFLEGGWEGMIAGWHGYTSHGAHGVAVAADLKSTQEAINKITKNLNSLSELEVKNLQRLSGAMDELHNEILELDEKVDDLRADTISSQIELAVLLSNEGIINSEDEHLLALERKLKKMLGPSAVEIGNGCFETKHKCNQTCLDRIAAGTFDAGEFSLPTFDSLNITAASLNDDGLDNHTILLYYSTAASSLAVTLMIAIFVVYMVSRDNVSCSICL

SEQ ID NO: 26554 - protein, 584 aa, synthetic construct
  REGION 1..584: note = hemagglutinin__InfluenzaB__ACF54345
MKAIIVLLMVVTSNADRICTGITSSNSPHVVKTATQGEVNVTGVIPLTTTPTKSYFANLKGTRTRGKLCPDCLNCTDLDVALGRPMCVGTTPSAKASILHEVRPVTSGCFPIMHDRTKIRQLANLLRGYENIRLSTQNVIDAEKAPGGPYRLGTSGSCPNATSKSGFFATMAWAVPKDNNKNATNPLTVEVPYICTEGEDQITVWGFHSDNKAQMKNLYGDSNPQKFTSSANGVTTHYVSQIGGFPDQTEDGGLPQSGRIVVDYMIQKPGKTGTIVYQRGVLLPQKVWCASGRSKVIKGSLPLIGEADCLHEKYGGLNKSKPYYTGEHAKAIGNCPIWVKTPLKLANGTKYRPPAKLLRERGFFGAIAGFLEGGWEGMIAGWHGYTSHGAHGVAVAADLKSTQEAINKITKNLNSLSELEVKNLQRLSGAMDELHNEILELDEKVDDLRADTISSQIELAVLLSNEGIINSEDEHLLALERKLKKMLGPSAVDIGNGCFETKHKCNQTCLDRIAAGTFNAGEFSLPTFDSLNITAASLNDDGLDNHTILLYYSTAASSLAVTLMLAIFIVYMVSRDNVSCSICL

SEQ ID NO: 26555 - protein, 584 aa, synthetic construct
  REGION 1..584: note = hemagglutinin__InfluenzaB__ACF54367
MKAIIVLLMVVTSNADRICTGITSSNSPHVVKTATQGEVNVTGVIPLTTAPTKSYFANLKGTRTRGKLCPDCLNCTDLDVALGRPMCVGTTPSAKASILHEVRPVTSGCFPIMHDRTKIRQLANLLRGYENIRLSTQNVIDAEKAPGGPYRLGTSGSCPNATSKSGFFATMAWAVPKDNNKNATNPLTVEVPYICTEGEDQITVWGFHSDSKTQMKNLYGDSNPQKFTSSANGVTTHYVSQIGGFPDQTEDGGLPQSGRIVVDYMMQKPGKTGTIVYQRGVLLPQKVWCASGRSKVIKGSLPLIGEADCLHEKYGGLNKSKPYYTGEHAKAIGNCPIWVKTPLKLANGTKYRPPAKLLKERGFFGAIAGFLEGGWEGMIAGWHGYTSHGAHGVAVAADLKSTQEAINKITKNLNSLSELEVKNLQRLSGAMDELHNEILELDEKVDDLRADTISSQIELAVLLSNEGIINSEDEHLLALERKLKKMLGPSAVDIGNGCFETKHKCNQTCLDRIAAGTFNAGEFSLPTFDSLNITAASLNDDGLDNHTILLYYSTAASSLAVTLMLAIFIVYMVSRDNVSCSICL

SEQ ID NO: 26556 - protein, 584 aa, synthetic construct
  REGION 1..584: note = hemagglutinin__InfluenzaB__ACN32556
MKAIIVLLMVVTSNADRICTGITSSNSPHVVKTATQGEVNVTGAIPLTTTPTKSHFANLKGTKTRGKLCPTCLNCTDLDVALGRPMCVGITPSAKASILHEVRPVTSGCFPIMHDRTKIRQLPNLLRGYEKIRLSTQNVINAEKAPGGPYRLGTSGSCPNATSKSGFFATMAWAVPRDNNKTATNPLTVEVPHICTKEEDQITVWGFHSDNKTQMKNLYGDSNPQKFTSFANGITTHYVSQIGGFPDQTEDGGLPQSGRIVVDYMVQKPGKTGTIVYQRGILLPQKVWCASGRSKVIKGSLPLIGEADCLHEKYGGLNKSKPYYTGEHAKAIGNCPIWVKTPLKLANGTKYRPPAKLLKERGFFGAIAGFLEGGWEGMIAGWHGYTSHGAHGVAVAADLKSTQEAINKITKNLNSLSELEVKNLQRLSGAMDELHNEILELDEKVDDLRADTISSQIELAVLLSNEGIINSEDEHLLALERKLKKMLGPSAVDIGNGCFETKHKCNQTCLDRIAAGTFNAGEFSLPTFDSLNITAASLNDDGLDNHTILLYYSTAASSLAVTLMIAIFIVYMISRDNVSCSICL

SEQ ID NO: 26557 - protein, 585 aa, synthetic construct
  REGION 1..585: note = hemagglutinin__InfluenzaB__ACN32567
MEAIIVLLMVVTSNADRICTGITSSNSPHVVKTATQGEVNVTGVIPLTTTPTKSHFANLKGTETRGKLCPKCLNCTDLDVALGRPKCTGNIPSARVSILHEVRPVTSGCFPIMHDRTKIRQLPNLLRGYEHIRLSTHNVINAENAPGGPYKIGTSGSCPNVTNGNGFFATMAWAVPKNDNNKTATNSLTIEVPYICTEGEDQITVWGFHSDNETQMAKLYGDSKPQKFTSSANGVTTHYVSQIGGFPNQTEDGGLPQSGRIVVDYMVQKSGKTGTITYQRGILLPQKVWCASGRSKVIKGSLPLIGEADCLHEKYGGLNKSKPYYTGEHAKAIGNCPIWVKTPLKLANGTKYRPPAKLLKERGFFGAIAGFLEGGWEGMIAGWHGYTSHGAHGVAVAADLKSTQEAINKITKNLNSLSELEVKNLQRLSGAMDELHNEILELDEKVDDLRADTISSQIELAVLLSNEGIINSEDEHLLALERKLKKMLGPSAVEIGNGCFETKHKCNQTCLDRIAAGTFDAGEFSLPTFDSLNITAASLNDDGLDNHTILLYYSTAASSLAVTLMIAIFVVYMVSRDNVSCSICL

SEQ ID NO: 26558 - protein, 585 aa, synthetic construct; identical to SEQ ID NO: 26514
  REGION 1..585: note = hemagglutinin__InfluenzaB__ACN32578

SEQ ID NO: 26559 - protein, 585 aa, synthetic construct
  REGION 1..585: note = hemagglutinin__InfluenzaB__ACN32589
MKAIIVLLMVVTSNADRICTGITSSNSPHVVKTATQGEVNVTGVIPLTTTPTKSHFSNLKGTETRGKLCPKCLNCTDLDVALGRPKCTGNIPSARVSILHEVRPVTSGCFPIMHDRTKIRQLPNLLRGYEHIRLSTHNVINAENAPGGPYKIGTSGSCPNVTNGNGFFATMAWAVPKNDNNKTATNSLTIEVPYICTEGEDQITIWGFHSDNETQMAKLYGDSKPQKFTSSANGVTTHYVSQIGGFPNQTEDGGLPQSGRIVVDYMVQKSGKTGTITYQRGILLPQKVWCASGRSKVIKGSLPLIGEADCLHEKYGGLNKSKPYYTGEHAKAIGNCPIWVKTPLKLANGTKYRPPAKLLKERGFFGAIAGFLEGGWEGMIAGWHGYTSHGAHGVAVAADLKSTQEAINKITKNLNSLSELEVKNLQRLSGAMDELHNEILELDEKVDDLRADTISSQIELAVLLSNEGIINSEDEHLLALERKLKKMLGPSAVEIGNGCFETKHKCNQTCLDRIAAGTFDAGEFSLPTFDSLNITAASLNDDGLDNHTILLYYSTAASSLAVTLMIAIFVVYMVSRDNVSCSICL

SEQ ID NO: 26560 - protein, 585 aa, synthetic construct
  REGION 1..585: note = hemagglutinin__InfluenzaB__ACN32600
MKAIIVLLMVVTSNADRICTGITSSNSPHVVKTATQGEVNVTGVIPLTTTPTKSHFSNLKGTETRGKLCPKCLNCTDLDVALGRPKCTGNIPSARVSILHEVRPVTSGCFPIMHDRTKIRQLPNLLRGYEHIRLSTHNVINAENAPGGPYKIGTSGSCPNVTNGNGFFATMAWAVPKNDNNKTATNSLTIEVPYICTEGEDQITVWGFHSDNETQMAKLYGDSKPQKFTSSANGVTTHYVSQIGGFPNQTEDGGLPQSGRIVVDYMVQKSGKTGTITYQRGILLPQKVWCASGRSKVIKGSLPLIGEADCLHEKYGGLNKSKPYYTGEHAKAIGNCPIWVKTPLKLANGTKYRPPARLLKERGFFGAIAGFLEGGWEGMIAGWHGYTSHGAHGVAVAADLKSTQEAINKITKNLNSLSELEVKNLQRLSGAMDELHNEILELDEKVDDLRADTISSQIELAVLLSNEGIINSEDEHLLALERKLKKMLGPSAVEIGNGCFETKHKCNQTCLDRIAAGTFDAGEFSLPTFDSLNITAASLNDDGLDNHTILLYYSTAASSLAVTLMIAIFVVYMVSRDNVSCSICL

SEQ ID NO: 26561 - protein, 585 aa, synthetic construct; identical to SEQ ID NO: 26525
  REGION 1..585: note = hemagglutinin__InfluenzaB__ACN32611

SEQ ID NO: 26562 - protein, 584 aa, synthetic construct; identical to SEQ ID NO: 26426
  REGION 1..584: note = hemagglutinin__InfluenzaB__ACN32716

SEQ ID NO: 26563 - protein, 585 aa, synthetic construct; identical to SEQ ID NO: 26514
  REGION 1..585: note = hemagglutinin__InfluenzaB__ACN32771

SEQ ID NO: 26564 - protein, 585 aa, synthetic construct; identical to SEQ ID NO: 26520
  REGION 1..585: note = hemagglutinin__InfluenzaB__ACN32782

SEQ ID NO: 26565 - protein, 585 aa, synthetic construct
  REGION 1..585: note = hemagglutinin__InfluenzaB__ACO05957
MKAIIVLLMVVTSNADRICTGITSSNSPHVVKTATQGEVNVTGVIPLTTTPTKSHFANLKGTETRGKLCPKCLNCTDLDVALGRPKCTGNIPSARVSILHEVRPVTSGCFPIMHDRTKIRQLPNLLRGYEHIRLSTHNVINAENAPGGPYKIGTSGSCPNVTNGNGFFATMAWAVPKNDNNKTATNSLTIEVPYICTEGEDQITVWGFHSDNEIQMAKLYGDSKPQKFTSSANGVTTHYVSQIGGFPNQTEDGGLPQSGRIVVDYMVQKSGKTGTITYQRGILLPQKVWCASGRSKVIKGSLPLIGEADCLHEKYGGLNKSKPYYTGEHAKAIGNCPIWVKTPLKLANGTKYRPPAKLLKERGFFGAIAGFLEGGWEGMIAGWHGYTSHGAHGVAVAADLKSTQEAINKITKNLNSLSELEVKNLQRLSGAMDELHNEILELDEKVDDLRADTISSQIELAVLLSNEGIINSEDEHLLALERKLKKMLGPSAVEIGNGCFETKHKCNQTCLDRIAAGTFDAGEFSLPTFDSLNITAASLNDDGLDNHTILLYYSTAASSLAVTLMIAIFVVYMVSRDNVSCSICL

SEQ ID NO: 26566 - protein, 584 aa, synthetic construct
  REGION 1..584: note = hemagglutinin__InfluenzaB__ACO05968
MKAIIVLLMVVTSNADRICTGITSSNSPHVVKTATQGEVNVTGVIPLTTTPTKSYFANLKGTRTRGKLCPDCLNCTDLDVALGRPMCVGTTPSAKASILHEVRPVTSGCFPIMHDRTKIRQLPNLLRGYENIRLSTQNVIDAEKAPGGPYRLGTSGSCPNATSKSGFFATMAWAVPKDNNKNATNPLTVEVPYICTEREDQITVWGFHSDNKTQMKNLYGDSNPQKFTSSANGVTTHYVSQIGSFPDQTEDGGLPQSGRIVVDYMMQKPGKTGTIVYQRGVLLPQKVWCASGRSKVIKGSLPLIGEADCLHEKYGGLNKSKPYYTGEHAKAIGNCPIWVKTPLKLANGTKYRPPAKLLKERGFFGAIAGFLEGGWEGMIAGWHGYTSHGAHGVAVAADLKSTQEAINKITKNLNSLSELEVKNLQRLSGAMDELHNEILELDEKVDDLRADTISSQIELAVLLSNEGIINSEDEHLLALERKLKKMLGPSAVEIGNGCFETKHKCNQTCLDRIAAGTFNAGEFSLPTFDSLNITAASLNDDGLDNHTILLYYSTAASSLAVTLMLAIFIVYMVSRDNVSCSICL

SEQ ID NO: 26567 - protein, 584 aa, synthetic construct
  REGION 1..584: note = hemagglutinin__InfluenzaB__ACO05979
MKAIIVLLMVVTSNADRICTGITSSNSPHVVKTATQGEVNVTGVIPLTTTPTKSYFANLKGTRTRGKLCPDCLNCTDLDVALGRPMCVGTTPSAKASILHEVRPVTSGCFPIMHDRTKIRQLPNLLRGYENIRLSTQNVIDAEKAPGGPYRLGTSGSCPNATSKSGFFATMAWAVPKDNNKNATNPLTVEVPYICTEGEDQITVWGFHSDNKTQMKNLYGDSNPQKFTSSANGVTTHYVSQIGSFPDQTEDGGLPQSGRIVVDYMMQKPGKTGTIVYQRGVLLPQKVWCASGRSKVIKGSLPLIGEADCLHEKYGGLNKSKPYYTGEHAKAIGNCPIWVKTPLKLANGTKYRPPAKLLKERGFFGAIAGFLEGGWEGMIAGWHGYTSHGAHGVAVAADLKSTQEAINKITKNLNSLSELEVKNLQRLSGAMDELHNEILELDEKVDDLRADTISSQIELAVLLSNEGIINSEDEHLLALERKLKKMLGPSAVEIGNGCFETKHKCNQTCLDRIAAGTFNAGEFSLPTFDSLNITAASLNDDGLDNHTILLYYSTAASSLAVTLMLAIFIVYMVSRDNVSCSICL

SEQ ID NO: 26568 - protein, 584 aa, synthetic construct; identical to SEQ ID NO: 26567
  REGION 1..584: note = hemagglutinin__InfluenzaB__ACO05990

SEQ ID NO: 26569 - protein, 585 aa, synthetic construct
  REGION 1..585: note = hemagglutinin__InfluenzaB__ACO06001
MKAIIVLLMVVTSNADRICTGITSSNSPHVVKTATQGEVNVTGVIPLTTTPTKSHFANLKGTETRGKLCPKCLNCTDLDVALGRPKCTGNIPSARVSILHEVRPVTSGCFPIMHDRTKIRQLPNLLRGYEHIRLSTHNVINAENAPGGPYKIGTSGSCPNVTNGNGFFATMAWAVPKNDNNKTATNSLTIEVPYICTEGEDQITVWGFHSDNENQMAKLYGDSKPQKFTSFANGVTTHYVSQIGGFPNQTEDGGLPQSGRIVVDYMVQKSGKTGTITYQRGILLPQKVWCASGRSKVIKGSLPLIGEADCLHEKYGGLNKSKPYYTGEHAKAIGNCPIWVKTPLKLANGTKYRPPAKLLKERGFFGAIAGFLEGGWEGMIAGWHGYTSHGAHGVAVAADLKSTQEAINKITKNLNSLSELEVKNLQRLSGAMDELHNEILELDEKVDDLRADTISSQIELAVLLSNEGIINSEDEHLLALERKLKKMLGPSAVEIGNGCFETKHKCNQTCLDRIAAGTFDAGEFSLPTFDSLNITAASLNDDGLDNHTILLYYSTAASSLAVTLMIAIFVVYMVSRDNVSCSICL

SEQ ID NO: 26570 - protein, 584 aa, synthetic construct; identical to SEQ ID NO: 26567
  REGION 1..584: note = hemagglutinin__InfluenzaB__ACO06012

SEQ ID NO: 26571 - protein, 584 aa, synthetic construct; identical to SEQ ID NO: 26567
  REGION 1..584: note = hemagglutinin__InfluenzaB__ACO06023

SEQ ID NO: 26572 - protein, 584 aa, synthetic construct
  REGION 1..584: note = hemagglutinin__InfluenzaB__ACO06062
MKAIIVLLMVVTSNADRICTGITSSNSPHVVKTATQGEVNVTGVIPLTTTPTKSYFANLKGTRTRGKLCPDCLNCTDLDVALGRPMCVGTTPSAKASILHEVRPVTSGCFPIMHDRTKIRQLPNLLRGYENIRLSTQNVIDAEKAPGGPYRLGTSGSCPNATSKSGFFATMAWAVPKDNNKNATNPLTVEVPYICTEGEDQITVWGFHSDNKTQMKNLYGDSNPQKFTSSANGVTTHYVSQIDSFPDQTEDGGLPQSGRIVVDYMMQKPGKTGTIVYQRGVLLPQKVWCASGRSKVIKGSLPLIGEADCLHEKYGGLNKSKPYYTGEHAKAIGNCPIWVKTPLKLANGTKYRPPAKLLKERGFFGAIAGFLEGGWEGMIAGWHGYTSHGAHGVAVAADLKSTQEAINKITKNLNSLSELEVKNLQRLSGAMDELHNEILELDEKVDDLRADTISSQIELAVLLSNEGIINSEDEHLLALERKLKKMLGPSAVEIGNGCFETKHKCNQTCLDRIAAGTFNAGEFSLPTFDSLNITAASLNDDGLDNHTILLYYSTAASSLAVTLMLAIFIVYMVSRDNVSCSICL

SEQ ID NO: 26573 - protein, 585 aa, synthetic construct
  REGION 1..585: note = hemagglutinin__InfluenzaB__ACO94661
MKAIIVLLMVVTSNADRICTGITSSNSPHVVKTATQGEVNVTGVIPLTTTPTKSHFANLKGTETRGKLCPKCLNCTDLDVALGRPKCTGNIPSARVSILHEVRPVTSGCFPIMHDRTKIRQLPNLLRGYEHIRLSTHNVINAENAPGGPYKIGTSGSCPNVTNGNGFFTTMAWAVPKNDNNKTATNSLTIEVPYICTEGEDQITVWGFHSDNETQMAKLYGDSKPQKFTSSANGVTTHYVSQIGGFPNQTEDGGLPQSGRIVVDYMVQKSGKTGTITYQRGILLPQKVWCASGRSKVIKGSLPLIGEADCLHEKYGGLNKSKPYYTGEHAKAIGNCPIWVKTPLKLANGTKYRPPAKLLKERGFFGAIAGFLEGGWEGMIAGWHGYTSHGAHGVAVAADLKSTQEAINKITKNLNSLSELEVKNLQRLSGAMDELHNEILELDEKVDDLRADTISSQIELAVLLSNEGIINSEDEHLLALERKLKKMLGPSAVEIGNGCFETKHKCNQTCLDRIAAGTFDAGEFSLPTFDSLNITAASLNDDGLDNHTILLYYSTAASSLAVTLMIAIFVVYMVSRDNVSCSICL

SEQ ID NO: 26574 - protein, 585 aa, synthetic construct; identical to SEQ ID NO: 26514
  REGION 1..585: note = hemagglutinin__InfluenzaB__ACR15622

SEQ ID NO: 26575 - protein, 585 aa, synthetic construct
  REGION 1..585: note = hemagglutinin__InfluenzaB__ACR15633
MKAIIVLLMVVTSNADRICTGITSSNSPHVVKTATQGEVNVTGVIPLTTTPTKSHFANLKGTETRGKLCPKCLNCTDLDVALGRPKCTGNIPSARVSILHEVRPVTSGCFPIMHDRTKIRQLPNLLRGYEHIRLSTHNVINAENAPGGPYKIGTSGSCPNVTNGNGFFATMAWAVPKNDNNKTATNSLTIEVPYICTEGEDQITVWGFHSDSETQMAKLYGDSKPQKFTSSANGVTTHYVSQIGGFPNQTEDGGLPQSGRIVVDYMVQKSGKTGTITYQRGILLPQKVWCASGRSKVIKGSLPLIGEADCLHEKYGGLNKSKPYYTGEHAKAIGNCPIWVKTPLKLANGTKYRPPAKLLKERGFFGAIAGFLEGGWEGMIAGWHGYTSHGAHGVAVAADLKSTQEAINKITKNLNSLSELEVKNLQRLSGAMDELHNEILELDEKVDDLRADTISSQIELAVLLSNEGIINSEDEHLLALERKLKKMLGPSAVEIGNGCFETKHKCNQTCLDRIAAGTFDAGEFSLPTFDSLNITAASLNDDGLDNHTILLYYSTAASSLAVTLMIAIFVVYMVSRDNVSCSICL

SEQ ID NO: 26576 - protein, 584 aa, synthetic construct
  REGION 1..584: note = hemagglutinin__InfluenzaB__ACR15644
MKAIIVLLMVVTSNADRICTGITSSNSPHVVKTATQGEVNVTGVIPLTTTPTKSYFANLKGTRTRGKLCPDCLNCTDLDVALGRPMCVGTTPSAKASILHEVRPVTSGCFPIMHDRTKIRQLPNLLRGYENIRLSTQNVIDAENAPGGPYRLGTSGSCPNATSKSGFFATMAWAVPKDNNKNATNPLTVEVPYVCTEGEDQITVWGFHSDNKIQMKNLYGDSNPQKFTSSANGVTTHYVSQIGGFPAQTEDGGLPQSGRIVVDYMVQKPRKTGTIVYQRGVLLPQKVWCASGRSKVIKGSLPLIGEADCLHEKYGGLNKSKPYYTGEHAKAIGNCPIWVKTPLKLANGTKYRPPAKLLKERGFFGAIAGFLEGGWEGMIAGWHGYTSHGAHGVAVAADLKSTQEAINKITKNLNSLSELEVKNLQRLSGAMDELHNEILELDEKVDDLRADTISSQIELAVLLSNEGIINSEDEHLLALERKLKKMLGPSAVDIGNGCFETKHKCNQTCLDRIAAGTFNAGEFSLPTFDSLNITAASLNDDGLDNHTILLYYSTAASSLAVTLMLAIFIVYMVSRDNVSCSICL

SEQ ID NO: 26577 - protein, 585 aa, synthetic construct
  REGION 1..585: note = hemagglutinin__InfluenzaB__ACR15655
MKAIIVLLMVVTSNADRICTGITSSNSPHVVKTATQGEVNVTGVIPLTTTPTKSHFANLKGTETRGKLCPKCLNCTDLDVALGRPKCTGNIPSARVSILHEVRPVTSGCFPIMHDRTKIRQLPNLLRGYEHIRLSTHNVINAENAPGGPYKIGTSGSCPNVTNGNGFFATMAWAVPKNDNNKTATNSLTIEVPYICTEGEDQITVWGFHSDSETQMAKLYGDSKPQKFTSSANGVTTHYVSQIGGFPNQTEDGGLPQSGRIVVDYMVQKSGKTGTITYQRGILLPQKVWCASGRSKVIKGSLPLIGEADCLHEKYGGLNKSKPYYTGEHAKAIGNCPIWVKTPLKLANGTKYRPPAKLLKERGFFGAIAGFLEGGWEGMIAGWHGYTSHGAHGVAVAADLKSTQEAINKITKNLNSLSELEVKNLQRLSGAMDELHNEILELDEKVDDLRADTISSQIELAVLLSNEGIINSEDEHLLALERKLKKMLGPSAVEIGNGCFETKHKCNQTCLDRIAAGTFDAGEFSLPTFDSLNITAASLNDDGLDNHTILLYYSTAASSLAVTLMIAIFVVYMVSRDNISCSICL

SEQ ID NO: 26578 - protein, 585 aa, synthetic construct
  REGION 1..585: note = hemagglutinin__InfluenzaB__ACR15666
MKAIIVLLMVVTSNADRICTGITSSNSPHVVKTATQGEVNVTGVIPLTTTPTKSHFANLKGTETRGKLCPKCLNCTDLDVALGRPKCTGNIPSARVSILHEVRPVTSGCFPIMHNRTKIRQLPNLLRGYEHIRLSTHNVINAENAPGGPYKIGTSGSCPNVTNGNGFFATMAWAVPKNDNNKTATNSLTIEVPYICTEGEDQITVWGFHSDDETQMAKLYGDSKPQKFTSSANGVTTHYVSQIGGFPNQTEDGGLPQSGRIVVDYMVQKSGKTGTITYQRGILLPQKVWCASGRSKVIKGSLPLIGEADCLHEKYGGLNKSKPYYTGEHAKAIGNCPIWVKTPLKLANGTKYRPPAKLLKERGFFGAIAGFLEGGWEGMIAGWHGYTSHGAHGVAVAADLKSTQEAINKITKNLNSLSELEVKNLQRLSGAMDELHNEILELDEKVDDLRADTISSQIELAVLLSNEGIINSEDEHLLALERKLKKMLGPSAVEIGNGCFETKHKCNQTCLDRIAAGTFDAGEFSLPTFDSLNITAASLNDDGLDNHTILLYYSTAASSLAVTLMIAIFVVYMVSRDNVSCSICL

SEQ ID NO: 26579 - protein, 585 aa, synthetic construct
  REGION 1..585: note = hemagglutinin__InfluenzaB__ACR15677
MKAIIVLLMVVTSNADRICTGITSSNSPHVVKTATQGEVNVTGVIPLTTTPTKSHFANLKGTKTRGKLCPKCLNCTDLDVALGRPKCTGNIPSAKVSILHEVRPVTSGCFPIMHDRTKIRQLPNLLRGYEHIRLSTHNVINAEKAPGGPYKIGTSGSCPNITNGNGFFATMAWAVPKNDNNKTATNSLTIEVPYICTEGEDQITVWGFHSDNEAQMAKLYGDSKPQKFTSSANGVTTHYVSQIGGFPNQTEDGGLPQSGRIVVDYMVQKSGKTGTITYQRGILLPQKVWCASGRSKVIKGSLPLIGEADCLHEKYGGLNKSKPYYTGEHAKAIGNCPIWVKTPLKLANGTKYRPPAKLLKERGFFGAIAGFLEGGWEGMIAGWHGYTSHGAHGVAVAADLKSTQEAINKITKNLNSLSELEVKNLQRLSGAMDELHNEILELDEKVDDLRADTISSQIELAVLLSNEGIINSEDEHLLALERKLKKMLGPSAVEIGNGCFETKHKCNQTCLDRIAAGTFDAGEFSLPTFDSLNITAASLNDDGLDNHTILLYYSTAASSLAVTLMIAIFVVYMVSRDNVSCSICL

SEQ ID NO: 26580 - protein, 584 aa, synthetic construct; identical to SEQ ID NO: 26567
  REGION 1..584: note = hemagglutinin__InfluenzaB__ACR15710

SEQ ID NO: 26581 - protein, 584 aa, synthetic construct
  REGION 1..584: note = hemagglutinin__InfluenzaB__ACR15721
MKAIIVLLMVVTSNADRICTGITSSNSPHVVKTATQGEVNVTGVIPLTTTPTKSHFANLKGTKTRGKLCPNCLNCTDLDVALGRPMCVGTTPSAKASILHEVRPVTSGCFPIMHDRTKIRQLPNLLRGYENIRLSTQNVINAEKAPGGPYRLGTSGSCPNATSRSGFFATMAWAVPRDDNKTATNPLTVEVPYVCTEGEDQITVWGFHSDNKAQMKNLYGDSNPQKFTSSANGVTTHYVSQIGGFPDQTEDGGLPQSGRIVVDYMVQKPGKTGTIVYQRGVLLPQKVWCASGRSKVIKGSLPLIGEADCLHEKYGGLNKSKPYYTGEHAKAIGNCPIWVKTPLKLANGTKYRPPAKLLKERGFFGAIAGFLEGGWEGMIAGWHGYTSHGAHGVAVAADLKSTQEAINKITKNLNSLSELEVKNLQRLSGAMDELHNEILELDEKVDDLRADTISSQIELAVLLSNEGIINSEDEHLLALERKLKKMLGPSAVDIGNGCFETKHKCNQTCLDRIAAGTFNAGEFSLPTFDSLNITAASLNDDGLDNHTILLYYSTAASSLAVTLMIAIFIVYMVSRDNVSCSICL

SEQ ID NO: 26582 - protein, 585 aa, synthetic construct
  REGION 1..585: note = hemagglutinin__InfluenzaB__ACR39336
MKAIIVLLMVVTSNADRICTGITSSNSPHVVKTATQGEVNVTGVIPLTTTPTKSHFANLKGTETRGKLCPKCLNCTDLDVALGRPKCTGNIPSARVSILHEVRPVTSGCFPIMHDRTKIRQLPNLLRGYEHIRLSTHNVINAENAPGGPYKIGTSGSCPNVTNGNGFFATMAWAVPKNDNNKTATNSLTIEVPYICTEGEDQITVWGFHSDNEAQMAKLYGDSKPQKFTSSANGVTTHYVSQIGGFPNQTEDGGLPQSGRIVVDYMVQKSGKTGTITYQRGILLPQKVWCASGRSKVIKGSLPLIGEADCLHEKYGGLNKSKPYYTGEHAKAIGNCPIWVKTPLKLANGTKYRPPAKLLKERGFFGAIAGFLEGGWEGMIAGWHGYTSHGAHGVAVAADLKSTQEAINKITKNLNSLSELEVKNLQRLSGAMDELHNEILELDEKVDDLRADTISSQIELAVLLSNEGIINSEDEHLLALERKLKKMLGPSAVEIGNGCFETKHKCNQTCLDRIAAGTFDAGEFSLPTFDSLNITAASLNDDGLDNHTILLYYSTAASSLAVTLMIAIFVVYMVSRDNVSCSICL

SEQ ID NO: 26583 - protein, 584 aa, synthetic construct
  REGION 1..584: note = hemagglutinin__InfluenzaB__AEA51386
MKAIIVLLMVVTSNADRICTGITSSNSPHVVKTATQGEVNVTGVIPLTTTPTKSYFANLKGTRTRGKLCPDCLNCTDLDVALGRPMCVGTTPSAKASILHEVRPVTSGCFPIMHDRTKIRQLPNLLRGYENIRLSTQNVIDAEKAPGGPYRLGTSGSCPNATSKSGFFATMAWAVPKDNYKNATNPLTVEVPYICTEGEGQITVWGFHSDNKPQMKNLYGDSNPQKFTSSASGVTTHYVSQIGDFPDQTEDGGLPQSGRIVVDYMMQKPGKTGTIVYQRGVLLPQKVWCASGRSKVIKGSLPLIGEADCLHEKYGGLNKSKPYYTGEHAKAIGNCPIWVITPQKLANGTTFSPPAKLLKERGFFGAIAGFLEGGWEGMIAGWHGYTSHGAHGVAVAADLKSTQEAINKITKNLNSLSELEVKNLQRLSGAMDELHNEILELDEKVDDLRADTISSQIELAVLLSNEGIINSEDEHLLALERKLKKMLGPSAVDIGNGCFETKHKCNQTCLDRIAAGTFNAGEFSLPTFDSLNITAASLNDDGLDNHTILLYYSTAASSLAVTLMLAIFIVYMVSRDNVSCSICL

SEQ ID NO: 26584 - protein, 584 aa, synthetic construct
  REGION 1..584: note = hemagglutinin__InfluenzaB__AEA51387
MKAIIVLLMVVTSNADRICTEITSSNSPLVVKTATQGEVNVTGVIPLTTTPTKSYFANLKGTRTRGKLCPDCLNCTDLDVALGRPMCVGTTPSAKASILHEVRPVTSGCFPIMHDRTKIRQLPNLLRGYENIRLSTQNVIDAEKAPGGPYRLGTSGSCPNATSKIGFFATMAWAVPKDNYKNATNPLTVEVPYICTEGEDQITVWGFHSDNKTQMKNLYGDSNPQKFTSSANGVTTHYVSQIGDFPDQTEDGGLPQSGRIVVDYMMQKPGKTGPIVYQRGVLLPQKVWCASGRSKVIKGSLPLIGEADCLHEKYGGLNKSKYSHTGDHAKTLGNCPIWVKTPLKLANGTKYRPPAKLLKERGFFGAIAGFLEGGWEGMIAGWHGYTSHGAHGVAVAADLKSTQEAINKITKNLNSLSELEVKNLQRLSGAMDELHNEILELDEKVDDLRADTISSQIELAVLLSNEGIINSEDEHLLALERKLKKMLGPSAVDIGNGCFETKHKCNQTCLDRIAAGTFNAGEFSLPTFDSLNITAASLNDDGLDNHTILLYYSTAASSLAVTLMLAIFIVYMVSRDNVSCSICL

SEQ ID NO: 26585 - protein, 584 aa, synthetic construct
  REGION 1..584: note = hemagglutinin__InfluenzaB__AEA51388
MKAIIVLLMVVTSNADRICTGITSSNSPHVVKTATQGEVNVTGVIPLTTTPTKSYFANLKGTRTRGKLCPDCLNCTDLDVALGRPMCVGTTPSAKASILHEVRPVTSGCFPIMHDRTKIRQLPNLLRGYENIRLSTQNVIDAEKAPGGPYRLGTSGSCPNATSKIGFFATMAWAVPKDNYKNATNPLTVEVPYICTEGEDQITVWGFHSDNKTQMKNLYGDSNPQKFTSSANGVTTHYVSQIGDFPDQTEDGGLPQSGRIVVDYMMQKPGKTGTIVYQRGVLLPQKVWCASGRSKVIKGSLPLIGEADCLHEKYGGLNKSKPSYTGEHAKAKGNCPIWVNTPLKLANGTKYRPPAKLFKERGFFGAIAGFLEGGWEGMIAGWHGYTSHGAHGVAVAADLKSTQEAINKITKNLNSLSELEVKNLQRLSGAMDELHNEILELDEKVDDLRADTISSQIELAVLLSNEGIINSEDEHLLALERKLKKMLGPSAVDKGNGCFETKHKCNQTCLDRIAAGTFNAGEFSLPTFDSLNITAASLNDDGLDNHTILLYYSTAASSLAVTLMLAIFIVYMVSRDNVSCSICL

SEQ ID NO: 26586 - protein, 584 aa, synthetic construct
  REGION 1..584: note = hemagglutinin__InfluenzaB__AEA51389
MKAIIVLLMVVTSNADRICTGITSSISPLVDKTATQGEVNVTGVIPLTTTPTKSYFANVKGTRTRGKLCPDCLNCTDLDVALGRPMCVGTTPSAKASILHEVRPVTSGCFPIMHDRTKIRQLPNLLRGYENIRLSTQNVIDAQKAPGGPYRLGTSGSCPNATSKIGFFATMACAVPKDNYKNATNPLTVEVPYIRTEGEDQITVWGFHSDNKTQMKNLYGDSNPPKFTSSANGVTTHYVSQTGDFPDQTEDGGLPPSGRIVVDYMMQKPGKTGTIAYQRGVLLPQKVWCASGRSKVIKGSLPLIGEADCLHEKYGGLNKSKPPHTGEHTKAIGNCPIWVKTPLKLANGTKYRPSAKLLKERGFFGAIAGFLEGGWEGMIAGWHGYTSHGAHGVAVAADLKSTQEAINKITKNLNSLSELEVKNLQRLSGAMDELHNEILELDEKVDDLRADTISSQIELAVLLSNEGIINSEDEHLLALERKLKKMLGPSAVDIGNGCFETKHKCNQTCLDRIAAGTFNAGEFFLPTFDSLNITAASLNDDGLDNHTILLYYSTAASSLAVTLMLAIFIVYMVSRDNVSCSICL

SEQ ID NO: 26587 - protein, 584 aa, synthetic construct
  REGION 1..584: note = hemagglutinin__InfluenzaB__AEA51390
MKAIIVLLMVVTSNADRICTGITSSNSPHVVKTATQGEVNVTGVIPLTTTPTKSYFANLKGTRTRGKLCPDCLNCTDLDVALGRPMCVGTTPSAKASILHEVRPVTSGCFPIMHDRTKIRQLPNLLRGYENIRLSTQNVIDAEKAPGGPYRLGTSGSCPNATSKIGFFATMAWAVPKDNYKNATNPLTVEVPYICTEGEDQITVWGFHSDNKTQMKNLYGDSNPQKFTSSANGVTTHYVSQIGDFPDQTEDGGLPPSGRIVVDYMMQKPGKTGTIVYQRGGLLPQKVWCASGRSKVIKGSLPLIGEADCLHEKYGGLNKSKPYYTGEHAKAIGNCPIWVKPPLKLANGTKYRPPAKLFKERGFFGALAGFLEGGWEGMIAGWHGYTSHGAHGVAVAADLKSTQEAINKITKNLNSLSELEVKNLQRLSGAMDELHNEILELDEKVDDLRADTISSQIELAVLLSNEGIINSEDEHLLALERKLKKMLGPSAVDIGNGCFETKHKCNQTCLDRIAAGTFNAGEFSLPTFDSLNITAASLNDDGLDNHTILLYYSTAASSLAVTLMLAIFIVYMVSRDNVSCSICL

SEQ ID NO: 26588 - protein, 585 aa, synthetic construct
  REGION 1..585: note = hemagglutinin__InfluenzaB__AEA51391
MKAIIVLLMVVTSNADRICTGITSSNSPHVVKTATQGEVNVTGVIPLTTTPTKSHFANLKGTETRGKLCPKCLNCTDLDVALGRPKCTGKIPSARVSILHEVRPVTSGCFPIMHDRTKIRQLPNLLRGYEHIRLSTHNVINAENAPGGPYKIGTSGSCPNITNGNGFFATMAWAVPKNDKNKTATNPLTIEVPYICTEGEDQITVWGFHSVNETQMAKLYGDSKPQKFTSSANGVTTHYISQIGGFPNQTEDGGLPQSGRIVVDYMVQKSGKTGTITYQRGILLPQKVWCASGRSKVIKGSLPLIGEADCLHEKYGGLNKSKPYYTGEHAKAIGNCPIWVKTPLKLANGTKYRPPAKLLKERGFFGAIAGFLEGGWEGMIAGWHGYTSHGAHGVPVAADLKSTQEAINKITKNLNSLSELEVKNLQRLSGAMDELHNEILELDEKVDDLRADTISSQIELAVLLSNEGIINSEDEHLLALERKLKKMLGPSAVEIGNGCFETKHKCNQTCLDRIAAGTFDAGEFSLPTFDSLNITAASLNDDGLDNHTILLYYSTAASSLAVTLMIAIFVVYMVSRDNVSCSICL

SEQ ID NO: 26589 - protein, 585 aa, synthetic construct
  REGION 1..585: note = hemagglutinin__InfluenzaB__AEA51392
MKAIIVLLMVVTSNADRICTGITSSNSPHVVKTATQGEVNVTGVIPLTTTPTKSHFANLKGTETRGKLCPKCPNCTDLDVALGRPKCTGKIPSARVSILHEVRPVTSGCFPIMHDRTKIRQLPNLLRGYEHIRLSTHNVINAENAPGGPYKIGTSGSCPNVTNGNGFFATMAWAVPKNDKNKTATNPLTIEVPYICTEGEDQITVWGFHSDNETQMAKLYGDSKPQKFTSSANGGTTHYVSQIGGFPNQTEDGGLPQSGRIVVDYMVQKSGKTGTITYQRGILLPQKVWCASGRSKVIKGSLPLIGEADCLHEKYGGLNKSKPYYTGEHAKAIGNCPIWVKTPLKLANGTKNIAPAKLLKERGFFGAIAGFLEGGWEGMIAGWHGYTSHGAHGVAVAADLKSTQEAINKITKNLNSLSELEVKNLQRLSGAMDELHNEILELDEKVDDLRADTISSQIELAVLLSNEGIINSEDEHLLALERKLKKMLGPSAVEIGNGCFETKHKCNQTCLDRIAAGTFDAGEFSLPTFDSLNITAASLNDDGLDNHTILLYYSTAASSLAVTLMIAIFVVYMVSRDNVSCSICL

SEQ ID NO: 26590 - protein, 584 aa, synthetic construct
  REGION 1..584: note = hemagglutinin__InfluenzaB__AEA51395
MKAIIVLLMVVTSNADRICTGITSSNSPHVVKTATLGEVNVTGVIPLTTTPTKSYFANLKGTRTRGKLCPDCLNCTDLDVALGRPMCVGTTPSAKASILHEVRPVTSGCFPIMHDRTKIRQLPNLLRGYENIRLSTQNVIDAEKAPGGPYRLGTSGSCPNATSKIGFFATMAWAVPKDNYKNATNPLTVEVPYICTEGEDQFTVWGFHSDNITQLKNLFGDSNPQRFTSSANGVTTHYVSQIGDFPDQTEDGGLPQSGRIVVDYVMQKPGKTGTIVYQRGVLLPPKVWFARGRSKVIKGSLPLIGEADCIHEKYGGLNKSKPYYTGEHAKAIGNCPIWVKTPLKLANGTKYRPPAKLLKERGFFGAIAGFLEGGWEGMIAGWHGYTSHGAHGVAVAADLKSTQEAINKITKNLNSLSELEVKNLQRLSGAMDELHNEILELDEKVDDLRADTISSQIELAVLLSNEGIINSEDEHLLALERKLKKMLGPSAVDIGNGCFETKHKCNQTCLDRIAAGTFNAGEFSLPTFDSLNITAASLNDDGLDNHTILLYYSTAASSLAVTLMLAIFIVYMVSRDNVSCSICL

SEQ ID NO: 26591 - protein, 585 aa, synthetic construct
  REGION 1..585: note = hemagglutinin__InfluenzaB__AEA51398
MKAIIVLLMVVTSNADRICTGITSSNSPHVVKTATQGEVNVTGVIPLTTTPTKSHFANLKGTETRGKLCPKCPNCTDLDVALGRPKCTGKIPSARVSILHEVRPVTSGCFPIMHDRTKIRQLPNLLRGYEHIRLSTHNVINAENAPGGPYKIGTSGSCPNVTNGIGFFATMAWAVPKNDKNKTATNPLTIEVPYICTEGEDQITVWGFHSDNETQMAKLYGDSKPQKFTSSANGVTTHYVSQIGGFPNQTEDGGLPQSGRIVVDYMVQKSGKTGTITYQRGILLPQKVWCASGRSKVIKGSLPLIGEADCLHEKYGGLNKSKSYYTGEHAKAIGNCPIWVKTPLKLANGTKYRPPAHLSYFCGFFGAIAGFLEGGWEGMIAGWNGYTSHGAHGVAVVADLKSTQEAINKITKNLNSLSELEVKNLQRLSGAMDELHNEILELDEKVDDLRADTISSQIELAVLLSNEGIINSEDEHLLALERKLKKMLGPSAVEIGNGCFETKHKCNQTCLDRIAAGTFDAGEFSLPTFDSLNITAASLNDDGLDNHTILLYYSTAASSLAVTLMIAIFVVYMVSRDNVSCSICL

SEQ ID NO: 26592 - protein, 585 aa, synthetic construct
  REGION 1..585: note = hemagglutinin__InfluenzaB__AEA51399
MKAIIVLLMVVTSNADRICTGITASQSPNIDKSSTQGEVNVTGVIPLTTTPTKSHFANLKGTETRGKLCPKCPNCTDLDVALGRPKCTGKIPSARVSILHEVRPVTSGCFPIMHDRTKIRQLPNLLRGYEHIRLSTHNVINAENAPGGPYKIGTSGSCPNVTNGIGFFATMAWAVPKNDKNKTATNPLTIEVPYICTEGEDQITVWGFHSDNETQMAKLYGDSKPQKFTSSANGVTTHYVSQIGGFPNQTEDGGLPQSGRIVVDYMVQKSGKTGTITYQRGILLPQKVWCASGRSKVIKGSLPLIGEADCLHEKYGGLNKSKSYYTGEHAKAIGNCPIWVKTPLKLANGTKYRPPAHLSYFCGFFGAIAGFLEGGWEGMIAGWNGYTSHGAHGVAVVADLKSTQEAINKITKNLNSLSELEVKNLQRLSGAMDELHNEILELDEKVDDLRADTISSQIELAVLLSNEGIINSEDEHLLALERKLKKMLGPSAVEIGNGCFETKHKCNQTCLDRIAAGTFDAGEFSLPTFDSLNITAASLNDDGLDNHTILLYYSTAASSLAVTLMIAIFVVYMVSRDNVSCSICL

SEQ ID NO: 26593 - protein, 585 aa, synthetic construct
  REGION 1..585: note = hemagglutinin__InfluenzaB__AEG21014
MKAIIVLLMVVTSNADRICTGITSSNSPHVVKTATQGEVNVTGVIPLTTTPTKSHFANLKGTETRGKLCPKCLHCTDLDVALGRPKCTGKIPSARVSILHEVRPVTSGCFPIMHDRTKIRQLPNLLRGYEHIRLSTHNVINAENAPGGPYKIGTSGSCPNVTNGNGFFATMAWAVPKNDNNKTATNSLTIEVPYICTEGEDQITVWGFHSDNETQMAKLYGDSKPQKFTSSANGVTTHYVSQMGGFPNQTEDGGLPQSGRIVVDYMVQKSGKTGTITYQRGILLPQKVWCASGRSKVIKGSLPLIGEADCLHEKYGGLNKSKPYYTGEHAKAIGNCPIWVKTPLKLANGTKYRPPAKLLMERGFFGAIAGFLEGGWEGMIAGWHGYTSHGAHGVAVAADLKSTQEAINKITKNLNSLSELEVKNLQRLSGAMDELHNEILELDEKVDDLRADTISSQIELAVLLSNEGIINSEDEHLLALERKLKKMLGPSAVEIGNGCFETKHKCNQTCLDRIAAGTFDAGEFSLPTFDSLNITAASLNDDGLDNHTILLYYSTAASSLAVTLMIAIFVVYMVSRDNVSCSICL

SEQ ID NO: 26594 - protein, 584 aa, synthetic construct
  REGION 1..584: note = hemagglutinin__InfluenzaB__AEG21015
MKAIIVLLMVVTSNADRICTGITSSNSPHVVKTATQGEVNVTGVIPLTTTPTKSYFANLKGTRTRGKLCPDCLNCTDLDVALGRPMCVGTTPSAKASILHEVRPVTSGCFPIMHDRTKIRQLPNLLRGYENIRLSTQNVIDAEKAPGGPYRLGTSGSCPNATSKNGFFATMAWAVPKDNYKGATNPKTVEVPYICTEGEGQITVWGFHSDNKPQMKNLYGDSNPQKFTSSASGVTTHYVSQIGDFPDQTEDGGLPQSGRIVVDYMMQKPGKTGTIVYQRGVLLPQKVWCASGRSKVIKGSLPLIGEADCLHEKYGGLNKSKPYYTGEHAKAIGNCPIWVITPQKLANGTTFSPPAKLLKERGFFGAIAGFLEGGWEGMIAGWHGYTSHGAHGVAVAADLKSTQEAINKITKNLNSLSELEVKNLQRLSGAMDELHNEILELDEKVDDLRADTISSQIELAVLLSNEGIINSEDEHLLALERKLKKMLGPSAVDIGNGCFETKHKCNQTCLDRIAAGTFNAGEFSLPTFDSLNITAASLNDDGLDNHTILLYYSTAASSLAVTLMLAIFIVYMVSRDNVSCSICL

SEQ ID NO: 26595 - protein, 584 aa, synthetic construct
  REGION 1..584: note = hemagglutinin__InfluenzaB__AEG21016
MKAIIVLLMVVTSNADRICTGITSSNSPHVVKTATQGEVNVTGVIPLTTTPTKSYFANLKGTRTRGKLCPDCLNCTDLDVALGRPMCVGTTPSAKASILHEVRPVTSGCFPIMHDRTKIRQLPNLLRGYENIRLSTQNVIDAEKAPGGPYRLGTSGSCPNATSKIGFFATMAWAVPKDNYKRATNPKTVEVPYICTEGEDQITVWGFHSDNKPQMKNPYGDSNPQKFTSSASGVTTHYVSQIGDFPDQTEDGGLPQSGRIVVDYMMQKPGKTGTIVYQRGVLLPQKVWCASGRSKVIKGSLPLIGEADCLHEKYGGLNKSKPYYTGEHAKAIGNCPIWVKTPLKLANGTKYRPPAKLLKERGFFGAIAGFLEGGWEGMIAGWHGYTSHGAHGVAVAADLKSTQEAINKITKNLNSLSELEVKNLQRLSGAMDELHNEILELDEKVDDLRADTISSQIELAVLLSNEGIINSEDEHLLALERKLKKMLGPSAVDIGNGCFETKHKCNQTCLDRIAAGTFNAGEFSLPTFDSLNITAASLNDDGLDNHTILLYYSTAASSLAVTLMLAIFIVYMVSRDNVSCSICL

SEQ ID NO: 26596 - protein, 584 aa, synthetic construct
  REGION 1..584: note = hemagglutinin__InfluenzaB__AEG21017
MKAIIVLLMVVTSNADRICTGITSSNSPHVVKTATQGEVNVTGVIPLTTTPTKSYFANLKGTRTRGKLCPDCLNCTDLDVALGRPMCVGTTPSAKASILHEVRPVTSGCFPIMHDRTKIRQLPNLLRGYENIRLSTQNVIDAEKAPGGPYRLGTSGSCPNATSKIGFFATMAWAVPKDNYKNATNPLTVEVPYICTEGEDQITVWGFHSDNKTQMKNLYGDSNPQKFTSSANGVTTHYVSQIGDFPDQTEDGGLPQSGRIVVDYMMQKPGKTGTIVYQRGVLLPQKVWCASGRSKVIKGSLPLIGEADCLHEKYGGLNKSKPSYTGEHAKAIGNCPIWVKTPLKLANGTKYRPPAKLLKERGFFGAIAGFLEGGWEGMIAGWHGYTSHGAHGVAVAADLKSTQEAINKITKNLNSLSELEVKNLQRLSGAMDELHNEILELDEKVDDLRADTISSQIELAVLLSNEGIINSEDEHLLALERKLKKMLGPSAVDIGNGCFETKHKCNQTCLDRIAAGTFNAGEFSLPTFDSLNITAASLNDDGLDNHTILLYYSTAASSLAVTLMLAIFIVYMVSRDNVSCSICL

SEQ ID NO: 26597 - protein, 584 aa, synthetic construct
  REGION 1..584: note = hemagglutinin__InfluenzaB__AEG21018
MKAIIVLLMVVTSNADRICTGITSSISPLVDKTATQGEVNVTGVIPLTTTPTKSYFANVKGTRTRGKLCPDCLNCTDLDVALGRPMCVGTTPSAKASILHEVRPVTSGCFPIMHDRTKIRQLPNLLRGYENIRLSTQNVIDAQKAPGGPYRLGTSGSCPNATSKIGFFATMACAVPKDNYKNATNPLTVEVPYIRTEGEDQITVWGFHSDNKTQMKNLYGDSNPPKFTSSANGVTTHYVSQTGDFPDQTEDGGLPPSGRIVVDYMMQKPGKTGPIAYQRGVLLPQKVWCASGRSKVIKGSLPLIGEADCLHEKYGGLNKSKYSHTGDHAKTLGNCPIWVKTPLKLANGTKYRPSAKLLKERGFFGAIAGFLEGGWEGMIAGWHGYTSHGAHGVAVAADLKSTQEAINKITKNLNSLSELEVKNLQRLSGAMDELHNEILELDEKVDDLRADTISSQIELAVLLSNEGIINSEDEHLLALERKLKKMLGPSAVDIGNGCFETKHKCNQTCLDRIAAGTFNAGEFSLPTFDSLNITAASLNDDGLDNHTILLYYSTAASSLAVTLMLAIFIVYMVSRDNVSCSICL

SEQ ID NO: 26598 - protein, 584 aa, synthetic construct
  REGION 1..584: note = hemagglutinin__InfluenzaB__AEG21019
MKAIIVLLMVVTSNADRICTGITSSNSPHVVKTATQGEVNVTGVIPLTTTPTKSYFANLKGTRTRGKLCPDCLNCTDLDVALGRPMCVGTTPSAKASILHEVRPVTSGCFPIMHDRTKIRQLPNLLRGYENIRLSTQNVIDAEKAPGGPYRLGTSGSCPNATSKIGFFATMAWAVPKDNYKNATNPLTVEVPYICTEGEDQITVWGFHSDNKTQMKNLYGDSNPQKFTSSANGVTTHYVSQTGDFPDQTEDGGLPPSGRIVVDYMMQKPGKTGTIVYQRGVLLPQKVWCASGRSKVIKGSLPLIGEADCLHEKYGGLNKSKPSYTGEHAKAIGNCPIWVKTPLKLANGTKYRPSAKLLKERGFFGAIAGFLEGGWEGMIAGWHGYTSHGAHGVAVAADLKSTQEAINKITKNLNSLSELEVKNLQRLSGAMDELHNEILELDEKVDDLRADTISSQIELAVLLSNEGIINSEDEHLLALERKLKKMLGPSAVDIGNGCFETKHKCNQTCLDRIAAGTFNAGEFSLPTFDSLNITAASLNDDGLDNHTILLYYSTAASSLAVTLMLAIFIVYMVSRDNVSCSICL

SEQ ID NO: 26599 - protein, 585 aa, synthetic construct
  REGION 1..585: note = hemagglutinin__InfluenzaB__AEG21021
MKAIIVLLMVVTSNADRICTGITSSNSPHVVKTATQGEVNVTGVIPLTTTPTKSHFANLKGTETRGKLCPKCLNCTDLDVALGRPKCTGKIPSARVSILHEVRPVTSGCFPILHDRTKIRQLPNLLRGYEHIRLSTHNVINAENAPGGPYKIGTSGSCPNITNGNGFFATMAWAVPKNDKNKTATNPLSIEVPYICTEGEDQITVWGFHSDNETQMAKLYGDSKPQKFTSSANGVATHYVSQIGGFPNQTEDGGLPQSGRIVVDYMVQKSGKTGTITYQRGILLPQKVWCASGRSKVIKGSLPLFGEADCLHEKYGGFNKSKPYYTGEHAKAIGNCPIWVKTPLKLANGTKYRPPAKLFKERGFFGAIAGFLEGGWEGMIAGWHGYTSHGAHGVAVAADLKSTQEAINKITKNLNSLSELEVKNLQRLSGAMDELHNEILELDEKVDDLRADTISSQIELAVLLSNEGIINSEDEHLLALERKLKKMLGPSAVEIGNGCFETKHKCNQTCLDRIAAGTFDAGEFSLPTFDSLNITAASLNDDGLDNHTILLYYSTAASSLAVTLMIAIFVVYMVSRDNVSCSICL

SEQ ID NO: 26600 - protein, 585 aa, synthetic construct
  REGION 1..585: note = hemagglutinin__InfluenzaB__AEG21022
MKAIIVLLMVVTSNADRICTGITSSNSPHVVKTATQGEVNVTGVIPLTTTPTKSHFANLKGTETRGKLCPKCLNCTDLDVALGRPKCTGTTPSARASILHEVRPVTSGCFPILHDRTKIRQLPNLLRGYEHIRLSTHNVINAENAPGGPYKIGTSGSCPNITNGNGFFATMAWAVPKNDKNKTATNPLSVEVPYICTEGEDQITVWGFHSDNETQMAKLYGDSKPQKFTSSANGVATHYVSQIGGFPNQTEDGGLPQSGRIVVDYMVQKSGKTGTITYQRGILLPQRGWCASGRSKVIKGSLPLFGEADCLHEKYGGLNKSKPYYTGEHAKAIGNCPIWVKTPLKLANGTKYRPPAKLFKERGFFGAIAGFLEGGWEGMIAGWHGYTSHGAHGVPVAADLKSTQEAINKITKNLNSLSELEVKNLQRLSGAMDELHNEILELDEKVDDLRADTISSQIELAVLLSNEGIINSEDEHLLALERKLKKMLGPSAVEIGNGCFETKHKCNQTCLDRIAAGTFDAGEFSLPTFDSLNITAASLNDDGLDNHTILLYYSTAASSLAVTLMIAIFVVYMVSRDNVSCSICL

SEQ ID NO: 26601 - protein, 584 aa, synthetic construct
  REGION 1..584: note = hemagglutinin__InfluenzaB__AEG21023
MKAIIVLLMVVTSNADRICTGITSSNSPHVVKTATLGEVNETGVIPLTTTPTKSYFANLKGTRTRGKLCPDCLNCTDLDVALGRPMCVGTTPSAKASILHEVRPVTSGCFPIMHDRTKIRQLPNLLRGYENIRLSTQNVIDAEKAPGGPYRLGTSGSCPNATSKIGFFATMAWAVPKDNYKNATNPLTVEVPYICTEGEDQITVWGFHSDNKTQMKNLYGDSNPQKFTSSANGVPTHYVSQIGDFPDPTEDGGLPQSGRIGVDYMMQKPGKTGTIVYQRGVLLPQKVWCASGRSKVIKGSLPLIGEADCLHEKYGGLNKSKPYYTGEHAKAIGNCPIWVKTPLKLANGTKYRPPAKLLKERGFFGAISGFLEGGWEGMIAGWHGYTSHGAHGVAVAADLKSTQEAINKITKNLNSLSELEVKNLQRLSGAMDELHNEILELDEKVDDLRADTISSQIELAVLLSNEGIINSEDEHLLALERKLKKMLGPSAVEIGNGCFETKHKCNQTCSDRIAAGTFDAGEFSLPTFDSLNITAASLNDDGLDNHTILLYYSTAASSLAVTLMIAIFVVYMVSRDNVSCSICL

SEQ ID NO: 26602 - protein, 585 aa, synthetic construct
  REGION 1..585: note = hemagglutinin__InfluenzaB__AEG21024
MKAIIVLLMVVTSNADRICTGITSSSSPHVVKTATQGEVNVTGVIPLTTTPTKSYFANLKGTETRGKLCPDCPNCTDLDVALGRPNCWGNIPSARVSILHEVRPVTSGCFPIMHDRTKIRQLPNLLRGYEHIRLSTHNVINAENAPGGPYKIGTSGSCPNVTNGNGFFATMAWAVPKDDKNNAATHLLTIEVPFFCTGGEHHIAVWGFPSDNDTLMAKLFGDSNPQMFSSSANGTTTHYVSQIGGFPNQTEDGGLPQSGRIVVDYMVQKSGKTGTIAYQRGVLLPQKVWCASGRSKVIKGSLPLIGEADCLHEKYGGLNKSKPYYTGEHAKAIGNCPIWVKTPLKLANGTKYRPPAKLLKERGFFGAIAGFLEGGWEGMIAGWHGYTSHGAHGVAVAADLKSTQEAINKITKNLNSLSELEVKNLQRLSGAMDELHNEILELDEKVDDLRADTISSQIELAVLLSNEGIINSEDEHLLALERKLKKMLGPSAVEIGNGCFETKHKCNQTCLDRIAAGTFDAGEFSLPTFDSLNITAASLNDDGLDNHTILLYYSTAASSLAVTLMIAIFVVYMVSRDNVSCSICL

SEQ ID NO: 26603 - protein, 584 aa, synthetic construct
  REGION 1..584: note = hemagglutinin__InfluenzaB__AEG21025
MKAIIVLLMVVTSNADRICTGITSSNSPHVVKTATLGEVNETGVIPLTTTPTKSYFANLKGTRTRGKLCPDCLNCTDLDVALGRPMCVGTTPSAKASILHEVRPVTSGCFPIMHDRTKIRQLPNLLRGYENIRLSTQNVIDAEKAPGGPYRLGTSGSCPNATSKIGFFATMAWAVPKDNYKNATNPLTVEVPYICTEGEDQITVWGFHSDIKTQMKNLYGDSNPQKFTSSANGVPTHYVSQIGDFPDPTEDGGLPQSGRIGVDYMMQKPGKTGTIVYQRGVLLPQKVWCASGRSKVIKGSLPLIGEADCLHEKYGGLNKSKPYYTGEHAKAIGNCPIWVKTPLKLANGTKYRPPAKLLKERGFFGAISGFLEGGWEGMIAGWHGYTSHGAHGVAVAADLKSTQEAINKITKNLNSLSELEVKNLQRLSGAMDELHNEILELDEKVDDLRADTISSQIELAVLLSNEGIINSEDEHLLALERKLKKMLGPSAVEIGNGCFETKHKCNQTCSDRIAAGTFDAGEFSLPTFDSLNITAASLNDDGLDNHTILLYYSTAASSLAVTLMIAIFVVYMVSRDNVSCSICL

SEQ ID NO: 26604 - protein, 585 aa, synthetic construct
  REGION 1..585: note = hemagglutinin__InfluenzaB__AEG21026
MKAMMVLLMVVTSNADRICTGITSSNSPHVVKTATQGEVNVTGVIPLTITPTKSHFANLKVKETRGKLCPKCPNCTDLDVALGRPKCTGKIPSARVSILHEDTPVTSGCIPIMHDRTKIRQLPNLLRGYEHIRLSTHNVINAESAPGGPYKIGTSGSCPNVTNGIGFFATMAWAVPKNDKNKTATNPLTIEVPYICTEGEDQITVWGFHFDNETQMAKLYGDSKPQVFTSSANGVNADFVSQIRGFPNQTEDGGLPQSGRIVVDYMVQKSGKTGTITYQRGILLPQKVWCASGRSKVIKESLPLIGEAYFQQEEYGGLNKSKSYYTEEHAKAIGICPIWVKTPLKLANKTKYRPPAHLSYFCGFFGAIAGFLEGGWEGMIAGWNGYTSHGAHGVAVVADLKSTQEAINKITKNLNSLSELEVETLQRLSGAMDELHNEILELDEKVDDHRADTISSQIELPDQLSNDGSINSEDEHLLALERKLKKMLGPSNGDKGSGGIETKHKCNQTCLDRIAAGTFDAGGFSHPTFDSKNVTAASLNDDGLDSGTILLYYSTDVSNLAVTVMMGIFVKYMVSRDNVSCSICL

SEQ ID NO: 26605 - protein, 585 aa, synthetic construct
  REGION 1..585: note = hemagglutinin__InfluenzaB__AEG21027
MKAIIVLLMVVTSNADRICTGITSSNSPHVVKTATQGEVNVTGVIPLTITPTKSHFANLKGTETRGKLCPKCPNCTDLDVALGRPKCTGKIPSARVSILHEVRPVTSGCFPIMHDRTKIRQLPNLLRGYEHIRLSTHNVINAENAPGGPYKIGTSGSCPNVTNGIGFFATMAWAVPKNDKNKTATNPLTIEVPYICTEGEDQITVWGFHFDNETQMAKLYGDSKPQKFTSSANGVNADFVSQIGGFPNQTEDGGLPQSGRIVVDYMVQKSGKTGTITYQRGILLPQKVWCASGRSKVIKESLPLIGEAYFQQEEYGGLNKSKSYYTGEHAKAIGNCPIWVKTPLKLANGTKYRPPAHLSYFCGFFGAIAGFLEGGWEGMIAGWNGYTSHGAHGVAVVADLKSTQEAINKITKNLNSLSELEVETLQRLSGAMDELHNEILEIDEKVDDHRADTISSQIELAVLLSNEGIINSEDEHLLALERKLKKMLGPSNGDKGSGGIETKHKCNQTCLDRIAAGTFDAGEFSLPTFDSLNITAASLNDDGLDSGTILLYYSTDVSNLAVTVMMGIFVKYMVSRDNVSCSICL

SEQ ID NO: 26606 - protein, 585 aa, synthetic construct
  REGION 1..585: note = hemagglutinin__InfluenzaB__AEG21028
MKAIIVLLMVVTSNADRICTGITASQSPNIDKSSTQGEVNVSCVIPLTTTPTKSHFANLKVKETRGKLCPKCPNCTDLDVSLGRPKCTGKIPSARVSILHEVRPVASGGFPIMHDRTKIRQLPNLLRGYEHIRLSTHNVINAENAPGGPYKIGTSGSCPNVTNGIGFFATMAWAVPKNDKNKTATNPLTIEVPYICTEGEDQITVWGFHSDNETQMAKLYGDSKPQKFTSSANGVTTHYAAKRPCFPNQTEDGGLPQSGRIVVDYMVQKSGKTGTITYQRGILLPQKVWCASGRSKVIKGSLPLIGEADCLHEKYGGLNKSKSYYTGEHAKAIGNCPIWVKTPLKLASRTMSKTPAHLSYFCGFFGAIAGFLEGGWEGMIAGWNGYTSHGAHGVAVVADLKSTQEAINKITKNLNSLSELEVKNLQRLSGAMDELHNEILELDEKVDDLRADTISSQIELAVLLSNEGIINSEDEHLLALERKLKKMLGPSAVEIGNGCFETKHKCNQTCLDRIAAGTFDAGEFSLPTFDSLNITAASLNDDGLDNHTILLYYSTAASSLAVTLMIAIFVVYMVSRDNVSCSICL

SEQ ID NO: 26607 - protein, 585 aa, synthetic construct
  REGION 1..585: note = hemagglutinin__InfluenzaB__AEG21029
MKAIIVLLMVVTSNADRICTGITSSNSPHVVKTATQGEVNVTGVIPLTTTPTKSHFANLKGTETRGKLCPKCPNCTDLDVALGRPKCTGKIPSARVSILHEVRPVTSGCFPIMHDRTKIRQLPNLLRGYEHIRLSTHNVINAENAPGGPYKIGTSGSCPNVTNGIGFFATMAWAVPKNDKNKTATNPLTIEVPYICTEGEDQITVWGFHSDSETQMAKLYGDSKPQKFTSSANGVTTHYVSQIGGFPNQTEDGGLPQSGRIVVDYMVQKSGKTGTITYQRGILLPQKVWCASGRSKVIKGSLPLIGEADCLHEKYGGLNKSKPYYTGEHAKAIGNCPIWVKTPLKLANGTKYRPPAKLLKERGFFGAIAGFLEGGWEGMIAGWHGYTSHGAHGVAVAADLKSTQEAINKITKNLNSLSELEVKNLQRLSGAMDELHNEILELDEKVDDLRADTISSQIELAVLLSNEGIINSEDEHLLALERKLKKMLGPSAVEIGNGCFETKHKCNQTCLDRIAAGTFDAGEFSLPTFDSLNITAASLNDDGLDNHTILLYYSTAASSLAVTLMIAIFVVYMVSRDNVSCSICL

SEQ ID NO: 26608 - protein, 585 aa, synthetic construct
  REGION 1..585: note = hemagglutinin__InfluenzaB__AEO80052
MKAIIVLLMVVTSNADRICTGITSSNSPHVVKTATQGEVNVTGVIPLTTTPTKSHFANLKGTETRGKLCPKCPNCTDLDVALGRPKCTGKIPSARVSILHEVRPVTSGCFPIMHDRTKIRQLPNLLRGYEHIRLSTHNVINAENAPGGPYKIGTSGSCPNVTNGNGFFATMAWAVPKNDKNKTATNPLTIEVPYICTEGEDQITVWGFHSDNETQMAKLYGDSKPQKFTSSANGVTTHYVSQIGGFPNQTEDGGLPQSGRIVVDYMVQKSGKTGTITYQRGILLPQKVWCASGRSKVIKGSLPLIGEADCLHEKYGGLNKSKPYYTGEHAKAIGNCPIWVKTPLKLANGTKYRPPAKLLKERGFFGAIAGFLEGGWEGMIAGWHGYTSHGAHGVAVAADLKSTQEAINKITKNLNSLSELEVKNLQRLSGAMDELHNEILELDEKVDDLRADTISSQIELAVLLSNEGIINSEDEHLLALERKLKKMLGPSAVEIGNGCFETKHKCNQTCLDRIAAGTFDAGEFSLPTFDSLNITAASLNDDGLDNHTILLYYSTAASSLAVTLMIAIFVVYMVSRDNVSCSICL

SEQ ID NO: 26609 - protein, 585 aa, synthetic construct; identical to SEQ ID NO: 26514
  REGION 1..585: note = hemagglutinin__InfluenzaB__AEO80067

SEQ ID NO: 26610 - protein, 584 aa, synthetic construct
  REGION 1..584: note = hemagglutinin__InfluenzaB__AEO80078
MKEIIVLLMVVTSNADRICTGITSSNSPHVVKTATQGEVNVTGVIPLTTTPTKSYFANLKGTRTRGKLCPDCLNCTDLDVALGRPMCVGTTPSAKASILHEVRPVTSGCFPIMHDRTKIRQLANLLRGYENIRLSTQNVIDAEKAPGGPYRLGTSGSCPNATSKSGFFATMAWAVPKDNNKNATNPLTVEVPYICTEGEDQITVWGFHSDNKTQMKNLYGDSNPQKFTSSANGVTTHYVSQIGGFPDQTEDGGLPQSGRIVVDYMMQKPGKTGTIVYQRGVLLPQKVWCASGRSKVIKGSLPLIGEADCLHEKYGGLNKSKPYYTGEHAKAIGNCPIWVKTPLKLANGTKYRPPAKLLKERGFFGAIAGFLEGGWEGMIAGWHGYTSHGAHGVAVAADLKSTQEAINKITKNLNSLSELEVKNLQRLSGAMDELHNEILELDEKVDDLRADTISSQIELAVLLSNEGIINSEDEHLLALERKLKKMLGPSAVDIGNGCFETKHKCNQTCLDRIAAGTFNAGEFSLPTFDSLNITAASLNDDGLDNHTILLYYSTAASSLAVTLMLAIFIVYMVSRDNVSCSICL

SEQ ID NO: 26611 - protein, 585 aa, synthetic construct
  REGION 1..585: note = hemagglutinin__InfluenzaB__AEO80086
MKAIIVLLMVVTSNADRICTGITSSNSPHVVKTATQGEVNVTGVIPLTTTPTKSHFANLKGTKTRGKLCPKCLNCTDLDVALGRPKCTGNIPSAKVSILHEVRPVTSGCFPIMHDRTKIRQLPNLLRGYEHIRLSTHNVINAEKAPGGPYKIGTSGSCPNVTNGNGFFATMAWAVPKNDNNKTATNSLTIEVPYICTEGEDQITIWGFHSDNETQMAKLYGDSKPQKFTSSANGVTTHYVSQIGGFPNQTEDGGLPQSGRIVVDYMVQKSGKTGTITYQRGILLPQKVWCASGRSKVIKGSLPLIGEADCLHEKYGGLNKSKPYYTGEHAKAIGNCPIWVKTPLKLANGTKYRPPAKLLKERGFFGAIAGFLEGGWEGMIAGWHGYTSHGAHGVAVAADLKSTQEAINKITKNLNSLSELEVKNLQRLSGAMDELHNEILELDEKVDDLRADTISSQIELAVLLSNEGIINSEDEHLLALERKLKKMLGPSAVEIGNGCFETKHKCNQTCLDRIAAGTFDAGEFSLPTFDSLNITAASLNDDGLDNHTILLYYSTAASSLAVTLMIAIFVVYMVSRDNVSCSICL

SEQ ID NO: 26612 - protein, 584 aa, synthetic construct
  REGION 1..584: note = hemagglutinin__InfluenzaB__AEO80097
MKAIIVLLMVVTSNADRICTGITSSNSPHVVKTATQGEVNVTGVIPLTTTPTKSHFANLKGTRTRGKLCPDCLNCTDLDVALGRPMCVGTTPSAKASILHEVRPVTSGCFPIMHDRTKIRQLANLLRGYENIRLSTQNVIDAEKAPGGPYRLGTSGSCPNATSKSGFFATMAWAVPKDNNKNATNPLTVEVPYICTEGEDQITVWGFHSDNKTQMKNLYGDSNPQKFTSSANGVTTHYVSQIGGFPDQTEDGGLPQSGRIVVDYMMQKPGKTGTIVYQRGVLLPQKVWCASGRSKVIKGSLPLIGEADCLHEKYGGLNKSKPYYTGEHAKAIGNCPIWVKTPLKLANGTKYRPPAKLLKERGFFGAIAGFLEGGWEGMIAGWHGYTSHGAHGVAVAADLKSTQEAINKITKNLNSLSELEVKNLQRLSGAMDELHNEILELDEKVDDLRADTISSQIELAVLLSNEGIINSEDEHLLALERKLKKMLGPSAVDIGNGCFETKHKCNQTCLDRIAAGTFNAGEFSLPTFDSLNITAASLNDDGLDNHTILLYYSTAASSLAVTLMLAIFIVYMVSRDNVSCSICL

SEQ ID NO: 26613 - protein, 584 aa, synthetic construct; identical to SEQ ID NO: 26426
  REGION 1..584: note = hemagglutinin__InfluenzaB__AEO80108

SEQ ID NO: 26614 - protein, 585 aa, synthetic construct; identical to SEQ ID NO: 26514
  REGION 1..585: note = hemagglutinin__InfluenzaB__AEO80145

SEQ ID NO: 26615 - protein, 585 aa, synthetic construct; identical to SEQ ID NO: 26573
  REGION 1..585: note = hemagglutinin__InfluenzaB__AEO80154

SEQ ID NO: 26616 - protein, 585 aa, synthetic construct
  REGION 1..585: note = hemagglutinin__InfluenzaB__AEO80183
MKAIIVLLMVVTSNADRICTGITSSNSPHVVKTATQGEVNVTGVIPLTTTPTKSHFANLKGTETRGKLCPKCLNCTDLDVALGRPKCTGNIPSARVSILHEVRPVTSGCFPIMHDRTKIRQLPNLLRGYEHIRLSTHNVINAENAPGGPYKIGTSGSCPNVTNGNGFFATMAWAVPKNDNNKTATNSLTIEVPYICTEGEDQITVWGFHSDIETQMAKLYGDSKPQKFTSSANGVTTHYVSQIGGFPNQTEDGGLPQSGRIVVDYMVQKSGKTGTITYQRGILLPQKVWCASGRSKVIKGSLPLIGEADCLHEKYGGLNKSKPYYTGEHAKAIGNCPIWVKTPLKLANGTKYRPPAKLLKERGFFGAIAGFLEGGWEGMIAGWHGYTSHGAHGVAVAADLKSTQEAINKITKNLNSLSELEVKNLQRLSGAMDELHNEILELDEKVDDLRADTISSQIELAVLLSNEGIINSEDEHLLALERKLKKMLGPSAVEIGNGCFETKHKCNQTCLDRIAAGTFDAGEFSLPTFDSLNITAASLNDDGLDNHTILLYYSTAASSLAVTLMIAIFVVYMVSRDNVSCSICL

SEQ ID NO: 26617 - protein, 585 aa, synthetic construct
  REGION 1..585: note = hemagglutinin__InfluenzaB__AEO80194
MKAIIVLLMVVTSNADRICTGITSSNSPHVVKTATQGEVNVTGVIPLTTTPTKSHFANLKGTETRGKLCPKCLNCTDLDVALGRPKCTGNIPSARVSILHEVRPVTSGCFPIMHDRTKIRQLPNLLRGYEHIRLSTHNVINAENAPGGPYKIGTSGSCPNVTNGNGFFATMAWAVPKNDNNKTATNSLTIEVPYICTEGEDQITVWGFHSDNEAQMAKLYGDSKPQKFTSSANGVTTHYVSQIGGFPNQTEDGGLPQSGRIVVDYMVQKSGKTGTITYQRGILLPQKVWCARGRSKVIKGSLPLIGEADCLHEKYGGLNKSKPYYTGEHAKAIGNCPIWVKTPLKLANGTKYRPPAKLLKERGFFGAIAGFLEGGWEGMIAGWHGYTSHGAHGVAVAADLKSTQEAINKITKNLNSLSELEVKNLQRLSGAMDELHNEILELDEKVDDLRADTISSQIELAVLLSNEGIINSEDEHLLALERKLKKMLGPSAVEIGNGCFETKHKCNQTCLDRIAAGTFDAGEFSLPTFDSLNITAASLNDDGLDNHTILLYYSTAASSLAVTLMIAIFVVYMISRDNVSCSICL

SEQ ID NO: 26618 - protein, 585 aa, synthetic construct; identical to SEQ ID NO: 26565
  REGION 1..585: note = hemagglutinin__InfluenzaB__AEO80205

SEQ ID NO: 26619 - protein, 585 aa, synthetic construct; identical to SEQ ID NO: 26565
  REGION 1..585: note = hemagglutinin__InfluenzaB__AEO80216

SEQ ID NO: 26620 - protein, 584 aa, synthetic construct
  REGION 1..584: note = hemagglutinin__InfluenzaB__AEO80227
MKAIIVLLMVVTSNADRICTGITSSNSPHVVKTATQGEVNVTGVIPLTTTPTKSYFANLKGTRTRGKLCPDCLNCTDLDVALGRPMCVGTTPSAKASILHEVRPVTSGCFPIMHDRTKIRQLANLLRGYENIRLSTQNVIDAEKAPGGPYRLGTSGSCPNATSKSGFFATMAWAVPKDNNKNATNPLTVEVPYICTEGEDQITVWGFHSDNKIQMKNLYGDSNPQKFTSSANGVTTHYVSQIGGFPDQTEDGGLPQSGRIVVDYMMQKPGKTGTIVYQRGVLLPQKVWCASGRSKVIKGSLPLIGEADCLHEKYGGLNKSKPYYTGEHAKAIGNCPIWVKTPLKLANGTKYRPPAKLLKERGFFGAIAGFLEGGWEGMIAGWHGYTSHGAHGVAVAADLKSTQEAINKITKNLNSLSELEVKNLQRLSGAMDELHNEILELDEKVDDLRADTISSQIELAVLLSNEGIINSEDEHLLALERKLKKMLGPSAVDIGNGCFETKHKCNQTCLDRIAAGTFNAGEFSLPTFDSLNITAASLNDDGLDNHTILLYYSTAASSLAVTLMLAIFIVYMVSRDNVSCSICL

SEQ ID NO: 26621 - protein, 585 aa, synthetic construct; identical to SEQ ID NO: 26582
  REGION 1..585: note = hemagglutinin__InfluenzaB__AEO80238

SEQ ID NO: 26622 - protein, 585 aa, synthetic construct
  REGION 1..585: note = hemagglutinin__InfluenzaB__AEP20178
MKAIIVLLMVVTSNADRICTGITSSNSPHVVKTATQGEVNVTGVIPLTTTPTKSHFSNLKGTETRGKLCPKCLNCTDLDVALGRPKCTGNIPSARVSILHEVRPVTSGCFPIMHDRTKIRQLPNLLRGYEHIRLSTHNVINAENAPGGPYKIGTSGSCPNVTNGNGFFATMAWAVPKNDNNKTATNSLTIEVPYICTEGEDQITVWGFHSDNETQMAKLYGDSKPQKFTSSANGVTTHYVSQIGGFPNQTEDGGLPQSGRIVVDYMVQKSGKTGTITYQRGILLPQKVWCASGRSKVIKGSLPLIGEADCLHEKYGGLNKSKPYYTGEHAKAIGNCPIWVKTPLKLANGTKYRPPAKLLKERGFFGAIAGFLEGGWEGMIAGWHGYTSHGAHGVAVAADLKSTQEAINKITKNLNSLSELEVKNLQRLSGAMDELHNEILELDEKVDDLRADTISSQIELAVLLSNEGIINSEDEHLLALERKLKKMLGPSAVEIGNGCFETKHKCNQTCLDRIAAGTFDAGEFSLPTFDSLNITAASLNDDGLDNHTILLYYSTAASSLAVTLMIAIFVVYMVSRDNVSCSICL

SEQ ID NO: 26623 - protein, 585 aa, synthetic construct
  REGION 1..585: note = hemagglutinin__InfluenzaB__AEP20189
MKAIIVLLMVVTSNADRICTGITSSNSPHVVKTATQGEVNVTGVIPLTTTPTKSHFANLKGTETRGKLCPKCLNCTDLDVALGRPKCTGNIPSARVSILHEVRPVTSGCFPIMHDRTKIRQLPNLLRGYEHIRLSTHNVINAENAPGGPYKIGTSGSCPNVTNGNGFFATMAWAVPKNDNNKTATNSLTIEVPYICTEGEDQITVWGFHSDNETQMAKLYGDSKPQKFTSSANGVTTHYVSQIGGFPNQTEDGGLPQSGRIVVDYMVQKSGKTGTITYQRGILLPQKVWCASGRSKVIKGSLPLIGEADCLHEKYGGLNKSKPYYTGEHAKAIGNCPIWVKTPLKLANGTKYRPPAKLLKERGFFGAIAGFLEGGWEGMIAGWHGYTSHGAHGVAVAADLKSTQEAINKITKNLNSLSELEVKNLQRLSGAMDELHNEILELDEKVDDLRADTISSQIELAVLLSNEGIINSEDEHLLALERKLKKMLGPSAVEIGNGCFETKHKCNQTCLDRIAAGTFDAGEFSLPTFDSLNITAASLNDDGLDNHTVLLYYSTAASSLAVTLMIAIFVVYMVSRDNVSCSICL

SEQ ID NO: 26624 - protein, 585 aa, synthetic construct; identical to SEQ ID NO: 26514
  REGION 1..585: note = hemagglutinin__InfluenzaB__AEP20200

SEQ ID NO: 26625 - protein, 584 aa, synthetic construct; identical to SEQ ID NO: 26405
  REGION 1..584: note = hemagglutinin__InfluenzaB__AEP20211

SEQ ID NO: 26626 - protein, 584 aa, synthetic construct
  REGION 1..584: note = hemagglutinin__InfluenzaB__AEP20222
MKAIIVLLMVVTSNADRICTGITSSNSPHVVKTATQGEVNVTGAIPLTTTPTKSHFANLKGTKTRGKLCPTCFNCTDLDVALGRPMCVGITPSAKASILHEVRPVTSGCFPIMHDRTKIRQLPNLLRGYEKIRLSTQNVIDAEKAPGGPYRLGTSGSCPNATSKSGFFATMAWAVPRDNNKTATNPLTVEVPNICTKEEDQITVWGFHSDNKTQMKNLYGDPNPQKFTSSANGITTHYVSQIGGFPDQTEDGGLPQSGRIVVDYMVQKPGKTGTIVYQRGILLPQKVWCASGRSKVIKGSLPLIGEADCLHEKYGGLNKSKPYYTGEHAKAIGNCPIWVKTPLKLANGTKYRPPAKLLKERGFFGAIAGFLEGGWEGMIAGWHGYTSHGAHGVAVAADLKSTQEAINKITKNLNSLSELEVKNLQRLSGAMDELHNEILELDEKVDDLRADTISSQIELAVLLSNEGIINSEDEHLLALERKLKKMLGPSAVDIGNGCFETKHKCNQTCLDRIAAGTFNAGEFSLPTFDSLNITAASLNDDGLDNHTILLYYSTAASSLAVTLMIAIFIVYMISRDNVSCSICL

SEQ ID NO: 26627 - protein, 584 aa, synthetic construct; identical to SEQ ID NO: 26511
  REGION 1..584: note = hemagglutinin__InfluenzaB__AEP20233

SEQ ID NO: 26628 - protein, 584 aa, synthetic construct
  REGION 1..584: note = hemagglutinin__InfluenzaB__AEP20244
MKAIIVLLMVVTSNADRICTGITSSNSPHVVKTATQGEVNVTGAIPLTTTPTKSHFANLKGTKTRGKLCPTCFNCTDLDVALGRPMCMGITPSAKASILHEVRPVTSGCFPIMHDRTKIRQLPNLLRGYEKIRLSTQNVIDAEKAPGGPYRLGTSGSCPNATSKSGFFATMAWAVPRGNNKTATNPLTVEVPHICTKEEDQITVWGFHSDNKTQMKNLYGDSNPQKFTSSANGITTHYVSQIGGFPDQTEDGGLPQSGRIVVDYMVQKPGKTGTIVYQRGILLPQKVWCASGRSKVIKGSLPLIGEADCLHEKYGGLNKSKPYYTGEHAKAIGNCPIWVKTPLKLANGTKYRPPAKLLKERGFFGAIAGFLEGGWEGMIAGWHGYTSHGAHGVAVAADLKSTQEAINKITKNLNSLSELEVKNLQRLSGAMDELHNEILELDEKVDDLRADTISSQIELAVLLSNEGIINSEDEHLLALERKLKKMLGPSAVDIGNGCFETKHKCNQTCLDRIAAGTFNAGEFSLPTFDSLNITAASLNDDGLDNHTILLYYSTAASSLAVTLMIAIFIVYMISRDNVSCSICL

SEQ ID NO: 26629 - protein, 585 aa, synthetic construct; identical to SEQ ID NO: 26419
  REGION 1..585: note = hemagglutinin__InfluenzaB__AEP20255

SEQ ID NO: 26630 - protein, 585 aa, synthetic construct
  REGION 1..585: note = hemagglutinin__InfluenzaB__AEP20277
MKAIIVLLMVVTSNADRICTGITSSNSPHVVKTATQGEVNVTGVIPLTTTPTKSHFANLKGTKTRGKLCPKCLNCTDLDVALGRPKCTGNIPSAEVSILHEVRPVTSGCFPIMHDRTKIRQLPNLLRGYEHIRLSTHNVINAEKAPGGPYKIGTSGSCPNVTNGNGFFATMAWAVPKNDNNKTATNSLTIEVPYICTEGEDQITVWGFHSDNETQMAKLYGDSKPQKFTSSANGVTTHYVSQIGGFPNQTEDGGLPQSGRIVVDYMVQKSGKTGTITYQRGILLPQKVWCASGRSKVIKGSLPLIGEADCLHEKYGGLNKSKPYYTGEHAKAIGNCPIWVKTPLKLANGTKYRPPAKLLKERGFFGAIAGFLEGGWEGMIAGWHGYTSHGAHGVAVAADLKSTQEAINKITKNLNSLSELEVKNLQRLSGAMDELHNEILELDEKVDDLRADTISSQIELAVLLSNEGIINSEDEHLLALERKLKKMLGPSAVEIGNGCFETKHKCNQTCLDKIAAGTFDAGEFSLPTFDSLNITAASLNDDGLDNHTILLYYSTAASSLAVTLMIAIFVVYMVSRDNVSCSICL

SEQ ID NO: 26631 - protein, 584 aa, synthetic construct
  REGION 1..584: note = hemagglutinin__InfluenzaB__AEP20299
MKAIIVLLMVVTSNADRICTGITSSNSPHVVKTATQGEVNVTGVIPLTTTPTKSYFANLKGTRTRGKLCPDCLNCTDLDVALGRPMCVGTTPSAKASILHEVRPVTSGCFPIMHDRTKIRQLANLLRGYENIRLSTQNVIDAEKAPGGPYRLGTSGSCPNATSKSGFFATMAWAVPKNNNKNATNPLTVEVPYICTEGEDQITVWGFHSDNKTQMKNLYGDSNPQKFTSSANGVTTHYVSQIGGFPDQTEDGGLPQSGRIVVDYMMQKPGKTGTIVYQRGVLLPQKVWCASGRSKVIKGSLPLIGEADCLHEKYGGLNKSKPYYTGEHAKAIGNCPIWVKTPLKLANGTKYRPPAKLLKERGFFGAIAGFLEGGWEGMIAGWHGYTSHGAHGVAVAADLKSTQEAINKITKNLNSLSELEVKNLQRLSGAMDELHNEILELDEKVDDLRADTISSQIELAVLLSNEGIINSEDEHLLALERKLKKMLGPSAVDIGNGCFETKHKCNQTCLDRIAAGTFNAGEFSLPTFDSLNITAASLNDDGLDNHTILLYYSTAASSLAVTLMLAIFIVYMVSRDNVSCSICL

SEQ ID NO: 26632 - protein, 584 aa, synthetic construct
  REGION 1..584: note = hemagglutinin__InfluenzaB__AEP20310
MKAIIVLLMVVTSNADRICTGITSSNSPHVVKTATQGEVNVTGVIPLTTTPTKSYFANLKGTRTRGKLCPDCLNCTDLDVALGRPMCVGTTPSAKASILHEVRPVTSGCFPIMHDRTKIRQLPNLLRGYENIRLSTQNVIDAEKAPGGPYRLGTSGSCPNATSKSGFFATMAWAVPKDNNKNATNPLTVEVPYICTEGEDQITVWGFHSDNKTQMKNLYGDSNPQKFTSSANGVTAHYVSQIGGFPDQTEDGGLPQSGRIVVDYMMQKPGKTGTIVYQRGVLLPQKVWCASGRSKVIKGSLPLIGEADCLHEKYGGLNKSKPYYTGEHAKAIGNCPIWVKTPLKLANGTKYRPPAKLLKERGFFGAIAGFLEGGWEGMIAGWHGYTSHGAHGVAVAADLKSTQEAINKITKNLNSLSELEVKNLQRLSGAMDELHNEILELDEKVDDLRADTISSQIELAVLLSNEGIINSEDEHLLALERKLKKMLGPSAVDIGNGCFETKHKCNQTCLDRIAAGTFNAGEFSLPTFDSLNITAASLNDDGLDNHTILLYYSTAASSLAVTLMLAIFIVYMVSRDNVSCSICL

SEQ ID NO: 26633 - protein, 585 aa, synthetic construct
  REGION 1..585: note = hemagglutinin__InfluenzaB__AEP20332
MKAIIVLLMVVTSNADRICTGITSSNSPHVVKTATQGEVNVTGVIPLTTTPTKSHFANLKGTKTRGKLCPKCLNCTDLDVALGRPKCTGNIPSAEVSILHEVRPVTSGCFPIMHDRTKIRQLPNLLRGYEHIRLSTHNVINAEKAPGGPYKIGTSGSCPNVTNGNGFFATMAWAVPKNDNNKTATNPLTIEVPYICTEGEDQITVWGFHSDNETQMAKLYGDSKPQKFTSSANGVTTHYVSQIGGFPNQTEDGGLPQSGRIVVDYMVQKSGKTGTITYQRGILLPQKVWCASGRSKVIKGSLPLIGEADCLHEKYGGLNKSKPYYTGEHAKAIGNCPIWVKTPLKLANGTKYRPPAKLLKERGFFGAIAGFLEGGWEGMIAGWHGYTSHGAHGVAVAADLKSTQEAINKITKNLNSLSELEVKNLQRLSGAMDELHNEILELDEKVDDLRADTISSQIELAVLLSNEGIINSEDEHLLALERKLKKMLGPSAVEIGNGCFETKHKCNQTCLDRIAAGTFDAGEFSLPTFDSLNITAASLNDDGLDNHTILLYYSTAASSLAVTLMIAIFVVYMVSRDNVSCSICL

SEQ ID NO: 26634 - protein, 584 aa, synthetic construct; identical to SEQ ID NO: 26426
  REGION 1..584: note = hemagglutinin__InfluenzaB__AEP20343

SEQ ID NO: 26635 - protein, 584 aa, synthetic construct; identical to SEQ ID NO: 26426
  REGION 1..584: note = hemagglutinin__InfluenzaB__AEP20354

SEQ ID NO: 26636 - protein, 584 aa, synthetic construct; identical to SEQ ID NO: 26426
  REGION 1..584: note = hemagglutinin__InfluenzaB__AEP20365

SEQ ID NO: 26637 - protein, 584 aa, synthetic construct; identical to SEQ ID NO: 26426
  REGION 1..584: note = hemagglutinin__InfluenzaB__AEP20376

SEQ ID NO: 26638 - protein, 585 aa, synthetic construct
  REGION 1..585: note = hemagglutinin__InfluenzaB__AEP20398
MKAIIVLLMVVTSNADRICTGITSSNSPHVVKTATQGEVNVTGVIPLTTTPTKSHFANLKGTKTRGKLCPKCLNCTDLDVALGRPKCTGNIPSAEVSILHEVRPVTSGCFPIMHDRTKIRQLPNLLRGYEHIRLSTHNVINAEKAPGGPYKIGTSGSCPNVTNGNGFFATMAWAVPKNDNNKTATNSLTIEVPYICTEGEDQITIWGFHSDNETQMAKLYGDSKPQKFTSSANGVTTHYVSQIGGFPNQTEDGGLPQSGRIVVDYMVQKSGKTGTITYQRGILLPQKVWCASGRSKVIKGSLPLIGEADCLHEKYGGLNKSKPYYTGEHAKAIGNCPIWVKTPLKLANGTKYRPPAKLLKERGFFGAIAGFLEGGWEGMIAGWHGYTSHGAHGVAVAADLKSTQEAINKITKNLNSLSELEVKNLQRLSGAMDELHNEILELDEKVDDLRADTISSQIELAVLLSNEGIINSEDEHLLALERKLKKMLGPSAVEIGNGCFETKHKCNQTCLDRIAAGTFDAGEFSLPTFDSLNITAASLNDDGLDNHTILLYYSTAASSLAVTLMIAIFVVYMVSRDNVSCSICL

SEQ ID NO: 26639 - protein, 585 aa, synthetic construct; identical to SEQ ID NO: 26608
  REGION 1..585: note = hemagglutinin__InfluenzaB__AEP20409

SEQ ID NO: 26640 - protein, 585 aa, synthetic construct; identical to SEQ ID NO: 26608
  REGION 1..585: note = hemagglutinin__InfluenzaB__AEP20420

SEQ ID NO: 26641 - protein, 585 aa, synthetic construct; identical to SEQ ID NO: 26608
  REGION 1..585: note = hemagglutinin__InfluenzaB__AEP20431

SEQ ID NO: 26642 - protein, 585 aa, synthetic construct; identical to SEQ ID NO: 26608
  REGION 1..585: note = hemagglutinin__InfluenzaB__AEP20442

SEQ ID NO: 26643 - protein, 585 aa, synthetic construct; identical to SEQ ID NO: 26608
  REGION 1..585: note = hemagglutinin__InfluenzaB__AEP20453

SEQ ID NO: 26644 - protein, 584 aa, synthetic construct; identical to SEQ ID NO: 26426
  REGION 1..584: note = hemagglutinin__InfluenzaB__AEQ39027

SEQ ID NO: 26645 - protein, 585 aa, synthetic construct
  REGION 1..585: note = hemagglutinin__InfluenzaB__AEQ39260
MKAIIVLLMVVTSNADRICTGITSSNSPHVVKTATQGEVNVTGVIPLTTTPTKSHFANLKGTETRGKLCPKCLNCTDLDVALGRPKCTGKIPSARVSILHEVRPVTSGCFPIMHDRTKIRQLPNLLRGYEHIRLSTHNVINAENAPGGPYKIGTSGSCPNVTNGNGFFATMAWAVPKNDKNKTATNPLTIEVPYICTEGEDQITVWGFHSDNETQMAKLYGDSKPQKFTSSANGVTTHYVSQIGGFPNQTEDGGLPQSGRIVVDYMVQKSGKTGTITYQRGILLPQKVWCASGRSKVIKGSLPLIGEADCLHEKYGGLNKSKPYYTGEHAKAIGNCPIWVKTPLKLANGTKYRPPAKLLKERGFFGAIAGFLEGGWEGMIAGWHGYTSHGAHGVAVAADLKSTQEAINKITKNLNSLSELEVKNLQRLSGAMDELHNEILELDEKVDDLRADTISSQIELAVLLSNEGIINSEDEHLLALERKLKKMLGPSAVEIGNGCFETKHKCNQTCLDRIAAGTFDAGEFSLPTFDSLNITAASLNDDGLDNHTILLYYSTAASSLAVTLMIAIFVVYMVSRDNVSCSICL

SEQ ID NO: 26646 - protein, 585 aa, synthetic construct; identical to SEQ ID NO: 26645
  REGION 1..585: note = hemagglutinin__InfluenzaB__AEQ39271

SEQ ID NO: 26647 - protein, 585 aa, synthetic construct
  REGION 1..585: note = hemagglutinin__InfluenzaB__AEQ39282
MKAIIVLLMVVTSNADRICTGITSSNSPHVVKTATQGEVNVTGVIPLTTTPTKSHFANLKGTETRGKLCPKCLNCTDLDVALGRPKCTGKIPSARVSILHEVRPVTSGCFPIMHDRTKIRQLPNLLRGYEHIRLSTHNVINAENAPGGPYKIGTSGSCPNVTNGNGFFATMAWAVPKNDKNKTATNPLTIEVPYICTEGEDQITVWGFHSDNETQMAKLYGDSKPQKFTSSANGVTTHYVSQIGGFPNQTEDGGLPQSGRIVVDYMVQKSGKTGTITYQRGILLPQKVWCASGRSKVIKGSLPLIGEADCLHEKYGGLNKSKPYYTGEHAKAIGNCPIWVKTPLKLANGTKYRPPAKLLKERGFFGAIAGFLEGGWEGMIAGWHGYTSHGAHGVAVAADLKSTQEAINKITKNLNSLSELEVKNLQRLSGAMDELHNEILELDEKVDDLRADTISSQIELAVLLSNEGIINSEDEHLLALERKLKKMLGPSAVEIGNGCFETKHKCNQTCLDRIAAGTFDAGEFSLPTFDSLNITAASLNGDELDNHTILLYYSTAASSLAVTLMIAIFVVYMVSRDNVSCSICL

SEQ ID NO: 26648 - protein, 585 aa, synthetic construct
  REGION 1..585: note = hemagglutinin__InfluenzaB__AEQ39315
MKAIIVLLMVVTSNADRICTGITSSNSPHVVKTATQGEVNVTGVIPLTTTPTKSHFANLKGTETRGKLCPKCLNCTDLDVALGRPKCTGKIPSARVSILHEVRPVTSGCFPIMHDRTKIRQLPNLLRGYEHIRLSTHNVINAENAPGGPYKIGTSGSCPNVTNGNGFFATMAWAVPKNDKNKTATNPLTIEVPYICTEGEDQITVWGFHSDNETQMAKLYGDSKPQKFTSSANGVTTHYVSQIGGFPNQTEDGGLPQSGRIVVDYMVQKSGKTGTITYQRGILLPQKVWCASGRSKVIKGSLPLIGEADCLHEKYGGLNKSKPYYTGEHAKAIGNCPIWVKTPLKLANGTKYRPPAKLLKERGFFGAIAGFLEGGWEGMIAGWHGYTSHGAHGVAVAADLKSTQEAINKITKNLNSLSELEVKNLQRLSGAMDELHNEILELDEKVDDLRADTISSQIELAVLLSNEGIINSEDEHLLALERKLKKMLGPSAVEIGNGCFETKHKCNQTCLDRIAAGTFDAGEFSLPTFDSLNITAASLNGDGLDNHTILLYYSTAASSLAVTLMIAIFVVYMVSRDNVSCSICL

SEQ ID NO: 26649 - protein, 585 aa, synthetic construct; identical to SEQ ID NO: 26648
  REGION 1..585: note = hemagglutinin__InfluenzaB__AEQ39326

SEQ ID NO: 26650 - protein, 585 aa, synthetic construct
  REGION 1..585: note = hemagglutinin__InfluenzaB__AEQ39337
MKAIIVLLMVVTSNADRICTGITSSNSPHVVKTATQGEVNVTGVIPLTTTPTKSHFANLKGTETRGKLCPKCLNCTDLDVALGRPKCTGKIPSARVSILHEVRPVTSGCFPIMHDRTKIRQLPNLLRGYEHIRLSTHNVINAGNAPGGPYKIGTSGSCPNVTNGNGFFATMAWAVPKNDKNKTATNPLTIEVPYICTEGEDQITVWGFHSDNETQMAKLYGDSKPQKFTSSANGVTTHYVSQIGGFPNQTEDGGLPQSGRIVVDYMVQKSGKTGTITYQRGILLPQKVWCASGRSKVIKGSLPLIGEADCLHEKYGGLNKSKPYYTGEHAKAIGNCPIWVKKPLKLANGTKYRPPAKLLKERGFFGAIAGFLEGGWEGMIAGWHGYTSHGAHGVAVAADLKSTQEAINKITKNLNSLSELEVKNLQRLSGAMDELHNEILELDEKVDDLRADTISSQIELAVLLSNEGIINSEDEHLLALERKLKKMLGPSAVEIGNGCFETKHKCNQTCLDRIAAGTFDAGEFSLPTFDSLNITAASLNDDGLDNHTILLYYSTAASSLAVTLMIAIFVVYMVSRDNVSCSICL

SEQ ID NO: 26651 - protein, 585 aa, synthetic construct
  REGION 1..585: note = hemagglutinin__InfluenzaB__AEQ39348
MKAIIVLLMVVTSNADRICTGITSSNSPHVVKTATQGEVNVTGVIPLTTTPTKSHFANLKGTETRGKLCPKCLNCTDLDVALGRPKCTGKIPSARVSILHEVRPVTSGCFPIMHDRTKIRQLPNLLRGYEHIRLSTHNVINAENAPGGPYKIGTSGSCPNVTNGNGFFATMAWAVPKNDKNKTATNPLTIEVPYICTEGEDQITVWGFHSDNETQMAKLYGDSKPQKFTSSANGVTTHYVSQIGGFPNQTEDGGLPQSGRIVVDYMVQKSGKTGTITYQRGILLPQKVWCASGRSKVIKGSLPLIGEADCLHEKYGGLNKSKPYYTGEHAKAIGNCPIWVKTPLKLANGTKYRPPAKLLKERGFFGAIAGFLEGGWEGMIAGWHGYTSHGAHGVAVAADLKSTQEAINKITKNLNSLSELEVKNLQRLSGAMDELHNEILELDEKVDDLRADTISSQIELAVLLSNEGIINSEDEHLLALERKLKKMLGPSAVEIGNGCFETKHKCNQTCLDRIAAGTFDAGEFSLPTFDSLNITAASLNDDGLDNHIILLYYSTAASSLAVTLMIAIFVVYMVSRDNVSCSICL

SEQ ID NO: 26652 - protein, 585 aa, synthetic construct; identical to SEQ ID NO: 26648
  REGION 1..585: note = hemagglutinin__InfluenzaB__AEQ39359

SEQ ID NO: 26653 - protein, 585 aa, synthetic construct
  REGION 1..585: note = hemagglutinin__InfluenzaB__AEQ39370
MKAIIVLLMVVTSNADRICTGITSSNSPHVVKTATQGEVNVTGVIPLTTTPTKSHFANLKGTETRGKLCPKCLNCTDLDVALGRPKCTGNIPSARVSILHEVRPVTSGCFPIMHDRTKIRQLPNLLRGYEHIRLSTHNVVNAENAPGGPYKIGTSGSCPNVTNGNGFFATMAWAVPKNDNNKTATNSLTIEVPYICTEGEDQITVWGFHSDNETQMAKLYGDSKPQKFTSSANGVTTHYVSQIGGFPNQTEDGGLPQSGRIVVDYMVQKSGKTGTITYQRGILLPQKVWCASGRSKVIKGSLPLIGEADCLHEKYGGLNKSKPYYTGEHAKAIGNCPIWVKTPLKLANGTKYRPPAKLLKERGFFGAIAGFLEGGWEGMIAGWHGYTSHGAHGVAVAADLKSTQEAINKITKNLNSLSELEVKNLQRLSGAMDELHNEILELDEKVDDLRADTISSQIELAVLLSNEGIINSEDEHLLALERKLKKMLGPSAVEIGNGCFETKHKCNQTCLDRIAAGTFDAGEFSLPTFDSLNITAASLNDDGLDNHTILLYYSTAASSLAVTLMIAIFVVYMVSRDNVSCSICL

SEQ ID NO: 26654 - protein, 584 aa, synthetic construct; identical to SEQ ID NO: 26426
  REGION 1..584: note = hemagglutinin__InfluenzaB__AEQ39392

SEQ ID NO: 26655 - protein, 584 aa, synthetic construct; identical to SEQ ID NO: 26426
  REGION 1..584: note = hemagglutinin__InfluenzaB__AEQ39429

SEQ ID NO: 26656 - protein, 584 aa, synthetic construct; identical to SEQ ID NO: 26426
  REGION 1..584: note = hemagglutinin__InfluenzaB__AEQ39440

SEQ ID NO: 26657 - protein, 584 aa, synthetic construct; identical to SEQ ID NO: 26426
  REGION 1..584: note = hemagglutinin__InfluenzaB__AEQ39451

SEQ ID NO: 26658 - protein, 585 aa, synthetic construct; identical to SEQ ID NO: 26638
  REGION 1..585: note = hemagglutinin__InfluenzaB__AEQ39462

SEQ ID NO: 26659 - protein, 585 aa, synthetic construct; identical to SEQ ID NO: 26645
  REGION 1..585: note = hemagglutinin__InfluenzaB__AEQ39484

SEQ ID NO: 26660 - protein, 584 aa, synthetic construct; identical to SEQ ID NO: 26405
  REGION 1..584: note = hemagglutinin__InfluenzaB__AEQ39506

SEQ ID NO: 26661 - protein, 585 aa, synthetic construct
  REGION 1..585: note = hemagglutinin__InfluenzaB__AEQ39517
MKAIIVLLMVVTSNADRICTGITSSNSPHVVKTATQGEVNVTGVIPLTTTPTKSHFANLKGTKTRGKLCPKCLNCTDLDVALGRPKCTGNIPSAEVSILHEVRPVTSGCFPIMHDRTKIRQLPNLLRGYEHIRLSTHNVINAEKAPGGPYKIGTSGSCPNVTNGNGFFATMAWAVPKNDNNKTATNSLTIEVPYICTEGEDQITIWGFHSDNETQMAKLYGDSKPQKFTSSANGVTTHYVSQIGGFPNQTEDGGLPQSGRIVVDYMVQKSGKTGTITYQRGILLPQKVWCASGRSKVIKGSLPLIGEADCLHEKYGGLNKSKPYYTGEHAKAIGNCPIWVKTPLKLANGTKYRPPAKLLKERGFFGAIAGFLEGGWEGMIAGWHGYTSHGAHGVAVAADLKSTQEAINKITKNLNSLSELEVKNLQRLSGAMDELHNEILELDEKVDDLRADTISSQIELAVLLSNEGIINSEDEHLLALERKLKKMLGPSAVEIGNGCFETKHKCNQTCLDRIAAGTFDAGEFSLPTFDSLNITAASLNDNGLDNHTILLYYSTAASSLAVTLMIAIFVVYMVSRDNVSCSICL

SEQ ID NO: 26662 - protein, 585 aa, synthetic construct
  REGION 1..585: note = hemagglutinin__InfluenzaB__AER27038
MKAIIVLLMVVTSNADRICTGITSSNSPHVVKTATQGEVNVTGVIPLTTTPTKSHFANLKGTETRGKLCPKCPNCTDLDVALGRPKCTGKIPSARVSILHEVRPVTSGCFPIMHDRTKIRQLPNLLRGYEHIRLSTHNVINAENAPGGPYKIGTSGSCPNVTNGNGFFATMAWAVPKNDKNKTATNPLTIEVPYICTKGEDQITVWGFHSDNETQMAKLYGDSKPQKFTSSANGVTTHYVSQIGGFPNQTEDGGLPQSGRIVVDYMVQKSGKTGTITYQRGILLPQKVWCASGRSKVIKGSLPLIGEADCLHEKYGGLNKSKPYYTGEHAKAIGNCPIWVKTPLKLANGTKYRPPAKLLKERGFFGAIAGFLEGGWEGMIAGWHGYTSHGAHGIAVAADLKSTQEAINKITKNLNSLSELEVKNLQRLSGAMDELHNEILELDEKVDDLRADTISSQIELAVLLSNEGIINSEDEHLLALERKLKKMLGPSAVEIGNGCFETKHKCNQTCLDRIAAGTFDAGEFSLPTFDSLNITAASLNDDGLDNHTILLYYSTAASSLAVTLMIAIFVVYMVSRDNVSCSICL

SEQ ID NO: 26663 - protein, 585 aa, synthetic construct; identical to SEQ ID NO: 26608
  REGION 1..585: note = hemagglutinin__InfluenzaB__AER27060

SEQ ID NO: 26664 - protein, 585 aa, synthetic construct
  REGION 1..585: note = hemagglutinin__InfluenzaB__AET10061
MKAIIVLLMVVTSNADRICTGITSSNSPHVVKTATQGEVNVTGVIPLTTTPTKSHFANLKGTETRGKLCPKCLNCTDLDVALGRPKCTGNIPSARVSILHEVRPVTSGCFPIMHDRTKIRQLPNLLRGYEHIRLSTHNVINAKNAPGGPYKIGTSGSCPNVTNGNGFFATMAWAVPKNDKNRTATNSLTIEVPYICKEGEDQITVWGFHSDNETQMAKLYGDSKPQKFTSSANGVTTHYVSQIGGFPNQTEDGGLPQSGRIVVDYMVQKSGKTGTITYQRGILLPQKVWCASGRSKVIKGSLPLIGEADCLHEKYGGLNKSKPYYTGEHAKAIGNCPIWVKTPLKLANGTKYRPPAKLLKERGFFGAIAGFLEGGWEGMIAGWHGYTSHGAHGVAVAADLKSTQEAINKITKNLNSLSELEVKNLQRLSGAMDELHNEILELDEKVDDLRADTISSQIELAVLLSNEGIINSEDEHLLALERKLKKMLGPSAVEIGNGCFETKHKCNQTCLDRIAAGTFDAGEFSLPTFDSLNITAASLNDDGLDNHTILLYYSTAASSLAVTLMIAIFVVYMVSRDNVSCSICL

SEQ ID NO: 26665 - protein, 584 aa, synthetic construct
  REGION 1..584: note = hemagglutinin__InfluenzaB__AET10062
MKAIIVLLMVVTSNADRICTGITSSNSPHVVKTATQGEVNVTGVIPLTITPTKSYFANLKGTRTRGKLCPDCLNCTDLDVALGRPMCVGTTPSAKASILHEVRPVTSGCFPIMHDRTKIRQLPNLLRGYENIRLSTQNVIDAEKAPGGPYRLGTSGSCPNATSKIGFFATMAWAVPKDNYKNATNPLTVEVPYICKEGEDQITVWGFHSDNKTQMKNLYGDSNPQKFTSSANGVTTHYVSQIGDFPDQTEDGGLPQSGRIVVDYMMQKPGKTGTIVYQRGVLLPQKVWCASGRSKVIKGSLPLIGEADCLHEKYGGLNKSKPYYTGEHAKAIGNCPIWVKTPLKLANGTKYRPPAKLLKERGFFGAIAGFLEGGWEGMIAGWHGYTSHGAHGVAVAADLKSTQEAINKITKNLNSLSELEVKNLQRLSGAMDELHNEILELDEKVDDLRADTISSQIELAVLLSNEGIINSEDEHLLALERKLKKMLGPSAVDIGNGCFETKHKCNQTCLDRIAAGTFNAGEFSLPTFDSLNITAASLNDDGLDNHTILLYYSTAASSLAVTLMLAIFIVYMVSRDNVSCSICL

SEQ ID NO: 26666 - protein, 584 aa, synthetic construct
  REGION 1..584: note = hemagglutinin__InfluenzaB__AET10064
MKAIIVLLMVVTSNADRICTGITSSNSPHVVKTATQGEVNVTGVIPLTTTPTKSYFANLKGTRTRGKLCPDCLNCTDLDVALGRPMCVGTTPSAKASILHEVRPVTSGCFPIMHDRTKIRQLPNLLRGYENIRLSTQNVIDAEKAPGGPYRLGTSGSCPNATSKIGFFATMAWAVPKDNYKNATNPLTVEVPYICTEGEDQITIWGFHSDNKTQMKNLYGDSNPQKFTSSANGVTTHYVSQIGDFPDQTEDGGLPQSGRIVVDYMMQKPGKTGTIVYQRGVLLPQKVWCASGRSKVIKGSLPLIGEADCLHEKYGGLNKSKPYYTGEHAKAIGNCPIWVKTPLKLANGTKYRPPAKLLKERGFFGAIAGFLEGGWEGMIAGWHGYTSHGAHGVAVAADLKSTQEAINKITKNLNSLSELEVKNLQRLSGAMDELHNEILELDEKVDDLRADTISSQIELAVLLSNEGIINSEDEHLLALERKLKKMLGPSAVDIGNGCFETKHKCNQTCLDRIAAGTFNAGEFSLPTFDSLNITAASLNDDGLDNHTILLYYSTAASSLAVTLMLAIFIVYMVSRDNVSCSICL

SEQ ID NO: 26667 - protein, 584 aa, synthetic construct
  REGION 1..584: note = hemagglutinin__InfluenzaB__AET10065
MKAIIVLLMVVTSNADRICTGITSSNSPHVVKTATQGEVNVTGVIPLTTTPTKSYFANLKGTRTRGKLCPDCLNCTDLDVALGRPMCVGTTPSAKASILHEVRPVTSGCFPIMHDRTKIRQLPNLLRGYENIRLSTQNVIDAEKAPGGPYRLGTSGSCPNATSKIGFFATMAWAVPKDNYKNATNPLTVEVPYICKEGEDQITVWGFHSDNKTQMKNLYGDSNPQKFTSSANGVTTHYVSQIGDFPDQTEDGGLPQSGRIVVDYMMQKPGKTGTIVYQRGVLLPQKVWCASGRSKVIKGSLPLIGEADCLHEKYGGLNKSKPYYTGEHAKAIGNCPIWVKTPLKLANGTKYRPPAKLLKERGFFGAIAGFLEGGWEGMIAGWHGYTSHGAHGVAVAADLKSTQEAINKITKNLNSLSELEVKNLQRLSGAMDELHNEILELDEKVDDLRADTISSQIELAVLLSNEGIINSEDEHLLALERKLKKMLGPSAVDIGNGCFETKHKCNQTCLDRIAAGTFNAGEFSLPTFDSLNITAASLNDDGLDNHTILLYYSTAASSLAVTLMLAIFIVYMVSRDNVSCSICL

SEQ ID NO: 26668 - protein, 584 aa, synthetic construct; identical to SEQ ID NO: 26667
  REGION 1..584: note = hemagglutinin__InfluenzaB__AET10066

SEQ ID NO: 26669 - protein, 584 aa, synthetic construct
  REGION 1..584: note = hemagglutinin__InfluenzaB__AET10067
MKAIIVLLMVVTSNADRICTGITSSNSPHVVKTATQGEVNVTGVIPLTATPTKSYFANLKGTRTRGKLCPDCLNCTDLDVALGRPMCVGTTPSAKASILHEVRPVTSGCFPIMHDRTKIRQLPNLLRGYENIRLSTQNVIDAEKAPGGPYRLGTSGSCPNATSKIGFFATMAWAVPKDNYKNATNPLTVEVPYICKEGEDQITVWGFHSDNKTQMKNLYGDSNPQKFTSSANGVTTHYVSQIGDFPDQTEDGGLPQSGRIVVDYMMQKPGKTGTIVYQRGVLLPQKVWCASGRSKVIKGSLPLIGEADCLHEKYGGLNKSKPYYTGEHAKAIGNCPIWVKTPLKLANGTKYRPPAKLLKERGFFGAIAGFLEGGWEGMIAGWHGYTSHGAHGVAVAADLKSTQEAINKITKNLNSLSELEVKNLQRLSGAMDELHNEILELDEKVDDLRADTISSQIELAVLLSNEGIINSEDEHLLALERKLKKMLGPSAVDIGNGCFETKHKCNQTCLDRIAAGTFNAGEFSLPTFDSLNITAASLNDDGLDNHTILLYYSTAASSLAVTLMLAIFIVYMVSRDNVSCSICL

SEQ ID NO: 26670 - protein, 584 aa, synthetic construct
  REGION 1..584: note = hemagglutinin__InfluenzaB__AET10068
MKAIIVLLMVVTSNADRICTGITSSNSPHVVKTATQGEVNVTGVIPLTTAPTKSYFANLKGTRTRGKLCPDCLNCTDLDVALGRPMCAGTTPSAKASILHEVRPVTSGCFPIMHDRTKIRQLPNLLRGYENIRLSTQNVIDAEKAPGGPYRLGTSGSCPNATSKIGFFATMAWAVPKDNYKNATNPLTVEVPYICKEGEDQITVWGFHSDNKTQMKNLYGDSNPQKFTSSANGVTTHYVSQIGDFPDQTEDGGLPQSGRIVVDYMMQKPGKTGTIVYQRGVLLPQKVWCASGRSKVIKGSLPLIGEADCLHEKYGGLNKSKPYYTGEHAKAIGNCPIWVKTPLKLANGTKYRPPAKLLKERGFFGAIAGFLEGGWEGMIAGWHGYTSHGAHGVAVAADLKSTQEAINKITKNLNSLSELEVKNLQRLSGAMDELHNEILELDEKVDDLRADTISSQIELAVLLSNEGIINSEDEHLLALERKLKKMLGPSAVDIGNGCFETKHKCNQTCLDRIAAGTFNAGEFSLPTFDSLNITAASLNDDGLDNHTILLYYSTAASSLAVTLMLAIFIVYMVSRDNVSCSICL

SEQ ID NO: 26671 - protein, 584 aa, synthetic construct; identical to SEQ ID NO: 26667
  REGION 1..584: note = hemagglutinin__InfluenzaB__AET10069

SEQ ID NO: 26672 - protein, 585 aa, synthetic construct
  REGION 1..585: note = hemagglutinin__InfluenzaB__AET10070
MKAIIVLLMVVTSNADRICTGITSSNSPHVVKTATQGEVKVTGVIPLTTTPTKSHFANLKGTETRGKLCPKCPNCTDLDVALGRPKCTGKIPSARVSILHEVRPVTSGCFPIMHDRTKIRQLPNLLRGYEHIRLSTHNVINAENAPGGPYKIGTSGSCPNVTNGNGFFATMAWAVPKNDKNKTATNPLTIEVPYICTEGEDQITVWGFHSDNETQMAKLYGDSKPQKFTSSANGVTTHYVSQIGGFPNQTEDGGLPQSGRIVVDYMVQKSGKTGTITYQRGILLPQKVWCASGRSKVIKGSLPLIGEADCLHEKYGGLNKSKPYYTGEHAKAIGNCPIWVKTPLKLANGTKYRPPAKLLKERGFFGAIAGFLEGGWEGMIAGWHGYTSHGAHGVAVAADLKSTQEAINKITKNLNSLSELEVKNLQRLSGAMDELHNEILELDEKVDDLRADTISSQIELAVLLSNEGIINSEDEHLLALERKLKKMLGPSAVEIGNGCFETKHKCNQTCLDRIAAGTFDAGEFSLPTFDSLNITAASLNDDGLDNHTILLYYSTAASSLAVTLMIAIFVVYMVSRDNVSCSICL

SEQ ID NO: 26673 - protein, 585 aa, synthetic construct; identical to SEQ ID NO: 26608
  REGION 1..585: note = hemagglutinin__InfluenzaB__AET10071

SEQ ID NO: 26674 - protein, 585 aa, synthetic construct; identical to SEQ ID NO: 26608
  REGION 1..585: note = hemagglutinin__InfluenzaB__AET10072

SEQ ID NO: 26675 - protein, 584 aa, synthetic construct
  REGION 1..584: note = hemagglutinin__InfluenzaB__AET10073
MKAIIVLLMVVTSNADRICTGITSSNSPHVVKTATQGEVNVTGVIPLTTTPTKSYFANLKGTRTRGKLCPDCLNCTDLDVALGRPMCVGTTPSAKASILHEVRPVTSGCFPIMHDRTKIRQLPNLLRGCENIRLSTQNVIDAEKAPGGPYRLGTSGSCPNATSKIGFFATMAWAVPKDNYKNATNPLTVEVPYICKEGEDQITVWGFHSDNKTQMKNLYGDSNPQKFTSSANGVTTHYVSQIGDFPDQTEDGGLPQSGRIVVDYMMQKPGKTGTIVYQRGVLLPQKVWCASGRSKVIKGSLPLIGEADCLHEKYGGLNKSKPYYTGEHAKAIGNCPIWVKTPLKLANGTKYRPPAKLLKERGFFGAIAGFLEGGWEGMIAGWHGYTSHGAHGVAVAADLKSTQEAINKITKNLNSLSELEVKNLQRLSGAMDELHNEILELDEKVDDLRADTISSQIELAVLLSNEGIINSEDEHLLALERKLKKMLGPSAVDIGNGCFETKHKCNQTCLDRIAAGTFNAGEFSLPTFDSLNITAASLNDDGLDNHTILLYYSTAASSLAVTLMLAIFIVYMVSRDNVSCSICL

SEQ ID NO: 26676 - protein, 585 aa, synthetic construct
  REGION 1..585: note = hemagglutinin__InfluenzaB__AET10074
MKAIIVLLMVVTSNADRICTGITSSNSPHVVKTATQGEVNVTGVIPLTTTPTRSHFANLKGTETRGKLCPKCPNCTDLDVALGRPKCTGKIPSARVSILHEVRPVTSGCFPIMHDRTKIRQLPNLLRGYEHIRLSTHNVINAENAPGGPYKIGTSGSCPNVTNGNGFFATMAWAVPKNDKNKTATNPLTIEVPYICTEGEDQITVWGFHSDNETQMAKLYGDSKPQKFTSSANGVTTHYVSQIGGFPNQTEDGGLPQSGRIVVDYMVQKSGRTGTITYQRGILLPQKVWCASGRSKVIKGSLPLIGEADCLHEKYGGLNKSKPYYTGEHAKAIGNCPIWVKTPLKLANGTKYRPPAKLLKERGFFGAIAGFLEGGWEGMIAGWHGYTSHGAHGVAVAADLKSTQEAINKITKNLNSLSELEVKNLQRLSGAMDELHNEILELDEKVDDLRADTISSQIELAVLLSNEGIINSEDEHLLALERKLKKMLGPSAVEIGNGCFETKHKCNQTCLDRIAAGTFDAGEFSLPTFDSLNITAASLDDDGLDNHTILLYYSTAASSLAVTLMIAIFVVYMVSRDNVSCSICL

SEQ ID NO: 26677 - protein, 585 aa, synthetic construct; identical to SEQ ID NO: 26608
  REGION 1..585: note = hemagglutinin__InfluenzaB__AET10076

SEQ ID NO: 26678 - protein, 585 aa, synthetic construct; identical to SEQ ID NO: 26608
  REGION 1..585: note = hemagglutinin__InfluenzaB__AET10077

SEQ ID NO: 26679 - protein, 585 aa, synthetic construct
  REGION 1..585: note = hemagglutinin__InfluenzaB__AET10078
MKAIIVLLMVVTSNADRICTGITSSNSPHVVKTATQGEVNVTGVIPLTTTPTKSHFANLKGTETRGKLCPKCLNCTDLDVALGRPKCTGKIPSARVSVLHEVRPVTSGCFPIMHDRTKIRQLPNLLRGYEHIRLSTHNVINAENAPGGPYKIGTSGSCPNVTNGNGFFATMAWAVPKNDKNKTATNPLTIEVPYICTEGEDQITVWGFHSDNETQMAKLYGDSKPQKFTSSANGVTTHYVSQIGGFPNQTEDGGLPQSGRIVVDYMVQKSGKTGTITYQRGILLPQKVWCASGRSKVIKGSLPLIGEADCLHEKYGGLNKSKPYYTGEHAKAIGNCPIWVKTPLKLANGTKYRPPAKLLKERGFFGAIAGFLEGGWEGMIAGWHGYTSHGAHGVAVAADLKSTQEAINKITKNLNSLSELEVKNLQRLSGAMDELHNEILELDEKVDDLRADTISSQIELAVLLSNEGIINSEDEHLLALERKLKKMLGPSAVEIGNGCFETKHKCNQTCLDRIAAGTFNAGEFSLPTFDSLNITAASLNEDGLDNHAILLYYSTAASSLAVTLMIAIFVVYMVSRDNVSCSICL

SEQ ID NO: 26680 - protein, 585 aa, synthetic construct
  REGION 1..585: note = hemagglutinin__InfluenzaB__AET10079
MKAIIVLLMVVTSNADGICTGITSSNSPHVVKTATQGEVNVTGVIPLTTTPTKSHFANLKGTETRGKLCPKCPNCTDLDVALGRPKCTGKIPSARVSILHEVRPVTSGCFPIMHDRTKIRQLPNLLRGYEHIRLSTHNVINAENAPGGPYKIGTSGSCPNVTNGNGFFTTMAWAVPKNDKNKTATNPLTIEVPYICTEGEDQITVWGFHSDNETQMAKLYGDSKPQKFTSSANGVTTHYVSQIGGFPNQTEDGGLPQSGRIVVDYMVQKSGKTGTITYQRGILLPQKVWCASGRSKVIKGSLPLIGEADCLHEKYGGLNKSKPYYTGEHAKAIGNCPIWVKTPLKLANGTKYRPPAKLLKERGFFGAIAGFLEGGWEGMIAGWHGYTSHGAHGVAVAADLKSTQEAINKITKNLNSLSELEVENLQRLSGAMDELHNEILELDEKVDDLRADTISSQIELAVLLSNEGIINSEDEHLLALERKLKKMLGPSAVEIGNGCFETKHKCNQTCLDRIAAGTFDAGEFSLPTFDSLNITAASLNDDGLDNHTILLYYSTAASSLAVTLMIAIFVVYMVSRDNVSCSICL

SEQ ID NO: 26681 - protein, 585 aa, synthetic construct; identical to SEQ ID NO: 26608
  REGION 1..585: note = hemagglutinin__InfluenzaB__AET10080

SEQ ID NO: 26682 - protein, 585 aa, synthetic construct; identical to SEQ ID NO: 26608
  REGION 1..585: note = hemagglutinin__InfluenzaB__AET10081

SEQ ID NO: 26683 - protein, 585 aa, synthetic construct
  REGION 1..585: note = hemagglutinin__InfluenzaB__AET10082
MKAIIVLLMVVTSNADRICTGITSSNSPHIVKTATQGEVNVTGVIPLTTTPTKSHFANLKGTETRGKLCPKCLNCTDLDVALGRPKCTGKIPSARVSILHEVRPVTSGCFPIMHDRTKIRQLPNLLRGYEHIRLSTHNVINAENAPGGPYKIGTSGSCPNITNGNGFFATMAWAVPKNDKNKTATNPLTIEVPYICTEGEDQITVWGFHSDNETQMAKLYGDSKPQKFTSSANGVTTHYVSQIGGFPNQTEDGGLPQSGRIVVDYMVQKSGKTGTITYQRGILLPQKVWCASGRSKVIKGSLPLIGEADCLHEKYGGLNKSKPYYTGEHAKAIGNCPIWVKTPLKLANGTKYRPPAKLLKERGFFGAIAGFLEGGWEGMIAGWHGYTSHGAHGVAVAADLKSTQEAINKITKNLNSLSELEVKNLQRLSGAMDELHNEILELDEKVDDLRADTISSQIELAVLLSNEGIINSEDEHLLALERKLKKMLGPSAVEIGNGCFETKHKCNQTCLDRIAAGTFDAGEFSLPTFDSLNITAASLNDDGLDNHTILLYYSTAASSLAVTLMIAIFVVYMVSRDNVSCSICL

SEQ ID NO: 26684 - protein, 585 aa, synthetic construct
  REGION 1..585: note = hemagglutinin__InfluenzaB__AET10083
MKAIIVLLMVVTSNADRICTGITSSNSPHVVKTATQGEVNVTGVIPLTTTPTKSHFANLKGTETRGKLCPKCLNCTDLDVALGRPKCTGKVPSARVSILHEVRPVTSGCFPIMHDRTKIRQLPNLLRGYEHIRLSTHNVINAENAPGGPYKIGTSGSCPNITNGNGFFATMAWAVPKNDKNKTATNPLTIEVPYICTEGEDQITVWGFHSDNETQMAKLYGDSKPQKFTSSANGVTTHYVSQIGGFPNQTEDGGLPQSGRIVVDYMVQKSGKTGTITYQRGILLPQKVWCASGRSKVIKGSLPLIGEADCLHEKYGGLNKSKPYYTGEHAKAIGNCPIWVKTPLKLANGTKYRPPAKLLKERGFFGAIAGFLEGGWEGMIAGWHGYTSHGAHGVAVAADLKSTQEAINKITKNLNSLSELEVKNLQRLSGAMDELHNEILELDEKVDDLRADTISSQIELAVLLSNEGIINSEDEHLLALERKLKKMLGPSAVEIGNGCFETKHKCNQTCLDRIAAGTFDAGEFSLPTFDSLNITAASLNDDGLDNHTILLYYSTAASSLAVTLMIAIFVVYMVSRDNVSCSICL

SEQ ID NO: 26685 - protein, 585 aa, synthetic construct; identical to SEQ ID NO: 26645
  REGION 1..585: note = hemagglutinin__InfluenzaB__AET10084

SEQ ID NO: 26686 - protein, 585 aa, synthetic construct; identical to SEQ ID NO: 26608
  REGION 1..585: note = hemagglutinin__InfluenzaB__AET10085

SEQ ID NO: 26687 - protein, 585 aa, synthetic construct; identical to SEQ ID NO: 26648
  REGION 1..585: note = hemagglutinin__InfluenzaB__AET43124

SEQ ID NO: 26688 - protein, 585 aa, synthetic construct; identical to SEQ ID NO: 26648
  REGION 1..585: note = hemagglutinin__InfluenzaB__AET43135

SEQ ID NO: 26689 - protein, 585 aa, synthetic construct; identical to SEQ ID NO: 26648
  REGION 1..585: note = hemagglutinin__InfluenzaB__AET43146

SEQ ID NO: 26690 - protein, 585 aa, synthetic construct; identical to SEQ ID NO: 26648
  REGION 1..585: note = hemagglutinin__InfluenzaB__AET43157

SEQ ID NO: 26691 - protein, 585 aa, synthetic construct
  REGION 1..585: note = hemagglutinin__InfluenzaB__AET43168
MKAIIVLLMVVTSNADRICTGITSSNSPHVVKTATQGEVNVTGVIPLTTTPTKSHFANLKGTETRGKLCPKCLNCTDLDVTLGRPKCTGKIPSARVSILHEVRPVTSGCFPIMHDRTKIRQLPNLLRGYEHIRLSTHNVINAENAPGGPYKIGTSGSCPNVTNGNGFFATMAWAVPKNDKNKTATNPLTIEVPYICTEGEDQITVWGFHSDNETQMAKLYGDSKPQKFTSSANGVTTHYVSQIGGFPNQTEDGGLPQSGRIVVDYMVQKSGKTGTITYQRGILLPQKVWCASGRSKVIKGSLPLIGEADCLHEKYGGLNKSKPYYTGEHAKAIGNCPIWVKTPLKLANGTKYRPPAKLLKERGFFGAIAGFLEGGWEGMIAGWHGYTSHGAHGVAVAADLKSTQEAINKITKNLNSLSELEVKNLQRLSGAMDELHNEILELDEKVDDLRADTISSQIELAVLLSNEGIINSEDEHLLALERKLKKMLGPSAVEIGNGCFETKHKCNQTCLDRIAAGTFDAGEFSLPTFDSLNITAASLNDDGLDNHTILLYYSTAASSLAVTLMIAIFVVYMVSRDNVSCSICL

SEQ ID NO: 26692 - protein, 585 aa, synthetic construct; identical to SEQ ID NO: 26648
  REGION 1..585: note = hemagglutinin__InfluenzaB__AET43179

SEQ ID NO: 26693 - protein, 585 aa, synthetic construct; identical to SEQ ID NO: 26648
  REGION 1..585: note = hemagglutinin__InfluenzaB__AET43190

SEQ ID NO: 26694 - protein, 585 aa, synthetic construct
  REGION 1..585: note = hemagglutinin__InfluenzaB__AET43201
MKAIIVLLMVVTSNADRICTGITSSNSPHVVKTATQGEVNVTGVIPLTTTPTKSHFANLKGTETRGKLCPKCLNCTDLDVALGRPKCTGKIPSARVSILHEVRPVTSGCFPIMHDRTKIRQLPNLLRGYEHIRLSTHNVINAGNAPGGPYKIGTSGSCPNVTNGNGFFATMAWAVPKNDKNKTATNPLTIEVPYICTEGEDQITVWGFHSDNETQMAKLYGDSKPQKFTSSANGVTTHYVSQIGGFPNQTEDGGLPQSGRIVVDYMVQKSGKTGTITYQRGILLPQKVWCASGRSKVIKGSLPLIGEADCLHEKYGGLNKSKPYYTGEHAKAIGNCPIWVKTPLKLANGTKYRPPAKLLKERGFFGAIAGFLEGGWEGMIAGWHGYTSHGAHGVAVAADLKSTQEAINKITKNLNSLSELEVKNLQRLSGAMDELHNEILELDEKVDDLRADTISSQIELAVLLSNEGIINSEDEHLLALERKLKKMLGPSAVEIGNGCFETKHKCNQTCLDRIAAGTFDAGEFSLPTFDSLNITAASLNDDGLDNHTILLYYSTAASSLAVTLMIAIFVVYMVSRDNVSCSICL

SEQ ID NO: 26695 - protein, 585 aa, synthetic construct; identical to SEQ ID NO: 26648
  REGION 1..585: note = hemagglutinin__InfluenzaB__AET43212

SEQ ID NO: 26696 - protein, 585 aa, synthetic construct; identical to SEQ ID NO: 26648
  REGION 1..585: note = hemagglutinin__InfluenzaB__AET43223

SEQ ID NO: 26697 - protein, 585 aa, synthetic construct; identical to SEQ ID NO: 26694
  REGION 1..585: note = hemagglutinin__InfluenzaB__AET50943

SEQ ID NO: 26698 - protein, 585 aa, synthetic construct; identical to SEQ ID NO: 26648
  REGION 1..585: note = hemagglutinin__InfluenzaB__AET50954

SEQ ID NO: 26699 - protein, 585 aa, synthetic construct; identical to SEQ ID NO: 26648
  REGION 1..585: note = hemagglutinin__InfluenzaB__AET50965

SEQ ID NO: 26700 - protein, 585 aa, synthetic construct; identical to SEQ ID NO: 26648
  REGION 1..585: note = hemagglutinin__InfluenzaB__AET50976

SEQ ID NO: 26701 - protein, 585 aa, synthetic construct; identical to SEQ ID NO: 26648
  REGION 1..585: note = hemagglutinin__InfluenzaB__AET74255

SEQ ID NO: 26702 - protein, 585 aa, synthetic construct; identical to SEQ ID NO: 26694
  REGION 1..585: note = hemagglutinin__InfluenzaB__AET74277

SEQ ID NO: 26703 - protein, 585 aa, synthetic construct; identical to SEQ ID NO: 26648
  REGION 1..585: note = hemagglutinin__InfluenzaB__AET74288

SEQ ID NO: 26704 - protein, 585 aa, synthetic construct
  REGION 1..585: note = hemagglutinin__InfluenzaB__AET74299
MKAIIVLLMVVTSNADRICTGITSSNSPHVVKTATQGEVNVTGVIPLTTTPTKSHFANLKGTETRGKLCPKCLNCTDLDVTLGRPKCTGKIPSARVSILHEVRPVTSGCFPIMHDRTKIRQLPNLLRGYEHIRLSTHNVINAENAPGGPYKIGTSGSCPNVTNGNGFFATMAWAVPKNDKNKTATNPLTIEVPYICTEGEDQITVWGFHSDNETQMAKLYGDSKPQKFTSSANGVTTHYVSQIGGFPNQTEDGGLPQSGRIVVDYMVQKSGKTGTITYQRGILLPQKVWCASGRSKVIKGSLPLIGEADCLHEKYGGLNKSKPYYTGEHAKAIGNCPIWVKTPLKLANGTKYRPPAKLLKERGFFGAIAGFLEGGWEGMIAGWHGYTSHGAHGVAVAADLKSTQEAINKITNNLNSLSELEVKNLQRLSGAMDELHNEILELDEKVDDLRADTISSQIELAVLLSNEGIINSEDEHLLALERKLKKMLGPSAVEIGNGCFETKHKCNQTCLDRIAAGTFDAGEFSLPTFDSLNITAASLNDDGLDNHTILLYYSTAASSLAVTLMIAIFVVYMVSRDNVSCSICL

SEQ ID NO: 26705 - protein, 585 aa, synthetic construct; identical to SEQ ID NO: 26648
  REGION 1..585: note = hemagglutinin__InfluenzaB__AET74329

SEQ ID NO: 26706 - protein, 585 aa, synthetic construct; identical to SEQ ID NO: 26648
  REGION 1..585: note = hemagglutinin__InfluenzaB__AET74340

SEQ ID NO: 26707 - protein, 585 aa, synthetic construct; identical to SEQ ID NO: 26648
  REGION 1..585: note = hemagglutinin__InfluenzaB__AET74351

SEQ ID NO: 26708 - protein, 585 aa, synthetic construct; identical to SEQ ID NO: 26645
  REGION 1..585: note = hemagglutinin__InfluenzaB__AEY69077

SEQ ID NO: 26709 - protein, 585 aa, synthetic construct; identical to SEQ ID NO: 26645
  REGION 1..585: note = hemagglutinin__InfluenzaB__AFB77676

SEQ ID NO: 26710 - protein, 585 aa, synthetic construct
  REGION 1..585: note = hemagglutinin__InfluenzaB__AFB77677
MKAIIVLLMVVTSNADRICTGITSSNSPHVVKTATQGEVNVTGVIPLTTTPTKSHFANLKGTETRGKLCPKCFNCTDLDVALGRPKCTGKIPSARVSILHEVRPVTSGCFPIMHDRTKIRQLPNLLRGYEHIRLSTHNVINAENAPGGPYKIGTSGSCPNVTNGNGFFATMAWAVPKNDKNKTATNPLTIEVPYICTEGEDQITVWGFHSDNETQMAKLYGDSKPQKFTSSANGVTTHYVSQIGGFPNQTEDGGLPQSGRIVVDYMVQKSGKTGTITYQRGILLPQKVWCASGRSKVIKGSLPLIGEADCLHEKYGGLNKSKPYYTGEHAKAIGNCPIWVKTPLKLANGTKYRPPAKLLKERGFFGAIAGFLEGGWEGMIAGWHGYTSHGAHGVAVAADLKSTQEAINKITKNLNSLSELEVKNLQRLSGAMDELHNEILELDEKVDDLRADTISSQIELAVLLSNEGIINSEDEHLLALERKLKKMLGPSAVEIGNGCFETKHKCNQTCLDRIAAGTFDAGEFSLPTFDSLNITAASLNDDGLDNHTILLYYSTAASSLAVTLMIAIFVVYMVSRDNVSCSICL

SEQ ID NO: 26711 - protein, 585 aa, synthetic construct; identical to SEQ ID NO: 26645
  REGION 1..585: note = hemagglutinin__InfluenzaB__AFB77678

SEQ ID NO: 26712 - protein, 585 aa, synthetic construct; identical to SEQ ID NO: 26645
  REGION 1..585: note = hemagglutinin__InfluenzaB__AFB77679

SEQ ID NO: 26713 - protein, 585 aa, synthetic construct
  REGION 1..585: note = hemagglutinin__InfluenzaB__AFB77680
MKAIIVLLMVVTSNADRICTGITSSNSPHVVKTATQGEVNVTGVIPLTTTPTKSHFANLKGTETRGKLCPKCLNCTDLDVALGRPKCTGKIPSARVSILHEVRPITSGCFPIMHDRTKIRQLPNLLRGYEHIRLSTHNVINAENAPGGPYKIGTSGSCPNVTNGNGFFATMAWAVPKNDKNKTATNPLTIEVPYICTEGEDQITVWGFHSDNETQMAKLYGDSKPQKFTSSANGVTTHYVSQIGGFPNQTEDGGLPQSGRIVVDYMVQKSGKTGTITYQRGILLPQKVWCASGRSKVIKGSLPLIGEADCLHEKYGGLNKSKPYYTGEHAKAIGNCPIWVKTPLKLANGTKYRPPAKLLKERGFFGAIAGFLEGGWEGMIAGWHGYTSHGAHGVAVAADLKSTQEAINKITKNLNSLSELEVKNLQRLSGAMDELHNEILELDEKVDDLRADTISSQIELAVLLSNEGIINSEDEHLLALERKLKKMLGPSAVEIGNGCFETKHKCNQTCLDRIAAGTFDAGEFSLPTFDSLNITAASLNDDGLDNHTILLYYSTAASSLAVTLMIAIFVVYMVSRDNVSCSICL

SEQ ID NO: 26714 - protein, 585 aa, synthetic construct; identical to SEQ ID NO: 26645
  REGION 1..585: note = hemagglutinin__InfluenzaB__AFB77681

SEQ ID NO: 26715 - protein, 585 aa, synthetic construct
  REGION 1..585: note = hemagglutinin__InfluenzaB__AFB77682
MKAIIVLLMVVTSNADRICTGITSSNSPHVVKTATQGEVNVTGVIPLTTTPTKSHFANLKGTETRGKLCPKCLNCTDLDVALGRPKCTGKIPSARVSILHEVRPVTSGCFPIMHDRTKIRQLPNLLRGYEHIRLSTHNVINAENAPGGPYKIGTSGSCPNITNGNGFFATMAWAVPKNDKNKTATNPLTIEVPYICTEGEDQITVWGFHSDNETQMAKLYGDSKPQKFTSSANGVTTHYVSQIGGFPNQTEDGGLPQSGRIVVDYMVQKSGKTGTITYQRGILLPQKVWCASGRSKVIKGSLPLIGEADCLHEKYGGLNKSKPYYTGEHAKAIGNCPIWVKTPLKLANGTKYRPPAKLLKERGFFGAIAGFLEGGWEGMIAGWHGYTSHGAHGVAVAADLKSTQEAINKITQNLNSLSELEVKNLQRLSGAMDELHNEILELDEKVDDLRADTISSQIELAVLLSNEGIINSEDEHLLALERKLKKMLGPSAVEIGNGCFETKHKCNQTCLDRIAAGTFDAGEFSLPTFDSLNITAASLNDDGLDNHTILLYYSTAASSLAVTLMIAIFVVYMVSRDNVSCSICL

SEQ ID NO: 26716 - protein, 585 aa, synthetic construct; identical to SEQ ID NO: 26645
  REGION 1..585: note = hemagglutinin__InfluenzaB__AFB77683

SEQ ID NO: 26717 - protein, 585 aa, synthetic construct; identical to SEQ ID NO: 26645
  REGION 1..585: note = hemagglutinin__InfluenzaB__AFB77684

SEQ ID NO: 26718 - protein, 585 aa, synthetic construct
  REGION 1..585: note = hemagglutinin__InfluenzaB__AFB77685
MKAIIVLLMVVTSNADRICTGITSSNSPHVVKTATQGEVNVTGVIPLTTTPTKSHFANLKGTETRGKLCPKCLNCTDLDVALGRPKCTGKTPSARVSILHEVRPVTSGCFPIMHDRTKIRQLPNLLRGYEHIRLSTHNVINAENAPGGPYKIGTSGSCPNITNGNGFFATMAWAVPKNDKNKTATNPLTIEVPYICTEGEDQITVWGFHSDNETQMAKLYGDSKPQKFTSSANGVTTHYISQIGGFPNQTEDGGLPQSGRIVVDYMVQKSEKTGTITYQRGILLPQKVWCASGRSKVIKGSLPLIGEADCLHEKYGGLNKSKPYYTGEHAKAIGNCPIWVKTPLKLANGTKYRPPAKLLKERGFFGAIAGFLEGGWEGMIAGWHGYTSHGAHGVAVAADLKSTQEAINKITKNLNSLSELEVKNLQRLSGAMDELHNEILELDEKVDDLRADTISSQIELAVLLSNEGIINSEDEHLLALERKLKKMLGPSAVEIGNGCFETKHKCNQTCLDRIAAGTFDAGEFSLPTFDSLNITAASLNDDGLDNHTILLYYSTAASSLAVTLMIAIFVVYMVSRDNVSCSICL

SEQ ID NO: 26719 - protein, 585 aa, synthetic construct
  REGION 1..585: note = hemagglutinin__InfluenzaB__AFB77686
MKAIIVLLMVVTSNADRICTGITSSNSPHVVKTATQGEVNVTGVIPLTTTPTKSHFANLKGTETRGKLCPKCLNCTDLDVALGRPKCTGKIPSARVSILHEVRPVTSGCFPIMHDRTKIRQLPNLLRGYEHIRLSTHNVINAENAPGGPYKIGTSGSCPNITNGNGFFATMAWAVPKNDKNKTATNPLTIEVPYICTEGEDQITVWGFHSDNETQMAKLYGDSKPQKFTSSANGVTTHYVSQISGFPNQTEDGGLPQSGRIVVDYMVQKSGKTGTITYQRGILLPQKVWCASGRSKVIKGSLPLIGEADCLHEKYGGLNKSKPYYTGEHAKAIGNCPIWVKTPLKLANGTKYRPPAKLLKERGFFGAIAGFLEGGWEGMIAGWHGYTSHGAHGVAVAADLKSTQEAINKITQNLNSLSELEVKNLQRLSGAMDELHNEILELDEKVDDLRADTISSQIELAVLLSNEGIINSEDEHLLALERKLKKMLGPSAVEIGNGCFETKHKCNQTCLDRIAAGTFDAGEFSLPTFDSLNITAASLNDDGLDNHTILLYYSTAASSLAVTLMIAIFVVYMVSRDNVSCSICL

SEQ ID NO: 26720 - protein, 585 aa, synthetic construct
  REGION 1..585: note = hemagglutinin__InfluenzaB__AFB77687
MKAIIVLLMVVTSNADRICTGITSSNSPHVVKTATQGEVNVTGVIPLTTTPTKSHFANLKGTETRGKLCPKCLNCTDLDVALGRPKCTGKIPSARVSILHEVRPVTSGCFPIMHDRTKIRQLPNLLRGYEHIKLSTHNVINAENAPGGPYKIGTSGSCPNVTNGNGFFATMAWAVPKNDKNKTATNPLTIEVPYICTEGEDQITVWGFHSDNETQMAKLYGDSKPQKFTSSANGVTTHYVSQIGGFPNQTEDGGLPQSGRIVVDYMVQKSGKTGTITYQRGILLPQKVWCASGRSKVIKGSLPLIGEADCLHEKYGGLNKSKPYYTGEHAKAIGNCPIWVKTPLKLANGTKYRPPAKLLKERGFFGAIAGFLEGGWEGMIAGWHGYTSHGAHGVAVAADLKSTQEAINKITKNLNSLSELEVKNLQRLSGAMDELHNEILELDEKVDDLRADTISSQIELAVLLSNEGIINSEDEHLLALERKLKKMLGPSAVEIGNGCFETKHKCNQTCLDRIAAGTFDAGEFSLPTFDSLNITAASLNDDGLDNHTILLYYSTAASSLAVTLMIAIFVVYMVSRDNVSCSICL

SEQ ID NO: 26721 - protein, 585 aa, synthetic construct
  REGION 1..585: note = hemagglutinin__InfluenzaB__AFB77688
MKAIIVLLMVVTSNADRICTGITSSNSPHVVKTATQGEVNVTGVIPLTTTPTKSHFANLKGTETRGKLCPKCLNCTDLDVALGRPKCTGKIPSARVSILHEVRPVTSGCFPIMHDRTKIRQLPNLLRGYEHIRLSTHNVINAENAPGGPYKIGTSGSCPNVTNGNGFFATMAWAVPKNDKNKTATNPLTIEVPYICTEGEDQITVWGFHSDNETQMAKLYGDSKPQKFTSSANGVTTHYVSQIGGFPNQTEDGGLPQSGRIVVDYMVQKSGKTGTITYQRGILLPQKVWCASGRSKVIKGSLPLIGEADCLHEKYGGLNKSKPYYTGEHAKAIGNCPIWVKAPLKLANGTKYRPPAKLLKERGFFGAIAGFLEGGWEGMIAGWHGYTSHGAHGVAVAADLKSTQEAINKITKNLNSLSELEVKNLQRLSGAMDELHNEILELDEKVDDLRADTISSQIELAVLLSNEGIINSEDEHLLALERKLKKMLGPSAVEIGNGCFETKHKCNQTCLDRIAAGTFDAGEFSLPTFDSLNITAASLNDDGLDNHTILLYYSTAASSLAVTLMIAIFVVYMVSRDNVSCSICL

SEQ ID NO: 26722 - protein, 585 aa, synthetic construct; identical to SEQ ID NO: 26645
  REGION 1..585: note = hemagglutinin__InfluenzaB__AFB77689

SEQ ID NO: 26723 - protein, 585 aa, synthetic construct; identical to SEQ ID NO: 26645
  REGION 1..585: note = hemagglutinin__InfluenzaB__AFB77690

SEQ ID NO: 26724 - protein, 585 aa, synthetic construct; identical to SEQ ID NO: 26683
  REGION 1..585: note = hemagglutinin__InfluenzaB__AFE00360

SEQ ID NO: 26725 - protein, 585 aa, synthetic construct; identical to SEQ ID NO: 26683
  REGION 1..585: note = hemagglutinin__InfluenzaB__AFF18534

SEQ ID NO: 26726 - protein, 585 aa, synthetic construct; identical to SEQ ID NO: 26683
  REGION 1..585: note = hemagglutinin__InfluenzaB__AFF18543

SEQ ID NO: 26727 - protein, 585 aa, synthetic construct; identical to SEQ ID NO: 26645
  REGION 1..585: note = hemagglutinin__InfluenzaB__AFG48978

SEQ ID NO: 26728 - protein, 585 aa, synthetic construct; identical to SEQ ID NO: 26645
  REGION 1..585: note = hemagglutinin__InfluenzaB__AFG48997

SEQ ID NO: 26729 - protein, 585 aa, synthetic construct
  REGION 1..585: note = hemagglutinin__InfluenzaB__AFG48998
MKAIIVLLMVVTSNADRICTGITSSNSPHVVKTATQGEVNVTGVIPLTTTPTKSHFANLKGTETRGKLCPKCPNCTDLDVALGRPKCTGKIPSARVSILHEVRPVTSGCFPIMHDRTKIRQLPNLLRGYEHIRLSTHNVINAENAPGGPYKIGTSGSCPNVTNGNGFFETMAWAVPKNDKNKTATNPLTIEVPYICTEGEDQITVWGFHSDNETQMAKLYGDSKPQKFTSSANGVTTHYVSQIGGFPNQTEDGGLPQSGRIVVDYMVQKSGKTGTITYQRGILLPQKVWCASGRSKVIKGSLPLIGEADCLHEKYGGLNKSKPYYTGEHAKAIGNCPIWVKTPLKLANGTKYRPPAKLLKERGFFGAIAGFLEGGWEGMIAGWHGYTSHGAHGVAVAADLKSTQEAINKITKNLNSLSELEVKNLQRLSGAMDELHNEILELDEKVDDLRADTISSQIELAVLLSNEGIINSEDEHLLALERKLKKMLGPSAVEIGNGCFETKHKCNQTCLDRIAAGTFDAGEFSLPTFDSLNITAASLNDDGLDNHTILLYYSTAASSLAVTLMIAIFVVYMVSRDNVSCSICL

SEQ ID NO: 26730 - protein, 584 aa, synthetic construct
  REGION 1..584: note = hemagglutinin__InfluenzaB__AFG49012
MKAIIVLLMVVTSNADRICTGITSSNSPHVVKTATQGEVNVTGVIPLTTTPTKSYFANLKGTKTRGKLCPDCLNCTDLDVALGRPMCVGTTPSAKASILHEVRPVTSGCFPIMHDRTKIRQLPNLLRGYENIRLSTQNVIDAEKAPGGPYRLGTSGSCPNATSKIGFFATMAWAVPKDNYKNATNPLTVEVPYICTEGEDQITVWGFHSDNKTQMKNLYGDSNPQKFTSSANGVTTHYVSQIGDFPDQTEDGGLPQSGRIVVDYMMQKPGKTGTIVYQRGVLLPQKVWCASGRSKVIKGSLPLIGEADCLHEKYGGLNKSKPYYTGEHAKAIGNCPIWVKTPLKLANGTKYRPPAKLLKERGFFGAIASFLEGGWEGMIAGWHGYTSHGAHGVAVAADLKSTQEAINKITKNLNSLSELEVKNLQRLSGAMDELHNEILELDEKVDDLRADTISSQIELAVLLSNEGIINSEDEHLLALERKLKKMLGPSAVDIGNGCFETKHKCNQTCLDRIAAGTFNAGEFSLPTFDSLNITAASLNDDGLDNHTILLYYSTAASSLAVTLMLAIFIVYMVSRDNVSCSICL

SEQ ID NO: 26731 - protein, 584 aa, synthetic construct
  REGION 1..584: note = hemagglutinin__InfluenzaB__AFG49013
MKAIIVLLMVVTSNADRICTGITSSNSPHVVKTATQGEVNVTGVIPLTTTPTKSYFANLKGTKTRGKLCPDCLNCTDLDVALGRPMCVGTTPSAKASILHEVRPVTSGCFPIMHDRTKIRQLANLLRGYENIRLSTQNVIDAEKAPGGPYRLGTSGSCPNATSKSGFFATMAWAVPKDNNKNATNPLTVEVPYICTEGEDQITVWGFHSDNKTQMKNLYGDSNPQKFTSSANGVTTHYVSQIGGFPDQTEDGGLPQSGRIVVDYMMQKPGKTGTIVYQRGVLLPQKVWCASGRSKVIKGSLPLIGEADCLHEKYGGLNKSKPYYTGEHAKAIGNCPIWVKTPLKLANGTKYRPPAKLLKERGFFGAIAGFLEGGWEGMIAGWHGYTSHGAHGVAVAADLKSTQEAINKITKNLNSLSELEVKNLQRLSGAMDELHNEILELDEKVDDLRADTISSQIELAVLLSNEGIINSEDEHLLALERKLKKMLGPSAVDIGNGCFETKHKCNQTCLDRIAAGTFNAGEFSLPTFDSLNITAASLNDDGLDNHTILLYYSTAASSLAVTLMLAIFIVYMVSRDNVSCSICL

SEQ ID NO: 26732 - protein, 584 aa, synthetic construct
  REGION 1..584: note = hemagglutinin__InfluenzaB__AFH57865
MKAIIVLLMVVTSNADRICTGITSSNSPHVVKTATQGEVNVTGVIPLTTTPTKSYFANLKGTRTRGKLCPDCLNCTDLDVALGRPMCVGTTPSAKASILHEVRPVTSGCFPIMHDRTKIRQLPNLLRGYENIRLSTQNVIDAEKAPGGPYRLGTSGSCPNATSKSGFFATMAWAVPKDNNKNATNPLTVEVPYICTEGEDQITVWGFHSDNKTPMKNLYGDSNPQKFTSSANGVTTHYVSQIGGFPDQTEDGGLPQSGRIVVDYMMQKPGKTGTIVYQRGVLLPQKVWCASGRSKVIKGSLPLIGEADCLHEKYGGLNKSKPYYTGEHAKAIGNCPIWVKTPLKLANGTKYRPPAKLLKERGFFGAIAGFLEGGWEGMIAGWHGYTSHGAHGVAVAADLKSTQEAINKITKNLNSLSELEVKNLQRLSGAMDELHNEILELDEKVDDLRADTISSQIELAVLLSNEGIINSEDEHLLALERKLKKMLGPSAVDIGNGCFETKHKCNQTCLDRIAAGTFNAGEFSLPTFDSLNITAASLNDDGLDNHTILLYYSTAASSLAVTLMLAIFIVYMVSRDNVSCSICL

SEQ ID NO: 26733 - protein, 584 aa, synthetic construct
  REGION 1..584: note = hemagglutinin__InfluenzaB__AFH57876
MKAIIVLLMVVTSNADRICTGITSSNSPHVVKTATQGEVNVTGVIPLTTTPTKSYFANLKGTRTRGKLCPDCLNCTDLDVALGRPMCVGTTPSAKASILHEVRPVTSGCFPIMHDRTKIRQLPNLLRGYENIRLSTQNVIDAEKAPGGPYRLGTSGSCPNATSKSGFFATMAWAVPKDNNKNATNPLTVEVPYICTEGEDQITVWGFHSDNKNQMKNLYGDSNPQKFTSSANGVTTHYVSQIGSFPDQTEDGGLPQSGRIVVDYMMQKPGKTGTIVYQRGILLPQKVWCASGRSKVIKGSLPLIGEADCLHEKYGGLNKSKPYYTGEHAKAIGNCPIWVKTPLKLANGTKYRPPAKLLKERGFFGAIAGFLEGGWEGMIAGWHGYTSHGAHGVAVAADLKSTQEAINKITKNLNSLSELEVKNLQRLSGAMDELHNEILELDEKVDDLRADTISSQIELAVLLSNEGIINSEDEHLLALERKLKKMLGPSAVEIGNGCFETKHKCNQTCLDRIAAGTFNAGEFSLPTFDSLNITAASLNDDGLDNHTILLYYSTAASSLAVTLMLAIFIVYMVSRDNVSCSICL

SEQ ID NO: 26734 - protein, 584 aa, synthetic construct
  REGION 1..584: note = hemagglutinin__InfluenzaB__AFH57942
MKAIIVLLMVVTSNADRICTGITSSNSPHVVKTATQGEVNVTGVIPLTTTPTKSYFANLKGTRTRGKLCPDCLNCTDLDVALGRPMCVGTTPSAKASILHEVRPVTSGCFPIMHDRTKIRQLPNLLRGYENIRLSTQNVIDAEKAPGGPYRLGTSGSCPNATSKIGFFATMAWAVPKDNYKNATNPLTVEVPYICTEGEDQITVWGFHSDNKNQMKSLYGDSNPQKFTSSANGVTTHYVSQIGDFPDQTEDGGLPQSGRIVVDYMMQKPGKTGTIVYQRGVLLPQKVWCASGRSKVIKGSLPLIGEADCLHEKYGGLNKSKPYYTGEHAKAIGNCPIWVKTPLKLANGTKYRPPAKLLKERGFFGAIAGFLEGGWEGMIAGWHGYTSHGAHGVAVAADLKSTQEAINKITKNLNSLSELEVKNLQRLSGAMDELHNEILELDEKVDDLRADTISSQIELAVLLSNEGIINSEDEHLLALERKLKKMLGPSAVDIGNGCFETKHKCNQTCLDRIAAGTFNAGEFSLPTFDSLNITAASLNDDGLDNHTILLYYSTAASSLAVTLMLAIFIVYMVSRDNVSCSICL

SEQ ID NO: 26735 - protein, 583 aa, synthetic construct
  REGION 1..583: note = hemagglutinin__InfluenzaB__AFH57986
MKAIIVLLMVVTSNADRICTGITSSNSPHVVKTATQGEVNVTGVIPLTTTPTKSHFANLKGTKTRGKLCPNCLNCTDLDVALGRPMCVGTTPSAKASILHEVRPVTSGCFPIMHDRTKIRQLPNLLRGYENIRLSTQNVINAERAPGGPYRLGTSGSCPNVTSRDGFFATMAWAVPRDNKTATNPLTVEVPYICTKGEDQITVWGFHSDDKTQMKNLYGDSNPQKFTSSANGVTTHYVSQIGGFPNQTEDGGLPQSGRIVVDYMVQKPGKTGTIVYQRGVLLPQKVWCASGRSKVIKGSLPLIGEADCLHEKYGGLNKSKPYYTGEHAKAIGNCPIWVKTPLKLANGTKYRPPAKLLKERGFFGAIAGFLEGGWEGMIAGWHGYTSHGAHGVAVAADLKSTQEAINKITKNLNSLSELEVKNLQRLSGAMDELHNEILELDEKVDDLRADTISSQIELAVLLSNEGIINSEDEHLLALERKLKKMLGPSAVDIGNGCFETKHKCNQTCLDRIAAGTFNAGEFSLPTFDSLNITAASLNDDGLDNHTILLYYSTAASSLAVTLMIAIFIVYMVSRDNVSCSICL

SEQ ID NO: 26736 - protein, 585 aa, synthetic construct
  REGION 1..585: note = hemagglutinin__InfluenzaB__AFH58249
MKAIIVLLMVVTSNADRICTGITSSNSPHVVKTATQGEVNVTGVIPLTTTPTKSHFANLKGTKTRGKLCPKCLNCTDLDVALGRPKCTGNIPPAKVSILHEVRPVTSGCFPIMHDRTKIRQLPNLLRGYERIRLSNHNVINAEEAPGGPYKIGTSGSCPNVTNGNGFFATMAWAVPKNENNKTATNSLTIEVPYICTEGEDQITVWGFHSDSETQMAKLYGDSKPQKFTSSANGVTTHYVSQIGGFPNQTEDGGLPQSGRIVVDYMVQKSGKTGTITYQRGILLPQKVWCASGRSKVIKGSLPLIGEADCLHEKYGGLNKSKPYYTGEHAKAIGNCPIWVKTPLKLANGTKYRPPATLLKERGFFGAIAGFLEGGWEGMIAGWHGYTSHGAHGVAVAADLKSTQEAINKITKNLNSLSELEVKNLQRLSGAMDELHNEILELDEKVDDLRADTISSQIELAVLLSNEGIINSEDEHLLALERKLKKMLGPSAVEIGNGCFETKHKCNQTCLDRIAAGTFNAGEFSLPTFDSLNITAASLNDDGLDNHTILLYYSTAASSLAVTLMIAIFVVYMVSRDNVSCSICL

SEQ ID NO: 26737 - protein, 585 aa, synthetic construct
  REGION 1..585: note = hemagglutinin__InfluenzaB__AFH58260
MKAIIVLLMVVTSNADRICTGITSSNSPHVVKTATQGEVNVTGVIPLTTTPTKSHFANLKGTKTRGKLCPKCLNCTDLDVALGRPKCTGNIPSAEVSILHEVRPVTSGCFPIMHDRTKIRQLPNLLRGYEHIRLSTHNVINAEKAPGGPYKIGTSGSCPNVTNGNGFFATMAWAVPKNDNNKTATNSLTIEVPYICTEGEDQITVWGFHSDNEIQMAKLYGDSKPQKFTSSSNGVTTHYVSQIGGFPNQTEDGGLPQSGRIVVDYMVQKSGKTGTITYQRGILLPQKVWCASGRSKVIKGSLPLIGEADCLHERYGGLNKSKPYYTGEHAKAIGNCPIWVKTPLKLANGTKYRPPAKLLKERGFFGAIAGFLEGGWEGMIAGWHGYTSHGAHGVAVAADLKSTQEAINKITKNLNSLSELEVKNLQRLSGAMDELHNEILELDEKVDDLRADTISSQIELAVLLSNEGIINSEDEHLLALERKLKKMLGPSAVEIGNGCFETKHKCNQTCLDRIAAGTFDAGEFSLPTFDSLNITAASLNDDGLDNHTILLYYSTAASSLAVTLMIAIFVVYMVSRDNVSCSICL

SEQ ID NO: 26738 - protein, 584 aa, synthetic construct
  REGION 1..584: note = hemagglutinin__InfluenzaB__AFH58271
MKAIIVLLMVVTSNADRICTGITSSNSPHVVKTATQGEVNVTGVIPLTTTPTKSYFANLKGTRTRGKLCPDCLNCTDLDVALGRPMCVGTTPSAKASILHEVKPVTSGCFPIMHDRTKIRQLPNLLRGYENIRLSTQNVIDAEKAPGGPYRLGTSGSCPNATSKSGFFATMAWAVPKDNNKNATNPLTVEVPYICTEGEDQITVWGFHSDDKTQMKNLYGDSNPQKFTSSANGVTTHYVSQIGSFPDQTEDGGLPQSGRIVVDYMMQKPGKTGTIVYQRGVLLPQKVWCASGRSKVIKGSLPLIGEADCLHEKYGGLNKSKPYYTGEHAKAIGNCPIWVKTPLKLANGTKYRPPAKLLKERGFFGAIAGFLEGGWEGMIAGWHGYTSHGAHGVAVAADLKSTQEAINKITKNLNSLSELEVKNLQRLSGAMDELHNEILELDEKVDDLRADTISSQIELAVLLSNEGIINSEDEHLLALERKLKKMLGPSAVEIGNGCFETKHKCNQTCLDRIAAGTFNAGEFSLPTFDSLNITAASLNDDGLDNHTILLYYSTAASSLAVTLMLAIFIVYMVSRDNVSCSICL

SEQ ID NO: 26739 - protein, 584 aa, synthetic construct; identical to SEQ ID NO: 26738
  REGION 1..584: note = hemagglutinin__InfluenzaB__AFH58282

SEQ ID NO: 26740 - protein, 585 aa, synthetic construct
  REGION 1..585: note = hemagglutinin__InfluenzaB__AFH58293
MKAIIVLLMVVTSNADRICTGITSSNSPHVVKTATQGEVNVTGVIPLTTTPTKSHFANLKGTETRGKLCPKCLNCTDLDVALGRPKCTGKIPSARVSILHEVRPVTSGCFPIMHDRTKIRQLPNLLRGYEHIRLSTHNVINAENAPGGPYKIGTSGSCPNITNGNGFFATMAWAVPKNDKNKTATNPLTIEVPYICTEGEDQITVWGFHSDDETQMAKLYGDSKPQKFTSSANGVTTHYVSQIGGFPNQTEDGGLPQSGRIVVDYMVQKSGKTGTITYQRGILLPQKVWCASGRSKVIKGSLPLIGEADCLHEKYGGLNKSKPYYTGEHAKAIGNCPIWVKTPLKLANGTKYRPPAKLLKERGFFGAIAGFLEGGWEGMIAGWHGYTSHGAHGVAVAADLKSTQEAINKITKNLNSLSELEVKNLQRLSGAMDELHNEILELDEKVDDLRADTISSQIELAVLLSNEGIINSEDEHLLALERKLKKMLGPSAVEIGNGCFETKHKCNQTCLDRIAAGTFDAGEFSLPTFDSLNITAASLNDDGLDNHTILLYYSTAASSLAVTLMIAIFVVYMVSRDNVSCSICL

SEQ ID NO: 26741 - protein, 584 aa, synthetic construct
  REGION 1..584: note = hemagglutinin__InfluenzaB__AFH58304
MKAIIVLLMVVTSNADRICTGITSSNSPHVVKTATQGEVNVTGVIPLTTTPTKSYFANLKGTRTRGKLCPDCLNCTDLDVALGRPMCVGTTPSAKASILHEVRPVTSGCFPIMHDRTKIRQLPNLLRGYENIRLSTQNVIDAEKAPGGPYRLGTSGSCPNATSKIGFFATMAWAVPKDNYKNATNPLTVEVPYICTEGEDQITVWGFHSDDKTQMKNLYGDSNPQKFTSSANGVTTHYVSQIGDFPDQTEDGGLPQSGRIVVDYMMQKPGKTGTIVYQRGVLLPQKVWCASGRSKVIKGSLPLIGEADCLHEKYGGLNKSKPYYTGEHAKAIGNCPIWVKTPLKLANGTKYRPPAKLLKERGFFGAIAGFLEGGWEGMIAGWHGYTSHGAHGVAVAADLKSTQEAINKITKNLNSLSELEVKNLQRLSGAMDELHNEILELDEKVDDLRADTISSQIELAVLLSNEGIINSEDEHLLALERKLKKMLGPSAVDIGNGCFETKHKCNQTCLDRIAAGTFNAGEFSLPTFDSLNITAASLNDDGLDNHTILLYYSTAASSLAVTLMLAIFIVYMVSRDNVSCSICL

SEQ ID NO: 26742 - protein, 584 aa, synthetic construct; identical to SEQ ID NO: 26741
  REGION 1..584: note = hemagglutinin__InfluenzaB__AFH58315

SEQ ID NO: 26743 - protein, 584 aa, synthetic construct
  REGION 1..584: note = hemagglutinin__InfluenzaB__AFH58326
MKAIIVLLMVVTSNADRICTGITSSNSPHVVKTATQGEVNVTGVIPLTTTPTKSYFANLKGTRTRGKLCPDCLNCTDLDVALGRPMCVGTTPSAKASILHEVRPVTSGCFPIMHDRTKIRQLPNLLRGYENIRLSTQNVIDAEKAPGGPYRLGTSGSCPNATSKIGFFATMAWAVPKDNYKNATNPLTVEVPYICTEGEDQITVWGFHSDNKAQMKNLYGDSNPQKFTSSANGVTTHYVSQIGDFPDQTEDGGPPQSGRIVVDYMMQKPGKTGTIVYQRGVLLPQKVWCASGRSKVIKGSLPLIGEADCLHEKYGGLNKSKPYYTGEHAKAIGNCPIWVKTPLKLANGTKYRPPAKLLKERGFFGAIAGFLEGGWEGMIAGWHGYTSHGAHGVAVAADLKSTQEAINKITKNLNSLSELEVKNLQRLSGAMDELHNEILELDEKVDDLRADTISSQIELAVLLSNEGIINSEDEHLLALERKLKKMLGPSAVDIGNGCFETKHKCNQTCLDRIAAGTFNAGEFSLPTFDSLNITAASLNDDGLDNHTILLYYSTAASSLAVTLMLAIFIVYMVSRDNVSCSICL

SEQ ID NO: 26744 - protein, 584 aa, synthetic construct
  REGION 1..584: note = hemagglutinin__InfluenzaB__AFH58337
MKAIIVLLMVVTSNADRICTGITSSNSPHVVKTATQGEVNVTGVIPLTTTPTKSYFANLKGTRTRGKLCPDCLNCTDLDVALGRPMCVGTTPSAKASILHEVRPVTSGCFPIMHDRTKIRQLPNLLRGYENIRLSTQNVIDAEKAPGGPYRLGTSGSCPNATSKIGFFATMAWAVPKDNYKNATNPLTVEVPYICTEGEDQITVWGFHSDNKAQMKNLYGDSNPQKFTSSANGVTTHYVSQIGDFPDQTEDGGLPQSGRIVVDYMMQKPGKTGTIVYQRGVLLPQKVWCASGRSKVIKGSLPLIGEADCLHEKYGGLNKSKPYYTGEHAKAIGNCPIWVKTPLKLANGTKYRPPAKLLKERGFFGAIAGFLEGGWEGMIAGWHGYTSHGAHGVAVAADLKSTQEAINKITKNLNSLSELEVKNLQRLSGAMDELHNEILELDEKVDDLRADTISSQIELAVLLSNEGIINSEDEHLLALERKLKKMLGPSAVDIGNGCFETKHKCNQTCLDRIAAGTFNAGEFSLPTFDSLNITAASLNDDGLDNHTILLYYSTAASSLAVTLMLAIFIVYMVSRDNVSCSICL

SEQ ID NO: 26745 - protein, 585 aa, synthetic construct
  REGION 1..585: note = hemagglutinin__InfluenzaB__AFH58348
MKAIIVLLMVVTSNADRICTGITSSNSPHVVKTATQGEVNVTGVIPLTTTPTKSHFANLKGTETRGKLCPKCLNCTDLDVALGRPKCTGNIPSARVSILHEVRPVTSGCFPIMHDRTKIRQLPNLLRGYEHIRLSAHNVINAENAPGGPYKIGTSGSCPNVTNGNGFFATMAWAVPKNDNNKTATNSLTIEVPYICTEGEDQITVWGFHSDKETQMAKLYGDSKPQKFTSSANGVTTHYVSQIGGFPNQTEDGGLPQSGRIVVDYMVQKSGKTGTITYQRGILLPQKVWCASGRSKVIKGSLPLIGEADCLHEKYGGLNKSKPYYTGEHAKAIGNCPIWVKTPLKLANGTKYRPPAKLLKERGFFGAIAGFLEGGWEGMIAGWHGYTSHGAHGVAVAADLKSTQEAINKITKNLNSLSELEVKNLQRLSGAMDELHNEILELDEKVDDLRADTISSQIELAVLLSNEGIINSEDEHLLALERKLKKMLGPSAVEIGNGCFETKHKCNQTCLDRIAAGTFNAGEFSLPTFDSLNITAASLNDDGLDNHTILLYYSTAASSLAVTLMIAIFVVYMVSRDNVSCSICL

SEQ ID NO: 26746 - protein, 585 aa, synthetic construct
  REGION 1..585: note = hemagglutinin__InfluenzaB__AFH58370
MKAIIVLLMVVTSNADRICTGITSSNSPHVVKTATQGEVNVTGVIPLTTTPTKSHFANLKGTETRGKLCPKCLNCTDLDVALGRPKCTGNIPSARVSILHEVRPVTSGCFPIMHDRTKIRQLPNLLRGYEHIRLSAHNVINAENAPGGPYKIGTSGSCPNVTNGNGFFATMAWAVPKNDNNKTATNSLTIEVPYICTEGEDQITVWGFHSDNEIQMAKLYGDSKPQKFTSSANGVTTHYVSQIGGFPNQTEDGGLPQSGRIVVDYMVQKSGKTGTITYQRGILLPQKVWCASGRSKVIKGSLPLIGEADCLHEKYGGLNKSKPYYTGEHAKAIGNCPIWVKTPLKLANGTKYRPPAKLLKERGFFGAIAGFLEGGWEGMIAGWHGYTSHGAHGVAVAADLKSTQEAINKITKNLNSLSELEVKNLQRLSGAMDELHNEILELDEKVDDLRADTISSQIELAVLLSNEGIINSEDEHLLALERKLKKMLGPSAVEIGNGCFETKHKCNQTCLDRIAAGTFNAGEFSLPTFDSLNITAASLNDDGLDNHTILLYYSTAASSLAVTLMIAIFVVYMVSRDNVSCSICL

SEQ ID NO: 26747 - protein, 585 aa, synthetic construct
  REGION 1..585: note = hemagglutinin__InfluenzaB__AFH58392
MKAIIVLLMVVTSNADRICTGITSSNSPHVVKTATQGEVNVTGVIPLTTTPTKSHFANLKGTETRGKLCPKCLNCTDLDVALGRPKCTGKIPSARVSILHEVRPVTSGCFPIMHDRTKIRQLPNLLRGYEHIRLSTHNVINAENAPGGPYKIGTSGSCPNITNGNGFFATMAWAVPKNDKNKTATNPLTIEVPYICTEGEDQITVWGFHSDNEIQMAKLYGDSKPQKFTSSANGVTTHYVSQIGGFPNQTEDGGLPQSGRIVVDYMVQKSGKTGTITYQRGILLPQKVWCASGRSKVIKGSLPLIGEADCLHEKYGGLNKSKPYYTGEHAKAIGNCPIWVKTPLKLANGTKYRPPAKLLKERGFFGAIAGFLEGGWEGMIAGWHGYTSHGAHGVAVAADLKSTQEAINKITKNLNSLSELEVKNLQRLSGAMDELHNEILELDEKVDDLRADTISSQIELAVLLSNEGIINSEDEHLLALERKLKKMLGPSAVEIGNGCFETKHKCNQTCLDRIAAGTFDAGEFSLPTFDSLNITAASLNDDGLDNHTILLYYSTAASSLAVTLMIAIFVVYMVSRDNVSCSICL

SEQ ID NO: 26748 - protein, 585 aa, synthetic construct; identical to SEQ ID NO: 26740
  REGION 1..585: note = hemagglutinin__InfluenzaB__AFH58403

SEQ ID NO: 26749 - protein, 585 aa, synthetic construct; identical to SEQ ID NO: 26740
  REGION 1..585: note = hemagglutinin__InfluenzaB__AFH58414

SEQ ID NO: 26750 - protein, 585 aa, synthetic construct; identical to SEQ ID NO: 26740
  REGION 1..585: note = hemagglutinin__InfluenzaB__AFH58425

SEQ ID NO: 26751 - protein, 585 aa, synthetic construct; identical to SEQ ID NO: 26740
  REGION 1..585: note = hemagglutinin__InfluenzaB__AFH58436

SEQ ID NO: 26752 - protein, 585 aa, synthetic construct
  REGION 1..585: note = hemagglutinin__InfluenzaB__AFH58458
MKAIIVLLMVVTSNADRICTGITSSNSPHVVKTATQGEVNVTGVIPLTTTPTKSHFANLKGTETRGKLCPKCLNCTDLDVALGRPKCTGKIPSARVSILHEVRPVTSGCFPIMHDRTKIRQLPNLLRGYEHIRLSTNNVINAENAPGGPYKIGTSGSCPNVTNGNGFFATMAWAVPKNDKNKTATNPLTIEVPYICTEGEDQITVWGFHSDNEIQMAKLYGDSRPQKFTSSANGVTTHYVSQIGGFPNQTEDGGLPQSGRIVVDYMVQKSGKTGTITYQRGILLPQKVWCASGRSKVIKGSLPLIGEADCLHEKYGGLNKSKPYYTGEHAKAIGNCPIWVKTPLKLANGTKYRPPAKLLKERGFFGAIAGFLEGGWEGMIAGWHGYTSHGAHGVAVAADLKSTQEAINKITKNLNSLSELEVKNLQRLSGAMDELHNEILELDEKVDDLRADTISSQIELAVLLSNEGIINSEDEHLLALERKLKKMLGPSAVEIGNGCFETKHKCNQTCLDRIAAGTFDAGEFSLPTFDSLNITAASLNDDGLDNHTILLYYSTAASSLAVTLMIAIFVVYMVSRDNVSCSICL

SEQ ID NO: 26753 - protein, 585 aa, synthetic construct; identical to SEQ ID NO: 26752
  REGION 1..585: note = hemagglutinin__InfluenzaB__AFH58469

SEQ ID NO: 26754 - protein, 584 aa, synthetic construct; identical to SEQ ID NO: 26734
  REGION 1..584: note = hemagglutinin__InfluenzaB__AFH58480

SEQ ID NO: 26755 - protein, 584 aa, synthetic construct
  REGION 1..584: note = hemagglutinin__InfluenzaB__AFH58502
MKAIIVLLMVVTSNADRICTGITSSNSPHVVKTATQGEVNVTGVIPLTTTPTKSYFANLKGTRTRGKLCPDCLNCTDLDVALGRPMCVGTTPSAKASILHEVRPVTSGCFPIMHDRTKIRQLPNLLRGYENIRLSTQNVIDAEKAPGGPYRLGTSGSCPNATSKIGFFATMAWAVPKDNYKNATNPLTVEVPYICTEGEDQITVWGFHSDDKTQMKSLYGDSNPQKFTSSANGVTTHYVSQIGDFPDQTEDGGLPQSGRIVVDYMMQKPGKTGTIVYQRGVLLPQKVWCASGRSKVIKGSLPLIGEADCLHEKYGGLNKSKPYYTGEHAKAIGNCPIWVKTPLKLANGTKYRPPAKLLKERGFFGAIAGFLEGGWEGMIAGWHGYTSHGAHGVAVAADLKSTQEAINKITKNLNSLSELEVKNLQRLSGAMDELHNEILELDEKVDDLRADTISSQIELAVLLSNEGIINSEDEHLLALERKLKKMLGPSAVDIGNGCFETKHKCNQTCLDRIAAGTFNAGEFSLPTFDSLNITAASLNDDGLDNHTILLYYSTAASSLAVTLMLAIFIVYMVSRDNVSCSICL

SEQ ID NO: 26756 - protein, 585 aa, synthetic construct
  REGION 1..585: note = hemagglutinin__InfluenzaB__AFH58513
MKAIIVLLMVVTSNADRICTGITSSNSPHVVKTATQGEVNVTGVIPLTTTPTKSHFANLKGTETRGKLCPKCPNCTDLDVALGRPKCTGKIPSARVSILHEVRPVTSGCFPIMHDRTKIRQLPNLLRGYEHIRLSTHNVINAENAPGGPYKIGTSGSCPNVTNGNGFFATMAWAVPKNDKNKTATNPLTIEVPYICTEGEDQITVWGFHSDDETQMAKLYGDSKPQKFTSSANGVTTHYVSQIGGFPNQTEDGGLPQSGRIVVDYMVQKSGKTGTITYQRGILLPQKVWCASGRSKVIKGSLPLIGEADCLHEKYGGLNKSKPYYTGEHAKAIGNCPIWVKTPLKLANGTKYRPPAKLLKERGFFGAIAGFLEGGWEGMIAGWHGYTSHGAHGVAVAADLKSTQEAINKITKNLNSLSELEVKNLQRLSGAMDELHNEILELDEKVDDLRADTISSQIELAVLLSNEGIINSEDEHLLALERKLKKMLGPSAVEIGNGCFETKHKCNQTCLDRIAAGTFDAGEFSLPTFDSLNITAASLNDDGLDNHTILLYYSTAASSLAVTLMIAIFVVYMVSRDNVSCSICL

SEQ ID NO: 26757 - protein, 585 aa, synthetic construct; identical to SEQ ID NO: 26756
  REGION 1..585: note = hemagglutinin__InfluenzaB__AFH58524

SEQ ID NO: 26758 - protein, 584 aa, synthetic construct
  REGION 1..584: note = hemagglutinin__InfluenzaB__AFH58535
MKAIIVLLMVVTSNADRICTGITSSNSPHVVKTATQGEVNVTGVIPLTTTPTKSHFANLKGTQTRGKLCPNCFNCTDLDVALGRPKCMGNTPSAKVSILHEVKPATSGCFPIMHDRTKIRQLPNLLRGYENIRLSTSNVINTETAPGGPYKVGTSGSCPNVANGNGFFNTMAWVIPKDNNKTAINPVTVEVPYICSEGEDQITVWGFHSDDKTQMERLYGDSNPQKFTSSANGVTTHYVSQIGGFPNQTEDEGLKQSGRIVVDYMVQKPGKTGTIVYQRGILLPQKVWCASGRSKVIKGSLPLIGEADCLHEKYGGLNKSKPYYTGEHAKAIGNCPIWVKTPLKLANGTKYRPPAKLLKERGFFGAIAGFLEGGWEGMIAGWHGYTSHGAHGVAVAADLKSTQEAINKITKNLNYLSELEVKNLQRLSGAMNELHDEILELDEKVDDLRADTISSQIELAVLLSNEGIINSEDEHLLALERKLKKMLGPSAVEIGNGCFETKHKCNQTCLDRIAAGTFNAGDFSLPTFDSLNITAASLNDDGLDNHTILLYYSTAASSLAVTLMIAIFIVYMVSRDNVSCSICL

SEQ ID NO: 26759 - protein, 583 aa, synthetic construct
  REGION 1..583: note = hemagglutinin__InfluenzaB__AFH58557
MKAIIVLLMVVTSNADRICTGITSSNSPHVVKTATQGEVNVTGVIPLTTTPTKSHFANLKGTKTRGKLCPNCLNCTDLDVALGRPMCVGTTPSAKASILHEVRPVTSGCFPIMHDRTKIRQLPNLLRGYENIRLSTQNVINAERAPGGPYRLGTSGSCPNVTSRDGFFATMAWAVPRDNKTATNPLTVEVPYICTKGEDQITVWGFHSDDKTQMKNLYGDSNPQKFTSSANGVTTHYVSQIGGFPNQTEDGGLPQSGRIVVDYMVQKPGKTGTIVYQRGVLLPQKVWCASGRSKVIKGSLPLIGEADCLHEKYGGLNKSKPYYTGEHAKAIGNCPIWVKTPLKLANGTKYRPPAKLLKERGFFGAIAGFLEGGWEGMIAGWHGYTSHGAHGVAVAADLKSTQEAINKITKNLNSLSELEVKNLQRLSGAMDELHNEILELDEKVDDLRADTISSQIELAVLLSNEGIINSEDEHLLALERKLKKMLGPSAVDIGNGCFETKHKCNQTCLDRIAAGTFNAGEFSFPTFDSLNITAASLNDDGLDNHTILLYYSTAASSLAVTLMIAIFIVYMVSRDNVSCSICL

SEQ ID NO: 26760 - protein, 584 aa, synthetic construct
  REGION 1..584: note = hemagglutinin__InfluenzaB__AFJ76224
MKAIIVLLMVVTSNADRICTGITSSNSPHVVKTATQGEVNVTGVIPLTTTPTKSHFANLKGTKTRGKLCPTCLNCTDLDVALGSPMCVGITPSAKASILHEVRPVTSGCFPIMHDRTKIRQLPNLLRGYEKIRLSTQNVINIEKAPGGPYRLGTSGSCPNATSRSGFFATMAWAVPRDNNKTATNPLTVEVPHICTKEEDQITVWGFHSDNKTQMKNLYGDSNPQKFTSSANGVTTHYVSQIGGFPDQTEDGGLPQSGRIVVDYMVQKPGKTGTIVYQRGILLPQKVWCASGRSKVIKGSLPLIGEADCLHEKYGGLNKSKPYYTGEHAKAIGNCPIWVKTPLKLANGTKYRPPAKLLKERGFFGAIAGFLEGGWEGMIAGWHGYTSHGAHGVAVAADLKSTQEAINKITKNLNSLSELEVKNLQRLSGAMDELHNEILELDEKVDDLRADTISSQIELAVLLSNEGIINSEDEHLLALERKLKKMLGPSAVDIGNGCFETKHKCNQTCLDRIAAGTFNAGEFSLPTFDSLNITAASLNDDGLDNHTILLYYSTAASSLAVTLMIAIFIVYMISRDNVSCSICL

SEQ ID NO: 26761 - protein, 584 aa, synthetic construct
  REGION 1..584: note = hemagglutinin__InfluenzaB__AFJ76235
MKAIIVLLMVVTSNADRICTGITSSNSPHVVKTATQGEVNVTGVIPLTTTPTKSHFANLKGTKTRGKLCPTCLNCTDLDVALGSPMCVGITPSAKASILHEVRPVTSRCFPIMHDRTKIRQLPNLLRGYEKIRLSTQNVINIEKAPGGPYRLGTSGSCPNATSRSGFFATMAWAVPRDNNKTATNPLTVEVPHICTKEEDQITVWGFHSDNKTQMKNLYGDSNPQKFTSSANGVTTHYVSQIGGFPDQTEDGGLPQSGRIVVDYMVQKPGKTGTIVYQRGILLPQKVWCASGRSKVIKGSLPLIGEADCLHEKYGGLNKSKPYYTGEHAKAIGNCPIWVKTPLKLANGTKYRPPAKLLKERGFFGAIAGFLEGGWEGMIAGWHGYTSHGAHGVAVAADLKSTQEAINKITKNLNSLSELEVKNLQRLSGAMDELHNEILELDEKVDDLRADTISSQIELAVLLSNEGIINSEDEHLLALERKLKKMLGPSAVDIGNGCFETKHKCNQTCLDRIAAGTFNAGEFSLPTFDSLNITAASLNDDGLDNHTILLYYSTAASSLAVTLMIAIFIVYMISRDNVSCSICL

SEQ ID NO: 26762 - protein, 584 aa, synthetic construct; identical to SEQ ID NO: 26760
  REGION 1..584: note = hemagglutinin__InfluenzaB__AFJ76246

SEQ ID NO: 26763 - protein, 585 aa, synthetic construct; identical to SEQ ID NO: 26514
  REGION 1..585: note = hemagglutinin__InfluenzaB__AFJ76268

SEQ ID NO: 26764 - protein, 585 aa, synthetic construct; identical to SEQ ID NO: 26565
  REGION 1..585: note = hemagglutinin__InfluenzaB__AFJ76301

SEQ ID NO: 26765 - protein, 584 aa, synthetic construct; identical to SEQ ID NO: 26426
  REGION 1..584: note = hemagglutinin__InfluenzaB__AFJ76323

SEQ ID NO: 26766 - protein, 585 aa, synthetic construct
  REGION 1..585: note = hemagglutinin__InfluenzaB__AFJ76334
MKAIIVLLMVVTSNADRICTGITSSNSPHVVKTATQGEVNVTGVIPLTTTPTKSHFANLKGTETRGKLCPKCLNCTDLDVALGRPKCTGNIPSARVSILHEVRPVTSGCFPIMHDRTKIRQLPNLLRGYEHIRLSTHNVINAENAPGGPYKIGTSGSCPNVTNGNGFFATMAWAVPKNDNNKTATNSLTIEVPYICTEGEDQITVWGFHSDSETQMAKLYGDSKPQKFTSSANGVTTHYVSQIGGFPNQTEDGGLPQSGRIVVDYMVQKSGKTGTITYQRGILLPQKVWCASGRSKVIKGSLPLIGEADCLHEKYGGLNKSKPYYTGEHAKAIGNCPIWVKTPLKLANGTKYRPPAKLLKERGFFGAIAGFLEGGWKGMIAGWHGYTSHGAHGVAVAADLKSTQEAINKITKNLNSLSELEVKNLQRLSGAMDELHNEILELDEKVDDLRADTISSQIELAVLLSNEGIINSEDEHLLALERKLKKMLGPSAVEIGNGCFETKHKCNQTCLDRIAAGTFDAGEFSLPTFDSLNITAASLNDDGLDNHTILLYYSTAASSLAVTLMIAVFVVYMVSRDNVSCSICL

SEQ ID NO: 26767 - protein, 585 aa, synthetic construct; identical to SEQ ID NO: 26514
  REGION 1..585: note = hemagglutinin__InfluenzaB__AFJ77327

SEQ ID NO: 26768 - protein, 584 aa, synthetic construct; identical to SEQ ID NO: 26426
  REGION 1..584: note = hemagglutinin__InfluenzaB__AFJ77369

SEQ ID NO: 26769 - protein, 584 aa, synthetic construct; identical to SEQ ID NO: 26426
  REGION 1..584: note = hemagglutinin__InfluenzaB__AFJ77380

SEQ ID NO: 26770 - protein, 584 aa, synthetic construct
  REGION 1..584: note = hemagglutinin__InfluenzaB__AFJ80139
MKAIIVLLMVVTSNADRICTGITSSNSPHVVKTATQGEVNVTGVIPLTTTPTKSHFANLKGTKTRGKLCPTCLNCTDLDVALGRPMCVGITPSAKASILHEVRPVTSGCFPIMHDRTKIRQLPNLLRGYEKIRLSTQNVINAEKAPGGPYRLGTSGSCPNATSRSGFFATMAWAVPRDNNKTATNPLTVEVPYICTKEEDQITVWGFHSDNKTQMKNLYGDSNPQKFTSSANGVTTHYVSQIGGFPDQTEDGGLPQSGRIVVDYMVQKPGKTGTIVYQRGILLPQKVWCASGRSKVIKGFLPLIGEADCLHEKYGGLNKSKPYYTGEHAKAIGNCPIWVKTPLKLANGTKYRPPAKLLKERGFFGAIAGFLEGGWEGMIAGWHGYTSHGAHGVAVAADLKSTQEAINKITKNLNSLSELEVKNLQRLSGAMDELHNEILELDEKVDDLRADTISSQIELAVLLSNEGIINSEDEHLLALERKLKKMLGPSAVDIGNGCFETKHKCNQTCLDRIAAGTFNAGEFSLPTFDSLNITAASLNDDGLDNHTILLYYSTAASSLAVTLMIAIFIVYMISRDNVSCSICL

SEQ ID NO: 26771 - protein, 584 aa, synthetic construct
  REGION 1..584: note = hemagglutinin__InfluenzaB__AFJ80150
MKAIIVLLMVVTSNADRICTGITSSNSPHVVKTATQGEVNVTGVIPLTTTPTKSHFANLKGTKTRGKLCPTCLNCTDLDVALGRPMCVGITPSAKASILHEVRPVTSGCFPIMHDRTKIRQLPNLLRGYEKIRLSTQNVINAEKAPGGPYRLGTSGSCPNATSRSGFFATMAWAVPRDNNKTATNPLTVEVPYICTKEEDQITVWGFHSDNKTQMKNLYGDSNPQKFTSSANGVTTHYVSQIGGFPDQTEDGGLPQSGRIVVDYMVQKPGKTGTIVYQRGILLPQKVWCASGRSKVIKGSLPLIGEADCLHEKYGGLNKSKPYYTGEHAKAIGNCPIWVKTPLKLANGTKYRPPAKLLKERGFFGAIAGFLEGGWEGMIAGWHGYTSHGAHGVAVAADLKSTQEAINKITKNLNSLSELEVKNLQRLSGAMDELHNEILELDEKVDDLRADTISSQIELAVLLSNEGIINSEDEHLLALERKLKKMLGPSAVDIGNGCFETKHKCNQTCLDRIAAGTFNAGEFSLPTFDSLNITAASLNDDGLDNHTILLYYSTAASSLAVTLMIAIFIVYMISRDNVSCSICL

SEQ ID NO: 26772 - protein, 584 aa, synthetic construct
  REGION 1..584: note = hemagglutinin__InfluenzaB__AFJ80161
MKAIIVLLMVVTSNADRICTGITSSNSPHVVKTATQGEVNVTGAIPLTTTPTKSHFANLKGTKTRGKLCPTCLNCTDLDVALGRPMCVGITPSAKASILHEVRPVTSGCFPIMHDRTKIRQLPNLLRGYEKIRLSTQNVINAEKAPGGPYRLGTSGSCPNATSRSGFFATMAWAVPRDNNKTATNPLTVEVPHICTKEEDQITVWGFHSDNKTQMKNLYGDSNPQKFTSSANGITTHYVSQIGGFPDQTEDGGLPQSGRIVVDYMVQKPGKTGTIVYQRGILLPQKVWCASGRSKVIKGSLPLIGEADCLHEKYGGLNKSKPYYTGEHAKAIGNCPIWVKTPLKLANGTKYRPPAKLLKERGFFGAIAGFLEGGWEGMIAGWHGYTSHGAHGVAVAADLKSTQEAINKITKNLNSLSELEVKNLQRLSGAMDELHNEILELDEKVDDLRADTISSQIELAVLLSNEGIINSEDEHLLALERKLKKMLGPSAVDIGNGCFETKHKCNQTCLDRIAAGTFNAGEFSLPTFDSLNITAASLNDDGLDNHTILLYYSTAASSLAVTLMIAIFIVYMIFRDNVSCSICL

SEQ ID NO: 26773 - protein, 584 aa, synthetic construct
  REGION 1..584: note = hemagglutinin__InfluenzaB__AFJ80172
MKAIIVLLMVVTSNADRICTGITSSNSPHVVKTATQGEVNVTGVIPLTTTPTKSHFANLKGTKTRGKLCPTCLNCTDLDVALGRPMCVGITPSAKASILHEVRPVTSGCFPIMHDRTKIRQLPNLLRGYEKIRLSTQNVINAEKAPGGPYRLGTSGSCPNATSRSGFFATMAWAVPRDNNKTATNPLTVEVPYICTKEEDQITVWGFHSDNKTQMKNLYGDSNPQKFTSSANGVTTHYVSQIGDFPDQTEDGGLPQSGRIVVDYMVQKPGKTGTIVYQRGILLPQKVWCASGRSKVIKGSLPLIGEADCLHEKYGGLNKSKPYYTGEHAKAIGNCPIWVKTPLKLANGTKYRPPAKLLKERGFFGAIAGFLEGGWEGMIAGWHGYTSHGAHGVAVAADLKSTQEAINKITKNLNSLSELEVKNLQRLSGAMDELHNEILELDEKVDDLRADTISSQIELAVLLSNEGIINSEDEHLLALERKLKKMLGPSAVDIGNGCFETKHKCNQTCLDRIAAGTFNAGEFSLPTFDSLNITAASLNDDGLDNHTILLYYSTAASSLAVTLMIAIFIVYMISRDNVSCSICL

SEQ ID NO: 26774 - protein, 584 aa, synthetic construct; identical to SEQ ID NO: 26760
  REGION 1..584: note = hemagglutinin__InfluenzaB__AFJ80183

SEQ ID NO: 26775 - protein, 584 aa, synthetic construct; identical to SEQ ID NO: 26771
  REGION 1..584: note = hemagglutinin__InfluenzaB__AFJ80194

SEQ ID NO: 26776 - protein, 584 aa, synthetic construct; identical to SEQ ID NO: 26760
  REGION 1..584: note = hemagglutinin__InfluenzaB__AFJ80205

SEQ ID NO: 26777 - protein, 584 aa, synthetic construct; identical to SEQ ID NO: 26405
  REGION 1..584: note = hemagglutinin__InfluenzaB__AFJ80216

SEQ ID NO: 26778 - protein, 584 aa, synthetic construct; identical to SEQ ID NO: 26760
  REGION 1..584: note = hemagglutinin__InfluenzaB__AFJ80227

SEQ ID NO: 26779 - protein, 585 aa, synthetic construct
  REGION 1..585: note = hemagglutinin__InfluenzaB__AFJ80238
MKAIIVLLMVVTSNADRICTGITSSNSPHVVKTATQGEVNVTGVIPLTTTPTKSHFANLKGTKTRGKLCPKCLNCTDLDVALGRPKCTGNIPSAKVSILHEVRPVTSGCFPIMHDRTKIRQLPNLLRGYEHIRLSIHNVINAEKAPGGPYKIGTSGSCPNVTNGNGFFATMAWAVPKNDNNKTATNSLTIEVPYICTEGEDQITVWGFHSDNETQMAKLYGDSKPQKFTSSANGVTTHYVSQIGGFPNQTEDGGLPQSGRIVVDYMVQKSGKTGTITYQRGILLPQKVWCASGRSKVIKGSLPLIGEADCLHEKYGGLNKSKPYYTGEHAKAIGNCPIWVKTPLKLANGTKYRPPAKLLKERGFFGAIAGFLEGGWEGMIAGWHGYTSHGAHGVAVAADLKSTQEAINKITKNLNSLSELEVKNLQRLSGAMDELHNEILELDEKVDDLRADTISSQIELAVLLSNEGIINSEDEHLLALERKLKKMLGPSAVEIGNGCFETKHKCNQTCLDRIAAGTFDAGEFSLPTFDSLNITAASLNDDGLDNHTILLYYSTAASSLAVTLMIAIFVVYMVSRDNVSCSICL

SEQ ID NO: 26780 - protein, 584 aa, synthetic construct
  REGION 1..584: note = hemagglutinin__InfluenzaB__AFJ80656
MKAIIVLLMVVTSNADRICTGITSSNSPHVVRTATQGEVNVTGVIPLTTTPTKSHFANLKGTKTRGKLCPTCLNCTDLDVALGRPMCVGITPSAKASILHEVRPVTSGCFPIMHDRTKIRQLPNLLRGYEKIRLSTQNVINAEKAPGGPYRLGTSGSCPNATSRSGFFATMAWAVPRDNNKTATNPLTVEVPHICTKEEDQITVWGFHSDNKTQMKNLYGDSNPQKFTSSANGVTTHYVSQIGGFPDQTEDGGLPQSGRIVVDYMVQKPGKTGTIVYQRGILLPQKVWCASGRSKVIKGSLPLIGEADCLHEKYGGLNKSKPYYTGEHAKAIGNCPIWVKTPLKLANGTKYRPPAKLLKERGFFGAIAGFLEGGWEGMIAGWHGYTSHGAHGVAVAADLKSTQEAINKITKNLNSLSELEVKNLQRLSGAMDELHNEILELDEKVDDLRADTISSQIELAVLLSNEGIINSEDEHLLALERKLKKMLGPSAVDIGNGCFETKHKCNQTCLDRIAAGTFNAGEFSLPTFDSLNITAASLNDDGLDNHTILLYYSTAASSLAVTLMIAIFIVYMISRDNVSCSICL

SEQ ID NO: 26781 - protein, 584 aa, synthetic construct; identical to SEQ ID NO: 26760
  REGION 1..584: note = hemagglutinin__InfluenzaB__AFJ80667

SEQ ID NO: 26782 - protein, 584 aa, synthetic construct; identical to SEQ ID NO: 26760
  REGION 1..584: note = hemagglutinin__InfluenzaB__AFJ80678

SEQ ID NO: 26783 - protein, 584 aa, synthetic construct; identical to SEQ ID NO: 26760
  REGION 1..584: note = hemagglutinin__InfluenzaB__AFJ80689

SEQ ID NO: 26784 - protein, 584 aa, synthetic construct
  REGION 1..584: note = hemagglutinin__InfluenzaB__AFJ80711
MKAIIVLLMVVTSNADRICTGITSSNSPHVVKTATQGEVNVTGVIPLTTTPIKSYFANLKGTKTRGKLCPDCLNCTDLDVALGRPMCVGTTPSAKASILHEVRPVTSGCFPIMHDRTKIRQLPNLLRGYENIRLSTQNVIDAEKAPGGPYRLGTSGSCPNATSKSGFFATMAWAVPKDNNKNATNPLTVEVPYVCTEGEDQITVWGFHSDNKTQMKNLYGDSNPQKFTSSANGVTTHYVSQIGGFPDQTEDGGLPQSGRIVVDYMVQKPGKTGTIVYQRGVLLPQKVWCASGRSKVIKGSLPLIGEADCLHEKYGGLNKSKPYYTGEHAKAIGNCPIWVKTPLKLANGTKYRPPAKLLKERGFFGAIAGFLEGGWEGMIAGWHGYTSHGAHGVAVAADLKSTQEAINKITKNLNSLSELEVKNLQRLSGAMDELHNEILELDEKVDDLRADTISSQIELAVLLSNEGIINSEDEHLLALERKLKKMLGPSAVDIGNGCFETKHKCNQTCLDRIAAGTFNAGEFSLPTFDSLNITAASLNDDGLDNHTILLYYSTAASSLAVTLMLAIFIVYMVSRDNVSCSICL

SEQ ID NO: 26785 - protein, 584 aa, synthetic construct; identical to SEQ ID NO: 26784
  REGION 1..584: note = hemagglutinin__InfluenzaB__AFJ80722

SEQ ID NO: 26786 - protein, 584 aa, synthetic construct
  REGION 1..584: note = hemagglutinin__InfluenzaB__AFJ80733
MKAIIVLLMVVTSNADRICTGITSSNSPHVVKTATQGEVNVTGVIPLTTTPTKSYFANLKGTRTRGKLCPDCLNCTDLDVALGRPMCMGTTPSAKASILHEVRPVTSGCFPIMHDRTKIRQLPNLLRGYENIRLSTQNVIDAEKAPGGPYRLGTSGSCPDATNKSGFFATMAWAVPKDNNKNATNPLTVEVPYICTEGEDQITVWGFHSDNKTQMKNLYGDSNPQKFTSSANGVTTHYVSQIGGFPDQTEDGGLPQSGRIVVDYMMQKPGKTGTIVYQRGVLLPQKVWCASGRSKVIKGSLPLIGEADCLHEKYGGLNKSKPYYTGEHAKAIGNCPIWVKTPLKLANGTKYRPPAKLLKERGFFGAIAGFLEGGWEGMIAGWHGYTSHGAHGVAVAADLKSTQEAINKITKNLNSLSELEVKNLQRLSGAMDELHNEILELDEKVDDLRADTISSQIELAVLLSNEGIINSEDEHLLALERKLKKMLGPSAVDIGNGCFETKHKCNQTCLDRIAAGTFNAGEFSLPTFDSLNITAASLNDDGLDNHTILLYYSTAASSLAVTLMLAIFIVYMVSRDNVSCSICL

SEQ ID NO: 26787 - protein, 585 aa, synthetic construct; identical to SEQ ID NO: 26514
  REGION 1..585: note = hemagglutinin__InfluenzaB__AFJ80744

SEQ ID NO: 26788 - protein, 585 aa, synthetic construct; identical to SEQ ID NO: 26514
  REGION 1..585: note = hemagglutinin__InfluenzaB__AFJ80755

SEQ ID NO: 26789 - protein, 585 aa, synthetic construct; identical to SEQ ID NO: 26514
  REGION 1..585: note = hemagglutinin__InfluenzaB__AFJ80781

SEQ ID NO: 26790 - protein, 585 aa, synthetic construct; identical to SEQ ID NO: 26514
  REGION 1..585: note = hemagglutinin__InfluenzaB__AFJ80792

SEQ ID NO: 26791 - protein, 585 aa, synthetic construct; identical to SEQ ID NO: 26514
  REGION 1..585: note = hemagglutinin__InfluenzaB__AFJ80803

SEQ ID NO: 26792 - protein, 585 aa, synthetic construct; identical to SEQ ID NO: 26514
  REGION 1..585: note = hemagglutinin__InfluenzaB__AFJ80814

SEQ ID NO: 26793 - protein, 585 aa, synthetic construct
  REGION 1..585: note = hemagglutinin__InfluenzaB__AFJ80825
MKAIIVLLMVVTSNADRICTGITSSNSPHVVKTATQGEVNVTGVIPLTTTPTKSHFANLKGTETRGKLCPKCLNCTDLDVALGRPKCTGNIPSARVSILHEVRPITSGCFPIMHDRTKIRQLPNLLRGYEHIRLSTHNVINAENAPGGPYKIGTSGSCPNVTNGNGFFATMAWAVPKNDNNKTATNSLTIEVPYICTEGEDQITVWGFHSDNETQMAKLYGDSKPQKFTSSANGVTTHYVSQIGGFPNQTEDGGLPQSGRIVVDYMVQKSGKTGTITYQRGILLPQKVWCASGRSKVIKGSLPLIGEADCLHEKYGGLNKSKPYYTGEHAKAIGNCPIWVKTPLKLANGTKYRPPAKLLKERGFFGAIAGFLEGGWEGMIAGWHGYTSHGAHGVAVAADLKSTQEAINKITKNLNSLSELEVKNLQRLSGAMDELHNEILELDEKVDDLRADTISSQIELAVLLSNEGIINSEDEHLLALERKLKKMLGPSAVEIGNGCFETKHKCNQTCLDRIAAGTFDAGEFSLPTFDSLNITAASLNDDGLDNHTILLYYSTAASSLAVTLMIAIFVVYMVSRDNVSCSICL

SEQ ID NO: 26794 - protein, 585 aa, synthetic construct; identical to SEQ ID NO: 26514
  REGION 1..585: note = hemagglutinin__InfluenzaB__AFJ80836

SEQ ID NO: 26795 - protein, 585 aa, synthetic construct; identical to SEQ ID NO: 26582
  REGION 1..585: note = hemagglutinin__InfluenzaB__AFJ80847

SEQ ID NO: 26796 - protein, 585 aa, synthetic construct; identical to SEQ ID NO: 26514
  REGION 1..585: note = hemagglutinin__InfluenzaB__AFJ80858

SEQ ID NO: 26797 - protein, 585 aa, synthetic construct; identical to SEQ ID NO: 26514
  REGION 1..585: note = hemagglutinin__InfluenzaB__AFJ80869

SEQ ID NO: 26798 - protein, 585 aa, synthetic construct; identical to SEQ ID NO: 26514
  REGION 1..585: note = hemagglutinin__InfluenzaB__AFJ80880

SEQ ID NO: 26799 - protein, 585 aa, synthetic construct; identical to SEQ ID NO: 26565
  REGION 1..585: note = hemagglutinin__InfluenzaB__AFJ80891

SEQ ID NO: 26800 - protein, 585 aa, synthetic construct; identical to SEQ ID NO: 26565
  REGION 1..585: note = hemagglutinin__InfluenzaB__AFJ80902

SEQ ID NO: 26801 - protein, 585 aa, synthetic construct; identical to SEQ ID NO: 26514
  REGION 1..585: note = hemagglutinin__InfluenzaB__AFJ80913

SEQ ID NO: 26802 - protein, 585 aa, synthetic construct
  REGION 1..585: note = hemagglutinin__InfluenzaB__AFJ80924
MKAIIVLLMVVTSNADRICTGITSSNSPHVVKTATQGEVNVTGVIPLTTTPTKSHFANLKGTETRGKLCPKCLNCTDLDVALGRPKCTGNIPSARVSILHEVRPVTSGCFPIMHDRTKIRQLPNLLRGYEHIRLSTHNVINAENAPGGPYKIGTSGSCPNVTNGNGFFATMAWAVPKNDNNKTATNSLTIEVPYICAEGEDQITVWGFHSDNETQMAKLYGDSKPQKFTSSANGVTTHYVSQIGGFPNQTEDGGLPQSGRIVVDYMVQKSGKTGTITYQRGILLPQKVWCASGRSKVIKGSLPLIGEADCLHEKYGGLNKSKPYYTGEHAKAIGNCPIWVKTPLKLANGTKYRPPAKLLKERGFFGAIAGFLEGGWEGMIAGWHGYTSHGAHGVAVAADLKSTQEAINKITKNLNSLSELEVKNLQRLSGAMDELHNEILELDEKVDDLRADTISSQIELAVLLSNEGIINSEDEHLLALERKLKKMLGPSAVEIGNGCFETKHKCNQTCLDRIAAGTFDAGEFSLPTFDSLNITAASLNDDGLDNHTILLYYSTAASSLAVTLMIAIFVVYMVSRDNVSCSICL

SEQ ID NO: 26803 - protein, 585 aa, synthetic construct; identical to SEQ ID NO: 26565
  REGION 1..585: note = hemagglutinin__InfluenzaB__AFJ80935

SEQ ID NO: 26804 - protein, 584 aa, synthetic construct; identical to SEQ ID NO: 26426
  REGION 1..584: note = hemagglutinin__InfluenzaB__AFJ80946

SEQ ID NO: 26805 - protein, 585 aa, synthetic construct
  REGION 1..585: note = hemagglutinin__InfluenzaB__AFJ80957
MKAIIVLLMVATSNADRICTGITSSNSPHVVKTATQGEVNVTGVIPLTTTPTKSHFANLKGTETRGKLCPKCLNCTDLDVALGRPKCTGNIPSARVSILHEVRPVTSGCFPIMHDRTKIRQLPNLLRGYEHIRLSTHNVINAENAPGGPYKIGTSGSCPNVTNGNGFFATMAWAVPKNDNNKTATNSLTIEVPYICTEGEDQITVWGFHSDNETQMAKLYGDSKPQKFTSSANGVTTHYVSQIGGFPNQTEDGGLPQSGRIVVDYMVQKSGKTGTITYQRGILLPQKVWCASGRSKVIKGSLPLIGEADCLHEKYGGLNKSKPYYTGEHAKAIGNCPIWVKTPLKLANGTKYRPPAKLLKERGFFGAIAGFLEGGWEGMIAGWHGYTSHGAHGVAVAADLKSTQEAINKITKNLNSLSELEVKNLQRLSGAMDELHNEILELDEKVDDLRADTISSQIELAVLLSNEGIINSEDEHLLALERKLKKMLGPSAVEIGNGCFETKHKCNQTCLDRIAAGTFNAGEFSLPTFDSLNITAASLNDDGLDNHTILLYYSTAASSLAVTLMIAIFVVYMVSRDNVSCSICL

SEQ ID NO: 26806 - protein, 584 aa, synthetic construct; identical to SEQ ID NO: 26426
  REGION 1..584: note = hemagglutinin__InfluenzaB__AFJ80968

SEQ ID NO: 26807 - protein, 584 aa, synthetic construct; identical to SEQ ID NO: 26426
  REGION 1..584: note = hemagglutinin__InfluenzaB__AFJ80979

SEQ ID NO: 26808 - protein, 584 aa, synthetic construct
  REGION 1..584: note = hemagglutinin__InfluenzaB__AFJ80990
MKAIIVLLMVVTSNADRICTGITSSNSPHVVKTATQGEVNVTGVIPLTTTPTKSYFANLKGTRTRGKLCPDCLNCTDLDVALGRPMCVGTTPSAEASILHEVRPVTSGCFPIMHDRTKIRQLPNLLRGYENIRLSTQNVIDAEKAPGGPYRLGTSGSCPNATNKSGFFATMAWAVPKDNNKNATNPLTVEVPYICTEGEDQITVWGFHSDNKTQMKNLYGDSNPQKFTSSANGVTTHYVSQIGGFPDQTEDGGLPQSGRIVVDYMMQKPGKTGTIVYQRGVLLPQKVWCASGRSKVIKGSLPLIGEADCLHEKYGGLNKSKPYYTGEHAKAIGNCPIWVKTPLKLANGTKYRPPAKLLKERGFFGAIAGFLEGGWEGMIAGWHGYTSHGAHGVAVAADLKSTQEAINKITKNLNSLSELEVKNLQRLSGAMDELHNEILELDEKVDDLRADTISSQIELAVLLSNEGIINSEDEHLLALERKLKKMLGPSAVDIGNGCFETKHKCNQTCLDRIAAGTFNAGEFSLPTFDSLNITAASLNDDGLDNHTILLYYSTAASSLAVTLMLAIFIVYMVSRDNVSCSICL

SEQ ID NO: 26809 - protein, 584 aa, synthetic construct; identical to SEQ ID NO: 26426
  REGION 1..584: note = hemagglutinin__InfluenzaB__AFJ81001

SEQ ID NO: 26810 - protein, 584 aa, synthetic construct; identical to SEQ ID NO: 26426
  REGION 1..584: note = hemagglutinin__InfluenzaB__AFJ84360

SEQ ID NO: 26811 - protein, 585 aa, synthetic construct; identical to SEQ ID NO: 26514
  REGION 1..585: note = hemagglutinin__InfluenzaB__AFJ90395

SEQ ID NO: 26812 - protein, 584 aa, synthetic construct; identical to SEQ ID NO: 26426
  REGION 1..584: note = hemagglutinin__InfluenzaB__AFJ90406

SEQ ID NO: 26813 - protein, 584 aa, synthetic construct; identical to SEQ ID NO: 26426
  REGION 1..584: note = hemagglutinin__InfluenzaB__AFJ90417

SEQ ID NO: 26814 - protein, 584 aa, synthetic construct; identical to SEQ ID NO: 26426
  REGION 1..584: note = hemagglutinin__InfluenzaB__AFJ90428

SEQ ID NO: 26815 - protein, 584 aa, synthetic construct; identical to SEQ ID NO: 26426
  REGION 1..584: note = hemagglutinin__InfluenzaB__AFJ90450

SEQ ID NO: 26816 - protein, 584 aa, synthetic construct; identical to SEQ ID NO: 26426
  REGION 1..584: note = hemagglutinin__InfluenzaB__AFJ91038

SEQ ID NO: 26817 - protein, 584 aa, synthetic construct
  REGION 1..584: note = hemagglutinin__InfluenzaB__AFJ91049
MKAIIVLLMVVTSNADRICTGITSSNSPHVVKTATQGEVNVTGVIPLTITPTKSYFANLKGTRTRGKLCPDCLNCTDLDVALGRPMCVGTTPSAKASILHEVRPVTSGCFPIMHDRTKIRQLANLLRGYENIRLSTQNVIDAEKAPGGPYRLGTSGSCPNATSKSGFFATMAWAVPKDNNKNATNPLTVEVPYICTEGEDQITVWGFHSDNKTQMKNLYGDSNPQKFTSSANGVTTHYVSQIGGFPDQTEDGGLPQSGRIVVDYMMQKPGKTGTIVYQRGVLLPQKVWCASGRSKVIKGSLPLIGEADCLHEKYGGLNKSKPYYTGEHAKAIGNCPIWVKTPLKLANGTKYRPPAKLLKERGFFGAIAGFLEGGWEGMIAGWHGYTSHGAHGVAVAADLKSTQEAINKITKNLNSLSELEVKNLQRLSGAMDELHNEILELDEKVDDLRADTISSQIELAVLLSNEGIINSEDEHLLALERKLKKMLGPSAVDIGNGCFETKHKCNQTCLDRIAAGTFNAGEFSLPTFDSLNITAASLNDDGLDNHTILLYYSTAASSLAVTLMLAIFIVYMVSRDNVSCSICL

SEQ ID NO: 26818 - protein, 585 aa, synthetic construct
  REGION 1..585: note = hemagglutinin__InfluenzaB__AFJ91060
MKAIIVLLMVVTSNADRICTGITSSNSPHVVKTATQGEVNVTGVIPLTTTPTKSHFANLKGTETRGKLCPRCLNCTDLDVALGRPKCTGNIPSARVSILHEVRPVTSGCFPIMHDRTKIRQLPNLLRGYEHIRLSTHNVINAENAPGGPYKIGTSGSCPNVTNGNGFFATMAWAVPKNDNNKTATNSLTIEVPYICTEGEDQITVWGFHSDNEAQMAKLYGDSKPQKFTSSANGVTTHYVSQIGGFPNQTEDGGLPQSGRIVVDYMVQKSGKTGTITYQRGILLPQKVWCASGRSKVIKGSLPLIGEADCLHEKYGGLNKSKPYYTGEHAKAIGNCPIWVKTPLKLANGTKYRPPAKLLKERGFFGAIAGFLEGGWEGMIAGWHGYTSHGAHGVAVAADLKSTQEAINKITKNLNSLSELEVKNLQRLSGAMDELHNEILELDEKVDDLRADTISSQIELAVLLSNEGIINSEDEHLLALERKLKKMLGPSAVEIGNGCFETKHKCNQTCLDRIAAGTFDAGEFSLPTFDSLNITAASLNDDGLDNHTILLYYSTAASSLAVTLMIAIFVVYMVSRDNVSCSICL

SEQ ID NO: 26819 - protein, 584 aa, synthetic construct; identical to SEQ ID NO: 26426
  REGION 1..584: note = hemagglutinin__InfluenzaB__AFJ91071

SEQ ID NO: 26820 - protein, 584 aa, synthetic construct
  REGION 1..584: note = hemagglutinin__InfluenzaB__AFJ91082
MKAIIVLLMVVTSNADRICTGITSSNSPHVVKTATQGEVNVTGVIPLTTTPTKSYFANLKGTRTRGKLCPDCLNCTDLDVALGRPMCVGTTPSAKASILHEVRPVTSGCFPIMHDRTKIRQLPNLLRGYENIRLSTQNVIDAEKAPGGPYRLGTSGSCPNATSKIGFFATMAWAVPKDNYKNATNPLTVEVPYICTEGEDQITVWGFHSDNKTQMKNLYGDSNPQKFTSSANGVTTHYVSQIGDFPDQTEDGGLPQSGRIVVDYMMQKPGKTGTIVYQRGVLLPQKVWCASGRSKVIKGSLPLIGEADCLHEKYGGLNKSKPYYTGEHAKAIGNCPIWVKTPLKLANGTKYRPPAKLLKERGFFGAIAGFLEGGWEGMIAGWHGYTSHGAHGVAVAADLKSTQEAINKITKNLNSLSELEVKNLQRLSGAMDELHNEILELDEKVDDLRADTISSQIELAVLLSNEGIINSEDEHLLALERKLKKMLGPSAVDIGNGCFETKHKCNQTCLDRIAAGTFNAGEFSLPTFDSLNITAASLNDDGLDNHTILLYYSTAASSLAVTLMLAIFIVYMVSRDNVSCSICL

SEQ ID NO: 26821 - protein, 584 aa, synthetic construct; identical to SEQ ID NO: 26820
  REGION 1..584: note = hemagglutinin__InfluenzaB__AFJ91093

SEQ ID NO: 26822 - protein, 584 aa, synthetic construct; identical to SEQ ID NO: 26820
  REGION 1..584: note = hemagglutinin__InfluenzaB__AFJ91104

SEQ ID NO: 26823 - protein, 584 aa, synthetic construct; identical to SEQ ID NO: 26820
  REGION 1..584: note = hemagglutinin__InfluenzaB__AFJ91115

SEQ ID NO: 26824 - protein, 585 aa, synthetic construct
  REGION 1..585: note = hemagglutinin__InfluenzaB__AFJ91704
MKAIIVLLMVVTSNADRICTGITSSNSPHVVKTATQGEVNVTGVIPLTTTPTKSHFANLKGTETRGKLCPKCLNCTDLDVALGRPKCTGNIPSARVSILHEVRPVTSGCFPIMHDRTKIRQLPNLLRGYEHIRLSTHNVINAENAPGGPYKIGTSGSCPNVTNGKGFFATMAWAVPKNDNNKTATNSLTIEVPYICTEGEDQITVWGFHSDNETQMAKLYGDSKPQKFTSSANGVTTHYVSQIGGFPNQTEDGGLPQSGRIVVDYMVQKSGKTGTITYQRGILLPQKVWCASGRSKVIKGSLPLIGEADCLHEKYGGLNKSKPYYTGEHAKAIGNCPIWVKTPLKLANGTKYRPPAKLLKERGFFGAIAGFLEGGWEGMIAGWHGYTSHGAHGVAVAADLKSTQEAINKITKNLNSLSELEVKNLQRLSGAMDELHNEILELDEKVDDLRADTISSQIELAVLLSNEGIINSEDEHLLALERKLKKMLGPSAVEIGNGCFETKHKCNQTCLDRIAAGTFDAGEFSLPTFDSLNITAASLNDDGLDNHTILLYYSTAASSLAVTLMIAIFVVYMVSRDNVSCSICL

SEQ ID NO: 26825 - protein, 584 aa, synthetic construct
  REGION 1..584: note = hemagglutinin__InfluenzaB__AFK09797
MKAIIVLLMVVTSNADRICTGITSSNSPHVVKTATQGEVNVTGVIPLTTTPIKSYFANLKGTKTRGKLCPDCLNCTDLDVALGRPMCVGTTPSAKASILHEVRPVTSGCFPIMHDRTKIRQLPNLLRGYENIRLSTQNVIDAEKAPGGPYRLGTSGSCPNATSKSGFFATMAWAVPKDNNKNATNPLTVEVPYVCTEGEDQITVWGFHSDNKNQMKNLYGDSNPQKFTSSANGVTTHYVSQIGGFPDQTEDGGLPQSGRIVVDYMVQKPGKTGTIVYQRGVLLPQKVWCASGRSKVIKGSLPLIGEADCLHEKYGGLNKSKPYYTGEHAKAIGNCPIWVKTPLKLANGTKYRPPAKLLKERGFFGAIAGFLEGGWEGMIAGWHGYTSHGAHGVAVAADLKSTQEAINKITKNLNSLSELEVKNLQRLSGAMDELHNEILELDEKVDDLRADTISSQIELAVLLSNEGIINSEDEHLLALERKLKKMLGPSAVDIGNGCFETKHKCNQTCLDRIAAGTFNAGEFSLPTFDSLNITAASLNDDGLDNHTILLYYSTAASSLAVTLMLAIFIVYMVSRDNVSCSICL

SEQ ID NO: 26826 - protein, 584 aa, synthetic construct; identical to SEQ ID NO: 26820
  REGION 1..584: note = hemagglutinin__InfluenzaB__AFN54654

SEQ ID NO: 26827 - protein, 584 aa, synthetic construct; identical to SEQ ID NO: 26567
  REGION 1..584: note = hemagglutinin__InfluenzaB__AFN54665

SEQ ID NO: 26828 - protein, 584 aa, synthetic construct; identical to SEQ ID NO: 26567
  REGION 1..584: note = hemagglutinin__InfluenzaB__AFN54676

SEQ ID NO: 26829 - protein, 584 aa, synthetic construct; identical to SEQ ID NO: 26820
  REGION 1..584: note = hemagglutinin__InfluenzaB__AFN54687

SEQ ID NO: 26830 - protein, 584 aa, synthetic construct
  REGION 1..584: note = hemagglutinin__InfluenzaB__AFN54698
MKAIIVLLMVVTSNADRICTGITSSNSPHVVKTATQGEVNVTGVIPLTTTPTKSYFANLKGTRTRGKLCPDCLNCTDLDVALGRPMCVGTTPSAKASILHEVRPVTSGCFPIMHDRTKIRQLPNLLRGYENIRLSTQNVIDAEKAPGGPYRLGTSGSCPNATSKIGFFATMAWAVPKDNYKNATNPLTVEVPYICTEGEDQITVWGFHSDNKTQMKNLYGDSNPQKFTSFANGVTTHYVSQIGDFPDQTEDGGLPQSGRIVVDYMMQKPGKTGTIVYQRGVLLPQKVWCASGRSKVIKGSLPLIGEADCLHEKYGGLNKSKPYYTGEHAKAIGNCPIWVKTPLKLANGTKYRPPAKLLKERGFFGAIAGFLEGGWEGMIAGWHGYTSHGAHGVAVAADLKSTQEAINKITKNLNSLSELEVKNLQRLSGAMDELHNEILELDEKVDDLRADTISSQIELAVLLSNEGIINSEDEHLLALERKLKKMLGPSAVDIGNGCFETKHKCNQTCLDRIAAGTFNAGEFSLPTFDSLNITAASLNDDGLDNHTILLYYSTAASSLAVTLMLAIFIVYMVSRDNVSCSICL

SEQ ID NO: 26831 - protein, 584 aa, synthetic construct; identical to SEQ ID NO: 26820
  REGION 1..584: note = hemagglutinin__InfluenzaB__AFN54709

SEQ ID NO: 26832 - protein, 584 aa, synthetic construct; identical to SEQ ID NO: 26820
  REGION 1..584: note = hemagglutinin__InfluenzaB__AFN54720

SEQ ID NO: 26833 - protein, 584 aa, synthetic construct; identical to SEQ ID NO: 26820
  REGION 1..584: note = hemagglutinin__InfluenzaB__AFN54731

SEQ ID NO: 26834 - protein, 584 aa, synthetic construct; identical to SEQ ID NO: 26820
  REGION 1..584: note = hemagglutinin__InfluenzaB__AFN54742

SEQ ID NO: 26835 - protein, 584 aa, synthetic construct; identical to SEQ ID NO: 26820
  REGION 1..584: note = hemagglutinin__InfluenzaB__AFN54753

SEQ ID NO: 26836 - protein, 584 aa, synthetic construct; identical to SEQ ID NO: 26820
  REGION 1..584: note = hemagglutinin__InfluenzaB__AFN54764

SEQ ID NO: 26837 - protein, 584 aa, synthetic construct; identical to SEQ ID NO: 26820
  REGION 1..584: note = hemagglutinin__InfluenzaB__AFN54775

SEQ ID NO: 26838 - protein, 584 aa, synthetic construct; identical to SEQ ID NO: 26820
  REGION 1..584: note = hemagglutinin__InfluenzaB__AFN54786

SEQ ID NO: 26839 - protein, 584 aa, synthetic construct; identical to SEQ ID NO: 26820
  REGION 1..584: note = hemagglutinin__InfluenzaB__AFN54797

SEQ ID NO: 26840 - protein, 584 aa, synthetic construct; identical to SEQ ID NO: 26820
  REGION 1..584: note = hemagglutinin__InfluenzaB__AFN54808

SEQ ID NO: 26841 - protein, 584 aa, synthetic construct; identical to SEQ ID NO: 26567
  REGION 1..584: note = hemagglutinin__InfluenzaB__AFN54819

SEQ ID NO: 26842 - protein, 584 aa, synthetic construct; identical to SEQ ID NO: 26820
  REGION 1..584: note = hemagglutinin__InfluenzaB__AFN54830

SEQ ID NO: 26843 - protein, 584 aa, synthetic construct; identical to SEQ ID NO: 26820
  REGION 1..584: note = hemagglutinin__InfluenzaB__AFN54841

SEQ ID NO: 26844 - protein, 584 aa, synthetic construct; identical to SEQ ID NO: 26820
  REGION 1..584: note = hemagglutinin__InfluenzaB__AFN54852

SEQ ID NO: 26845 - protein, 584 aa, synthetic construct; identical to SEQ ID NO: 26820
  REGION 1..584: note = hemagglutinin__InfluenzaB__AFN54863

SEQ ID NO: 26846 - protein, 585 aa, synthetic construct
  REGION 1..585: note = hemagglutinin__InfluenzaB__AFU34595
MKAIIVLLMVVTSNADRICTGITSSNSPHVVKTATQGEVNVTGVIPLTTTPTKSHFANLKGTETRGKLCPKCPNCTDLDVALGRPKCTGKIPSARVSILHEVRPVTSGCFPIMHDRTKIRQLPNLLRGYEHIRLSTHNVINAENAPGGPYKIGTSGSCPNVTNGNGFFATMAWAVPKNDKNKTATNPLTIEVPYICTEGEDQITVWGFHSDNETQMAKLYRDSKPQKFTSSANGVTTHYVSQIGGFPNQTEDGGLPQSGRIVVDYMVQKSGKTGTITYQRGILLPQKVWCASGRSKVIKGSLPLIGEADCLHEKYGGLNKSKPYYTGEHAKAIGNCPIWVKTPLKLANGTKYRPPTKLLKERGFFGAIAGFLEGGWEGMIAGWHGYTSHGAHGVAVAADLKSTQEAINKITKNLNSLSELEVKNLQRLSGAMDELHNEILELDEKVDDLRADTISSQIELAVLLSNEGIINSEDEHLLALERKLKKMLGPSAVEIGNGCFETKHKCNQTCLDRIAAGTFDAGEFSLPTFDSLNITAASLNDDGLDNHTILLYYSTAASSLAVTLMIAIFVVYMVSRDNVSCSICL

SEQ ID NO: 26847 - protein, 585 aa, synthetic construct
  REGION 1..585: note = hemagglutinin__InfluenzaB__AFU34606
MKAIIVLLMVVTSNADRICTGITSSNSPHVVKTATQGEVNVTGVIPLTTTPTKSHFANLKGTETRGKLCPKCPNCTDLDVALDRPKCTGKIPSARVSILHEVRLVTSGCFPIMHDRTKIRQLPNLLRGYEHIRLSTHNVINAENAPGGPYKIGTSGSCPNVTNGNGFFATMAWAVPKNDKNKTATNPLTIEVPYICTEGEDQITVWGFHSDDETQMAKLYGDSKPQKFTSSANGVTTHYVSQIGGFPNQTEDGGLPQSGRIVVDYMVQKSGKTGTITYQRGILLPQKVWCASGRSKVIKGSLPLIGEADCLHEKYGGLNKSKPYYTGEHAKAIGNCPIWVKTPLKLANGTKYRPPAKLLKERGFFGAIAGFLEGGWEGMIAGWHGYTSHGAHGVAVAADLKSTQEAINKITKNLNSLSELEVKNLQRLSGAMDELHNEILELDEKVDDLRADTISSQIELAVLLSNEGIINSEDEHLLALERKLKKMLGPSAVEIGNGCFETKHKCNQTCLDRIAAGTFDAGEFSLPTFDSLNITAASLNDDGLDNHTILLYYSTAASSLAVTLMIAIFVVYMVSRDNVSCSICL

SEQ ID NO: 26848 - protein, 585 aa, synthetic construct; identical to SEQ ID NO: 26756
  REGION 1..585: note = hemagglutinin__InfluenzaB__AFU34617

SEQ ID NO: 26849 - protein, 585 aa, synthetic construct
  REGION 1..585: note = hemagglutinin__InfluenzaB__AFU34628
MKAIIVLLMVVTSNADRICTGITSSNSPHVVKTATQGEVNVTGVIPLTTTPTKSHFANLKGTETRGKLCPKCPNCTDLDVALGRPKCTGKIPSARVSILHEVRPVTSGCFPIMHDRTKIRQLPNLLRGYEHIRLSTHNVINAENAPGGPYKIGTSGSCPNVTNGNGFFATMAWAVPKNDKNKTATNPLTIEVPYICTEGEDQITVWGFHSDDETQMAKLYGDSKPQKFTSSANGVTTHYVSQIGGFPNQTEDGGLPQSGRIVVDYMVQKSGKTGTITYQRGILLPQKVWCASGRSKVIKGSLPLIGEADCLHEKYGGLNKSKPYYTGEHAKAIGNCPIWVKTPLKLANGTKYRPPAKLLKERGFLGAIAGFLEGGWKGMIAGWHGYTSHGAHGVAVAADLKSTQEAINKITKNLNSLSELEVKNLQRLSGAMDELHNEILELDEKVDDLRADTISSQIELAVLLSNEGIINSEDEHLLALERKLKKMLGPSAVEIGNGCFETKHKCNQTCLDRIAAGTFDAGEFSLPTFDSLNITAASLNDDGLDNHTILLYYSTAASSLAVTLMIAIFVVYMVSRDNVSCSICL

SEQ ID NO: 26850 - protein, 585 aa, synthetic construct; identical to SEQ ID NO: 26608
  REGION 1..585: note = hemagglutinin__InfluenzaB__AFU34639

SEQ ID NO: 26851 - protein, 585 aa, synthetic construct; identical to SEQ ID NO: 26645
  REGION 1..585: note = hemagglutinin__InfluenzaB__AGB08299

SEQ ID NO: 26852 - protein, 585 aa, synthetic construct; identical to SEQ ID NO: 26645
  REGION 1..585: note = hemagglutinin__InfluenzaB__AGB08300

SEQ ID NO: 26853 - protein, 584 aa, synthetic construct
  REGION 1..584: note = hemagglutinin__InfluenzaB__AGB97259
MKAIIVLLMVVTSNADRICTGITSSNSPHVVKTATQGEVNVTGVIPLTTTPTKSYFANLKGTRTRGKLCPDCLNCTDLDVALGRPMCVGTTPSAKASILHEVRPVTSGCFPIMHDRTKIRQLPNLLRGYEKIRLSTQNVIDAEKAPGGPYRLGTSGSCPNATSKIGFFATMAWAVPKDNYKNATNPLTVEVPYICTEGEDQITVWGFHSDNKTQMKSLYGDSNPQKFTSSANGVTTHYVSQIGDFPDQTEDGGLPQSGRIVVDYMMQKPGKTGTIVYQRGVLLPQKVWCASGRSKVIKGSLPLIGEADCLHEEYGGLNKSKPYYTGKHAKAIGNCPIWVKTPLKLANGTKYRPPAKLLKERGFFGAIAGFLEGGWEGMIAGWHGYTSHGAHGVAVAADLKSTQEAINKITKNLNSLSELEVKNLQRLSGAMDELHNEILELDEKVDDLRADTISSQIELAVLLSNEGIINSEDEHLLALERKLKKMLGPSAVDIGNGCFETKHKCNQTCLDRIAAGTFNAGEFSLPTFDSLNITAASLNDDGLDNHTILLYYSTAASSLAVTLMLAIFIVYIVSRDNVSCSICL

SEQ ID NO: 26854 - protein, 584 aa, synthetic construct
  REGION 1..584: note = hemagglutinin__InfluenzaB__AGB97265
MKAIIVLLMVVTSNADRICTGITSSNSPHVVKTATQGEVNVTGVIPLTTTPTKSYFANLKGTKTRGKLCPDCLNCTDLDVALGRPMCVGTTPSAKASILHEVRPVTSGCFPIMHDRTKIRQLANLLRGYENIRLSTQNVIDAEKAPGGPYRLGTSGSCPNATSKSGFFATMAWAVPKDNNKNATNPLTVEVPYICAEGEDQITVWGFHSDNKTQMKNLYGDSNPQKFTSSANGVTTHYVSQIGGFPDQTEDGGLPQSGRIVVDYMMQKPGKTGTIVYQRGVLLPQKVWCASGRSKVIKGSLPLIGEADCLHEKYGGLNKSKPYYTGEHAKAIGNCPIWVKTPLKLANGTKYRPPAKLLKERGFFGAIAGFLEGGWEGMIAGWHGYTSHGAHGVAVAADLKSTQEAINKITKNLNSLSELEVKNLQRLSGAMDELHNEILELDEKVDDLRADTISSQIELAVLLSNEGIINSEDEHLLALERKLKKMLGPSAVDIGNGCFETKHKCNQTCLDRIAAGTFNAGEFSLPTFDSLNITAASLNDDGLDNHTILLYYSTAASSLAVTLMLAIFIVYMVSRDNVSCSICL

SEQ ID NO: 26855 - protein, 584 aa, synthetic construct; identical to SEQ ID NO: 26854
  REGION 1..584: note = hemagglutinin__InfluenzaB__AGF44878

SEQ ID NO: 26856 - protein, 584 aa, synthetic construct; identical to SEQ ID NO: 26854
  REGION 1..584: note = hemagglutinin__InfluenzaB__AGF44879

SEQ ID NO: 26857 - protein, 584 aa, synthetic construct
  REGION 1..584: note = hemagglutinin__InfluenzaB__AGF44881
MKAIIVLLMVVTSNADRICTGITSSNSPHVVKTATQGEVNVTGVIPLTTTPTKSYFANLKGTKTRGKLCPDCLNCTDLDVALGRPMCVGTTPSAKASILHEVRPVTSGCFPIMHDRTKIRQLANLLRGYENIRLSTQNVIDAEKAPGGPYRLGTSGSCPNATSKSGFFATMAWAVPKDNNKNATNPLTVEVPYICAEGEDQIAVWGFHSDNKTQMKNLYGDSNPQKFTSSANGVTTHYVSQIGGFPDQTEDGGLPQSGRIVVDYMMQKPGKTGTIVYQRGVLLPQKVWCASGRSKVIKGSLPLIGEADCLHEKYGGLNKSKPYYTGEHAKAIGNCPIWVKTPLKLANGTKYRPPAKLLKERGFFGAIAGFLEGGWEGMIAGWHGYTSHGAHGVAVAADLKSTQEAINKITKNLNSLSELEVKNLQRLSGAMDELHNEILELDEKVDDLRADTISSQIELAVLLSNEGIINSEDEHLLALERKLKKMLGPSAVDIGNGCFETKHKCNQTCLDRIAAGTFNAGEFSLPTFDSLNITAASLNDDGLDNHTILLYYSTAASSLAVILMLAIFIVYMVSRDNVSCSICL

SEQ ID NO: 26858 - protein, 584 aa, synthetic construct
  REGION 1..584: note = hemagglutinin__InfluenzaB__AGF44882
MKAIIVLLMVVTSNADRICTGITSSNSPHVVKTATQGEVNVTGVIPLTTTPTKSYFANLKGTKTRGKLCPDCLNCTDLDVALGRPMCVGTTPSAKASILHEVRPVTSGCFPIMHDRTKIRQLANLLRGYENIRLSTQNVIDAEKAPGGPYRLGTSGSCPNATSKSGFFATMAWAVPKDNNKNATNPLTVEVPYICAEGEDQITVWGFHSDNKTQMKNLYGDSNPQKFTSSANGVTTHYVSQIGGFPDQTEDGGLPQSGRIVVDYMMQKPGKTGTIVYQRGVLLPQKVWCASGKSKVIKGSLPLIGEADCLHEKYGGLNKSKPYYTGEHAKAIGNCPIWVKTPLKLANGTKYRPPAKLLKERGFFGAIAGFLEGGWEGMIAGWHGYTSHGAHGVAVAADLKSTQEAINKITKNLNSLSELEVKNLQRLSGAMDELHNEILELDEKVDDLRADTISSQIELAVLLSNEGIINSEDEHLLALERKLKKMLGPSAVDIGNGCFETKHKCNQTCLDRIAAGTFNAGEFSLPTFDSLNITAASLNDDGLDNHTILLYYSTAASSLAVTLMLAIFIVYMVSRDNVSCSICL

SEQ ID NO: 26859 - protein, 584 aa, synthetic construct; identical to SEQ ID NO: 26854
  REGION 1..584: note = hemagglutinin__InfluenzaB__AGF44883

SEQ ID NO: 26860 - protein, 584 aa, synthetic construct; identical to SEQ ID NO: 26854
  REGION 1..584: note = hemagglutinin__InfluenzaB__AGF44884

SEQ ID NO: 26861 - protein, 584 aa, synthetic construct; identical to SEQ ID NO: 26854
  REGION 1..584: note = hemagglutinin__InfluenzaB__AGF44886

SEQ ID NO: 26862 - protein, 584 aa, synthetic construct; identical to SEQ ID NO: 26854
  REGION 1..584: note = hemagglutinin__InfluenzaB__AGF44887

SEQ ID NO: 26863 - protein, 584 aa, synthetic construct; identical to SEQ ID NO: 26854
  REGION 1..584: note = hemagglutinin__InfluenzaB__AGF44888

SEQ ID NO: 26864 - protein, 584 aa, synthetic construct
  REGION 1..584: note = hemagglutinin__InfluenzaB__AGL09834
MKAIIVLLMVVTSNADRICTGITSSNSPHVVKTATQGEVNVTGVIPLTTTPTKSYFANLKGTKTRGKLCPDCLNCTDLDVALGRPMCVGTTPSAKASILHEVRPVTSGCFPIMHDRTKIRQLANLLRGYENIRLSTQNVIDAEKAPGGPYRLGTSGSCPNATSKSGFFATMAWAVPKDNNKNATNPLTVEVPYICAEGEDQIAVWGFHSDNKTQMKNLYGDSNPQKFTSSANGVTTHYVSQIGGFPDQTEDGGLPQSGRIVVDYMMQKPGKTGTIVYQRGVLLPQKVWCASGRSKVIKGSLPLIGEADCLHEKYGGLNKSKPYYTGEHAKAIGNCPIWVKTPLKLANGTKYRPPAKLLKERGFFGAIAGFLEGGWEGMIAGWHGYTSHGAHGVAVAADLKSTQEAINKITKNLNSLSELEVKNLQRLSGAMDELHNEILELDEKVDDLRADTISSQIELAVLLSNEGIINSEDEHLLALERKLKKMLGPSAVDIGNGCFETKHKCNQTCLDRIAAGTFNAGDFSLPTFDSLNITAASLNDDGLDNHTILLYYSTAASSLAVTLMLAIFIVYMVSRDNVSCSICL

SEQ ID NO: 26865 - protein, 584 aa, synthetic construct; identical to SEQ ID NO: 26854
  REGION 1..584: note = hemagglutinin__InfluenzaB__AGL09835

SEQ ID NO: 26866 - protein, 584 aa, synthetic construct
  REGION 1..584: note = hemagglutinin__InfluenzaB__AGL09836
MKAIIVLLMVVTSNADRICTGITSSNSPHVVKTATQGEVNVTGVIPLTTTPTKSYFANLKGTKTRGKLCPDCLNCTDLDVALGRPMCVGTTPSAKASILHEVRPVTSGCFPIMHDRTKIRQLANLLRGYENIRLSTQNVIDAKKAPGGPYRLGTSGSCPNATSKSGFFATMAWAVPEDNNKNATNPLTVEVPYICAEGEDQITVWGFHSDNKTQMKNLYGDSNPQKFTSSANGVTTHYVSQIGGFPDQTEDGGLPQSGRIVVDYMMQKPGKTGTIVYQRGVLLPQKVWCASGRSKVIKGSLPLIGEADCLHEKYGGLNKSKPYYTGEHAKAIGNCPIWVKTPLKLANGTKYRPPAKLLKERGFFGAIAGFLEGGWEGMIAGWHGYTSHGAHGVAVAADLKSTQEAINKITKNLNSLSELEVKNLQRLSGAMDELHNEILELDEKVDDLRADTISSQIELAVLLSNEGIINSEDEHLLALERKLKKMLGPSAVDIGNGCFETKHKCNQTCLDRIAAGTFNAGEFSLPTFDSLNITAASLNDDGLDNHTILLYYSTAASSLAVTLMLAIFIVYMVSRDNVSCSICL

SEQ ID NO: 26867 - protein, 584 aa, synthetic construct; identical to SEQ ID NO: 26854
  REGION 1..584: note = hemagglutinin__InfluenzaB__AGL09837

SEQ ID NO: 26868 - protein, 584 aa, synthetic construct; identical to SEQ ID NO: 26854
  REGION 1..584: note = hemagglutinin__InfluenzaB__AGL09838

SEQ ID NO: 26869 - protein, 584 aa, synthetic construct; identical to SEQ ID NO: 26854
  REGION 1..584: note = hemagglutinin__InfluenzaB__AGL09839

SEQ ID NO: 26870 - protein, 584 aa, synthetic construct; identical to SEQ ID NO: 26854
  REGION 1..584: note = hemagglutinin__InfluenzaB__AGL09840

SEQ ID NO: 26871 - protein, 584 aa, synthetic construct; identical to SEQ ID NO: 26854
  REGION 1..584: note = hemagglutinin__InfluenzaB__AGL09841

SEQ ID NO: 26872 - protein, 585 aa, synthetic construct
  REGION 1..585: note = hemagglutinin__InfluenzaB__AGL09842
MKAIIVLLMVVTSNADRICTGITSSNSPHVVKTATQGEVNVTGVIPLTTTPTKSHFANLKGTETRGKLCPKCLNCTDLDVALGRPKCTGKIPSARVSILHEVRPVTSGCFPIMHDRTKIRQLPNLLRGYEHIRLSTHNVINAENAPGGPYKIGTSGSCPNVTNGNGFFATMAWAVPKNDKNKTETNPLTIEVPYICTEGEDQITVWGFHSDNETQMAKLYGDSKPQKFTSSANGVTTHYVSQIGGFPNQTEDGGLPQSGRIVVDYMVQKSGKTGTITYQRGILLPQKVWCASGRSKVIKGSLPLIGEADCLHEKYGGLNKSKPYYTGEHAKAIGNCPIWVKTPLKLANGTKYRPPAKLLKERGFFGAIAGFLEGGWEGMIAGWHGYTSHGAHGVAVAADLKSTQEAINKITKNLNSLSELEVKNLQRLSGAMDELHNEILELDEKVDDLRADTISSQIELAVLLSNEGIINSEDEHLLALERKLKKMLGPSAVEIGNGCFETKHKCNQTCLDRIAAGTFDAGEFSLPTFDSLNITAASLNDDGLDNHTILLYYSTAASSLAVTLMIAIFVVYMVSRDNVSCSICL

SEQ ID NO: 26873 - protein, 584 aa, synthetic construct; identical to SEQ ID NO: 26854
  REGION 1..584: note = hemagglutinin__InfluenzaB__AGL09843

SEQ ID NO: 26874 - protein, 584 aa, synthetic construct
  REGION 1..584: note = hemagglutinin__InfluenzaB__AGL09844
MKAIIVLLMVVTSNADRICTGITSSNSPHVVKTATQGEVNVTGVIPLTTTPTKSYFANLKGTKTRGKLCPDCLNCTDLDVALGRPMCVGTTPSAKASILHEVRPVTSGCFPIMHDRTKIRQLANLLRGYENIRLSTQNVIDAEKAPGGPYRLGTSGSCPNATSKSGFFATMAWAVPKDNNKNATNPLTVEVPYICAEGEDQITVWGFHSDNKTQMKNLYGDSNPQKFTSSANGVTTHYVSQIGGFPDQKEDGGLPQSGRIVVDYMMQKPGKTGTIVYQRGVLLPQKVWCASGRSKVIKGSLPLIGEADCLHEKYGGLNKSKPYYTGEHAKAIGNCPIWVKTPLKLANGTKYRPPAKLLKERGFFGAIAGFLEGGWEGMIAGWHGYTSHGAHGVAVAADLKSTQEAINKITKNLNSLSELEVKNLQRLSGAMDELHNEILELDEKVDDLRADTISSQIELAVLLSNEGIINSEDEHLLALERKLKKMLGPSAVDIGNGCFETKHKCNQTCLDRIAAGTFNAGEFSLPTFDSLNITAASLNDDGLDNHTILLYYSTAASSLAVTLMLAIFIVYMVSRDNVSCSICL

SEQ ID NO: 26875 - protein, 584 aa, synthetic construct; identical to SEQ ID NO: 26854
  REGION 1..584: note = hemagglutinin__InfluenzaB__AGL09845

SEQ ID NO: 26876 - protein, 584 aa, synthetic construct; identical to SEQ ID NO: 26854
  REGION 1..584: note = hemagglutinin__InfluenzaB__AGL09846

SEQ ID NO: 26877 - protein, 584 aa, synthetic construct
  REGION 1..584: note = hemagglutinin__InfluenzaB__AGL09847
MKAIIVLLMVVTSNADRICTGITSSNSPHVVKTATQGEVNVTGVIPLTTTPTKSYFANLKGTKTRGKLCPDCLNCTDLDVALGRPMCVGTTPSAKASILHEVRPVTSGCFPIMHDRTKIRQLANLLRGYENIRLSTQNVIDAEKAPGGPYRLGTSGSCPNATSKSGFFATMAWAVPKDNNKNATNPLTVEVPYICAEGEDQIAIWGFHSDNKTQMKNLYGDSNPQKFTSSANGVTTHYVSQIGGFPDQTEDGGLPQSGRIVVDYMMQKPGKTGTIVYQRGVLLPQKVWCASGRSKVIKGSLPLIGEADCLHEKYGGLNKSKPYYTGEHAKAIGNCPIWVKTPLKLANGTKYRPPAKLLKERGFFGAIAGFLEGGWEGMIAGWHGYTSHGAHGVAVAADLKSTQEAINKITKNLNSLSELEVKNLQRLSGAMDELHNEILELDEKVDDLRADTISSQIELAVLLSNEGIINSEDEHLLALERKLKKMLGPSAVDIGNGCFETKHKCNQTCLDRIAAGTFNAGEFSLPTFDSLNITAASLNDDGLDNHTILLYYSTAASSLAVTLMLAIFIVYMVSRDNVSCSICL

SEQ ID NO: 26878 - protein, 584 aa, synthetic construct
  REGION 1..584: note = hemagglutinin__InfluenzaB__AGL09849
MKAIIVLLMVVTSNADRICTGITSSNSPHVVKTATQGEVNVTGVIPLTTTPTKSYFANLKGTKTRGKLCPDCLNCTDLDVALGRPMCVGTTPSAKASILHEVRPVTSGCFPIMHDRTKIRQLANLLRGYENIRLSTQNVINAEKAPGGPYRLGTSGSCPNATSKSGFFATMAWAVPKDNNKNATNPLTVEVPYICAEGEDQITVWGFHSDNKTQMKNLYGDSNPQKFTSSANGVTTHYVSQIGGFPDQTEDGGLPQSGRIVVDYMMQKPGKTGTIVYQRGVLLPQKVWCASGRSKVIKGSLPLIGEADCLHEKYGGLNKSKPYYTGEHAKAIGNCPIWVKTPLKLANGTKYRPPAKLLKERGFFGAIAGFLEGGWEGMIAGWHGYTSHGAHGVAVAADLKSTQEAINKITKNLNSLSELEVKNLQRLSGAMDELHNEILELDEKVDDLRADTISSQIELAVLLSNEGIINSEDEHLLALERKLKKMLGPSAVDIGNGCFETKHKCNQTCLDRIAAGTFNAGEFSLPTFDSLNITAASLNDDGLDNHTILLYYSTAASSLAVTLMLAIFIVYMVSRDNVSCSICL

SEQ ID NO: 26879 - protein, 584 aa, synthetic construct; identical to SEQ ID NO: 26854
  REGION 1..584: note = hemagglutinin__InfluenzaB__AGL09850

SEQ ID NO: 26880 - protein, 584 aa, synthetic construct; identical to SEQ ID NO: 26854
  REGION 1..584: note = hemagglutinin__InfluenzaB__AGL09851

SEQ ID NO: 26881 - protein, 585 aa, synthetic construct; identical to SEQ ID NO: 26645
  REGION 1..585: note = hemagglutinin__InfluenzaB__AGL09852

SEQ ID NO: 26882 - protein, 584 aa, synthetic construct; identical to SEQ ID NO: 26854
  REGION 1..584: note = hemagglutinin__InfluenzaB__AGL09853

SEQ ID NO: 26883 - protein, 584 aa, synthetic construct; identical to SEQ ID NO: 26854
  REGION 1..584: note = hemagglutinin__InfluenzaB__AGL09854

SEQ ID NO: 26884 - protein, 585 aa, synthetic construct
  REGION 1..585: note = hemagglutinin__InfluenzaB__AGL09855
MKAIIVLLMVVTSNADRICTGITSSNSPHVVKTATQGEVNVTGVIPLTTTPTKSHFANLKGTETRGKLCPKCLNCTDLDVALGRPKCTGKIPSARVSILHEVRPVTSGCFPIMHDRTKIRQLPNLLRGYEHIRLSTHNVINAENAPGGPYKIGTSGSCPNVTNGNGFFATMAWAVPKNDKNKTETNPLTIEVPYICTEEEDQITVWGFHSDNETQMAKLYGDSKPQKFTSSANGVTTHYVSQIGDFPNQTEDGGLPQSGRIVVDYMVQKSGKTGTITYQRGILLPQKVWCASGRSKVIKGSLPLIGEADCLHEKYGGLNKSKPYYTGEHAKAIGNCPIWVKTPLKLANGTKYRPPAKLLKERGFFGAIAGFLEGGWEGMIAGWHGYTSHGAHGVAVAADLKSTQEAINKITKNLNSLSELEVKNLQRLSGAMDELHNEILELDEKVDDLRADTISSQIELAVLLSNEGIINSEDEHLLALERKLKKMLGPSAVEIGNGCFETKHKCNQTCLDRIAAGTFDAGEFSLPTFDSLNITAASLNDDGLDNHTILLYYSTAASSLAVTLMIAIFVVYMVSRDNVSCSICL

SEQ ID NO: 26885 - protein, 584 aa, synthetic construct; identical to SEQ ID NO: 26854
  REGION 1..584: note = hemagglutinin__InfluenzaB__AGL09856

SEQ ID NO: 26886 - protein, 584 aa, synthetic construct
  REGION 1..584: note = hemagglutinin__InfluenzaB__AGL09857
MKAIIVLLMVVTSNADRICTGITSSNSPHVVKTATQGEVNVTGVIPLTTTPTKSYFANLKGTKTRGKLCPDCLNCTDLDVALGRPMCVGTTPSAKASILHEVRPVTSGCFPIMHDRTKIRQLANLLRGYENIRLSTQKVIDAEKAPGGPYRLGTSGSCPNATSKSGFFATMAWAVPKDNNKNATNPLTVEVPYICAEGEDQITVWGFHSDNKTQMKNLYGDSNPQKFTSSANGVTTHYVSQIGGFPDQTEDGGLPQSGRIVVDYMIQKPGKTGTIVYQRGVLLPQKVWCASGRSKVIKGSLPLIGEADCLHEKYGGLNKSKPYYTGEHAKAIGNCPIWVKTPLKLANGTKYRPPAKLLKERGFFGAIAGFLEGGWEGMIAGWHGYTSHGAHGVAVAADLKSTQEAINKITKNLNSLSELEVKNLQRLSGAMDELHNEILELDEKVDDLRADTISSQIELAVLLSNEGIINSEDEHLLALERKLKKMLGPSAVDIGNGCFETKHKCNQTCLDRIAAGTFNAGEFSLPTFDSLNITAASLNDDGLDNHTILLYYSTAASSLAVTLMLAIFIVYMVSRDNVSCSICL

SEQ ID NO: 26887 - protein, 585 aa, synthetic construct
  REGION 1..585: note = hemagglutinin__InfluenzaB__AGL09859
MKAIIVLLMVVTSNADRICTGITSSNSPHVVKTATQGEVNVTGVIPLTTTPTKSHFANLKGTETRGKLCPKCLNCTDLDVALGRPKCTGKIPSARVSILHEVRPVTSGCFPIMHDRTKIRQLPNLLRGYEHIRLSTHNVINAEDAPGGPYKIGTSGSCPNVTNGNGFFATMAWAVPKNDKNKTATNPLTIEVPYICTEGEDQITVWGFHSDNETQMAKLYGDSKPQKFTSSANGVTTHYVSQIGGFPNQTEDGGLPQSGRIVVDYMVQKSGKTGTITYQRGILLPQKVWCASGRSKVIKGSLPLIGEADCLHEKYGGLNKSKPYYTGEHAKAIGNCPIWVKTPLKLANGTKYRPPAKLLKERGFFGAIAGFLEGGWEGMIAGWHGYTSHGAHGVAVAADLKSTQEAINKITKNLNSLSELEVKNLQRLSGAMDELHNEILELDEKVDDLRADTISSQIELAVLLSNEGIINSEDEHLLALERKLKKMLGPSAVEIGNGCFETKHKCNQTCLDRIAAGTFDAGEFSLPTFDSLNITAASLNDDGLDNHTILLYYSTAASSLAVTLMIAIFVVYMVSRDNVSCSICL

SEQ ID NO: 26888 - protein, 585 aa, synthetic construct; identical to SEQ ID NO: 26887
  REGION 1..585: note = hemagglutinin__InfluenzaB__AGL09860

SEQ ID NO: 26889 - protein, 585 aa, synthetic construct; identical to SEQ ID NO: 26887
  REGION 1..585: note = hemagglutinin__InfluenzaB__AGL09861

SEQ ID NO: 26890 - protein, 585 aa, synthetic construct; identical to SEQ ID NO: 26887
  REGION 1..585: note = hemagglutinin__InfluenzaB__AGL09862

SEQ ID NO: 26891 - protein, 585 aa, synthetic construct; identical to SEQ ID NO: 26887
  REGION 1..585: note = hemagglutinin__InfluenzaB__AGL09863

SEQ ID NO: 26892 - protein, 584 aa, synthetic construct; identical to SEQ ID NO: 26854
  REGION 1..584: note = hemagglutinin__InfluenzaB__AGL09864

SEQ ID NO: 26893 - protein, 584 aa, synthetic construct; identical to SEQ ID NO: 26854
  REGION 1..584: note = hemagglutinin__InfluenzaB__AGL09866

SEQ ID NO: 26894 - protein, 584 aa, synthetic construct; identical to SEQ ID NO: 26854
  REGION 1..584: note = hemagglutinin__InfluenzaB__AGL09867

SEQ ID NO: 26895 - protein, 584 aa, synthetic construct; identical to SEQ ID NO: 26854
  REGION 1..584: note = hemagglutinin__InfluenzaB__AGL09868

SEQ ID NO: 26896 - protein, 584 aa, synthetic construct
  REGION 1..584: note = hemagglutinin__InfluenzaB__AGL09869
MKAIIVLLMVVTSNADRICTGITSSNSPHVVKTATQGEVNVTGVIPLTTTPTKSYFANLKGTKTRGKLCPDCLNCTDLDVALGRPMCVGTTPSAKASILHEVRPVTSGCFPIMHDRTKIRQLANLLRGYENIRLSTQNVIDAEKAPGGPYRLGTSGSCPNTTSKSGFFATMAWAVPKDNNKNATNPLTVEVPYICAEGEDQITVWGFHSDNKTQMKNLYGDSNPQKFTSSANGVTTHYVSQIGGFPDQTEDGGLPQSGRIVVDYMMQKPGKTGTIVYQRGVLLPQKVWCASGRSKVIKGSLPLIGEADCLHEKYGGLNKSKPYYTGEHAKAIGNCPIWVKTPLKLANGTKYRPPAKLLKERGFFGAIAGFLEGGWEGMIAGWHGYTSHGAHGVAVAADLKSTQEAINKITKNLNSLSELEVKNLQRLSGAMDELHNEILELDEKVDDLRADTISSQIELAVLLSNEGIINSEDEHLLALERKLKKMLGPSAVDIGNGCFETKHKCNQTCLDRIAAGTFNAGEFSLPTFDSLNITAASLNDDGLDNHTILLYYSTAASSLAVTLMLAIFIVYMVSRDNVSCSICL

SEQ ID NO: 26897 - protein, 584 aa, synthetic construct
  REGION 1..584: note = hemagglutinin__InfluenzaB__AGL09870
MKAIIVLLMVVTSNADRICTGITSSNSPHVVKTATQGEVNVTGVIPLTTTPTKSYFANLKGTKTRGKLCPDCLNCTDLDVALGRPMCVGTTPSAKASILHEVRPVTSGCFPIMHDRTKIRQLANLLRGYENIRLSTQNVIDAEKAPGGPYRLGTSGSCPNATSKSGFFATMAWAVPKDNNKNATNPLTVEVPYICAEGEDQITVWGFHSDNKTQMKNLYGDSNPQRFTSSANGVTTHYVSQIGGFPDQTEDGGLPQSGRIVVDYMMQKPGKTGTIVYQRGVLLPQKVWCASGRSKVIKGSLPLIGEADCLHEKYGGLNKSKPYYTGEHAKAIGNCPIWVKTPLKLANGTKYRPPAKLLKERGFFGAIAGFLEGGWEGMIAGWHGYTSHGAHGVAVAADLKSTQEAINKITKNLNSLSELEVKNLQRLSGAMDELHNEILELDEKVDDLRADTISSQIELAVLLSNEGIINSEDEHLLALERKLKKMLGPSAVDIGNGCFETKHKCNQTCLDRIAAGTFNAGEFSLPTFDSLNITAASLNDDGLDNHTILLYYSTAASSLAVTLMLAIFIVYMVSRDNVSCSICL

SEQ ID NO: 26898 - protein, 584 aa, synthetic construct; identical to SEQ ID NO: 26854
  REGION 1..584: note = hemagglutinin__InfluenzaB__AGL09871

SEQ ID NO: 26899 - protein, 584 aa, synthetic construct
  REGION 1..584: note = hemagglutinin__InfluenzaB__AGL09872
MKAIIVLLMVVTSNADRICTGITSSNSPHVVKTATQGEVNVTGVIPLTTTPTKSYFANLKGTKTRGKLCPDCLNCTDLDVALGRPMCVGTTPSAKASILHEVRPVTSGCFPIMHDRTKIRQLANLLRGYENIRLSTQNVIDAEKAPGGPYRLGTSGSCPNATSKSGFFATMAWAVPKDNNKNATNPLTVEVPYICAEGEDQIAVWGFHSDNKTQMKNLYGDSNPQKFTSSANGVTTHYVSQIGGFPDQTEDGGLPQSGRIVVDYMMQKPGKTGTIVYQRGVLLPQKVWCASGRSKVIKGSLPLIGEADCLHEKYGGLNKSKPYYTGEHAKAIGNCPIWVKTPLKLANGTKYRPPAKLLKERGFFGAIAGFLEGGWEGMIAGWHGYTSHGAHGVAVAADLKSTQEAINKITKNLNSLSELEVKNLQRLSGAMDELHNEILELDEKVDDLRADTISSQIELAVLLSNEGIINSEDEHLLALERKLKKMLGPSAVDIGNGCFETKHKCNQTCLDRIAAGTFNAGEFSLPTFDSLNITAASLNDDGLDNHTILLYYSTAASSLAVTLMLAIFIVYMVSRDNVSCSICL

SEQ ID NO: 26900 - protein, 584 aa, synthetic construct; identical to SEQ ID NO: 26854
  REGION 1..584: note = hemagglutinin__InfluenzaB__AGL09873

SEQ ID NO: 26901 - protein, 585 aa, synthetic construct; identical to SEQ ID NO: 26887
  REGION 1..585: note = hemagglutinin__InfluenzaB__AGL09874

SEQ ID NO: 26902 - protein, 585 aa, synthetic construct; identical to SEQ ID NO: 26872
  REGION 1..585: note = hemagglutinin__InfluenzaB__AGO02695

SEQ ID NO: 26903 - protein, 584 aa, synthetic construct; identical to SEQ ID NO: 26854
  REGION 1..584: note = hemagglutinin__InfluenzaB__AGQ16249

SEQ ID NO: 26904 - protein, 585 aa, synthetic construct; identical to SEQ ID NO: 26887
  REGION 1..585: note = hemagglutinin__InfluenzaB__AGQ16250

SEQ ID NO: 26905 - protein, 585 aa, synthetic construct; identical to SEQ ID NO: 26887
  REGION 1..585: note = hemagglutinin__InfluenzaB__AGQ16251

SEQ ID NO: 26906 - protein, 584 aa, synthetic construct
  REGION 1..584: note = hemagglutinin__InfluenzaB__AGQ16252
MKAIIVLLMVVTSNADRICTGITSSNSPHVVKTATQGEVNVTGVIPLTTTPAKSYFANLKGTRTRGKLCPDCLNCTDLDVALGRPMCVGTTPSAKASILHEVRPVTSGCFPIMHDRTKIRQLPNLLRGYENIRLSTQNVIDAEKAPGGPYRLGTSGSCPNATSKIGFFATMAWAVPKDNYKNATNPLTVEVPYICKEGEDQITVWGFHSDNKTQMKNLYGDSNPQKFTSSANGVTTHYVSQIGDFPDQTEDGGLPQSGRIVVDYMMQKPGKTGTIVYQRGVLLPQKVWCASGRSKVIKGSLPLIGEADCLHEEYGGLNKSKPYYTGKHAKAIGNCPIWVKTPLKLANGTKYRPPAKLLKERGFFGAIAGFLEGGWEGMIAGWHGYTSHGAHGVAVAADLKSTQEAINKITKNLNSLSELEVKNLQRLSGAMDELHNEILELDEKVDDLRADTISSQIELAVLLSNEGIINSEDEHLLALERKLKKMLGPSAVDIGNGCFETKHKCNQTCLDRIAAGTFNAGEFSLPTFDSLNITAASLNDDGLDNHTILLYYSTAASSLAVTLMLAIFIVYMVSRDNVSCSICL

SEQ ID NO: 26907 - protein, 584 aa, synthetic construct; identical to SEQ ID NO: 26854
  REGION 1..584: note = hemagglutinin__InfluenzaB__AGQ16253

SEQ ID NO: 26908 - protein, 584 aa, synthetic construct
  REGION 1..584: note = hemagglutinin__InfluenzaB__AGQ16255
MKAIIVLLMVVTSNADRICTGITSSNSPHVVKTATQGEVNVTGVIPLTTTPTKSYFANLKGTKTRGKLCPDCLNCTDLDVALGRPMCVGTTPSAKASILHEVRPVTSGCFPIMHDRTKIRQLANLLRGYENIRLSTQNVIDAEKAPGGPYRLGTSGSCPNATSKSGFFATMAWAVPKDNNKNATNPLTVEVPYICAEGEDQITVWGFHSDNKTQMKNLYGDSNPQKFTSSANGITTHYVSQIGGFPDQTEDGGLPQSGRIVVDYMMQKPGKTGTIVYQRGVLLPQKVWCASGRSKVIKGSLPLIGEADCLHEKYGGLNKSKPYYTGEHAKAIGNCPIWVKTPLKLANGTKYRPPAKLLKERGFFGAIAGFLEGGWEGMIAGWHGYTSHGAHGVAVAADLKSTQEAINKITKNLNSLSELEVKNLQRLSGAMDELHNEILELDEKVDDLRADTISSQIELAVLLSNEGIINSEDEHLLALERKLKKMLGPSAVDIGNGCFETKHKCNQTCLDRIAAGTFNAGEFSLPTFDSLNITAASLNDDGLDNHIILLYYSTAASSLAVTLMLAIFIVYMVSRDNVSCSICL

SEQ ID NO: 26909 - protein, 584 aa, synthetic construct
  REGION 1..584: note = hemagglutinin__InfluenzaB__AGQ16256
MKAIIVLLMVVTSNADRICTGITSSNSPHVVKTVTQGEVNVTGVIPLTTTPTKSYFANLKGTKTRGKLCPDCLNCTDLDVALGRPMCVGTTPSAKASILHEVRPVTSGCFPIMHDRTKIRQLANLLRGYENIRLSTQNVIDAEKAPGGPYRLGTSGSCPNATSKSGFFATMAWAVPKDSNKNATNPLTVEVPYICAEGEDQITVWGFHSDNKTQMKNLYGDSNPQKFTSSANGVTTHYVSQIGGFPDQTEDGGLPQSGRIVVDYMMQKPGKTGTIVYQRGVLLPQKVWCASGRSKVIKGSLPLIGEADCLHEKYGGLNKSKPYYTGEHAKAIGNCPIWVKTPLKLANGTKYRPPAKLLKERGFFGAIAGFLEGGWEGMIAGWHGYTSHGAHGVAVAADLKSTQEAINKITKNLNSLSELEVKNLQRLSGAMDELHNEILELDEKVDDLRADTISSQIELAVLLSNEGIINSEDEHLLALERKLKKMLGPSAVDIGNGCFETKHKCNQTCLDRIAAGTFNAGEFSLPTFDSLNITAASLNDDGLDNHTILLYYSTAASSLAVTLMLAIFIVYMVSRDNVSCSICL

SEQ ID NO: 26910 - protein, 584 aa, synthetic construct; identical to SEQ ID NO: 26854
  REGION 1..584: note = hemagglutinin__InfluenzaB__AGQ16257

SEQ ID NO: 26911 - protein, 584 aa, synthetic construct; identical to SEQ ID NO: 26854
  REGION 1..584: note = hemagglutinin__InfluenzaB__AGQ16258

SEQ ID NO: 26912 - protein, 584 aa, synthetic construct; identical to SEQ ID NO: 26854
  REGION 1..584: note = hemagglutinin__InfluenzaB__AGQ16259

SEQ ID NO: 26913 - protein, 584 aa, synthetic construct
  REGION 1..584: note = hemagglutinin__InfluenzaB__AGQ16260
MKTIIVLLMVVTSNADRICTGITSSNSPHVVKTATQGEVNVTGVIPLTTTPTKSYFANLKGTKTRGKLCPDCLNCTDLDVALGRPMCVGTTPSAKASILHEVRPVTSGCFPIMHDRTKIRQLANLLRGYENIRLSSQNVIDAEKAPGGPYRLGTSGSCPNATSKSGFFATMAWAVPKDNNKNATNPLTVEVPYICAEGEDQITVWGFHSDNKTQMKNLYGDSNPQKFTSSANGVTTHYVSQIGGFPDQTEDGGLPQSGRIVVDYMMQKPGKTGTIVYQRGVLLPQKVWCASGRSKVIKGSLPLIGEADCLHEKYGGLNKSKPYYTGEHAKAIGNCPIWVKTPLKLANGTKYRPPAKLLKERGFFGAIAGFLEGGWEGMIAGWHGYTSHGAHGVAVAADLKSTQEAINKITKNLNSLSELEVKNLQRLSGAMDELHNEILELDEKVDDLRADTISSQIELAVLLSNEGIINSEDEHLLALERKLKKMLGPSAVDIGNGCFETKHKCNQTCLDRIAAGTFNAGEFSLPTFDSLNITAASLNDDGLDNHTILLYYSTAASSLAVTLMLAIFIVYMVSRDNVSCSICL

SEQ ID NO: 26914 - protein, 584 aa, synthetic construct; identical to SEQ ID NO: 26854
  REGION 1..584: note = hemagglutinin__InfluenzaB__AGQ16261

SEQ ID NO: 26915 - protein, 584 aa, synthetic construct; identical to SEQ ID NO: 26854
  REGION 1..584: note = hemagglutinin__InfluenzaB__AGQ16262

SEQ ID NO: 26916 - protein, 585 aa, synthetic construct; identical to SEQ ID NO: 26887
  REGION 1..585: note = hemagglutinin__InfluenzaB__AGQ16263

SEQ ID NO: 26917 - protein, 585 aa, synthetic construct; identical to SEQ ID NO: 26887
  REGION 1..585: note = hemagglutinin__InfluenzaB__AGQ16264

SEQ ID NO: 26918 - protein, 584 aa, synthetic construct; identical to SEQ ID NO: 26899
  REGION 1..584: note = hemagglutinin__InfluenzaB__AGQ16265

SEQ ID NO: 26919 - protein, 584 aa, synthetic construct
  REGION 1..584: note = hemagglutinin__InfluenzaB__AGQ16266
MKAIIVLLMVVTSNADRICTGITSSNSPHVVKTATQGEVNVTGVIPLTTTPTKSYFANLKGTKTRGKLCPDCLNCTDLDVALGRPMCVGTTPSAKASILHEVRPVTSGCFPIMHDRTKIRQLANLLRGYENIRLSTQNVIDAEKAPGGPYRLGTSGSCPNATSKSGFFATMAWAVPKDNNKNATNPLTVEVPYICAEGEDQITVWGFHSDNKTQMKNLYGDSNPQKFTSSANGVTTHYVSQVGGFPDQTEDGGLPQSGRIVVDYMMQKPGKTGTIVYQRGVLLPQKVWCASGRSKVIKGSLPLIGEADCLHEKYGGLNKSKPYYTGEHAKAIGNCPIWVKTPLKLANGTKYRPPAKLLKERGFFGAIAGFLEGGWEGMIAGWHGYTSHGAHGVAVAADLKSTQEAINKITKNLNSLSELEVKNLQRLSGAMDELHNEILELDEKVDDLRADTISSQIELAVLLSNEGIINSEDEHLLALERKLKKMLGPSAVDIGNGCFETKHKCNQTCLDRIAAGTFNAGEFSLPTFDSLNITAASLNDDGLDNHTILLYYSTAASSLAVTLMLAIFIVYMVSRDNVSCSICL

SEQ ID NO: 26920 - protein, 584 aa, synthetic construct; identical to SEQ ID NO: 26899
  REGION 1..584: note = hemagglutinin__InfluenzaB__AGQ16267

SEQ ID NO: 26921 - protein, 584 aa, synthetic construct; identical to SEQ ID NO: 26899
  REGION 1..584: note = hemagglutinin__InfluenzaB__AGQ16268

SEQ ID NO: 26922 - protein, 585 aa, synthetic construct; identical to SEQ ID NO: 26872
  REGION 1..585: note = hemagglutinin__InfluenzaB__AGQ16269

SEQ ID NO: 26923 - protein, 584 aa, synthetic construct; identical to SEQ ID NO: 26899
  REGION 1..584: note = hemagglutinin__InfluenzaB__AGQ16270

SEQ ID NO: 26924 - protein, 584 aa, synthetic construct
  REGION 1..584: note = hemagglutinin__InfluenzaB__AGQ16272
MKAIIVLLMVVTSNADRICTGITSSNSPHVVKTATQGEVNVTGVIPLTTTPTKSYFANLKGTKTRGKLCPDCLNCTDLDVALGRPMCVGTTPSAKASILHEVRPVTSGCFPIMHDRTKIRQLANLLRGYENIRLSTQNVIDAEKAPGGPYRLGTSGSCPNATSKSGFFATMAWAVPRDNNKNATNPLTVEVPYICEEGEDQITVWGFHSDNKTQMKNLYGDSNPQKFTSSANGVTTHYVSQIGGFPDQTEDGGLPQSGRIVVDYMMQKPGKTGTIVYQRGVLLPQKVWCASGRSKVIKGSLPLIGEADCLHEKYGGLNKSKPYYTGEHAKAIGNCPIWVKTPLKLANGTKYRPPAKLLKERGFFGAIAGFLEGGWEGMIAGWHGYTSHGAHGVAVAADLKSTQEAINKITKNLNSLSELEVKNLQRLSGAMDELHNEILELDEKVDDLRADTISSQIELAVLLSNEGIINSEDEHLLALERKLKKMLGPSAVDIGNGCFETKHKCNQTCLDRIAAGTFNAGEFSLPTFDSLNITAASLNDDGLDNHTILLYYSTAASSLAVTLMLAIFIVYMVSRDNVSCSICL

SEQ ID NO: 26925 - protein, 584 aa, synthetic construct; identical to SEQ ID NO: 26854
  REGION 1..584: note = hemagglutinin__InfluenzaB__AGQ16273

SEQ ID NO: 26926 - protein, 584 aa, synthetic construct; identical to SEQ ID NO: 26854
  REGION 1..584: note = hemagglutinin__InfluenzaB__AGQ16274

SEQ ID NO: 26927 - protein, 584 aa, synthetic construct; identical to SEQ ID NO: 26854
  REGION 1..584: note = hemagglutinin__InfluenzaB__AGQ16275

SEQ ID NO: 26928 - protein, 584 aa, synthetic construct; identical to SEQ ID NO: 26854
  REGION 1..584: note = hemagglutinin__InfluenzaB__AGQ16276

SEQ ID NO: 26929 - protein, 584 aa, synthetic construct; identical to SEQ ID NO: 26899
  REGION 1..584: note = hemagglutinin__InfluenzaB__AGQ16277

SEQ ID NO: 26930 - protein, 584 aa, synthetic construct; identical to SEQ ID NO: 26899
  REGION 1..584: note = hemagglutinin__InfluenzaB__AGQ16278

SEQ ID NO: 26931 - protein, 584 aa, synthetic construct; identical to SEQ ID NO: 26899
  REGION 1..584: note = hemagglutinin__InfluenzaB__AGQ16279

SEQ ID NO: 26932 - protein, 584 aa, synthetic construct; identical to SEQ ID NO: 26899
  REGION 1..584: note = hemagglutinin__InfluenzaB__AGQ16280

SEQ ID NO: 26933 - protein, 584 aa, synthetic construct
  REGION 1..584: note = hemagglutinin__InfluenzaB__AGQ16281
MKAIIVLLMVVTSNADRICTGITSSNSPHVVKTATQGEVNVTGVIPLTTTPTKSYFANLKGTKTRGKLCPDCLNCTDLDVALGRPMCVGTTPSAKASILHEVRPVTSGCFPIMHDRTKIRQLANLLRGYENIRLSTQNVIDAEKAPGGPYRLGTSGSCPNATSKSGFFATMAWAVPKDNNKNATNPLTVEVPYICAEGEDQITVWGFHSDNKTQMKNLYGDSNPQKFTSSANGVTTHYVSQIGSFPDQTEDGGLPQSGRIVVDYMMQKPGKTGTIVYQRGVLLPQKVWCASGRSKVIKGSLPLIGEADCLHEKYGGLNKSKPYYTGEHAKAIGNCPIWVKTPLKLANGTKYRPPAKLLKERGFFGAIAGFLEGGWEGMIAGWHGYTSHGAHGVAVAADLKSTQEAINKITKNLNSLSELEVKNLQRLSGAMDELHNEILELDEKVDDLRADTISSQIELAVLLSNEGIINSEDEHLLALERKLKKMLGPSAVDIGNGCFETKHKCNQTCLDRIAAGTFNAGEFSLPTFDSLNITAASLNDDGLDNHTILLYYSTAASSLAVTLMLAIFIVYMVSRDNVSCSICL

SEQ ID NO: 26934 - protein, 584 aa, synthetic construct
  REGION 1..584: note = hemagglutinin__InfluenzaB__AGQ16282
MKAIIVLLMVVTSNADRICTGITSSNSPHVVKTATQGEVNVTGVIPLTTTPTKSYFANLKGTKTRGKLCPDCLNCTDLDVALGRPMCVGTTPSAKASILHEVRPVTSGCFPIMHDRTKIRQLANLLRGYENIRLSTQNVIDAEKAPGGPYRLGTSGSCPNATSKSGFFATMAWAVPKGNNKNATNPLTVEVPYICAEGEDQITVWGFHSDNKTQMKNLYGDSNPQRFTSSANGVTTHYVSQIGGFPDQTEDGGLPQSGRIVVDYMMQKPGKTGTIVYQRGVLLPQKVWCASGRSKVIKGSLPLIGEADCLHEKYGGLNKSKPYYTGEHAKAIGNCPIWVKTPLKLANGTKYRPPAKLLKERGFFGAIAGFLEGGWEGMIAGWHGYTSHGAHGVAVAADLKSTQEAINKITKNLNSLSELEVKNLQRLSGAMDELHNEILELDEKVDDLRADTISSQIELAVLLSNEGIINSEDEHLLALERKLKKMLGPSAVDIGNGCFETKHKCNQTCLDRIAAGTFNAGEFSLPTFDSLNITAASLNDDGLDNHTILLYYSTAASSLAVTLMLAIFIVYMVSRDNVSCSICL

SEQ ID NO: 26935 - protein, 584 aa, synthetic construct
  REGION 1..584: note = hemagglutinin__InfluenzaB__AGQ16283
MKAIIVLLMVVTSNADRICTGITSSNSPHVVKTATHGEVNVTGVIPLTTTPTKSYFANLKGTKTRGKLCPDCLNCTDLDVALGRPMCVGTTPSAKASILHEVRPVTSGCFPIMHDRTKIRQLANLLRGYENIRLSTQNVIDAEKAPGGPYRLGTSGSCPNATSKSGFFATMAWAVPKDNNKNATNPLTVEVPYICAEGEDQIAVWGFHSDNKTQMKNLYGDSNPQKFTSSANGVTTHYVSQIGGFPDQTEDGGLPQSGRIVVDYMMQKPGKTGTIVYQRGVLLPQKVWCASGRSKVIKGSLPLIGEADCLHEKYGGLNKSKPYYTGEHAKAIGNCPIWVKTPLKLANGTKYRPPAKLLKERGFFGAIAGFLEGGWEGMIAGWHGYTSHGAHGVAVAADLKSTQEAINKITKNLNSLSELEVKNLQRLSGAMDELHNEILELDEKVDDLRADTISSQIELAVLLSNEGIINSEDEHLLALERKLKKMLGPSAVDIGNGCFETKHKCNQTCLDRIAAGTFNAGEFSLPTFDSLNITAASLNDDGLDNHTILLYYSTAASSLAVTLMLAIFIVYMVSRDNVSCSICL

SEQ ID NO: 26936 - protein, 585 aa, synthetic construct
  REGION 1..585: note = hemagglutinin__InfluenzaB__AGQ16284
MKAIIVLLMVVTSNADRICTGITSSNSPHVVKTATQGEVNVTGVIPLTTTPTKSHFANLKGTETRGKLCPKCLNCTDLDVALGRPKCTGKIPSARVSILHEARPVTSGCFPIMHDRTKIRQLPNLLRGYEHIKLSTHNVINAENAPGGPYKIGTSGSCPNVTNGNGFFATMAWAVPKNDKNKTATNPLTIEVPYICTEGEDQITVWGFHSDNETQMAKLYGDSKPQKFTSSANGVTTHYVSQIGGFPNQTEDGGLPQSGRIVVDYMVQKSGKTGTITYQRGILLPQKVWCASGRSKVIKGSLPLIGEADCLHEKYGGLNKSKPYYTGEHAKAIGNCPIWVKTPLKLANGTKYRPPAKLLKERGFFGAIAGFLEGGWEGMIAGWHGYTSHGAHGVAVAADLKSTQEAINKITKNLNSLSELEVKNLQRLSGAMDELHNEILELDEKVDDLRADTISSQIELAVLLSNEGIINSEDEHLLALERKLKKMLGPSAVEIGNGCFETKHKCNQTCLDRIAAGTFDAGEFSLPTFDSLNITAASLNDDGLDNHTILLYYSTAASSLAVTLMIAIFVVYMVSRDNVSCSICL

SEQ ID NO: 26937 - protein, 584 aa, synthetic construct; identical to SEQ ID NO: 26899
  REGION 1..584: note = hemagglutinin__InfluenzaB__AGQ16285

SEQ ID NO: 26938 - protein, 584 aa, synthetic construct; identical to SEQ ID NO: 26899
  REGION 1..584: note = hemagglutinin__InfluenzaB__AGQ16286

SEQ ID NO: 26939 - protein, 584 aa, synthetic construct
  REGION 1..584: note = hemagglutinin__InfluenzaB__AGQ16287
MKAIIVLLMVVTSNADRICTGITSSNSPHVVKTATQGEVNVTGVIPLTTTPTKSYFANLKGTKTRGKLCPDCLNCTDLDVALGRPMCVGTTPSAKASILHEVRPVTSGCFPIMHDRTKIRQLANLLRGYENIRLSTQNVIDAEKAPGGPYRLGTSGSCPNATSKSGFFATMAWAVPKDNNKNATNPLTVEVPYICEEGEDQITVWGFHSDNKTQMKNLYGDSNPQKFTSSANGVTTHYVSQIGGFPDQTEDGGLPQSGRIVVDYMMQKPGKTGTIVYQRGVLLPQKVWCASGRSKVIKGSLPLIGEADCLHEKYGGLNKSKPYYTGEHAKAIGNCPIWVKTPLKLANGTKYRPPAKLLKERGFFGAIAGFLEGGWEGMIAGWHGYTSHGAHGVAVAADLKSTQEAINKITKNLNSLSELEVKNLQRLSGAMDELHNEILELDEKVDDLRADTISSQIELAVLLSNEGIINSEDEHLLALERKLKKMLGPSAVDIGNGCFETKHKCNQTCLDRIAAGTFNAGEFSLPTFDSLNITAASLNDDGLDNHTILLYYSTAASSLAVTLMLAIFIVYMVSRDNVSCSICL

SEQ ID NO: 26940 - protein, 584 aa, synthetic construct; identical to SEQ ID NO: 26854
  REGION 1..584: note = hemagglutinin__InfluenzaB__AGQ16289

SEQ ID NO: 26941 - protein, 584 aa, synthetic construct; identical to SEQ ID NO: 26854
  REGION 1..584: note = hemagglutinin__InfluenzaB__AGQ16290

SEQ ID NO: 26942 - protein, 584 aa, synthetic construct
  REGION 1..584: note = hemagglutinin__InfluenzaB__AGQ16291
MKAIIVLLMVVTSNADRICTGITSSNSPHVVKTATQGEVNVTGVIPLTTTPTKSYFANLKGTKTRGKLCPDCLNCTDLDVALGRPMCVGTTPSAKASILHEVRPVTSGCFPIMHDRTKIRQLANLLRGYENIRLSTQNVIDAEKAPGGPYRLGTSGSCPNTTSKSGFFATMAWAVPKDNNKNATNPLTVEVPYICAEGEDQIAVWGFHSDNKTQMKNLYGDSNPQKFTSSANGVTTHYVSQIGGFPDQTEDGGLPQSGRIVVDYMMQKPGKTGTIVYQRGVLLPQKVWCASGRSKVIKGSLPLIGEADCLHEKYGGLNKSKPYYTGEHAKAIGNCPIWVKTPLKLANGTKYRPPAKLLKERGFFGAIAGFLEGGWEGMIAGWHGYTSHGAHGVAVAADLKSTQEAINKITKNLNSLSELEVKNLQRLSGAMDELHNEILELDEKVDDLRADTISSQIELAVLLSNEGIINSEDEHLLALERKLKKMLGPSAVDIGNGCFETKHKCNQTCLDRIAAGTFNAGEFSLPTFDSLNITAASLNDDGLDNHTILLYYSTAASSLAVTLMLAIFIVYMVSRDNVSCSICL

SEQ ID NO: 26943 - protein, 584 aa, synthetic construct
  REGION 1..584: note = hemagglutinin__InfluenzaB__AGQ16292
MKAIIVLLMVVTSNADRICTGITSSNSPHVVKTATQGEVNVTGVIPLTTTPTKSYFANLKGTKTRGKLCPDCLNCTDLDVALGRPMCVGTTPSAKASILHEVRPVTSGCFPIMHDRTKIRQLANLLRGYENIRLSTQNVIDAEKAPGGPYRLGTSGSCPNATSKSGFFATMAWAVPKDNNKNATNPLTVEVPYICAEGEDQIAVWGFHSDNKTQMKNLYGDSNPQKFTSSANGVTTHYVSQIGGFPDQTEDGGLPQSGRIVVDYMMQKPGKTGTIVYQRGVLLPQKVWCASGRSKVIKGSLPLIGEADCLHEKYGGLNKSKPYYTGEHAKAIGNCPIWVKTPLKLANGTKYRPPAKLLKERGFFGAIAGFLEGGWEGMIAGWHGYTSHGAHGVAVAADLKSTQEAINKITKNLNSLSELEIKNLQRLSGAMDELHNEILELDEKVDDLRADTISSQIELAVLLSNEGIINSEDEHLLALERKLKKMLGPSAVDIGNGCFETKHKCNQTCLDRIAAGTFNAGEFSLPTFDSLNITAASLNDDGLDNHTILLYYSTAASSLAVTLMLAIFIVYMVSRDNVSCSICL

SEQ ID NO: 26944 - protein, 584 aa, synthetic construct; identical to SEQ ID NO: 26943
  REGION 1..584: note = hemagglutinin__InfluenzaB__AGQ16293

SEQ ID NO: 26945 - protein, 584 aa, synthetic construct; identical to SEQ ID NO: 26943
  REGION 1..584: note = hemagglutinin__InfluenzaB__AGQ16294

SEQ ID NO: 26946 - protein, 585 aa, synthetic construct
  REGION 1..585: note = hemagglutinin__InfluenzaB__AGQ16295
MKAIIVLLMVVTSNADRICTGITSSNSPHVVKTATQGEVNVTGAIPLTTTPTKSHFANLKGTETRGKLCPKCLNCTDLDVALGRPKCTGKIPSARVSILHEVRPVTSGCFPIMHDRTKIRQLPNLLRGYEHIRLSTHNVINAENAPGGPYKIGTSGSCPNVTNGNGFFATMAWAVPKNDKNKTETNPLTIEVPYICTEEEDQITVWGFHSDNETQMAKLYGDSKPQKFTSSANGVTTHYVSQIGGFPNQTEDGGLPQSGRIVVDYMVQKSGKTGTITYQRGILLPQKVWCASGRSKVIKGSLPLIGEADCLHEKYGGLNKSKPYYTGEHAKAIGNCPIWVKTPLKLANGTKYRPPAKLLKERGFFGAIAGFLEGGWEGMIAGWHGYTSHGAHGVAVAADLKSTQEAINKITKNLNSLSELEVKNLQRLSGAMDELHNEILELDEKVDDLRADTISSQIELAVLLSNEGIINSEDEHLLALERKLKKMLGPSAVEIGNGCFETKHKCNQTCLDRIAAGTFDAGEFSLPTFDSLNITAASLNDDGLDNHTILLYYSTAASSLAVTLMIAIFVVYMVSRDNVSCSICL

SEQ ID NO: 26947 - protein, 585 aa, synthetic construct; identical to SEQ ID NO: 26887
  REGION 1..585: note = hemagglutinin__InfluenzaB__AGQ16296

SEQ ID NO: 26948 - protein, 584 aa, synthetic construct; identical to SEQ ID NO: 26854
  REGION 1..584: note = hemagglutinin__InfluenzaB__AGQ16297

SEQ ID NO: 26949 - protein, 584 aa, synthetic construct
  REGION 1..584: note = hemagglutinin__InfluenzaB__AGQ16298
MKAIIVLLMVVTSNADRICTGITSSNSPHVVKTATQGEVNVTGVIPLTTTPTKSYFANLKGTKTRGKLCPDCLNCTDLDVALGRPMCVGTTPSAKASILHEVRPVTSGCFPIMHDRTKIRQLANLLRGYENIRLSTQNVIDAEKAPGGPYRLGTSGSCPNATSKSGFFATMAWAVPKDNNKNATNPLTVEVPYICAEGEDQITVWGFHSDNKTQMKNLYGDSNPQKFTSSANGVTTHYVSQIGGFPDQTEDGGLPQSGRIVVDYMMQKPGKTGTIVYQRGVLLPQKVWCASGRSKVIKGSLPLIGEADCLHEKYGGLNKSKPYYTGEHAKAIGNCPIWVKTPLKLANGTKYRPPAKLLKERGFFGAIAGFLEGGWEGMIAGWHGYTSHGAHGVAIAADLKSTQEAINKITKNLNSLSELEVKNLQRLSGAMDELHNEILELDEKVDDLRADTISSQIELAVLLSNEGIINSEDEHLLALERKLKKMLGPSAVDIGNGCFETKHKCNQTCLDRIAAGTFNAGEFSLPTFDSLNITAASLNDDGLDNHTILLYYSTAASSLAVTLMLAIFIVYMVSRDNVSCSICL

SEQ ID NO: 26950 - protein, 584 aa, synthetic construct; identical to SEQ ID NO: 26899
  REGION 1..584: note = hemagglutinin__InfluenzaB__AGQ16299

SEQ ID NO: 26951 - protein, 584 aa, synthetic construct; identical to SEQ ID NO: 26899
  REGION 1..584: note = hemagglutinin__InfluenzaB__AGQ16300

SEQ ID NO: 26952 - protein, 584 aa, synthetic construct; identical to SEQ ID NO: 26854
  REGION 1..584: note = hemagglutinin__InfluenzaB__AGQ16301

SEQ ID NO: 26953 - protein, 584 aa, synthetic construct; identical to SEQ ID NO: 26854
  REGION 1..584: note = hemagglutinin__InfluenzaB__AGQ16302

SEQ ID NO: 26954 - protein, 584 aa, synthetic construct; identical to SEQ ID NO: 26854
  REGION 1..584: note = hemagglutinin__InfluenzaB__AGQ16303

SEQ ID NO: 26955 - protein, 584 aa, synthetic construct; identical to SEQ ID NO: 26854
  REGION 1..584: note = hemagglutinin__InfluenzaB__AGQ16305

SEQ ID NO: 26956 - protein, 585 aa, synthetic construct
  REGION 1..585: note = hemagglutinin__InfluenzaB__AGQ16306
MKAIIVLLMVVTSNADRICTGITSSNSPHVVKTATQGEVNVTGVIPLTTTPTKSHFANLKGTETRGKLCPKCLNCTDLDVALGRPKCTGKIPSARVSILHEVRPVTSGCFPIMHDRTKIRQLPNLLRGYEHIRLSTHNVINAENAPGGPYKIGTSGSCPNVTNGNGFFATMAWAVPKNDKNKTETNPLTIEVPYICKEGEDQITVWGFHSDNETQMAKLYGDSKPQKFTSSANGVTTHYVSQIGGFPNQTEDGGLPQSGRIVVDYMVQKSGKTGTITYQRGILLPQKVWCASGRSKVIKGSLPLIGEADCLHEKYGGLNKSKPYYTGEHAKAIGNCPIWVKTPLKLANGTKYRPPAKLLKERGFFGAIAGFLEGGWEGMIAGWHGYTSHGAHGVAVAADLKSTQEAINKITKNLNSLSELEVKNLQRLSGAMDELHNEILELDEKVDDLRADTISSQIELAVLLSNEGIINSEDEHLLALERKLKKMLGPSAVEIGNGCFETKHKCNQTCLDRIAAGTFDAGEFSLPTFDSLNITAASLNDDGLDNHTILLYYSTAASSLAVTLMIAIFVVYMVSRDNVSCSICL

SEQ ID NO: 26957 - protein, 584 aa, synthetic construct; identical to SEQ ID NO: 26854
  REGION 1..584: note = hemagglutinin__InfluenzaB__AGQ16307

SEQ ID NO: 26958 - protein, 585 aa, synthetic construct; identical to SEQ ID NO: 26887
  REGION 1..585: note = hemagglutinin__InfluenzaB__AGQ16308

SEQ ID NO: 26959 - protein, 584 aa, synthetic construct
  REGION 1..584: note = hemagglutinin__InfluenzaB__AGQ16309
MKAIIVLLMVVTSNADRICTGITSSNSPHVVKTATQGEVNVTGVIPLTTTPTKSYFANLKGTKTRGKLCPDCLNCTDLDVALGRPMCVGTTPSAKASILHEVRPVTSGCFPIMHDRTKIRQLANLLRGYENIRLSTQNVIDAEKAPGGPYRLGTSGSCPNATSKSGFFATMAWAVPKDNNKNATNPLTVEVPYICAEGEDQITVWGFHSDNKTQMKNLYGDSNPQKFTSSANGVTTHYVSQIGGFPDQTEDGGLPQSGRIVADYMMQKPGKTGTIVYQRGVLLPQKVWCASGRSKVIKGSLPLIGEADCLHEKYGGLNKSKPYYTGEHAKAIGNCPIWVKTPLKLANGTKYRPPAKLLKERGFFGAIAGFLEGGWEGMIAGWHGYTSHGAHGVAVAADLKSTQEAINKITKNLNSLSELEVKNLQRLSGAMDELHNEILELDEKVDDLRADTISSQIELAVLLSNEGIINSEDEHLLALERKLKKMLGPSAVDIGNGCFETKHKCNQTCLDRIAAGTFNAGEFSLPTFDSLNITAASLNDDGLDNHTILLYYSTAASSLAVTLMLAIFIVYMVSRDNVSCSICL

SEQ ID NO: 26960 - protein, 584 aa, synthetic construct
  REGION 1..584: note = hemagglutinin__InfluenzaB__AGQ16310
MKAIIVLLMVVTSNADRICTGITSSNSPHVVKTATQGEVNVTGVIPLTTTPTKSYFANLKGTKTRGKLCPDCLNCTDLDVALGRPMCVGTTPSAKASILHEVRPVTSGCFPIMHDRTKIRQLANLLRGYENIRLSTQNVIDAEKAPGGPYRLGTSGSCPNATSKSGFFATMAWAVPKDNNKNATNPLTVEVPYICAEGEDQITVWGFHSDNKTQMKNLYGDSNPQKFTSSANGVTTHYVSQIGGFPDQTEDGGLPQSGRIVVDYMMQKPGKTGTIVYQRGVLLPQKVWCASGRSKVIKGSLPLIGEADCLHEKYGGLNKSKPYYTGEHAKAIGNCPIWVKTPLKLANGTKYRPPAKLLKERGFFGAIAGFLEGGWEGMVAGWHGYTSHGAHGVAVAADLKSTQEAINKITKNLNSLSELEVKNLQRLSGAMDELHNEILELDEKVDDLRADTISSQIELAVLLSNEGIINSEDEHLLALERKLKKMLGPSAVDIGNGCFETKHKCNQTCLDRIAAGTFNAGEFSLPTFDSLNITAASLNDDGLDNHTILLYYSTAASSLAVTLMLAIFIVYMVSRDNVSCSICL

SEQ ID NO: 26961 - protein, 585 aa, synthetic construct; identical to SEQ ID NO: 26887
  REGION 1..585: note = hemagglutinin__InfluenzaB__AGQ16311

SEQ ID NO: 26962 - protein, 584 aa, synthetic construct; identical to SEQ ID NO: 26854
  REGION 1..584: note = hemagglutinin__InfluenzaB__AGQ16312

SEQ ID NO: 26963 - protein, 584 aa, synthetic construct
  REGION 1..584: note = hemagglutinin__InfluenzaB__AGQ16313
MKAIIVLLMVVTSNADRICTGITSSNSPHVVKTATQGEVNVTGVIPLTTTPTKSYFANLKGTKTRGKLCPDCLNCTDLDVALGRPMCVGTTPSAKASILHEVRPVTSGCFPIMHDRTKIRQLANLLRGYENIRLSTQNVIDAEKAPGGPYRLGTSGSCPNATSKSGFFATMAWAVPKDNNKNATNPLTVEVPYICAEGEDQIAVWGFHSDNKTQMKNLYGDSNPQKFTSSANGVTTHYVSQIGGFPDQTEDGGLPQSGRIVVDYMMQKPGKTGTIVYQRGVLLPQKVWCASGRSKVIKGSLPLIGEADCLHEKYGGLNKSKPYYTGEHAKAIGNCPIWVKTPLKLANGTKYRPPAKLLKEKGFFGAIAGFLEGGWEGMIAGWHGYTSHGAHGVAVAADLKSTQEAINKITKNLNSLSELEVKNLQRLSGAMDELHNEILELDEKVDDLRADTISSQIELAVLLSNEGIINSEDEHLLALERKLKKMLGPSAVDIGNGCFETKHKCNQTCLDRIAAGTFNAGEFSLPTFDSLNITAASLNDDGLDNHTILLYYSTAASSLAVTLMLAIFIVYMVSRDNVSCSICL

SEQ ID NO: 26964 - protein, 585 aa, synthetic construct
  REGION 1..585: note = hemagglutinin__InfluenzaB__AGQ16314
MKAIIVLLMVVTSNADRICTGITSSNSPHVVKTATQGEVNVTGVIPLTTTPTKSHFANLKGTETRGKLCPKCLNCTDLDVALGRPKCTGKIPSARVSILHEVRPVTSGCFPIMHDRTKIRQLPNLLRGYEHIRLSTHNVINAENAPGGPYKIGTSGSCPNVTNGNGFFATMAWAVPKNDKNKTETNPLTIEVPYICTEEEDQITVWGFHSDNETQMAKLYGDSKPQKFTSSANGVTTHYVSQIGGFPNQTEDGGLPQSGRIVVDYMVQKSGKTGTITYQRGILLPQKVWCASGRSKVIKGSLPLIGEADCLHEKYGGLNKSKPYYTGEHAKAIGNCPIWVKTPLKLANGTKYRPPAKLLKERGFFGAIAGFLEGGWEGMIAGWHGYTSHGAHGVAVAADLKSTQEAINKITKNLNSLSELEVKNLQRLSGAMDELHNEILELDEKVDDLRADTISSQIELAVLLSNEGIINSEDEHLLALERKLKKMLGPSAVEIGNGCFETKHKCNQTCLDRIAAGTFDAGEFSLPTFDSLNITAASLNDDGLDNHTILLYYSTAASSLAVTLMIAIFVVYMVSRDNVSCSICL

SEQ ID NO: 26965 - protein, 584 aa, synthetic construct
  REGION 1..584: note = hemagglutinin__InfluenzaB__AGQ16315
MKAIIVLLMVVTSNADRICTGITSSNSPHVVKTATQGEVNVTGVIPLTTTPTKSYFANLKGTKTRGKLCPDCLNCTDLDVALGRPMCVGTTPSAKASILHEVRPVTSGCFPIMHDRTKIRQLANLLRGYENIRLSTQTVIDAEKAPGGPYRLGTSGSCPNATSKSGFFATMAWAVPKDNNKNATNPLTVEVPYICAEGEDQITVWGFHSDNKTQMKNLYGDSNPQKFTSSANGITTHYVSQIGGFPDQTEDGGLPQSGRIVVDYMMQKPGKTGTIVYQRGVLLPQKVWCASGRSKVIKGSLPLIGEADCLHEKYGGLNKSKPYYTGEHAKAIGNCPIWVKTPLKLANGTKYRPPAKLLKERGFFGAIAGFLEGGWEGMIAGWHGYTSHGAHGVAVAADLKSTQEAINKITKNLNSLSELEVKNLQRLSGAMDELHNEILELDEKVDDLRADTISSQIELAVLLSNEGIINSEDEHLLALERKLKKMLGPSAVDIGNGCFETKHKCNQTCLDRIAAGTFNAGEFSLPTFDSLNITAASLNDDGLDNHIILLYYSTAASSLAVTLMLAIFIVYMVSRDNVSCSICL

SEQ ID NO: 26966 - protein, 584 aa, synthetic construct; identical to SEQ ID NO: 26854
  REGION 1..584: note = hemagglutinin__InfluenzaB__AGQ16316

SEQ ID NO: 26967 - protein, 584 aa, synthetic construct; identical to SEQ ID NO: 26854
  REGION 1..584: note = hemagglutinin__InfluenzaB__AGQ16317

SEQ ID NO: 26968 - protein, 585 aa, synthetic construct; identical to SEQ ID NO: 26645
  REGION 1..585: note = hemagglutinin__InfluenzaB__AGQ16318

SEQ ID NO: 26969 - protein, 584 aa, synthetic construct
  REGION 1..584: note = hemagglutinin__InfluenzaB__AGQ16319
MKAIIVLLMVVTSNADRICTGITSSNSPHVVKTATQGEVNVTGVIPLTTTPTKSYFANLKGTKTRGKLCPGCLNCTDLDVALGRPMCVGTTPSAKASILHEVRPVTSGCFPIMHDRTKIRQLANLLRGYENIRLSTQNVIDAEKAPGGPYRLGTSGSCPNATSKSGFFATMAWAVPKDNNKNATNPLTVEVPYICAEGEDQIAVWGFHSDNKTQMKNLYGDSNPQKFTSSANGVTTHYVSQIGGFPDQTEDGGLPQSGRIVVDYMMQKPGKTGTIVYQRGVLLPQKVWCASGRSKVIKGSLPLIGEADCLHEKYGGLNKSKPYYTGEHAKAIGNCPIWVKTPLKLANGTKYRPPAKLLKERGFFGAIAGFLEGGWEGMIAGWHGYTSHGAHGVAVAADLKSTQEAINKITKNLNSLSELEVKNLQRLSGAMDELHNEILELDEKVDDLRADTISSQIELAVLLSNEGIINSEDEHLLALERKLKKMLGPSAVDIGNGCFETKHKCNQTCLDRIAAGTFNAGEFSLPTFDSLNITAASLNDDGLDNHTILLYYSTAASSLAVTLMLAIFIVYMVSRDNVSCSICL

SEQ ID NO: 26970 - protein, 584 aa, synthetic construct; identical to SEQ ID NO: 26899
  REGION 1..584: note = hemagglutinin__InfluenzaB__AGQ16320

SEQ ID NO: 26971 - protein, 584 aa, synthetic construct; identical to SEQ ID NO: 26854
  REGION 1..584: note = hemagglutinin__InfluenzaB__AGQ16321

SEQ ID NO: 26972 - protein, 584 aa, synthetic construct; identical to SEQ ID NO: 26854
  REGION 1..584: note = hemagglutinin__InfluenzaB__AGQ16322

SEQ ID NO: 26973 - protein, 585 aa, synthetic construct
  REGION 1..585: note = hemagglutinin__InfluenzaB__AGQ16323
MKAIIVLLMVVTSNADRICTGITSSNSPHVVKTATQGEVNVTGVIPLTTTPTKSHFASLKGTETRGKLCPKCLNCTDLDVALGRPKCTGKIPSARVSILHEVRPVTSGCFPIMHDRTKIRQLPNLLRGYEHIRLSTHNVINAEDAPGGPYKIGTSGSCPNVTNGNGFFATMAWAVPKNDKNKTATNPLTIEVPYICTEGEDQITVWGFHSDNETQMAKLYGDSKPQKFTSSANGVTTHYVSQIGGFPNQTEDGGLPQSGRIVVDYMVQKSGKTGTITYQRGILLPQKVWCASGRSKVIKGSLPLIGEADCLHEKYGGLNKSKPYYTGEHAKAIGNCPIWVKTPLKLANGTKYRPPAKLLKERGFFGAIAGFLEGGWEGMIAGWHGYTSHGAHGVAVAADLKSTQEAINKITKNLNSLSELEVKNLQRLSGAMDELHNEILELDEKVDDLRADTISSQIELAVLLSNEGIINSEDEHLLALERKLKKMLGPSAVEIGNGCFETKHKCNQTCLDRIAAGTFDAGEFSLPTFDSLNITAASLNDDGLDNHTILLYYSTAASSLAVTLMIAIFVVYMVSRDNVSCSICL

SEQ ID NO: 26974 - protein, 584 aa, synthetic construct; identical to SEQ ID NO: 26854
  REGION 1..584: note = hemagglutinin__InfluenzaB__AGQ16324

SEQ ID NO: 26975 - protein, 584 aa, synthetic construct; identical to SEQ ID NO: 26854
  REGION 1..584: note = hemagglutinin__InfluenzaB__AGQ16325

SEQ ID NO: 26976 - protein, 584 aa, synthetic construct; identical to SEQ ID NO: 26854
  REGION 1..584: note = hemagglutinin__InfluenzaB__AGQ16326

SEQ ID NO: 26977 - protein, 584 aa, synthetic construct; identical to SEQ ID NO: 26854
  REGION 1..584: note = hemagglutinin__InfluenzaB__AGQ16327

SEQ ID NO: 26978 - protein, 585 aa, synthetic construct
  REGION 1..585: note = hemagglutinin__InfluenzaB__AGQ16328
MKAIIVLLMVVTSNADRICTGITSSNSPHVVKTATQGEVNVTGVIPLTTTPTKSHFANLKGTETRGKLCPKCLNCTDLDVALGRPKCTGKTPSARVSILHEVRPVTSGCFPIMHDRTKIRQLPNLLRGYEHIRLSTHNVINAENAPGGPYKIGTSGSCPNVTNGNGFFATMAWAVPKNDKNKTATNPLTIEVPYICTEGEDQITVWGFHSDNETQMAKLYGDSNPQKFTSSANGVTTHYVSQIGGFPNQTEDGGLPQSGRIVVDYMVQKSGKTGTITYQRGILLPQKVWCASGRSKVIKGSLPLIGEADCLHEKYGGLNKSKPYYTGEHAKAIGNCPIWVKTPLKLANGTKYRPPAKLLKERGFFGAIAGFLEGGWEGMIAGWHGYTSHGAHGVAVAADLKSTQEAINKITKNLNSLSELEVKNLQRLSGAMDELHNEILELDEKVDDLRADTISSQIELAVLLSNEGIINSEDEHLLALERKLKKMLGPSAVEIGNGCFETKHKCNQTCLDRIAAGTFDAGEFSLPTFDSLNITAASLNDDGLDNHTILLYYSTAASSLAVTLMIAIFVVYMVSRDNVSCSICL

SEQ ID NO: 26979 - protein, 585 aa, synthetic construct
  REGION 1..585: note = hemagglutinin__InfluenzaB__AGX15487
MKAIIVLLMVVTSNADRICTGITSSNSPHVVKTATQGEVNVTGVIPLTTTPTKSHFANLKGTKTRGKLCPKCLNCTDLDVALGRPKCTGNIPSAKVSILHEVRPVTSGCFPIMHDRTKIRQLPNLLRGYEHIRLSTHNVINAEKAPGGPYKIGTSGSCPNVTNGNGFFATMAWAVPKNDNNKTATNSLTIEVPYICTEGEDQITVWGFHSDNETQMAKLYGDSKPQKFTSSANGVTTHYVSQIGGFPNQTEDGGLPQSGRIVVDYMVQKSGKTGTITYQRGILLPQKVWCASGRSKVIKGSLPLIGEADCLHEKYGGLNKSKPYYTGEHAKAIGNCPIWVKTPLKLANGTKYRPPAKLLKERGFFGAIAGFLEGGWEGMIAGWHGYTSHGAHGVAVAADLKSTQEAINKITKNLNSLSELEVKNLQRLSGAMDELHNEILELDEKVDDLRADTISSQIELAVLLSNEGIINSEDEHLLALERKLKKMLGPSAVEIGNGCFETKHKCNQTCLDRIAAGTFDAGEFSLPTFDSLNITAASLNDDGLDNHTILLYYSTAASSLAVTLMIAIFVVYMVSRDNVSCSICL

SEQ ID NO: 26980 - protein, 585 aa, synthetic construct; identical to SEQ ID NO: 26979
  REGION 1..585: note = hemagglutinin__InfluenzaB__AGX15496

SEQ ID NO: 26981 - protein, 585 aa, synthetic construct
  REGION 1..585: note = hemagglutinin__InfluenzaB__AGX15518
MKAIIVLLMVVTSNADRICTGITSSNSPHVVKTATQGEVNVTGVIPLTTAPTKSHFANLKGTKTRGKLCPKCLNCTDLDVALGRPKCTGNIPSAEVSILHEVRPVTSGCFPIMHDRTKIRQLPNLLRGYEHIRLSTHNVINAEKAPGGPYKIGTSGSCPNVTNGNGFFATMAWAVPKNDNNKTATNSLTIEVPYICTEGEDQITIWGFHSDNETQMAKLYGDSKPQKFTSSANGVTTHYVSQIGGFPNQTEDGGLPQSGRIVVDYMVQKPGKTGTITYQRGILLPQKVWCASGRSKVIKGSLPLIGEADCLHEKYGGLNKSKPYYTGEHAKAIGNCPIWVKTPLKLANGTKYRPPAKLLKERGFFGAIAGFLEGGWEGMIAGWHGYTSHGAHGVAVAADLKSTQEAINKITKNLNSLSELEVKNLQRLSSAMDELHNEILELDEKVDDLRADTISSQIELAVLLSNEGIINSEDEHLLALERKLKKMLGPSAVEIGNGCFETKHKCNQTCLDRIAAGTFDAGEFSLPTFDSLNITAASLNDDGLDNHTILLYYSTAASSLAVTLMIAIFVVYMVSRDNVSCSICL

SEQ ID NO: 26982 - protein, 585 aa, synthetic construct
  REGION 1..585: note = hemagglutinin__InfluenzaB__AGX15529
MKAIIVLLMVVTSNADRVCTGITSSNSPHVVKTATQGEVNVTGVIPLTTTPTKSHFANLKGTKTRGKLCPKCLNCTDLDVALGRPKCTGNIPSAEVSILYEVRPVTSGCFPIMHDRTKIRQLPNLLRGYEHIRLSTHNVINAEKAPGGPYKIGTSGSCPNVTNGNGFFATMAWAVPKNDNNKTATNSLTIEVPYICTEGEDQITIWGFHSDNETQMAKLYGDSKPQKFTSSANGVTTHYVSQIGGFPNQTEDGGLPQSGRIVVDYMVQKSGKTGTITYQRGILLPQKVWCASGRSKVIKGTLPLIGEADCLHEKYGGLNKSKPYYTGEHAKAIGNCPIWVKTPLKLANGTKYRPPAKLLKERGFFGAIAGFLEGGWEGMIAGWHGYTSHGAHGVAVAADLKSTQEAINKITKNLNSLSELEVKNLQRLSGAMDELHNEILELDEKVDDLRADTISSQIELAVLLSNEGIINSEDEHLLALERKLKKMLGPSAVEIGNGCFETKHKCNQTCLDRIAAGTFDAGEFSLPTFDSLNITAASLNDDGLDNHTILLYYSTAASSLAVTLMIAIFVVYMVSRDNVSCSICL

SEQ ID NO: 26983 - protein, 585 aa, synthetic construct; identical to SEQ ID NO: 26573
  REGION 1..585: note = hemagglutinin__InfluenzaB__AGX15541

SEQ ID NO: 26984 - protein, 585 aa, synthetic construct
  REGION 1..585: note = hemagglutinin__InfluenzaB__AGX15552
MKAIIVLLMVVTSNADRICTGITSSNSPHVVKTATQGEVNVTGVIPLTTTPTKSHFANLKGTETRGKLCPKCLNCTDLDVALGRPKCTGNIPSARVSILHEVRPVTSGCFPIMHDRTKIRQLPNLLRGYEHIRLSTHNVINAKNAPGGPYKIGTSGSCPNVTNGNGFFATMAWAVPKNDNNKTATNSLTIEVPYICTEGEDQITVWGFHSDNETQMAKLYGDSKPQKFTSSANGVTTHYVSQIGGFPNQTEDGGLPQSGRIVVDYMVQKSGKTGTITYQRGILLPQKVWCASGRSKVIKGSLPLIGEADCLHEKYGGLNKSKPYYTGEHAKAIGNCPIWVKTPLKLANGTKYRPPAKLLKERGFFGAIAGFLEGGWEGMIAGWHGYTSHGAHGVAVAADLKSTQEAINKITKNLNSLSELEVKNLQRLSGAMDELHNEILELDEKVDDLRADTISSQIELAVLLSNEGIINSEDEHLLALERKLKKMLGPSAVEIGNGCFETKHKCNQTCLDRIAAGTFDAGEFSLPTFDSLNITAASLNDDGLDNHTILLYYSTAASSLAVTLMIAIFVVYMVSRDNVSCSICL

SEQ ID NO: 26985 - protein, 585 aa, synthetic construct; identical to SEQ ID NO: 26582
  REGION 1..585: note = hemagglutinin__InfluenzaB__AGX15563

SEQ ID NO: 26986 - protein, 585 aa, synthetic construct; identical to SEQ ID NO: 26582
  REGION 1..585: note = hemagglutinin__InfluenzaB__AGX15574

SEQ ID NO: 26987 - protein, 585 aa, synthetic construct
  REGION 1..585: note = hemagglutinin__InfluenzaB__AGX15607
MKAIIVLLMVVTSNADRICTGITSSNSPHVVKTATQGEVNVTGVIPLTTTPTKSHFANLKGTETRGKLCPKCLNCTDLDVALGRPKCTGNTPSARVSILHEVRPVTSGCFPIMHDRTKIRQLPNLLRGYEHIRLSTHNVINAENAPGGPYKIGTSGSCPNVTNGNGFFATMAWAVPKNDNNKTATNSLTIEVPYICTEGEDQITVWGFHSDNETQMAKLYGDSKPQKFTSSANGVTTHYVSQIGGFPNQTEDGGLPQSGRIVVDYMVQKSGKTGTITYQRGILLPQKVWCASGRSKVIKGSLPLIGEADCLHEKYGGLNKSKPYYTGEHAKAIGNCPIWVKTPLKLANGTKYRPPAKLLKERGFFGAIAGFLEGGWEGMIAGWHGYTSHGAHGVAVAADLKSTQEAINKITKNLNSLSELEVKNLQRLSGAMDELHNEILELDEKVDDLRADTISSQIELAVLLSNEGIINSEDEHLLALERKLKKMLGPSAVEIGNGCFETKHKCNQTCLDRIAAGTFDAGEFSLPTFDSLNITAASLNDDGLDNHTILLYYSTAASSLAVTLMIAIFVVYMVSRDNVSCSICL

SEQ ID NO: 26988 - protein, 585 aa, synthetic construct
  REGION 1..585: note = hemagglutinin__InfluenzaB__AGX15629
MKAIIVLLMVVTSNADRICTGITSSNSPHVVKTATQGEVNVTGVIPLTTTPTKSHFANLKGTETRGKLCPKCLNCTDLDVALGRPKCTGNIPSARVSILHEVRPVTSGCFPIMHDRTKIRQLPNLLRGYEHIRLSTHNVINAENAPGGPYKIGTSGSCPNVTNGNGFFATMAWAVPKNDNNKTATNSLTIEVPYICTEGEDQITVWGFHSDNEIQMAKLYGDSKPQKFTSSANGVTTHYVSQIGGFPNQTEDGGLPQSGRIVVDYMVQKSGKTGTITYQRGILLPQKVWCTSGRSKVIKGSLPLIGEADCLHEKYGGLNKSKPYYTGEHAKAIGNCPIWVKTPLKLANGTKYRPPAKLLKERGFFGAIAGFLEGGWEGMIAGWHGYTSHGAHGVAVAADLKSTQEAINKITKNLNSLSELEVKNLQRLSGAMDELHNEILELDEKVDDLRADTISSQIELAVLLSNEGIINSEDEHLLALERKLKKMLGPSAVEIGNGCFETKHKCNQTCLDRIAAGTFDAGEFSLPTFDSLNITAASLNDDGLDNHTILLYYSTAASSLAVTLMIAIFVVYMVSRDNVSCSICL

SEQ ID NO: 26989 - protein, 585 aa, synthetic construct
  REGION 1..585: note = hemagglutinin__InfluenzaB__AGX15651
MKAIIVLLMVVTSNADRICTGITSSNSPHVVKTATQGEVNVTGVIPLTTTPTKSHFANLKGTETRGKLCPKCLNCTDLDVALGRPKCTGKIPSARVSILHEVRPVTSGCFPIMHDRTKIRQLPNLLRGYEHIRLSTHNVINAENAPGGPYKIGTSGSCPNITNGNGFFATMAWAVPKNDKNKTATNPLTIEVPYICTEGEDQITVWGFHSDNETQMAKLYGDSKPQKFTSSANGVTTHYVSQIGGFPNQTEDGGLPQSGRIVVDYMVQKSGKTGTITYQRGILLPQKVWCASGRSKVIKGSLPLIGEADCLHEKYGGLNKSKPYYTGEHAKAIGNCPIWVKTPLKLANGTKYRPPAKLLKERGFFGAIAGFLEGGWEGMIAGWHGYTSHGAHGVAVAADLKSTQEAINKITKNLNSLSELEVKNLQRLSGAMDELHNEILELDEKVDDLRADTISSQIELAVLLSNEGIINSEDEHLLALERKLKKMLGPSAVEIGNGCFETKHKCNQTCLDRIAAGTFDAGEFSLPTFDSLNITAASLNDDGLDNHTILLYYSTAASSLAVTLMIAIFVVYMVSRDNVSCSICL

SEQ ID NO: 26990 - protein, 585 aa, synthetic construct; identical to SEQ ID NO: 26989
  REGION 1..585: note = hemagglutinin__InfluenzaB__AGX15675

SEQ ID NO: 26991 - protein, 585 aa, synthetic construct; identical to SEQ ID NO: 26989
  REGION 1..585: note = hemagglutinin__InfluenzaB__AGX15686

SEQ ID NO: 26992 - protein, 585 aa, synthetic construct
  REGION 1..585: note = hemagglutinin__InfluenzaB__AGX15697
MKAIIVLLMVVTSNADRICTGITSSNSPHVVKTATQGEVNVTGVIPLTTTPTKSHFANLKGTETRGKLCPKCLNCTDLDVALGRPKCTGKIPSARVSILHEVRPVTSGCFPIMHDRTKIRQLPNLLRGYEHIRLSTHNVINAENAPGGPYKIGTSGSCPNITNGNGFFATMAWAVPKNDKNKTATNPLTIEVPYICTEGEDQITVWGFHSDNENQMAKLYGDSKPQKFTSSANGVTTHYVSQIGGFPNQTEDGGLPQSGRIVVDYMVQKSGKTGTITYQRGILLPQKVWCASGRSKVIKGSLPLIGEADCLHEKYGGLNKSKPYYTGEHAKAIGNCPIWVKTPLKLANGTKYRPPAKLLKERGFFGAIAGFLEGGWEGMIAGWHGYTSHGAHGVAVAADLKSTQEAINKITKNLNSLSELEVKNLQRLSGAMDELHNEILELDEKVDDLRADTISSQIELAVLLSNEGIINSEDEHLLALERKLKKMLGPSAVEIGNGCFETKHKCNQTCLDRIAAGTFDAGEFSLPTFDSLNITAASLNDDGLDNHTILLYYSTAASSLAVTLMIAIFVVYMVSRDNVSCSICL

SEQ ID NO: 26993 - protein, 585 aa, synthetic construct; identical to SEQ ID NO: 26989
  REGION 1..585: note = hemagglutinin__InfluenzaB__AGX15708

SEQ ID NO: 26994 - protein, 585 aa, synthetic construct; identical to SEQ ID NO: 26989
  REGION 1..585: note = hemagglutinin__InfluenzaB__AGX15719

SEQ ID NO: 26995 - protein, 585 aa, synthetic construct; identical to SEQ ID NO: 26514
  REGION 1..585: note = hemagglutinin__InfluenzaB__AGX15730

SEQ ID NO: 26996 - protein, 585 aa, synthetic construct; identical to SEQ ID NO: 26989
  REGION 1..585: note = hemagglutinin__InfluenzaB__AGX15741

SEQ ID NO: 26997 - protein, 585 aa, synthetic construct; identical to SEQ ID NO: 26989
  REGION 1..585: note = hemagglutinin__InfluenzaB__AGX15753

SEQ ID NO: 26998 - protein, 585 aa, synthetic construct
  REGION 1..585: note = hemagglutinin__InfluenzaB__AGX15764
MKAIIVLLMVVTSNADRICTGITSSNSPHVVKTATQGEVNVTGVIPLTTTPTKSHFANLKGTETRGKLCPKCLNCTDLDVALGRPKCTGKIPSARVSILHEVRPVTSGCFPIMHDRTKIRQLPNLLRGYEHIRLSTHNVINAENAPGGPYKIGTSGSCPNITNGNGFFATMAWAVPKNDKNKTATNPLTIEVPYICTEGEDQITVWGFHSDNETQMAKLYGDSKPQKFTSSANGVTTHYVSQIGGFPNQTEDGGLPQSGRIVVDYMVQKSGKTGTITYQRGILLPQKVWCASGRSKVIKGSLPLIGEADCLHEKYGGLNKSKPYYTGEHAKAIGNCPIWVKTPLKLANGTKYRPPAKLLKERGFFGAIAGFLEGGWEGMIAGWHGYTSHGAHGVAVAADLKSTQEAINKITKNLNSLSELEVKNLQRLSGAMDELHNEILELDEKVDDLRADTISSQIELAVLLSNEGIINSEDEHLLALERKLKKMLGPSAVEIGNGCFETKHKCNQTCLDRIAAGTFDAGEFSLPTFDSLNITAASLNDDGLDNHTILLYYSTAASSLAITLMIAIFVVYMVSRDNVSCSICL

SEQ ID NO: 26999 - protein, 584 aa, synthetic construct
  REGION 1..584: note = hemagglutinin__InfluenzaB__AGX15775
MKAIIVLLMVVTSNADRICTGITSSNSPHVVKTATQGEVNVTGVIPLTTTPTKSYFANLKGTRTRGKLCPDCLNCTDLDVALGRPMCVGTTPSAKASILHEVRPVTSGCFPIMHDRTKIRQLPNLLRGYENIRLSTQNVIDAEKAPGGPYRLGTSGSCPNATSKSGFFATMAWAVPKDNNKNATNPLTVEVPYICTEGEDQITVWGFHSDNKIQMKNLYGDSNPQKFTSSANGVTTHYVSQIGSFPDQTEDGGLPQSGRIVVDYMMQKPGKTGTIVYQRGVLLPQRVWCASGRSKVIKGSLPLIGEADCLHEKYGGLNKSKPYYTGEHAKAIGNCPIWVKTPLKLANGTKYRPPAKLLKERGFFGAIAGFLEGGWEGMIAGWHGYTSHGAHGVAVAADLKSTQEAINKITKNLNSLSELEVKNLQRLSGAMDELHNEILELDEKVDDLRADTISSQIELAVLLSNEGIINSEDEHLLALERKLKKMLGPSAVEIGNGCFETKHKCNQTCLDRIAAGTFNAGEFSLPTFDSLNITAASLNDDGLDNHTILLYYSTAASSLAVTLMLAIFIVYMVSRDNVSCSICL

SEQ ID NO: 27000 - protein, 585 aa, synthetic construct
  REGION 1..585: note = hemagglutinin__InfluenzaB__AGX15786
MKAIIVLLMVVTSNADRICTGITSSNSPHVVKTATQGEVNVTGVIPLTTTPTKSHFANLKGTETRGKLCPKCLNCTDLDVALGRPKCTGKIPSARVSILHEVRPVTSGCFPIMHDRTKIRQLPNLLRGYEHIRLSTHNVINAENAPGGPYKIGTSGSCPNITNGNGFFATMAWAVPKNDKNKTATNPLTIEVPYICTEGEDQITVWGFHSDNETQMAKLYGDSKPQKFTSSANGVTTHYVSQIGGFPNQTEDGGLPQSGRIVVDYMVQKSGKTGTITYQRGILLPQKVWCASGRSKVIKGSLPLIGEADCLHEKYGGLNKSKPYYTGEHAKAIGNCPIWVKTPLKLANGTKYRPPAKLLKERGFFGAIAGFLEGGWEGMIAGWHGYTSHGAHGVAVAADLKSTQEAINKITKNLNSLSELEVKNLQRLSGAMDELHNEILELDEKVDDLRADTISSQIELAVLLSNEGIINSEDEHLLALERKLKKMLGPSAVEIGNGCFETKHKCNQTCLDRIAAGTFDAGEFFLPTFDSLNITAASLNDDGLDNHTILLYYSTAASSLAVTLMIAIFVVYMVSRDNVSCSICL

SEQ ID NO: 27001 - protein, 585 aa, synthetic construct; identical to SEQ ID NO: 26989
  REGION 1..585: note = hemagglutinin__InfluenzaB__AGX15797

SEQ ID NO: 27002 - protein, 585 aa, synthetic construct
  REGION 1..585: note = hemagglutinin__InfluenzaB__AGX15808
MKAIIVLLMVVTSNADRICTGITSSNSPHVVKTATQGEVNVTGVIPLTTTPTKSHFANLKGTETRGKLCPKCLNCTDLDVALGRPKCTGKIPSARVSILHEVRPVTSGCFPIMHDRTKIRQLPNLLRGYEHIRLSTHNVINAENAPGGPYKIGTSGSCPNVTNGNGFFATMAWAVPKNDKNKTATNPLTIEVPYICTEGEDQITVWGFHSDNETQMAKLYGDSKPQKFTSSANGVTTHYVSQIGGFPNQTEDGGLPQSGRIVVDYMVQKSGKTGTITYQRGILLPQKVWCAIGRSKVIKGSLPLIGEADCLHEKYGGLNKSKPYYTGEHAKAIGNCPIWVKTPLKLANGTKYRPPAKLLKERGFFGAIAGFLEGGWEGMIAGWHGYTSHGAHGVAVAADLKSTQEAINKITKNLNSLSELEVKNLQRLSGAMDELHNEILELDEKVDDLRADTISSQIELAVLLSNEGIINSEDEHLLALERKLKKMLGPSAVEIGNGCFETKHKCNQTCLDRIAAGTFDAGEFSLPTFDSLNITAASLNDDGLDNHTILLYYSTAASSLAVTLMIAIFVVYMVSRDNVSCSICL

SEQ ID NO: 27003 - protein, 585 aa, synthetic construct; identical to SEQ ID NO: 26608
  REGION 1..585: note = hemagglutinin__InfluenzaB__AGX15830

SEQ ID NO: 27004 - protein, 585 aa, synthetic construct; identical to SEQ ID NO: 26608
  REGION 1..585: note = hemagglutinin__InfluenzaB__AGX15841

SEQ ID NO: 27005 - protein, 585 aa, synthetic construct; identical to SEQ ID NO: 26608
  REGION 1..585: note = hemagglutinin__InfluenzaB__AGX15852

SEQ ID NO: 27006 - protein, 585 aa, synthetic construct; identical to SEQ ID NO: 26608
  REGION 1..585: note = hemagglutinin__InfluenzaB__AGX15863

SEQ ID NO: 27007 - protein, 585 aa, synthetic construct
  REGION 1..585: note = hemagglutinin__InfluenzaB__AGX15874
MKAIIVLLMVVTSNADRICTGITSSNSPHVVKTATQGEVNVTGVIPLTTTPTKSHFANLKGTETRGKLCPKCPNCTDLDVALGRPKCTGKIPSARVSILHEVRPVTSGCFPIMHDRTKIRQLPNLLRGYEHIRLSTHNVINAENAPGGPYKIGTSGSCPNVTNGNGFFATMAWAVPKNDKNKTATNPLTIEVPYICTEGEDQITVWGFHSDNETQMAKLYGDSKPQKFTSSANGVTTHYVSQIGGFPNQTEDGGLPQSGRIVVDYMVQKSGKTGTITYQRGILLPQKVWCASGRSKVIKGSLPLIGEADCLHEKYGGLNKSKPYYTGEHAKAIGNCPIWVKTPLKLANGTKYRPPAKLLKERGFFGAIAGFLEGGWEGMIAGWHGYTSHGAHGVAVAADLKSTQEAINKITKNLNSLSELEVKNLQRLSGAMDELHNEILELDEKVDDLRADTISSQIELAVLLSNEGIINSEDEHLLALERKLKKMLGPSAVEIGNGCFETKHKCNQTCLDRIAAGTFDAGEFSLPTFDSLNITAASLNDDGLNNHTILLYYSTAASSLAVTLMIAIFVVYMVSRDNVSCSICL

SEQ ID NO: 27008 - protein, 585 aa, synthetic construct; identical to SEQ ID NO: 26608
  REGION 1..585: note = hemagglutinin__InfluenzaB__AGX15885

SEQ ID NO: 27009 - protein, 585 aa, synthetic construct
  REGION 1..585: note = hemagglutinin__InfluenzaB__AGX15896
MKAIIVLLMVVTSNADRICTGITSSNSPHVVKTATQGEVNVTGVIPLTTTPTKSHFANLKGTETRGKLCPKCPNCTDLDVALGRPKCTGKIPSARVSILHEVRPVTSGCFPIMHDRTKIRQLPNLLRGYEHIRLSTHNVINAENAPGGPYKIGTSGSCPNVTNGNGFFATMAWAVPKNDKNKTATNPLTIEVPYICTEGEDQITVWGFHSDNETQMAKLYGDSKPQKFTSSANGVTAHYVSQIGGFPNQTEDGGLPQSGRIVVDYMVQKSGKTGTITYQRGILLPQKVWCASGRSKVIKGSLPLIGEADCLHEKYGGLNKSKPYYTGEHAKAIGNCPIWVKTPLKLANGTKYRPPAKLLKERGFFGAIAGFLEGGWEGMIAGWHGYTSHGAHGVAVAADLKSTQEAINKITKNLNSLSELEVKNLQRLSGAMDELHGEILELDEKVDDLRADTISSQIELAVLLSNEGIINSEDEHLLALERKLKKMLGPSAVEIGNGCFETKHKCNQTCLDRIAAGTFDAGEFSLPTFDSLNITAASLNDDGLDNHTILLYYSTAASSLAVTLMIAIFVVYMVSRDNVSCSICL

SEQ ID NO: 27010 - protein, 585 aa, synthetic construct; identical to SEQ ID NO: 26608
  REGION 1..585: note = hemagglutinin__InfluenzaB__AGX15907

SEQ ID NO: 27011 - protein, 585 aa, synthetic construct; identical to SEQ ID NO: 26608
  REGION 1..585: note = hemagglutinin__InfluenzaB__AGX15918

SEQ ID NO: 27012 - protein, 585 aa, synthetic construct
  REGION 1..585: note = hemagglutinin__InfluenzaB__AGX15929
MKAIIVLLMVVTSNADRICTGITSSNSPHVVKTATQGEVNVTGVIPLTTTPTKSHFANLKGTETRGKLCPKCLNCTDLDVALGRPKCTGKIPSARVSILHEVRPVTSGCFPIMHDRTKIRQLPNLLRGYEHIRLSTNNVINAENAPGGPYKIGTSGSCPNVTNGNGFFATMAWAVPKNDKNKTATNPLTIEVPYICTEGEDQITVWGFHSDNETQMAKLYGDSKPQKFTSSANGVTTHYVSQIGGFPNQTEDGGLPQSGRIVVDYMVQKSEKTGTITYQRGILLPQKVWCASGRSKVIKGSLPLIGEADCLHEKYGGLNKSKPYYTGEHAKAIGNCPIWVKTPLKLANGTKYRPPAKLLKERGFFGAIAGFLEGGWEGMIAGWHGYTSHGAHGVAVAADLKSTQEAINKITKNLNSLSELEVKNLQRLSGAMDELHNEILELDEKVDDLRADTISSQIELAVLLSNEGIINSEDEHLLALERKLKKMLGPSAVEIGNGCFETKHKCNQTCLDRIAAGTFDAGEFSLPTFDSLNITAASLNDDGLDNHTILLYYSTAASSLAVTLMIAIFVVYMVSRDNVSCSICL

SEQ ID NO: 27013 - protein, 585 aa, synthetic construct; identical to SEQ ID NO: 26608
  REGION 1..585: note = hemagglutinin__InfluenzaB__AGX15940

SEQ ID NO: 27014 - protein, 585 aa, synthetic construct
  REGION 1..585: note = hemagglutinin__InfluenzaB__AGX15962
MKAIIVLLMVVTSNADRICTGITSSNSPHIVKTATQGEVNVTGVIPLTTTPTKSHFANLKGTETRGKLCPKCLNCTDLDVALGRPKCTGKIPSARVSILHEVRPVTSGCFPIMHDRTKIRQLPNLLRGYEHIRLSTHNVINAENAPGGPYKIGTSGSCPNITNGNGFFATMAWAVPKNDKNKTATNPLTIEVPYICTEGEDQITVWGFHSDNETQMAKLYGDSKPQKFTSSANGVTTHYVSQIGGFPNQTEDGGLPQSGRIVVDYMMQKSGKTGTITYQRGILLPQKVWCASGRSKVIKGSLPLIGEADCLHEKYGGLNKSKPYYTGEHAKAIGNCPIWVKTPLKLANGTKYRPPAKLLKERGFFGAIAGFLEGGWEGMIAGWHGYTSHGAHGVAVAADLKSTQEAINKITKNLNSLSELEVKNLQRLSGAMDELHNEILELDEKVDDLRADTISSQIELAVLLSNEGIINSEDEHLLALERKLKKMLGPSAVEIGNGCFETKHKCNQTCLDRIAAGTFDAGEFSLPTFDSLNITAASLNDDGLDNHTILLYYSTAASSLAVTLMIAIFVVYMVSRDNVSCSICL

SEQ ID NO: 27015 - protein, 585 aa, synthetic construct; identical to SEQ ID NO: 26645
  REGION 1..585: note = hemagglutinin__InfluenzaB__AGX15973

SEQ ID NO: 27016 - protein, 585 aa, synthetic construct; identical to SEQ ID NO: 26645
  REGION 1..585: note = hemagglutinin__InfluenzaB__AGX15984

SEQ ID NO: 27017 - protein, 585 aa, synthetic construct; identical to SEQ ID NO: 26683
  REGION 1..585: note = hemagglutinin__InfluenzaB__AGX15995

SEQ ID NO: 27018 - protein, 585 aa, synthetic construct; identical to SEQ ID NO: 26683
  REGION 1..585: note = hemagglutinin__InfluenzaB__AGX16006

SEQ ID NO: 27019 - protein, 585 aa, synthetic construct
  REGION 1..585: note = hemagglutinin__InfluenzaB__AGX16017
MKAIIVLLMVVTSNADRICTGITSSNSPHIVKTATQGEVNVTGVIPLTTTPTKSHFANLKGTETRGKLCPKCLNCTDLDVALGRPKCTGKIPSARVSILHEVRPVTSGCFPIMHDRTKIRQLPNLLRGYEHIRLSTHNVINAENAPGGPYKIGTSGSCPNITNGNGFFATMAWAVPKNDKNKTATNPLTIEVPYICTEGEDQITVWGFHSDNEIQMAKLYGDSKPQKFTSSANGVTTHYVSQIGGFPNQTEDGGLPQSGRIVVDYMVQKSGKTGTITYQRGILLPQKVWCASGRSKVIKGSLPLIGEADCLHEKYGGLNKSKPYYTGEHAKAIGNCPIWVKTPLKLANGTKYRPPAKLLKERGFFGAIAGFLEGGWEGMIAGWHGYTSHGAHGVAVAADLKSTQEAINKITKNLNSLSELEVKNLQRLSGAMDELHNEILELDEKVDDLRADTISSQIELAVLLSNEGIINSEDEHLLALERKLKKMLGPSAVEIGNGCFETKHKCNQTCLDRIAAGTFDAGEFSLPTFDSLNITAASLNDDGLDNHTILLYYSTAASSLAVTLMIAIFVVYMVSRDNVSCSICL

SEQ ID NO: 27020 - protein, 584 aa, synthetic construct; identical to SEQ ID NO: 26426
  REGION 1..584: note = hemagglutinin__InfluenzaB__AGX16028

SEQ ID NO: 27021 - protein, 584 aa, synthetic construct
  REGION 1..584: note = hemagglutinin__InfluenzaB__AGX16039
MKAIIVLLMVVTSNADRICTGITSSNSPHVVKTATQGEVNVTGVIPLTTTPTKSYFANLKGTRTRGKLCPDCLNCTDLDVALGRPMCVGTTPSAKASILHEVRPVTSGCFPIMHDRTKIRQLPNLLRGYENIRLSTQNVIDAEKAPGGPYRLGTSGSCPNATSKSGFFATMAWAVPKDNNKNATNPLTVEVPYICTEGEDQITVWGFHSDNKTQMKNLYGDSNPQKFTSSANGVTTHYVSQIGGFPDQTEDGGLPQSGRIVVDYMMQKPGKTGTIVYQRGVLLPQKVWCASGRSKVIKGSLPLIGEADCLHEKYGGLNKSKPYYTGEHAKAIGNCPIWVKTPLKLANGTKYRPPAKLLKERGFFGAIAGFLEGGWEGMIAGWHGYTSHGAHGVAVAADLKSTQEAINKITKNLNSLSELEVKNLQRLSGAVDELHNEILELDEKVDDLRADTISSQIELAVLLSNEGIINSEDEHLLALERKLKKMLGPSAVDIGNGCFETKHKCNQTCLDRIAAGTFNAGEFSLPTFDSLNITAASLNDDGLDNHTILLYYSTAASSLAVTLMLAIFIVYMVSRDNVSCSICL

SEQ ID NO: 27022 - protein, 584 aa, synthetic construct
  REGION 1..584: note = hemagglutinin__InfluenzaB__AGX16050
MKAIIVLLMVVTSNADRICTGITSSNSPHVVKTATQGEVNVTGVIPLTTTPTKSYFANLKGTRTRGKLCPDCLNCTDLDVALGRPMCVGTTPSAKASILHEVRPVTSGCFPIMHDRTKIRQLPNLLRGYENIRLSTQNVIDAENAPGGPYRLGTSGSCPNATSKSGFFATMAWAVPKDNNKNATNPLTVEVPYICTEGEDQITVWGFHSDNKTQMKNLYGDSNPQKFTSSANGVTTHYVSQIGGFPAQTEDGGLPQSGRIVVDYMVQKPRKTGTIVYQRGVLLPQKVWCASGRSKVIKGSLPLIGEADCLHEKYGGLNKSKPYYTGEHAKAIGNCPIWVKTPLKLANGTKYRPPAKLLKERGFFGAIAGFLEGGWEGMIAGWHGYTSHGAHGVAVAADLKSTQEAINKITKNLNSLSELEVKNLQRLSGAMDELHNEILELDEKVDDLRADTISSQIELAVLLSNEGIINSEDEHLLALERKLKKMLGPSAVDIGNGCFETKHKCNQTCLDRIAAGTFNAGEFSLPTFDSLNITAASLNDDGLDNHTILLYYSTAASSLAVTLMLAIFIVYMVSRDNVSCSICL

SEQ ID NO: 27023 - protein, 584 aa, synthetic construct
  REGION 1..584: note = hemagglutinin__InfluenzaB__AGX16061
MKAIIVLLMVVTSNADRICTGITSSNSPHVVKTATQGEVNVTGVIPLTTTPTKSYFANLKGTRTRGKLCPDCLNCTDLDVALGRPMCVGTTPSAKASILHEVRPVTSGCFPIMHDRTKIRQLPNLLRGYENIRLSTQNVIDAEKAPGGPYRLGTSGSCPNATSKSGFFATMAWAVPKDNNKNATNPLTVEVPYICTEGEDQITVWGFHSDNKTQMKNLYGDSNPQKFTSSANGVTTHYVSQIGGFPDQTEDGGLPQSGRIVVDYMMQKPGKTGTIVYQRGVLLPQKVWCASGRSKVIKGSLPLIGEADCLHEKYGGLNKSKPYYTGEHAKAIGNCPIWVKTPLKLANGTKYRPPAKLLKERGFFGAIAGFLEGGWEGMIAGWHGYTSHGAHGVAVAADLKSTQEAINKITKNLNSLSELEVKNLQRLSGAMDELHNEILELDEKVDDLRADTISSQIELAVLLSNEGIINSEDEHLLALERKLKKMLGPSAVDIGNGCFETKHKCNQTCLDRIAAGTFNAGEFSLPTFDSLNITAASLNDDGLDNHTILLYYSTAASSLAVTLMLAIFIVYMVSRDNVSCSICL

SEQ ID NO: 27024 - protein, 584 aa, synthetic construct
  REGION 1..584: note = hemagglutinin__InfluenzaB__AGX16083
MKAIIVLLMVVTSNADRICTGITSSNSPHVVKTATQGEVNVTGVIPLTTTPTKSYFANLKGTRTRGKLCPDCLNCTDLDVALGRPMCVGTTPSAKASILHEVRPVTSGCFPIMHDRTKIRQLPNLLRGYENIRLSTQNVIDAEKAPGGPYRLGTSGSCPNATSKSGFFATMAWAVPKDNNKNATNPLTVEVPYICTEGEDQITVWGFHSDNKTQMKNLYGDSNPQKFTSSANGVTTHYVSQIGGFPDQTEDGGLPQSGRIVVDYMMQKPGKTGTIVYQRGVLLPQKVWCASGRSKVIKGSLPLIGEADCLHEKYGGLNKSKPYYTGEHAKAIGNCPIWVKTPLKLANGTKYRPPAKLLKERGFFGAIAGFLEGGWEGMIAGWHGYTSHGAHGVAVAADLKSTQEAINKITKNLNSLSELEVKNLQRLSGAMDELHNEILELDEKVDDLRADTISSQIELAVLLSNEGIINSEDEHLLALERKLKKMLGPSAVEIGNGCFETKHKCNQTCLDRIAAGTFNAGEFSLPTFDSLNITAASLNDDGLDNHTILLYYSTAASSLAVTLMLAIFIVYMVSRDNVSCSICL

SEQ ID NO: 27025 - protein, 584 aa, synthetic construct
  REGION 1..584: note = hemagglutinin__InfluenzaB__AGX16105
MKAIIVLLMVVTSNADRICTGITSSSSPHVVKTATQGEVNVTGVIPLTTTPTKSYFANLKGTRTRGKLCPDCLNCTDLDVALGRPMCVGTTPSAKASILHEVRPVTSGCFPIMHDRTKIRQLPNLLRGYENIRLSTQNVIDAEKAPGGPYRLGTSGSCPNATSKSGFFATMAWAVPKDNNKNATNPLTVEVPYICTEGEDQITVWGFHSDNKTQMKNLYGDSNPQKFTSSANGVTTHYVSQIGGFPDQTEDGGLPQSGRIVVDYMMQKPGKTGTIVYQRGVLLPQKVWCASGRSKVIKGSLPLIGEADCLHEKYGGLNKSKPYYTGEHAKAIGNCPIWVKTPLKLANGTKYRPPAKLLKERGFFGAIAGFLEGGWEGMIAGWHGYTSHGAHGVAVAADLKSTQEAINKITKNLNSLSELEVKNLQRLSGAMDELHSEILELDEKVDDLRADTISSQIELAVLLSNEGIINSEDEHLLALERKLKKMLGPSAVDIGNGCFETKHKCNQTCLDRIAAGTFNAGEFSLPTFDSLNITAASLNDDGLDNHTILLYYSTAASSLAVTLMLAIFIVYMVSRDNVSCSICL

SEQ ID NO: 27026 - protein, 584 aa, synthetic construct
  REGION 1..584: note = hemagglutinin__InfluenzaB__AGX16116
MKAIIVLLMVVTSNADRICTGITSSNSPHVVKTATQGEVNVTGVIPLTTTPTKSYFANLKGTRTRGKLCPDCLNCTDLDVALGRPMCVGTTPSAKASILHEVRPVTSGCFPIMHDRTKIRQLPNLLRGYENIRLSTQNVIDAENAPGGPYRLGTSGSCPNATSKSGFFATMAWAVPKDNNKNATNPLTVEVPYVCTEGEDQITVWGFHSDNKTQMKNLYGDSNPQKFTSSANGVTTHYVSQIGGFPAQTEDGGLPQSGRIVVDYMVQKPRKTGTIVYQRGVLLPQKVWCASGRSKVIKGSLPLIGEADCLHEKYGGLNKSKPYYTGEHAKAIGNCPIWVKTPLKLANGTKYRPPAKLLKERGFFGAIAGFLEGGWEGMIAGWHGYTSHGAHGVAVAADLKSTQEAINKITKNLNSLSELEIKNLQRLSGAMDELHNEILELDEKVDDLRADTISSQIELAVLLSNEGIINSEDEHLLALERKLKKMLGPSAVDIGNGCFETKHKCNQTCLDRIAAGTFNAGEFSLPTFDSLNITAASLNDDGLDNHTILLYYSTAASSLAVTLMLAIFIVYMVSRDNVSCSICL

SEQ ID NO: 27027 - protein, 584 aa, synthetic construct
  REGION 1..584: note = hemagglutinin__InfluenzaB__AGX16127
MKAIIVLLMVVTSNADRICTGITSSNSPHVVKTATQGEVNVTGVIPLTTTPTKSYFANLKGTRTRGKLCPDCLNCTDLDVALGRPMCVGTTPSAKASILHEVRPVTSGCFPIMHDRTKIRQLPNLLRGYENIRLSTQNVIDAENAPGGPYRLGTSGSCPNATSKSGFFATMAWAVPKDNNKNATNPLTVEVPYVCTEGEDQITVWGFHSDNKIQMKNLYGDSNPQKFTSSANGVTTHYVSQIGGFPAQTEDGGLPQSGRIVVDYMVQKPRKTGTIVYQRGVLLPQKVWCASGRSKVIKGSLPLIGEADCLHEKYGGLNKSKPYYTGEHAKAIGNCPIWVKTPLKLANGTKYRPPAKLLKERGFFGAIAGFLEGGWEGMIAGWHGYTSHGAHGVAVAADLKSTQEAINKITKNLNSLSELEIKNLQRLSGAMDELHNEILELDEKVDDLRADTISSQIELAVLLSNEGIINSEDEHLLALERKLKKMLGPSAVDIGNGCFETKHKCNQTCLDRIAAGTFNAGEFSLPTFDSLNITAASLNDDGLDNHTILLYYSTAASSLAVTLMLAIFIVYMVSRDNVSCSICL

SEQ ID NO: 27028 - protein, 584 aa, synthetic construct; identical to SEQ ID NO: 27026
  REGION 1..584: note = hemagglutinin__InfluenzaB__AGX16138

SEQ ID NO: 27029 - protein, 584 aa, synthetic construct; identical to SEQ ID NO: 27023
  REGION 1..584: note = hemagglutinin__InfluenzaB__AGX16149

SEQ ID NO: 27030 - protein, 584 aa, synthetic construct; identical to SEQ ID NO: 27024
  REGION 1..584: note = hemagglutinin__InfluenzaB__AGX16160

SEQ ID NO: 27031 - protein, 584 aa, synthetic construct; identical to SEQ ID NO: 27024
  REGION 1..584: note = hemagglutinin__InfluenzaB__AGX16182

SEQ ID NO: 27032 - protein, 584 aa, synthetic construct; identical to SEQ ID NO: 26426
  REGION 1..584: note = hemagglutinin__InfluenzaB__AGX16193

SEQ ID NO: 27033 - protein, 584 aa, synthetic construct; identical to SEQ ID NO: 26426
  REGION 1..584: note = hemagglutinin__InfluenzaB__AGX16215

SEQ ID NO: 27034 - protein, 584 aa, synthetic construct; identical to SEQ ID NO: 26426
  REGION 1..584: note = hemagglutinin__InfluenzaB__AGX16226

SEQ ID NO: 27035 - protein, 584 aa, synthetic construct
  REGION 1..584: note = hemagglutinin__InfluenzaB__AGX16237
MKAIIVLLMVVTSNADRICTGITSSNSPHVVKTATQGEVNVTGVIPLTTTPTKSYFANLKGTRTRGKLCPDCLNCTDLDVALGRPMCVGTTPSAKASILHEVRPVTSGCFPIMHDRTKIRQLPNLLRGYENIRLSTQNVIDAEKAPGGPYRLGTSGSCPNATSKSGFFATMAWAVPKDNNKNATNPLTVEVPYICTEGEDQITVWGFHSDNKTQMKNLYGDSNPQKFTSSANGVTTHYVSQIGGFPDQTEDGGLPQSGRIVVDYMMQKPGKTGTIVYQRGVLLPQKVWCASGRSKVIKGSLPLIGEADCLHEKYGGLNKSKPYYTGEHAKAIGNCPIWVKTPLKLANGTKYRPPAKLLKERGFFGAIAGFLEGGWEGMIAGWHGYTSHGAHGVAVAADLKSTQEAINKITKNLNSLSELEVKNLQRLSGAMDELHNEILELDEKVDDLRADTISSQIELAVLLSNEGIINSEDEHLLALERKLKKMLGPSAVDIGNGCFETKHKCNQTCLDRIAAGTFNAGEFSLPTFDSLNITAASLNDDGLDNHTILLYYSTAASSLAITLMLAIFIVYMVSRDNVSCSICL

SEQ ID NO: 27036 - protein, 584 aa, synthetic construct; identical to SEQ ID NO: 26426
  REGION 1..584: note = hemagglutinin__InfluenzaB__AGX16248

SEQ ID NO: 27037 - protein, 584 aa, synthetic construct; identical to SEQ ID NO: 26426
  REGION 1..584: note = hemagglutinin__InfluenzaB__AGX16259

SEQ ID NO: 27038 - protein, 584 aa, synthetic construct
  REGION 1..584: note = hemagglutinin__InfluenzaB__AGX16270
MKAIIVLLMVVTSNADRICTGITSSNSPHVVKTATQGEVNVTGVIPLTTTPTKSYFANLKGTRTRGKLCPDCLNCTDLDVALGRPMCVGTTPSAKASILHEVRPVTSGCFPIMHDRTKIRQLANLLRGYENIRLSTQNVIDAEKAPGGPYRLGTSGSCPNATSKSGFFATMAWAVPKDNNKNATNPLTVEVPYICKEGEDQITVWGFHSDNKTQMKNLYGDSNPQKFTSSANGVTTHYVSQIGGFPDQTEDGGLPQSGRIVVDYMIQKPGKTGTIVYQRGVLLPQKVWCASGRSKVIKGSLPLIGEADCLHEKYGGLNKSKPYYTGEHAKAIGNCPIWVKTPLKLANGTKYRPPAKLLKERGFFGAIAGFLEGGWEGMIAGWHGYTSHGAHGVAVAADLKSTQEAINKITKNLNSLSELEVKNLQRLSGAMDELHNEILELDEKVDDLRADTISSQIELAVLLSNEGIINSEDEHLLALERKLKKMLGPSAVDIGNGCFETKHKCNQTCLDRIAAGTFNAGEFSLPTFDSLNITAASLNDDGLDNHTILLYYSTAASSLAVTLMLAIFIVYMVSRDNVSCSICL

SEQ ID NO: 27039 - protein, 584 aa, synthetic construct; identical to SEQ ID NO: 27038
  REGION 1..584: note = hemagglutinin__InfluenzaB__AGX16281

SEQ ID NO: 27040 - protein, 584 aa, synthetic construct
  REGION 1..584: note = hemagglutinin__InfluenzaB__AGX16292
MKAIIVLLMVVTSNADRICTGITSSNSPHVVKTATQGEVNVTGVIPLTTTPTKSYFANLKGTRTRGKLCPDCLNCTDLDVALGRPMCVGTTPSAKASILHEVRPVTSGCFPIMHDRTKIRQLANLLRGYENIRLSNQNVIDAEKAPGGPYRLGTSGSCPNATSKSGFFATMAWAVPKDNNKNATNPLTVEVPYICTEGEDQITVWGFHSDNKTQMKNLYGDSNPQKFTSSANGVTTHYVSQIGGFPDQTEDGGLPQSGRIVVDYMMQKPGKTGTIVYQRGVLLPQKVWCASGRSKVIKGALPLIGEADCLHEKYGGLNKSKPYYTGEHAKAIGNCPIWVKTPLKLANGTKYRPPAKLLKERGFFGAIAGFLEGGWEGMIAGWHGYTSHGAHGVAVAADLKSTQEAINKITKNLNSLSELEVKNLQRLSGAMDELHNEILELDEKVDDLRADTISSQIELAVLLSNEGIINSEDEHLLALERKLKKMLGPSAVDIGNGCFETKHKCNQTCLDRIAAGTFNAGEFSLPTFDSLNITAASLNDDGLDNHTILLYYSTAASSLAVTLMLAIFIVYMVSRDNVSCSICL

SEQ ID NO: 27041 - protein, 585 aa, synthetic construct; identical to SEQ ID NO: 26514
  REGION 1..585: note = hemagglutinin__InfluenzaB__AGX16303

SEQ ID NO: 27042 - protein, 584 aa, synthetic construct; identical to SEQ ID NO: 26426
  REGION 1..584: note = hemagglutinin__InfluenzaB__AGX16314

SEQ ID NO: 27043 - protein, 584 aa, synthetic construct; identical to SEQ ID NO: 26426
  REGION 1..584: note = hemagglutinin__InfluenzaB__AGX16325

SEQ ID NO: 27044 - protein, 584 aa, synthetic construct; identical to SEQ ID NO: 26731
  REGION 1..584: note = hemagglutinin__InfluenzaB__AGX16336

SEQ ID NO: 27045 - protein, 584 aa, synthetic construct; identical to SEQ ID NO: 26731
  REGION 1..584: note = hemagglutinin__InfluenzaB__AGX16347

SEQ ID NO: 27046 - protein, 584 aa, synthetic construct; identical to SEQ ID NO: 26731
  REGION 1..584: note = hemagglutinin__InfluenzaB__AGX16358

SEQ ID NO: 27047 - protein, 584 aa, synthetic construct
  REGION 1..584: note = hemagglutinin__InfluenzaB__AGX16369
MKAIIVLLMVVTSNADRICTGITSSNSPHVVKTATQGEVNVTGVIPLTTTPTKSYFANLKGTRTRGKLCPDCLNCTDLDVALGRPMCVGTTPSAKASILHEVRPVTSGCFPIMHDRTKIRQLPNLLRGYENIRLSTQNVIDAEKAPGGPYRLGTSGSCPNATSKSGFFATMAWAVPKDNNKNATNPLTVEVPYICTEGEDQITVWGFHSDNKTQMKNLYGDSNPQKFTSSANGVTTHYVSQIGSFPDQTEDGGLPQSGRIVVDYMMQKPGKTGTIVYQRGILLPQKVWCASGRSKVIKGSLPLIGEADCLHEKYGGLNKSKPYYTGEHAKAIGNCPIWVKTPLKLANGTKYRPPAKLLKERGFFGAIAGFLEGGWEGMIAGWHGYTSHGAHGVAVAADLKSTQEAINKITKNLNSLSELEVKNLQRLSGAMDELHNEILELDEKVDDLRADTISSQIELAVLLSNEGIINSEDEHLLALERKLKKMLGPSAVEIGNGCFETKHKCNQTCLDRIAAGTFNAGEFSLPTFDSLNITAASLNDDGLDNHTILLYYSTAASSLAVTLMLAIFIVYMVSRDNVSCSICL

SEQ ID NO: 27048 - protein, 584 aa, synthetic construct
  REGION 1..584: note = hemagglutinin__InfluenzaB__AGX16380
MKAIVVLLMVVTSNADRICTGITSSNSPHVVKTATQGEVNVTGVIPLTTTPTKSYFANLKGTRTRGKLCPDCLNCTDLDVALGRPMCVGATPSAKASILHEVRPVTSGCFPMMHDRTKIRQLPNLLRGYENIRLSTQNVIDAEKAPGGPYRLGTSGSCPNATSKSGFFATMAWAVPKDNNKNATNPLTVEVPYICTEGEDQITVWGFHSDNKTQMKNLYGDSNPQKFTSSANGVTTHYVSQIGSFPDQTEDGGLPQSGRIVVDYMMQKPGKTGTIVYQRGVLLPQKVWCASGRSKVIKGSLPLIGEADCLHEKYGGLNKSKPYYTGEHAKAIGNCPIWVKTPLKLANGTKYRPPAKLLKERGFFGAIAGFLEGGWEGMIAGWHGYTSHGAHGVAVAADLKSTQEAINKITKNLNSLSELEVKNLQRLSGAMDELHNEILELDEKVDDLRADTISSQIELAVLLSNEGIINSEDEHLLALERKLKKMLGPSAVEIGNGCFETKHKCNQTCLDRIAAGTFNAGEFSLPTFDSLNITAASLNDDGLDNHTILLYYSTAASSLAVTLMLAIFIVYMVSRDNVSCSICL

SEQ ID NO: 27049 - protein, 584 aa, synthetic construct; identical to SEQ ID NO: 26567
  REGION 1..584: note = hemagglutinin__InfluenzaB__AGX16391

SEQ ID NO: 27050 - protein, 584 aa, synthetic construct
  REGION 1..584: note = hemagglutinin__InfluenzaB__AGX16402
MKAIIVLLMVVTSNADRICTGITSSNSPHVVKTATQGEVNVTGVIPLTTTPTKSYFANLKGTRTRGKLCPDCLNCTDLDVALGRPMCVGTTPSAKASILHEVRPVTSGCFPIMHDRTKIRQLPNLLRGYENIRLSTQNVIDAEKAPGGPYRLGTSGSCPNATSKIGFFATMAWAVPKDNYKNATNPLTVEVPYICTEGEDQITVWGFHSDNKPQMKNLYGDSNPQKFTSSANGVTTHYVSQIGDFPDQTEDGGLPQSGRIVVDYMMQKPGKTGTIVYQRGVLLPQKVWCASGRSKVIKGSLPLIGEADCLHEKYGGLNKSKPYYTGEHAKAIGNCPIWVKTPLKLANGTKYRPPAKLLKERGFFGAIAGFLEGGWEGMIAGWHGYTSHGAHGVAVAADLKSTQEAINKITKNLNSLSELEVKNLQRLSGAMDELHNEILELDEKVDDLRADTISSQIELAVLLSNEGIINSEDEHLLALERKLKKMLGPSAVDIGNGCFETKHKCNQTCLDRIAAGTFNAGEFSLPTFDSLNITAASLNDDGLDNHTILLYYSTAASSLAVTLMLAIFIVYMVSRDNVSCSICL

SEQ ID NO: 27051 - protein, 584 aa, synthetic construct; identical to SEQ ID NO: 26820
  REGION 1..584: note = hemagglutinin__InfluenzaB__AGX16413

SEQ ID NO: 27052 - protein, 584 aa, synthetic construct; identical to SEQ ID NO: 26820
  REGION 1..584: note = hemagglutinin__InfluenzaB__AGX16423

SEQ ID NO: 27053 - protein, 584 aa, synthetic construct; identical to SEQ ID NO: 26820
  REGION 1..584: note = hemagglutinin__InfluenzaB__AGX16434

SEQ ID NO: 27054 - protein, 584 aa, synthetic construct; identical to SEQ ID NO: 26820
  REGION 1..584: note = hemagglutinin__InfluenzaB__AGX16445

SEQ ID NO: 27055 - protein, 584 aa, synthetic construct; identical to SEQ ID NO: 26820
  REGION 1..584: note = hemagglutinin__InfluenzaB__AGX16456

SEQ ID NO: 27056 - protein, 584 aa, synthetic construct
  REGION 1..584: note = hemagglutinin__InfluenzaB__AGX16467
MKAIIVLLMVVTSNADRICTGITSSNSPHVVKTATQGEVNVTGVIPLTTTPTKSYFANLKGTRTRGKLCPDCLNCTDLDVALGRPMCVGTTPSAKASILHEVRPVTSGCFPIMHDRTKIRQLPNLLRGYENIRLSTQNVIDAEKAPGGPYRLGTSGSCPNATSKSGFFATMAWAVPKDNNKNATNPLTVEVPYICTEGEDQITVWGFHSDNKTQMKNLYGDSNPQKFTSSANGVTTHYVSQIGSFPDQTEDGGLPQSGRIVVDYMMQKPGKTGTIVYQRGVLLPQRVWCASGRSKVIKGSLPLIGEADCLHEKYGGLNKSKPYYTGEHAKAIGNCPIWVKTPLKLANGTKYRPPAKLLKERGFFGAIAGFLEGGWEGMIAGWHGYTSHGAHGVAVAADLKSTQEAINKITKNLNSLSELEVKNLQRLSGAMDELHNEILELDEKVDDLRADTISSQIELAVLLSNEGIINSEDEHLLALERKLKKMLGPSAVEIGNGCFETKHKCNQTCLDRIAAGTFNAGEFSLPTFDSLNITAASLNDDGLDNHTILLYYSTAASSLAVTLMLAIFIVYMVSRDNVSCSICL

SEQ ID NO: 27057 - protein, 584 aa, synthetic construct; identical to SEQ ID NO: 26820
  REGION 1..584: note = hemagglutinin__InfluenzaB__AGX16478

SEQ ID NO: 27058 - protein, 584 aa, synthetic construct; identical to SEQ ID NO: 26567
  REGION 1..584: note = hemagglutinin__InfluenzaB__AGX16489

SEQ ID NO: 27059 - protein, 585 aa, synthetic construct; identical to SEQ ID NO: 26979
  REGION 1..585: note = hemagglutinin__InfluenzaB__AGX16500

SEQ ID NO: 27060 - protein, 585 aa, synthetic construct; identical to SEQ ID NO: 26979
  REGION 1..585: note = hemagglutinin__InfluenzaB__AGX16511

SEQ ID NO: 27061 - protein, 585 aa, synthetic construct; identical to SEQ ID NO: 26979
  REGION 1..585: note = hemagglutinin__InfluenzaB__AGX16522

SEQ ID NO: 27062 - protein, 585 aa, synthetic construct
  REGION 1..585: note = hemagglutinin__InfluenzaB__AGX16533
MKAIIVLLMVVTSNADRICTGITSSNSPHVVKTATQGEVNVTGVIPLTTTPTKSHFANLKGTKTRGKLCPKCLNCTDLDVALGRPKCTGNIPSAKVSILHEVRPVTSGCFPIMHDRTKIRQLPNLLRGYEHIRLSTHNVINAEKAPGGPYKIGTSGSCPNVTNGNGFFATMAWAVPKNDNNKTATNSLTIEVPYICTEGEDQITVWGFHSDKETQMAKLYGDSKPQKFTSSANGVTTHYVSQIGGFPNQTEDGGLPQSGRIVVDYMVQKSGKTGTITYQRGILLPQKVWCASGRSKVIKGSLPLIGEADCLHEKYGGLNKSKPYYTGEHAKAIGNCPIWVKTPLKLANGTKYRPPAKLLKERGFFGAIAGFLEGGWEGMIAGWHGYTSHGAHGVAVAADLKSTQEAINKITKNLNSLSELEVKNLQRLSGAMDELHNEILELDEKVDDLRADTISSQIELAVLLSNEGIINSEDEHLLALERKLKKMLGPSAVEIGNGCFETKHKCNQTCLDRIAAGTFDAGEFSLPTFDSLNITAASLNDDGLDNHTILLYYSTAASSLAVTLMIAIFVVYMVSRDNVSCSICL

SEQ ID NO: 27063 - protein, 585 aa, synthetic construct
  REGION 1..585: note = hemagglutinin__InfluenzaB__AGX16555
MKAIIVLLMVVTSNADRICTGITSSNSPHVVKTATQGEVNVTGVIPLTTTPTKSHFANLKGTKTRGKLCPKCLNCTDLDVALGRPKCTGNIPSAKVSILHEVRPVTSGCFPIMHDRTKIRQLPNLLRGYEHIRLSTHNVINAEKAPGGPYKIGTSGSCPNVTNGNGFFATMAWAVPKNDNNKTATNSLTIEVPYICTEGEDQITVWGFHSDNEAQMAKLYGDSKPQKFTSSANGVTTHYVSQIGGFPNQTEDGGLPQSGRIVVDYMVQKSGKTGTITYQRGILLPQKVWCASGRSKVIKGSLPLIGEADCLHEKYGGLNKSKPYYTGEHAKAIGNCPIWVKTPLKLANGTKYRPPAKLLKERGFFGAIAGFLEGGWEGMIAGWHGYTSHGAHGVAVAADLKSTQEAINKITKNLNSLSELEVKNLQRLSGAMDELHNEILELDEKVDDLRADTISSQIELAVLLSNEGIINSEDEHLLALERKLKKMLGPSAVEIGNGCFETKHKCNQTCLDRIAAGTFDAGEFSLPTFDSLNITAASLNDDGLDNHTILLYYSTAASSLAVTLMIAIFVVYMVSRDNVSCSICL

SEQ ID NO: 27064 - protein, 585 aa, synthetic construct
  REGION 1..585: note = hemagglutinin__InfluenzaB__AGX16566
MKAIIVLLMVVTSNADRICTGITSSNSPHVVKTATQGEVNVTGVIPLTTTPTKSHFANLKGTKTRGKLCPKCLNCTDLDVALGRPKCTGNIPSAKVSILHEVRPVTSGCFPIMHDRTKIRQLPNLLRGYEHIRLSTHNVINAEKAPGGPYKIGTSGSCPNVTNGNGFFATMAWAVPKNDNNKTATNSLTIEVPYICTEGEDQITVWGFHSDNEIQMAKLYGDSKPQKFTSSANGVTTHYVSQIGGFPNQTEDGGLPQSGRIVVDYMVQKSGKTGTITYQRGILLPQKVWCASGRSKVIKGSLPLIGEADCLHEKYGGLNKSKPYYTGEHAKAIGNCPIWVKTPLKLANGTKYRPPAKLLKERGFFGAIAGFLEGGWEGMIAGWHGYTSHGAHGVAVAADLKSTQEAINKITKNLNSLSELEVKNLQRLSGAMDELHNEILELDEKVDDLRADTISSQIELAVLLSNEGIINSEDEHLLALERKLKKMLGPSAVEIGNGCFETKHKCNQTCLDRIAAGTFDAGEFSLPTFDSLNITAASLNDDGLDNHTILLYYSTAASSLAVTLMIAIFVVYMVSRDNVSCSICL

SEQ ID NO: 27065 - protein, 585 aa, synthetic construct; identical to SEQ ID NO: 26979
  REGION 1..585: note = hemagglutinin__InfluenzaB__AGX16577

SEQ ID NO: 27066 - protein, 585 aa, synthetic construct
  REGION 1..585: note = hemagglutinin__InfluenzaB__AGX16588
MKAIIVLLMVVTSNADRICTGITSSNSPHVVKTATQGEVNVTGVIPLTTTPTKSHFANLKGTKTRGKLCPKCLNCTDLDVALGRPKCTGNIPSAKVSILHEVRPVTSGCFPIMHDRTKIRQLPNLLRGYEHIRLSTHNVINAEKAPGGPYKIGTSGSCPNVTNGNGFFATMAWAVPKNDNNKTATNSLTIEVPYICTEGEDQITVWGFHSDNEIQMAKLYGDSKPQKFTSSANGVTTHYVSQIGGFPNQTEDGGLPQSGRIVVDYMVQKSGKTGTITYQRGILLPQKVWCASGRSKVIKGSLPLIGEADCLHEKYGGLNKSKPYYTGEHAKAIGNCPIWVKTPLKLANGTKYRPPAKLLKERGFFGAIAGFLEGGWEGMIAGWHGYTSHGAHGVAVAADLKSTQEAINKITKNLNSLSELEVKNLQRLSGAMDELHNEILELDEKVDDLRADTISSQIELAVLLSNEGIINSEDEHLLALERKLKKMLGPSAIEIGNGCFETKHKCNQTCLDRIAAGTFDAGEFSLPTFDSLNITAASLNDDGLDNHTILLYYSTAASSLAVTLMIAIFVVYMVSRDNVSCSICL

SEQ ID NO: 27067 - protein, 585 aa, synthetic construct; identical to SEQ ID NO: 26979
  REGION 1..585: note = hemagglutinin__InfluenzaB__AGX16599

SEQ ID NO: 27068 - protein, 585 aa, synthetic construct; identical to SEQ ID NO: 27062
  REGION 1..585: note = hemagglutinin__InfluenzaB__AGX16610

SEQ ID NO: 27069 - protein, 585 aa, synthetic construct; identical to SEQ ID NO: 26979
  REGION 1..585: note = hemagglutinin__InfluenzaB__AGX16621

SEQ ID NO: 27070 - protein, 585 aa, synthetic construct
  REGION 1..585: note = hemagglutinin__InfluenzaB__AGX16654
MKAIIVLLMVVTSNADRICTGITSSNSPHVVKTATQGEVNVTGVIPLTTTPTKSHFANLKGTKTRGKLCPKCLNCTDLDVALGRPKCTGNIPSAKVSILHEVRPVTSGCFPIMHDRTKIRQLPNLLRGYEHIRLSTHNVINAEKAPGGPYKIGTSGSCPNVTNGNGFFATMAWAVPKNDNNKTAINSLTIEVPYICTEGEDQITVWGFHSDNETQMAKLYGDSKPQKFTSSANGVTTHYVSQIGGFPNQTEDGGLPQSGRIVVDYMVQKSGKTGTITYQRGILLPQKVWCASGRSKVIKGSLPLIGEADCLHEKYGGLNKSKPYYTGEHAKAIGNCPIWVKTPLKLANGTKYRPPAKLLKERGFFGAIAGFLEGGWEGMIAGWHGYTSHGAHGVAVAADLKSTQEAINKITKNLNSLSELEVKNLQRLSGAMDELHNEILELDEKVDDLRADTISSQIELAVLLSNEGIINSEDEHLLALERKLKKMLGPSAIEIGNGCFETKHKCNQTCLDRIAAGTFDAGEFSLPTFDSLNITAASLNDDGLDNHTILLYYSTAASSLAVTLMIAIFVVYMVSRDNVSCSICL

SEQ ID NO: 27071 - protein, 585 aa, synthetic construct; identical to SEQ ID NO: 26979
  REGION 1..585: note = hemagglutinin__InfluenzaB__AGX16665

SEQ ID NO: 27072 - protein, 585 aa, synthetic construct; identical to SEQ ID NO: 26979
  REGION 1..585: note = hemagglutinin__InfluenzaB__AGX16676

SEQ ID NO: 27073 - protein, 585 aa, synthetic construct; identical to SEQ ID NO: 26979
  REGION 1..585: note = hemagglutinin__InfluenzaB__AGX16687

SEQ ID NO: 27074 - protein, 585 aa, synthetic construct; identical to SEQ ID NO: 26979
  REGION 1..585: note = hemagglutinin__InfluenzaB__AGX16698

SEQ ID NO: 27075 - protein, 585 aa, synthetic construct
  REGION 1..585: note = hemagglutinin__InfluenzaB__AGX16709
MKAIIVLLMVVTSNADRICTGITSSNSPHVVKTATQGEVNVTGVIPLTTTPTKSHFANLKGTKTRGKLCPKCLNCTDLDVALGRPKCTENIPSAKVSILHEVRPVTSGCFPIMHDRTKIRQLPNLLRGYEHIRLSTHNVINAEKAPGGPYKIGTSGSCPNVTNGNGFFATMAWAVPKNDNNKTATNSLTIEVPYICTEGEDQITVWGFHSDNETQMAKLYGDSKPQKFTSSANGVTTHYVSQIGGFPNQTEDGGLPQSGRIVVDYMVQKSGKTGTITYQRGILLPQKVWCASGRSKVIKGSLPLIGEADCLHEKYGGLNKSKPYYTGEHAKAIGNCPIWVKTPLKLANGTKYRPPAKLLKERGFFGAIAGFLEGGWEGMIAGWHGYTSHGAHGVAVAADLKSTQEAINKITKNLNSLSELEVKNLQRLSGAMDELHNEILELDEKVDDLRADTISSQIELAVLLSNEGIINSEDEHLLALERKLKKMLGPSAVEIGNGCFETKHKCNQTCLDRIAAGTFDAGEFSLPTFDSLNITAASLNDDGLDNHTILLYYSTAASSLAVTLMIAIFVVYMVSRDNVSCSICL

SEQ ID NO: 27076 - protein, 585 aa, synthetic construct; identical to SEQ ID NO: 26979
  REGION 1..585: note = hemagglutinin__InfluenzaB__AGX16720

SEQ ID NO: 27077 - protein, 585 aa, synthetic construct; identical to SEQ ID NO: 26979
  REGION 1..585: note = hemagglutinin__InfluenzaB__AGX16731

SEQ ID NO: 27078 - protein, 585 aa, synthetic construct
  REGION 1..585: note = hemagglutinin__InfluenzaB__AGX16742
MKAIIVLLMVVTSNADRICTGITSSNSPHVVKTATQGEVNVTGVIPLTTTPTKSHFANLKGTKTRGKLCPKCLNCTDLDVALGRPKCTGNIPSAKVSIIHEVRPVTSGCFPIMHDRTKIRQLPNLLRGYEHIRLSTHNVINAEKAPGGPYKIGTSGSCPNVTNGNGFFATMAWAVPKNDNNKTATNSLTIEVPYICTEGEDQITVWGFHSDNETQMAKLYGDSKPQKFTSSANGVTTHYVSQIGGFPNQTEDGGLPQSGRIVVDYMVQKSGKTGTITYQRGILLPQKVWCASGRSKVIKGSLPLIGEADCLHEKYGGLNKSKPYYTGEHAKAIGNCPIWVKTPLKLANGTKYRPPAKLLKERGFFGAIAGFLEGGWEGMIAGWHGYTSHGAHGVAVAADLKSTQEAINKITKNLNSLSELEVKNLQRLSGAMDELHNEILELDEKVDDLRADTISSQIELAVLLSNEGIINSEDEHLLALERKLKKMLGPSAVEIGNGCFETKHKCNQTCLDRIAAGTFDAGEFSLPTFDSLNITAASLNDDGLDNHTILLYYSTAASSLAVTLMIAIFVVYMVSRDNVSCSICL

SEQ ID NO: 27079 - protein, 585 aa, synthetic construct; identical to SEQ ID NO: 26979
  REGION 1..585: note = hemagglutinin__InfluenzaB__AGX16753

SEQ ID NO: 27080 - protein, 585 aa, synthetic construct; identical to SEQ ID NO: 26979
  REGION 1..585: note = hemagglutinin__InfluenzaB__AGX16764

SEQ ID NO: 27081 - protein, 585 aa, synthetic construct; identical to SEQ ID NO: 26979
  REGION 1..585: note = hemagglutinin__InfluenzaB__AGX16775

SEQ ID NO: 27082 - protein, 585 aa, synthetic construct
  REGION 1..585: note = hemagglutinin__InfluenzaB__AGX16797
MKAIIVLLMVVTSNADRICTGITSSNSPHVVKTATQGEVNVTGVIPLTTTPTKSHFANLKGTKTRGKLCPKCLNCTDLDVALGRPKCTGNMPSAKVSILHEVRPVTSGCFPIMHDRTKIRQLPNLLRGYEHIRLSTHNVINAEKAPGGPYKIGTSGSCPNVTNGNGFFATMAWAVPKNDNNKTATNSLTIEVPYICTEGEDQITVWGFHSDNETQMAKLYGDSKPQKFTSSANGVTTHYVSQIGGFPNQTEDGGLPQSGRIVVDYMVQKSGKTGTITYQRGILLPQKVWCASGRSKVIKGSLPLIGEADCLHEKYGGLNKSKPYYTGEHAKAIGNCPIWVKTPLKLANGTKYRPPAKLLKERGFFGAIAGFLEGGWEGMIAGWHGYTSHGAHGVAVAADLKSTQEAINKITKNLNSLSELEVKNLQRLSGAMDELHNEILELDEKVDDLRADTISSQIELAVLLSNEGIINSEDEHLLALERKLKKMLGPSAVEIGNGCFETKHKCNQTCLDRIAAGTFDAGEFSLPTFDSLNITAASLNDDGLDNHTILLYYSTAASSLAVTLMIAIFVVYMVSRDNVSCSICL

SEQ ID NO: 27083 - protein, 585 aa, synthetic construct; identical to SEQ ID NO: 26979
  REGION 1..585: note = hemagglutinin__InfluenzaB__AGX16808

SEQ ID NO: 27084 - protein, 585 aa, synthetic construct
  REGION 1..585: note = hemagglutinin__InfluenzaB__AGX16819
MKAIIVLLMVVTSNADRICTGITSSNSPHVVKTATQGEVNVTGVIPLTTTPTKSHFANLKGTKTRGKLCPKCLNCTDLDVALGRPKCTGNIPSAKVSILHEVRPVTSGCFPIMHDRTKIRQLPNLLRGYEHIRLSTHNVINAEKAPGGPYKIGTSGSCPNVTNGNGFFATMAWAVPKNDNNKTATNSLTIEVPYICTEGEDQITVWGFHSDSETQMAKLYGDSKPQKFTSSANGVTTHYVSQIGGFPNQTEDGGLPQSGRIVVDYMVQKSGKTGTITYQRGILLPQKVWCASGRSKVIKGSLPLIGEADCLHEKYGGLNKSKPYYTGEHAKAIGNCPIWVKTPLKLANGTKYRPPAKLLKERGFFGAIAGFLEGGWEGMIAGWHGYTSHGAHGVAVAADLKSTQEAINKITKNLNSLSELEVKNLQRLSGAMDELHNEILELDEKVDDLRADTISSQIELAVLLSNEGIINSEDEHLLALERKLKKMLGPSAVEIGNGCFETKHKCNQTCLDRIAAGTFDAGEFSLPTFDSLNITAASLNDDGLDNHTILLYYSTAASSLAVTLMIAIFIVYMVSRDNVSCSICL

SEQ ID NO: 27085 - protein, 585 aa, synthetic construct; identical to SEQ ID NO: 26979
  REGION 1..585: note = hemagglutinin__InfluenzaB__AGX16830

SEQ ID NO: 27086 - protein, 585 aa, synthetic construct
  REGION 1..585: note = hemagglutinin__InfluenzaB__AGX16841
MKAIIVLLMVVTSNADRICTGITSSNSPHVVKTATQGEVNVTGVIPLTTTPTKSHFANLKGTKTRGKLCPKCLNCTDLDVALGRPKCTGNIPSAKVSILHEVRPVTSGCFPIMHDRTKIRQLPNLLRGYEHIRLSTHNVINAEKAPGGPYKIGTSGSCPNVTNGNGFFATMAWAVPKNDNNKTATNSLTIEVPYICTEGEDQITVWGFHSDNETQMAKLYGDSKPQKFTSSANGMTTHYVSQIGGFPNQTEDGGLPQSGRIVVDYMVQKSGKTGTITYQRGILLPQKVWCASGRSKVIKGSLPLIGEADCLHEKYGGLNKSKPYYTGEHAKAIGNCPIWVKTPLKLANGTKYRPPAKLLKERGFFGAIAGFLEGGWEGMIAGWHGYTSHGAHGVAVAADLKSTQEAINKITKNLNSLSELEVKNLQRLSGAMDELHNEILELDEKVDDLRADTISSQIELAVLLSNEGIINSEDEHLLALERKLKKMLGPSAVEIGNGCFETKHKCNQTCLDRIAAGTFDAGEFSLPTFDSLNITAASLNGDGLDNHTILLYYSTAASSLAVTLMIAIFVVYMVSRDNVSCSICL

SEQ ID NO: 27087 - protein, 585 aa, synthetic construct
  REGION 1..585: note = hemagglutinin__InfluenzaB__AGX16852
MKAIIVLLMVVTSNADRICTGITSSNSPHVVKTATQGEVNVTGVIPLTTTPTKSHFANLKGTKTRGKLCPKCLNCTDLDVALGRPKCTGNIPSAKVSILHEVRPVTSGCFPIMHDRTKIRQLPNLLRGYEHIRLSTHNVINAEKAPGGPYKIGTSGSCPNVTNGNGFFATMAWAVPKNDNNKTATNSLTIEVPYICTEGEDQITVWGFHSDNETQMAKLYGDSKPQKFTSSANGVTTHYVSQIGGFPNQTEDGGLPQSGRIVVDYMVQKSGKTGTITYQRGILLPQKVWCASGRSKVIKGSLPLIGEADCLHEKYGGLNKSKPYYTGEHAKAIGNCPIWVKTPLKLANGTKYRPPAKLLKERGFFGAIAGFLEGGWEGMIAGWHGYTSHGAHGVAVAADLKSTQEAINKITKNLNSLSELEVKNLQRISGAMDELHNEILELDEKVDDLRADTISSQIELAVLLSNEGIINSEDEHLLALERKLKKMLGPSAVEIGNGCFETKHKCNQTCLDRIAAGTFDAGEFSLPTFDSLNITAASLNDDGLDNHTILLYYSTAASSLAVTLMIAIFVVYMVSRDNVSCSICL

SEQ ID NO: 27088 - protein, 585 aa, synthetic construct; identical to SEQ ID NO: 26979
  REGION 1..585: note = hemagglutinin__InfluenzaB__AGX16863

SEQ ID NO: 27089 - protein, 585 aa, synthetic construct; identical to SEQ ID NO: 26979
  REGION 1..585: note = hemagglutinin__InfluenzaB__AGX16874

SEQ ID NO: 27090 - protein, 585 aa, synthetic construct
  REGION 1..585: note = hemagglutinin__InfluenzaB__AGX16885
MKAIIVLLMVVTSNADRICTGITSSNSPHVVKTATQGEVNVTGVIPLTTTPTKSHFANLKGTKTRGKLCPKCLNCTDLDVALGRPKCTGNIPSAKVSILHEVRPVTSGCFPIMHDRTKIRQLPNLLRGYEHIRLSTHNVINAEKAPGGPYKIGTSGSCPNVTNGNGFFATMAWAVPKNDNNKTATNSLTIEVPYICTEGEDQITVWGFHSDNETQMAKLYGDSKPQKFTSSANGVTTHYVSQIGGFPNQTEDGGLPQSGRIVVDYMVQKSGKTGTITYQRGILLPQKVWCASGRSKVIKGSLPLIGEADCLHEKYGGLNKSKPYYTGEHAKAIGNCPIWVKTPLKLANGTKYRPPAKLLKERGFFGAIAGFLEGGWEGMIAGWHGYTSHGAHGVAVAADLKSTQEAINKITKNLNSLSELEVKNLQRLSGAMDELHNEILELDEKVDDLRADTISSQIELAVLLSNEGIINSEDEHLLALERKLKKMLGPSAIEIGNGCFETKHKCNQTCLDRIAAGTFDAGEFSLPTFDSLNITAASLNDDGLDNHTILLYYSTAASSLAVTLMIAIFVVYMVSRDNVSCSICL

SEQ ID NO: 27091 - protein, 585 aa, synthetic construct; identical to SEQ ID NO: 27090
  REGION 1..585: note = hemagglutinin__InfluenzaB__AGX16896

SEQ ID NO: 27092 - protein, 585 aa, synthetic construct; identical to SEQ ID NO: 26979
  REGION 1..585: note = hemagglutinin__InfluenzaB__AGX16907

SEQ ID NO: 27093 - protein, 585 aa, synthetic construct; identical to SEQ ID NO: 27064
  REGION 1..585: note = hemagglutinin__InfluenzaB__AGX16918

SEQ ID NO: 27094 - protein, 585 aa, synthetic construct; identical to SEQ ID NO: 26979
  REGION 1..585: note = hemagglutinin__InfluenzaB__AGX16940

SEQ ID NO: 27095 - protein, 585 aa, synthetic construct; identical to SEQ ID NO: 27090
  REGION 1..585: note = hemagglutinin__InfluenzaB__AGX16951

SEQ ID NO: 27096 - protein, 585 aa, synthetic construct
  REGION 1..585: note = hemagglutinin__InfluenzaB__AGX16962
MKAIIVLLMVVTSNADRICTGITSSNSPHVVKTATQGEVNVTGVIPLTTTPTESHFANLKGTKTRGKLCPKCLNCTDLDVALGRPKCTGNIPSAKVSILHEVRPVTSGCFPIMHDRTKIRQLPNLLRGYEHIRLSTHNVINAEKAPGGPYKIGTSGSCPNVTNGNGFFATMAWAVPKNDNNKTATNSLTIEVPYICTEGEDQITVWGFHSDNETQMAKLYGDSKPQKFTSSANGVTTHYVSQIGGFPNQKEDGGLPQSGRIVVDYMVQKSGNTGTITYQRGILLPQKVWCASGRSKVIKGSLPLIGEADCLHEKYGGLNKSKPYYTGEHAKAIGNCPIWVKTPLKLANGTKYRPPAKLLKERGFFGAIAGFLEGGWEGMIAGWHGYTSHGAHGVAVAADLKSTQEAINKITKNLNSLSELEVKNLQRLSGAMDELHNEILELDEKVDDLRADTISSQIELAVLLSNEGIINSEDEHLLALERKLKKMLGPSAVEIGNGCFETKHKCNQTCLDRIAAGTFDAGEFSLPTFDSLNITAASLNDDGLDNHTILLYYSTAASSLAVTLMIAIFVVYMVSRDNVSCSICL

SEQ ID NO: 27097 - protein, 585 aa, synthetic construct; identical to SEQ ID NO: 26979
  REGION 1..585: note = hemagglutinin__InfluenzaB__AGX16973

SEQ ID NO: 27098 - protein, 585 aa, synthetic construct
  REGION 1..585: note = hemagglutinin__InfluenzaB__AGX16995
MKAIIVLLMVVTSNADRICTGITSSNSPHVVKTATQGEVNVTGVIPLTTTPTKSHFANLKGTKTRGKLCPKCLNCTDLDVALGRPKCTGNIPSAKVSILHEVRPVTSGCFPIMHDRTKIRQLPNLLRGYEHIRLSTHNVINAEKAPGGPYKIGTSGSCPNVTNGNGFFATMAWAVPKNDNNKTATNSLTVEVPYICTEGEDQITVWGFHSDNEIQMAKLYGDSKPQKFTSSANGVTTHYVSQIGGFPNQTEDGGLPQSGRIVVDYMVQKSGKTGTITYQRGILLPQKVWCASGRSKVIKGSLPLIGEADCLHEKYGGLNKSKPYYTGEHAKAIGNCPIWVKTPLKLANGTKYRPPAKLLKERGFFGAIAGFLEGGWEGMIAGWHGYTSHGAHGVAVAADLKSTQEAINKITKNLNSLSELEVKNLQRLSGAMDELHNEILELDEKVDDLRADTISSQIELAVLLSNEGIINSEDEHLLALERKLKKMLGPSAVEIGNGCFETKHKCNQTCLDRIAAGTFDAGEFSLPTFDSLNITAASLNDDGLDNHTILLYYSTAASSLAVTLMIAIFVVYMVSRDNVSCSICL

SEQ ID NO: 27099 - protein, 585 aa, synthetic construct
  REGION 1..585: note = hemagglutinin__InfluenzaB__AGX17006
MKAIIVLLMVVTSNADRICTGITSSNSPHVVKTATQGEVNVTGVIPLTTTPTKSHFANLKGTKTRGKLCPKCLNCTDLDVALGRPKCTGNIPSAKVSILHEVRPVTSGCFPIMHDRTKIRQLPNLLRGYEHIRLSTHNVINAEKAPGGPYKIGTSGSCPNVTNGNGFFATMAWAVPKNDNNKTATNSLTIEVPYICTEGEDQITVWGFHSDNENQMAKLYGDSKPQKFTSSANGVTTHYVSQIGGFPNQTEDGGLPQSGRIVVDYMVQKSGKTGTITYQRGILLPQKVWCASGRSKVIKGSLPLIGEADCLHEKYGGLNKSKPYYTGEHAKAIGNCPIWVKTPLKLANGTKYRPPAKLLKERGFFGAIAGFLEGGWEGMIAGWHGYTSHGAHGVAVAADLKSTQEAINKITKNLNSLSELEVKNLQRLSGAMDELHNEILELDEKVDDLRADTISSQIELAVLLSNEGIINSEDEHLLALERKLKKMLGPSAVEIGNGCFETKHKCNQTCLDRIAAGTFDAGEFSLPTFDSLNITAASLNDDGLDNHTILLYYSTAASSLAVTLMIAIFVVYMVSRDNVSCSICL

SEQ ID NO: 27100 - protein, 585 aa, synthetic construct; identical to SEQ ID NO: 26979
  REGION 1..585: note = hemagglutinin__InfluenzaB__AGX17017

SEQ ID NO: 27101 - protein, 585 aa, synthetic construct; identical to SEQ ID NO: 26979
  REGION 1..585: note = hemagglutinin__InfluenzaB__AGX17028

SEQ ID NO: 27102 - protein, 585 aa, synthetic construct
  REGION 1..585: note = hemagglutinin__InfluenzaB__AGX17039
MKAIIVLLMVVTSNADRICTGITSSNSPHVVKTATQGEVNVTGVIPLTTTPTESHFANLKGTKTRGKLCPKCLNCTDLDVALGRPKCTGNIPSAKVSILHEVRPVTSGCFPIMHDRTKIRQLPNLLRGYEHIRLSTHNVINAEKAPGGPYKIGTSGSCPNVTNGNGFFATMAWAVPKNDNNKTATNSLTIEVPYICTEGEDQITVWGFHSDNETQMAKLYGDSKPQKFTSSANGVTTHYVSQIGGFPNQTEDGGLPQSGRIVVDYMVQKSGNTGTITYQRGILLPQKVWCASGRSKVIKGSLPLIGEADCLHEKYGGLNKSKPYYTGEHAKAIGNCPIWVKTPLKLANGTKYRPPAKLLKERGFFGAIAGFLEGGWEGMIAGWHGYTSHGAHGVAVAADLKSTQEAINKITKNLNSLSELEVKNLQRLSGAMDELHNEILELDEKVDDLRADTISSQIELAVLLSNEGIINSEDEHLLALERKLKKMLGPSAVEIGNGCFETKHKCNQTCLDRIAAGTFDAGEFSLPTFDSLNITAASLNDDGLDNHTIMLYYSTAASSLAVTLMIAIFVVYMVSRDNVSCSICL

SEQ ID NO: 27103 - protein, 585 aa, synthetic construct; identical to SEQ ID NO: 26979
  REGION 1..585: note = hemagglutinin__InfluenzaB__AGX17050

SEQ ID NO: 27104 - protein, 585 aa, synthetic construct
  REGION 1..585: note = hemagglutinin__InfluenzaB__AGX17061
MKAIIVLLMVVTSNADRICTGITSSNSPHVVKTATQGEVNVTGVIPLTTTPTKSHFANLKGTKTRGKLCPKCLNCTDLDVALGRPKCTGNIPSAKVSILHEVRPVTSGCFPIMHDRTKIRQLPNLLRGYERIRLSNHNVINAEKAPGGPYKIGTSGSCPNVTNGNGFFATMAWAVPKNENNKTATNSLTIEVPYICTEGEDQITVWGFHSDNETQMAKLYGDSKPQKFTSSANGVTTHYVSQIGGFPNQTEDGGLPQSGRIVVDYMVQKSGKTGTITYQRGILLPQKVWCASGRSKVIKGSLPLIGEADCLHEKYGGLNKSKPYYTGEHAKAIGNCPIWVKTPLKLANGTKYRPPAKLLKERGFFGAIAGFLEGGWEGMIAGWHGYTSHGAHGVAVAADLKSTQEAINKITKNLNSLSELEVKNLQRLSGAMDELHNEILELDEKVDDLRADTISSQIELAVLLSNEGIINSEDEHLLALERKLKKMLGPSAVEIGNGCFETKHKCNQTCLDRIAAGTFNAGEFSLPTFDSLNITAASLNDDGLDNHTILLYYSTAASSLAVTLMIAIFVVYMVSRDNVSCSICL

SEQ ID NO: 27105 - protein, 585 aa, synthetic construct
  REGION 1..585: note = hemagglutinin__InfluenzaB__AGX17072
MKAIIVLLMVVTSNADRICTGITSSNSPHVVKTATQGEVNVTGVIPLTTTPTESHFANLKGTKTRGKLCPKCLNCTDLDVALGRPKCTGNIPSAKVSILHEVRPVTSGCFPIMHDRTKIRQLPNLLRGYEHIRLSTHNVINAEKAPGGPYKIGTSGSCPNVTNGNGFFATMAWAVPKNDNNKTATNSLTIEVPYICTEGEDQITVWGFHSDNETQMAKLYGDSKPQKFTSSANGVTTHYVSQIGGFPNQTEDGGLPQSGRIVVDYMVQKSGNTGTITYQRGILLPQKVWCASGRSKVIKGSLPLIGEADCLHEKYGGLNKSKPYYTGEHAKAIGNCPIWVKTPLKLANGTKYRPPAKLLKERGFFGAIAGFLEGGWEGMIAGWHGYTSHGAHGVAVAADLKSTQEAINKITKNLNSLSELEVKNLQRLSGAMDELHNEILELDEKVDDLRADTISSQIELAVLLSNEGIINSEDEHLLALERKLKKMLGPSAVEIGNGCFETKHKCNQTCLDRIAAGTFDAGEFSLPTFDSLNITAASLNDDGLDNHTILLYYSTAASSLAVTLMIAIFVVYMVSRDNVSCSICL

SEQ ID NO: 27106 - protein, 585 aa, synthetic construct; identical to SEQ ID NO: 27090
  REGION 1..585: note = hemagglutinin__InfluenzaB__AGX17083

SEQ ID NO: 27107 - protein, 585 aa, synthetic construct
  REGION 1..585: note = hemagglutinin__InfluenzaB__AGX17094
MKAIIVLLMVVTSNADRICTGITSSNSPHVVKTATQGEVNVTGVIPLTTTPTKSHFANLKGTKTRGKLCPKCLNCTDLDVALGRPKCTGNIPSAKVSILHEVRPVTSGCFPIMHDRTKIRQLPNLLRGYEHIRLSTHNVINAEKAPGGPYKIGTSGSCPNVTNGNGFFATMAWAVPKNDNNKTATNSLTIEVPYICTEGEDQITVWGFHSDSETQMAKLYGDSKPQKFTSSANGVTTHYVSQIGGFPNQTEDGGLPQSGRIVVDYMVQKSGKTGTITYQRGILLPQKVWCASGRSKVIKGSLPLIGEADCLHEKYGGLNKSKPYYTGEHAKAIGNCPIWVKTPLKLANGTKYRPPAKLLKERGFFGAIAGFLEGGWEGMIAGWHGYTSHGAHGVAVAADLKSTQEAINKITKNLNSLSELEVKNLQRLSGAMDELHNEILELDEKVDDLRADTISSQIELAVLLSNEGIINSEDEHLLALERKLKKMLGPSAVEIGNGCFETKHKCNQTCLDRIAAGTFDAGEFSLPTFDSLNITAASLNDDGLDNHTILLYYSTAASSLAVTLMIAIFVVYMVSRDNVSCSICL

SEQ ID NO: 27108 - protein, 585 aa, synthetic construct
  REGION 1..585: note = hemagglutinin__InfluenzaB__AGX17105
MKAIIVLLMVVTSNADRICTGITSSNSPHVVKTATQGEINVTGVIPLTTTPTKSHFANLKGTKTRGKLCPKCLNCTDLDVALGRPKCTGNIPSAKVSILHEVRPVTSGCFPIMHDRTKIRQLPNLLRGYEHIRLSTHNVINAEKAPGGPYKIGTSGSCPNVTNGNGFFATMAWAVPKNDNNKTATNSLTIEVPHICTEGEDQITVWGFHSDNEIQMAKLYGDSKPQKFTSSANGVTTHYISQIGGFPNQTEDGGLPQSGRIVVDYMVQKSGKTGTITYQRGILLPQKVWCASGRSKVIKGSLPLIGEADCLHEKYGGLNKSKPYYTGEHAKAIGNCPIWVKTPLKLANGTKYRPPAKLLKERGFFGAIAGFLEGGWEGMIAGWHGYTSHGAHGVAVAADLKSTQEAINKITKNLNSLSELEVKNLQRLSGAMDELHNEILELDEKVDDLRADTISSQIELAVLLSNEGIINSEDEHLLALERKLKKMLGPSAIEIGNGCFETKHKCNQTCLDRIAAGTFDAGEFSLPTFDSLNITAASLNDDGLDNHTILLYYSTAASSLAVTLMIAIFVVYMVSRDNVSCSICL

SEQ ID NO: 27109 - protein, 585 aa, synthetic construct; identical to SEQ ID NO: 27090
  REGION 1..585: note = hemagglutinin__InfluenzaB__AGX17116

SEQ ID NO: 27110 - protein, 585 aa, synthetic construct
  REGION 1..585: note = hemagglutinin__InfluenzaB__AGX17127
MKAIIVLLMVVTSNADRICTGITSSNSPHVVKTATQGEVNVTGVIPLTTTPTESHFANLKGTKTRGKLCPKCLNCTDLDVALGRPKCTGNIPSAKVSILHEVRPVTSGCFPIMHDRTKIRQLPNLLRGYEHIRLSTHNVINAEKAPGGPYKIGTSGSCPNVTNGNGFFATMAWAVPKNDNNKTATNSLTIEVPYICTEGEDQITVWGFHSDNENQMAKLYGDSKPQKFTSSANGVTTHYVSQIGGFPNQTEDGGLPQSGRIVVDYMVQKSGNTGTITYQRGILLPQKVWCASGRSKVIKGSLPLIGEADCLHEKYGGLNKSKPYYTGEHAKAIGNCPIWVKTPLKLANGTKYRPPAKLLKERGFFGAIAGFLEGGWEGMIAGWHGYTSHGAHGVAVAADLKSTQEAINKITKNLNSLSELEVKNLQRLSGAMDELHNEILELDEKVDDLRADTISSQIELAVLLSNEGIINSEDEHLLALERKLKKMLGPSAVEIGNGCFETKHKCNQTCLDRIAAGTFDAGEFSLPTFDSLNITAASLNDDGLDNHTILLYYSTAASSLAVTLMIAIFVVYMVSRDNVSCSICL

SEQ ID NO: 27111 - protein, 585 aa, synthetic construct; identical to SEQ ID NO: 27099
  REGION 1..585: note = hemagglutinin__InfluenzaB__AGX17138

SEQ ID NO: 27112 - protein, 585 aa, synthetic construct; identical to SEQ ID NO: 27099
  REGION 1..585: note = hemagglutinin__InfluenzaB__AGX17149

SEQ ID NO: 27113 - protein, 585 aa, synthetic construct
  REGION 1..585: note = hemagglutinin__InfluenzaB__AGX17160
MKAIIVLLMVVTSNADRICTGITSSNSPHVVKTATQGEVNVTGMIPLTTTPTKSHFANLKGTKTRGKLCPKCLNCTDLDVALGRPKCTGNIPSAKVSILHEVRPVTSGCFPIMHDRTKIRQLPNLLRGYEHIRLSTHNVINAEKAPGGPYKIGTSGSCPNVTNGNGFFATMAWAVPKNDNNKTATNSLTIEVPYICTEGEDQITVWGFHSDNETQMAKLYGDSKPQKFTSSANGVTTHYVSQIGGFPNQTEDGGLPQSGRIVVDYMVQKSGKTGTITYQRGILLPQKVWCASGRSKVIKGSLPLIGEADCLHEKYGGLNKSKPYYTGEHAKAIGNCPIWVKTPLKLANGTKYRPPAKLLKERGFFGAIAGFLEGGWEGMIAGWHGYTSHGAHGVAVAADLKSTQEAINKITKNLNSLSELEVKNLQRLSGAMDELHNEILELDEKVDDLRADTISSQIELAVLLSNEGIINSEDEHLLALERKLKKMLGPSAVEIGNGCFETKHKCNQTCLDRIAAGTFDAGEFSLPTFDSLNITAASLNDDGLDNHTILLYYSTAASSLAVTLMIAIFVVYMVSRDNVSCSICL

SEQ ID NO: 27114 - protein, 585 aa, synthetic construct
  REGION 1..585: note = hemagglutinin__InfluenzaB__AGX17171
MKAIIVLLMVVTSNADRICTGITSSNSPHVVKTATQGEVNVTGVIPLTTTPTESHFANLKGTKTRGKLCPKCLNCTDLDVALGRPKCTGNIPSAKVSILHEVRPVTSGCFPIMHNRTKIRQLPNLLRGYEHIRLSTHNVINAEKAPGGPYKIGTSGSCPNVTNGNGFFATMAWAVPKNDNNKTATNSLTIEVPYICTEGEDQITVWGFHSDNEAQMAKLYGDSKPQKFTSSANGVTTHYVSQIGGFPNQTEDGGLPQSGRIVVDYMVQKSGNTGTITYQRGILLPQKVWCASGRSKVIKGSLPLIGEADCLHEKYGGLNKSKPYYTGEHAKAIGNCPIWVKTPLKLANGTKYRPPAKLLKERGFFGAIAGFLEGGWEGMIAGWHGYTSHGAHGVAVAADLKSTQEAINKITKNLNSLSELEVKNLQRLSGAMDELHNEILELDEKVDDLRADTISSQIELAVLLSNEGIINSEDEHLLALERKLKKMLGPSAVEIGNGCFETKHKCNQTCLDRIAAGTFDAGEFSLPTFDSLNITAASLNDDGLDNHTILLYYSTAASSLAVTLMIAIFVVYMVSRDNVSCSICL

SEQ ID NO: 27115 - protein, 585 aa, synthetic construct; identical to SEQ ID NO: 26979
  REGION 1..585: note = hemagglutinin__InfluenzaB__AGX17182

SEQ ID NO: 27116 - protein, 585 aa, synthetic construct; identical to SEQ ID NO: 26979
  REGION 1..585: note = hemagglutinin__InfluenzaB__AGX17193

SEQ ID NO: 27117 - protein, 585 aa, synthetic construct; identical to SEQ ID NO: 26979
  REGION 1..585: note = hemagglutinin__InfluenzaB__AGX17204

SEQ ID NO: 27118 - protein, 585 aa, synthetic construct
  REGION 1..585: note = hemagglutinin__InfluenzaB__AGX17215
MKAIIVLLMVVTSNADRICTGITSSNSPHVVKTATQGEVNVTGVIPLTTTPTKSHFANLKGTKTRGKLCPKCLNCTDLDVALGRPKCTGNIPSAKVSILHEVRPVTSGCFPIMHDRTKIRQLPNLLRGYEHIRLSTHNVINAEKAPGGPYKIGTSGSCPNVTNGNGFFATMAWAVPKNDNNKTATNSLTIEVPYICTEGEDQITVWGFHSDNEAQMAKLYGDSKPQKFTSSANGVTTHYVSQIGGFPNQTEDGGLPQSGRIVVDYMVQKSGKTGTITYQRGILLPQKVWCASGRSKVIKGSLPLIGEADCLHEKYGGLNKSKPYYTGEHAKAIGNCPIWVKTPLKLANGTKYRPPAKLLKERGFFGAIAGFLEGGWEGMIAGWHGYTSHGAHGVAVAADLKSTQEAINKITKNLNSLSELEVKNLQRLSGAMDELHNEILELDEKVDDLRADTISSQIELAVLLSNEGIINSEDEHLLALERKLKKMLGPSAIEIGNGCFETKHKCNQTCLDRIAAGTFDAGEFSLPTFDSLNITAASLNDDGLDNHTILLYYSTAASSLAVTLMIAIFVVYMVSRDNVSCSICL

SEQ ID NO: 27119 - protein, 585 aa, synthetic construct; identical to SEQ ID NO: 26979
  REGION 1..585: note = hemagglutinin__InfluenzaB__AGX17226

SEQ ID NO: 27120 - protein, 585 aa, synthetic construct
  REGION 1..585: note = hemagglutinin__InfluenzaB__AGX17237
MKAIIVLLMVVTSNADRICTGITSSNSPHVVKTATQGEVNVTGVIPLTTTPTKSHFANLKGTKTRGKLCPKCLNCTDLDVALGRPKCTGNIPSAKVSILHEVRPVTSGCFPIMHDRTKIRQLPNLLRGYEHIRLSTHNVINAEKAPGGPYKIGTSGSCPNITNGNGFFATMAWAVPKNDNNKTATNSLTIEVPYICTEGEDQITVWGFHSDNEIQMAKLYGDSKPQKFTSSANGVTTHYVSQIGGFPNQTEDGGLPQSGRIVVDYMVQKSGKTGTITYQRGILLPQKVWCASGRSKVIKGSLPLIGEADCLHEKYGGLNKSKPYYTGEHAKAIGNCPIWVKTPLKLANGTKYRPPAKLLKERGFFGAIAGFLEGGWEGMIAGWHGYTSHGAHGVAVAADLKSTQEAINKITKNLNSLSELEVKNLQRLSGAMDELHNEILELDEKVDDLRADTISSQIELAVLLSNEGIINSEDEHLLALERKLKKMLGPSAVEIGNGCFETKHKCNQTCLDRIAAGTFDAGEFSLPTFDSLNITAASLNDDGLDNHTILLYYSTAASSLAVTLMIAIFVVYMVSRDNVSCSICL

SEQ ID NO: 27121 - protein, 585 aa, synthetic construct
  REGION 1..585: note = hemagglutinin__InfluenzaB__AGX17248
MKAIIVLLMVVTSNADRICTGITSSNSPHVVKTATQGEVNVTGVIPLTTTPTKSHFANLKGTKTRGKLCPKCLNCTDLDVALGRPKCTGNIPSAKVSILHEVRPVTSGCFPIMHDRTKIRQLPNLLRGYEHIRLSTHNVINAEKAPGGPYKIGTSGSCPNVTNGNGFFATMAWAVPKNDNNKTATNSLTIEVPYICTEGEDQITVWGFHSDNETQMAKLYGDSKPQKFTSSANGVTTHYVSQIGGFPNQTEDGGLPQSGRIVVDYMVQKSGKTGTITYQRGILLPQKVWCTSGRSKVIKGSLPLIGEADCLHEKYGGLNKSKPYYTGEHAKAIGNCPIWVKTPLKLANGTKYRPPAKLLKERGFFGAIAGFLEGGWEGMIAGWHGYTSHGAHGVAVAADLKSTQEAINKITKNLNSLSELEVKNLQRLSGAMDELHNEILELDEKVDDLRADTISSQIELAVLLSNEGIINSEDEHLLALERKLKKMLGPSAVEIGNGCFETKHKCNQTCLDRIAAGTFDAGEFSLPTFDSLNITAASLNDDGLDNHTILLYYSTAASSLAVTLMIAIFVVYMVSRDNVSCSICL

SEQ ID NO: 27122 - protein, 585 aa, synthetic construct; identical to SEQ ID NO: 27063
  REGION 1..585: note = hemagglutinin__InfluenzaB__AGX17270

SEQ ID NO: 27123 - protein, 585 aa, synthetic construct; identical to SEQ ID NO: 26979
  REGION 1..585: note = hemagglutinin__InfluenzaB__AGX17281

SEQ ID NO: 27124 - protein, 585 aa, synthetic construct; identical to SEQ ID NO: 26979
  REGION 1..585: note = hemagglutinin__InfluenzaB__AGX17292

SEQ ID NO: 27125 - protein, 585 aa, synthetic construct; identical to SEQ ID NO: 26979
  REGION 1..585: note = hemagglutinin__InfluenzaB__AGX17303

SEQ ID NO: 27126 - protein, 585 aa, synthetic construct; identical to SEQ ID NO: 27105
  REGION 1..585: note = hemagglutinin__InfluenzaB__AGX17314

SEQ ID NO: 27127 - protein, 585 aa, synthetic construct; identical to SEQ ID NO: 26979
  REGION 1..585: note = hemagglutinin__InfluenzaB__AGX17325

SEQ ID NO: 27128 - protein, 585 aa, synthetic construct; identical to SEQ ID NO: 27090
  REGION 1..585: note = hemagglutinin__InfluenzaB__AGX17336

SEQ ID NO: 27129 - protein, 585 aa, synthetic construct; identical to SEQ ID NO: 26979
  REGION 1..585: note = hemagglutinin__InfluenzaB__AGX17347

SEQ ID NO: 27130 - protein, 585 aa, synthetic construct; identical to SEQ ID NO: 26979
  REGION 1..585: note = hemagglutinin__InfluenzaB__AGX17358

SEQ ID NO: 27131 - protein, 585 aa, synthetic construct
  REGION 1..585: note = hemagglutinin__InfluenzaB__AGX17369
MKAIIVLLMVVTSNADRICTGITSSNSPHVVKTATQGEVNVTGVIPLTTTPTKSHFANLKGTKTRGKLCPKCLNCTDLDVALGRPKCTGNIPSAKVSILHEVRPVTSGCFPIMHDRTKIRQLPNLLRGYEHIRLSTHNVINAEKAPGGPYKIGTSGSCPNVTNGNGFFATMAWAVPKNDNNKTATNSLTIEVPYICTEGEDQITVWGFHSDNETQMAKLYGDSKPQKFTSSANGVTTHYVSQIGGFPNQTEDGGLPQSGRIVADYMVQKSGKTGTITYQRGILLPQKVWCASGRSKVIKGSLPLIGEADCLHEKYGGLNKSKPYYTGEHAKAIGNCPIWVKTPLKLANGTKYRPPAKLLKERGFFGAIAGFLEGGWEGMIAGWHGYTSHGAHGVAVAADLKSTQEAINKITKNLNSLSELEVKNLQRLSGAMDELHNEILELDEKVDDLRADTISSQIELAVLLSNEGIINSEDEHLLALERKLKKMLGPSAVEIGNGCFETKHKCNQTCLDRIAAGTFDAGEFSLPTFDSLNITAASLNDDGLDNHTILLYYSTAASSLAVTLMIAIFVVYMVSRDNVSCSICL

SEQ ID NO: 27132 - protein, 585 aa, synthetic construct; identical to SEQ ID NO: 27105
  REGION 1..585: note = hemagglutinin__InfluenzaB__AGX17380

SEQ ID NO: 27133 - protein, 585 aa, synthetic construct; identical to SEQ ID NO: 26979
  REGION 1..585: note = hemagglutinin__InfluenzaB__AGX17391

SEQ ID NO: 27134 - protein, 585 aa, synthetic construct
  REGION 1..585: note = hemagglutinin__InfluenzaB__AGX17400
MKAIIVLLMVVTSNADRICTGITSSNSPHMVKTATQGEVNVTGVIPLTTTPTKSHFANLKGTKTRGKLCPKCLNCTDLDVALGRPKCTGNIPSAKVSILHEVRPVTSGCFPIMHDRTKIRQLPNLLRGYEHIRLSTHNVINAEKAPGGPYKIGTSGSCPNVTNGNGFFATMAWAVPKNDNNKTATNSLTIEVPYICTEGEDQITVWGFHSDNETQMAKLYGDSKPQKFTSSANGVTTHYVSQIGGFPNQTEDGGLPQSGRIVVDYMVQKSGKTGTITYQRGILLPQKVWCASGRSKVIKGSLPLIGEADCLHEKYGGLNKSKPYYTGEHAKAIGNCPIWVKTPLKLANGTKYRPPAKLLKERGFFGAIAGFLEGGWEGMIAGWHGYTSHGAHGVAVAADLKSTQEAINKITKNLNSLSELEVKNLQRLSGAMDELHNEILELDEKVDDLRADTISSQIELAVLLSNEGIINSEDEHLLALERKLKKMLGPSAVEIGNGCFETKHKCNQTCLDRIAAGTFDAGEFSLPTFDSLNITAASLNDDGLDNHTILLYYSTAASSLAVTLMIAIFVVYMVSRDNVSCSICL

SEQ ID NO: 27135 - protein, 585 aa, synthetic construct; identical to SEQ ID NO: 26979
  REGION 1..585: note = hemagglutinin__InfluenzaB__AGX17411

SEQ ID NO: 27136 - protein, 585 aa, synthetic construct; identical to SEQ ID NO: 26979
  REGION 1..585: note = hemagglutinin__InfluenzaB__AGX17422

SEQ ID NO: 27137 - protein, 585 aa, synthetic construct; identical to SEQ ID NO: 27062
  REGION 1..585: note = hemagglutinin__InfluenzaB__AGX17433

SEQ ID NO: 27138 - protein, 585 aa, synthetic construct; identical to SEQ ID NO: 26979
  REGION 1..585: note = hemagglutinin__InfluenzaB__AGX17444

SEQ ID NO: 27139 - protein, 585 aa, synthetic construct; identical to SEQ ID NO: 27062
  REGION 1..585: note = hemagglutinin__InfluenzaB__AGX17455

SEQ ID NO: 27140 - protein, 585 aa, synthetic construct; identical to SEQ ID NO: 27105
  REGION 1..585: note = hemagglutinin__InfluenzaB__AGX17466

SEQ ID NO: 27141 - protein, 585 aa, synthetic construct; identical to SEQ ID NO: 26979
  REGION 1..585: note = hemagglutinin__InfluenzaB__AGX17477

SEQ ID NO: 27142 - protein, 585 aa, synthetic construct; identical to SEQ ID NO: 27064
  REGION 1..585: note = hemagglutinin__InfluenzaB__AGX17488

SEQ ID NO: 27143 - protein, 585 aa, synthetic construct; identical to SEQ ID NO: 26979
  REGION 1..585: note = hemagglutinin__InfluenzaB__AGX17499

SEQ ID NO: 27144 - protein, 585 aa, synthetic construct; identical to SEQ ID NO: 27105
  REGION 1..585: note = hemagglutinin__InfluenzaB__AGX17510

SEQ ID NO: 27145 - protein, 585 aa, synthetic construct; identical to SEQ ID NO: 27105
  REGION 1..585: note = hemagglutinin__InfluenzaB__AGX17521

SEQ ID NO: 27146 - protein, 585 aa, synthetic construct; identical to SEQ ID NO: 27107
  REGION 1..585: note = hemagglutinin__InfluenzaB__AGX17532

SEQ ID NO: 27147 - protein, 585 aa, synthetic construct
  REGION 1..585: note = hemagglutinin__InfluenzaB__AGX17543
MKAIIVLLMVVTSNADRICTGITSSNSPHVVKTATQGEVNVTGVIPLTTTPTKSHFASLKGTKTRGKLCPKCLNCTDLDVALGRPKCTGNIPSAKVSILHEVRPVTSGCFPIMHDRTKIRQLPNLLRGYEHIRLSTHNVINAEKAPGGPYKIGTSGSCPNVTNGNGFFATMAWAVPKNDNNKTATNSLTIEVPYICTEGEDQITVWGFHSDNETQMAKLYGDSKPQKFTSSANGVTTHYVSQIGGFPNQTEDGGLPQSGRIVVDYMVQKSGKTGTITYQRGILLPQKVWCASGRSKVIKGSLPLIGEADCLHEKYGGLNKSKPYYTGEHAKAIGNCPIWVKTPLKLANGTKYRPPAKLLKERGFFGAIAGFLEGGWEGMIAGWHGYTSHGAHGVAVAADLKSTQEAINKITKNLNSLSELEVKNLQRLSGAMNELHNEILELDEKVDDLRADTISSQIELAVLLSNEGIINSEDEHLLALERKLKKMLGPSAVEIGNGCFETKHKCNQTCLDRIAAGTFDAGEFSLPTFDSLNITAASLNDDGLDNHTILLYYSTAASSLAVTLMIAIFVVYMVSRDNVSCSICL

SEQ ID NO: 27148 - protein, 585 aa, synthetic construct
  REGION 1..585: note = hemagglutinin__InfluenzaB__AGX17554
MKAIIVLLLVVTSNADRICTGITSSNSPHVVKTATQGEVNVTGVIPLTTTPTKSHFANLKGTKTRGKLCPKCLNCTDLDVALGRPKCTGNIPSAKVSILHEVRPVTSGCFPIMHDRTKIRQLPNLLRGYEHIRLSTHNVINAEKAPGGPYKIGTSGSCPNVTNGNGFFATMAWAVPKNDNNKTATNSLTIEVPYICTEGEDQITVWGFHSDNETQMAKLYGDSKPQKFTSSANGVTTHYVSQIGGFPNQTEDGGLPQSGRIVVDYMVQKSGKTGTITYQRGILLPQKVWCASGRSKVIKGSLPLIGEADCLHEKYGGLNKSKPYYTGEHAKAIGNCPIWVKTPLKLANGTKYRPPAKLLKERGFFGAIAGFLEGGWEGMIAGWHGYTSHGAHGVAVAADLKSTQEAINKITKNLNSLSELEVKNLQRLSGAMDELHNEILELDEKVDDLRADTISSQIELAVLLSNEGIINSEDEHLLALERKLKKMLGPSAVEIGNGCFETKHKCNQTCLDRIAAGTFDAGEFSLPTFDSLNITAASLNDDGLDNHTILLYYSTAASSLAVTLMIAIFVVYMVSRDNVSCSICL

SEQ ID NO: 27149 - protein, 584 aa, synthetic construct; identical to SEQ ID NO: 27023
  REGION 1..584: note = hemagglutinin__InfluenzaB__AGX17565

SEQ ID NO: 27150 - protein, 585 aa, synthetic construct
  REGION 1..585: note = hemagglutinin__InfluenzaB__AGX17576
MKAIIVLLMVVTSNADRICTGITSSNSPHVVKTATQGEVNVTGVIPLTTTPTKSHFANLKGTKTRGKLCPKCLNCTDLDVALGRPKCTGNIPSAEVSILHEVRPVTSGCFPIMHDRTKIRQLPNLLRGYEHIRLSTHNVINAEKAPGGPYKIGTSGSCPNVTNGNGFFATMAWAVPKNDNNKTATNSLTIEVPYICTEGEDQITIWGFHSDNETQMAKLYGDSKPQKFTSSANGVTTHYVSQIGGFPNQTEDGGLPQSGRIVVDYMVQKSGKTGTITYQRGILLPQKVWCASGRSKVIKGSLPLIGEADCLHEKYGGLNKSKPYYTGEHAKAIGNCPIWVKTPLKLANGTKYRPPAKLLKERGFFGAIAGFLEGGWEGMIAGWHGYTSHGAHGVAVAADLKSTQEAINKITKNLNSLSELEVKNLQRLSGAMDELHNEILELDEKVDDLRADTISSQIELAVLLSNEGIINSEDEHLLALERKLKKMLGPSAVEIGNGCFETKHKCNQTCLDRIAAGTFDAGEFSLPTFDSLNITAASLNDDGLDNHTILLYYSTAASSLAVTLMMAIFVVYMVSRDNVSCSICL

SEQ ID NO: 27151 - protein, 585 aa, synthetic construct; identical to SEQ ID NO: 26514
  REGION 1..585: note = hemagglutinin__InfluenzaB__AGX17598

SEQ ID NO: 27152 - protein, 585 aa, synthetic construct
  REGION 1..585: note = hemagglutinin__InfluenzaB__AGX17609
MKAIIVLLMVVTSNADRICTGITSSNSPHVVKTATQGEVNVTGVIPLTTTPTKSHFANLKGTETRGKLCPKCLNCTDLDVALGRPKCTGKIPSARVSILHEVRPVTSGCFPIMHDRTKIRQLPNLLRGYEHIRLSTHNVINAENAPGGPYKIGTSGSCPNVTNGNGFFATMAWAVPKNDNNKTATNSLTIEVPYICTEGEDQITVWGFHSDNETQMAKLYGDSKPQKFTSSANGVTTHYVSQIGGFPNQTEDGGLPQSGRIVVDYMVQKSGKTGTITYQRGILLPQKVWCASGRSKVIKGSLPLIGEADCLHEKYGGLNKSKPYYTGEHAKAIGNCPIWVKTPLKLANGTKYRPPAKLLKERGFFGAIAGFLEGGWEGMIAGWHGYTSHGAHGVAVAADLKSTQEAINKITKNLNSLSELEVKNLQRLSGAMDELHNEILELDEKVDDLRADTISSQIELAVLLSNEGIINSEDEHLLALERKLKKMLGPSAVEIGNGCFETKHKCNQTCLDRIAAGTFDAGEFSLPTFDSLNITAASLNDDGLDNHTILLYYSTAASSLAVTLMIAIFVVYMVSRDNVSCSICL

SEQ ID NO: 27153 - protein, 585 aa, synthetic construct; identical to SEQ ID NO: 26981
  REGION 1..585: note = hemagglutinin__InfluenzaB__AGX17620

SEQ ID NO: 27154 - protein, 585 aa, synthetic construct; identical to SEQ ID NO: 26514
  REGION 1..585: note = hemagglutinin__InfluenzaB__AGX17631

SEQ ID NO: 27155 - protein, 585 aa, synthetic construct; identical to SEQ ID NO: 26638
  REGION 1..585: note = hemagglutinin__InfluenzaB__AGX17642

SEQ ID NO: 27156 - protein, 585 aa, synthetic construct; identical to SEQ ID NO: 26981
  REGION 1..585: note = hemagglutinin__InfluenzaB__AGX17653

SEQ ID NO: 27157 - protein, 585 aa, synthetic construct; identical to SEQ ID NO: 26514
  REGION 1..585: note = hemagglutinin__InfluenzaB__AGX17664

SEQ ID NO: 27158 - protein, 585 aa, synthetic construct; identical to SEQ ID NO: 26638
  REGION 1..585: note = hemagglutinin__InfluenzaB__AGX17675

SEQ ID NO: 27159 - protein, 585 aa, synthetic construct; identical to SEQ ID NO: 26981
  REGION 1..585: note = hemagglutinin__InfluenzaB__AGX17686

SEQ ID NO: 27160 - protein, 585 aa, synthetic construct
  REGION 1..585: note = hemagglutinin__InfluenzaB__AGX17697
MKAIIVLLMVVTSNADRICTGITSSNSPHVVKTATQGEVNVTGVIPLTTTPTKSHFANLKGTETRGKLCPKCLNCTDLDVALGRPKCTGEIPSARVSILHEVRPVTSGCFPIMHDRTKIRQLPNLLRGYEHIRLSTHNAINAENAPGGPYKIGTSGSCPNVTNGNGFFATMAWAVPKNDNNKTATNSLTIEVPYICTEGEDQITVWGFHSDNETQMAKLYGDSKPQKFTSSANGVTTHYVSQIGGFPNQTEDGGLPQSGRIVVDYMVQKSGKTGTITYQRGILLPQKVWCASGRSKVIKGSLPLIGEADCLHEKYGGLNKSKPYYTGEHAKAIGNCPIWVKTPLKLANGTKYRPPAKLLKERGFFGAIAGFLEGGWEGMIAGWHGYTSHGAHGVAVAADLKSTQEAINKITKNLNSLSELEVKNLQRLSGAMDELHNEILELDEKVDDLRADTISSQIELAVLLSNEGIINSEDEHLLALERKLKKMLGPSAVEIGNGCFETKHKCNQTCLDRIAAGTFDAGEFSLPTFDSLNITAASLNDDGLDNHTILLYYSTAASSLAVTLMIAIFVVYMVSRDNVSCSICL

SEQ ID NO: 27161 - protein, 585 aa, synthetic construct; identical to SEQ ID NO: 26638
  REGION 1..585: note = hemagglutinin__InfluenzaB__AGX17708

SEQ ID NO: 27162 - protein, 585 aa, synthetic construct; identical to SEQ ID NO: 26981
  REGION 1..585: note = hemagglutinin__InfluenzaB__AGX17719

SEQ ID NO: 27163 - protein, 585 aa, synthetic construct; identical to SEQ ID NO: 26638
  REGION 1..585: note = hemagglutinin__InfluenzaB__AGX17730

SEQ ID NO: 27164 - protein, 585 aa, synthetic construct; identical to SEQ ID NO: 26514
  REGION 1..585: note = hemagglutinin__InfluenzaB__AGX17741

SEQ ID NO: 27165 - protein, 585 aa, synthetic construct; identical to SEQ ID NO: 26981
  REGION 1..585: note = hemagglutinin__InfluenzaB__AGX17752

SEQ ID NO: 27166 - protein, 585 aa, synthetic construct; identical to SEQ ID NO: 26981
  REGION 1..585: note = hemagglutinin__InfluenzaB__AGX17774

SEQ ID NO: 27167 - protein, 585 aa, synthetic construct
  REGION 1..585: note = hemagglutinin__InfluenzaB__AGX17785
MKAIIVLLMVVTSNADRICTGITSSNSPHVVKTATQGEVNVTGVIPLTTTPTKSHFANLKGTKTRGKLCPKCLNCTDLDVALGRPKCTGNIPSAEVSILHEVRPVTSGCFPIMHDRTKIRQLPNLLRGYEHVRLSTHNVINAEKAPGGPYKIGTSGSCPNVTNGNGFFATMAWAVPKNDNNKTATNSLTIEVPYICTEGEDQITIWGFHSDNETQMAKLYGDSKPQKFTSSANGVTTHYVSQIGGFPNQTEDGGLPQSGRIVVDYMVQKSGKTGTITYQRGILLPQKVWCASGRSKVIKGSLPLIGEADCLHEKYGGLNKSKPYYTGEHAKAIGNCPIWVKTPLKLANGTKYRPPAKLLKERGFFGAIAGFLEGGWEGMIAGWHGYTSHGAHGVAVAADLKSTQEAINKITKNLNSLSELEVKNLQRLSGAMDELHNEILELDEKVDDLRADTISSQIELAVLLSNEGIINSEDEHLLALERKLKKMLGPSAVEIGNGCFETKHKCNQTCLDRIAAGTFDAGEFSLPTFDSLNITAASLNDDGLDNHTILLYYSTAASSLAVTLMIAIFVVYMVSRDNVSCSICL

SEQ ID NO: 27168 - protein, 585 aa, synthetic construct; identical to SEQ ID NO: 26981
  REGION 1..585: note = hemagglutinin__InfluenzaB__AGX17796

SEQ ID NO: 27169 - protein, 585 aa, synthetic construct; identical to SEQ ID NO: 26565
  REGION 1..585: note = hemagglutinin__InfluenzaB__AGX17807

SEQ ID NO: 27170 - protein, 585 aa, synthetic construct; identical to SEQ ID NO: 27152
  REGION 1..585: note = hemagglutinin__InfluenzaB__AGX17818

SEQ ID NO: 27171 - protein, 585 aa, synthetic construct
  REGION 1..585: note = hemagglutinin__InfluenzaB__AGX17829
MKAIIVLLMVVTSNADRICTGITSSNSPHVVKTATQGEVNVTGVIPLTTTPTKSHFANLKGTETRGKLCPKCLNCTDLDVALGRPKCTGKIPSARVSILHEVRPVTSGCFPIMHDRTKIRQLPNLLRGYEHIRLSTHNVINAENAPGGPYKIGTSGSCPNVTNGNGFFATMAWAVPKNDNNKTATNSLTIEVPYICTEGEDQITVWGFHSDNETQMAKLYGDSKPQKFTSSANGVTTHYVSQIGGFPNQTEDGGLPQSGRIVVDYMVQKSGKTGTITYQRGILLPQKVWCASGRSKVIKGSLPLIGEADCLHEKYGGLNKSKPYYTGEHAKAIGNCPIWVKTPLKLANGTKYRPPAKLLKERGFFGAIAGFLEGGWEGMIAGWHGYTSHGAHGVAVAADLKSTQEAVNKITKNLNSLSELEVKNLQRLSGAMDELHNEILELDEKVDDLRADTISSQIELAVLLSNEGIINSEDEHLLALERKLKKMLGPSAVEIGNGCFETKHKCNQTCLDRIAAGTFDAGEFSLPTFDSLNITAASLNDDGLDNHTILLYYSTAASSLAVTLMIAIFVVYMVSRDNVSCSICL

SEQ ID NO: 27172 - protein, 585 aa, synthetic construct; identical to SEQ ID NO: 26638
  REGION 1..585: note = hemagglutinin__InfluenzaB__AGX17840

SEQ ID NO: 27173 - protein, 585 aa, synthetic construct; identical to SEQ ID NO: 26981
  REGION 1..585: note = hemagglutinin__InfluenzaB__AGX17851

SEQ ID NO: 27174 - protein, 585 aa, synthetic construct
  REGION 1..585: note = hemagglutinin__InfluenzaB__AGX17862
MKAIIVLLMVVTSNADRICTGITSSNSPHVVKTATQGEVNVTGVIPLTTTPTKSHFANLKGTKTRGKLCPKCLNCTDLDVALGRPKCTGNIPSAEVSILHEVRPVTSGCFPIMHDRTKIRQLPNLLRGYEHIRLSTHNVINAEKAPGGPYKIGTSGSCPNVTNGNGFFATMAWAVPKNDNNKTATNSLTIEVPYICTEGEDQITIWGFHSDNETQMAKLYGDSKPQKFTSSANGVTTHYVSQIGGFPNQTEDGGLPQSGRIVVDYMVQKSGKTGTITYQRGILLPQKVWCASGRSKVIKGTLPLIGEADCLHEKYGGLNKSKPYYTGEHAKAIGNCPIWVKTPLKLANGTKYRPPAKLLKERGFFGAIAGFLEGGWEGMIAGWHGYTSHGAHGVAVAADLKSTQEAINKITKNLNSLSELEVKNLQRLSGAMDELHNEILELDEKVDDLRADTISSQIELAVLLSNEGIINSEDEHLLALERKLKKMLGPSAVEIGNGCFETKHKCNQTCLDRIAAGTFDAGEFSLPTFDSLNITAASLNDDGLDNHTILLYYSTAASSLAVTLMIAIFVVYMVSRDNVSCSICL

SEQ ID NO: 27175 - protein, 585 aa, synthetic construct
  REGION 1..585: note = hemagglutinin__InfluenzaB__AGX17873
MKAIIVLLMVVTSNADRICTGITSSNSPHVVKTATQGEVNVTGVIPLTTTPTKSHFANLKGTETRGKLCPKCLDCTDLDVALGRPKCTGNIPSARVSILHEVRPVTSGCFPIMHDRTKIRQLPNLLRGYEHIRLSTHNVINAENAPGGPYKIGTSGSCPNVTNGNGFFATMAWAVPKNDNNKTATNSLTIEVPYICTEGEDQITVWGFHSDNETQMAKLYGDSKPQKFTSSANGVTTHYVSQIGGFPNQTEDGGLPQSGRIVVDYMVQKSGKTGTITYQRGILLPQKVWCASGRSKVIKGSLPLIGEADCLHEKYGGLNKSKPYYTGEHAKAIGNCPIWVKTPLKLANGTKYRPPAKLLKERGFFGAIAGFLEGGWEGMIAGWHGYTSHGAHGVAVAADLKSTQEAINKITKNLNSLSELEVKNLQRLSGAMDELHNEILELDEKVDDLRADTISSQIELAVLLSNEGIINSEDEHLLALERKLKKMLGPSAVEIGNGCFETKHKCNQTCLDRIAAGTFDAGEFSLPTFDSLNITAASLNDDGLDNHTILLYYSTAASSLAVTLMIAIFVVYMVSRDNVSCSICL

SEQ ID NO: 27176 - protein, 585 aa, synthetic construct; identical to SEQ ID NO: 26638
  REGION 1..585: note = hemagglutinin__InfluenzaB__AGX17884

SEQ ID NO: 27177 - protein, 585 aa, synthetic construct
  REGION 1..585: note = hemagglutinin__InfluenzaB__AGX17895
MKAIIVLLMVVTSNADRICTGITSSNSPHVVKTATQGEVNVTGVIPLTTTPTKSHFANLKGTETRGKLCPKCLNCTDLDVALGRPKCTGNIPSARVSILHEVRPVTSGCFPIMHDRTKIRQLPNLLRGYEHIRLSTHNVINAENAPGGPYKIGTSGSCPNVTNGNGFFATMAWAVPKNDNNKTATNSLTIEVPYICTEGEDQITVWGFHSDNENQMAKLYGDSKPQKFTSSANGVTTHYVSQIGGFPNQTEDGGLPQSGRIVVDYMVQKSGKTGTITYQRGILLPQKVWCASGRSKVIKGSLPLIGEADCLHEKYGGLNKSKPYYTGEHAKAIGNCPIWVKTPLKLANGTKYRPPAKLLKERGFFGAIAGFLEGGWEGMIAGWHGYTSHGAHGVAVAADLKSTQEAINKITKNLNSLSELEVKNLQRLSGAMDELHNEILELDEKVDDLRADTISSQIELAVLLSNEGIINSEDEHLLALERKLKKMLGPSAVEIGNGCFETKHKCNQTCLDRIAAGTFDAGEFSLPTFDSLNITAASLNDDGLDNHTILLYYSTAASSLAVTLMIAIFVVYMVSRDNVSCSICL

SEQ ID NO: 27178 - protein, 585 aa, synthetic construct; identical to SEQ ID NO: 26638
  REGION 1..585: note = hemagglutinin__InfluenzaB__AGX17906

SEQ ID NO: 27179 - protein, 585 aa, synthetic construct; identical to SEQ ID NO: 26638
  REGION 1..585: note = hemagglutinin__InfluenzaB__AGX17917

SEQ ID NO: 27180 - protein, 585 aa, synthetic construct
  REGION 1..585: note = hemagglutinin__InfluenzaB__AGX17928
MKTIIVLLMVVTSNADRICTGITSSNSPHVVKTATQGEVNVTGVIPLTTTPTKSHFANLKGTKTRGKLCPKCLNCTDLDVALGRPKCTGNIPSAEVSILHEVRPVTSGCFPIMHDRTKIRQLPNLLRGYEHIRLSTHNVINAEKAPGGPYKIGTSGSCPNVTNGNGFFATMAWAVPKNDNNKTATNSLTIEVPYICTEGEDQITIWGFHSDNETQMAKLYGDSKPQKFTSSANGVTTHYVSQIGGFPNQTEDGGLPQSGRIVVDYMVQKSGKTGTITYQRGILLPQKVWCASGRSKVIKGTLPLIGEADCLHEKYGGLNKSKPYYTGEHAKAIGNCPIWVKTPLKLANGTKYRPPAKLLKERGFFGAIAGFLEGGWEGMIAGWHGYTSHGAHGVAVAADLKSTQEAINKITKNLNSLSELEVKNLQRLSGAMDELHNEILELDEKVDDLRADTISSQIELAVLLSNEGIINSEDEHLLALERKLKKMLGPSAVEIGNGCFETKHKCNQTCLDRIAAGTFDAGEFSLPTFDSLNITAASLNDDGLDNHTILLYYSTAASSLAVTLMIAIFVVYMVSRDNVSCSICL

SEQ ID NO: 27181 - protein, 585 aa, synthetic construct; identical to SEQ ID NO: 26514
  REGION 1..585: note = hemagglutinin__InfluenzaB__AGX17939

SEQ ID NO: 27182 - protein, 585 aa, synthetic construct; identical to SEQ ID NO: 26514
  REGION 1..585: note = hemagglutinin__InfluenzaB__AGX17950

SEQ ID NO: 27183 - protein, 585 aa, synthetic construct; identical to SEQ ID NO: 26514
  REGION 1..585: note = hemagglutinin__InfluenzaB__AGX17961

SEQ ID NO: 27184 - protein, 585 aa, synthetic construct; identical to SEQ ID NO: 26981
  REGION 1..585: note = hemagglutinin__InfluenzaB__AGX17972

SEQ ID NO: 27185 - protein, 585 aa, synthetic construct; identical to SEQ ID NO: 26514
  REGION 1..585: note = hemagglutinin__InfluenzaB__AGX17983

SEQ ID NO: 27186 - protein, 585 aa, synthetic construct; identical to SEQ ID NO: 26638
  REGION 1..585: note = hemagglutinin__InfluenzaB__AGX17994

SEQ ID NO: 27187 - protein, 585 aa, synthetic construct
  REGION 1..585: note = hemagglutinin__InfluenzaB__AGX18005
MKAIIVLLMVVTSNADRICTGITSSNSPHVVKTATQGEVNVTGVIPLTTTPTKSHFANLKGTETRGKLCPKCLNCTDLDVALGRPKCTGNIPSARVSILHEVRPVTSGCFPIMHDRTKIRQLPNLLRGYEHIRLSTHNVINAENAPGGPYKIGTSGSCPNVTNGNGFFATMAWAVPKNDNNKTATNSLTIEVPYICTEGEDQITVWGFHSDNETQMAKLYGDSKPQKFTSSANGVTTHYVSQIGGFPNQTEDGGLPQSGRIVVDYMVQKSGKTGTITYQRGILLPQKVWCASGRSKVIKGSLPLIGEADCLHEKYGGLNKSKPYYTGEHAKAIGNCPIWVKTPLKLANGTKYRPPAKLLKERGFFGAIAGFLEGGWEGMIAGWHGYTSHGAHGVAVAADIKSTQEAINKITKNLNSLSELEVKNLQRLSGAMDELHNEILELDEKVDDLRADTISSQIELAVLLSNEGIINSEDEHLLALERKLKKMLGPSAVEIGNGCFETKHKCNQTCLDRIAAGTFDAGEFSLPTFDSLNITAASLNDDGLDNHTILLYYSTAASSLAVTLMIAIFVVYMVSRDNVSCSICL

SEQ ID NO: 27188 - protein, 585 aa, synthetic construct
  REGION 1..585: note = hemagglutinin__InfluenzaB__AGX18016
MKAIIVLLMVVTSNADRICTGITSSNSPHVVKTATQGEVNVTGVIPLTTTPTKSHFANLKGTETRGKLCPKCLNCTDLDVALGRPKCTGNIPSARVSILHEVRPVTSGCFPIMHDRTKIRQLPNLLRGYEHIRLSTHNVINAENAPGGPYKIGTSGSCPNVTNGNGFFATMAWAVPKNDNNKTATNSLTIEVPYICIEGEDQITVWGFHSDNETQMAKLYGDSKPQKFTSSANGVTTHYVSQIGGFPNQTEDGGLPQSGRIVVDYMVQKSGKTGTITYQRGILLPQKVWCASGRSKVIKGSLPLIGEADCLHEKYGGLNKSKPYYTGEHAKAIGNCPIWVKTPLKLANGTKYRPPAKLLKERGFFGAIAGFLEGGWEGMIAGWHGYTSHGAHGVAVAADLKSTQEAINKITKNLNSLSELEVKNLQRLSGAMDELHNEILELDEKVDDLRADTISSQIELAVLLSNEGIINSEDEHLLALERKLKKMLGPSAVEIGNGCFETKHKCNQTCLDRIAAGTFDAGEFSLPTFDSLNITAASLNDDGLDNHTILLYYSTAASSLAVTLMIAIFVVYMVSRDNVSCSICL

SEQ ID NO: 27189 - protein, 585 aa, synthetic construct; identical to SEQ ID NO: 27152
  REGION 1..585: note = hemagglutinin__InfluenzaB__AGX18027

SEQ ID NO: 27190 - protein, 585 aa, synthetic construct; identical to SEQ ID NO: 26638
  REGION 1..585: note = hemagglutinin__InfluenzaB__AGX18038

SEQ ID NO: 27191 - protein, 585 aa, synthetic construct; identical to SEQ ID NO: 26638
  REGION 1..585: note = hemagglutinin__InfluenzaB__AGX18049

SEQ ID NO: 27192 - protein, 585 aa, synthetic construct; identical to SEQ ID NO: 26638
  REGION 1..585: note = hemagglutinin__InfluenzaB__AGX18060

SEQ ID NO: 27193 - protein, 585 aa, synthetic construct; identical to SEQ ID NO: 26514
  REGION 1..585: note = hemagglutinin__InfluenzaB__AGX18071

SEQ ID NO: 27194 - protein, 585 aa, synthetic construct; identical to SEQ ID NO: 27174
  REGION 1..585: note = hemagglutinin__InfluenzaB__AGX18082

SEQ ID NO: 27195 - protein, 585 aa, synthetic construct; identical to SEQ ID NO: 27174
  REGION 1..585: note = hemagglutinin__InfluenzaB__AGX18093

SEQ ID NO: 27196 - protein, 585 aa, synthetic construct; identical to SEQ ID NO: 26981
  REGION 1..585: note = hemagglutinin__InfluenzaB__AGX18104

SEQ ID NO: 27197 - protein, 585 aa, synthetic construct; identical to SEQ ID NO: 26638
  REGION 1..585: note = hemagglutinin__InfluenzaB__AGX18115

SEQ ID NO: 27198 - protein, 585 aa, synthetic construct; identical to SEQ ID NO: 26638
  REGION 1..585: note = hemagglutinin__InfluenzaB__AGX18126

SEQ ID NO: 27199 - protein, 585 aa, synthetic construct; identical to SEQ ID NO: 26514
  REGION 1..585: note = hemagglutinin__InfluenzaB__AGX18137

SEQ ID NO: 27200 - protein, 585 aa, synthetic construct; identical to SEQ ID NO: 27174
  REGION 1..585: note = hemagglutinin__InfluenzaB__AGX18148

SEQ ID NO: 27201 - protein, 585 aa, synthetic construct; identical to SEQ ID NO: 26514
  REGION 1..585: note = hemagglutinin__InfluenzaB__AGX18159

SEQ ID NO: 27202 - protein, 585 aa, synthetic construct; identical to SEQ ID NO: 26514
  REGION 1..585: note = hemagglutinin__InfluenzaB__AGX18170

SEQ ID NO: 27203 - protein, 585 aa, synthetic construct; identical to SEQ ID NO: 27174
  REGION 1..585: note = hemagglutinin__InfluenzaB__AGX18181

SEQ ID NO: 27204 - protein, 585 aa, synthetic construct
  REGION 1..585: note = hemagglutinin__InfluenzaB__AGX18192
MKAIIVLLMVVTSNADRICTGITSSNSPHVVKTATQGEVNVTGVIPLTTTPTKSHFANLKGTKTRGKLCPKCLNCTDLDVALGRPKCTGNIPSAEVSILHEVRPVTSGCFPIMHDRTKIRQLPNLLRGYEHIRLSTHNVINAEKAPGGPYKIGTSGSCPNVTNGNGFFATMAWAVPKNDNNKTATNSLTIEVPYICTEGEDQITIWGFHSDNETQMAKLYGDSKPQKFTSSTNGVTTHYVSQIGGFPNQTEDGGLPQSGRIVVDYMVQKPGKTGTITYQRGILLPQKVWCASGRSKVIKGSLPLIGEADCLHEKYGGLNKSKPYYTGEHAKAIGNCPIWVKTPLKLANGTKYRPPAKLLKERGFFGAIAGFLEGGWEGMIAGWHGYTSHGAHGVAVAADLKSTQEAINKITKNLNSLSELEVKNLQRLSSAMDELHNEILELDEKVDDLRADTISSQIELAVLLSNEGIINSEDEHLLALERKLKKMLGPSAVEIGNGCFETKHKCNQTCLDRIAAGTFDAGEFSLPTFDSLNITAASLNDDGLDNHTILLYYSTAASSLAVTLMIAIFVVYMVSRDNVSCSICL

SEQ ID NO: 27205 - protein, 585 aa, synthetic construct; identical to SEQ ID NO: 27152
  REGION 1..585: note = hemagglutinin__InfluenzaB__AGX18203

SEQ ID NO: 27206 - protein, 585 aa, synthetic construct
  REGION 1..585: note = hemagglutinin__InfluenzaB__AGX18214
MKAIIVLLMVVTSNADRICTGITSSNSPHVVKTATQGEVNVTGVIPLTTTPTKSHFANLKGTKTRGKLCPKCLNCTDLDVALGRPKCTGNIPSAEVSILHEVRPVTSGCFPIMHDRTKIRQLPNLLRGYEHIRLSTHNVINAEKAPGGPYKTGTSGSCPNVTNGNGFFATMAWAVPKNDNNKTATNSLTIEVPYICTEGEDQITIWGFHSDNETQMAKLYGDSKPQKFTSSANGVTTHYVSQIGGFPNQTEDGGLPQSGRIVVDYMVQKSGKTGTITYQRGILLPQKVWCASGRSKVIKGSLPLIGEADCLHEKYGGLNKSKPYYTGEHAKAIGNCPIWVKTPLKLANGTKYRPPAKLLKERGFFGAIAGFLEGGWEGMIAGWHGYTSHGAHGVAVAADLKSTQEAINKITKNLNSLSELEVKNLQRLSGAMDELHNEILELDEKVDDLRADTISSQIELAVLLSNEGIINSEDEHLLALERKLKKMLGPSAVEIGNGCFETKHKCNQTCLDRIAAGTFDAGEFSLPTFDSLNITAASLNDDGLDNHIILLYYSTAASSLAVTLMIAIFVVYMVSRDNVSCSICL

SEQ ID NO: 27207 - protein, 585 aa, synthetic construct
  REGION 1..585: note = hemagglutinin__InfluenzaB__AGX18225
MKAIIVLLMVVTSNADRICTGITSSNSPHVVKTATQGEVNVTGVIPLTTTPTKSHFANLKGTKTRGKLCPKCLNCTDLDVALGRPKCTGNIPSAEVSILHEVRPVTSGCFPIMHDRTKIRQLPNLLRGYEHIRLSTHNVINAEKAPGGPYKIGTSGSCPNVTNGNGFFATMAWAVPKNDNNKTATNSLTIEVPYICTEGEDQITIWGFHSDNETQMAKLYGDSKPQKFTSSANGVTTHYVSQIGGFPNQTEDGGLPQSGRIVVDYMVQKSGKTGTITYQRGILLPQKVWCASGRSKVIKGSLPLIGEADCLHEKYGGLNKSKPYYTGEHAKAIGNCPIWVKTPLKLANGTKYRPPAKLLKERGFFGAIAGFLEGGWEGMIAGWHGYTSHGAHGVAVAADLKSTQEAINRITKNLNSLSELEVKNLQRLSGAMDELHNEILELDEKVDDLRADTISSQIELAVLLSNEGIINSEDEHLLALERKLKKMLGPSAVEIGNGCFETKHKCNQTCLDRIAAGTFDAGEFSLPTFDSLNITAASLNDDGLDNHTILLYYSTAASSLAVTLMIAIFVVYMVSRDNVSCSICL

SEQ ID NO: 27208 - protein, 585 aa, synthetic construct
  REGION 1..585: note = hemagglutinin__InfluenzaB__AGX18236
MKAIIVLLMVVTSNADRICTGITSSNSPHVVKTATQGEVNVTGVIPLTTTPTKSHFANLKGTKTRGKLCPKCLNCTDLDVALGRPKCTGNIPSAEVSILHEVRPVTSGCFPIMHDRTKIRQLPNLLRGYEHIRLSTHNVINAEKAPGGPYKIGTSGSCPNVTNGNGFFATMAWAVPKNDNNKTATNSLTIEVPYICTEGEDQITIWGFHSDNETQMAKLYGDSKPQKFTSSANGVTTHYVSQIGGFPNQTEDGGLPQSGRIVVDYMMQKSGKTGTITYQRGILLPQKVWCASGRSKVIKGSLPLIGEADCLHEKYGGLNKSKPYYTGEHAKAIGNCPIWVKTPLKLANGTKYRPPAKLLKERGFFGAIAGFLEGGWEGMIAGWHGYTSHGAHGVAVAADLKSTQEAINKITKNLNSLSELEVKNLQRLSGAMDELHNEILELDEKVDDLRADTISSQIELAVLLSNEGIINSEDEHLLALERKLKKMLGPSAVEIGNGCFETKHKCNQTCLDRIAAGTFDAGEFSLPTFDSLNITAASLNDDGLDNHTILLYYSTAASSLAVTLMIAIFVVYMVSRDNVSCSICL

SEQ ID NO: 27209 - protein, 585 aa, synthetic construct; identical to SEQ ID NO: 26565
  REGION 1..585: note = hemagglutinin__InfluenzaB__AGX18247

SEQ ID NO: 27210 - protein, 585 aa, synthetic construct
  REGION 1..585: note = hemagglutinin__InfluenzaB__AGX18258
MKAIIVLLMVVTSNADRICTGITSSNSPHVVKTATQGEVNVTGVIPLTTTPTKSHFANLKGTKTRGKLCPKCLNCTDLDVALGRPKCTGNIPSAEVSILHEVRPVTSGCFPIMHDRTKIRQLPNLLRGYEHIRLSTHNVINAEKAPGGPYKIGTSGSCPNVTNGNGFFATMAWAVPKNDKNKTATNSLTIEVPYICTEGEDQITIWGFHSDNETQMAKLYGDSKPQKFTSSANGVTTHYVSQIGGFPNQTEDGGLPQSGRIVVDYMVQKSGKTGTITYQRGILLPQKVWCASGRSKVIKGTLPLIGEADCLHEKYGGLNKSKPYYTGEHAKAIGNCPIWVKTPLKLANGTKYRPPAKLLKERGFFGAIAGFLEGGWEGMIAGWHGYTSHGAHGVAVAADLKSTQEAINKITKNLNSLSELEVKNLQRLSGAMDELHNEILELDEKVDDLRADTISSQIELAVLLSNEGIINSEDEHLLALERKLKKMLGPSAVEIGNGCFETKHKCNQTCLDRIAAGTFDAGEFSLPTFDSLNITAASLNDDGLDNHTILLYYSTAASSLAVTLMIAIFVVYMVSRDNVSCSICL

SEQ ID NO: 27211 - protein, 585 aa, synthetic construct; identical to SEQ ID NO: 26514
  REGION 1..585: note = hemagglutinin__InfluenzaB__AGX18280

SEQ ID NO: 27212 - protein, 585 aa, synthetic construct
  REGION 1..585: note = hemagglutinin__InfluenzaB__AGX18291
MKAIIVLLMVVTSNADRICTGITSSNSPHVVKTATQGEVNVTGVIPLTTTPTKSHFANLKGTKTRGKLCPKCLNCTDLDVALGRPKCTGNIPSAEVSILHEVRPVTSGCFPIMHDRTKIRQLPNLLRGYEHIRLSTHNVINAEKAPGGPYKIGTSGSCPNVTNGNGFFATMAWAVPKNDNNKTATNSLTIEVPYICTEGEDQITIWGFHSDNETQMAKLYGDSKPQKFTSSANGVTTHYVSQIGGFPNQTEDGGLPQSGRIVVDYMVQKSGKTGTITYQRGILLPQKVWCVSGRSKVIKGSLPLIGEADCLHEKYGGLNKSKPYYTGEHAKAIGNCPIWVKTPLKLANGTKYRPPAKLLKERGFFGAIAGFLEGGWEGMIAGWHGYTSHGAHGVAVAADLKSTQEAINKITKNLNSLSELEVKNLQRLSGAMDELHNEILELDEKVDDLRADTISSQIELAVLLSNEGIINSEDEHLLALERKLKKMLGPSAVEIGNGCFETKHKCNQTCLDRIAAGTFDAGEFSLPTFDSLNITAASLNDDGLDNHTILLYYSTAASSLAVTLMIAIFVVYMVSRDNVSCSICL

SEQ ID NO: 27213 - protein, 585 aa, synthetic construct
  REGION 1..585: note = hemagglutinin__InfluenzaB__AGX18302
MKAIIVLLMVVTSNADRICTGITSSNSPHVVKTATQGEVNVTGVIPLTTTPTKSHFANLKGTKTRGKLCPKCLNCTDLDVALGRPKCTGNIPSAEVSILHEVRPVTSGCFPIMHDRTKIRQLPNLLRGYKHIRLSTHNVINAEKAPGGPYKIGTSGSCPNVTNGNGFFATMAWAVPKNDNNKTATNSLTIEVPYICTEGEDQITIWGFHSDNETQMAKLYGDSKPQKFTSSANGVTTHYVSQIGGFPNQTEDGGLPQSGRIVVDYMVQKSGKTGTITYQRGILLPQKVWCASGRSKVIKGTLPLIGEADCLHEKYGGLNKSKPYYTGEHAKAIGNCPIWVKTPLKLANGTKYRPPAKLLKERGFFGAIAGFLEGGWEGMIAGWHGYTSHGAHGVAVAADLKSTQEAINKITKNLNSLSELEVKNLQRLSGAMDELHNEILELDEKVDDLRADTISSQIELAVLLSNEGIINSEDEHLLALERKLKKMLGPSAVEIGNGCFETKHKCNQTCLDRIAAGTFDAGEFSLPTFDSLNITAASLNDDGLDNHTILLYYSTAASSLAVTLMIAIFVVYMVSRDNVSCSICL

SEQ ID NO: 27214 - protein, 585 aa, synthetic construct; identical to SEQ ID NO: 26514
  REGION 1..585: note = hemagglutinin__InfluenzaB__AGX18313

SEQ ID NO: 27215 - protein, 585 aa, synthetic construct
  REGION 1..585: note = hemagglutinin__InfluenzaB__AGX18324
MKAIIVLLMVVTSNADRICTGITSSNSPHVVKTATQGEVNVTGVIPLTTTPTKSHFANLKGTKTRGKLCPKCLNCTDLDVALGRPKCTGNIPSAEVSILHEVRPVTSGCFPIMHDRTKIRQLPNLLRGYEHIRLSTHNVINAEKAPGGPYKIGTSGSCPNVTNGNGFFATMAWAVPKNDNNKTATNSLTIEVPYICTEGEDQITIWGFHSDNEAQMAKLYGDSKPQKFTSSANGVTTHYVSQIGGFPNQTEDGGLPQSGRIVVDYMVQKSGKTGTITYQRGILLPQKVWCASGRSKVIKGSLPLIGEADCLHEKYGGLNKSKPYYTGEHAKAIGNCPIWVKTPLKLANGTKYRPPAKLLKERGFFGAIAGFLEGGWEGMIAGWHGYTSHGAHGVAVAADLKSTQEAINKITKNLNSLSELEVKNLQRLSGAMDELHNEILELDEKVDDLRADTISSQIELAVLLSNEGIINSEDEHLLALERKLKKMLGPSAVEIGNGCFETKHKCNQTCLDRIAAGTFDAGEFSLPTFDSLNITAASLNDDGLDNHTILLYYSTAASSLAVTLMIAIFVVYMVSRDNVSCSICL

SEQ ID NO: 27216 - protein, 585 aa, synthetic construct; identical to SEQ ID NO: 27174
  REGION 1..585: note = hemagglutinin__InfluenzaB__AGX18335

SEQ ID NO: 27217 - protein, 585 aa, synthetic construct
  REGION 1..585: note = hemagglutinin__InfluenzaB__AGX18346
MKAIIVLLMVVTSNADRICTGITSSNSPHVVKTATQGEVNVTGVIPLTTTPTKSHFANLKGTKTRGKLCPKCLNCTDLDVALGRPKCTGNIPSAEVSILHEVRPVTSGCFPIMHDRTKIRQLPNLLRGYEHIRLSTHNVINAEKAPGGPYKIGTSGSCPNVTNGNGFFATMAWAVPKNDNNKTATNSLTIEVPYICTEGEDQITIWGFHSDNETQMAKLYGDSKPQKFTSSANGVTTHYVSQIGGFPNQTEDGGLPQSGRIVVDYMVQKSGKTGTITYQRGILLPQKVWCASGRSKVIKGSLPLIGEADCLHEKYGGLNKSKPYYTGEHAKAIGNCPIWVKTPLKLANGTKYRPPAKLLKERGFFGAIAGFLEGGWEGMIAGWHGYTSHGAHGVAVAADLKSTQEAINKITKNLNSLSELEVKNLQRLSGAMDELHNEILELDEKVDDLRADTISSQIELAVLLSNEGIINSEDEHLLALERKLKKMLGPSAVEIGNGCFETKHKCNQTCLDRIAAGTFDAGEFSLPTFDSLNITAASLNEDGLDNHTILLYYSTAASSLAVTLMIAIFVVYMVSRDNVSCSICL

SEQ ID NO: 27218 - protein, 585 aa, synthetic construct
  REGION 1..585: note = hemagglutinin__InfluenzaB__AGX18357
MKAIIVLLMVVTSNADRICTGITSSNSPHVVKTATQGEVNVTGVIPLTTAPTKSHFANLKGTKTRGKLCPKCLNCTDLDVALGRPKCTGNIPSAEVSILHEVRPVTSGCFPIMHDRTKIRQLPNLLRGYEHIRLSTHNVINAEKAPGGPYKIGTSGSCPNVTNGNGFFATMAWAVPKNDNNKTATNSLTIEVPYICTEGEDQITIWGFHSDKETQMAKLYGDSKPQKFTSSANGVTTHYVSQIGGFPNQTEDGGLPQSGRIVVDYMVQKPGKTGTITYQRGILLPQKVWCASGRSKVIKGSLPLIGEADCLHEKYGGLNKSKPYYTGEHAKAIGNCPIWVKTPLKLANGTKYRPPAKLLKERGFFGAIAGFLEGGWEGMIAGWHGYTSHGAHGVAVAADLKSTQEAINKITKNLNSLSELEVKNLQRLSSAMDELHNEILELDEKVDDLRADTISSQIELAVLLSNEGIINSEDEHLLALERKLKKMLGPSAVEIGNGCFETKHKCNQTCLDRIAAGTFDAGEFSLPTFDSLNITAASLNDDGLDNHTILLYYSTAASSLAVTLMIAIFVVYMVSRDNVSCSICL

SEQ ID NO: 27219 - protein, 585 aa, synthetic construct
  REGION 1..585: note = hemagglutinin__InfluenzaB__AGX18368
MKAIIVLLMVVTSNADRICTGITSSNSPHVVKTATQGEVNVTGVIPLTTAPTKSHFANLKGTKTRGKLCPKCLNCTDLDVALGRPKCTGNTPSAEVSILHEVRPVTSGCFPIMHDRTKIRQLPNLLRGYEHIRLSNHNVINAEKAPGGPYKIGTSGSCPNVTNGNGFFATMAWAVPKNDNNKTATNSLTIEVPYICTEGEDQITIWGFHSDNETQMAKLYGDSKPQKFTSSANGVTTHYVSQIGGFPNQTEDGGLPQSGRIVVDYMVQKPGKTGTITYQRGILLPQKVWCASGRSKVIKGSLPLIGEADCLHEKYGGLNKSKPYYTGEHAKAIGNCPIWVKTPLKLANGTKYRPPAKLLKERGFFGAIAGFLEGGWEGMIAGWHGYTSHGAHGVAVAADLKSTQEAINKITKNLNSLSELEVKNLQRLSSAMDELHNEILELDEKVDDLRADTISSQIELAVLLSNEGIINSEDEHLLALERKLKKMLGPSAVEIGNGCFETKHKCNQTCLDRIAAGTFDAGEFSLPTFDSLNITAASLNDDGLDNHTILLYYSTAASSLAVTLMIAIFVVYMVSRDNVSCSICL

SEQ ID NO: 27220 - protein, 585 aa, synthetic construct; identical to SEQ ID NO: 26638
  REGION 1..585: note = hemagglutinin__InfluenzaB__AGX18379

SEQ ID NO: 27221 - protein, 585 aa, synthetic construct; identical to SEQ ID NO: 27174
  REGION 1..585: note = hemagglutinin__InfluenzaB__AGX18390

SEQ ID NO: 27222 - protein, 585 aa, synthetic construct
  REGION 1..585: note = hemagglutinin__InfluenzaB__AGX18401
MKAIIVLLMVVTSNADRICTGITSSNSPHVVKTATQGEVNVTGVIPLTTAPTKSHFANLKGTKTRGKLCPKCLNCTDLDVALGRPKCTGNIPSAEVSILHEVRPVTSGCFPIMHDRTKIRQLPNLLRGYEHIRLSTHNVINAEKAPGGPYKIGTSGSCPNVTNGNGFFATMAWAVPKNDNNKTATNSLTIEVPYICTEGEDQITIWGFHSDNEIQMAKLYGDSKPQKFTSSANGVTTHYVSQIGGFPNQTEDGGLPQSGRIVVDYMVQKPGKTGTITYQRGILLPQKVWCASGRSKVIKGSLPLIGEADCLHEKYGGLNKSKPYYTGEHAKAIGNCPIWVKTPLKLANGTKYRPPAKLLKERGFFGAIAGFLEGGWEGMIAGWHGYTSHGAHGVAVAADLKSTQEAINKITKNLNSLSELEVKNLQRLSSAMDELHNEILELDEKVDDLRADTISSQIELAVLLSNEGIINSEDEHLLALERKLKKMLGPSAVEIGNGCFETKHKCNQTCLDRIAAGTFDAGEFSLPTFDSLNITAASLNDDGLDNHTILLYYSTAASSLAVTLMIAIFVVYMVSRDNVSCSICL

SEQ ID NO: 27223 - protein, 585 aa, synthetic construct
  REGION 1..585: note = hemagglutinin__InfluenzaB__AGX18412
MKAIIVLLMVVTSNADRICTGITSSNSPHVVKTATQGEVNVTGVIPLTTTPTKSHFANLKGTKTRGKLCPKCLNCTDLDVALGRPKCTGNIPSAEVSILHEVRPVTSGCFPIMHDRTKIRQLPNLLRGYEHIRLSNHNVINAEKAPGGPYKIGTSGSCPNVTNGNGFFATMAWAVPKNDNNKTATNSLTIEVPYICTEGEDQITIWGFHSDNEAQMAKLYGDSKPQKFTSSANGVTTHYVSQIGGFPNQTEDGGLPQSGRIVVDYMVQKSGKTGTITYQRGILLPQKVWCASGRSKVIKGSLPLIGEADCLHEKYGGLNKSKPYYTGEHAKAIGNCPIWVKTPLKLANGTKYRPPAKLLKERGFFGAIAGFLEGGWEGMIAGWHGYTSHGAHGVAVAADLKSTQEAINKITKNLNSLSELEVKNLQRLSGAMDELHNEILELDEKVDDLRADTISSQIELAVLLSNEGIINSEDEHLLALERKLKKMLGPSAVEIGNGCFETKHKCNQTCLDRIAAGTFDAGEFSLPTFDSLNITAASLNDDGLDNHTILLYYSTAASSLAVTLMIAIFVVYMVSRDNVSCSICL

SEQ ID NO: 27224 - protein, 585 aa, synthetic construct; identical to SEQ ID NO: 26981
  REGION 1..585: note = hemagglutinin__InfluenzaB__AGX18423

SEQ ID NO: 27225 - protein, 584 aa, synthetic construct
  REGION 1..584: note = hemagglutinin__InfluenzaB__AGX18424
MKAIIVLLMVVTSNADRICTGITSSNSPHVVKTATQGEVNVTGVIPLTTTPIKSHFANLKGTRTRGKLCPDCLNCTDLDVALGRPMCVGTTPSAKASILHEVRPVTSGCFPIMHDRTKIRQLPNLLRGYENIRLSTQNVIDAEKALGGPYRLGTSGSCPNATSKSGFFATMAWAVPKDNNKNATNPLTVEVPYICTEGEDQITVWGFHSDDKTQMKNLYGDSNPQKFTSSANGVTTHYVSQIGGFPDQTEDGGLPQSGRIVVDYMVQKPGKTGTIVYQRGVLLPQKVWCASGRSKVIKGSLPLIGEADCLHEKYGGLNKSKPYYTGEHAKAIGNCPIWVKTPLKLANGTKYRPPAKLLKERGFFGAIAGFLEGGWEGMIAGWHGYTSHGAHGVAVAADLKSTQEAINKITKNLNSLSELEVKNLQRLSGAMDELHNEILELDEKVDDLRADTISSQIELAVLLSNEGIINSEDEHLLALERKLKKMLGPSAVDIGNGCFETKHKCNQTCLDRIAAGTFNAGEFSLPTFDSLNITAASLNDDGLDNHTILLYYSTAASSLAVTLMLAIFIVYMVSRDNVSCSICL

SEQ ID NO: 27226 - protein, 585 aa, synthetic construct
  REGION 1..585: note = hemagglutinin__InfluenzaB__AGX18435
MKAIIVLLMVVTSNADRICTGITSSNSPHVVKTATQGEVNVTGVIPLTTTPTKSHFANLKGTKTRGKLCPKCLNCTDLDVALGRPKCTGNIPSAEVSILHEVRPVTSGCFPIMHDRTKIRQLPNLLRGYEHIRLSTHNVINAEKAPGGPYKIGTSGSCPNVTNGNGFFATMAWAVPKNDNNKTATNSLTIEVPYICTEGEDQITIWGFHSDNEIQMAKLYGDSKPQKFTSSANGVTTHYVSQIGGFPNQTEDGGLPQSGRIVVDYMVQKSGKTGTITYQRGILLPQKVWCASGRSKVIKGSLPLIGEADCLHEKYGGLNKSKPYYTGEHAKAIGNCPIWVKTPLKLANGTKYRPPAKLLKERGFFGAIAGFLEGGWEGMIAGWHGYTSHGAHGVAVAADLKSTQEAINKITKNLNSLSELEVKNLQRLSGAMDELHNEILELDEKVDDLRADTISSQIELAVLLSNEGIINSEDEHLLALERKLKKMLGPSAVEIGNGCFETKHKCNQTCLDRIAAGTFDAGEFSLPTFDSLNITAASLNDDGLDNHTILLYYSTAASSLAVTLMIAIFVVYMVSRDNVSCSICL

SEQ ID NO: 27227 - protein, 585 aa, synthetic construct; identical to SEQ ID NO: 26638
  REGION 1..585: note = hemagglutinin__InfluenzaB__AGX18446

SEQ ID NO: 27228 - protein, 585 aa, synthetic construct; identical to SEQ ID NO: 27174
  REGION 1..585: note = hemagglutinin__InfluenzaB__AGX18457

SEQ ID NO: 27229 - protein, 585 aa, synthetic construct; identical to SEQ ID NO: 26981
  REGION 1..585: note = hemagglutinin__InfluenzaB__AGX18468

SEQ ID NO: 27230 - protein, 585 aa, synthetic construct; identical to SEQ ID NO: 27174
  REGION 1..585: note = hemagglutinin__InfluenzaB__AGX18479

SEQ ID NO: 27231 - protein, 585 aa, synthetic construct; identical to SEQ ID NO: 26514
  REGION 1..585: note = hemagglutinin__InfluenzaB__AGX18490

SEQ ID NO: 27232 - protein, 585 aa, synthetic construct
  REGION 1..585: note = hemagglutinin__InfluenzaB__AGX18512
MKAIIVLLMVVTSNADRICTGITSSNSPHVVKTATQGEVNVTGVIPLTTTPTKSHFANLKGTETRGRLCPKCLNCTDLDVALGRPKCTGNIPSARVSILHEVRPVTSGCFPIMHDRTKIRQLPNLLRGYEHIRLSTHNVINAENAPGGPYKIGTSGSCPNVTNGNGFFATMAWAVPKNDNNKTATNSLTIEVPYICTEGEDQITVWGFHSDNETQMAKLYGDSKPQKFTSSANGVTTHYVSQIGGFPNQTEDGGLPQSGRIVVDYMVQKSGKTGTITYQRGILLPQKVWCASGRSKVIKGSLPLIGEADCLHEKYGGLNKSKPYYTGEHAKAIGNCPIWVKTPLKLANGTKYRPPAKLLKERGFFGAIAGFLEGGWEGMIAGWHGYTSHGAHGVAVAADLKSTQEAINKITKNLNSLSELEVKNLQRLSGAMDELHNEILELDEKVDDLRADTISSQIELAVLLSNEGIINSEDEHLLALERKLKKMLGPSAVEIGNGCFETKHKCNQTCLDRIAAGTFDAGEFSLPTFDSLNITAASLNDDGLDNHTILLYYSTAASSLAVTLMIAIFVVYMVSRDNVSCSICL

SEQ ID NO: 27233 - protein, 585 aa, synthetic construct; identical to SEQ ID NO: 26514
  REGION 1..585: note = hemagglutinin__InfluenzaB__AGX18523

SEQ ID NO: 27234 - protein, 585 aa, synthetic construct; identical to SEQ ID NO: 26514
  REGION 1..585: note = hemagglutinin__InfluenzaB__AGX18534

SEQ ID NO: 27235 - protein, 585 aa, synthetic construct; identical to SEQ ID NO: 26575
  REGION 1..585: note = hemagglutinin__InfluenzaB__AGX18545

SEQ ID NO: 27236 - protein, 585 aa, synthetic construct; identical to SEQ ID NO: 26514
  REGION 1..585: note = hemagglutinin__InfluenzaB__AGX18556

SEQ ID NO: 27237 - protein, 585 aa, synthetic construct; identical to SEQ ID NO: 26514
  REGION 1..585: note = hemagglutinin__InfluenzaB__AGX18567

SEQ ID NO: 27238 - protein, 585 aa, synthetic construct
  REGION 1..585: note = hemagglutinin__InfluenzaB__AGX18578
MKAIIVLLMVVTSNADRICTGITSSNSPHVVKTATQGEVNVTGVIPLTTTPTKSHFANLKGTETRGKLCPKCLNCTDLDVALGRPKCTGNIPSARVSILHEVRPVTSGCFPIMHDRTKIRQLPNLLRGYEHIRLSTHNVINAENAPGGPYKIGTSGSCPNVTNGNGFFATMAWAVPKNDKNKTATNSLTIEVPYICTEGEDQITVWGFHSDNETQMAKLYGDSKPQKFTSSANGVTTHYVSQIGGFPNQTEDGGLPQSGRIVVDYMVQKSGKTGTITYQRGILLPQKVWCASGRSKVIKGSLPLIGEADCLHEKYGGLNKSKPYYTGEHAKAIGNCPIWVKTPLKLANGTKYRPPAKLLKERGFFGAIAGFLEGGWEGMIAGWHGYTSHGAHGVAVAADLKSTQEAINKITKNLNSLSELEVKNLQRLSGAMDELHKEILELDEKVDDLRADTISSQIELAVLLSNEGIINSEDEHLLALERKLKKMLGPSAVEIGNGCFETKHKCNQTCLDRIAAGTFDAGEFSLPTFDSLNITAASLNDDGLDNHTILLYYSTAASSLAVTLMIAIFVVYMVSRDNVSCSICL

SEQ ID NO: 27239 - protein, 585 aa, synthetic construct
  REGION 1..585: note = hemagglutinin__InfluenzaB__AGX18589
MKAIIVLLMVVTSNADRICTGITSSNSPHVVKTATQGEVNVTGVIPLTTTPTKSHFANLKGTETRGKLCPKCLNCTDLDVALGRPKCTGNIPSARVSILHEVRPVTSGCFPIMHDRTKIRQLPNLLRGYEHIRLSTHNVINAENAPGGPYKIGTSGSCPNVTNGNGFFATMAWAVPKNDNNKTATNSLTIEVPYICTEGEDQITVWGFHSDTETQMAKLYGDSKPQKFTSSANGVTTHYVSQIGDFPNQTEDGGLPQSGRIVVDYMVQKSGKTGTITYQRGILLPQKVWCASGRSKVIKGSLPLIGEADCLHEKYGGLNKSKPYYTGEHAKAIGNCPIWVKTPLKLANGTKYRPPAKLLKERGFFGAIAGFLEGGWEGMIAGWHGYTSHGAHGVAVAADLKSTQEAINKITKNLNSLSELEVKNLQRLSGAMDELHNEILELDEKVDDLRADTISSQIELAVLLSNEGIINSEDEHLLALERKLKKMLGPSAVEIGNGCFETKHKCNQTCLDRIAAGTFDAGEFSLPTFDSLNITAASLNDDGLDNHTILLYYSTAASSLAVTLMIAIFVVYMVSRDNVSCSICL

SEQ ID NO: 27240 - protein, 585 aa, synthetic construct; identical to SEQ ID NO: 26514
  REGION 1..585: note = hemagglutinin__InfluenzaB__AGX18600

SEQ ID NO: 27241 - protein, 585 aa, synthetic construct; identical to SEQ ID NO: 26514
  REGION 1..585: note = hemagglutinin__InfluenzaB__AGX18611

SEQ ID NO: 27242 - protein, 585 aa, synthetic construct; identical to SEQ ID NO: 26514
  REGION 1..585: note = hemagglutinin__InfluenzaB__AGX18622

SEQ ID NO: 27243 - protein, 585 aa, synthetic construct; identical to SEQ ID NO: 26514
  REGION 1..585: note = hemagglutinin__InfluenzaB__AGX18633

SEQ ID NO: 27244 - protein, 585 aa, synthetic construct; identical to SEQ ID NO: 26514
  REGION 1..585: note = hemagglutinin__InfluenzaB__AGX18644

SEQ ID NO: 27245 - protein, 585 aa, synthetic construct; identical to SEQ ID NO: 26514
  REGION 1..585: note = hemagglutinin__InfluenzaB__AGX18655

SEQ ID NO: 27246 - protein, 585 aa, synthetic construct; identical to SEQ ID NO: 26514
  REGION 1..585: note = hemagglutinin__InfluenzaB__AGX18666

SEQ ID NO: 27247 - protein, 585 aa, synthetic construct; identical to SEQ ID NO: 26514
  REGION 1..585: note = hemagglutinin__InfluenzaB__AGX18677

SEQ ID NO: 27248 - protein, 585 aa, synthetic construct; identical to SEQ ID NO: 26514
  REGION 1..585: note = hemagglutinin__InfluenzaB__AGX18688

SEQ ID NO: 27249 - protein, 585 aa, synthetic construct; identical to SEQ ID NO: 26514
  REGION 1..585: note = hemagglutinin__InfluenzaB__AGX18699

SEQ ID NO: 27250 - protein, 585 aa, synthetic construct; identical to SEQ ID NO: 26514
  REGION 1..585: note = hemagglutinin__InfluenzaB__AGX18710

SEQ ID NO: 27251 - protein, 585 aa, synthetic construct; identical to SEQ ID NO: 26514
  REGION 1..585: note = hemagglutinin__InfluenzaB__AGX18721

SEQ ID NO: 27252 - protein, 585 aa, synthetic construct; identical to SEQ ID NO: 26514
  REGION 1..585: note = hemagglutinin__InfluenzaB__AGX18732

SEQ ID NO: 27253 - protein, 585 aa, synthetic construct
  REGION 1..585: note = hemagglutinin__InfluenzaB__AGX18743
MKAIIVLLMVVTSNADRICTGITSSNSPHVVKTATQGEVNVTGVIPLTTTPTKSHFANLKGTETRGKLCPKCLNCTDLDVALGRPKCTGNIPSARVSILHEVRPVTSGCFPIMHDRTKIRQLPNLLRGYEHIRLSNHNVINAENAPGGPYKIGTSGSCPNVTNGNGFFATMAWAVPKNDNNKTATNSLTIEVPYICTEGEDQITVWGFHSDNETQMAKLYGDSKPQKFTSSANGVTTHYVSQIGGFPNQTEDGGLPQSGRIVVDYMVQKSGKTGTITYQRGILLPQKVWCASGRSKVIKGSLPLIGEADCLHEKYGGLNKSKPYYTGEHAKAIGNCPIWVKTPLKLANGTKYRPPAKLLKERGFFGAIAGFLEGGWEGMIAGWHGYTSHGAHGVAVAADLKSTQEAINKITKNLNSLSELEVKNLQRLSGAMDELHNEILELDEKVDDLRADTISSQIELAVLLSNEGIINSEDEHLLALERKLKKMLGPSAVEIGNGCFETKHKCNQTCLDRIAAGTFDAGEFSLPTFDSLNITAASLNDDGLDNHTILLYYSTAASSLAVTLMIAIFVVYMVSRDNVSCSICL

SEQ ID NO: 27254 - protein, 585 aa, synthetic construct; identical to SEQ ID NO: 26514
  REGION 1..585: note = hemagglutinin__InfluenzaB__AGX18754

SEQ ID NO: 27255 - protein, 585 aa, synthetic construct; identical to SEQ ID NO: 26514
  REGION 1..585: note = hemagglutinin__InfluenzaB__AGX18765

SEQ ID NO: 27256 - protein, 585 aa, synthetic construct; identical to SEQ ID NO: 26565
  REGION 1..585: note = hemagglutinin__InfluenzaB__AGX18776

SEQ ID NO: 27257 - protein, 585 aa, synthetic construct; identical to SEQ ID NO: 26514
  REGION 1..585: note = hemagglutinin__InfluenzaB__AGX18787

SEQ ID NO: 27258 - protein, 585 aa, synthetic construct; identical to SEQ ID NO: 26514
  REGION 1..585: note = hemagglutinin__InfluenzaB__AGX18798

SEQ ID NO: 27259 - protein, 585 aa, synthetic construct
  REGION 1..585: note = hemagglutinin__InfluenzaB__AGX18809
MKAIIVLLMVVTSNADRICTGITSSNSPHVVKTATQGEVNVTGVIPLTTTPTKSHFANLKGTETRGKLCPKCLNCTDLDVALGRPKCTGNIPSARVSILHEVRPVTSGCFPIMHDRTKIRQLPNLLRGYEHIRLSTHNVINAENAPGGPYKIGTSGSCPNVTNGNGFFATMAWAVPKNDNNKTATNSLTIEVPYICTEGEDQITVWGFHSDSETQMAKLYGDSKPQKFTSSANGVTTHYVSQIGGFPNQTEDGGLPQSGRIVVDYMMQKSGKTGTITYQRGILLPQKVWCASGRSKVIKGSLPLIGEADCLHEKYGGLNKSKPYYTGEHAKAIGNCPIWVKTPLKLANGTKYRPPAKLLKERGFFGAIAGFLEGGWEGMIAGWHGYTSHGAHGVAVAADLKSTQEAINKITKNLNSLSELEVKNLQRLSGAMDELHNEILELDEKVDDLRADTISSQIELAVLLSNEGIINSEDEHLLALERKLKKMLGPSAVEIGNGCFETKHKCNQTCLDRIAAGTFDAGEFSLPTFDSLNITAASLNDDGLDNHTILLYYSTAASSLAVTLMIAIFVVYMVSRDNVSCSICL

SEQ ID NO: 27260 - protein, 585 aa, synthetic construct; identical to SEQ ID NO: 27177
  REGION 1..585: note = hemagglutinin__InfluenzaB__AGX18820

SEQ ID NO: 27261 - protein, 585 aa, synthetic construct; identical to SEQ ID NO: 26514
  REGION 1..585: note = hemagglutinin__InfluenzaB__AGX18831

SEQ ID NO: 27262 - protein, 585 aa, synthetic construct; identical to SEQ ID NO: 26514
  REGION 1..585: note = hemagglutinin__InfluenzaB__AGX18842

SEQ ID NO: 27263 - protein, 585 aa, synthetic construct; identical to SEQ ID NO: 26582
  REGION 1..585: note = hemagglutinin__InfluenzaB__AGX18853

SEQ ID NO: 27264 - protein, 585 aa, synthetic construct
  REGION 1..585: note = hemagglutinin__InfluenzaB__AGX18864
MKAIIVLLMVVTSNADRICTGITSSNSPHVVKTATQGEVNVTGVIPLTTTPTKSYFANLKGTETRGKLCPKCLNCTDLDVALGRPKCTGNIPSARVSILHEVRPVTSGCFPIMHDRTKIRQLPNLLRGYEHIRLSNHNVINAENAPGGPYKIGTSGSCPNVTNGNGFFATMAWAVPKNDNNKTATNSLTIEVPYICTEGEDQITVWGFHSDNEAQMAKLYGDSKPQKFTSSANGVTTHYVSQIGGFPNQTEDGGLPQSGRIVVDYMVQKSGKTGTITYQRGILLPQKVWCASGRSKVIKGSLPLIGEADCLHEKYGGLNKSKPYYTGEHAKAIGNCPIWVKTPLKLANGTKYRPPAKLLKERGFFGAIAGFLEGGWEGMIAGWHGYTSHGAHGVAVAADLKSTQEAINKITKNLNSLSELEVKNLQRLSGAMDELHNEILELDEKVDDLRADTISSQIELAVLLSNEGIINSEDEHLLALERKLKKMLGPSAVEIGNGCFETKHKCNQTCLDRIAAGTFDAGEFSLPTFDSLNITAASLNDDGLDNHTILLYYSTAASSLAVTLMIAIFVVYMVSRDNVSCSICL

SEQ ID NO: 27265 - protein, 585 aa, synthetic construct
  REGION 1..585: note = hemagglutinin__InfluenzaB__AGX18875
MKAIIVLLMVVTSNADRICTGITSSNSPHVVKTATQGEVNVTGVIPLTTTPTKSHFANLKGTETRGKLCPKCLNCTDLDVALGRPKCTGNIPSARVSILHEVRPVTSGCFPIMHDRTKIRQLPNLLRGYEHIRLSTHNVINAENAPGGPYKIGTSGSCPNVTNRNGFFATMAWAVPKNDNNKTATNSLTIEVPYICTEGEDQITVWGFHSDNEIQMAKLYGDSKPQKFTSSANGVTTHYVSQIGGFPNQTEDGGLPQSGRIVVDYMVQKSGKTGTITYQRGILLPQKVWCASGRSKVIKGSLPLIGEADCLHEKYGGLNKSKPYYTGEHAKAIGNCPIWVKTPLKLANGTKYRPPAKLLKERGFFGAIAGFLEGGWEGMIAGWHGYTSHGAHGVAVAADLKSTQEAINKITKNLNSLSELEVKNLQRLSGAIDELHNEILELDEKVDDLRADTISSQIELAVLLSNEGIINSEDEHLLALERKLKKMLGPSAVEIGNGCFETKHKCNQTCLDRIAAGTFDAGEFSLPTFDSLNITAASLNDDGLDNHTILLYYSTAASSLAVTLMIAIFVVYMVSRDNVSCSICL

SEQ ID NO: 27266 - protein, 585 aa, synthetic construct
  REGION 1..585: note = hemagglutinin__InfluenzaB__AGX18886
MKAIIVLLMVVTSNADRICTGITSSNSPHVVKTATQGEVNVTGVIPLTTTPTKSHFANLKGTETRGKLCPKCLNCTDLDVALGRPKCTGNIPSARVSILHEVRPVTSGCFPIMHDRTKIRQLPNLLRGYEHIRLSTHNVINAENAPGGPYKIGTSGSCPNVTNGNGFFATMAWAVPKNDNNKTATNSLTIEVPYICTEGEDQITVWGFHSDNEIQMAKLYGDSKPQKFTSSANGVTTHYVSQIGGFPNQTEDGGLPQSGRIVVDYMVQKSGKTGTITYQRGILLPQKVWCASGRSKVIKGSLPLIGEADCLHEKYGGLNKSKPYYTGEHAKAIGNCPIWVKTPLKLANGTKYRPPAKLLKERGFFGAIAGFLEGGWEGMIAGWHGYTSHGAHGVAVAADLKSTQEAINKITKNLNSLSELEVKNLQRLSGAMDELHNEILELDEKVDDLRADTISSQIELAVLLSNEGIINSEDEHLLALERKLKKMLGPSAVEIGNGCFETKHKCNQTCLDRIAAGTFDAGEFSLPTFDSLNITAASLNDNGLDNHTILLYYSTAASSLAVTLIIAIFVVYMVSRDNVSCSICL

SEQ ID NO: 27267 - protein, 585 aa, synthetic construct; identical to SEQ ID NO: 26987
  REGION 1..585: note = hemagglutinin__InfluenzaB__AGX18897

SEQ ID NO: 27268 - protein, 585 aa, synthetic construct; identical to SEQ ID NO: 26514
  REGION 1..585: note = hemagglutinin__InfluenzaB__AGX18908

SEQ ID NO: 27269 - protein, 585 aa, synthetic construct; identical to SEQ ID NO: 26514
  REGION 1..585: note = hemagglutinin__InfluenzaB__AGX18919

SEQ ID NO: 27270 - protein, 585 aa, synthetic construct
  REGION 1..585: note = hemagglutinin__InfluenzaB__AGX18930
MKAIIVLLMVVTSNADRICTGITSSNSPHVVKTATQGEVNVTGVIPLTTTPTKSHFANLKGTETRGKLCPKCLNCTDLDVALGRPKCTGNIPSARVSILHEVRPVTSGCFPIMHDRTKIRQLPNLLRGYEHIRLSTHNVINAENAPGGPYKIGTSGSCPNVTNGNGFFATMAWAVPKNDNNKTATNSLTIEVPYICTEGEDQITVWGFHSDNETQMAKLYGDSKPQKFTSSANGVTTHYVSQIGGFPNQTEDGGLPQSGRIVVDYMVQKSGKTGTITYQRGILLPQKVWCASGRSKVIKGSLPLIGEADCLHEKYGGLNKSKPYYTGEHAKAIGNCPIWVKTPLKLANGTKYRPPAKLLKERGFFGAIAGFLEGGWEGMIAGWHGYTSHGAHGVAVAADLKSTQEAINKITKNLNSLSELEVKNLQRLSGAMDELHNEILELDEKVDDLRADTISSQIELAVLLSNEGIINSEDEHLLALERKLKKMLGPSAVEIGNGCFETKHKCNQTCIDRIAAGTFDAGEFSLPTFDSLNITAASLNDDGLDNHTILLYYSTAASSLAVTLMIAIFVVYMVSRDNVSCSICL

SEQ ID NO: 27271 - protein, 585 aa, synthetic construct; identical to SEQ ID NO: 26514
  REGION 1..585: note = hemagglutinin__InfluenzaB__AGX18941

SEQ ID NO: 27272 - protein, 585 aa, synthetic construct; identical to SEQ ID NO: 26514
  REGION 1..585: note = hemagglutinin__InfluenzaB__AGX18952

SEQ ID NO: 27273 - protein, 585 aa, synthetic construct; identical to SEQ ID NO: 26514
  REGION 1..585: note = hemagglutinin__InfluenzaB__AGX18963

SEQ ID NO: 27274 - protein, 585 aa, synthetic construct
  REGION 1..585: note = hemagglutinin__InfluenzaB__AGX18974
MKAIIVLLMVVTSNADRICTGITSSNSPHVVKTATQGEVNVTGVIPLTTTPTKSHFANLKGTETRGKLCPKCLNCTDLDVALGRPKCTGNIPSARVSILHEVRPVTSGCFPIMHDRTKIRQLPNLLRGYEHIRLSTHNVINAENAPGGPYKIGTSGSCPNVTNGNGFFATMAWAVPKNDNNKTATNSLTIEVPYICTEGEDQITVWGFHSDNETQMAKLYGDSKPQKFTSSANGVTTHYVSQIGGFPNQTEDGGLPQSGRIVVDYMVQKSGKTGTITYQRGILLPQKVWCASGRSKVIKGSLPLIGEADCLHEKYGGLNKSKPYYTGEHAKAIGNCPIWVKTPLKLANGTKYRPPAKLLKERGFFGAIAGFLEGGWEGMIAGWHGYTSHGAHGVAVAADLKSTQEAINKITKNLNSLSELEVKNLQRLSGAMDELHNEILELDEKVDDLRADTISSQIELAVLLSNEGIINSEDEHLLALEKKLKKMLGPSAVEIGNGCFETKHKCNQTCLDRIAAGTFDAGEFSLPTFDSLNITAASLNDDGLDNHTILLYYSTAASSLAVTLMIAIFVVYMVSRDNVSCSICL

SEQ ID NO: 27275 - protein, 585 aa, synthetic construct; identical to SEQ ID NO: 26514
  REGION 1..585: note = hemagglutinin__InfluenzaB__AGX18985

SEQ ID NO: 27276 - protein, 585 aa, synthetic construct
  REGION 1..585: note = hemagglutinin__InfluenzaB__AGX18996
MKAIIVLLMVVTSNADRICTGITSSNSPHVVKTATQGEVNVTGVIPLTTTPTKSHFANLKGTETRGKLCPKCLNCTDLDVALGRPKCTGNTPSARVSILHEVRPVTSGCFPIMHDRTKIRQLPNLLRGYEHIRLSTHNVINAENAPGGPYKIGTSGSCPNVTNGNGFFATMAWAVPKNDNNKTATNSLTIEVPYICTEGEDQITVWGFHSDNGTQMAKLYGDSKPQKFTSSANGVTTHYVSQIGGFPNQTEDGGLPQSGRIVVDYMVQKSGKTGTITYQRGILLPQKVWCASGRSKVIKGSLPLIGEADCLHEKYGGLNKSKPYYTGEHAKAIGNCPIWVKTPLKLANGTKYRPPAKLLKERGFFGAIAGFLEGGWEGMIAGWHGYTSHGAHGVAVAADLKSTQEAINKITKNLNSLSELEVKNLQRLSGAMDELHNEILELDEKVDDLRADTISSQIELAVLLSNEGIINSEDEHLLALERKLKKMLGPSAVEIGNGCFETKHKCNQTCLDRIAAGTFDAGEFSLPTFDSLNITAASLNDDGLDNHTILLYYSTAASSLAVTLMIAIFVVYMVSRDNVSCSICL

SEQ ID NO: 27277 - protein, 585 aa, synthetic construct; identical to SEQ ID NO: 26514
  REGION 1..585: note = hemagglutinin__InfluenzaB__AGX19007

SEQ ID NO: 27278 - protein, 585 aa, synthetic construct
  REGION 1..585: note = hemagglutinin__InfluenzaB__AGX19018
MKAIIVLLMVVTSNADRICTGITSSNSPHVVKTATQGEVNVTGVIPLTTTPTKSHFANLKGTETRGKLCPKCLNCTDLDVALGRPKCTGNIPSARVSILHEVRPVTSGCFPIMHDRTKIRQLPNFLRGYEHIRLSTHNVINAENAPGGPYKIGTSGSCPNVTNGNGFFATMAWAVPKNDNNKTATNSLTIEVPYICTEGEDQITVWGFHSDSETQMAKLYGDSKPQKFTSSANGVTTHYVSQIGGFPNQTEDGGLPQSGRIVVDYMVQKSGKTGTITYQRGILLPQKVWCASGRSKVIKGSLPLIGEADCLHEKYGGLNKSKPYYTGEHAKAIGNCPIWVKTPLKLANGTKYRPPAKLLKERGFFGAIAGFLEGGWEGMIAGWHGYTSHGAHGVAVAADLKSTQEAINKITKNLNSLSELEVKNLQRLSGAMDELHNEILELDEKVDDLRADTISSQIELAVLLSNEGIINSEDEHLLALERKLKKMLGPSAVEIGNGCFETKHKCNQTCLDRIAAGTFDAGEFSLPTFDSLNITAASLNDDGLDNHTILLYYSTAASSLAVTLMIAIFVVYMVSRDNVSCSICL

SEQ ID NO: 27279 - protein, 585 aa, synthetic construct; identical to SEQ ID NO: 27177
  REGION 1..585: note = hemagglutinin__InfluenzaB__AGX19029

SEQ ID NO: 27280 - protein, 585 aa, synthetic construct; identical to SEQ ID NO: 26514
  REGION 1..585: note = hemagglutinin__InfluenzaB__AGX19040

SEQ ID NO: 27281 - protein, 585 aa, synthetic construct
  REGION 1..585: note = hemagglutinin__InfluenzaB__AGX19051
MKAIIVLLMVVTSNADRICTGITSSNSPHVVKTATQGEVNVTGVIPLTTTPTKSHFANLKGTETRGKLCPKCLNCTDLDVALGRPKCTGNIPSARVSILHEVRPVTSGCFPIMHDRTKIRQLPNLLRGYEHIRLSTHNVINTENAPGGPYKIGTSGSCPNVTNGNGFFATMAWAVPKNDNNKTATNSLTIEVPYICTEGEDQITVWGFHSDSETQMAKLYGDSKPQKFTSSANGVTTHYVSQIGGFPNQTEDGGLPQSGRIVVDYMVQKSGKTGTITYQRGILLPQKVWCASGRSKVIKGSLPLIGEADCLHEKYGGLNKSKPYYTGEHAKAIGNCPIWVKTPLKLANGTKYRPPAKLLKERGFFGAIAGFLEGGWEGMIAGWHGYTSHGAHGVAVAADLKSTQEAINKITKNLNSLSELEVKNLQRLSGAMDELHNEILELDEKVDDLRADTISSQIELAVLLSNEGIINSEDEHLLALERKLKKMLGPSAVEIGNGCFETKHKCNQTCLDRIAAGTFDAGEFSLPTFDSLNITAASLNDDGLDNHTILLYYSTAASSLAVTLMIAIFVVYMVSRDNVSCSICL

SEQ ID NO: 27282 - protein, 585 aa, synthetic construct
  REGION 1..585: note = hemagglutinin__InfluenzaB__AGX19062
MKAIIVLLMVVTSNADRICTGITSSNSPHVVKTATQGEVNVTGVIPLTTTPTKSHFANLKGTETRGKLCPKCLNCTDLDVALGRPKCTGNIPSARVSILHEVRPVTSGCFPIMHDRTKIRQLPNLLRGYEHIRLSTHNVINAENAPGGPYKIGTSGSCPNVTNGNGFFATMAWAVPKNDNNKTATNSLTIEVPYICTEGEDQITVWGFHSDNETQMAKLYGDSKPQKFTSSANGVTTHYVSQIGGFPNQTEDGGLPQSGRIVVDYMVQKSGKTGTITYQRGILLPQKVWCASGRSKVIKGSLPLIGEADCLHEKYGGLNKSKPYYTGEHAKAIGNCPIWVKTPLKLANGTKYRPPAKLLKERGFFGAIAGFLEGGWEGMIAGWHGYTSHGAHGVAVAADLKSTQEAINKITKNFNSLSELEVKNLQRLSGAMDELHNEILELDEKVDDLRADTISSQIELAVLLSNEGIINSEDEHLLALERKLKKMLGPSAVEIGNGCFETKHKCNQTCLDRIAAGTFDAGEFSLPTFDSLNITAASLNDDGLDNHTILLYYSTAASSLAVTLMIAIFVVYMVSRDNVSCSICL

SEQ ID NO: 27283 - protein, 585 aa, synthetic construct; identical to SEQ ID NO: 26514
  REGION 1..585: note = hemagglutinin__InfluenzaB__AGX19073

SEQ ID NO: 27284 - protein, 585 aa, synthetic construct
  REGION 1..585: note = hemagglutinin__InfluenzaB__AGX19084
MKAIIVLLMVVTSNADRICTGITSSNSPHVVKTATQGEVNVTGVIPLTTTPTKSHFANLKGTETRGKLCPKCLNCTDLDVALGRPKCTGNIPSARVSILHEVRPVTSGCFPIMHDRTKIRQLPNLLRGYEHIKLSTHNVINAENAPGGPYKIGTSGSCPNVTNGNGFFATMAWAVPKNDNNKTATNSLTIEVPYICTEGEDQITVWGFHSDNENQMAKLYGDSKPQKFTSSANGVTTHYVSQIGGFPNQTEDGGLPQSGRIVVDYMVQKSGKTGTITYQRGILLPQKVWCASGRSKVIKGSLPLIGEADCLHEKYGGLNKSKPYYTGEHAKAIGNCPIWVKTPLKLANGTKYRPPAKLLKERGFFGAIAGFLEGGWEGMIAGWHGYTSHGAHGVAVAADLKSTQEAINKITKNLNSLSELEVKNLQRLSGAMDELHNEILELDEKVDDLRADTISSQIELAVLLSNEGIINSEDEHLLALERKLKKMLGPSAVEIGNGCFETKHKCNQTCLDRIAAGTFDAGEFSLPTFDSLNITAASLNDDGLDNHTILLYYSTAASSLAVTLMIAIFVVYMVSRDNVSCSICL

SEQ ID NO: 27285 - protein, 585 aa, synthetic construct; identical to SEQ ID NO: 26514
  REGION 1..585: note = hemagglutinin__InfluenzaB__AGX19095

SEQ ID NO: 27286 - protein, 585 aa, synthetic construct; identical to SEQ ID NO: 27177
  REGION 1..585: note = hemagglutinin__InfluenzaB__AGX19106

SEQ ID NO: 27287 - protein, 585 aa, synthetic construct; identical to SEQ ID NO: 26514
  REGION 1..585: note = hemagglutinin__InfluenzaB__AGX19117

SEQ ID NO: 27288 - protein, 585 aa, synthetic construct
  REGION 1..585: note = hemagglutinin__InfluenzaB__AGX19128
MKAIIVLLMVVTSNADRICTGITSSNSPHVVKTATQGEVNVTGVIPLTTTPTKSHFANLKGTETRGKLCPKCLNCTDLDVALGRPKCTGNTPSARVSILHEVRPVTSGCFPIMHDRTKIRQLPNLLRGYEHIRLSTHNVINAENAPGGPYKIGTSGSCPNVTNGNGFFATMAWAVPKNDNNKTATNSLTIEVPYICTEGEDQITVWGFHSDSETQMAKLYGDSKPQKFTSSANGVTTHYVSQIGGFPNQTEDGGLPQSGRIVVDYMVQKSGKTGTITYQRGILLPQKVWCASGRSKVIKGSLPLIGEADCLHEKYGGLNKSKPYYTGEHAKAIGNCPIWVKTPLKLANGTKYRPPAKLLKERGFFGAIAGFLEGGWEGMIAGWHGYTSHGAHGVAVAADLKSTQEAINKITKNLNSLSELEVKNLQRLSGAMDELHNEILELDEKVDDLRADTISSQIELAVLLSNEGIINSEDEHLLALERKLKKMLGPSAVEIGNGCFETKHKCNQTCLDRIAAGTFDAGEFSLPTFDSLNITAASLNDDGLDNHTILLYYSTAASSLAVTLMIAIFVVYMVSRDNVSCSICL

SEQ ID NO: 27289 - protein, 585 aa, synthetic construct; identical to SEQ ID NO: 26514
  REGION 1..585: note = hemagglutinin__InfluenzaB__AGX19139

SEQ ID NO: 27290 - protein, 585 aa, synthetic construct; identical to SEQ ID NO: 26987
  REGION 1..585: note = hemagglutinin__InfluenzaB__AGX19150

SEQ ID NO: 27291 - protein, 585 aa, synthetic construct; identical to SEQ ID NO: 26514
  REGION 1..585: note = hemagglutinin__InfluenzaB__AGX19161

SEQ ID NO: 27292 - protein, 585 aa, synthetic construct; identical to SEQ ID NO: 26987
  REGION 1..585: note = hemagglutinin__InfluenzaB__AGX19172

SEQ ID NO: 27293 - protein, 585 aa, synthetic construct
  REGION 1..585: note = hemagglutinin__InfluenzaB__AGX19183
MKAIIVLLMVVTSNADRICTGITSSNSPHVVKTATQGEVNVTGVIPLTTTPTKSHFANLKGTETRGKLCPKCLNCTDLDVALGRPKCTGNIPSARVSILHEVRPVTSGCFPIMHDRTKIRQLPNLLRGYEHIRLSTHNVINAENAPGGPYKIGTSGSCPNVTNGNGFFATMAWAVPKNDNNKTATNSLTIEVPYICTEGEDQITVWGFHSDTETQMAKLYGDSKPQKFTSSANGVTTHYVSQIGGFPNQTEDGGLPQSGRIVVDYMVQKSGKTGTITYQRGILLPQKVWCASGRSKVIKGSLPLIGEADCLHEKYGGLNKSKPYYTGEHAKAIGNCPIWVKTPLKLANGTKYRPPAKLLKERGFFGAIAGFLEGGWEGMIAGWHGYTSHGAHGVAVAADLKSTQEAINKITKNLNSLSELEVKNLQRLSGAMDELHNEILELDEKVDDLRADTISSQIELAVLLSNEGIINSEDEHLLALERKLKKMLGPSAVEIGNGCFETKHKCNQTCLDRIAAGTFDAGEFSLPTFDSLNITAASLNDDGLDNHTILLYYSTAASSLAVTLMIAIFVVYMVSRDNVSCSICL

SEQ ID NO: 27294 - protein, 585 aa, synthetic construct; identical to SEQ ID NO: 26514
  REGION 1..585: note = hemagglutinin__InfluenzaB__AGX19194

SEQ ID NO: 27295 - protein, 585 aa, synthetic construct
  REGION 1..585: note = hemagglutinin__InfluenzaB__AGX19205
MKAIIVLLMVVTSNADRVCTGITSSNSPHVVKTATQGEVNVTGVIPLTTTPTKSHFANLKGTETRGKLCPKCLNCTDLDVALGRPKCTGNIPSARVSILHEVRPVTSGCFPIMHDRTKIRQLPNLLRGYEHIRLSTHNVINAENAPGGPYKIGTSGSCPNVTNGNGFFATMAWAVPKNDNNKTATNSLTIEVPYICTEGEDQITVWGFHSDNETQMAKLYGDSKPQKFTSSANGVTTHYVSQIGGFPNQTEDGGLPQSGRIVVDYMVQKSGKTGTITYQRGILLPQKVWCASGRSKVIKGSLPLIGEADCLHEKYGGLNKSKPYYTGEHAKAIGNCPIWVKTPLKLANGTKYRPPAKLLKERGFFGAIAGFLEGGWEGMIAGWHGYTSHGAHGVAVAADLKSTQEAINKITKNLNSLSELEVKNLQRLSGAMDELHNEILELDEKVDDLRADTISSQIELAVLLSNEGIINSEDEHLLALERKLKKMLGPSAVEIGNGCFETKHKCNQTCLDRIAAGTFDAGEFSLPTFDSLNITAASLNDDGLDNHTILLYYSTAASSLAVTLMIAIFVVYMVSRDNVSCSICL

SEQ ID NO: 27296 - protein, 585 aa, synthetic construct
  REGION 1..585: note = hemagglutinin__InfluenzaB__AGX19216
MKAIIVLLMVVTSNADRICTGITSSNSPHVVKTATQGEVNVTGVIPLTTTPTKSHFANLKGTETRGKLCPKCLNCTDLDVALGRPKCTGNIPSARVSILHEVRPVTSGCFPIMHDRTKIRQLPNLLRGYEHIRLSTHNVINAENAPGGPYKIGTSGSCPNVTNGNGFFATMAWAVPKNDNNKTATNSLTIEVPYICTEGEDQITVWGFHSDNETQMAKLYGDSKPQKFTSSANGVTTHYVSQIGGFPNQTEDGGLPQSGRIVVDYMVQKSGKPGTITYQRGILLPQKVWCASGRSKVIKGSLPLIGEADCLHEKYGGLNKSKPYYTGEHAKAIGNCPIWVKTPLKLANGTKYRPPAKLLKERGFFGAIAGFLEGGWEGMIAGWHGYTSHGAHGVAVAADLKSTQEAINKITKNLNSLSELEVKNLQRLSGAMDELHNEILELDEKVDDLRADTISSQIELAVLLSNEGIINSEDEHLLALERKLKKMLGPSAVEIGNGCFETKHKCNQTCLDRIAAGTFDAGEFSLPTFDSLNITAASLNDDGLDNHTILLYYSTAASSLAVTLMIAIFVVYMVSRDNVSCSICL

SEQ ID NO: 27297 - protein, 585 aa, synthetic construct
  REGION 1..585: note = hemagglutinin__InfluenzaB__AGX19227
MKAIIVLLMVVTSNADRICTGITSSNSPHVVKTATQGEVNVTGVIPLTTTPTKSHFANLKGTETRGKLCPQCLNCTDLDVALGRPKCTGNIPSARVSILHEVRPVTSGCFPIMHDRTKIRQLPNLLRGYEHIRLSTHNVINAENAPGGPYKIGTSGSCPNVTNGNGFFATMAWAVPKSDNNKTATNSLTIEVPYICTEGEDQITVWGFHSDNETQMAKLYGDSKPQKFTSSANGVTTHYVSQIGGFPNQTEDGGLPQSGRIVVDYMVQKSGKTGTITYQRGILLPQKVWCASGRSKVIKGSLPLIGEADCLHEKYGGLNKSKPYYTGEHAKAIGNCPIWVKTPLKLANGTKYRPPAKLLKERGFFGAIAGFLEGGWEGMIAGWHGYTSHGAHGVAVAADLKSTQEAINKITKNLNSLSELEVKNLQRLSGAMDELHNEILELDEKVDDLRADTISSQIELAVLLSNEGIINSEDEHLLALERKLKKMLGPSAVEIGNGCFETKHKCNQTCLDRIAAGTFDAGEFSLPTFDSLNITAASLNDDGLDNHTILLYYSTAASSLAVTLMIAIFVVYMVSRDNVSCSICL

SEQ ID NO: 27298 - protein, 585 aa, synthetic construct
  REGION 1..585: note = hemagglutinin__InfluenzaB__AGX19238
MKAIIVLLMVVTSNADRICTGITSSNSPHVVKTATQGEVNVTGVIPLTTTPTKSHFANLKGTETRGKLCPKCLNCTDLDVALGRPKCTGNIPSARVSILHEVRPVTSGCFPIMHDRTKIRQLPNLLRGYEHIRLSTHNVINAENAPGGPYKIGTSGSCPNVTNGNGFFATMAWAVPKNDKNKTATNSLTIEVPYICTEGEDQITVWGFHSDNETQMAKLYGDSKPQKFTSSANGVTTHYVSQIGGFPNQTEDGGLPQSGRIVVDYMVQKSGKTGTITYQRGILLPQKVWCASGRSKVIKGSLPLIGEADCLHEKYGGLNKSKPYYTGEHAKAIGNCPIWVKTPLKLANGTKYRPPAKLLKERGFFGAIAGFLEGGWEGMIAGWHGYTSHGAHGVAVAADLKSTQEAINKITKNLNSLSELEVKNLQRLSGAMDELHNEILELDEKVDDLRADTISSQIELAVLLSNEGIINSEDEHLLALERKLKKMLGPSAVEIGNGCFETKHKCNQTCLDRIAAGTFDAGEFSLPTFDSLNITAASLNDDGLDNHTILLYYSTAASSLAVTLMIAIFVVYMVSRDNVSCSICL

SEQ ID NO: 27299 - protein, 585 aa, synthetic construct; identical to SEQ ID NO: 27298
  REGION 1..585: note = hemagglutinin__InfluenzaB__AGX19249

SEQ ID NO: 27300 - protein, 585 aa, synthetic construct; identical to SEQ ID NO: 26514
  REGION 1..585: note = hemagglutinin__InfluenzaB__AGX19260

SEQ ID NO: 27301 - protein, 585 aa, synthetic construct; identical to SEQ ID NO: 26514
  REGION 1..585: note = hemagglutinin__InfluenzaB__AGX19271

SEQ ID NO: 27302 - protein, 585 aa, synthetic construct
  REGION 1..585: note = hemagglutinin__InfluenzaB__AGX19282
MKAIIVLLMVVTSNADRICTGITSSNSPHVVKTATQGEVNVTGVIPLTTTPTKSHFANLKGTETRGKLCPKCLNCTDLDVALGRPKCTGNIPSARVSILHEVRPVTSGCFPIMHDRTKIRQLPNLLRGYEHIRLSTHNVINAENAPGGPYKIGTSGSCPNVTNGNGFFATMAWAVPKNDNNKTATNSLTIEVPYICTEGEDQITVWGFHSDNETQMAKLYGDSKPQKFTSSANGVTTHYVSQIGGFPNQTEDGGLPQSGRIVVDYMVQKSGKTGTITYQRGILLPQKVWCTSGRSKVIKGSLPLIGEADCLHEKYGGLNKSKPYYTGEHAKAIGNCPIWVKTPLKLANGTKYRPPAKLLKERGFFGAIAGFLEGGWEGMIAGWHGYTSHGAHGVAVAADLKSTQEAINKITKNLNSLSELEVKNLQRLSGAMDELHNEILELDEKVDDLRADTISSQIELAVLLSNEGIINSEDEHLLALERKLKKMLGPSAVEIGNGCFETKHKCNQTCLDRIAAGTFDAGEFSLPTFDSLNITAASLNDDGLDNHTILLYYSTAASSLAVTLMIAIFVVYMVSRDNVSCSICL

SEQ ID NO: 27303 - protein, 585 aa, synthetic construct
  REGION 1..585: note = hemagglutinin__InfluenzaB__AGX19304
MKAIIVLLMVVTSNADRICTGITSSNSPHVVKTATQGEVNVTGVIPLTTTPTKSHFANLKGTETRGKLCPKCLNCTDLDVALGRPKCTGNIPSARVSILHEVRPVTSGCFPIMHDRTKIRQLPNLLRGYEHIRLSTHNVINAENAPGGPYKIGTSGSCPNVTNGNGFFATMAWAVPKNDNNKTAINSLTIEVPYICTEGEDQITVWGFHSDNETQMAKLYGDSKPQKFTSSANGVTTHYVSQIGGFPNQTEDGGLPQSGRIVVDYMVQKSGKTGTITYQRGILLPQKVWCASGRSKVIKGSLPLIGEADCLHEKYGGLNKSKPYYTGEHAKAIGNCPIWVKTPLKLANGTKYRPPAKLLKERGFFGAIAGFLEGGWEGMIAGWHGYTSHGAHGVAVAADLKSTQEAINKITKNLNSLSELEVKNLQRLSGAMDELHNEILELDEKVDDLRADTISSQIELAVLLSNEGIINSEDEHLLALERKLKKMLGPSAVEIGNGCFETKHKCNQTCLDRIAAGTFDAGEFSLPTFDSLNITAASLNDDGLDNHTILLYYSTAASSLAVTLMIAIFVVYMVSRDNVSCSICL

SEQ ID NO: 27304 - protein, 585 aa, synthetic construct; identical to SEQ ID NO: 27303
  REGION 1..585: note = hemagglutinin__InfluenzaB__AGX19315

SEQ ID NO: 27305 - protein, 585 aa, synthetic construct; identical to SEQ ID NO: 27302
  REGION 1..585: note = hemagglutinin__InfluenzaB__AGX19326

SEQ ID NO: 27306 - protein, 585 aa, synthetic construct; identical to SEQ ID NO: 27302
  REGION 1..585: note = hemagglutinin__InfluenzaB__AGX19337

SEQ ID NO: 27307 - protein, 585 aa, synthetic construct
  REGION 1..585: note = hemagglutinin__InfluenzaB__AGX19348
MKAIIVLLMVVTSNADRICTGITSSNSPHVVKTATQGEVNVTGVIPLTTTPTKSHFANLKGTETRGKLCPKCLNCTDLDVALGRPKCTGNIPSARVSILHEVRPVTSGCFPIMHDRTKIRQLPNLLRGYEHIRLSTHNVINAENAPGGPYKIGTSGSCPNVTNGNGFFATMAWAVPKNDNNKTATNSLTIEVPYICTEGEDQITVWGFHSDNEAQMAKLYGDSKPQKFTSSANGVTTHYVSQIGGFPNQTEDGGLPQSGRIVVDYMVQKSGKTGTITYQRGILLPQKVWCTSGRSKVIKGSLPLIGEADCLHEKYGGLNKSKPYYTGEHAKAIGNCPIWVKTPLKLANGTKYRPPAKLLKERGFFGAIAGFLEGGWEGMIAGWHGYTSHGAHGVAVAADLKSTQEAINKITKNLNSLSELEVKNLQRLSGAMDELHNEILELDEKVDDLRADTISSQIELAVLLSNEGIINSEDEHLLALERKLKKMLGPSAVEIGNGCFETKHKCNQTCLDRIAAGTFDAGEFSLPTFDSLNITAASLNDDGLDNHTILLYYSTAASSLAVTLMIAIFVVYMVSRDNVSCSICL

SEQ ID NO: 27308 - protein, 585 aa, synthetic construct; identical to SEQ ID NO: 27302
  REGION 1..585: note = hemagglutinin__InfluenzaB__AGX19359

SEQ ID NO: 27309 - protein, 584 aa, synthetic construct; identical to SEQ ID NO: 26731
  REGION 1..584: note = hemagglutinin__InfluenzaB__AGX19370

SEQ ID NO: 27310 - protein, 585 aa, synthetic construct; identical to SEQ ID NO: 26565
  REGION 1..585: note = hemagglutinin__InfluenzaB__AGX19381

SEQ ID NO: 27311 - protein, 585 aa, synthetic construct; identical to SEQ ID NO: 27302
  REGION 1..585: note = hemagglutinin__InfluenzaB__AGX19392

SEQ ID NO: 27312 - protein, 585 aa, synthetic construct; identical to SEQ ID NO: 27302
  REGION 1..585: note = hemagglutinin__InfluenzaB__AGX19403

SEQ ID NO: 27313 - protein, 585 aa, synthetic construct; identical to SEQ ID NO: 26989
  REGION 1..585: note = hemagglutinin__InfluenzaB__AGX19414

SEQ ID NO: 27314 - protein, 584 aa, synthetic construct
  REGION 1..584: note = hemagglutinin__InfluenzaB__AGX19425
MKTIIVLLMVVTSNADRICTGITSSNSPHVVKTATQGEVNVTGVIPLTTTPTKSYFANLKGTRTRGKLCPDCLNCTDLDVALGRPMCVGTTPSAKASILHEVRPVTSGCFPIMHDRTKIRQLPNLLRGYENIRLSTQNVIDAEKAPGGPYRLGTSGSCPNATSKSGFFATMAWAVPKDNNKNATNPLTVEVPYICTEGEDQITVWGFHSDNKTQMRNLYGDSNPQKFTSSANGVTTHYVSQIGSFPDQTEDGGLPQSGRIVVDYMMQKPGKTGTIVYQRGVLLPQRVWCASGRSKVIKGALPLIGEADCLHEKYGGLNKSKPYYTGEHAKAIGNCPIWVKTPLKLANGTKYRPPAKLLKERGFFGAIAGFLEGGWEGMIAGWHGYTSHGAHGVAVAADLKSTQEAINKITKNLNSLSELEVKNLQRLSGAMDELHNEILELDEKVDDLRADTISSQIELAVLLSNEGIINSEDEHLLALERKLKKMLGPSAVEIGNGCFETKHKCNQTCLDRIAAGTFNAGEFSLPTFDSLNITAASLNDDGLDNHTILLYYSTAASSLAVTLMLAIFIVYMVSRDNVSCSICL

SEQ ID NO: 27315 - protein, 585 aa, synthetic construct; identical to SEQ ID NO: 26514
  REGION 1..585: note = hemagglutinin__InfluenzaB__AGX19436

SEQ ID NO: 27316 - protein, 585 aa, synthetic construct; identical to SEQ ID NO: 27177
  REGION 1..585: note = hemagglutinin__InfluenzaB__AGX19447

SEQ ID NO: 27317 - protein, 584 aa, synthetic construct; identical to SEQ ID NO: 27056
  REGION 1..584: note = hemagglutinin__InfluenzaB__AGX19458

SEQ ID NO: 27318 - protein, 584 aa, synthetic construct; identical to SEQ ID NO: 27056
  REGION 1..584: note = hemagglutinin__InfluenzaB__AGX19469

SEQ ID NO: 27319 - protein, 585 aa, synthetic construct; identical to SEQ ID NO: 26989
  REGION 1..585: note = hemagglutinin__InfluenzaB__AGX19480

SEQ ID NO: 27320 - protein, 585 aa, synthetic construct; identical to SEQ ID NO: 26582
  REGION 1..585: note = hemagglutinin__InfluenzaB__AGX19491

SEQ ID NO: 27321 - protein, 585 aa, synthetic construct
  REGION 1..585: note = hemagglutinin__InfluenzaB__AGX19502
MKAIIVLLMVVTSNADRICTGITSSNSPHVVKTATQGEVNVTGVIPLTTTPTKSHFANLKGTETRGKLCPKCLNCTDLDVALGRPKCTGKIPSARVSILHEVRPVTSGCFPIMHDRTKIRQLPNLLRGYEHIRLSTHNVINAENAPGGPYKIGTSGSCPNITNGNGFFATMAWAVPKNDKNKTATNPLTIEVPYICTEGEDQITVWGFHSDSETQMAKLYGDSKPQKFTSSANGVTTHYVSQIGGFPNQTEDGGLPQSGRIVVDYMVQKSGKTGTITYQRGILLPQKVWCASGRSKVIKGSLPLIGEADCLHEKYGGLNKSKPYYTGEHAKAIGNCPIWVKTPLKLANGTKYRPPAKLLKERGFFGAIAGFLEGGWEGMIAGWHGYTSHGAHGVAVAADLKSTQEAINKITKNLNSLSELEVKNLQRLSGAMDELHNEILELDEKVDDLRADTISSQIELAVLLSNEGIINSEDEHLLALERKLKKMLGPSAVEIGNGCFETKHKCNQTCLDRIAAGTFDAGEFSLPTFDSLNITAASLNDDGLDNHTILLYYSTAASSLAVTLMIAIFVVYMVSRDNVSCSICL

SEQ ID NO: 27322 - protein, 585 aa, synthetic construct
  REGION 1..585: note = hemagglutinin__InfluenzaB__AGX19513
MKAIIVLLMVVTSNADRICTGITSSNSPHVVKTATQGEVNVTGVIPLTTTPTKSHFANLKGTETRGKLCPKCLNCTDLDVALGRPKCTGKIPSARVSILHEVRPVTSGCFPIMHDRTKIRQLPNLLRGYEHIRLSTHNVINAENAPGGPYKIGTSGSCPNITNGNGFFATMAWAVPKNDKNKTATNPLTIEVPYICTEGEDQITVWGFHSDNETQMAKLYGDSKPQKFTSSANGVTTHYISQIGGFPNQTEDGGLPQSGRIVVDYMVQKSGKTGTITYQRGILLPQKVWCASGRSKVIKGSLPLIGEADCLHEKYGGLNKSKPYYTGEHAKAIGNCPIWVKTPLKLANGTKYRPPAKLLKERGFFGAIAGFLEGGWEGMIAGWHGYTSHGAHGVAVAADLKSTQEAINKITKNLNSLSELEVKNLQRLSGAMDELHNEILELDEKVDDLRADTISSQIELAVLLSNEGIINSEDEHLLALERKLKKMLGPSAVEIGNGCFETKHKCNQTCLDRIAAGTFDAGEFSLPTFDSLNITAASLNDDGLDNHTILLYYSTAASSLAVTLMIAIFVVYMVSRDNVSCSICL

SEQ ID NO: 27323 - protein, 585 aa, synthetic construct; identical to SEQ ID NO: 27322
  REGION 1..585: note = hemagglutinin__InfluenzaB__AGX19524

SEQ ID NO: 27324 - protein, 585 aa, synthetic construct
  REGION 1..585: note = hemagglutinin__InfluenzaB__AGX19535
MKAIIVLLMVVTSNADRICTGITSSNSPHVVKTATQGEVNVTGVIPLTTTPTKSHFANLKGTETRGKLCPKCLNCTDLDVALGRPKCTGNIPSARVSILHEVRPVTSGCFPIMHDRTKIRQLPNLLRGYEHIRLSTHNVINAENAPGGPYKIGTSGSCPNVTNGNGFFATMAWAVPKNDNNKTATNSLTIEVPYICTEGEDQITVWGFHSDDETQMAKLYGDSKPQKFTSSANGVTTHYVSQIGGFPNQTEDGGLPQSGRIVVDYMVQKSGKTGTITYQRGILLPQKVWCASGRSKVIKGSLPLIGEADCLHEKYGGLNKSKPYYTGEHAKAIGNCPIWVKTPLKLANGTKYRPPAKLLKERGFFGAIAGFLEGGWEGMIAGWHGYTSHGAHGVAVAADLKSTQEAINKITKNLNSLSELEVKNLQRLSGAMDELHNEILELDEKVDDLRADTISSQIELAVLLSNEGIINSEDEHLLALERKLKKMLGPSAVEIGNGCFETKHKCNQTCLDRIAAGTFDAGEFSLPTFDSLNITAASLNDDGLDNHTILLYYSTAASSLAVTLMIAIFVVYMVSRDNVSCSICL

SEQ ID NO: 27325 - protein, 585 aa, synthetic construct
  REGION 1..585: note = hemagglutinin__InfluenzaB__AGX19546
MKAIIVLLMVVTSNADRICTGITSSNSPHVVKTATQGEVNVTGVIPLTTTPTKSHFANLKGTETRGKLCPKCLNCTDLDVALGRPKCTGNIPSARVSILHEVRPVTSGCFPIMHDRTKIRQLPNLLRGYEHIRLSTHNVINAENAPGGPYKIGTSGSCPNVTNGNGFFATMAWAVPKNDNNKTATNSLTIEVPYICTEGEDQITVWGFHSDKETQMAKLYGDSKPQKFTSSANGVTTHYVSQIGGFPNQTEDGGLPQSGRIVVDYMVQKSGKTGTITYQRGILLPQKVWCASGRSKVIKGSLPLIGEADCLHEKYGGLNKSKPYYTGEHAKAIGNCPIWVKTPLKLANGTKYRPPAKLLKERGFFGAIAGFLEGGWEGMIAGWHGYTSHGAHGVAVAADLKSTQEAINKITKNLNSLSELEVKNLQRLSGAMDELHNEILELDEKVDDLRADTISSQIELAVLLSNEGIINSEDEHLLALERKLKKMLGPSAVEIGNGCFETKHKCNQTCLDRIAAGTFDAGEFSLPTFDSLNITAASLNDDGLDNHTILLYYSTAASSLAVTLMIAIFVVYMVSRDNVSCSICL

SEQ ID NO: 27326 - protein, 585 aa, synthetic construct
  REGION 1..585: note = hemagglutinin__InfluenzaB__AGX19557
MKAIIVLLMVVTSNADRICTGITSSNSPHVVKTATQGEVNVTGVIPLTTTPTKSHFANLKGTETRGKLCPKCLNCTDLDVALGRPKCTGNIPSARVSILHEVRPVTSGCFPIMHDRTKIRQLPNLLRGYEHIRLSTHNVINAENAPGGPYKIGTSGSCPNVTNGNGFFATMAWAVPKNDNNKTATNSLTIEVPYICTGGEDQITVWGFHSDNETQMAKLYGDSKPQKFTSSANGVTTHYVSQIGGFPNQTEDGGLPQSGRIVVDYMVQKSGKTGTITYQRGILLPQKVWCASGRSKVIKGSLPLIGEADCLHEKYGGLNKSKPYYTGEHAKAIGNCPIWVKTPLKLANGTKYRPPAKLLKERGFFGAIAGFLEGGWEGMIAGWHGYTSHGAHGVAVAADLKSTQEAINKITKNLNSLSELEVKNLQRLSGAMDELHNEILELDEKVDDLRADTISSQIELAVLLSNEGIINSEDEHLLALERKLKKMLGPSAVEIGNGCFETKHKCNQTCLDRIAAGTFDAGEFSLPTFDSLNITAASLNDDGLDNHTILLYYSTAASSLAVTLMIAIFVVYMVSRDNVSCSICL

SEQ ID NO: 27327 - protein, 585 aa, synthetic construct; identical to SEQ ID NO: 26989
  REGION 1..585: note = hemagglutinin__InfluenzaB__AGX19568

SEQ ID NO: 27328 - protein, 585 aa, synthetic construct; identical to SEQ ID NO: 27322
  REGION 1..585: note = hemagglutinin__InfluenzaB__AGX19579

SEQ ID NO: 27329 - protein, 585 aa, synthetic construct; identical to SEQ ID NO: 26989
  REGION 1..585: note = hemagglutinin__InfluenzaB__AGX19590

SEQ ID NO: 27330 - protein, 585 aa, synthetic construct; identical to SEQ ID NO: 26989
  REGION 1..585: note = hemagglutinin__InfluenzaB__AGX19601

SEQ ID NO: 27331 - protein, 585 aa, synthetic construct; identical to SEQ ID NO: 26989
  REGION 1..585: note = hemagglutinin__InfluenzaB__AGX19612

SEQ ID NO: 27332 - protein, 585 aa, synthetic construct
  REGION 1..585: note = hemagglutinin__InfluenzaB__AGX19623
MKAIIVLLMVVTSNADRICTGITSSNSPHVVKTATQGEVNVTGVIPLTTTPTKSHFANLKGTETRGKLCPKCLNCTDLDVALGRPKCTGNIPSARVSILHEVRPVTSGCFPIMHDRTKIRQLPNLLRGYEHIRLSTHNVINAENAPGGPYKIGTSGSCPNVTNGNGFFATMAWAVPKNDNNKTATNSLTIEVPYICTEGEDQITVWGFHSDNETQMAKLYGDSKPQKFTSSANGVTTHYVSQIGGFPNQTEDGGLPQSGRIVVDYMVQKSGKTGTITYQRGILLPQKVWCASGRSKVIKGSLPLIGEADCLHEKYGGLNKSKPYYTGEHAKAIGNCPIWVKTPLKLANGTKYRPPAKLLKERGFFGAIAGFLEGGWEGMIAGWHGYTSHGAHGVAVAADLKSTQEAINKITKNLNSLSELEVKNLQRLSGAMDELHNEILELDEKVDDLRADTISSQIELAVLLSNEGIINSEDEHLLALERKLKKMLGPSAVEIGNGCFETKHKCNQTCLDRIAAGTFDAGEFSLPTFDSLNITAASLNDDGLDNHTILLYYSTAASSLAVALMIAIFVVYMVSRDNVSCSICL

SEQ ID NO: 27333 - protein, 585 aa, synthetic construct; identical to SEQ ID NO: 26989
  REGION 1..585: note = hemagglutinin__InfluenzaB__AGX19634

SEQ ID NO: 27334 - protein, 585 aa, synthetic construct; identical to SEQ ID NO: 26514
  REGION 1..585: note = hemagglutinin__InfluenzaB__AGX19645

SEQ ID NO: 27335 - protein, 585 aa, synthetic construct; identical to SEQ ID NO: 26565
  REGION 1..585: note = hemagglutinin__InfluenzaB__AGX19656

SEQ ID NO: 27336 - protein, 585 aa, synthetic construct
  REGION 1..585: note = hemagglutinin__InfluenzaB__AGX19667
MKAIIVLLMVVTSNADRICTGITSSNSPHVVKTATQGEVNVTGVIPLTTTPTKSHFANLKGTETRGKLCPKCLNCTDLDVALGRPKCTGKIPSARVSILHEVRPVTSGCFPIMHDRTKIRQLPNLLRGYEHIRLSTHNVINAENAPGGPYKIGTSGSCPNITNGNGFFATMAWAVPKNDKNKTATNPLTIEVPYICTEGEDQITVWGFHSDNETQMAKLYGDSKPQKFTSSANGVTTHYVSQIGGFPNQTEDGGLPQSGRIVVDYMVQKSGKTGTITYQRGILLPQKVWCASGRSKVIKGSLPLIGEADCLHEKYGGLNKSKPYYTGEHAKAIGNCPIWVKTPLKLANGTKYRPPAKLLKERGFFGAIAGFLEGGWEGMIAGWHGYTSHGAHGVAVAADLKSTQEAINKITKNLNSLSELEVKDLQRLSGAMDELHNEILELDEKVDDLRADTISSQIELAVLLSNEGIINSEDEHLLALERKLKKMLGPSAVEIGNGCFETKHKCNQTCLDRIAAGTFDAGEFSLPTFDSLNITAASLNDDGLDNHTILLYYSTAASSLAVTLMIAIFVVYMVSRDNVSCSICL

SEQ ID NO: 27337 - protein, 585 aa, synthetic construct; identical to SEQ ID NO: 26989
  REGION 1..585: note = hemagglutinin__InfluenzaB__AGX19678

SEQ ID NO: 27338 - protein, 585 aa, synthetic construct; identical to SEQ ID NO: 26514
  REGION 1..585: note = hemagglutinin__InfluenzaB__AGX19700

SEQ ID NO: 27339 - protein, 585 aa, synthetic construct
  REGION 1..585: note = hemagglutinin__InfluenzaB__AGX19711
MKAIIVLLMVVTSNADRICTGITSSNSPHVVKTATQGEVNVTGVIPLTTTPTKSHFANLKGTETRGKLCPKCLNCTDLDVALGRPKCTGNIPSARVSILHEVRPVTSGCFPIMHDRTKIRQLPNLLRGYEHIRLSTHNVINAENAPGGPYKIGTSGSCPNVTNGNGFFATMAWAVPKNDKNKTATNSLTIEVPYICKEGEDQITVWGFHSDNETQMAKLYGDSKPQKFTSSANGVTTHYVSQIGGFPNQTEDGGLPQSGRIVVDYMVQKSGKTGTITYQRGILLPQKVWCASGRSKVIKGSLPLIGEADCLHEKYGGLNKSKPYYTGEHAKAIGNCPIWVKTPLKLANGTKYRPPAKLLKERGFFGAIAGFLEGGWEGMIAGWHGYTSHGAHGVAVAADLKSTQEAINKITKNLNSLSELEVKNLQRLSGAMDELHNEILELDEKVDDLRADTISSQIELAVLLSNEGIINSEDEHLLALERKLKKMLGPSAVEIGNGCFETKHKCNQTCLDRIAAGTFDAGEFSLPTFDSLNITAASLNDDGLDNHTILLYYSTAASSLAVTLMIAIFVVYMVSRDNVSCSICL

SEQ ID NO: 27340 - protein, 585 aa, synthetic construct; identical to SEQ ID NO: 26989
  REGION 1..585: note = hemagglutinin__InfluenzaB__AGX19722

SEQ ID NO: 27341 - protein, 585 aa, synthetic construct; identical to SEQ ID NO: 26989
  REGION 1..585: note = hemagglutinin__InfluenzaB__AGX19733

SEQ ID NO: 27342 - protein, 585 aa, synthetic construct; identical to SEQ ID NO: 26989
  REGION 1..585: note = hemagglutinin__InfluenzaB__AGX19744

SEQ ID NO: 27343 - protein, 585 aa, synthetic construct; identical to SEQ ID NO: 26514
  REGION 1..585: note = hemagglutinin__InfluenzaB__AGX19755

SEQ ID NO: 27344 - protein, 585 aa, synthetic construct; identical to SEQ ID NO: 26989
  REGION 1..585: note = hemagglutinin__InfluenzaB__AGX19766

SEQ ID NO: 27345 - protein, 585 aa, synthetic construct; identical to SEQ ID NO: 27322
  REGION 1..585: note = hemagglutinin__InfluenzaB__AGX19788

SEQ ID NO: 27346 - protein, 585 aa, synthetic construct; identical to SEQ ID NO: 26989
  REGION 1..585: note = hemagglutinin__InfluenzaB__AGX19799

SEQ ID NO: 27347 - protein, 585 aa, synthetic construct; identical to SEQ ID NO: 26989
  REGION 1..585: note = hemagglutinin__InfluenzaB__AGX19810

SEQ ID NO: 27348 - protein, 585 aa, synthetic construct
  REGION 1..585: note = hemagglutinin__InfluenzaB__AGX19821
MKAIIVLLMVVTSNADRICTGITSSNSPHVVKTATQGEVNVTGVIPLTTTPTKSHFANLKGTETRGKLCPKCLNCTDLDVALGRPKCTGNIPSARVSILHEVRPVTSGCFPIMHDRTKIRQLPNLLRGYEHIRLSTHNVINAENAPGGPYKIGTSGSCPNVTNGNGFFATMAWAVPKNDNNKTATNSLTIEVPYICTEGEDQITVWGFHSDNETQMAKLYGDSKPQKFTSSANGVTTHYVSQIGGFPNQTEDGGLPQSGRIVVDYMVQKSGKTGTITYQRGILLPQKVWCASGRSKVIKGSLPLIGEADCLHEKYGGLNKSKPYYTGEHAKAIGNCPIWVKTPLKLANGTKYRPPAKLLKERGFFGAIAGFLEGGWEGMIAGWHGYTSHGAHGVAVAADLKSTQEAINKITKNLNSLSELEVKNLQRLSGSMDELHNEILELDEKVDDLRADTISSQIELAVLLSNEGIINSEDEHLLALERKLKKMLGPSAVEIGNGCFETKHKCNQTCLDRIAAGTFDAGEFSLPTFDSLNITAASLNDDGLDNHTILLYYSTAASSLAVTLMIAIFVVYMVSRDNVSCSICL

SEQ ID NO: 27349 - protein, 585 aa, synthetic construct; identical to SEQ ID NO: 27322
  REGION 1..585: note = hemagglutinin__InfluenzaB__AGX19832

SEQ ID NO: 27350 - protein, 585 aa, synthetic construct; identical to SEQ ID NO: 26989
  REGION 1..585: note = hemagglutinin__InfluenzaB__AGX19843

SEQ ID NO: 27351 - protein, 585 aa, synthetic construct; identical to SEQ ID NO: 26989
  REGION 1..585: note = hemagglutinin__InfluenzaB__AGX19854

SEQ ID NO: 27352 - protein, 585 aa, synthetic construct; identical to SEQ ID NO: 26989
  REGION 1..585: note = hemagglutinin__InfluenzaB__AGX19865

SEQ ID NO: 27353 - protein, 585 aa, synthetic construct; identical to SEQ ID NO: 27322
  REGION 1..585: note = hemagglutinin__InfluenzaB__AGX19876

SEQ ID NO: 27354 - protein, 585 aa, synthetic construct; identical to SEQ ID NO: 26989
  REGION 1..585: note = hemagglutinin__InfluenzaB__AGX19887

SEQ ID NO: 27355 - protein, 585 aa, synthetic construct
  REGION 1..585: note = hemagglutinin__InfluenzaB__AGX19898
MKAIIVLLMVVTSNADRICTGITSSNSPHVVKTATQGEVNVTGVIPLTTTPTKSHFANLKGTETRGKLCPKCLNCTDLDVALGRPKCTGKIPSARVSILHEVRPVTSGCFPIMHDRTKIRQLPNLLRGYEHIRLSTHNVINAENAPGGPYKIGTSGSCPNITNENGFFATMAWAVPKNDKNKTATNPLTIEVPYICTEGEDQITVWGFHSDNETQMAKLYGDSKPQKFTSSANGVTTHYVSQIGGFPNQTEDGGLPQSGRIVVDYMVQKSGKTGTITYQRGILLPQKVWCASGRSKVIKGSLPLIGEADCLHEKYGGLNKSKPYYTGEHAKAIGNCPIWVKTPLKLANGTKYRPPAKLLKERGFFGAIAGFLEGGWEGMIAGWHGYTSHGAHGVAVAADLKSTQEAINKITKNLNSLSELEVKNLQRLSGAMDELHNEILELDEKVDDLRADTISSQIELAVLLSNEGIINSEDEHLLALERKLKKMLGPSAVEIGNGCFETKHKCNQTCLDRIAAGTFDAGEFSLPTFDSLNITAASLNDDGLDNHTILLYYSTAASSLAVTLMIAIFVVYMVSRDNVSCSICL

SEQ ID NO: 27356 - protein, 585 aa, synthetic construct; identical to SEQ ID NO: 26514
  REGION 1..585: note = hemagglutinin__InfluenzaB__AGX19909

SEQ ID NO: 27357 - protein, 585 aa, synthetic construct; identical to SEQ ID NO: 26989
  REGION 1..585: note = hemagglutinin__InfluenzaB__AGX19920

SEQ ID NO: 27358 - protein, 585 aa, synthetic construct; identical to SEQ ID NO: 27355
  REGION 1..585: note = hemagglutinin__InfluenzaB__AGX19931

SEQ ID NO: 27359 - protein, 585 aa, synthetic construct; identical to SEQ ID NO: 27322
  REGION 1..585: note = hemagglutinin__InfluenzaB__AGX19942

SEQ ID NO: 27360 - protein, 585 aa, synthetic construct; identical to SEQ ID NO: 26989
  REGION 1..585: note = hemagglutinin__InfluenzaB__AGX19953

SEQ ID NO: 27361 - protein, 585 aa, synthetic construct; identical to SEQ ID NO: 26747
  REGION 1..585: note = hemagglutinin__InfluenzaB__AGX19964

SEQ ID NO: 27362 - protein, 585 aa, synthetic construct; identical to SEQ ID NO: 26514
  REGION 1..585: note = hemagglutinin__InfluenzaB__AGX19975

SEQ ID NO: 27363 - protein, 585 aa, synthetic construct
  REGION 1..585: note = hemagglutinin__InfluenzaB__AGX19986
MKAIIVLLMVVTSNADRICTGITSSNSPHVVKTATQGEVNVTGVIPLTTTPTKSHFANLKGTETRGKLCPKCLNCTDLDVALGRPKCTGKIPSARVSILHEVRPVTSGCFPIMHDRTKIRQLPNLLRGYEHIRLSTHNVINAENAPGGPYKIGTSGSCPNITNGNGFFATMAWAVPKNDKNKTATNPLTIEVPYICTEGEDQITVWGFHSDNETQMAKLYGDSKPQKFTSSANGVTTHYVSQIGGFPNQTEDGGLPQSGRIVVDYMVQKSGKTGTITYQRGILLPQKVWCVSGRSKVIKGSLPLIGEADCLHEKYGGLNKSKPYYTGEHAKAIGNCPIWVKTPLKLANGTKYRPPAKLLKERGFFGAIAGFLEGGWEGMIAGWHGYTSHGAHGVAVAADLKSTQEAINKITKNLNSLSELEVKNLQRLSGAMDELHNEILELDEKVDDLRADTISSQIELAVLLSNEGIINSEDEHLLALERKLKKMLGPSAVEIGNGCFETKHKCNQTCLDRIAAGTFDAGEFSLPTFDSLNITAASLNDDGLDNHTILLYYSTAASSLAVTLMIAIFVVYMVSRDNVSCSICL

SEQ ID NO: 27364 - protein, 585 aa, synthetic construct
  REGION 1..585: note = hemagglutinin__InfluenzaB__AGX19997
MKAIIVLLMVVTSNADRICTGITSSNSPHVVKTATQGEVNVTGVIPLTTTPTKSHFANLKGTETRGKLCPKCLNCTDLDVALGRPKCTGKIPSARVSILHEVRPVTSGCFPIMHDRTKIRQLPNLLRGYEHIRLSTHNVINAENAPGGPYKIGTSGSCPNITNGNGFFATMAWAVPKNDKNKTATNPLTIEVPYICTEGEDQITVWGFHSDNETQMAKLYGDSKPQKFTSSANGVTTHYVSQIGGFPNQIEDGGLPQSGRIVVDYMVQKSGKTGTITYQRGILLPQKVWCASGRSKVIKGSLPLIGEADCLHEKYGGLNKSKPYYTGEHAKAIGNCPIWVKTPLKLANGTKYRPPAKLLKERGFFGAIAGFLEGGWEGMIAGWHGYTSHGAHGVAVAADLKSTQEAINKITKNLNSLSELEVKNLQRLSGAMDELHNEILELDEKVDDLRADTISSQIELAVLLSNEGIINSEDEHLLALERKLKKMLGPSAVEIGNGCFETKHKCNQTCLDRIAAGTFDAGEFSLPTFDSLNITAASLNDDGLDNHTILLYYSTAASSLAVTLMIAIFVVYMVSRDNVSCSICL

SEQ ID NO: 27365 - protein, 585 aa, synthetic construct; identical to SEQ ID NO: 26989
  REGION 1..585: note = hemagglutinin__InfluenzaB__AGX20008

SEQ ID NO: 27366 - protein, 585 aa, synthetic construct; identical to SEQ ID NO: 26989
  REGION 1..585: note = hemagglutinin__InfluenzaB__AGX20019

SEQ ID NO: 27367 - protein, 585 aa, synthetic construct; identical to SEQ ID NO: 26989
  REGION 1..585: note = hemagglutinin__InfluenzaB__AGX20030

SEQ ID NO: 27368 - protein, 585 aa, synthetic construct
  REGION 1..585: note = hemagglutinin__InfluenzaB__AGX20041
MKAIIVLLMVVTSDADRICTGITSSNSPHVVKTATQGEVNVTGVIPLTTTPTKSHFANLKGKETRGKLCPKCLNCTDLDVALGRPKCTGKIPSARVSILHEVRPVTSGCFPIMHDRTKIRQLPNLLRGYEHIRLSTHNVINAENAPGGPYKIGTSGSCPNITNGNGFFATMAWAVPKNDKNKTATNPLTIEVPYICTEGEDQITVWGFHSDNETQMAKLYGDSKPQKFTSSANGVTTHYVSQIGGFPNQTEDGGLPQSGRIVVDYMVQKSGKTGTITYQRGILLPQKVWCASGRSKVIKGSLPLIGEADCLHEKYGGLNKSKPYYTGEHAKAIGNCPIWVKTPLKLANGTKYRPPAKLLKERGFFGAIAGFLEGGWEGMIAGWHGYTSHGAHGVAVAADLKSTQEAINKITKNLNSLSELEVKNLQRLSGAMDELHNEILELDEKVDDLRADTISSQIELAVLLSNEGIINSEDEHLLALERKLKKMLGPSAVEIGNGCFETKHKCNQTCLDRIAAGTFDAGEFSLPTFDSLNITAASLNDDGLDNHTILLYYSTAASSLAVTLMIAIFVVYMVSRDNVSCSICL

SEQ ID NO: 27369 - protein, 585 aa, synthetic construct; identical to SEQ ID NO: 26989
  REGION 1..585: note = hemagglutinin__InfluenzaB__AGX20052

SEQ ID NO: 27370 - protein, 585 aa, synthetic construct; identical to SEQ ID NO: 26989
  REGION 1..585: note = hemagglutinin__InfluenzaB__AGX20063

SEQ ID NO: 27371 - protein, 585 aa, synthetic construct
  REGION 1..585: note = hemagglutinin__InfluenzaB__AGX20074
MKAIIALLMVVTSNADRICTGITSSNSPHVVKTATQGEVNVTGVIPLTTTPTKSHFANLKGTETRGKLCPKCLNCTDLDVALGRPKCTGKIPSARVSILHEVRPVTSGCFPIMHDRTKIRQLPNLLRGYEHIRLSTHNVINAENAPGGPYKIGTSGSCPNITNGNGFFATMAWAVPKNDKNKTATNPLTIEVPYICTEGEDQITVWGFHSDNETQMAKLYGDSKPQKFTSSANGVTTHYVSQIGGFPNQTEDGGLPQSGRIVVDYMVQKSGKTGTITYQRGILLPQKVWCASGRSKVIKGSLPLIGEADCLHEKYGGLNKSKPYYTGEHAKAIGNCPIWVKTPLKLANGTKYRPPAKLLKERGFFGAIAGFLEGGWEGMIAGWHGYTSHGAHGVAVAADLKSTQEAINKITKNLNSLSELEVKNLQRLSGAMDELHNEILELDEKVDDLRADTISSQIELAVLLSNEGIINSEDEHLLALERKLKKMLGPSAVEIGNGCFETKHKCNQTCLDRIAAGTFDAGEFSLPTFDSLNITAASLNDDGLDNHTILLYYSTAASSLAVTLMIAIFVVYMVSRDNVSCSICL

SEQ ID NO: 27372 - protein, 585 aa, synthetic construct
  REGION 1..585: note = hemagglutinin__InfluenzaB__AGX20085
MKAIIVLLMVVTSNADRICTGITSSNSPHVVKTATQGEVNVTGVIPLTTTPTKSHFANLKGTETRGKLCPKCLNCTDLDVALGRPKCTGKIPSARVSILHEVRPVTSGCFPIMHDRTKIRQLPNLLRGYEHIRLSTHNVINAENAPGGPYKIGTSGSCPNITNGNGFFATMAWAVPKNDKNKTATNPLTIEVPYICTEGEDQITIWGFHSDNETQMAKLYGDSKPQKFTSSANGVTTHYVSQIGGFPNQTEDGGLPQSGRIVVDYMVQKSGKTGTITYQRGILLPQKVWCASGRSKVIKGSLPLIGEADCLHEKYGGLNKSKPYYTGEHAKAIGNCPIWVKTPLKLANGTKYRPPAKLLKERGFFGAIAGFLEGGWEGMIAGWHGYTSHGAHGVAVAADLKSTQEAINKITKNLNSLSELEVKNLQRLSGAMDELHNEILELDEKVDDLRADTISSQIELAVLLSNEGIINSEDEHLLALERKLKKMLGPSAVEIGNGCFETKHKCNQTCLDRIAAGTFDAGEFSLPTFDSLNITAASLNDDGLDNHTILLYYSTAASSLAVTLMIAIFVVYMVSRDNVSCSICL

SEQ ID NO: 27373 - protein, 585 aa, synthetic construct
  REGION 1..585: note = hemagglutinin__InfluenzaB__AGX20096
MKAIIVLLMVVTSNADRICTGVTSSNSPHVVKTATQGEVNVTGVIPLTTTPTKSHFANLKGTETRGKLCPKCLNCTDLDVALGRPKCTGNIPSARVSILHEVRPVTSGCFPIMHDRTKIRQLPNLLRGYEHIRLSTHNVINAENAPGGPYKIGTSGSCPNVTNGNGFFATMAWAVPKNDNNKTATNSLTIEVPYICTEGEDQITVWGFHSDNETQMAKLYGDSKPQKFTSSANGVTTHYVSQIGGFPNQTEDGGLPQSGRIVVDYMVQKSGKTGTITYQRGILLPQKVWCASGRSKVIKGSLPLIGEADCLHEKYGGLNKSKPYYTGEHAKAIGNCPIWVKTPLKLANGTKYRPPAKLLKERGFFGAIAGFLEGGWEGMIAGWHGYTSHGAHGVAVAADLKSTQEAINKITKNLNSLSELEVKNLQRLSGAMDELHNEILELDEKVDDLRADTISSQIELAVLLSNEGIINSEDEHLLALERKLKKMLGPSAVEIGNGCFETKHKCNQTCLDRIAAGTFDAGEFSLPTFDSLNITAASLNDDGLDNHTILLYYSTAASSLAVTLMIAIFVVYMVSRDNVSCSICL

SEQ ID NO: 27374 - protein, 585 aa, synthetic construct; identical to SEQ ID NO: 26608
  REGION 1..585: note = hemagglutinin__InfluenzaB__AGX20107

SEQ ID NO: 27375 - protein, 585 aa, synthetic construct; identical to SEQ ID NO: 26608
  REGION 1..585: note = hemagglutinin__InfluenzaB__AGX20118

SEQ ID NO: 27376 - protein, 585 aa, synthetic construct; identical to SEQ ID NO: 26608
  REGION 1..585: note = hemagglutinin__InfluenzaB__AGX20129

SEQ ID NO: 27377 - protein, 585 aa, synthetic construct; identical to SEQ ID NO: 26608
  REGION 1..585: note = hemagglutinin__InfluenzaB__AGX20140

SEQ ID NO: 27378 - protein, 585 aa, synthetic construct; identical to SEQ ID NO: 26608
  REGION 1..585: note = hemagglutinin__InfluenzaB__AGX20151

SEQ ID NO: 27379 - protein, 585 aa, synthetic construct; identical to SEQ ID NO: 26608
  REGION 1..585: note = hemagglutinin__InfluenzaB__AGX20162

SEQ ID NO: 27380 - protein, 585 aa, synthetic construct; identical to SEQ ID NO: 26608
  REGION 1..585: note = hemagglutinin__InfluenzaB__AGX20173

SEQ ID NO: 27381 - protein, 585 aa, synthetic construct; identical to SEQ ID NO: 26608
  REGION 1..585: note = hemagglutinin__InfluenzaB__AGX20184

SEQ ID NO: 27382 - protein, 585 aa, synthetic construct; identical to SEQ ID NO: 26608
  REGION 1..585: note = hemagglutinin__InfluenzaB__AGX20195

SEQ ID NO: 27383 - protein, 585 aa, synthetic construct; identical to SEQ ID NO: 26608
  REGION 1..585: note = hemagglutinin__InfluenzaB__AGX20206

SEQ ID NO: 27384 - protein, 585 aa, synthetic construct; identical to SEQ ID NO: 26608
  REGION 1..585: note = hemagglutinin__InfluenzaB__AGX20217

SEQ ID NO: 27385 - protein, 585 aa, synthetic construct; identical to SEQ ID NO: 26645
  REGION 1..585: note = hemagglutinin__InfluenzaB__AGX20228

SEQ ID NO: 27386 - protein, 585 aa, synthetic construct
  REGION 1..585: note = hemagglutinin__InfluenzaB__AGX20239
MKAIIVLLMVVTSNADRICTGITSSNSPHVVKTATQGEVNVTGVIPLTTTPTKSHFANLKGTETRGKLCPKCPNCTDLDVALGRPKCTGKIPSARVSILHEVRPVTSGCFPIMHDRTKIRQLPNLLRGYEHIRLSTHNVINAENAPGGPYKIGTSGSCPNVTNGNGFFATMAWAVPKNDKNKTATNPLTIEVPYICTEGEDQIIVWGFHSDNETQMAKLYGDSKPQKFTSSANGVTTHYVSQIGGFPNQTEDGGLPQSGRIVVDYMVQKSGKTGTITYQRGILLPQKVWCASGRSKVIKGSLPLIGEADCLHEKYGGLNKSKPYYTGEHAKAIGNCPIWVKTPLKLANGTKYRPPAKLLKERGFFGAIAGFLEGGWEGMIAGWHGYTSHGAHGVAVAADLKSTQEAINKITKNLNSLSELEVKNLQRLSGAMDELHNEILELDEKVDDLRADTISSQIELAVLLSNEGIINSEDEHLLALERKLKKMLGPSAVEIGNGCFETKHKCNQTCLDRIAAGTFDAGEFSLPTFDSLNITAASLNDDGLDNHTILLYYSTAASSLAVTLMIAIFVVYMVSRDNVSCSICL

SEQ ID NO: 27387 - protein, 585 aa, synthetic construct; identical to SEQ ID NO: 26608
  REGION 1..585: note = hemagglutinin__InfluenzaB__AGX20250

SEQ ID NO: 27388 - protein, 585 aa, synthetic construct; identical to SEQ ID NO: 26608
  REGION 1..585: note = hemagglutinin__InfluenzaB__AGX20261

SEQ ID NO: 27389 - protein, 585 aa, synthetic construct; identical to SEQ ID NO: 26608
  REGION 1..585: note = hemagglutinin__InfluenzaB__AGX20272

SEQ ID NO: 27390 - protein, 585 aa, synthetic construct; identical to SEQ ID NO: 26608
  REGION 1..585: note = hemagglutinin__InfluenzaB__AGX20283

SEQ ID NO: 27391 - protein, 585 aa, synthetic construct; identical to SEQ ID NO: 26608
  REGION 1..585: note = hemagglutinin__InfluenzaB__AGX20294

SEQ ID NO: 27392 - protein, 585 aa, synthetic construct
  REGION 1..585: note = hemagglutinin__InfluenzaB__AGX20305
MKAIIVLLMVVTSNADRICTGITSSNSPHVVKTATQGEVNVTGVIPLTTTPTKSHFANLKGTETRGKLCPKCPNCTDLDVALGRPKCTGKIPSARVSILHEVRPVTSGCFPIMHDRTKIRQLPNLLRGYEHIRLSTHNVINAENAPGGPYKIGTSGSCPNVTNGNGFFATMAWAVPKNDKNKTATNQLTIEVPYICTEGEDQITVWGFHSDNETQMAKLYGDSKPQKFTSSANGVTTHYVSQIGGFPNQTEDGGLPQSGRIVVDYMVQKSGKTGTITYQRGILLPQKVWCASGRSKVIKGSLPLIGEADCLHEKYGGLNKSKPYYTGEHAKAIGNCPIWVKTPLKLANGTKYRPPAKLLKERGFFGAIAGFLEGGWEGMIAGWHGYTSHGAHGVAVAADLKSTQEAINKITKNLNSLSELEVKNLQRLSGAMDELHNEILELDEKVDDLRADTISSQIELAVLLSNEGIINSEDEHLLALERKLKKMLGPSAVEIGNGCFETKHKCNQTCLDRIAAGTFDAGEFSLPTFDSLNITAASLNDDGLDNHTILLYYSTAASSLAVTLMIAIFVVYMVSRDNVSCSICL

SEQ ID NO: 27393 - protein, 585 aa, synthetic construct; identical to SEQ ID NO: 26608
  REGION 1..585: note = hemagglutinin__InfluenzaB__AGX20316

SEQ ID NO: 27394 - protein, 585 aa, synthetic construct; identical to SEQ ID NO: 26608
  REGION 1..585: note = hemagglutinin__InfluenzaB__AGX20327

SEQ ID NO: 27395 - protein, 585 aa, synthetic construct
  REGION 1..585: note = hemagglutinin__InfluenzaB__AGX20338
MKAIIVLLMVVTSNADRICTGITSSNSPHVVKTATQGEVNVTGVIPLTTTPTKSHFANLKGTETRGKLCPKCPNCTDLDVALGRPKCTGKIPSARVSILHEVRPVTSGCFPIMHDRTKIRQLPNLLRGYEHIRLSTHNVINAENAPGGPYKIGTSGSCPNVTNGNGFFATMAWAVPKNDKNKTATNPLTIEVPYICTEGEDQITVWGFHSDNETQMANLYGDSKPQKFTSSANGVTTHYVSQIGGFPNQTEDGGLPQSGRIVVDYMVQKSGKTGTITYQRGILLPQKVWCASGRSKVIKGSLPLIGEADCLHEKYGGLNKSKPYYTGEHAKAIGNCPIWVKTPLKLANGTKYRPPAKLLKERGFFGAIAGFLEGGWEGMIAGWHGYTSHGAHGVAVAADLKSTQEAINKITKNLNSLSELEVKNLQRLSGAMDELHNEILELDEKVDDLRADTISSQIELAVLLSNEGIINSEDEHLLALERKLKKMLGPSAVEIGNGCFETKHKCNQTCLDRIAAGTFDAGEFSLPTFDSLNITAASLNDDGLDNHTILLYYSTAASSLAVTLMIAIFVVYMVSRDNVSCSICL

SEQ ID NO: 27396 - protein, 585 aa, synthetic construct; identical to SEQ ID NO: 26608
  REGION 1..585: note = hemagglutinin__InfluenzaB__AGX20349

SEQ ID NO: 27397 - protein, 585 aa, synthetic construct; identical to SEQ ID NO: 26608
  REGION 1..585: note = hemagglutinin__InfluenzaB__AGX20360

SEQ ID NO: 27398 - protein, 585 aa, synthetic construct; identical to SEQ ID NO: 26645
  REGION 1..585: note = hemagglutinin__InfluenzaB__AGX20371

SEQ ID NO: 27399 - protein, 585 aa, synthetic construct
  REGION 1..585: note = hemagglutinin__InfluenzaB__AGX20382
MKAIIVLLMVVTSNADRICTGITSSNSPHVVKTATQGEVNVTGVIPLTTTPTKSHFANLKGTETRGKLCPKCPNCTDLDVALGRPKCTGKIPSARVSILHEVRPVTSGCFPIMHDRTKIRQLPNLLRGYEHIRLSTHNVINAENAPGGPYKIGTSGSCPNVTNGNGFFATMAWAVPKNDKNKTATNPLTIEVPYICTEGEDQITVWGFHSDNETQMAKLYGDSKPQKFTSSANGVTTHYVSQIGGFPNQTEDGGLPQSGRIVVDYMVQKSGKTGTITYQRGILLPQKVWCASGRSKVIKGSLPLIGEADCLHEKYGGLNKSKPYYTGEHAKAIGNCPIWVKTPLKLANGTKYRPPAKLLKERGFFGAIAGFLEGGWEGMIAGWHGYTSHGAHGVAVAADLKSTQEAINKITKNLNSLSELEVKNLQRLSGAMNELHNEILELDEKVDDLRADTISSQIELAVLLSNEGIINSEDEHLLALERKLKKMLGPSAVEIGNGCFETKHKCNQTCLDRIAAGTFDAGEFSLPTFDSLNITAASLNDDGLDNHTILLYYSTAASSLAVTLMIAIFVVYMVSRDNVSCSICL

SEQ ID NO: 27400 - protein, 585 aa, synthetic construct; identical to SEQ ID NO: 26608
  REGION 1..585: note = hemagglutinin__InfluenzaB__AGX20393

SEQ ID NO: 27401 - protein, 585 aa, synthetic construct; identical to SEQ ID NO: 26645
  REGION 1..585: note = hemagglutinin__InfluenzaB__AGX20404

SEQ ID NO: 27402 - protein, 585 aa, synthetic construct; identical to SEQ ID NO: 26608
  REGION 1..585: note = hemagglutinin__InfluenzaB__AGX20415

SEQ ID NO: 27403 - protein, 585 aa, synthetic construct; identical to SEQ ID NO: 26608
  REGION 1..585: note = hemagglutinin__InfluenzaB__AGX20426

SEQ ID NO: 27404 - protein, 585 aa, synthetic construct; identical to SEQ ID NO: 26608
  REGION 1..585: note = hemagglutinin__InfluenzaB__AGX20437

SEQ ID NO: 27405 - protein, 585 aa, synthetic construct; identical to SEQ ID NO: 26608
  REGION 1..585: note = hemagglutinin__InfluenzaB__AGX20448

SEQ ID NO: 27406 - protein, 585 aa, synthetic construct; identical to SEQ ID NO: 26608
  REGION 1..585: note = hemagglutinin__InfluenzaB__AGX20459

SEQ ID NO: 27407 - protein, 585 aa, synthetic construct; identical to SEQ ID NO: 26608
  REGION 1..585: note = hemagglutinin__InfluenzaB__AGX20470

SEQ ID NO: 27408 - protein, 585 aa, synthetic construct; identical to SEQ ID NO: 26608
  REGION 1..585: note = hemagglutinin__InfluenzaB__AGX20481

SEQ ID NO: 27409 - protein, 585 aa, synthetic construct; identical to SEQ ID NO: 26608
  REGION 1..585: note = hemagglutinin__InfluenzaB__AGX20492

SEQ ID NO: 27410 - protein, 585 aa, synthetic construct; identical to SEQ ID NO: 26608
  REGION 1..585: note = hemagglutinin__InfluenzaB__AGX20503

SEQ ID NO: 27411 - protein, 585 aa, synthetic construct; identical to SEQ ID NO: 26608
  REGION 1..585: note = hemagglutinin__InfluenzaB__AGX20514

SEQ ID NO: 27412 - protein, 585 aa, synthetic construct
  REGION 1..585: note = hemagglutinin__InfluenzaB__AGX20525
MKAIIVLLMVVTSNADRICTGITSSNSPHVVKTATQGEVNVTGVIPLTTTPTKSHFSNLKGTETRGKLCPKCPNCTDLDVALGRPKCTGKIPSARVSILHEVRPVTSGCFPIMHDRTKIRQLPNLLRGYEHIRLSTHNVINAENAPGGPYKIGTSGSCPNVTNGNGFFATMAWAVPKNDKNKTATNPLTIEVPYICTEGEDQITVWGFHSDNETQMAKLYGDSKPQKFTSSANGVTTHYVSQIGGFPNQTEDGGLPQSGRIVVDYMVQKSGKTGTITYQRGILLPQKVWCASGRSKVIKGSLPLIGEADCLHEKYGGLNKSKPYYTGEHAKAIGNCPIWVKTPLKLANGTKYRPPAKLLKERGFFGAIAGFLEGGWEGMIAGWHGYTSHGAHGVAVAADLKSTQEAINKITKNLNSLSELEVKNLQRLSGAMDELHNEILELDEKVDDLRADTISSQIELAVLLSNEGIINSEDEHLLALERKLKKMLGPSAVEIGNGCFETKHKCNQTCLDRIAAGTFDAGEFSLPTFDSLNITAASLNDDGLDNHTILLYYSTAASSLAVTLMIAIFVVYMVSRDNVSCSICL

SEQ ID NO: 27413 - protein, 585 aa, synthetic construct; identical to SEQ ID NO: 26608
  REGION 1..585: note = hemagglutinin__InfluenzaB__AGX20536

SEQ ID NO: 27414 - protein, 585 aa, synthetic construct
  REGION 1..585: note = hemagglutinin__InfluenzaB__AGX20547
MKAIIVLLMVVTSNADRICTGITSSNSPHVVKTATQGEVNVTGVIPLTTTPTKSHFANLKGTETRGKLCPKCLNCTDLDVALGRPKCTGKIPSARVSILHEVRPVTSGCFPIMHDRTKIRQLPNLLRGYEHIRLSTHNVINAENAPGGPYKIGTSGSCPNVTNGNGFFATMAWAVPKNDKNKTATNPLTIEVPYICTEGEDQITVWGFHSDNETQMAKLYGDSKPQKFTSSANGVTTHHVSQIGGFPNQTEDGGLPQSGRIVVDYMVQKSGKTGTITYQRGILLPQKVWCASGRSKVIKGSLPLIGEADCLHEKYGGLNKSKPYYTGEHAKAIGNCPIWVKTPLKLANGTKYRPPAKLLKERGFFGAIAGFLEGGWEGMIAGWHGYTSHGAHGVAVAADLKSTQEAINKITKNLNSLSELEIKNLQRLSGAMDELHNEILELDEKVDDLRADTISSQIELAVLLSNEGIINSEDEHLLALERKLKKMLGPSAVEIGNGCFETKHKCNQTCLDRIAAGTFDAGEFSLPTFDSLNITAASLNDDGLDNHTILLYYSTAASSLAVTLMIAIFVVYMVSRDNVSCSICL

SEQ ID NO: 27415 - protein, 585 aa, synthetic construct; identical to SEQ ID NO: 26662
  REGION 1..585: note = hemagglutinin__InfluenzaB__AGX20558

SEQ ID NO: 27416 - protein, 585 aa, synthetic construct; identical to SEQ ID NO: 26608
  REGION 1..585: note = hemagglutinin__InfluenzaB__AGX20569

SEQ ID NO: 27417 - protein, 585 aa, synthetic construct; identical to SEQ ID NO: 26645
  REGION 1..585: note = hemagglutinin__InfluenzaB__AGX20580

SEQ ID NO: 27418 - protein, 585 aa, synthetic construct; identical to SEQ ID NO: 26608
  REGION 1..585: note = hemagglutinin__InfluenzaB__AGX20591

SEQ ID NO: 27419 - protein, 585 aa, synthetic construct; identical to SEQ ID NO: 26608
  REGION 1..585: note = hemagglutinin__InfluenzaB__AGX20602

SEQ ID NO: 27420 - protein, 585 aa, synthetic construct; identical to SEQ ID NO: 26608
  REGION 1..585: note = hemagglutinin__InfluenzaB__AGX20613

SEQ ID NO: 27421 - protein, 585 aa, synthetic construct; identical to SEQ ID NO: 26608
  REGION 1..585: note = hemagglutinin__InfluenzaB__AGX20624

SEQ ID NO: 27422 - protein, 585 aa, synthetic construct
  REGION 1..585: note = hemagglutinin__InfluenzaB__AGX20635
MKAIIVLLMVVTSNADRICTGITSSNSPHVVKTATQGEVNVTGVIPLTTTPTKSHFANLKGTETRGKLCPKCLNCTDLDVALGRPKCTGKIPSARVSILHEVRPVTSGCFPIMHDRTKIRQLPNLLRGYEHIRLSTHNVINAENAPGGPYKIGTSGSCPNVTNGNGFFATMAWAVPKNDKNKTATNPLTIEVPYICTEGEDQITVWGFHSDNETLMAKLYGDSKPQKFTSSANGVTTHYVSQIGGFPNQTEDGGLPQSGRIVVDYMVQKSGKTGTITYQRGILLPQKVWCASGRSKVIKGSLPLIGEADCLHEKYGGLNKSKPYYTGEHAKAIGNCPIWVKTPLKLANGTKYRPPAKLLKERGFFGAIAGFLEGGWEGMIAGWHGYTSHGAHGVAVAADLKSTQEAINKITKNLNSLSELEVKNLQRLSGAMDELHNEILELDEKVDDLRADTISSQIELAVLLSNEGIINSEDEHLLALERKLKKMLGPSAVEIGNGCFETKHKCNQTCLDRIAAGTFDAGEFSLPTFDSLNITAASLNDDGLDNHTILLYYSTAASSLAVTLMIAIFVVYMVSRDNVSCSICL

SEQ ID NO: 27423 - protein, 585 aa, synthetic construct; identical to SEQ ID NO: 26608
  REGION 1..585: note = hemagglutinin__InfluenzaB__AGX20646

SEQ ID NO: 27424 - protein, 585 aa, synthetic construct
  REGION 1..585: note = hemagglutinin__InfluenzaB__AGX20668
MKAIIVLLMVVTSNADRICTGITSSNSPHVVKTATQGEVNVTGVIPLTTTPTKSHFANLKGTETRGKLCPKCPNCTDLDVALGRPKCTGKIPSARVSILHEVRPVTSGCFPIMHDRTKIRQLPNLLRGYEHIRLSTHNVINAENAPGGPYKIGTSGSCPNVTNGNGFFATMAWAVPKNDKTKTATNPLTIEVPYICTEGEDQITVWGFHSDNETQMAKLYGDSKPQKFTSSANGVTTHYVSQIGGFPNQTEDGGLPQSGRIVVDYMVQKSGKTGTITYQRGILLPQKVWCASGRSKVIKGSLPLIGEADCLHEKYGGLNKSKPYYTGEHAKAIGNCPIWVKTPLKLANGTKYRPPAKLLKERGFFGAIAGFLEGGWEGMIAGWHGYTSHGAHGVAVAADLKSTQEAINKITKNLNSLSELEVKNLQRLSGAMDELHNEILELDEKVDDLRADTISSQIELAVLLSNEGIINSEDEHLLALERKLKKMLGPSAVEIGNGCFETKHKCNQTCLDRIAAGTFDAGEFSLPTFDSLNITAASLNDDGLDNHTILLYYSTAASSLAVTLMIAIFVVYMVSRDNVSCSICL

SEQ ID NO: 27425 - protein, 585 aa, synthetic construct; identical to SEQ ID NO: 26683
  REGION 1..585: note = hemagglutinin__InfluenzaB__AGX20679

SEQ ID NO: 27426 - protein, 585 aa, synthetic construct; identical to SEQ ID NO: 26645
  REGION 1..585: note = hemagglutinin__InfluenzaB__AGX20690

SEQ ID NO: 27427 - protein, 585 aa, synthetic construct; identical to SEQ ID NO: 26645
  REGION 1..585: note = hemagglutinin__InfluenzaB__AGX20701

SEQ ID NO: 27428 - protein, 585 aa, synthetic construct; identical to SEQ ID NO: 26989
  REGION 1..585: note = hemagglutinin__InfluenzaB__AGX20712

SEQ ID NO: 27429 - protein, 585 aa, synthetic construct; identical to SEQ ID NO: 26608
  REGION 1..585: note = hemagglutinin__InfluenzaB__AGX20723

SEQ ID NO: 27430 - protein, 585 aa, synthetic construct
  REGION 1..585: note = hemagglutinin__InfluenzaB__AGX20734
MKAIIVLLMVVTSNADRICTGITSSNSPHVVKTATQGEVNVTGVIPLTTTPTKSHFANLKGTETRGKLCPKCLNCTDLDVALGRPKCTGKIPSARVSILHEVRPVTSGCFPIMHDRTKIRQLPNLLRGYEHIRLSTNNVINAENAPGGPYKIGTSGSCPNVTNGNGFFATMAWAVPKNDKNKTATNPLTIEVPYICTEGEDQITVWGFHSDNETQMAKLYGDSKPQKFTSSANGVTTHYVSQIGGFPNQTEDGGLPQSGRIVVDYMVQKSGKTGTITYQRGILLPQKVWCASGRSKVIKGSLPLIGEADCLHEKYGGLNKSKPYYTGEHAKAIGNCPIWVKTPLKLANGTKYRPPAKLLKERGFFGAIAGFLEGGWEGMIAGWHGYTSHGAHGVAVAADLKSTQEAINKITKNLNSLSELEVKNLQRLSGAMDELHNEILELDEKVDDLRADTISSQIELAVLLSNEGIINSEDEHLLALERKLKKMLGPSAVEIGNGCFETKHKCNQTCLDRIAAGTFDAGEFSLPTFDSLNITAASLNDDGLDNHTILLYYSTAASSLAVTLMIAIFVVYMVSRDNVSCSICL

SEQ ID NO: 27431 - protein, 585 aa, synthetic construct
  REGION 1..585: note = hemagglutinin__InfluenzaB__AGX20745
MKAIIVLLMVVTSNADRICTGITSSNSPHVVKTATQGEVNVTGVIPLTTTPTKSHFANLKGTETRGKLCPKCPNCTDLDVALGRPKCTGKIPSARVSILHEVRPVTSGCFPIMHDRTKIRQLPNLLRGYEHIRLSTHNVINAENAPGGPYKIGTSGSCPNVTNGNGFFATMAWAVPKNDKNKTATNPLTIEVPYICTEGEDQITIWGFHSDNETQMAKLYGDSKPQKFTSSANGVTTHYVSQIGGFPNQTEDGGLPQSGRIVVDYMVQKSGKTGTITYQRGILLPQKVWCASGRSKVIKGSLPLIGEADCLHEKYGGLNKSKPYYTGEHAKAIGNCPIWVKTPLKLANGTKYRPPAKLLKERGFFGAIAGFLEGGWEGMIAGWHGYTSHGAHGVAVAADLKSTQEAINKITKNLNSLSELEVKNLQRLSGAMDELHNEILELDEKVDDLRADTISSQIELAVLLSNEGIINSEDEHLLALERKLKKMLGPSAVEIGNGCFETKHKCNQTCLDRIAAGTFDAGEFSLPTFDSLNITAASLNDDGLDNHTILLYYSTAASSLAVTLMIAIFVVYMVSRDNVSCSICL

SEQ ID NO: 27432 - protein, 585 aa, synthetic construct; identical to SEQ ID NO: 26989
  REGION 1..585: note = hemagglutinin__InfluenzaB__AGX20756

SEQ ID NO: 27433 - protein, 585 aa, synthetic construct; identical to SEQ ID NO: 26608
  REGION 1..585: note = hemagglutinin__InfluenzaB__AGX20767

SEQ ID NO: 27434 - protein, 585 aa, synthetic construct; identical to SEQ ID NO: 26645
  REGION 1..585: note = hemagglutinin__InfluenzaB__AGX20778

SEQ ID NO: 27435 - protein, 585 aa, synthetic construct
  REGION 1..585: note = hemagglutinin__InfluenzaB__AGX20789
MKAIIVLLMVVTSNADRICTGITSSNSPHVVKTATQGEVNVTGVIPLTTTPTKSHFANLKGTETRGKLCPKCPNCTDLDVALGRPKCTGKIPSARVSILHEVRPVTSGCFPIMHDRTKIRQLPNLLRGYEHIRLSTHNVINAENAPGGPYKIGTSGSCPNVTNGNGFFATMAWAVPKNDKNKTATNPLTIEVPYICTEGEDQITVWGFHSDNETQMAKLYGDSKPQKFTSSANGVTTHYVSQIGGFPNQTEDGGLPQSGRIVVDYMVQKSGKTGTITYQRGILLPQKVWCASGRSKVIKGSLPLIGEADCLHEKYGGLNKSKPYYTGEHAKAIGNCPIWVKTPLKLANGTKYRPPAKLLKERGFFGAIAGFLEGGWEGMIAGWHGYTSHGAHGVAVAADLKSTQEAINKITKNLNSLSELEVKNLQRLSGAMDELHGEILELDEKVDDLRADTISSQIELAVLLSNEGIINSEDEHLLALERKLKKMLGPSAVEIGNGCFETKHKCNQTCLDRIAAGTFDAGEFSLPTFDSLNITAASLNDDGLDNHTILLYYSTAASSLAVTLMIAIFVVYMVSRDNVSCSICL

SEQ ID NO: 27436 - protein, 585 aa, synthetic construct
  REGION 1..585: note = hemagglutinin__InfluenzaB__AGX20800
MKAIIVLLMVVTSNADRICTGITSSNSPHVVKTATQGEVNVTGVIPLTTTPTKSHFANLKGTETRGKLCPKCPNCTDLDVALGRPKCTGKIPSARVSILHEVRPVTSGCFPIMHDRTKIRQLPNLLRGYEHIRLSTHNVINAENAPGGPYKIGTSGSCPNVTNGNGFFATMAWAVPKNDKNKTATNPLTIEVPYICTEGEDQITVWGFHSDNETQMAKLYGDSKPQKFTSSANGVTTHYVSQIGGFPNQTEDGGLPQSGRIVVDYMVQKSGKTGTITYQRGILLPQKVWCASGRSKVIKGSLPLIGEADCLHEKYGGLNKSKPYYTGEHAKAIGNCPIWVKTPLKLANGTKYRPPAKLLKERGFFGAIAGFLEGGWEGMIAGWHGYTSHGAHGVAVAADLKSTQEAINKITKNLNSLSELEVKNLQRLSGAMDELHNEILELDEKVDDLRADTISSQIELAVLLSNEGIINSEDEHLLALERKLKKMLGPSAVEIGNGCFETKHKCNQTCLDRIAAGTFDAGEFSLPTFDSLNITAASLNDDELDNHTILLYYSTAASSLAVTLMIAIFVVYMVSRDNVSCSICL

SEQ ID NO: 27437 - protein, 585 aa, synthetic construct; identical to SEQ ID NO: 26683
  REGION 1..585: note = hemagglutinin__InfluenzaB__AGX20811

SEQ ID NO: 27438 - protein, 585 aa, synthetic construct; identical to SEQ ID NO: 26683
  REGION 1..585: note = hemagglutinin__InfluenzaB__AGX20822

SEQ ID NO: 27439 - protein, 585 aa, synthetic construct; identical to SEQ ID NO: 26683
  REGION 1..585: note = hemagglutinin__InfluenzaB__AGX20833

SEQ ID NO: 27440 - protein, 585 aa, synthetic construct
  REGION 1..585: note = hemagglutinin__InfluenzaB__AGX20844
MKAIIVLLMVVTSNADRICTGITSSNSPHIVKTATQGEVNVTGVIPLTTTPTKSHFANLKGTETRGKLCPKCLNCTDLDVALGRPKCMGKIPSARVSILHEVRPVTSGCFPIMHDRTKIRQLPNLLRGYEHIRLSTHNVINAENAPGGPYKIGTSGSCPNITNGNGFFATMAWAVPKNDKNKTATNPLTIEVPYICTEGEDQITVWGFHSDNETQMAKLYGDSKPQKFTSSANGVTTHYVSQIGGFPNQTEDGGLPQSGRIVVDYMVQKSGKTGTITYQRGILLPQKVWCASGRSKVIKGSLPLIGEADCLHEKYGGLNKSKPYYTGEHAKAIGNCPIWVKTPLKLANGTKYRPPAKLLKERGFFGAIAGFLEGGWEGMIAGWHGYTSHGAHGVAVAADLKSTQEAINKITKNLNSLSELEVKNLQRLSGAMDELHNEILELDEKVDDLRADTISSQIELAVLLSNEGIINSEDEHLLALERKLKKMLGPSAVEIGNGCFETKHKCNQTCLDRIAAGTFDAGEFSLPTFDSLNITAASLNDDGLDNHTILLYYSTAASSLAVTLMIAIFVVYMVSRDNVSCSICL

SEQ ID NO: 27441 - protein, 585 aa, synthetic construct; identical to SEQ ID NO: 26608
  REGION 1..585: note = hemagglutinin__InfluenzaB__AGX20855

SEQ ID NO: 27442 - protein, 585 aa, synthetic construct; identical to SEQ ID NO: 26683
  REGION 1..585: note = hemagglutinin__InfluenzaB__AGX20866

SEQ ID NO: 27443 - protein, 585 aa, synthetic construct; identical to SEQ ID NO: 26683
  REGION 1..585: note = hemagglutinin__InfluenzaB__AGX20877

SEQ ID NO: 27444 - protein, 585 aa, synthetic construct
  REGION 1..585: note = hemagglutinin__InfluenzaB__AGX20888
MKAIIVLLMVVTSNADRICTGITSSNSPHVVKTATQGEVNVTGVIPLTTTPTKSHFANLKGTETRGKLCPKCPNCTDLDVALGRPKCTGKIPSARVSILHEVRPVTSGCFPIMHDRTKIRQLPNLLRGYEHIRLSTHNVINAENAPGGPYKIGTSGSCPNVTNGNGFFATMAWAVPKNDKNKTATNPLTIEVPYICTEGEDQITVWGFHSDSETQMAKLYGDSKPQKFTSSANGVTTHYVSQIGGFPNQTEDGGLPQSGRIVVDYMVQKSGKTGTITYQRGILLPQKVWCASGRSKVIKGSLPLIGEADCLHEKYGGLNKSKPYYTGEHAKAIGNCPIWVKTPLKLANGTKYRPPAKLLKERGFFGAIAGFLEGGWEGMIAGWHGYTSHGAHGVAVAADLKSTQEAINKITKNLNSLSELEVKNLQRLSGAMDELHNEILELDEKVDDLRADTISSQIELAVLLSNEGIINSEDEHLLALERKLKKMLGPSAVEIGNGCFETKHKCNQTCLDRIAAGTFDAGEFSLPTFDSLNITAASLNDDGLDNHTILLYYSTAASSLAVTLMIAIFVVYMVSRDNVSCSICL

SEQ ID NO: 27445 - protein, 585 aa, synthetic construct; identical to SEQ ID NO: 26683
  REGION 1..585: note = hemagglutinin__InfluenzaB__AGX20899

SEQ ID NO: 27446 - protein, 585 aa, synthetic construct; identical to SEQ ID NO: 26683
  REGION 1..585: note = hemagglutinin__InfluenzaB__AGX20910

SEQ ID NO: 27447 - protein, 585 aa, synthetic construct; identical to SEQ ID NO: 26608
  REGION 1..585: note = hemagglutinin__InfluenzaB__AGX20921

SEQ ID NO: 27448 - protein, 585 aa, synthetic construct
  REGION 1..585: note = hemagglutinin__InfluenzaB__AGX20932
MKAIIVLLMVVTSNADRICTGITSSNSPHVVKTATQGEVNVTGVIPLTTTPTKSHFANLKGTETRGKLCPKCPNCTDLDVALGRPKCTGKIPSARVSILHEVRPVTSGCFPIMHDRTKIRQLPNLLRGYEHIRLSTHNVINAENAPGGPYKIGTSGSCPNVTNGNGFFATMAWAVPKNDKNKTATNPLTIEVPYICTEGEDQITVWGFHSDNETQMAKLYGDPKPQKFTSSANGVTTHYVSQIGGFPNQTEDGGLPQSGRIVVDYMVQKSGKTGTITYQRGILLPQKVWCASGRSKVIKGSLPLIGEADCLHEKYGGLNKSKPYYTGEHAKAIGNCPIWVKTPLKLANGTKYRPPAKLLKERGFFGAIAGFLEGGWEGMIAGWHGYTSHGAHGVAVAADLKSTQEAINKITKNLNSLSELEVKNLQRLSGAMDELHNEILELDEKVDDLRADTISSQIELAVLLSNEGIINSEDEHLLALERKLKKMLGPSAVEIGNGCFETKHKCNQTCLDRIAAGTFDAGEFSLPTFDSLNITAASLNDDGLDNHTILLYYSTAASSLAVTLMIAIFVVYMVSRDNVSCSICL

SEQ ID NO: 27449 - protein, 585 aa, synthetic construct; identical to SEQ ID NO: 26608
  REGION 1..585: note = hemagglutinin__InfluenzaB__AGX20943

SEQ ID NO: 27450 - protein, 585 aa, synthetic construct; identical to SEQ ID NO: 26608
  REGION 1..585: note = hemagglutinin__InfluenzaB__AGX20954

SEQ ID NO: 27451 - protein, 585 aa, synthetic construct; identical to SEQ ID NO: 26608
  REGION 1..585: note = hemagglutinin__InfluenzaB__AGX20965

SEQ ID NO: 27452 - protein, 585 aa, synthetic construct
  REGION 1..585: note = hemagglutinin__InfluenzaB__AGX20976
MKAIIVLLMVVTSNADRICTGITSSNSPHVVKTATQGEVNVTGVIPLTTTPTKSHFANLKGTETRGKLCPKCLNCTDLDVALGRPKCTGKIPSARVSILHEVRPVTSGCFPIMHDRTKIRQLPNLLRGYEHIRLSTHNVINAENAPGGPYKIGTSGSCPNVTNGNGFFATMAWAVPKNDKNKTATNPLTIEVPYICTEGEDQITVWGFHSDNETQMAKLYGDSKPQKFTSSANGVTTHYVSQIGGFPNQTEDGGLPQSGRIVVDYMVQKSGKTGTITYQRGILLPQKVWCASGRSKVIKGSLPLIGEADCLHEKYGGLNKSKPYYTGEHAKAIGNCPIWVKTPLKLANGTKYRPPAKLLKERGFFGAIAGFLEGGWEGMIAGWHGYTSHGAHGVAVAADLKSTQEAINKITKNLNSLSELEVKNLQRLSGAMDELHGEILELDEKVDDLRADTISSQIELAVLLSNEGIINSEDEHLLALERKLKKMLGPSAVEIGNGCFETKHKCNQTCLDRIAAGTFDAGEFSLPTFDSLNITAASLNDDGLDNHTILLYYSTAASSLAVTLMIAIFVVYMVSRDNVSCSICL

SEQ ID NO: 27453 - protein, 585 aa, synthetic construct; identical to SEQ ID NO: 26608
  REGION 1..585: note = hemagglutinin__InfluenzaB__AGX20987

SEQ ID NO: 27454 - protein, 585 aa, synthetic construct; identical to SEQ ID NO: 26683
  REGION 1..585: note = hemagglutinin__InfluenzaB__AGX20998

SEQ ID NO: 27455 - protein, 585 aa, synthetic construct
  REGION 1..585: note = hemagglutinin__InfluenzaB__AGX21009
MKAIIVLLMVVTSNADRICTGITSSNSPHVVKTATQGEVNVTGVIPLTTTPTKSHFANLKGTETRGKLCPKCPNCTDLDVALGRPKCTGKIPSARVSILHEVRPVTSGCFPIMHDRTKIRQLPNLLRGYEHIRLSTHNVINAENAPGGPYKIGTSGSCPNVTNGNGFFATMAWAVPKNDKNKTATNPLTIEVPYICTEGEDQITVWGFHSDNETQMAKLYGDSKPQKFTSSANGVTTHYVSQIGGFPNQTEDGGLPQSGRIVVDYMVQKSGKTGTITYQRGILLPQKVWCASGRSKVIKGSLPLIGEADCLHEKYGGLNKSKPYYTGEHAKAIGNCPIWVKTPLKLANGTKYRPPAKLLKERGFFGAIAGFLEGGWEGMIAGWHGYTSHGAHGVAVAADLKSTQEAINKITKNLNSLSELEVKNLQRLSGAMDELHNEILELDEKVDDLRADTISSQIELAVLLSNEGIINSEDEHLLALERKLKKMLGPSAVEIGNGCFETKHKCNQTCLDRIAAGTFDAGEFSLPTFDSLNITAASLNDDGLDNHTILLYYSTAASSLAVTLMIAIFVVYMISRDNVSCSICL

SEQ ID NO: 27456 - protein, 585 aa, synthetic construct
  REGION 1..585: note = hemagglutinin__InfluenzaB__AGX21020
MKAIIVLLMVVTSNADRICTGITSSNSPHVVKTATQGEVNVTGVIPLTTTPTKSHFANLKGTETRGKLCPKCLNCTDLDVALGRPKCTGKIPSARVSILHEVRPVTSGCFPIMHDRTKIRQLPNLLRGYEHIRLSTHNVINAENAPGGPYKIGTSGSCPNVTNGNGFFATMAWAVPKNDKNKTATNPLTIEVPYICTEGEDQITVWGFHSDNETQMAKLYGDSEPQKFTSSANGVTTHYVSQIGGFPNQTEDGGLPQSGRIVVDYMVQKSGKTGTITYQRGILLPQKVWCASGRSKVIKGSLPLIGEADCLHEKYGGLNKSKPYYTGEHAKAIGNCPIWVKTPLKLANGTKYRPPAKLLKERGFFGAIAGFLEGGWEGMIAGWHGYTSHGAHGVAVAADLKSTQEAINKITKNLNSLSELEVKNLQRLSGAMDELHNEILELDEKVDDLRADTISSQIELAVLLSNEGIINSEDEHLLALERKLKKMLGPSAVEIGNGCFETKHKCNQTCLDRIAAGTFDAGEFSLPTFDSLNITAASLNDDGLDNHTILLYYSTAASSLAVTLMIAIFVVYMVSRDNVSCSICL

SEQ ID NO: 27457 - protein, 585 aa, synthetic construct; identical to SEQ ID NO: 26683
  REGION 1..585: note = hemagglutinin__InfluenzaB__AGX21031

SEQ ID NO: 27458 - protein, 585 aa, synthetic construct
  REGION 1..585: note = hemagglutinin__InfluenzaB__AGX21042
MKAIIVLLMVVTSNADRICTGITSSNSPHVVKTATQGEVNVTGVIPLTTTPTKSHFANLKGTETRGKLCPKCLNCTDLDVALGRPKCTGKIPSARVSILHEVRPVTSGCFPIMHDRTKIRQLPNLLRGYEHIRLSTHNVINTENAPGGPYKIGTSGSCPNVTNGNGFFATMAWAVPKNDKNKTATNPLTIEVPYICTEGEDQITVWGFHSDNETQMAKLYGDSKPQKFTSSANGVTTHYVSQIGGFPNQTEDGGLPQSGRIVVDYMVQKSGKTGTITYQRGILLPQKVWCASGRSKVIKGSLPLIGEADCLHEKYGGLNKSKPYYTGEHAKAIGNCPIWVKTPLKLANGTKYRPPAKLLKERGFFGAIAGFLEGGWEGMIAGWHGYTSHGAHGVAVAADLKSTQEAINKITKNLNSLSELEVKNLQRLSGAMDELHNEILELDEKVDDLRADTISSQIELAVLLSNEGIINSEDEHLLALERKLKKMLGPSAVEIGNGCFETKHKCNQTCLDRIAAGTFDAGEFSLPTFDSLNITAASLNDDGLDNHTILLYYSTAASSLAVTLMIAIFVVYMVSRDNVSCSICL

SEQ ID NO: 27459 - protein, 585 aa, synthetic construct; identical to SEQ ID NO: 26645
  REGION 1..585: note = hemagglutinin__InfluenzaB__AGX21053

SEQ ID NO: 27460 - protein, 585 aa, synthetic construct; identical to SEQ ID NO: 26608
  REGION 1..585: note = hemagglutinin__InfluenzaB__AGX21064

SEQ ID NO: 27461 - protein, 585 aa, synthetic construct; identical to SEQ ID NO: 26645
  REGION 1..585: note = hemagglutinin__InfluenzaB__AGX21075

SEQ ID NO: 27462 - protein, 585 aa, synthetic construct; identical to SEQ ID NO: 26645
  REGION 1..585: note = hemagglutinin__InfluenzaB__AGX21084

SEQ ID NO: 27463 - protein, 585 aa, synthetic construct; identical to SEQ ID NO: 26645
  REGION 1..585: note = hemagglutinin__InfluenzaB__AGX21095

SEQ ID NO: 27464 - protein, 585 aa, synthetic construct
  REGION 1..585: note = hemagglutinin__InfluenzaB__AGX21106
MKAIIVLLMVVTSNADRICTGITSSNSPHVVKTATQGEVNVTGVIPLTTTPTKSHFANLKGTETRGKLCPKCPNCTDLDVALGRPKCTGKIPSARVSILHEVRPVTSGCFPIMHDRTKIRQLPNLLRGYEHIRLSTHNVINAENAPGGPYKIGTSGSCPNVTNGNGFFATMAWAVPKNDKNKTATNPLTIEVPYICTEGEDQITVWGFHSDNEAQMAKLYGDSKPQKFTSSANGVTTHYVSQIGGFPNQTEDGGLPQSGRIVVDYMVQKSGKTGTITYQRGILLPQKVWCASGRSKVIKGSLPLIGEADCLHEKYGGLNKSKPYYTGEHAKAIGNCPIWVKTPLKLANGTKYRPPAKLLKERGFFGAIAGFLEGGWEGMIAGWHGYTSHGAHGVAVAADLKSTQEAINKITKNLNSLSELEVKNLQRLSGAMDELHNEILELDEKVDDLRADTISSQIELAVLLSNEGIINSEDEHLLALERKLKKMLGPSAVEIGNGCFETKHKCNQTCLDRIAAGTFDAGEFSLPTFDSLNITAASLNDDGLDNHTILLYYSTAASSLAVTLMIAIFVVYMVSRDNVSCSICL

SEQ ID NO: 27465 - protein, 585 aa, synthetic construct; identical to SEQ ID NO: 26608
  REGION 1..585: note = hemagglutinin__InfluenzaB__AGX21117

SEQ ID NO: 27466 - protein, 585 aa, synthetic construct; identical to SEQ ID NO: 27458
  REGION 1..585: note = hemagglutinin__InfluenzaB__AGX21128

SEQ ID NO: 27467 - protein, 585 aa, synthetic construct
  REGION 1..585: note = hemagglutinin__InfluenzaB__AGX21139
MKAIIVLLMVVTSNADRICTGITSSNSPHVVKTATQGEVNVTGVIPLTTTPTKSHFANLKGTETRGKLCPKCPNCTDLDVALGRPKCTGKIPSARVSILHEVRPVTSGCFPIMHDRTKIRQLPNLLRGYEHIRLSTHNVINAENAPGGPYKIGTSGSCPNVTNGNGFFATMAWAVPKNDKNKTATNPLTIEVPYICTEGEDQITVWGFHSDNETQMAKLYGDSKPQKFTSSANGVTTHYVSQIGDFPNQTEDGGLPQSGRIVVDYMVQKSGKTGTITYQRGILLPQKVWCASGRSKVIKGSLPLIGEADCLHEKYGGLNKSKPYYTGEHAKAIGNCPIWVKTPLKLANGTKYRPPAKLLKERGFFGAIAGFLEGGWEGMIAGWHGYTSHGAHGVAVAADLKSTQEAINKITKNLNSLSELEVKNLQRLSGAMDELHNEILELDEKVDDLRADTISSQIELAVLLSNEGIINSEDEHLLALERKLKKMLGPSAVEIGNGCFETKHKCNQTCLDRIAAGTFDAGEFSLPTFDSLNITAASLNDDGLDNHTILLYYSTAASSLAVTLMIAIFVVYMVSRDNVSCSICL

SEQ ID NO: 27468 - protein, 585 aa, synthetic construct; identical to SEQ ID NO: 26683
  REGION 1..585: note = hemagglutinin__InfluenzaB__AGX21150

SEQ ID NO: 27469 - protein, 585 aa, synthetic construct; identical to SEQ ID NO: 26608
  REGION 1..585: note = hemagglutinin__InfluenzaB__AGX21161

SEQ ID NO: 27470 - protein, 585 aa, synthetic construct; identical to SEQ ID NO: 26683
  REGION 1..585: note = hemagglutinin__InfluenzaB__AGX21172

SEQ ID NO: 27471 - protein, 585 aa, synthetic construct; identical to SEQ ID NO: 26645
  REGION 1..585: note = hemagglutinin__InfluenzaB__AGX21183

SEQ ID NO: 27472 - protein, 585 aa, synthetic construct; identical to SEQ ID NO: 26683
  REGION 1..585: note = hemagglutinin__InfluenzaB__AGX21194

SEQ ID NO: 27473 - protein, 585 aa, synthetic construct
  REGION 1..585: note = hemagglutinin__InfluenzaB__AGX21205
MKAIIVLLMVVTSNADRICTGITSSNSPHIVKTATQGEVNVTGVIPLTTTPTKSHFANLKGTETRGKLCPKCLNCTDLDVALGRPKCTGKIPSARVSILHEVRPVTSGCFPIMHDRTKIRQLPNLLRGYEHIRLSTHNVINAKNAPGGPYKIGTSGSCPNITNGNGFFATMAWAVPKNDKNKTATNPLTIEVPYICTEGEDQITVWGFHSDNETQMAKLYGDSKPQKFTSSANGVTTHYVSQIGGFPNQTEDGGLPQSGRIVVDYMVQKSGKTGTITYQRGILLPQKVWCASGRSKVIKGSLPLIGEADCLHEKYGGLNKSKPYYTGEHAKAIGNCPIWVKTPLKLANGTKYRPPAKLLKERGFFGAIAGFLEGGWEGMIAGWHGYTSHGAHGVAVAADLKSTQEAINKITKNLNSLSELEVKNLQRLSGAMDELHNEILELDEKVDDLRADTISSQIELAVLLSNEGIINSEDEHLLALERKLKKMLGPSAVEIGNGCFETKHKCNQTCLDRIAAGTFDAGEFSLPTFDSLNITAASLNDDGLDNHTILLYYSTAASSLAVTLMIAIFVVYMVSRDNVSCSICL

SEQ ID NO: 27474 - protein, 585 aa, synthetic construct; identical to SEQ ID NO: 26645
  REGION 1..585: note = hemagglutinin__InfluenzaB__AGX21216

SEQ ID NO: 27475 - protein, 585 aa, synthetic construct; identical to SEQ ID NO: 26608
  REGION 1..585: note = hemagglutinin__InfluenzaB__AGX21227

SEQ ID NO: 27476 - protein, 585 aa, synthetic construct
  REGION 1..585: note = hemagglutinin__InfluenzaB__AGX21238
MKAIIVLLMVVTSNADRICTGITSSNSPHVVKTATQGEVNVTGVIPLTTTPTKSHFANLKGTETRGKLCPKCLNCTDLDVALGRPKCTGKIPSARVSILHEVRPVTSGCFPIMHDRTKIRQLPNLLRGYEHIRLSTHNVINAENAPGGPYKIGTSGSCPNVTNGNGFFATMAWAVPKNDKNKTATNPLTIEVPYICTEGEDQITVWGFHSDNETQMAKLYGDSKPQKFTSSANGVTTHYVSQIGGFPNQTEDGGLPQSGRIVVDYMVQKSGKTGTITYQRGILLPQKVWCANGRSKVIKGSLPLIGEADCLHEKYGGLNKSKPYYTGEHAKAIGNCPIWVKTPLKLANGTKYRPPAKLLKERGFFGAIAGFLEGGWEGMIAGWHGYTSHGAHGVAVAADLKSTQEAINKITKNLNSLSELEVKNLQRLSGAMDELHNEILELDEKVDDLRADTISSQIELAVLLSNEGIINSEDEHLLALERKLKKMLGPSAVEIGNGCFETKHKCNQTCLDRIAAGTFDAGEFSLPTFDSLNITAASLNDDGLDNHTILLYYSTAASSLAVTLMIAIFVVYMISRDNVSCSICL

SEQ ID NO: 27477 - protein, 585 aa, synthetic construct; identical to SEQ ID NO: 26683
  REGION 1..585: note = hemagglutinin__InfluenzaB__AGX21249

SEQ ID NO: 27478 - protein, 585 aa, synthetic construct
  REGION 1..585: note = hemagglutinin__InfluenzaB__AGX21260
MKAIIVLLMVVTSNADRICTGITSSNSPHVVKTATQGEVNVTGVIPLTTTPTKSHFANLKGTETRGKLCPKCLNCTDLDVALGRPKCTGKIPSARVSILHEVRPVTSGCFPIMHDRTKIRQLPNLLRGYEHIRLSTHNVINAENAPGGPYKIGTSGSCPNVTNGNGFFATMAWAVPKNDKNKTATNPLTIEVPYICTEGEDQITVWGFHSDNETQMAKLYGDSKPQKFTSSANGVTTHYVSQIGGFPNQTEDGGLPQSGRIVVDYMVQKSGKTGTITYQRGILLPQRVWCASGRSKVIKGSLPLIGEADCLHEKYGGLNKSKPYYTGEHAKAIGNCPIWVKTPLKLANGTKYRPPAKLLKERGFFGAIAGFLEGGWEGMIAGWHGYTSHGAHGVAVAADLKSTQEAINKITKNLNSLSELEVKNLQRLSGAMDELHNEILELDEKVDDLRADTISSQIELAVLLSNEGIINSEDEHLLALERKLKKMLGPSAVEIGNGCFETKHKCNQTCLDRIAAGTFDAGEFSLPTFDSLNITAASLNDDGLDNHTILLYYSTAASSLAVTLMIAIFVVYMVSRDNVSCSICL

SEQ ID NO: 27479 - protein, 585 aa, synthetic construct; identical to SEQ ID NO: 26608
  REGION 1..585: note = hemagglutinin__InfluenzaB__AGX21271

SEQ ID NO: 27480 - protein, 585 aa, synthetic construct
  REGION 1..585: note = hemagglutinin__InfluenzaB__AGX21282
MKAIIVLLMVVTSNADRICTGITSSNSPHIVKTATQGEVNVTGVIPLTTSPTKSHFANLKGTETRGKLCPKCLNCTDLDVALGRPKCTGKIPSARVSILHEVRPVTSGCFPIMHDRTKIRQLPNLLRGYEHIRLSTHNVINAKNAPGGPYKIGTSGSCPNITNGNGFFATMAWAVPKNDKNKTATNPLTIEVPYICTEGEDQITVWGFHSDNETQMAKLYGDSKPQKFTSSANGVTTHYVSQIGGFPNQTEDGGLPQSGRIVVDYMVQKSGKTGTITYQRGILLPQKVWCASGRSKVIKGSLPLIGEADCLHEKYGGLNKSKPYYTGEHAKAIGNCPIWVKTPLKLANGTKYRPPAKLLKERGFFGAIAGFLEGGWEGMIAGWHGYTSHGAHGVAVAADLKSTQEAINKITKNLNSLSELEVKNLQRLSGAMDELHNEILELDEKVDDLRADTISSQIELAVLLSNEGIINSEDEHLLALERKLKKMLGPSAVEIGNGCFETKHKCNQTCLDRIAAGTFDAGEFSLPTFDSLNITAASLNDDGLDNHTILLYYSTAASSLAVTLMIAIFVVYMVSRDNVSCSICL

SEQ ID NO: 27481 - protein, 585 aa, synthetic construct; identical to SEQ ID NO: 26645
  REGION 1..585: note = hemagglutinin__InfluenzaB__AGX21293

SEQ ID NO: 27482 - protein, 585 aa, synthetic construct; identical to SEQ ID NO: 26683
  REGION 1..585: note = hemagglutinin__InfluenzaB__AGX21304

SEQ ID NO: 27483 - protein, 585 aa, synthetic construct; identical to SEQ ID NO: 26645
  REGION 1..585: note = hemagglutinin__InfluenzaB__AGX21315

SEQ ID NO: 27484 - protein, 585 aa, synthetic construct; identical to SEQ ID NO: 26608
  REGION 1..585: note = hemagglutinin__InfluenzaB__AGX21326

SEQ ID NO: 27485 - protein, 585 aa, synthetic construct
  REGION 1..585: note = hemagglutinin__InfluenzaB__AGX21337
MKAIIVLLMVVTSNADRICTGITSSNSPHVVKTATQGEVNVTGVIPLTTTPTKSHFANLKGTETRGKLCPKCPNCTDLDVALGRPKCTGKIPSARVSILHEVRPVTSGCFPIMHDRTKIRQLPNLLRGYEHIRLSTHNVINAENAPGGPYKIGTSGSCPNVTNGNGFFATMAWAVPKNDKNKTATNPLTIEVPYICTEGEDQITVWGFHSDKETQMAKLYGDSKPQKFTSSANGVTTHYVSQIGGFPNQTEDGGLPQSGRIVVDYMVQKSGKTGTITYQRGILLPQKVWCASGRSKVIKGSLPLIGEADCLHEKYGGLNKSKPYYTGEHAKAIGNCPIWVKTPLKLANGTKYRPPAKLLKERGFFGAIAGFLEGGWEGMIAGWHGYTSHGAHGVAVAADLKSTQEAINKITKNLNSLSELEVKNLQRLSGAMDELHNEILELDEKVDDLRADTISSQIELAVLLSNEGIINSEDEHLLALERKLKKMLGPSAVEIGNGCFETKHKCNQTCLDRIAAGTFDAGEFSLPTFDSLNITAASLNDDGLDNHTILLYYSTAASSLAVTLMIAIFVVYMVSRDNVSCSICL

SEQ ID NO: 27486 - protein, 585 aa, synthetic construct; identical to SEQ ID NO: 26645
  REGION 1..585: note = hemagglutinin__InfluenzaB__AGX21348

SEQ ID NO: 27487 - protein, 585 aa, synthetic construct; identical to SEQ ID NO: 26645
  REGION 1..585: note = hemagglutinin__InfluenzaB__AGX21359

SEQ ID NO: 27488 - protein, 585 aa, synthetic construct
  REGION 1..585: note = hemagglutinin__InfluenzaB__AGX21370
MKAIIVLLMVVTSNADRICTGITSSNSPHVVKTATQGEVNVTGVIPLTTTPTKSHFANLKGTETRGKLCPKCPNCTDLDVALGRPKCMGKIPSARVSILHEVRPVTSGCFPIMHDRTKIRQLPNLLRGYEHIRLSTHNVINAENAPGGPYKIGTSGSCPNVTNGNGFFATMAWAVPKNDKNKTATNPLTIEVPYICTEGEDQITVWGFHSDNETQMAKLYGDSKPQKFTSSANGVTTHYVSQIGGFPNQTEDGGLPQSGRIVVDYMVQKSGKTGTITYQRGILLPQKVWCASGRSKVIKGSLPLIGEADCLHEKYGGLNKSKPYYTGEHAKAIGNCPIWVKTPLKLANGTKYRPPAKLLKERGFFGAIAGFLEGGWEGMIAGWHGYTSHGAHGVAVAADLKSTQEAINKITKNLNSLSELEVKNLQRLSGAMDELHNEILELDEKVDDLRADTISSQIELAVLLSNEGIINSEDEHLLALERKLKKMLGPSAVEIGNGCFETKHKCNQTCLDRIAAGTFDAGEFSLPTFDSLNITAASLNDDGLDNHTILLYYSTAASSLAVTLMIAIFVVYMVSRDNVSCSICL

SEQ ID NO: 27489 - protein, 585 aa, synthetic construct
  REGION 1..585: note = hemagglutinin__InfluenzaB__AGX21381
MKAIIVLLMVVTSNADRICTGITSSNSPHIVKTATQGEVNVTGVIPLTTTPTKSHFANLKGTETRGKLCPKCLNCTDLDVALGRPKCTGKIPSARVSILHEVRPVTSGCFPIMHDRTKIRQLPNLLRGYEHIRLSTHNVINAENAPGGPYKIGTSGSCPNITNGNGFFATMAWAVPKNDKNKTATNPLTIEVPYICTEGEDQITVWGFHSDNETQMAKLYGDSKPQKFTSSANGVTTHYISQIGGFPNQTEDGGLPQSGRIVVDYMVQKSGKTGTITYQRGILLPQKVWCASGRSKVIKGSLPLIGEADCLHEKYGGLNKSKPYYTGEHAKAIGNCPIWVKTPLKLANGTKYRPPAKLLKERGFFGAIAGFLEGGWEGMIAGWHGYTSHGAHGVAVAADLKSTQEAINKITKNLNSLSELEVKNLQRLSGAMDELHNEILELDEKVDDLRADTISSQIELAVLLSNEGIINSEDEHLLALERKLKKMLGPSAVEIGNGCFETKHKCNQTCLDRIAAGTFDAGEFSLPTFDSLNITAASLNDDGLDNHTILLYYSTAASSLAVTLMIAIFVVYMVSRDNVSCSICL

SEQ ID NO: 27490 - protein, 585 aa, synthetic construct
  REGION 1..585: note = hemagglutinin__InfluenzaB__AGX21392
MKAIIVLLMVVTSNADRICTGITSSNSPHIVKTATQGEVNVTGVIPLTTTPTKSHFANLKGTETRGKLCPKCLNCTDLDVALGRPKCTGKIPSARVSILHEVRPVTSGCFPIMHDRTKIRQLPNLLRGYEHIRLSTHNVINAENAPGGPYKIGTSGSCPNITNGNGFFATMAWAVPKNDKNKTATNPLTIEVPYICTEGEDQITVWGFHSDNEAQMAKLYGDSKPQKFTSSANGVTTHYVSQIGGFPNQTEDGGLPQSGRIVVDYMVQKSGKTGTITYQRGILLPQKVWCASGRSKVIKGSLPLIGEADCLHEKYGGLNKSKPYYTGEHAKAIGNCPIWVKTPLKLANGTKYRPPAKLLKERGFFGAIAGFLEGGWEGMIAGWHGYTSHGAHGVAVAADLKSTQEAINKITKNLNSLSELEVKNLQRLSGAMDELHNEILELDEKVDDLRADTISSQIELAVLLSNEGIINSEDEHLLALERKLKKMLGPSAVEIGNGCFETKHKCNQTCLDRIAAGTFDAGEFSLPTFDSLNITAASLNDDGLDNHTILLYYSTAASSLAVTLMIAIFVVYMVSRDNVSCSICL

SEQ ID NO: 27491 - protein, 585 aa, synthetic construct
  REGION 1..585: note = hemagglutinin__InfluenzaB__AGX21403
MKAIIVLLMVVTSNADRICTGITSSNSPHVVKTATQGEVNVTGVIPLTTTPTKSHFANLKGTETRGKLCPKCPNCTDLDVALGRPKCTGKIPSARVSILHEVRPVTSGCFPIMHDRTKIRQLPNLLRGYEHIRLSTHNVINAENAPGGPYKIGTSGSCPNVTNGNGFFATMAWAVPKNDKNKTATNPLTIEVPYICTEGEDQITVWGFHSDNETQMAKLYGDSKPQKFTSSANGVTTHYVSQIGGFPNQTEDGGLPQSGRIVVDYMVQKSGKTGTITYQRGILLPQKVWCASGRSKVIKGSLPLIGEADCLHEKYGGLNKSKPYYTGEHAKAIGNCPIWVKTPLKLANGTKYRPPAKLLKERGFFGAIAGFLEGGWEGMIAGWHGYTSHGAHGVAVAADLKSTQEAINKITKNLNSLSELEVKNLQRLSGAMDELHNEILELDEKVDDLRADTISSQIELAVLLSNEGIINSEDEHLLALERKLKKMLGPSAVEIGNGCFETKHKCNQTCLNRIAAGTFDAGEFSLPTFDSLNITAASLNDDGLDNHTILLYYSTAASSLAVTLMIAIFVVYMVSRDNVSCSICL

SEQ ID NO: 27492 - protein, 585 aa, synthetic construct
  REGION 1..585: note = hemagglutinin__InfluenzaB__AGX21414
MKAIIVLLMVVTSNADRICTGITSSNSPHVVKTATQGEVNVTGVIPLTTTPTKSHFANLKGTETRGKLCPKCPNCTDLDVALGRPKCTGKIPSARVSILHEVRPVTSGCFPIMHDRTKIRQLPNLLRGYEHIRLSTHNVINAENAPGGPYKIGTSGSCPNVTNGNGFFATMAWAVPKNDKNKTATDPLTIEVPYICTEGEDQITVWGFHSDNETQMAKLYGDSKPQKFTSSSNGVTTHYVSQIGGFPNQTEDGGLPQSGRIVVDYMVQKSGKTGTITYQRGILLPQKVWCASGRSKVIKGSLPLIGEADCLHEKYGGLNKSKPYYTGEHAKAIGNCPIWVKTPLKLANGTKYRPPAKLLKERGFFGAIAGFLEGGWEGMIAGWHGYTSHGAHGVAVAADLKSTQEAINKITKNLNSLSELEVKNLQRLSGAMDELHNEILELDEKVDDLRADTISSQIELAVLLSNEGIINSEDEHLLALERKLKKMLGPSAVEIGNGCFETKHKCNQTCLDRIAAGTFDAGEFSLPTFDSLNITAASLNDDGLDNHTILLYYSTAASSLAVTLMIAIFVVYMVSRDNVSCSICL

SEQ ID NO: 27493 - protein, 585 aa, synthetic construct; identical to SEQ ID NO: 26608
  REGION 1..585: note = hemagglutinin__InfluenzaB__AGX21425

SEQ ID NO: 27494 - protein, 585 aa, synthetic construct
  REGION 1..585: note = hemagglutinin__InfluenzaB__AGX21436
MKAIIVLLMVVTSNADRICTGITSSNSPHIVKTATQGEVNVTGVIPLTTTPTKSHFANLKGTETRGKLCPKCLNCTDLDVALGRPKCTGKIPSARVSILHEVRPVTSGCFPIMHDRTKIRQLPNLLRGYEHIRLSTHNVINAENAPGGPYKIGTSGSCPNITNGNGFFATMAWAVPKNDKNKTATNPLTIEVPYICTEGEDQITVWGFHSDNETQMAKLYGDSKPQKFTSSANGVTTHYVSQIGGFPNQTEDGGLPQSGRIVVDYMVQKSGKTGTITYQRGILLPQKVWCASGRSKVIKGSLPLIGEADCLHEKYGGLNKSKPYYTGEHAKAIGNCPIWVKTPLKLANGTKYRPPAKLLKERGFFGAIAGFLEGGWEGMIAGWHGYTSHGAHGVAVAADLKSTQEAINKITKNLNSLSELEVKNLQRLSGAMDELHNEILELDEKVDDLRADTISSQIELAVLLSNEGIINSEDEHLLALERKLKKMLGPSAVEIGNGCFETKHKCNQTCLDRIAAGTFDAGEFSLPTFDSLNITAASLNDDGLDNHTILLYYSTVASSLAVTLMIAIFVVYMVSRDNVSCSICL

SEQ ID NO: 27495 - protein, 585 aa, synthetic construct; identical to SEQ ID NO: 26683
  REGION 1..585: note = hemagglutinin__InfluenzaB__AGX21447

SEQ ID NO: 27496 - protein, 585 aa, synthetic construct; identical to SEQ ID NO: 26608
  REGION 1..585: note = hemagglutinin__InfluenzaB__AGX21458

SEQ ID NO: 27497 - protein, 585 aa, synthetic construct; identical to SEQ ID NO: 26608
  REGION 1..585: note = hemagglutinin__InfluenzaB__AGX21469

SEQ ID NO: 27498 - protein, 585 aa, synthetic construct
  REGION 1..585: note = hemagglutinin__InfluenzaB__AGX21480
MKAIIVLLMVVTSNADRICTGITSSNSPHVVKTATQGEVNVTGVIPLTTTPTKSHFANLKGTETRGKLCPKCLNCTDLDVALGRPKCTGKIPSARVSILHEVRPVTSGCFPIMHDRTKIRQLPNLLRGYEHIRLSTHNVINAENAPGGPYKIGTSGSCPNVTNGNGFFATMAWAVPKNDKNKTATNPLTIEVPYICTEGEDQITVWGFHSDNETQMAKLYGDSKPQKFTSSANGVTTHYVSQIGGFPNQTEDGGLPQSGRIVVDYMVQKSGKTGTITYQRGILLPQKVWCASGRSKVIKGSLPLIGEADCLHEKYGGLNKSKPYYTGEHAKAIGNCPIWVKTPLKLANGTKYRPPAKLLKERGFFGAIAGFLEGGWEGMIAGWHGYTSHGAHGVAVAADLKSTQEAINKITKNLNSLSELEVKNLQRLSGAMDELHNEILELDEKVDDLRADTISSQIELAVLLSNEGIINSEDEHLLALERKLKKMLGPSAVEIGNGCFETKHKCNQTCLDRIAAGTFDAGEFSLPTFDSLNITAASLNEDGLDNHTILLYYSTAASSLAVTLMIAIFVVYMVSRDNVSCSICL

SEQ ID NO: 27499 - protein, 585 aa, synthetic construct; identical to SEQ ID NO: 26683
  REGION 1..585: note = hemagglutinin__InfluenzaB__AGX21491

SEQ ID NO: 27500 - protein, 585 aa, synthetic construct; identical to SEQ ID NO: 26683
  REGION 1..585: note = hemagglutinin__InfluenzaB__AGX21502

SEQ ID NO: 27501 - protein, 585 aa, synthetic construct; identical to SEQ ID NO: 26608
  REGION 1..585: note = hemagglutinin__InfluenzaB__AGX21513

SEQ ID NO: 27502 - protein, 585 aa, synthetic construct; identical to SEQ ID NO: 26645
  REGION 1..585: note = hemagglutinin__InfluenzaB__AGX21524

SEQ ID NO: 27503 - protein, 585 aa, synthetic construct
  REGION 1..585: note = hemagglutinin__InfluenzaB__AGX21535
MKAIIVLLMVVTSNADRICTGITSSNSPHIVKTATQGEVNVTGVIPLTTTPTKSHFANLKGTETRGKLCPKCLNCTDLDVALGRPKCTGKIPSARVSILHEVRPVTSGCFPIMHDRTKIRQLPNLLRGYEHIRLSTHNVINAENAPGGPYKIGTSGSCPNITNGNGFFATMAWAVPKNDKNKTATNPLTIEVPYICTEGEDQITVWGFHSDSETQMAKLYGDSKPQKFTSSANGVTTHYVSQIGGFPNQTEDGGLPQSGRIVVDYMVQKSGKTGTITYQRGILLPQKVWCASGRSKVIKGSLPLIGEADCLHEKYGGLNKSKPYYTGEHAKAIGNCPIWVKTPLKLANGTKYRPPAKLLKERGFFGAIAGFLEGGWEGMIAGWHGYTSHGAHGVAVAADLKSTQEAINKITKNLNSLSELEVKNLQRLSGAMDELHNEILELDEKVDDLRADTISSQIELAVLLSNEGIINSEDEHLLALERKLKKMLGPSAVEIGNGCFETKHKCNQTCLDRIAAGTFDAGEFSLPTFDSLNITAASLNDDGLDNHTILLYYSTAASSLAVTLMIAIFVVYMVSRDNVSCSICL

SEQ ID NO: 27504 - protein, 585 aa, synthetic construct; identical to SEQ ID NO: 26645
  REGION 1..585: note = hemagglutinin__InfluenzaB__AGX21546

SEQ ID NO: 27505 - protein, 585 aa, synthetic construct
  REGION 1..585: note = hemagglutinin__InfluenzaB__AGX21557
MKAIIVLLMVVTSNADRICTGITSSNSPHVVKTATQGEVNVTGVITLTTTPTKSHFANLKGTETRGKLCPKCLNCTDLDVALGRPKCTGKIPSARVSILHEVRPVTSGCFPIMHDRTKIRQLPNLLRGYEHIRLSTHNVINAENAPGGPYKIGTSGSCPNVTNGNGFFATMAWAVPKNDKNKTATNPLTIEVPYICTEGEDQITVWGFHSDNETQMAKLYGDSKPQKFTSSANGVTTHYVSQIGGFPNQTEDGGLPQSGRIVVDYMVQKSGKTGTITYQRGILLPQKVWCASGRSKVIKGSLPLIGEADCLHEKYGGLNKSKPYYTGEHAKAIGNCPIWVKTPLKLANGTKYRPPAKLLKERGFFGAIAGFLEGGWEGMIAGWHGYTSHGAHGVAVAADLKSTQEAINKITKNLNSLSELEVKNLQRLSGAMDELHNEILELDEKVDDLRADTISSQIELAVLLSNEGIINSEDEHLLALERKLKKMLGPSAVEIGNGCFETKHKCNQTCLDRIAAGTFDAGEFSLPTFDSLNITAASLNDDGLDNHTILLYYSTAASSLAVTLMIAIFVVYMVSRDNVSCSICL

SEQ ID NO: 27506 - protein, 585 aa, synthetic construct
  REGION 1..585: note = hemagglutinin__InfluenzaB__AGX21568
MKAIIVLLMVVTSNADRICTGITSSNSPHVVKTATQGEVNVTGVIPLTTTPTKSHFANLKGTETRGKLCPKCLNCTDLDVALGRPKCTGKIPSARVSILHEVRPVTSGCFPMMHDRTKIRQLPNLLRGYEHIRLSTHNVINAENAPGGPYKIGTSGSCPNVTNGNGFFATMAWAVPKNDKNKTATNPLTIEVPYICTEGEDQITVWGFHSDNETQMAKLYGDSKPQKFTSSANGVTTHYVSQIGGFPNQTEDGGLPQSGRIVVDYMVQKSGKTGTITYQRGILLPQKVWCASGRSKVIKGSLPLIGEADCLHEKYGGLNKSKPYYTGEHAKAIGNCPIWVKTPLKLANGTKYRPPAKLLKERGFFGAIAGFLEGGWEGMIAGWHGYTSHGAHGVAVAADLKSTQEAINKITKNLNSLSELEVKNLQRLSGAMDELHNEILELDEKVDDLRADTISSQIELAVLLSNEGIINSEDEHLLALERKLKKMLGPSAVEIGNGCFETKHKCNQTCLDRIAAGTFDAGEFSLPTFDSLNITAASLNDDGLDNHTILLYYSTAASSLAVTLMIAIFVVYMVSRDNVSCSICL

SEQ ID NO: 27507 - protein, 585 aa, synthetic construct; identical to SEQ ID NO: 26608
  REGION 1..585: note = hemagglutinin__InfluenzaB__AGX21579

SEQ ID NO: 27508 - protein, 585 aa, synthetic construct; identical to SEQ ID NO: 26645
  REGION 1..585: note = hemagglutinin__InfluenzaB__AGX21590

SEQ ID NO: 27509 - protein, 585 aa, synthetic construct; identical to SEQ ID NO: 27458
  REGION 1..585: note = hemagglutinin__InfluenzaB__AGX21601

SEQ ID NO: 27510 - protein, 585 aa, synthetic construct; identical to SEQ ID NO: 26645
  REGION 1..585: note = hemagglutinin__InfluenzaB__AGX21611

SEQ ID NO: 27511 - protein, 585 aa, synthetic construct; identical to SEQ ID NO: 26989
  REGION 1..585: note = hemagglutinin__InfluenzaB__AGX21622

SEQ ID NO: 27512 - protein, 585 aa, synthetic construct
  REGION 1..585: note = hemagglutinin__InfluenzaB__AGX21633
MKAIIVLLMVVTSNADRICTGITSSNSPHIVKTATQGEVNVTGVIPLTTTPTKSHFANLKGTETRGKLCPKCLNCTDLDVALGRPKCTGKIPSARVSILHEVRPVTSGCFPIMHDRTKIRQLPNLLRGYEHIRLSTHNVINAENAPGGPYKIGTSGSCPNITNGNGFFATMAWAVPKNDKNKTATNPLTIEVPYICTEGEDQITVWGFHSDNETQMAKLYGDSKPQKFTSSANGVTTHYVSQIGGFPNQTEDGGLPQSGRIVVDYMVQKSGKTGTITYQRGILLPQKVWCASGRSKVIKGSLPLIGEADCLHEKYGGLNKSKPYYTGEHAKAIGNCPIWVKTPLKLANGTKYRPPARLLKERGFFGAIAGFLEGGWEGMIAGWHGYTSHGAHGVAVAADLKSTQEAINKITKNLNSLSELEVKNLQRLSGAMDELHNEILELDEKVDDLRADTISSQIELAVLLSNEGIINSEDEHLLALERKLKKMLGPSAVEIGNGCFETKHKCNQTCLDRIAAGTFDAGEFSLPTFDSLNITAASLNDDGLDNHTILLYYSTAASSLAVTLMIAIFVVYMVSRDNVSCSICL

SEQ ID NO: 27513 - protein, 585 aa, synthetic construct; identical to SEQ ID NO: 26683
  REGION 1..585: note = hemagglutinin__InfluenzaB__AGX21644

SEQ ID NO: 27514 - protein, 585 aa, synthetic construct; identical to SEQ ID NO: 26608
  REGION 1..585: note = hemagglutinin__InfluenzaB__AGX21655

SEQ ID NO: 27515 - protein, 585 aa, synthetic construct
  REGION 1..585: note = hemagglutinin__InfluenzaB__AGX21666
MKAIIVLLMVVTSNADRICTGITSSNSPHVVKTATQGEVNVTGVIPLTTTPTKSHFANLKGTETRGKLCPKCPNCTDLDVALGRPKCTGKIPSARVSILHEVRPVTSGCFPIMHDRTKIRQLPNLLRGYEHIRLSTHNVINAENAPGGPYKIGTSGSCPNVTNGNGFFATMAWAVPKNDKNKTATNPLTIEVPYICTEGEDQITVWGFHSDNETQMAKLYGDSKPQKFTSSANGVTTHYVSQIGGFPNQTEDGGLPQSGRIVVDYMVQKSGKTGTITYQRGILLPQKVWCASGRSKVIKGSLPLIGEADCLHEKYGGLNKSKPYYTGEHAKAIGNCPIWVKTPLKLANGTKYRPPAKLLKERGFFGAIAGFLEGGWEGMIAGWHGYTSHGAHGVAVAADLKSTQEAINKITKNLNSLSELEVKNLQRLSGAMDELHNEILELDEKVDDLRADTISSQIELAVLLSNEGIINSEDEHLLALERKLKKMLGPSAVEIGNGCFETKHKCNQTCLDKIAAGTFDAGEFSLPTFDSLNITAASLNDDGLDNHTILLYYSTAASSLAVTLMIAIFVVYMVSRDNVSCSICL

SEQ ID NO: 27516 - protein, 585 aa, synthetic construct; identical to SEQ ID NO: 26683
  REGION 1..585: note = hemagglutinin__InfluenzaB__AGX21677

SEQ ID NO: 27517 - protein, 585 aa, synthetic construct; identical to SEQ ID NO: 26608
  REGION 1..585: note = hemagglutinin__InfluenzaB__AGX21688

SEQ ID NO: 27518 - protein, 585 aa, synthetic construct
  REGION 1..585: note = hemagglutinin__InfluenzaB__AGX21699
MKAIIVLLMVVTSNADRICTGITSSNSPHVVKTATQGEVNVTGVIPLTTTPTKSHFANLKGTETRGKLCPKCLNCTDLDVALGRPKCTGKIPSARVSILHEVRPVTSGCFPIMHDRTKIRQLPNLLRGYEHIRLSTHNVINAENAPGGPYKIGTSGSCPNVTNGNGFFATMAWAVPKNDKNKTATNPLTIEVPYICTEGEDQITVWGFHSDNETQMAKLYGDSKPQKFTSSANGVTTHYVSQIGGFPNQTEDGGLPQSGRIVVDYMVQKSGKTGTITYQRGILLPQKVWCASGRSKVIKGSLPLIGEADCLHEKYGGLNKSKPYYTGEHAKAIGNCPIWVKTPLNLANGTKYRPPAKLLKERGFFGAIAGFLEGGWEGMIAGWHGYTSHGAHGVAVAADLKSTQEAINKITKNLNSLSELEVKNLQRLSGAMDELHNEILELDEKVDDLRADTISSQIELAVLLSNEGIINSEDEHLLALERKLKKMLGPSAVEIGNGCFETKHKCNQTCLDRIAAGTFDAGEFSLPTFDSLNITAASLSDDGLDNHTILLYYSTAASSLAVTLMIAIFVVYMVSRDNVSCSICL

SEQ ID NO: 27519 - protein, 585 aa, synthetic construct; identical to SEQ ID NO: 27458
  REGION 1..585: note = hemagglutinin__InfluenzaB__AGX21710

SEQ ID NO: 27520 - protein, 585 aa, synthetic construct; identical to SEQ ID NO: 26683
  REGION 1..585: note = hemagglutinin__InfluenzaB__AGX21721

SEQ ID NO: 27521 - protein, 584 aa, synthetic construct
  REGION 1..584: note = hemagglutinin__InfluenzaB__AGX21732
MKAIIVLLMVVTSNADRICTGITSSNSPHVVKTATQGEVNVTGAIPLTTTPTKSHFANLKGTKTRGKLCPTCLNCTDLDVALGGPMCVGITPSAKASILHEVRPVTSGCFPIMHDRTKIRQLPNLLRGYEKIRLSAQNVINAEKAPGGPYKLGTSGSCPNATSKSGFFATMAWAVPRDDNKTATNPLTVEVPHICANEEDQITVWGFHSDNKTQMKNLYGDSNPQKFTSSANGITTHYVSQIGGFPDQTEDGGLPQSGRIVVDYMVQKPGKTGTIVYQRGILLPQKVWCASGRSKVIKGSLPLIGEADCLHEKYGGLNKSKPYYTGEHAKAIGNCPIWVKTPLKLANGTKYRPPAKLLKERGFFGAIAGFLEGGWEGMIAGWHGYTSHGAHGVAVAADLKSTQEAINKITKNLNSLSELEVKNLQRLSGAMDELHNEILELDEKVDDLRADTISSQIELAVLLSNEGIINSEDEHLLALERKLKKMLGPSAVDIGNGCFETKHKCNQTCLDRIAAGTFNAGEFSLPTFDSLNITAASLNDDGLDNHTILLYYSTAASSLAVTLMIAIFIVYMISRDNVSCSICL

SEQ ID NO: 27522 - protein, 584 aa, synthetic construct
  REGION 1..584: note = hemagglutinin__InfluenzaB__AGX21743
MKAIIVLLMVVTSNADRICTGITSSNSPHVVKTATQGEVNVTGVIPLTTTPTKSHFANLKGTRTRGKLCPDCLNCTDLDVALGRPMCVGTTPSAKASILHEVRPVTSGCFPIMHDRTKIRQLPNLLRGYENIRLSTQNVIDAEKALGGPYRLGTSGSCPNATSKSGFFATMAWAVPKDNNKNATNPLTVEVPYICTEGEDQITVWGFHSDNKTQMKNLYGDSNPQKFTSSANGVTTHYVSQIGGFPDQTEDGGLPQSGRIVVDYMVQKPGKTGTIVYQRGVLLPQKVWCASGKSKVIKGSLPLIGEADCLHEKYGGLNKSKPYYTGEHAKAIGNCPIWVKTPLKLANGTKYRPPAKLLKERGFFGAIAGFLEGGWEGMIAGWHGYTSHGAHGVAVAADLKSTQEAINKITKNLNSLSELEVKNLQRLSGAMDELHNEILELDEKVDDLRADTISSQIELAVLLSNEGIINSEDEHLLALERKLKKMLGPSAVDIGNGCFETKHKCNQTCLDRIAAGTFNAGEFSLPTFDSLNITAASLNDDGLDNHTILLYYSTAASSLAVTLMLAIFIVYMVSRDNVSCSICL

SEQ ID NO: 27523 - protein, 584 aa, synthetic construct
  REGION 1..584: note = hemagglutinin__InfluenzaB__AGX21754
MKAIIVLLMVVTSNADRICTGITSSNSPHVVKTATQGEVNVTGAIPLTTTPAKSHFANLKGTKTRGKLCPTCLNCTDLDVALGGPMCVGITPSAKASILHEVRPVTSGCFPIMHDRTKIRQLPNLLRGYEKIRLSAQNVINAEKAPGGPYKLGTSGSCPNATSKSGFFATMAWAVPRDDNKTATNPLTVEVPHICANEEDQITVWGFHSDNKTQMKNLYGDSNPQKFTSSANGITTHYVSQIGGFPDQTEDGGLPQSGRIVVDYMVQKPGKTGTIVYQRGILLPQKVWCASGRSKVIKGSLPLIGEADCLHEKYGGLNKSKPYYTGEHAKAIGNCPIWVKTPLKLANGTKYRPPAKLLKERGFFGAIAGFLEGGWEGMIAGWHGYTSHGAHGVAVAADLKSTQEAINKITKNLNSLSELEVKNLQRLSGAMDELHNEILELDEKVDDLRADTISSQIELAVLLSNEGIINSEDEHLLALERKLKKMLGPSAVDIGNGCFETKHKCNQTCLDRIAAGTFNAGEFSLPTFDSLNITAASLNDDGLDNHTILLYYSTAASSLAVTLMIAIFIVYMISRDNVSCSICL

SEQ ID NO: 27524 - protein, 584 aa, synthetic construct
  REGION 1..584: note = hemagglutinin__InfluenzaB__AGX21776
MKAIIVLLMVVTSNADRICTGITSSNSPHVVKTATQGEVNVTGVIPLTTTPTKSYFANLKGTRTRGKLCPDCLNCTDLDVALGRPMCVGITPSAKASILHEVRPVTSGCFPIMHDRTKIRQLPNLLRGYENIRLSTQNVIDAEKAPGGPYRLGTSGSCPNATSKSGFFATMAWAVPKDNNKNATNPLTVEVPYVCTEGEDQITVWGFHSDNKTQMKNLYGDSNPQKFTSSANGVTTHYVSQIGGFPDQTEDGGLPQSGRIVVDYMVQKPGKTGTIVYQRGVLLPQKVWCASGRSKVIKGSLPLIGEADCLHEKYGGLNKSKPYYTGEHAKAIGNCPIWVKTPLKLANGTKYRPPAKLLKERGFFGAIAGFLEGGWEGMIAGWHGYTSHGAHGVAVAADLKSTQEAINKITKNLNSLSELEVKNLQRLSGAMDELHNEILELDEKVDDLRADTISSQIELAVLLSNEGIINSEDEHLLALERKLKKMLGPSAVDIGNGCFETKHKCNQTCLDRIAAGTFNAGEFSLPTFDSLNITAASLNDDGLDNHTILLYYSTAASSLAVTLMLAIFIVYMVSRDNVSCSICL

SEQ ID NO: 27525 - protein, 585 aa, synthetic construct; identical to SEQ ID NO: 26979
  REGION 1..585: note = hemagglutinin__InfluenzaB__AGX21787

SEQ ID NO: 27526 - protein, 584 aa, synthetic construct
  REGION 1..584: note = hemagglutinin__InfluenzaB__AGX21798
MKAIIVLLMVVTSNADRICTGITSSNSPHVVKTATQGEVNVTGVIPLTTTPTKSYFANLKGTRTRGKLCPDCLNCTDLDVALGRPMCVGTTPSAKASILHEVRPVTSGCFPIMHDRTKIRQLPNLLRGYENIRLSTQNVIDAEKAPGGPYRLGTSGSCPNATSKSGFFATMAWAVPKDNNKNATNPLTVEVPYVCTEGEDQITVWGFHSDNKTQMKNLYGDSNPQKFTSSANGVTTHYVSQIGGFPDQTEDGGLPQSGRIVVDYMVQKPGKTGTIVYQRGVLLPQKVWCASGRSKVIKGSLPLIGEADCLHEKYGGLNKSKPYYTGEHAKAIGNCPIWVKTPLKLANGTKYRPPAKLLKERGFFGAIAGFLEGGWEGMIAGWHGYTSHGAHGVAVAADLKSTQEAINKITKNLNSLSELEVKNLQRLSGAMDELHNEILELDEKVDDLRADTISSQIELAVLLSNEGIINSEDEHLLALERKLKKMLGPSAVDIGNGCFETKHKCNQTCLDRIAAGTFNAGEFSLPTFDSLNITAASLNDDGLDNHTILLYYSTAASSLAVTLMLAIFIVYMVSRDNVSCSICL

SEQ ID NO: 27527 - protein, 584 aa, synthetic construct
  REGION 1..584: note = hemagglutinin__InfluenzaB__AGX21809
MKAIIVLLMVVTSNADRICTGITSSNSPHVVKTATQGEVNVTGVIPLTTTPTKSYFANLKGTRTRGKLCPDCLNCTDLDVALGRPMCVGTTPSAKASILHEVRPVTSGCFPIMHDRTKIRQLPNLLRGYENIRLSTQNVIDAEKAPGGPYRLGTSGSCPNATSKSGFFATMAWAVPKDNNKNATNPLTVEVPYVCTEGEDQITVWGFHSDNKTQMKNLYGDSNPQKFTSSANGVTTHYVSQIGGFPDQTEDGGLPQSGRIVVDYMVQKPGKTGTIVYQRGVLLPQKVWCASGRSKVIKGSLPLIGEADCLHEKYGGLNKSRPYYTGEHAKAIGNCPIWVKTPLKLANGTKYRPPAKLLKERGFFGAIAGFLEGGWEGMIAGWHGYTSHGAHGVAVAADLKSTQEAINKITKNLNSLSELEVKNLQRLSGAMDELHNEILELDEKVDDLRADTISSQIELAVLLSNEGIINSEDEHLLALERKLKKMLGPSAVDIGNGCFETKHKCNQTCLDRIAAGTFNAGEFSLPTFDSLNITAASLNDDGLDNHTILLYYSTAASSLAVTLMLAIFIVYMVSRDNVSCSICL

SEQ ID NO: 27528 - protein, 584 aa, synthetic construct
  REGION 1..584: note = hemagglutinin__InfluenzaB__AGX21820
MKAIIVLLMVVTSNADRICTGITSSNSPHVVKTATQGEVNVTGVIPLTTTPTKSYFANLKGTRTRGKLCPDCLNCTDLDVALGRPMCVGTTPSAKASILHEVRPVTSGCFPIMHDRTKIRQLPNLLRGYENIRLSTQNVIDAEKAPGGPYRLGTSGSCPNATNKSGFFATMAWAVPKDNNKNATNPLTVEVPYICTEGEDQITVWGFHSDNKTQMKNLYGDSNPQKFTSSANGVTTHYVSQIGGFPDQTEDGGLPQSGRIVVDYMMQKPGKTGTIVYQRGVLLPQKVWCASGRSKVIKGSLPLIGEADCLHEKYGGLNKSKPYYTGEHAKAIGNCPIWVKTPLKLANGTKYRPPAKLLKERGFFGAIAGFLEGGWEGMIAGWHGYTSHGAHGVAVAADLKSTQEAINKITKNLNSLSELEVKNLQRLSGAMDELHNEILELDEKVDDLRADTISSQIELAVLLSNEGIINSEDEHLLALERKLKKMLGPSAVDIGNGCFETKHKCNQTCLDRIAAGTFNAGEFSLPTFDSLNITAASLNDDGLDNHTILLYYSTAASSLAVTLMLAIFIVYMVSRDNVSCSICL

SEQ ID NO: 27529 - protein, 584 aa, synthetic construct; identical to SEQ ID NO: 27023
  REGION 1..584: note = hemagglutinin__InfluenzaB__AGX21831

SEQ ID NO: 27530 - protein, 584 aa, synthetic construct; identical to SEQ ID NO: 27026
  REGION 1..584: note = hemagglutinin__InfluenzaB__AGX21842

SEQ ID NO: 27531 - protein, 584 aa, synthetic construct; identical to SEQ ID NO: 27026
  REGION 1..584: note = hemagglutinin__InfluenzaB__AGX21853

SEQ ID NO: 27532 - protein, 584 aa, synthetic construct
  REGION 1..584: note = hemagglutinin__InfluenzaB__AGX21864
MKAIIVLLMVVTSNADRICTGITSSNSPHVVKTATQGEVNVTGVIPLTTTPTKSYFANLKGTRTRGKLCPDCLNCTDLDVALGRPMCVGTTPSAKASILHEVRPVTSGCFPIMHDRTKIRQLPNLLRGYENIRLSNQNVIDAEKAPGGPYRLGTSGSCPNATSKSGFFATMAWAVPKDNNKNATNPLTVEVPYICTEGEDQITVWGFHSDNKTQMKNLYGDSNPQKFTSSANGVTTHYVSQIGGFPDQTEDGGLPQSGRIVVDYMMQKPGKTGTIVYQRGVLLPQKVWCASGRSKVIKGSLPLIGEADCLHEKYGGLNKSKPYYTGEHAKAIGNCPIWVKTPLKLANGTKYRPPAKLLKERGFFGAIAGFLEGGWEGMIAGWHGYTSHGAHGVAVAADLKSTQEAINKITKNLNSLSELEVKNLQRLSGAMDELHNEILELDEKVDDLRADTISSQIELAVLLSNEGIINSEDEHLLALERKLKKMLGPSAVDIGNGCFETKHKCNQTCLDRIAAGTFNAGEFSLPTFDSLNITAASLNDDGLDNHTILLYYSTAASSLAVTLMLAIFIVYMVSRDNVSCSICL

SEQ ID NO: 27533 - protein, 584 aa, synthetic construct; identical to SEQ ID NO: 27024
  REGION 1..584: note = hemagglutinin__InfluenzaB__AGX21875

SEQ ID NO: 27534 - protein, 584 aa, synthetic construct; identical to SEQ ID NO: 27023
  REGION 1..584: note = hemagglutinin__InfluenzaB__AGX21886

SEQ ID NO: 27535 - protein, 584 aa, synthetic construct; identical to SEQ ID NO: 27023
  REGION 1..584: note = hemagglutinin__InfluenzaB__AGX21897

SEQ ID NO: 27536 - protein, 584 aa, synthetic construct; identical to SEQ ID NO: 27023
  REGION 1..584: note = hemagglutinin__InfluenzaB__AGX21908

SEQ ID NO: 27537 - protein, 584 aa, synthetic construct
  REGION 1..584: note = hemagglutinin__InfluenzaB__AGX21919
MKAIIVLLMVVTSNADRICTGITSSNSPHVVKTATQGEVNVTGVIPLTTTPTKSYFANLKGTRTRGKLCPDCLNCTDLDVALGRPMCVGTTPSAKASILHEVRPVTSGCFPIMHDRTKIRQLPNLLRGYENIRLSTQNVIDAEKAPGGPYRLGTSGSCPNATSKSGFFATMAWAVPKDNNKNATNPLTVEVPYICTEGEDQITVWGFHSDNKTQMKNLYGDSNPQKFTSSANGVTTHYVSQIGGFPDQTEDGGLPQSGRIVVDYMMQKPGKAGTIVYQRGVLLPQKVWCASGRSKVIKGSLPLIGEADCLHEKYGGLNKSKPYYTGEHAKAIGNCPIWVKTPLKLANGTKYRPPAKLLKERGFFGAIAGFLEGGWEGMIAGWHGYTSHGAHGVAVAADLKSTQEAINKITKNLNSLSELEVKNLQRLSGAMDELHNEILELDEKVDDLRADTISSQIELAVLLSNEGIINSEDEHLLALERKLKKMLGPSAVDIGNGCFETKHKCNQTCLDRIAAGTFNAGEFSLPTFDSLNITAASLNDDGLDNHTILLYYSTAASSLAVTLMLAIFIVYMVSRDNVSCSICL

SEQ ID NO: 27538 - protein, 584 aa, synthetic construct; identical to SEQ ID NO: 27026
  REGION 1..584: note = hemagglutinin__InfluenzaB__AGX21941

SEQ ID NO: 27539 - protein, 584 aa, synthetic construct; identical to SEQ ID NO: 27023
  REGION 1..584: note = hemagglutinin__InfluenzaB__AGX21952

SEQ ID NO: 27540 - protein, 584 aa, synthetic construct; identical to SEQ ID NO: 27026
  REGION 1..584: note = hemagglutinin__InfluenzaB__AGX21963

SEQ ID NO: 27541 - protein, 584 aa, synthetic construct
  REGION 1..584: note = hemagglutinin__InfluenzaB__AGX21974
MKAIIVLLMVVTSNADRICTGITSSNSPHVVKTATQGEVNVTGVIPLTTTPTKSYFANLKGTRTRGKLCPDCLNCTDLDVALGRPMCVGTTPSAKASILHEVRPVTSGCFPIMHDRTKIRQLPNLLRGYENIRLSTQNVIDAEKAPGGPYRLGTSGSCPNATSKSGFFATMAWAVPKVNNKNATNPLTVEVPYICTEGEDQITVWGFHSDNKTQMKNLYGDSNPQKFTSSANGVTTHYVSQIGSFPDQTEDGGLPQSGRIVVDYMMQKPGKTGTIVYQRGVLLPQKVWCASGRSKVIKGSLPLIGEADCLHEKYGGLNKSKPYYTGEHAKAIGNCPIWVKTPLKLANGTKYRPPAKLLKERGFFGAIAGFLEGGWEGMIAGWHGYTSHGAHGVAVAADLKSTQEAINKITKNLNSLSELEVKNLQRLSGAMDELHNEILELDEKVDDLRADTISSQIELAVLLSNEGIINSEDEHLLALERKLKKMLGPSAVDIGNGCFETKHKCNQTCLDRIAAGTFNAGEFSLPTFDSLNITAASLNDDGLDNHTILLYYSTAASSLAVTLMLAIFIVYMISRDNVSCSICL

SEQ ID NO: 27542 - protein, 584 aa, synthetic construct; identical to SEQ ID NO: 27026
  REGION 1..584: note = hemagglutinin__InfluenzaB__AGX21985

SEQ ID NO: 27543 - protein, 584 aa, synthetic construct; identical to SEQ ID NO: 27024
  REGION 1..584: note = hemagglutinin__InfluenzaB__AGX21996

SEQ ID NO: 27544 - protein, 584 aa, synthetic construct; identical to SEQ ID NO: 27024
  REGION 1..584: note = hemagglutinin__InfluenzaB__AGX22007

SEQ ID NO: 27545 - protein, 584 aa, synthetic construct; identical to SEQ ID NO: 27023
  REGION 1..584: note = hemagglutinin__InfluenzaB__AGX22018

SEQ ID NO: 27546 - protein, 584 aa, synthetic construct; identical to SEQ ID NO: 27023
  REGION 1..584: note = hemagglutinin__InfluenzaB__AGX22029

SEQ ID NO: 27547 - protein, 584 aa, synthetic construct; identical to SEQ ID NO: 27023
  REGION 1..584: note = hemagglutinin__InfluenzaB__AGX22040

SEQ ID NO: 27548 - protein, 584 aa, synthetic construct
  REGION 1..584: note = hemagglutinin__InfluenzaB__AGX22051
MKAIIVLLMVVTSNADRICTGITSSNSPHVVKTATQGEVNVTGVIPLTTTPTKSYFANLKGTRTRGKLCPDCLNCTDLDVALGRPMCVGTTPSAKASILHEVRPVTSGCFPIMHDRTKIRQLPNLLRGYENIRLSTQNVIDAEKAPGGPYRLGTSGSCPNATSKSGFFATMAWAVPKDNNKNATNPLTVEVPYICTEGEDQITVWGFHSDNKTQMKNLYGDSNPQKFTSSANGVTTHYVSQIGGFPDQIEDGGLPQSGRIVVDYMMQKPGKTGTIVYQRGVLLPQKVWCASGRSKVIKGSLPLIGEADCLHEKYGGLNKSKPYYTGEHAKAIGNCPIWVKTPLKLANGTKYRPPAKLLKERGFFGAIAGFLEGGWEGMIAGWHGYTSHGAHGVAVAADLKSTQEAINKITKNLNSLSELEVKNLQRLSGAMDALHNEILELDEKVDDLRADTISSQIELAVLLSNEGIINSEDEHLLALERKLKKMLGPSAVEIGNGCFETKHKCNQTCLDRIAAGTFNAGEFSLPTFDSLNITAASLNDDGLDNHTILLYYSTAASSLAVTLMLAIFIVYMVSRDNVSCSICL

SEQ ID NO: 27549 - protein, 584 aa, synthetic construct; identical to SEQ ID NO: 27023
  REGION 1..584: note = hemagglutinin__InfluenzaB__AGX22062

SEQ ID NO: 27550 - protein, 584 aa, synthetic construct
  REGION 1..584: note = hemagglutinin__InfluenzaB__AGX22073
MKAIIVLLMVVTSNADRICTGITSSNSPHVVKTATQGEVNVTGVIPLTTTPTKSYFANLKGTRTRGKLCPDCLNCTDLDVALGRPMCVGTTPSAKASILHEVRPVTSGCFPIMHDRTKIRQLPNLLRGYENIRLSTQNVIDAEKAPGGPYRLGTSGSCPNATSKSGFFATMAWAVPKDNNKNATNPLTVEVPYICTEGEDQITVWGFHSDNKTQMKNLYGDSNPQKFTSSANGVTTHYVSQIGGFPDQTEDGGLPQSGRIVVDYMMQKPGKTGTIVYQRGVLLPQKVWCASGRSKVIKGSLPLIGEADCLHEKYGGLNKSKPYYTGEHAKAIGNCPIWVKTPLKLANGTKYRPPAKLLKERGFFGAIAGFIEGGWEGMIAGWHGYTSHGAHGVAVAADLKSTQEAINKITKNLNSLSELEVKNLQRLSGAMDELHNEILELDEKVDDLRADTISSQIELAVLLSNEGIINSEDEHLLALERKLKKMLGPSAVDIGNGCFETKHKCNQTCLDRIAAGTFNAGDFSLPTFDSLNITAASLNDDGLDNHTILLYYSTAASSLAVTLMLAIFIVYMVSRDNVSCSICL

SEQ ID NO: 27551 - protein, 584 aa, synthetic construct; identical to SEQ ID NO: 27026
  REGION 1..584: note = hemagglutinin__InfluenzaB__AGX22095

SEQ ID NO: 27552 - protein, 584 aa, synthetic construct; identical to SEQ ID NO: 27024
  REGION 1..584: note = hemagglutinin__InfluenzaB__AGX22106

SEQ ID NO: 27553 - protein, 584 aa, synthetic construct
  REGION 1..584: note = hemagglutinin__InfluenzaB__AGX22128
MKAIIVLLMVVTSNADRICTGITSSNSPHVVKTATQGEVNVTGVIPLTTTPTKSYFANLKGTRTRGKLCPDCLNCTDLDVALGRPMCVGTTPSAKASILHEVRPVTSGCFPIMHDRTKIRQLPNLLRGYENIRLSTQNVIDAENAPGGPYRLGTSGSCPNATSKSGFFATMAWAVPKDNNKNATNPLTVEVPYVCTEGEDQITVWGFHSDNKTQMKNLYGDSNPQKFTSSANGVTTHYVSQIGGFPAQTEDGGLPQSGRIVVDYMVQKPRKTGTIVYQRGVLLPQKVWCASGRSKVIKGSLPLIGEADCLHEKYGGLNKSKPYYTGEHAKAIGNCPIWVKTPLKLANGTKYRPPAKLLKERGFFGAIAGFLEGGWEGMIAGWHGYTSHGAHGVAVAADLKSTQEAINKITKNLNSLSELEIKNLQRLSGAMNELHNEILELDEKVDDLRADTISSQIELAVLLSNEGIINSEDEHLLALERKLKKMLGPSAVDIGNGCFETKHKCNQTCLDRIAAGTFNAGEFSLPTFDSLNITAASLNDDGLDNHTILLYYSTAASSLAVTLMLAIFIVYMVSRDNVSCSICL

SEQ ID NO: 27554 - protein, 584 aa, synthetic construct
  REGION 1..584: note = hemagglutinin__InfluenzaB__AGX22139
MKAIIVLLMVVTSNADRICTGITSSNSPHVVKTATQGEVNVTGVIPLTTTPTKSYFANLKGTRTRGKLCPDCLNCTDLDVALGRPMCVGTTPSAEASILHEVRPVTSGCFPIMHDRTKIRQLPNLLRGYENIRLSTQNVIDAEKAPGGPYRLGTSGSCPNATSKSGFFATMAWAVPKDNNKNATNPLTVEVPYICTEGEDQITVWGFHSDNKTQMKNLYGDSNPQKFTSSANGVTTHYVSQIGGFPDQTEDGGLPQSGRIVVDYMMQKPGKTGTIVYQRGVLLPQKVWCASGRSKVIKGSLPLIGEADCLHEKYGGLNKSKPYYTGEHAKAIGNCPIWVKTPLKLANGTKYRPPAKLLKERGFFGAIAGFLEGGWEGMIAGWHGYTSHGAHGVAVAADLKSTQEAINKITKNLNSLSELEVKNLQRLSGAMDELHNEILELDEKVDDLRADTISSQIELAVLLSNEGIINSEDEHLLALERKLKKMLGPSAVDIGNGCFETKHKCNQTCLDRIAAGTFNAGEFSLPTFDSLNITAASLNDDGLDNHTILLYYSTAASSLAVTLMLAIFIVYMVSRDNVSCSICL

SEQ ID NO: 27555 - protein, 584 aa, synthetic construct; identical to SEQ ID NO: 27554
  REGION 1..584: note = hemagglutinin__InfluenzaB__AGX22150

SEQ ID NO: 27556 - protein, 584 aa, synthetic construct; identical to SEQ ID NO: 27554
  REGION 1..584: note = hemagglutinin__InfluenzaB__AGX22161

SEQ ID NO: 27557 - protein, 584 aa, synthetic construct; identical to SEQ ID NO: 27023
  REGION 1..584: note = hemagglutinin__InfluenzaB__AGX22172

SEQ ID NO: 27558 - protein, 584 aa, synthetic construct; identical to SEQ ID NO: 27554
  REGION 1..584: note = hemagglutinin__InfluenzaB__AGX22183

SEQ ID NO: 27559 - protein, 584 aa, synthetic construct; identical to SEQ ID NO: 27554
  REGION 1..584: note = hemagglutinin__InfluenzaB__AGX22194

SEQ ID NO: 27560 - protein, 584 aa, synthetic construct; identical to SEQ ID NO: 27554
  REGION 1..584: note = hemagglutinin__InfluenzaB__AGX22205

SEQ ID NO: 27561 - protein, 584 aa, synthetic construct; identical to SEQ ID NO: 27024
  REGION 1..584: note = hemagglutinin__InfluenzaB__AGX22216

SEQ ID NO: 27562 - protein, 584 aa, synthetic construct; identical to SEQ ID NO: 27026
  REGION 1..584: note = hemagglutinin__InfluenzaB__AGX22227

SEQ ID NO: 27563 - protein, 584 aa, synthetic construct
  REGION 1..584: note = hemagglutinin__InfluenzaB__AGX22238
MKAIIVLLMVVTSNADRICTGITSSNSPHMVKTATQGEVNVTGVIPLTTTPTKSYFANLKGTRTRGKLCPDCLNCTDLDVALGRPMCVGTTPSAKASILHEVRPVTSGCFPIMHDRTKIRQLPNLLRGYENIRLSTQNVIDAEKAPGGPYRLGTSGSCPNATSKSGFFATMAWAVPKDNNKNATNPLTVEVPYICTEGEDQITVWGFHSDNKTQMKNLYGDSNPQKFTSSANGVTTHYVSQIGGFPDQTEDGGLPQSGRIVVDYMMQKPGKTGTIVYQRGVLLPQKVWCASGRSKVIKGSLPLIGEADCLHEKYGGLNKSKPYYTGEHAKAIGNCPIWVKTPLKLANGTKYRPPAKLLKERGFFGAIAGFLEGGWEGMIAGWHGYTSHGAHGVAVAADLKSTQEAINKITKNLNSLSELEVKNLQRLSGAMDELHNEILELDEKVDDLRADTISSQIELAVLLSNEGIINSEDEHLLALERKLKKMLGPSAVDIGNGCFETKHKCNQTCLDRIAAGTFNAGEFSLPTFDSLNITAASLNDDGLDNHTILLYYSTAASSLAVTLMLAIFIVYMVSRDNVSCSICL

SEQ ID NO: 27564 - protein, 584 aa, synthetic construct; identical to SEQ ID NO: 27024
  REGION 1..584: note = hemagglutinin__InfluenzaB__AGX22249

SEQ ID NO: 27565 - protein, 584 aa, synthetic construct; identical to SEQ ID NO: 27023
  REGION 1..584: note = hemagglutinin__InfluenzaB__AGX22260

SEQ ID NO: 27566 - protein, 584 aa, synthetic construct
  REGION 1..584: note = hemagglutinin__InfluenzaB__AGX22271
MKAIIVLLMVVTSNADRICTGITSSNSPHVVKTATQGEVNVTGVIPLTTTPTKSYFANLKGTRTRGKLCPDCLNCTDLDVALGRPMCVGTTPSAKASILHEVRPVTSGCFPIMHDRTKIRQLPNLLRGYENIRLSTQNVIDAEKAPGGPYRLGTSGSCPNATSKSGFFATMAWAVPKDNNKNATNPLTVEVPYICTEGEDQITVWGFHSDNKTQMKNLYGDSNPQKFTSSANGVTTHYVSQIGGFPDQTEDGGLPQSGRIVVDYMMQKPGKTGTIVYQRGVLLPQKVWCASGRSKVIKGSLPLIGEADCLHEKYGGLNKSKPYYTGEHAKAIGNCPIWVKTPLKLANGTKYRPSAKLLKERGFFGAIAGFLEGGWEGMIAGWHGYTSHGAHGVAVAADLKSTQEAINKITKNLNSLSELEVKNLQRLSGAMDELHNEILELDEKVDDLRADTISSQIELAVLLSNEGIINSEDEHLLALERKLKKMLGPSAVEIGNGCFETKHKCNQTCLDRIAAGTFNAGEFSLPTFDSLNITAASLNDDGLDNHTILLYYSTAASSLAVTLMLAIFIVYMVSRDNVSCSICL

SEQ ID NO: 27567 - protein, 584 aa, synthetic construct
  REGION 1..584: note = hemagglutinin__InfluenzaB__AGX22282
MKAIIVLLMVVTSNADRICTGITSSNSPHVVKTATQGEVNVTGVIPLTTTPTKSYFANLKGTRTRGKLCPDCLNCTDLDVALGRPMCVGTTPSAKASILHEVRPVTSGCFPIMHDRTKIRQLPNLLRGYENIRLSTQNVIDAEKAPGGPYRLGTSGSCPNATSKSGFFATMAWAVPKDNNKNATNPLTVEVPYICTEGEDQITVWGFHSDNKTQMKNLYGDSNPQKFTSSANGVTTHYVSQIGDFPDQTEDGGLPQSGRIVVDYMMQKPGKTGTIVYQRGVLLPQKVWCASGRSKVIKGSLPLIGEADCLHEKYGGLNKSKPYYTGEHAKAIGNCPIWVKTPLKLANGTKYRPPAKLLKERGFFGAIAGFLEGGWEGMIAGWHGYTSHGAHGVAVAADLKSTQEAINKITKNLNSLSELEVKNLQRLSGAMDELHNEILELDEKVDDLRADTISSQIELAVLLSNEGIINSEDEHLLALERKLKKMLGPSAVDIGNGCFETKHKCNQTCLDRIAAGTFNAGEFSLPTFDSLNITAASLNDDGLDNHTILLYYSTAASSLAVTLMLAIFIVYMVSRDNVSCSICL

SEQ ID NO: 27568 - protein, 584 aa, synthetic construct; identical to SEQ ID NO: 27023
  REGION 1..584: note = hemagglutinin__InfluenzaB__AGX22293

SEQ ID NO: 27569 - protein, 584 aa, synthetic construct
  REGION 1..584: note = hemagglutinin__InfluenzaB__AGX22304
MKAIIVLLMVVTSNADRICTGITSSNSPHVVKTATQGEVNVTGVIPLTTTPTKSYFANLKGTRTRGKLCPDCLNCTDLDVALGRPMCVGTTPSAKASILHEVRPVTSGCFPIMHDRTKIRQLPNLLRGYENIRLSTQNVIDAEKAPGGPYRLGTSGSCPNATSKSGFFATMAWAVPKDNNKNATNPLTVEVPYICTEGEDQITVWGFHSDNKTQMKNLYGDSNPQKFTSSTNGVTTHYVSQIGGFPDQTEDGGLPQSGRIVVDYMMQKPGKTGTIVYQRGVLLPQKVWCASGRSKVIKGSLPLIGEADCLHEKYGGLNKSKPYYTGEHAKAIGNCPIWVKTPLKLANGTKYRPPAKLLKERGFFGAIAGFLEGGWEGMIAGWHGYTSHGAHGVAVAADLKSTQEAINKITKNLNSLSELEVKNLQRLSGAMDELHNEILELDEKVDDLRADTISSQIELAVLLSNEGIINSEDEHLLALERKLKKMLGPSAVDIGNGCFETKHKCNQTCLDRIAAGTFNAGEFSLPTFDSLNITAASLNDDGLDNHTILLYYSTAASSLAVTLMLAIFIVYMVSRDNVSCSICL

SEQ ID NO: 27570 - protein, 584 aa, synthetic construct; identical to SEQ ID NO: 27023
  REGION 1..584: note = hemagglutinin__InfluenzaB__AGX22315

SEQ ID NO: 27571 - protein, 584 aa, synthetic construct; identical to SEQ ID NO: 26426
  REGION 1..584: note = hemagglutinin__InfluenzaB__AGX22326

SEQ ID NO: 27572 - protein, 584 aa, synthetic construct; identical to SEQ ID NO: 27026
  REGION 1..584: note = hemagglutinin__InfluenzaB__AGX22337

SEQ ID NO: 27573 - protein, 584 aa, synthetic construct; identical to SEQ ID NO: 27026
  REGION 1..584: note = hemagglutinin__InfluenzaB__AGX22348

SEQ ID NO: 27574 - protein, 584 aa, synthetic construct
  REGION 1..584: note = hemagglutinin__InfluenzaB__AGX22359
MKAIIVLLMVVTSNADRICTGITSSNSPHVVKTATQGEVNVTGVIPLTTTPTKSYFANLKGTRTRGKLCPDCLNCTDLDVALGRPMCVGTTPSAKASILHEVRPVTSGCFPIMHDRTKIRQLPNLLRGYENIRLSTQNVIDAENAPGGPYRLGTSGSCPNATSKSGFFATMAWAVPKDNNKNATNPLTVEVPYVCTEGEDQITVWGFHSDNKTQMKNLYGDSNPQKFTSSANGVTTHYVSQIGGFPAQTEDGGLPQSGRIVVDYMVQKPKKTGTIVYQRGVLLPQKVWCASGRSKVIKGSLPLIGEADCLHEKYGGLNKSKPYYTGEHAKAIGNCPIWVKTPLKLANGTKYRPPAKLLKERGFFGAIAGFLEGGWEGMIAGWHGYTSHGAHGVAVAADLKSTQEAINKITKNLNSLSELEIKNLQRLSGAMDELHNEILELDEKVDDLRADTISSQIELAVLLSNEGIINSEDEHLLALERKLKKMLGPSAVDIGNGCFETKHKCNQTCLDRIAAGTFNAGEFSLPTFDSLNITAASLNDDGLDNHTILLYYSTAASSLAVTLMLAIFIVYMVSRDNVSCSICL

SEQ ID NO: 27575 - protein, 584 aa, synthetic construct; identical to SEQ ID NO: 27024
  REGION 1..584: note = hemagglutinin__InfluenzaB__AGX22370

SEQ ID NO: 27576 - protein, 584 aa, synthetic construct
  REGION 1..584: note = hemagglutinin__InfluenzaB__AGX22381
MKAIIVLLMVVTSNADRICTGITSSNSPHVVKTATQGEVNVTGVIPLTTTPTKSYFANLKGTRTRGKLCPDCLNCTDLDVALGRPMCVGTTPSAKASILHEVRPVTSGCFPIMHDRTKIRQLSNLLRGYENIRLSTQNVIDAEKAPGGPYRLGTSGSCPNATSKSGFFATMAWAVPKDNNKNATNPLTVEVPYICTEGEDQITVWGFHSDNKTQMKNLYGDSNPQKFTSSANGVTTHYVSQIGGFPDQTEDGGLPQSGRIVVDYMMQKPGKTGTIVYQRGVLLPQKVWCASGRSKVIKGSLPLIGEADCLHEKYGGLNKSKPYYTGEHAKAIGNCPIWVKTPLKLANGTKYRPPAKLLKERGFFGAIAGFLEGGWEGMIAGWHGYTSHGAHGVAVAADLKSTQEAINKITKNLNSLSELEVKNLQRLSGAMDELHNEILELDEKVDDLRADTISSQIELAVLLSNEGIINSEDEHLLALERKLKKMLGPSAVDIGNGCFETKHKCNQTCLDRIAAGTFNAGEFSLPTFDSLNITAASLNDDGLDNHTILLYYSTAASSLAVTLMLAIFIVYMVSRDNVSCSICL

SEQ ID NO: 27577 - protein, 584 aa, synthetic construct; identical to SEQ ID NO: 27023
  REGION 1..584: note = hemagglutinin__InfluenzaB__AGX22392

SEQ ID NO: 27578 - protein, 584 aa, synthetic construct
  REGION 1..584: note = hemagglutinin__InfluenzaB__AGX22403
MKAIIVLLMVVTSNADRICTGITSSNSPHVVKTATQGEVNVTGVIPLTTTPTKSYFANLKGTRTRGKLCPDCLNCTDLDVALGRPMCVGTTPSAKASILHEVRPVTSGCFPIMHDRTKIRQLPNLLRGYENIRLSTQNVIDAEKAPGGPYRLGTSGSCPNATSKSGFFATMAWAVPKDNNKNATNPLTVEVPYICTEGEDQITVWGFHSDNKTQMKNLYGDSNPQKFTSSANGVTTHYVSQIGGFPDQTEDGGLPQSGRIVVDYMMQKPGKTGTIVYQRGVLLPQKVWCASGRSKVIKGSLPLIGEADCLHEKYGGLNKSKPYYTGEHAKAIGNCPIWVKTPLKLANGTKYRPPAKLLKERGFFGAIAGFLEGGWEGMIAGWHGYTSHGAHGVAVAADLKSTQEAINKITKNLNSLSELEVKNLQRLSGAMDELHNEILELDEKVDDLRADTISSQIELAVLLSNEGIINSEDEHLLALERKLKKMLGPSAVDIGNGCFETKHKCNQTCLDRIAAGTFNAGDFSLPTFDSLNITAASLNDDGLDNHTILLYYSTAASSLAVTLMLAIFIVYMVSRDNVSCSICL

SEQ ID NO: 27579 - protein, 584 aa, synthetic construct; identical to SEQ ID NO: 27023
  REGION 1..584: note = hemagglutinin__InfluenzaB__AGX22414

SEQ ID NO: 27580 - protein, 584 aa, synthetic construct
  REGION 1..584: note = hemagglutinin__InfluenzaB__AGX22425
MKAIIVLLMVVTSNADRICTGITSSNSPHVVKTATQGEVNVTGVIPLTTTPTKSYFANLKGTRTRGKLCPDCLNCTDLDVALGRPMCVGTTPSAKASILHEVRPVTSGCFPIMHDRTKIRQLPNLLRGYENIRLSTQNVIDAEKAPGGPYRLGTSGSCPNATSKSGFFATMAWAVPKDNNKNATNPLTVEVPYICTEGEDQITVWGFHSDNKIQMKNLYGDSNPQKFTSSANGVTTHYVSQIGGFPDQTEDGGLPQSGRIVVDYMMQKPGKTGTIVYQRGVLLPQKVWCASGRSKVIKGSLPLIGEADCLHEKYGGLNKSKPYYTGEHAKAIGNCPIWVKTPLKLANGTKYRPPAKLLKERGFFGAIAGFLEGGWEGMIAGWHGYTSHGAHGVAVAADLKSTQEAINKITKNLNSLSELEVKNLQRLSGAMDELHNEILELDEKVDDLRADTISSQIELAVLLSNEGIINSEDEHLLALERKLKKMLGPSAVEIGNGCFETKHKCNQTCLDRIAAGTFNAGEFSLPTFDSLNITAASLNDDGLDNHTILLYYSTAASSLAVTLMLAIFIVYMVSRDNVSCSICL

SEQ ID NO: 27581 - protein, 584 aa, synthetic construct; identical to SEQ ID NO: 27024
  REGION 1..584: note = hemagglutinin__InfluenzaB__AGX22436

SEQ ID NO: 27582 - protein, 584 aa, synthetic construct; identical to SEQ ID NO: 27024
  REGION 1..584: note = hemagglutinin__InfluenzaB__AGX22445

SEQ ID NO: 27583 - protein, 584 aa, synthetic construct
  REGION 1..584: note = hemagglutinin__InfluenzaB__AGX22456
MKAIIVLLMVVTSNADRICTGITSSSSPHVVKTATQGEVNVTGVIPLTTTPTKSYFANLKGTRTRGKLCPDCLNCTDLDVALGRPMCVGTTPSAKASILHEVRPVTSGCFPIMHDRTKIRQLPNLLRGYENIRLSTQNVIDAEKAPGGPYRLGTSGSCPNATSKSGFFATMAWAVPKDNNKNATNPLTVEVPYICTEGEDQITVWGFHSDNKTQMKNLYGDSNPQKFTSSANGVTTHYVSQIGGFPDQTEDGGLPQSGRIVVDYMMQKPGKTGTIVYQRGVLLPQKVWCASGRSKVIKGSLPLIGEADCLHEKYGGLNKSKPYYTGEHAKAIGNCPIWVKTPLKLANGTKYRPPAKLLKERGFFGAIAGFLEGGWEGMIAGWHGYTSHGAHGVAVAADLKSTQEAINKITKNLNSLSELEVKNLQRLSGAMDELHSEILELDEKVDDLRADTISSQIELAVLLSNEGIINSEDEHLLALERKLKKMLGPSAVDIGNGCFETKHKCNQTCLDRIAAGTFNAGEFSLPTFDSLNITAASLNDDGLDNHTILLYYSTAASSLAVTLMLAIFIVYIVSRDNVSCSICL

SEQ ID NO: 27584 - protein, 584 aa, synthetic construct; identical to SEQ ID NO: 27023
  REGION 1..584: note = hemagglutinin__InfluenzaB__AGX22467

SEQ ID NO: 27585 - protein, 584 aa, synthetic construct; identical to SEQ ID NO: 27023
  REGION 1..584: note = hemagglutinin__InfluenzaB__AGX22478

SEQ ID NO: 27586 - protein, 584 aa, synthetic construct
  REGION 1..584: note = hemagglutinin__InfluenzaB__AGX22489
MKAIIVLLMVVTSNADRICTGITSSNSPHVVKTATQGEVNVTGVIPLTTTPTKSYFANLKGTRTRGKLCPDCLNCTDLDVALGRPMCVGTTPSAKASILHEVRPVTSGCFPIMHDRTKIRQLPNLLRGYENIRLSTQSAIDAEKAPGGPYRLGTSGSCPNATSKSGFFATMAWAVPKDNNKNATNPLTVEVPYICTEGEDQITVWGFHSDNKTQMKNLYGDSNPQKFTSSANGVTTHYVSQIGGFPGQTEDGGLPQSGRIVVDYMIQKPGKTGTIVYQRGVLLPQKVWCASGRSKVIKGSLPLIGEADCLHEKYGGLNKSKPYYTGEHAKAIGNCPIWVKTPLKLANGTKYRPPAKLLKERGFFGAIAGFLEGGWEGMIAGWHGYTSHGAHGVAVAADLKSTQEAINKITKNLNSLSELEVKNLQRLSGAMDELHNEILELDEKVDDLRADTISAQIELAVLLSNEGIINSEDEHLLALERKLKKMLGPSAVDIGNGCFETKHKCNQTCLDRIAAGTFNAGEFSLPTFDSLNITAASLNDDGLDNHTILLYYSTAASSLAVTLMLAIFIVYMVSRDNVSCSICL

SEQ ID NO: 27587 - protein, 584 aa, synthetic construct
  REGION 1..584: note = hemagglutinin__InfluenzaB__AGX22500
MKAIIVLLMVVTSNADRICTGITSSNSPHVVKTATQGEVNVTGVIPLTTTPTKSYFANLKGTRTRGKLCPDCLNCTDLDVALGRPMCVGTTPSAKASILHEVRPVTSGCFPIMHDRTKIRQLPNLLRGYENIRLSTQNVIDAENAPGGPYRLGTSGSCPNATSKSGFFATMAWAVPKDNNKNATNPLTVEVPYICTEGEDQITVWGFHSDNKTQMKNLYGDSNPQKFTSSANGVTTHYVSQIGGFPAQTEDGGLPQSGRIIVDYMVQKPRKTGTIVYQRGVLLPQKVWCASGRSKVIKGSLPLIGEADCLHEKYGGLNKSKPYYTGEHAKAIGNCPIWVKTPLKLANGTKYRPPAKLLKERGFFGAIAGFLEGGWEGMIAGWHGYTSHGAHGVAVAADLKSTQEAINKITKNLNSLSELEVKNLQRLSGAMDELHNEILELDEKVDDLRADTISSQIELAVLLSNEGIINSEDEHLLALERKLKKMLGPSAVDIGNGCFETKHKCNQTCLDRIAAGTFNAGEFSLPTFDSLNITAASLNDDGLDNHTILLYYSTVASSLAVTLMLAIFIVYMVSRDNVSCSICL

SEQ ID NO: 27588 - protein, 584 aa, synthetic construct; identical to SEQ ID NO: 27024
  REGION 1..584: note = hemagglutinin__InfluenzaB__AGX22511

SEQ ID NO: 27589 - protein, 584 aa, synthetic construct
  REGION 1..584: note = hemagglutinin__InfluenzaB__AGX22522
MKAIIVLLMVVTSNADRICTGITSSNSPHVVKTATQGEVNVTGVIPLTTTPTKSYFANLKGTRTRGKLCPDCLNCTDLDVALGRPMCVGTTPSAKASILHEVRPVTSGCFPIMHDRTKIRQLANLLRGYENIRLSTQNVIDAEKAPGGPYRLGTSGSCPNATSKSGFFATMAWAVPKDNNKNATNPLTVEVPYICTEGEDQITVWGFHSDNKTQMKNLYGDSNPQKFTSSANGVTKHYVSQIGGFPDQTEDGGLPQSGRIVVDYMMQKPGKTGTIVYQRGVLLPQKVWCASGRSKVIKGSLPLIGEADCLHEKYGGLNKSKPYYTGEHAKAIGNCPIWVKTPLKLANGTKYRPPAKLLKERGFFGAIAGFLEGGWEGMIAGWHGYTSHGAHGVAVAADLKSTQEAINKITKNLNSLSELEVKNLQRLSGAMDELHNEILELDEKVDDLRADTISSQIELAVLLSNEGIINSEDEHLLALERKLKKMLGPSAVDIGNGCFETKHKCNQTCLDRIAAGTFNAGEFSLPTFDSLNITAASLNDDGLDNHTILLYYSTAASSLAVTLMLAIFIVYMVSRDNVSCSICL

SEQ ID NO: 27590 - protein, 584 aa, synthetic construct; identical to SEQ ID NO: 26426
  REGION 1..584: note = hemagglutinin__InfluenzaB__AGX22533

SEQ ID NO: 27591 - protein, 584 aa, synthetic construct; identical to SEQ ID NO: 27038
  REGION 1..584: note = hemagglutinin__InfluenzaB__AGX22566

SEQ ID NO: 27592 - protein, 584 aa, synthetic construct; identical to SEQ ID NO: 27024
  REGION 1..584: note = hemagglutinin__InfluenzaB__AGX22577

SEQ ID NO: 27593 - protein, 584 aa, synthetic construct; identical to SEQ ID NO: 27038
  REGION 1..584: note = hemagglutinin__InfluenzaB__AGX22588

SEQ ID NO: 27594 - protein, 584 aa, synthetic construct; identical to SEQ ID NO: 26426
  REGION 1..584: note = hemagglutinin__InfluenzaB__AGX22599

SEQ ID NO: 27595 - protein, 584 aa, synthetic construct
  REGION 1..584: note = hemagglutinin__InfluenzaB__AGX22610
MKAIIVLLMVVTSNADRICTGITSSNSPHVVKTATQGEVNVTGVIPLTTTPTKSYFANLKGTRTRGKLCPDCLNCTDLDVALGRPMCVGTTPSAKASILHEVRPVTSGCFPIMHDRTKIRQLPNLLRGYENIRLSTQNVIDAEKAPGGPYRLGTSGSCPNATSKSGFFATMAWAVPKDNNKNATNPLTVEVPYICTEGEDQITVWGFHSDNKTQMKNLYGDPNPQKFTSSANGVTTHYVSQIGGFPDQTEDGGLPQSGRIVVDYMMQKPGKTGTIVYQRGVLLPQKVWCASGRSKVIKGSLPLIGEADCLHEKYGGLNKSKPYYTGEHAKAIGNCPIWVKTPLKLANGTKYRPPAKLLKERGFFGAIAGFLEGGWEGMIAGWHGYTSHGAHGVAVAADLKSTQEAINKITKNLNSLSELEVKNLQRLSGAMDELHNEILELDEKVDDLRADTISSQIELAVLLSNEGIINSEDEHLLALERKLKKMLGPSAVDIGNGCFETKHKCNQTCLDRIAAGTFNAGEFSLPTFDSLNITAASLNDDGLDNHTILLYYSTAASSLAVTLMLAIFIVYMVSRDNVSCSICL

SEQ ID NO: 27596 - protein, 584 aa, synthetic construct
  REGION 1..584: note = hemagglutinin__InfluenzaB__AGX22621
MKAIIVLLMVVTSNADRICTGITSSNSPHVVKTATQGEVNVTGVIPLTTTPTKSYFANLKGTRTRGKLCPDCLNCTDLDVALGRPMCVGTTPSAKASILHEVRPVTSGCFPIMHDRTKIRQLANLLRGYENIRLSTQNVIDAEKAPGGPYRLGTSGSCPNATSKSGFFATMAWAVPKDNNKNATNPLTVEVPYICTGGEDQITVWGFHSDNKTQMKNLYGDSNPQKFTSSANGVTTHYVSQIGGFPDQTEDGGLPQSGRIVVDYMMQKPGKTGTIVYQRGVLLPQKVWCASGRSKVIKGSLPLIGEADCLHEKYGGLNKSKPYYTGEHAKAIGNCPIWVKTPLKLANGTKYRPPAKLLKERGFFGAIAGFLEGGWEGMIAGWHGYTSHGAHGVAVAADLKSTQEAINKITKNLNSLSELEVKNLQRLSGAMDELHNEILELDEKVDDLRADTISSQIELAVLLSNEGIINSEDEHLLALERKLKKMLGPSAVDIGNGCFETKHKCNQTCLDRIAAGTFNAGEFSLPTFDSLNITAASLNDDGLDNHTILLYYSTAASSLAVTLMLAIFIVYMVSRDNVSCSICL

SEQ ID NO: 27597 - protein, 584 aa, synthetic construct; identical to SEQ ID NO: 26426
  REGION 1..584: note = hemagglutinin__InfluenzaB__AGX22632

SEQ ID NO: 27598 - protein, 584 aa, synthetic construct
  REGION 1..584: note = hemagglutinin__InfluenzaB__AGX22643
MKAIIVLLMVVTSNADRICTGITSSNSPHVVKTATQGEVNVTGVIPLTTTPTKSYFANLKGTRTRGKLCPDCLNCTDLDVALGRPMCVGTTPSAKASILHEVRPVTSGCFPIMHDRTKIRQLANLLRGYENIRLSIQNVIDAEKAPGGPYRLGTSGSCPNATSKSGFFATMAWAVPKDNNKNATNPLTVEVPYICTEGEDQITVWGFHSDNKTQMKNLYGDSNPQKFTSSANGVTTHYVSQIGGFPDQTEDGGLPQSGRIVVDYMMQKPGKTGTIVYQRGVLLPQKVWCASGRSKVIKGSLPLIGEADCLHEKYGGLNKSKPYYTGEHAKAIGNCPIWVKTPLKLANGTKYRPPAKLLKERGFFGAIAGFLEGGWEGMIAGWHGYTSHGAHGVAVAADLKSTQEAINKITKNLNSLSELEVKNLQRLSGAMDELHNEILELDEKVDDLRADTISSQIELAVLLSNEGIINSEDEHLLALERKLKKMLGPSAVDIGNGCFETKHKCNQTCLDRIAAGTFNAGEFSLPTFDSLNITAASLNDDGLDNHTILLYYSTAASSLAVTLMLAIFIVYMVSRDNVSCSICL

SEQ ID NO: 27599 - protein, 584 aa, synthetic construct
  REGION 1..584: note = hemagglutinin__InfluenzaB__AGX22654
MKAIIVLLMVVTSNADRICTGITSSNSPHVVKTATQGEVNVTGVIPLTTTPTKSYFANLKGTRTRGKLCPDCLNCTDLDVALGRPMCVGTTPSAKASILHEVRPVTSGCFPIMHDRTKIRQLANLLRGYENIRLSTQNVIDAEKAPGGPYRLGTSGSCPNATSKSGFFATMAWAVPKDNNKNATNPLTVEVPYICTEGEDQITVWGFHSDNKTQMKNLYGDSNPQKFTSSANGVTTHYVSQIGGFPDQTEDGGLPQSGRIVVDYMMQKPGKTGTIVYQRGVLLPQKVWCASGRSKVIKGSLPLIGEADCLHEKYGGLNKSKPYYTGEHAKAIGNCPIWVKTPLKLANGTKYRPPAKLLKERGFFGAIAGFLEGGWEGMIAGWHGYTSHGAHGVAVAADLKSTQEAINKITKNLNSLSELEVKNLQRLSGAMDELHSEILELDEKVDDLRADTISSQIELAVLLSNEGIINSEDEHLLALERKLKKMLGPSAVDIGNGCFETKHKCNQTCLDRIAAGTFNAGEFSLPTFDSLNITAASLNDDGLDNHTILLYYSTAASSLAVTLMLAIFIVYMVSRDNVSCSICL

SEQ ID NO: 27600 - protein, 584 aa, synthetic construct; identical to SEQ ID NO: 27038
  REGION 1..584: note = hemagglutinin__InfluenzaB__AGX22665

SEQ ID NO: 27601 - protein, 584 aa, synthetic construct; identical to SEQ ID NO: 27038
  REGION 1..584: note = hemagglutinin__InfluenzaB__AGX22676

SEQ ID NO: 27602 - protein, 584 aa, synthetic construct; identical to SEQ ID NO: 26426
  REGION 1..584: note = hemagglutinin__InfluenzaB__AGX22687

SEQ ID NO: 27603 - protein, 584 aa, synthetic construct; identical to SEQ ID NO: 27038
  REGION 1..584: note = hemagglutinin__InfluenzaB__AGX22698

SEQ ID NO: 27604 - protein, 584 aa, synthetic construct
  REGION 1..584: note = hemagglutinin__InfluenzaB__AGX22709
MKAIIVLLMVVTSNADRICTGITSSNSPHVVKTATQGEVNVTGVIPLTTTPTKSYFANLKGTRTRGKLCPDCLNCTDLDVALGRPMCVGTTPSAKASILHEVRPVTSGCFPIMHDRTKIRQLANLLRGYENIRLSTQNVIDAEKAPGGPYRLGTSGSCPNATSKSGFFATMAWAVPKDNNKNATNPLTVEVPYICTEGEDQITVWGFHSDNKTQMKNLYGDSNPQKFTSSANGVTTHYVSQIGGFPDQTEDGGLPQSGRIVVDYMMQKPEKTGTIVYQRGVLLPQKVWCASGRSKVIKGSLPLIGEADCLHEKYGGLNKSKPYYTGEHAKAIGNCPIWVKTPLKLANGTKYRPPAKLLKERGFFGAIAGFLEGGWEGMIAGWHGYTSHGAHGVAVAADLKSTQEAINKITKNLNSLSELEVKNLQRLSGAMDELHNEILELDEKVDDLRADTISSQIELAVLLSNEGIINSEDEHLLALERKLKKMLGPSAVDIGNGCFETKHKCNQTCLDRIAAGTFNAGEFSLPTFDSLNITAASLNDDGLDNHTILLYYSTAASSLAVTLMLAIFIVYMVSRDNVSCSICL

SEQ ID NO: 27605 - protein, 584 aa, synthetic construct
  REGION 1..584: note = hemagglutinin__InfluenzaB__AGX22720
MKAIIVLLMVVTSNADRICTGITSSNSPHVVKTATQGEVNVTGVIPLTTTPTKSYFANLKGTRTRGKLCPDCLNCTDLDVALGRPMCVGTTPSAKASILHEVRPVTSGCFPIMHDRTKIRQLPNLLRGYENIRLSTQNVIDAEKAPGGPYRLGTSGSCPNATSKSGFFATMAWAVPKDNNKNATNPLTVEVPYICTEGEDQITVWGFHSDNKTQMKNLYGDSNPQKFTSSANGATTHYVSQIGGFPDQTEDGGLPQSGRIVVDYMMQKPGKTGTIVYQRGVLLPQKVWCASGRSKVIKGSLPLIGEADCLHEKYGGLNKSKPYYTGEHAKAIGNCPIWVKTPLKLANGTKYRPPAKLLKERGFFGAIAGFLEGGWEGMIAGWHGYTSHGAHGVAVAADLKSTQEAINKITKNLNSLSELEVKNLQRLSGAMDELHNEILELDEKVDDLRADTISSQIELAVLLSNEGIINSEDEHLLALERKLKKMLGPSAVDIGNGCFETKHKCNQTCLDRIAAGTFNAGEFSLPTFDSLNITAASLNDDGLDNHTILLYYSTAASSLAVTLMLAIFIVYMVSRDNVSCSICL

SEQ ID NO: 27606 - protein, 584 aa, synthetic construct; identical to SEQ ID NO: 27038
  REGION 1..584: note = hemagglutinin__InfluenzaB__AGX22731

SEQ ID NO: 27607 - protein, 584 aa, synthetic construct; identical to SEQ ID NO: 27599
  REGION 1..584: note = hemagglutinin__InfluenzaB__AGX22742

SEQ ID NO: 27608 - protein, 584 aa, synthetic construct
  REGION 1..584: note = hemagglutinin__InfluenzaB__AGX22753
MKAIIVLLMVVTSNADRICTGITSSNSPHVVKTATQGEVNVTGVIPLTTTPAKSYFANLKGTRTRGKLCPDCLNCTDLDVALGRPMCVGTTPSAKASILHEVRPVTSGCFPIMHDRTKIRQLANLLRGYENIRLSTQNVIDAEKAPGGPYRLGTSGSCPNATSKSGFFATMAWAVPKDNNKNATNPLTVEVPYICKEGEDQITVWGFHSDNKTQMKNLYGDSNPQKFTSSANGVTTHYVSQIGGFPDQTEDGGLPQSGRIVVDYMIQKPGKTGTIVYQRGVLLPQKVWCASGRSKVIKGSLPLIGEADCLHEKYGGLNKSKPYYTGEHAKAIGNCPIWVKTPLKLANGTKYRPPAKLLKERGFFGAIAGFLEGGWEGMIAGWHGYTSHGAHGVAVAADLKSTQEAINKITKNLNSLSELEVKNLQRLSGAMDELHNEILELDEKVDDLRADTISSQIELAVLLSNEGIINSEDEHLLALERKLKKMLGPSAVDIGNGCFETKHKCNQTCLDRIAAGTFNAGEFSLPTFDSLNITAASLNDDGLDNHTILLYYSTAASSLAVTLMLAIFIVYMVSRDNVSCSICL

SEQ ID NO: 27609 - protein, 584 aa, synthetic construct
  REGION 1..584: note = hemagglutinin__InfluenzaB__AGX22764
MKAIIVLLMVVTSNADRICTGITSSNSPHVVKTATQGEVNVTGVIPLTTTPTKSYFANLKGTRTRGKLCPDCLNCTDLDVALGRPMCVGTTPSAKASILHEVRPVTSGCFPIMHDRTKIRQLANLLRGYENIRLSTQNVIDAEKAPGGPYRLGTSGSCPNATSKSGFFATMAWAVPKDNNKNATNPLTVEVPYICKEGEDQITVWGFHSDNKTQMKNLYGDSNPQKFTSSANGVTTHYVSQIGGFPDQTEDGGLPQSGRIVVDYMIQKPGKTGTIVYQRGVLLPQKVWCASGRSKVIKGSLPLIGEADCLHEKYGGLNKSKPYYTGDHAKAIGNCPIWVKTPLKLANGTKYRPPAKLLKERGFFGAIAGFLEGGWEGMIAGWHGYTSHGAHGVAVAADLKSTQEAINKITKNLNSLSELEVKNLQRLSGAMDELHNEILELDEKVDDLRADTISSQIELAVLLSNEGIINSEDEHLLALERKLKKMLGPSAVDIGNGCFETKHKCNQTCLDRIAAGTFNAGEFSLPTFDSLNITAASLNDDGLDNHTILLYYSTAASSLAVTLMLAIFIVYMVSRDNVSCSICL

SEQ ID NO: 27610 - protein, 584 aa, synthetic construct
  REGION 1..584: note = hemagglutinin__InfluenzaB__AGX22775
MKAIIVLLMVVTSNADRICTGITSSNSPHVVKTATQGEVNVTGVIPLTTTPTKSYFANLKGTRTRGKLCPDCLNCTDLDVALGRPMCVGTTPSAKASILHEVRPVTSGCFPIMHDRTKIRQLPNLLRGYENIRLSTQNVIDAEKAPGGPYRLGTSGSCPNATSKSGFFATMAWAVPKDNNKNATNPLTVEVPYICTEGEDQITVWGFHSDNKTQMKNLYGDSNPQKFTSSANGVTTHYVSQIGGFPDQTEDGGLPQSGRIVVDYMMQKPGKTGTIVYQRGVLLPQKVWCASGRSKVIKGSLPLIGEADCLHEKYGGLNKSKPYYTGEHAKAIGNCPIWVKTPLKLANGTKYRPPAKLLKERGFFGAIAGFLEGGWEGMIAGWHGYTSHGAHGVAVAADLKSTQEAINKITKNLNSLSELEVKNLQRLSGAMDELHNEILELDEKVDDLRADTISSQIELAVLLSNEGIINSEDEHLLALERRLKKMLGPSAVEIGNGCFETKHKCNQTCLDRIAAGTFNAGEFSLPTFDSLNITAASLNDDGLDNHTILLYYSTAASSLAVTLMLAIFIVYMVSRDNVSCSICL

SEQ ID NO: 27611 - protein, 584 aa, synthetic construct; identical to SEQ ID NO: 27038
  REGION 1..584: note = hemagglutinin__InfluenzaB__AGX22786

SEQ ID NO: 27612 - protein, 584 aa, synthetic construct
  REGION 1..584: note = hemagglutinin__InfluenzaB__AGX22797
MKAIIVLLMVVTSNADRICTGITSSNSPHVVKTATQGEVNVTGVIPLTTTPTKSYFANLKGTRTRGKLCPDCLNCTDLDVALGRPMCVGTTPSAKASILHEVRPVTSGCFPIMHDRTKIRQLANLLRGYENIRLSTQNVIDAEKAPGGPYRLGTSGSCPNATSKSGFFATMAWAVPKDNNKNATNPLTVEVPYICKEGEDQITVWGFHSDNKTQMKNLYGDSNPQKFTSSANGVTTHYVSQIGGFPDQTEDGGLPQSGRIVVDYMIQKPGKTGTIVYQRGVLFPQKVWCASGRSKVIKGSLPLIGEADCLHEKYGGLNKSKPYYTGEHAKAIGNCPIWVKTPLKLANGTKYRPPAKLLKERGFFGAIAGFLEGGWEGMIAGWHGYTSHGAHGVAVAADLKSTQEAINKITKNLNSLSELEVKNLQRLSGAMDELHNEILELDEKVDDLRADTISSQIELAVLLSNEGIINSEDEHLLALERKLKKMLGPSAVDIGNGCFETKHKCNQTCLDRIAAGTFNAGEFSLPTFDSLNITAASLNDDGLDNHTILLYYSTAASSLAVTLMLAIFIVYMVSRDNVSCSICL

SEQ ID NO: 27613 - protein, 584 aa, synthetic construct; identical to SEQ ID NO: 27038
  REGION 1..584: note = hemagglutinin__InfluenzaB__AGX22808

SEQ ID NO: 27614 - protein, 584 aa, synthetic construct; identical to SEQ ID NO: 27038
  REGION 1..584: note = hemagglutinin__InfluenzaB__AGX22819

SEQ ID NO: 27615 - protein, 584 aa, synthetic construct; identical to SEQ ID NO: 27038
  REGION 1..584: note = hemagglutinin__InfluenzaB__AGX22830

SEQ ID NO: 27616 - protein, 584 aa, synthetic construct
  REGION 1..584: note = hemagglutinin__InfluenzaB__AGX22841
MKAIIVLLMVVTSNADRICTGITSSNSPHVVKTATQGEVNVTGVIPLTTTPTKSYFANLKGTRTRGKLCPDCLNCTDLDVALGRPMCVGTTPSAKASILHEVRPVTSGCFPIMHDRTKIRQLANLLRGYENIRLSTQNVIDAEKAPGGPYRLGTSGSCPNATSKSGFFATMAWAVPKDNNKNATNPLTVEVPYICKEGEDQITVWGFHSDNKTQMKNLYGDSNPQKFTSSADGVTTHYVSQIGGFPDQTEDGGLPQSGRIVVDYMIQKPGKTGTIVYQRGVLLPQKVWCASGRSKVIKGSLPLIGEADCLHEKYGGLNKSKPYYTGEHAKAIGNCPIWVKTPLKLANGTKYRPPAKLLKERGFFGAIAGFLEGGWEGMIAGWHGYTSHGAHGVAVAADLKSTQEAINKITKNLNSLSELEVKNLQRLSGAMDELHNEILELDEKVDDLRADTISSQIELAVLLSNEGIINSEDEHLLALERKLKKMLGPSAVDIGNGCFETKHKCNQTCLDRIAAGTFNAGEFSLPTFDSLNITAASLNDDGLDNHTILLYYSTAASSLAVTLMLAIFIVYMVSRDNVSCSICL

SEQ ID NO: 27617 - protein, 584 aa, synthetic construct; identical to SEQ ID NO: 26426
  REGION 1..584: note = hemagglutinin__InfluenzaB__AGX22852

SEQ ID NO: 27618 - protein, 584 aa, synthetic construct; identical to SEQ ID NO: 27038
  REGION 1..584: note = hemagglutinin__InfluenzaB__AGX22863

SEQ ID NO: 27619 - protein, 584 aa, synthetic construct; identical to SEQ ID NO: 27038
  REGION 1..584: note = hemagglutinin__InfluenzaB__AGX22874

SEQ ID NO: 27620 - protein, 584 aa, synthetic construct; identical to SEQ ID NO: 26426
  REGION 1..584: note = hemagglutinin__InfluenzaB__AGX22885

SEQ ID NO: 27621 - protein, 584 aa, synthetic construct; identical to SEQ ID NO: 27599
  REGION 1..584: note = hemagglutinin__InfluenzaB__AGX22896

SEQ ID NO: 27622 - protein, 584 aa, synthetic construct
  REGION 1..584: note = hemagglutinin__InfluenzaB__AGX22907
MKAIIVLLMVVTSNADRICTGITSSNSPHVVKTATQGEVNVTGVIPLTTTPTKSYFANLKGTRTRGKLCPDCLNCTDLDVALGRPMCVGTTPSAKASILHEVRPVTSGCFPIMHDRTKIRQLANLLRGYENIRLSTQNVIDAEKAPGGPYRLGTSGSCPNATSKSGFFATMAWAVPKDNNKNATNPLTVEVPYICTEGEDQITVWGFHSDNKTQMKNLYGDSNPQKFTSSANGVTTHYVSQIGGFPDQTEDGGLPQSGRIVVDYMMQKPGKTGTIVYQRGVLLPQKVWCASGRSKVIKGSLPLIGEADCLHEKYGGLNKSKPYYTGEHAKAIGNCPIWVKTPLKLANGTKYRPPAKLLKERGFFGAIAGFLEGGWEGMIAGWHGYTSHGAHGVAVAADLKSTQEAINKITKNLNSLSELEVKNLQRLSGAMDELHNEILELDEKVDDLRADTISSQIELAVLLSNEGIINSEDEHLLALERKLKKMLGPSAVDIGNGCFETKHKCNQTCLDRIAAGTFNAGEFSLPTFDSLNITAASLNDDGLDNHTILLYYSTAASSLAVTLMLAIFIVYMVSRDSVSCSICL

SEQ ID NO: 27623 - protein, 584 aa, synthetic construct; identical to SEQ ID NO: 26426
  REGION 1..584: note = hemagglutinin__InfluenzaB__AGX22918

SEQ ID NO: 27624 - protein, 584 aa, synthetic construct; identical to SEQ ID NO: 26426
  REGION 1..584: note = hemagglutinin__InfluenzaB__AGX22929

SEQ ID NO: 27625 - protein, 584 aa, synthetic construct; identical to SEQ ID NO: 27038
  REGION 1..584: note = hemagglutinin__InfluenzaB__AGX22940

SEQ ID NO: 27626 - protein, 584 aa, synthetic construct; identical to SEQ ID NO: 26426
  REGION 1..584: note = hemagglutinin__InfluenzaB__AGX22951

SEQ ID NO: 27627 - protein, 584 aa, synthetic construct; identical to SEQ ID NO: 26426
  REGION 1..584: note = hemagglutinin__InfluenzaB__AGX22962

SEQ ID NO: 27628 - protein, 584 aa, synthetic construct; identical to SEQ ID NO: 26426
  REGION 1..584: note = hemagglutinin__InfluenzaB__AGX22973

SEQ ID NO: 27629 - protein, 584 aa, synthetic construct; identical to SEQ ID NO: 26426
  REGION 1..584: note = hemagglutinin__InfluenzaB__AGX22984

SEQ ID NO: 27630 - protein, 584 aa, synthetic construct; identical to SEQ ID NO: 26426
  REGION 1..584: note = hemagglutinin__InfluenzaB__AGX22995

SEQ ID NO: 27631 - protein, 584 aa, synthetic construct; identical to SEQ ID NO: 26426
  REGION 1..584: note = hemagglutinin__InfluenzaB__AGX23006

SEQ ID NO: 27632 - protein, 584 aa, synthetic construct
  REGION 1..584: note = hemagglutinin__InfluenzaB__AGX23017
MKAIIVLLMVVTSNADRICTGITSSNSPHVVKTATQGEVNVTGVIPLTTTPTKSYFANLKGTRTRGKLCPDCLNCTDLDVALGRPMCVGTTPSAKASILHEIRPVTSGCFPIMHDRTKIRQLANLLRGYENIRLSTQNVIDAEKAPGGPYRLGTSGSCPNATSKSGFFATMAWAVPKDNNKNATNPLTVEVPYICTEGEDQITVWGFHSDNKTQMKNLYGDSNPQKFTSSANGVTTHYVSQIGGFPDQTEDGGLPQSGRIVVDYMMQKPGKTGTIVYQRGVLLPQKVWCASGRSKVIKGSLPLIGEADCLHEKYGGLNKSKPYYTGEHAKAIGNCPIWVKTPLKLANGTKYRPPAKLLKERGFFGAIAGFLEGGWEGMIAGWHGYTSHGAHGVAVAADLKSTQEAINKITKNLNSLSELEVKNLQRLSGAMDELHNEILELDEKVDDLRADTISSQIELAVLLSNEGIINSEDEHLLALERKLKKMLGPSAVDIGNGCFETKHKCNQTCLDRIAAGTFNAGEFSLPTFDSLNITAASLNDDGLDNHTILLYYSTAASSLAVTLMLAIFIVYMVSRDNVSCSICL

SEQ ID NO: 27633 - protein, 584 aa, synthetic construct
  REGION 1..584: note = hemagglutinin__InfluenzaB__AGX23028
MKAIIVLLMVVTSNADRICTGITSSNSPHVVKTATQGEVNVTGVIPLTTTPTKSYFANLKGTKTRGKLCPDCLNCTDLDVALGRPMCVGTTPSAKASILHEVRPVTSGCFPIMHDRTKIRQLANLLRGYENIRLSTQNVIDAEKAPGGPYKLGTSGSCPNATSKSGFFATMAWAVPKDNNKNATNPLTVEVPYICTEGEDQITVWGFHSDNKTQMKNLYGDSNPQKFTSSANGVTTHYVSQIGGFPDQTEDGGLPQSGRIVVDYMMQKPGKTGTIVYQRGVLLPQKVWCASGRSKVIKGSLPLIGEADCLHEKYGGLNKSKPYYTGEHAKAIGNCPIWVKTPLKLANGTKYRPPAKLLKERGFFGAIAGFLEGGWEGMIAGWHGYTSHGAHGVAVAADLKSTQEAINKITKNLNSLSELEVKNLQRLSGAMDELHNEILELDEKVDDLRADTISSQIELAVLLSNEGIINSEDEHLLALERKLKKMLGPSAVDIGNGCFETKHKCNQTCLDRIAAGTFNAGEFSLPTFDSLNITAASLNDDGLDNHTILLYYSTAASSLAVTLMLAIFIVYMVSRDNVSCSICL

SEQ ID NO: 27634 - protein, 584 aa, synthetic construct; identical to SEQ ID NO: 26426
  REGION 1..584: note = hemagglutinin__InfluenzaB__AGX23039

SEQ ID NO: 27635 - protein, 584 aa, synthetic construct
  REGION 1..584: note = hemagglutinin__InfluenzaB__AGX23050
MKAIIVLLMVVTSNADRICTGITSSNSPHVVKTATQGEVNVTGVIPLTTTPTKSYFANLKGTRTRGKLCPDCLNCTDLDVALGRPMCVGTTPSAKASILHEVSPVTSGCFPIMHDRTKIRQLANLLRGYENIRLSTQNVIDAEKAPGGPYRLGTSGSCPNATSKSGFFATMAWAVPKDNNKNATNPLTVEVPYICTEGEDQITVWGFHSDNKTQMKNLYGDSNPQKFTSSANGVTTHYVSQIGGFPDQTEDGGLPQSGRIVVDYMMQKPGKTGTIVYQRGVLLPQKVWCASGRSKVIKGSLPLIGEADCLHEKYGGLNKSKPYYTGEHAKAIGNCPIWVKTPLRLANGTKYRPPAKLLKERGFFGAIAGFLEGGWEGMIAGWHGYTSHGAHGVAVAADLKSTQEAINKITKNLNSLSELEVKNLQRLSGAMDELHNEILELDEKVDDLRADTISSQIELAVLLSNEGIINSEDEHLLALERKLKKMLGPSAVDIGNGCFETKHKCNQTCLDRIAAGTFNAGEFSLPTFDSLNITAASLNDDGLDNHTILLYYSTAASSLAVTLMLAIFIVYMVSRDNVSCSICL

SEQ ID NO: 27636 - protein, 584 aa, synthetic construct
  REGION 1..584: note = hemagglutinin__InfluenzaB__AGX23061
MKAIIVLLMVVTSNADRICTGITSSNSPHVVKTATQGEVNVTGVIPLTTTPTKSYFANLKGTRTRGKLCPDCLNCTDLDVALGRPMCVGTTPSAKASILHEVRPVTSGCFPIMHDRTKIRQLANLLRGYENIRLSTQNVIDAEKAPGGPYRLGTSGSCPNATSKSGFFATMAWAVPKDNNKNATNPLTVEVPYICTEGEDQITVWGFHSDNKTQMKNLYGDSNPQKFTSSANGVTTHYVSQIGGFPDQTEDGGLPQSGRIVVDYMMQKPGKTGTIVYQRGVLLPQKVWCASGRSKVIKGSLPLIGEADCLHEKYGGLNKSKPYYTGEHAKAIGNCPIWVKTPLRLANGTKYRPPAKLLKERGFFGAIAGFLEGGWEGMIAGWHGYTSHGAHGVAVAADLKSTQEAINKITKNLNSLSELEVKNLQRLSGAMDELHNEILELDEKVDDLRADTISSQIELAVLLSNEGIINSEDEHLLALERKLKKMLGPSAVDIGNGCFETKHKCNQTCLDRIAAGTFNAGEFSLPTFDSLNITAASLNDDGLDNHTILLYYSTAASSLAVTLMLAIFIVYMVSRDNVSCSICL

SEQ ID NO: 27637 - protein, 584 aa, synthetic construct; identical to SEQ ID NO: 26426
  REGION 1..584: note = hemagglutinin__InfluenzaB__AGX23072

SEQ ID NO: 27638 - protein, 584 aa, synthetic construct; identical to SEQ ID NO: 27038
  REGION 1..584: note = hemagglutinin__InfluenzaB__AGX23083

SEQ ID NO: 27639 - protein, 584 aa, synthetic construct; identical to SEQ ID NO: 26426
  REGION 1..584: note = hemagglutinin__InfluenzaB__AGX23094

SEQ ID NO: 27640 - protein, 584 aa, synthetic construct; identical to SEQ ID NO: 26426
  REGION 1..584: note = hemagglutinin__InfluenzaB__AGX23105

SEQ ID NO: 27641 - protein, 584 aa, synthetic construct; identical to SEQ ID NO: 27038
  REGION 1..584: note = hemagglutinin__InfluenzaB__AGX23116

SEQ ID NO: 27642 - protein, 584 aa, synthetic construct; identical to SEQ ID NO: 26426
  REGION 1..584: note = hemagglutinin__InfluenzaB__AGX23127

SEQ ID NO: 27643 - protein, 584 aa, synthetic construct; identical to SEQ ID NO: 26426
  REGION 1..584: note = hemagglutinin__InfluenzaB__AGX23138

SEQ ID NO: 27644 - protein, 584 aa, synthetic construct
  REGION 1..584: note = hemagglutinin__InfluenzaB__AGX23149
MKAIIVLLMVVTSNADRICTGITSSDSPHVVKTATQGEVNVTGVIPLTTTPTKSYFANLKGTRTRGKLCPDCLNCTDLDVALGRPMCVGTTPSAKASILHEVRPVTSGCFPIMHDRTKIRQLANLLRGYENIRLSTQNVIDAEKAPGGPYRLGTSGSCPNATSKSGFFATMAWAVPKDNNKNATNPLTVEVPYICTEGEDQITVWGFHSDNKTQMKNLYGDSNPQKFTSSANGVTTHYVSQIGGFPDQTEDGGLPQSGRIVVDYMMQKPGKTGTIVYQRGVLLPQKVWCASGRSKVIKGSLPLIGEADCLHEKYGGLNKSKPYYTGEHAKAIGNCPIWVKTPLKLANGTKYRPPAKLLKERGFFGAIAGFLEGGWEGMIAGWHGYTSHGAHGVAVAADLKSTQEAINKITKNLNSLSELEVKNLQRLSGAMDELHNEILELDEKVDDLRADTISSQIELAVLLSNEGIINSEDEHLLALERKLKKMLGPSAVDIGNGCFETKHKCNQTCLDRIAAGTFNAGEFSLPTFDSLNITAASLNDDGLDNHTILLYYSTAASSLAVTLMLAIFIVYMVSRDNVSCSICL

SEQ ID NO: 27645 - protein, 584 aa, synthetic construct
  REGION 1..584: note = hemagglutinin__InfluenzaB__AGX23160
MKAIIVLLMVVTSNADRICTGITSSNSPHVVKTATQGEVNVTGVIPLTTTPTKSYFANLKGTRTRGKLCPDCLNCTDLDVALGRPMCVGITPSAKASILHEVRPVTSGCFPIMHDRTKIRQLANLLRGYENIRLSTQNVIDAEKAPGGPYRLGTSGSCPNATSKSGFFATMAWAVPKDNNKNATNPLTVEVPYICTEGEDQITVWGFHSDNKTQMKNLYGDSNPQRFTSSANGVTTHYVSQIGGFPDQTEDGGLPQSGRIVVDYMMQKPGKTGTIVYQRGVLLPQKVWCASGRSKVIKGSLPLIGEADCLHEKYGGLNKSKPYYTGEHAKAIGNCPIWVKTPLRLANGTKYRPPAKLLKERGFFGAIAGFLEGGWEGMIAGWHGYTSHGAHGVAVAADLKSTQEAINKITKNLNSLSELEVKNLQRLSGAMDELHNEILELDEKVDDLRADTISSQIELAVLLSNEGIINSEDEHLLALERKLKKMLGPSAVDIGNGCFETKHKCNQTCLDRIAAGTFNAGEFSLPTFDSLNITAASLNDDGLDNHTILLYYSTAASSLAVTLMLAIFIVYMVSRDNVSCSICL

SEQ ID NO: 27646 - protein, 584 aa, synthetic construct
  REGION 1..584: note = hemagglutinin__InfluenzaB__AGX23171
MKAIIVLLMVVTSNADRICTGITSSNSPHVVKTATQGEVNVTGVIPLTTTPTKSYFANLKGTRTRGKLCPDCLNCTDLDVALGRPMCVGTTPSAKASILHEVRPVTSGCFPIMHDRTKIRQLANLLRGYENIRLSTQNVIDAEKAPGGPYRLGTSGSCPNATSKSGFFATMAWAVPKDNNKNATNPLTVEVPYICTEGEDQITVWGFHSDNKTQMKNLYGDSNPQRFTSSANGVTTHYVSQIGGFPDQTEDGGLPQSGRIVVDYMMQKPGKTGTIVYQRGVLLPQKVWCASGRSKVIKGSLPLIGEADCLHEKYGGLNKSKPYYTGEHAKAIGNCPIWVKTPLRLANGTKYRPPAKLLKERGFFGAIAGFLEGGWEGMIAGWHGYTSHGAHGVAVAADLKSTQEAINKITKNLNSLSELEVKNLQRLSGAMDELHNEILELDEKVDDLRADTISSQIELAVLLSNEGIINSEDEHLLALERKLKKMLGPSAVDIGNGCFETKHKCNQTCLDRIAAGTFNAGEFSLPTFDSLNITAASLNDDGLDNHTILLYYSTAASSLAVTLMLAIFIVYMVSRDNVSCSICL

SEQ ID NO: 27647 - protein, 584 aa, synthetic construct; identical to SEQ ID NO: 26426
  REGION 1..584: note = hemagglutinin__InfluenzaB__AGX23182

SEQ ID NO: 27648 - protein, 584 aa, synthetic construct; identical to SEQ ID NO: 26426
  REGION 1..584: note = hemagglutinin__InfluenzaB__AGX23193

SEQ ID NO: 27649 - protein, 584 aa, synthetic construct; identical to SEQ ID NO: 27038
  REGION 1..584: note = hemagglutinin__InfluenzaB__AGX23204

SEQ ID NO: 27650 - protein, 584 aa, synthetic construct; identical to SEQ ID NO: 26426
  REGION 1..584: note = hemagglutinin__InfluenzaB__AGX23215

SEQ ID NO: 27651 - protein, 584 aa, synthetic construct
  REGION 1..584: note = hemagglutinin__InfluenzaB__AGX23226
MKAIIVLLMVVTSNADRICTGITSSNSPHVVKTATQGEVNVTGVIPLTTTPTKSYFANLKGTRTRGKLCPDCLNCTDLDVALGRPMCVGTTPSAKASILHEVRPVTSGCFPIMHDRTKIRQLANLLRGYENIRLSTQNVIDAEKAPGGPYRLGTSGSCPNATSKSGFFATMAWAVPKDNNKNATNPLTVEVPYICKEGEDQITVWGFHSDNKTQMKNLYGDSNPQKFTSSASGVTTHYVSQIGGFPDQTEDGGLPQSGRIVVDYMIQKPGKTGTIVYQRGVLLPQKVWCASGRSKVIKGSLPLIGEADCLHEKYGGLNKSKPYYTGEHAKAIGNCPIWVKTPLKLANGTKYRPPAKLLKERGFFGAIAGFLEGGWEGMIAGWHGYTSHGAHGVAVAADLKSTQEAINKITKNLNSLSELEVKNLQRLSGAMDELHNEILELDEKVDDLRADTISSQIELAVLLSNEGIINSEDEHLLALERKLKKMLGPSAVDIGNGCFETKHKCNQTCLDRIAAGTFNAGEFSLPTFDSLNITAASLNDDGLDNHTILLYYSTAASSLAVTLMLAIFIVYMVSRDNVSCSICL

SEQ ID NO: 27652 - protein, 584 aa, synthetic construct; identical to SEQ ID NO: 27599
  REGION 1..584: note = hemagglutinin__InfluenzaB__AGX23237

SEQ ID NO: 27653 - protein, 584 aa, synthetic construct
  REGION 1..584: note = hemagglutinin__InfluenzaB__AGX23248
MKAIIVLLMVVTSNADRICTGITSSNSPHVVKTATQGEVNVTGVIPLTTTPTKSYFANLKGTRTRGKLCPDCLNCTDLDVALGRPMCVGTTPSAKASILHEVRPVTSGCFPIMHDRTKIRQLANLLRGYENIRLSTQNVIDAEKAPGGPYRLGTSGSCPNATSKSGFFATMAWAVPKDNNKNATNPLTVEVPYICKEGEDQITVWGFHSDNKTQMKNLYGDSNPQKFTSSASGVTTHYVSQIGGFPDQTEDGGLPQSGRIVVDYMIQKPGKTGTIVYQRGVLLPQKVWCASGRSKVIKGSLPLIGEADCLHEKYGGLNKSKPYYTGEHAKAIGNCPIWVKTPLKLANGTKYRPPAKLLKERGFFGAIAGFLEGGWEGMIAGWHGYTSHGAHGVAVAADLKSTQEAINKITKNLNSLSELEVKNLQRLSGAMDELHNEILELDEKVDDLRADTISSQIELAVLLSNEGIINSEDEHLLALERKLKKMLGPSAVDIGNGCFETKHKCNQTCLNRIAAGTFNAGEFSLPTFDSLNITAASLNDDGLDNHTILLYYSTAASSLAVTLMLAIFIVYMVSRDNVSCSICL

SEQ ID NO: 27654 - protein, 584 aa, synthetic construct; identical to SEQ ID NO: 26426
  REGION 1..584: note = hemagglutinin__InfluenzaB__AGX23259

SEQ ID NO: 27655 - protein, 584 aa, synthetic construct; identical to SEQ ID NO: 26426
  REGION 1..584: note = hemagglutinin__InfluenzaB__AGX23270

SEQ ID NO: 27656 - protein, 584 aa, synthetic construct
  REGION 1..584: note = hemagglutinin__InfluenzaB__AGX23281
MKAIIVLLMVVTSNADRICTGITSSNSPHVVKTATQGEVNVTGVIPLTTTPTKSYFANLKGTRTRGKLCPDCLNCTDLDVALGRPMCVGTTPSAKASILHEVRPVTSGCFPIMHDRTKIRQLANLLRGYENIRLSTQNVIDAEKAPGGPYRLGTSGSCPNAASKSGFFATMAWAVPKDNNKNATNPLTVEVPYICTEGEDQITVWGFHSDNKTQMKNLYGDSNPQKFTSSANGVTTHYVSQIGGFPDQTEDGGLPQSGRIVVDYMMQKPGKTGTIVYQRGVLLPQKVWCASGRSKVIKGSLPLIGEADCLHEKYGGLNKSKPYYTGEHAKAIGNCPIWVKTPLKLANGTKYRPPAKLLKERGFFGAIAGFLEGGWEGMIAGWHGYTSHGAHGVAVAADLKSTQEAINKITKNLNSLSELEVKNLQRLSGAMDELHSEILELDEKVDDLRADTISSQIELAVLLSNEGIINSEDEHLLALERKLKKMLGPSAVDIGNGCFETKHKCNQTCLDRIAAGTFNAGEFSLPTFDSLNITAASLNDDGLDNHTILLYYSTAASSLAVTLMLAIFIVYMVSRDNVSCSICL

SEQ ID NO: 27657 - protein, 584 aa, synthetic construct
  REGION 1..584: note = hemagglutinin__InfluenzaB__AGX23292
MKAIIVLLMVVTSNADRICTGITSSNSPHVVKTATQGEVNVTGVIPLTTTPTKSYFANLKGTRTRGKLCPDCLNCTDLDVALGRPMCVGTTPSAKASILHEVRPVTSGCFPIMHDRTKIRQLANLLRGYENIRLSTQNVIDAEKAPGGPYRLGTSGSCPNANSKSGFFATMAWAVPKDNNKNATNPLTVEVPYICTEGEDQITVWGFHSDNKTQMKNLYGDSNPQKFTSSANGVTTHYVSQIGGFPDQTEDGGLPQSGRIVVDYMMQKPGKTGTIVYQRGVLLPQKVWCASGRSKVIKGSLPLIGEADCLHEKYGGLNKSKPYYTGEHAKAIGNCPIWVKTPLKLANGTKYRPPAKLLKERGFFGAIAGFLEGGWEGMIAGWHGYTSHGAHGVAVAADLKSTQEAINKITKNLNSLSELEVKNLQRLSGAMDELHNEILELDEKVDDLRADTISSQIELAVLLSNEGIINSEDEHLLALERKLKKMLGPSAVDIGNGCFETKHKCNQTCLDRIAAGTFNAGEFSLPTFDSLNITAASLNDDGLDNHTILLYYSTAASSLAVTLMLAIFIVYMVSRDNVSCSICL

SEQ ID NO: 27658 - protein, 584 aa, synthetic construct
  REGION 1..584: note = hemagglutinin__InfluenzaB__AGX23314
MKAIIVLLMVVTSNADRICTGITSSNSPHVVKTATQGEVNVTGVIPLTTTPTKSYFANLKGTRTRGKLCPDCLNCTDLDVALGRPMCVGTTPSAKASILHEVRPVTSGCFPIMHDRTKIRQLANLLRGYENIRLSTQNVIDAERAPGGPYRLGTSGSCPNATSKSGFFATMAWAVPKDNNKNATNPLTVEVPYICTEGEDQITVWGFHSDNKTQMKNLYGDSNPQKFTSSANGVTTHYVSQIGGFPDQTEDGGLPQSGRIVVDYMMQKPGKTGTIVYQRGVLLPQKVWCASGRSKVIKGSLPLIGEADCLHEKYGGLNKSKPYYTGEHAKAIGNCPIWVKTPLKLANGTKYRPPAKLLKERGFFGAIAGFLEGGWEGMIAGWHGYTSHGAHGVAVAADLKSTQEAINKITKNLNSLSELEVKNLQRLSGAMDELHNEILELDEKVDDLRADTISSQIELAVLLSNEGIINSEDEHLLALERKLKKMLGPSAVDIGNGCFETKHKCNQTCLDRIAAGTFNAGEFSLPTFDSLNITAASLNDDGLDNHTILLYYSTAASSLAVTLMLAIFIVYMVSRDNVSCSICL

SEQ ID NO: 27659 - protein, 584 aa, synthetic construct; identical to SEQ ID NO: 27658
  REGION 1..584: note = hemagglutinin__InfluenzaB__AGX23325

SEQ ID NO: 27660 - protein, 584 aa, synthetic construct; identical to SEQ ID NO: 27658
  REGION 1..584: note = hemagglutinin__InfluenzaB__AGX23336

SEQ ID NO: 27661 - protein, 584 aa, synthetic construct; identical to SEQ ID NO: 27658
  REGION 1..584: note = hemagglutinin__InfluenzaB__AGX23347

SEQ ID NO: 27662 - protein, 584 aa, synthetic construct; identical to SEQ ID NO: 27658
  REGION 1..584: note = hemagglutinin__InfluenzaB__AGX23358

SEQ ID NO: 27663 - protein, 584 aa, synthetic construct; identical to SEQ ID NO: 27658
  REGION 1..584: note = hemagglutinin__InfluenzaB__AGX23369

SEQ ID NO: 27664 - protein, 584 aa, synthetic construct; identical to SEQ ID NO: 27658
  REGION 1..584: note = hemagglutinin__InfluenzaB__AGX23380

SEQ ID NO: 27665 - protein, 584 aa, synthetic construct; identical to SEQ ID NO: 26426
  REGION 1..584: note = hemagglutinin__InfluenzaB__AGX23391

SEQ ID NO: 27666 - protein, 584 aa, synthetic construct
  REGION 1..584: note = hemagglutinin__InfluenzaB__AGX23413
MKAIIVLLMVVTSNADRICTGITSSNSPHVVKTATQGEVNVTGVIPLTTTPTKSYFANLKGTRTRGKLCPDCLNCTDLDVALGRPMCVGTTPSAKASILHEVRPVTSGCFPIMHDRTKIRQLANLLRGYENIRLSNQNVIDAERAPGGPYRLGTSGSCPNATSKSGFFATMAWAVPKDNNKNATNPLTVEVPYICTEGEDQITVWGFHSDNKTQMKNLYGDSNPQKFTSSANGVTTHYVSQIGGFPDQTEDGGLPQSGRIVVDYMMQKPGKTGTIVYQRGVLLPQKVWCASGRSKVIKGSLPLIGEADCLHEKYGGLNKSKPYYTGEHAKAIGNCPIWVKTPLKLANGTKYRPPAKLLKERGFFGAIAGFLEGGWEGMIAGWHGYTSHGAHGVAVAADLKSTQEAINKITKNLNSLSELEVKNLQRLSGAMDELHNEILELDEKVDDLRADTISSQIELAVLLSNEGIINSEDEHLLALERKLKKMLGPSAVDIGNGCFETKHKCNQTCLDRIAAGTFNAGEFSLPTFDSLNITAASLNDDGLDNHTILLYYSTAASSLAVTLMLAIFIVYMVSRDNVSCSICL

SEQ ID NO: 27667 - protein, 584 aa, synthetic construct; identical to SEQ ID NO: 27666
  REGION 1..584: note = hemagglutinin__InfluenzaB__AGX23424

SEQ ID NO: 27668 - protein, 584 aa, synthetic construct; identical to SEQ ID NO: 26820
  REGION 1..584: note = hemagglutinin__InfluenzaB__AGX23435

SEQ ID NO: 27669 - protein, 584 aa, synthetic construct; identical to SEQ ID NO: 26731
  REGION 1..584: note = hemagglutinin__InfluenzaB__AGX23446

SEQ ID NO: 27670 - protein, 584 aa, synthetic construct; identical to SEQ ID NO: 26820
  REGION 1..584: note = hemagglutinin__InfluenzaB__AGX23457

SEQ ID NO: 27671 - protein, 584 aa, synthetic construct; identical to SEQ ID NO: 26731
  REGION 1..584: note = hemagglutinin__InfluenzaB__AGX23468

SEQ ID NO: 27672 - protein, 584 aa, synthetic construct; identical to SEQ ID NO: 26426
  REGION 1..584: note = hemagglutinin__InfluenzaB__AGX23479

SEQ ID NO: 27673 - protein, 584 aa, synthetic construct; identical to SEQ ID NO: 26426
  REGION 1..584: note = hemagglutinin__InfluenzaB__AGX23490

SEQ ID NO: 27674 - protein, 584 aa, synthetic construct; identical to SEQ ID NO: 27047
  REGION 1..584: note = hemagglutinin__InfluenzaB__AGX23501

SEQ ID NO: 27675 - protein, 584 aa, synthetic construct
  REGION 1..584: note = hemagglutinin__InfluenzaB__AGX23512
MKAIIVLLMVVTSNADRICTGITSSNSPHVVKTATQGEVNVTGVIPLTTTPTKSYFANLKGTKTRGKLCPDCLNCTDLDVALGRPMCVGTTPSAKASILHEVRPVTSGCFPIMHDRTKIRQLANLLRGYENIRLSTQNVIDAEKAPGGPYRLGTSGSCPNATSKSGFFATMAWAVPKDNNKNATNPLTVEVPYICTEGEDQITVWGFHSDNKTQMKTLYGDSNPQKFTSSANGVTTHYVSQIGGFPDQTEDGGLPQSGRIVVDYMMQKPGKTGTIVYQRGVLLPQKVWCASGRSKVIKGSLPLIGEADCLHEKYGGLNKSKPYYTGEHAKAIGNCPIWVKTPLKLANGTKYRPPAKLLKERGFFGAIAGFLEGGWEGMIAGWHGYTSHGAHGVAVAADLKSTQEAINKITKNLNSLSELEVKNLQRLSGAMDELHNEILELDEKVDDLRADTISSQIELAVLLSNEGIINSEDEHLLALERKLKKMLGPSAVDIGNGCFETKHKCNQTCLDRIAAGTFNAGEFSLPTFDSLNITAASLNDDGLDNHTILLYYSTAASSLAVTLMLAIFIVYMVSRDNVSCSICL

SEQ ID NO: 27676 - protein, 584 aa, synthetic construct; identical to SEQ ID NO: 26426
  REGION 1..584: note = hemagglutinin__InfluenzaB__AGX23523

SEQ ID NO: 27677 - protein, 584 aa, synthetic construct; identical to SEQ ID NO: 26731
  REGION 1..584: note = hemagglutinin__InfluenzaB__AGX23534

SEQ ID NO: 27678 - protein, 584 aa, synthetic construct; identical to SEQ ID NO: 26731
  REGION 1..584: note = hemagglutinin__InfluenzaB__AGX23545

SEQ ID NO: 27679 - protein, 584 aa, synthetic construct; identical to SEQ ID NO: 26426
  REGION 1..584: note = hemagglutinin__InfluenzaB__AGX23556

SEQ ID NO: 27680 - protein, 584 aa, synthetic construct; identical to SEQ ID NO: 26426
  REGION 1..584: note = hemagglutinin__InfluenzaB__AGX23567

SEQ ID NO: 27681 - protein, 584 aa, synthetic construct; identical to SEQ ID NO: 26426
  REGION 1..584: note = hemagglutinin__InfluenzaB__AGX23578

SEQ ID NO: 27682 - protein, 584 aa, synthetic construct; identical to SEQ ID NO: 26426
  REGION 1..584: note = hemagglutinin__InfluenzaB__AGX23600

SEQ ID NO: 27683 - protein, 584 aa, synthetic construct
  REGION 1..584: note = hemagglutinin__InfluenzaB__AGX23611
MKAIIVLLMVVTSNADRICTGITSSNSPHVVKTATQGEVNVTGVIPLTTTPTKSYFANLKGTRTRGKLCPDCLNCTDLDVALGRPMCVGTTPSAKASILHEVRPVTSGCFPIMHDRTKIRQLANLLRGYENIRLSTQNVIDAEKAPGGPYRLGTSGSCPNATSKSGFFATMAWAVPKDNNKNATNPLTVEVPYICTEGEDQITVWGFHSDNKTQMKNLYGDSNPQKFTSSANGVTTHYVSQIGGFPDQTEDGGLPQSGRIVVDYMMQKPGKTGTIVYQRGVLLPQKVWCASGRSKVIKGSLPLIGEADCLHEKYGGLNKSKPYYTGEHAKAIGNCPIWVKTPLKLANGTKYRPPAKLLKERGFFGAIAGFLEGGWEGMIAGWHGYTSHGAHGVAVAADLKSTQEAINKITKNLNSLSELEIKNLQRLSGAMDELHNEILELDEKVDDLRADTISSQIELAVLLSNEGIINSEDEHLLALERKLKKMLGPSAVDIGNGCFETKHKCNQTCLDRIAAGTFNAGEFSLPTFDSLNITAASLNDDGLDNHTILLYYSTAASSLAVTLMLAIFIVYMVSRDNVSCSICL

SEQ ID NO: 27684 - protein, 584 aa, synthetic construct; identical to SEQ ID NO: 26426
  REGION 1..584: note = hemagglutinin__InfluenzaB__AGX23622

SEQ ID NO: 27685 - protein, 584 aa, synthetic construct; identical to SEQ ID NO: 26731
  REGION 1..584: note = hemagglutinin__InfluenzaB__AGX23633

SEQ ID NO: 27686 - protein, 584 aa, synthetic construct; identical to SEQ ID NO: 26731
  REGION 1..584: note = hemagglutinin__InfluenzaB__AGX23644

SEQ ID NO: 27687 - protein, 584 aa, synthetic construct; identical to SEQ ID NO: 26426
  REGION 1..584: note = hemagglutinin__InfluenzaB__AGX23655

SEQ ID NO: 27688 - protein, 584 aa, synthetic construct; identical to SEQ ID NO: 26731
  REGION 1..584: note = hemagglutinin__InfluenzaB__AGX23666

SEQ ID NO: 27689 - protein, 584 aa, synthetic construct
  REGION 1..584: note = hemagglutinin__InfluenzaB__AGX23677
MKAIIVLLMVVTSNADRICTGITSSNSPHVVKTATQGEVNVTGVIPLTTTPTKSYFANLKGTKTRGKLCPDCLNCTDLDVALGRPMCVGTTPSAKASILHEVRPVTSGCFPIMHDRTKIRQLANLLRGYEKIRLSTQNVIDAEKAPGGPYRLGTSGSCPNATSKSGFFATMAWAVPKDNNKNATNPLTVEVPYICIEGEDQITVWGFHSDNKTQMKNLYGDSNPQKFTSSANGVTTHYVSQIGGFPDQTEDGGLPQSGRIVVDYMMQKPGKTGTIVYQRGVLLPQKVWCASGRSKVIKGSLPLIGEADCLHEKYGGLNKSKPYYTGEHAKAIGNCPIWVKTPLKLANGTKYRPPAKLLKERGFFGAIAGFLEGGWEGMIAGWHGYTSHGAHGVAVAADLKSTQEAINKITKNLNSLSELEVKNLQRLSGAMDELHNEILELDEKVDDLRADTISSQIELAVLLSNEGIINSEDEHLLALERKLKKMLGPSAVDIGNGCFETKHKCNQTCLDRIAAGTFNAGEFSLPTFDSLNITAASLNDDGLDNHTILLYYSTAASSLAVTLMLAIFIVYMVSRDNVSCSICL

SEQ ID NO: 27690 - protein, 584 aa, synthetic construct; identical to SEQ ID NO: 26731
  REGION 1..584: note = hemagglutinin__InfluenzaB__AGX23688

SEQ ID NO: 27691 - protein, 584 aa, synthetic construct; identical to SEQ ID NO: 26731
  REGION 1..584: note = hemagglutinin__InfluenzaB__AGX23699

SEQ ID NO: 27692 - protein, 584 aa, synthetic construct; identical to SEQ ID NO: 26426
  REGION 1..584: note = hemagglutinin__InfluenzaB__AGX23710

SEQ ID NO: 27693 - protein, 584 aa, synthetic construct; identical to SEQ ID NO: 26731
  REGION 1..584: note = hemagglutinin__InfluenzaB__AGX23721

SEQ ID NO: 27694 - protein, 584 aa, synthetic construct; identical to SEQ ID NO: 26426
  REGION 1..584: note = hemagglutinin__InfluenzaB__AGX23732

SEQ ID NO: 27695 - protein, 584 aa, synthetic construct; identical to SEQ ID NO: 26731
  REGION 1..584: note = hemagglutinin__InfluenzaB__AGX23743

SEQ ID NO: 27696 - protein, 584 aa, synthetic construct; identical to SEQ ID NO: 26731
  REGION 1..584: note = hemagglutinin__InfluenzaB__AGX23754

SEQ ID NO: 27697 - protein, 584 aa, synthetic construct; identical to SEQ ID NO: 26426
  REGION 1..584: note = hemagglutinin__InfluenzaB__AGX23765

SEQ ID NO: 27698 - protein, 584 aa, synthetic construct; identical to SEQ ID NO: 26731
  REGION 1..584: note = hemagglutinin__InfluenzaB__AGX23776

SEQ ID NO: 27699 - protein, 584 aa, synthetic construct; identical to SEQ ID NO: 26731
  REGION 1..584: note = hemagglutinin__InfluenzaB__AGX23787

SEQ ID NO: 27700 - protein, 584 aa, synthetic construct; identical to SEQ ID NO: 26426
  REGION 1..584: note = hemagglutinin__InfluenzaB__AGX23798

SEQ ID NO: 27701 - protein, 584 aa, synthetic construct; identical to SEQ ID NO: 26426
  REGION 1..584: note = hemagglutinin__InfluenzaB__AGX23809

SEQ ID NO: 27702 - protein, 584 aa, synthetic construct; identical to SEQ ID NO: 26426
  REGION 1..584: note = hemagglutinin__InfluenzaB__AGX23820

SEQ ID NO: 27703 - protein, 584 aa, synthetic construct; identical to SEQ ID NO: 26731
  REGION 1..584: note = hemagglutinin__InfluenzaB__AGX23831

SEQ ID NO: 27704 - protein, 584 aa, synthetic construct; identical to SEQ ID NO: 26426
  REGION 1..584: note = hemagglutinin__InfluenzaB__AGX23842

SEQ ID NO: 27705 - protein, 584 aa, synthetic construct
  REGION 1..584: note = hemagglutinin__InfluenzaB__AGX23853
MKAIIVLLMVVTSNADRICTGITSSNSPHVVKTATQGEVNVTGVIPLTTTPTKSYFANLKGTRTRGKLCPDCLNCTDLDVALGRPMCVGTTPSAKASILHEVRPVTSGCFPIMHDRTKIRQLANLLRGYENIRLSIQNVIDAEKAPGGPYRLGTSGSCPNATSKSGFFATMAWAVPKDNNKNATNPLTVEVPYICTEGEDQITVWGFHSDNKTQMKNLYGDSNPQKFTSSANGVTTHYVSQIGGFPDQTEDGGLPQSGRIVVDYMMQKSGKTGTIVYQRGVLLPQKVWCASGRSKVIKGSLPLIGEADCLHEKYGGLNKSKPYYTGEHAKAIGNCPIWVKTPLKLANGTKYRPPAKLLKERGFFGAIAGFLEGGWEGMIAGWHGYTSHGAHGVAVAADLKSTQEAINKITKNLNSLSELEVKNLQRLSGAMDELHNEILELDEKVDDLRADTISSQIELAVLLSNEGIINSEDEHLLALERKLKKMLGPSAVDIGNGCFETKHKCNQTCLDRIAAGTFNAGEFSLPTFDSLNITAASLNDDGLDNHTILLYYSTAASSLAVTLMLAIFIVYMVSRDNVSCSICL

SEQ ID NO: 27706 - protein, 584 aa, synthetic construct; identical to SEQ ID NO: 26426
  REGION 1..584: note = hemagglutinin__InfluenzaB__AGX23864

SEQ ID NO: 27707 - protein, 584 aa, synthetic construct; identical to SEQ ID NO: 26731
  REGION 1..584: note = hemagglutinin__InfluenzaB__AGX23875

SEQ ID NO: 27708 - protein, 584 aa, synthetic construct; identical to SEQ ID NO: 26426
  REGION 1..584: note = hemagglutinin__InfluenzaB__AGX23886

SEQ ID NO: 27709 - protein, 584 aa, synthetic construct
  REGION 1..584: note = hemagglutinin__InfluenzaB__AGX23897
MKAIIVLLMVVTSNADRICTGITSSNSPHVVKTATQGEVNVTGVIPLTTTPTKSYFANLKGTRTRGKLCPDCLNCTDLDVALGRPMCVGTTPSAKASILHEVRPVTSGCFPIMHDRTKIRQLANLLRGYENIRLSTQNVIDAEKAPGGPYRLGTSGSCPNATSKSGFFATMAWAVPKDNNKNATNPLTVEVPYICTEGEDQITVWGFHSDNKTQMKNLYGDSNPQKFTSSANGVTTHYVSQIGGFPDQTEDGGLPQSGRIVVDYMMQKSGKTGTIVYQRGVLLPQKVWCASGRSKVIKGSLPLIGEADCLHEKYGGLNKSKPYYTGEHAKAIGNCPIWVKTPLKLANGTKYRPPAKLLKERGFFGAIAGFLEGGWEGMIAGWHGYTSHGAHGVAVAADLKSTQEAINKITKNLNSLSELEVKNLQRLSGAMDELHNEILELDEKVDDLRADTISSQIELAVLLSNEGIINSEDEHLLALERKLKKMLGPSAVDIGNGCFETKHKCNQTCLDRIAAGTFNAGEFSLPTFDSLNITAASLNDDGLDNHTILLYYSTAASSLAVTLMLAIFIVYMVSRDNVSCSICL

SEQ ID NO: 27710 - protein, 584 aa, synthetic construct
  REGION 1..584: note = hemagglutinin__InfluenzaB__AGX23908
MKAIIVLLMVVTSNADRICTGITSSNSPHVVKTATQGEVNVTGVIPLTTTPTKSYFANLKGTRTRGKLCPDCLNCTDLDVALGRPMCVGTTPSAKASILHEVRPVTSGCFPIMHDRTKIRQLANLLRGYENIRLSTQNVIDAEKAPGGPYRLGTSGSCPNATSKSGFFVTMAWAVPKDNNKNATNPLTVEVPYICTEGEDQITVWGFHSDNKTQMKNLYGDSNPQKFTSSANGVTTHYVSQIGGFPDQTEDGGLPQSGRIVVDYMMQKPGKTGTIVYQRGVLLPQKVWCASGRSKVIKGSLPLIGEADCLHEKYGGLNKSKPYYTGEHAKAIGNCPIWVKTPLKLANGTKYRPPAKLLKERGFFGAIAGFLEGGWEGMIAGWHGYTSHGAHGVAVAADLKSTQEAINKITKNLNSLSELEVKNLQRLSGAMDELHNEILELDEKVDDLRADTISSQIELAVLLSNEGIINSEDEHLLALERKLKKMLGPSAVDIGNGCFETKHKCNQTCLDRIAAGTFNAGEFSLPTFDSLNITAASLNDDGLDNHTILLYYSTAASSLAVTLMLAIFIVYMVSRDNVSCSICL

SEQ ID NO: 27711 - protein, 584 aa, synthetic construct; identical to SEQ ID NO: 26567
  REGION 1..584: note = hemagglutinin__InfluenzaB__AGX23919

SEQ ID NO: 27712 - protein, 584 aa, synthetic construct; identical to SEQ ID NO: 27047
  REGION 1..584: note = hemagglutinin__InfluenzaB__AGX23930

SEQ ID NO: 27713 - protein, 584 aa, synthetic construct; identical to SEQ ID NO: 26426
  REGION 1..584: note = hemagglutinin__InfluenzaB__AGX23941

SEQ ID NO: 27714 - protein, 584 aa, synthetic construct; identical to SEQ ID NO: 26731
  REGION 1..584: note = hemagglutinin__InfluenzaB__AGX23952

SEQ ID NO: 27715 - protein, 584 aa, synthetic construct; identical to SEQ ID NO: 26731
  REGION 1..584: note = hemagglutinin__InfluenzaB__AGX23963

SEQ ID NO: 27716 - protein, 584 aa, synthetic construct; identical to SEQ ID NO: 27047
  REGION 1..584: note = hemagglutinin__InfluenzaB__AGX23974

SEQ ID NO: 27717 - protein, 584 aa, synthetic construct; identical to SEQ ID NO: 26567
  REGION 1..584: note = hemagglutinin__InfluenzaB__AGX23985

SEQ ID NO: 27718 - protein, 584 aa, synthetic construct
  REGION 1..584: note = hemagglutinin__InfluenzaB__AGX23996
MKAIIVLLMVVTSNADRICTGITSSNSPHVVKTATQGEVNVTGVIPLTTTPTKSYFANLKGTRTRGKLCPDCLNCTDLDVALGRPMCVGTTPSAKASILHEVRPITSGCFPIMHDRTKIRQLANLLRGYENIRLSTQNVIDAEKAPGGPYRLGTSGSCPNATSKSGFFATMAWAVPKDNNKNATNPLTVEVPYICTEGEDQITVWGFHSDNKTQMKNLYGDSNPQKFTSSANGVTTHYVSQIGGFPDQTEDGGLPQSGRIVVDYMMQKPGKTGTIVYQRGVLLPQKVWCASGRSKVIKGSLPLIGEADCLHEKYGGLNKSKPYYTGEHAKAIGNCPIWVKTPLKLANGTKYRPPAKLLKERGFFGAIAGFLEGGWEGMIAGWHGYTSHGAHGVAVAADLKSTQEAINKITKNLNSLSELEVKNLQRLSGAMDELHNEILELDEKVDDLRADTISSQIELAVLLSNEGIINSEDEHLLALERKLKKMLGPSAVDIGNGCFETKHKCNQTCLDRIAAGTFNAGEFSLPTFDSLNITAASLNDDGLDNHTILLYYSTAASSLAVTLMLAIFIVYMVSRDNVSCSICL

SEQ ID NO: 27719 - protein, 584 aa, synthetic construct; identical to SEQ ID NO: 27047
  REGION 1..584: note = hemagglutinin__InfluenzaB__AGX24007

SEQ ID NO: 27720 - protein, 584 aa, synthetic construct; identical to SEQ ID NO: 27047
  REGION 1..584: note = hemagglutinin__InfluenzaB__AGX24018

SEQ ID NO: 27721 - protein, 584 aa, synthetic construct
  REGION 1..584: note = hemagglutinin__InfluenzaB__AGX24029
MKAIIVLLMVVTSNADRICTGITSSNSPHVVKTATQGEVNVTGVIPLTTTPTKSYFANLKGTRTRGKLCPDCLNCTDLDVALGRPMCVGTTPSAKASILHEVRPVTSGCFPIMHDRTKIRQLPNLLRGYENIRLSTQNVIDAEKAPGGPYRLGTSGSCPNATSKSGFFATMAWAVPKDNNKNATNPLTVEVPYICKEGEDQITVWGFHSDNKTQMKNLYGDSNPQKFTSSANGVTTHYVSQIGSFPDQTEDGGLPQSGRIVVDYMMQKPGKTGTIVYQRGVLLPQKVWCASGRSKVIKGSLPLIGEADCLHEKYGGLNKSKPYYTGEHAKAIGNCPIWVKTPLKLANGTKYRPPAKLLKERGFFGAIAGFLEGGWEGMIAGWHGYTSHGAHGVAVAADLKSTQEAINKITKNLNSLSELEVKNLQRLSGAMDELHNEILELDEKVDDLRADTISSQIELAVLLSNEGIINSEDEHLLALERKLKKMLGPSAVEIGNGCFETKHKCNQTCLNRIAAGTFNAGEFSLPTFDSLNITAASLNDDGLDNHTILLYYSTAASSLAVTLMLAIFIVYMVSRDNVSCSICL

SEQ ID NO: 27722 - protein, 584 aa, synthetic construct; identical to SEQ ID NO: 27047
  REGION 1..584: note = hemagglutinin__InfluenzaB__AGX24040

SEQ ID NO: 27723 - protein, 584 aa, synthetic construct; identical to SEQ ID NO: 26731
  REGION 1..584: note = hemagglutinin__InfluenzaB__AGX24051

SEQ ID NO: 27724 - protein, 584 aa, synthetic construct; identical to SEQ ID NO: 26820
  REGION 1..584: note = hemagglutinin__InfluenzaB__AGX24062

SEQ ID NO: 27725 - protein, 584 aa, synthetic construct; identical to SEQ ID NO: 26567
  REGION 1..584: note = hemagglutinin__InfluenzaB__AGX24073

SEQ ID NO: 27726 - protein, 584 aa, synthetic construct
  REGION 1..584: note = hemagglutinin__InfluenzaB__AGX24084
MKAIIVLLMVVTSNADRICTGITSSNSPHVVKTATQGEVNVTGVIPLTTTPTKSYFANLKGTRTRGKLCPDCLNCTDLDVALGRPMCVGTTPSAKASIIHEVRPVTSGCFPIMHDRTKIRQLANLLRGYENIRLSTQNVIDAEKAPGGPYRLGTSGSCPNATSKSGFFATMAWAVPKDNNKNATNPLTVEVPYICTEGEDQITVWGFHSDNKTQMKNLYGDSNPQKFTSSANGVTTHYVSQIGGFPDQTEDGGLPQSGRIVVDYMMQKPGKTGTIVYQRGVLLPQKVWCASGRSKVIKGSLPLIGEADCLHEKYGGLNKSKPYYTGEHAKAIGNCPIWVKTPLKLANGTKYRPPAKLLKERGFFGAIAGFLEGGWEGMIAGWHGYTSHGAHGVAVAADLKSTQEAINKITKNLNSLSELEVKNLQRLSGAMDELHNEILELDEKVDDLRADTISSQIELAVLLSNEGIINSEDEHLLALERKLKKMLGPSAVDIGNGCFETKHKCNQTCLDRIAAGTFNAGEFSLPTFDSLNITAASLNDDGLDNHTILLYYSTAASSLAVTLMLAIFIVYMVSRDNVSCSICL

SEQ ID NO: 27727 - protein, 584 aa, synthetic construct; identical to SEQ ID NO: 27047
  REGION 1..584: note = hemagglutinin__InfluenzaB__AGX24095

SEQ ID NO: 27728 - protein, 584 aa, synthetic construct
  REGION 1..584: note = hemagglutinin__InfluenzaB__AGX24106
MKAIIVLLMVVTSNADRICTGITSSNSPHVVKTATQGEVNVTGVIPLTTTPTKSYFANLKGTRTRGKLCPDCLNCTDLDVALGRPMCVGTTPSAKASILHEVRPVTSGCFPIMHDRTKIRQLANLLRGYENIRLSTQNVIDAEKAPGGPYRLGTSGSCPNTTSKSGFFATMAWAVPKDNNKNATNPLTVEVPYICTEGEDQITVWGFHSDNKTQMKNLYGDSNPQKFTSSANGVTTHYVSQIGGFPDQTEDGGLPQSGRIVVDYMMQKPGKTGTIVYQRGVLLPQKVWCASGRSKVIKGSLPLIGEADCLHEKYGGLNKSKPYYTGEHAKAIGNCPIWVKTPLKLANGTKYRPPAKLLKERGFFGAIAGFLEGGWEGMIAGWHGYTSHGAHGVAVAADLKSTQEAINKITKNLNSLSELEVKNLQRLSGAMDELHNEILELDEKVDDLRADTISSQIELAVLLSNEGIINSEDEHLLALERKLKKMLGPSAVDIGNGCFETKHKCNQTCLDRIAAGTFNAGEFSLPTFDSLNITAASLNDDGLDNHTILLYYSTAASSLAVTLMLAIFIVYMVSRDNVSCSICL

SEQ ID NO: 27729 - protein, 584 aa, synthetic construct
  REGION 1..584: note = hemagglutinin__InfluenzaB__AGX24117
MKAIIVLLMVVTSNADRICTGITSSNSPHVVKTATQGEVNVTGVIPLTTTPTKSYFANLKGTRTRGKLCPDCLNCTDLDVALGRPMCVGTTPSAKASILHEVRPVTSGCFPIMHDRTKIRQLPNLLRGYENIRLSTQNVIDAEKAPGGPYRLGTSGSCPNTTSKSGFFATMAWAVPKDNNKNATNPLTVEVPYICTEGEDQITVWGFHSDNKTQMKNLYGDSNPQKFTSSANGVTTHYVSQIGSFPDQTEDGGLPQSGRIVVDYMMQKPGKTGTIVYQRGILLPQKVWCASGRSKVIKGSLPLIGEADCLHEKYGGLNKSKPYYTGEHAKAIGNCPIWVKTPLKLANGTKYRPPAKLLKERGFFGAIAGFLEGGWEGMIAGWHGYTSHGAHGVAVAADLKSTQEAINKITKNLNSLSELEVKNLQRLSGAMDELHNEILELDEKVDDLRADTISSQIELAVLLSNEGIINSEDEHLLALERKLKKMLGPSAVEIGNGCFETKHKCNQTCLDRIAAGTFNAGEFSLPTFDSLNITAASLNDDGLDNHTILLYYSTAASSLAVTLMLAIFIVYMVSRDNVSCSICL

SEQ ID NO: 27730 - protein, 584 aa, synthetic construct
  REGION 1..584: note = hemagglutinin__InfluenzaB__AGX24128
MKAIIVLLMVVTSNADRICTGITSSNSPHVVKTATQGEVNVTGVIPLTTTPTKSYFANLKGTRTRGKLCPDCLNCTDLDVALGRPMCVGTTPSAKASILHEVRPVTSGCFPIMHDRTKIRQLPNLLRGYENIRLSTQNVIDAEKAPGGPYRLGTSGSCPNATSKIGFFATMAWAVPKDNYKNATNPLTVEVPYICTEGEDQITVWGFHSDNKTQMKNLYGDSNPQKFTSSANGVTTHYVSQIGDFPDQTEDGGLPQSGRIVVDYMMQKPGKTGTIVYQRGVLLPQKVWCASGRSKVIKGSLPLIGEADCIHEKYGGLNKSKPYYTGEHAKAIGNCPIWVKTPLKLANGTKYRPPAKLLKERGFFGAIAGFLEGGWEGMIAGWHGYTSHGAHGVAVAADLKSTQEAINKITKNLNSLSELEVKNLQRLSGAMDELHNEILELDEKVDDLRADTISSQIELAVLLSNEGIINSEDEHLLALERKLKKMLGPSAVDIGNGCFETKHKCNQTCLDRIAAGTFNAGEFSLPTFDSLNITAASLNDDGLDNHTILLYYSTAASSLAVTLMLAIFIVYMVSRDNVSCSICL

SEQ ID NO: 27731 - protein, 584 aa, synthetic construct; identical to SEQ ID NO: 26426
  REGION 1..584: note = hemagglutinin__InfluenzaB__AGX24139

SEQ ID NO: 27732 - protein, 584 aa, synthetic construct
  REGION 1..584: note = hemagglutinin__InfluenzaB__AGX24150
MKAIIVLLMVVTSNADRICTGITSSNSPHVVKTATQGEVNVTGVIPLTTTPTKSYFANLKGTRTRGKLCPYCLNCTDLDVALGRPMCVGTTPSAKASILHEVRPVTSGCFPIMHDRTKIRQLPNLLRGYENIRLSTQNVIDAEKAPGGPYRLGTSGSCPNATSKSGFFATMAWAVPKDNNKNATNPLTVEVPYICTEGEDQITVWGFHSDNKTQMKNLYGDSNPQKFTSSANGVTTHYVSQIGSFPDQTEDGGLPQSGRIVVDYMMQKPGKTGTIVYQRGILLPQKVWCASGRSKVIKGSLPLIGEADCLHEKYGGLNKSKPYYTGEHAKAIGNCPIWVKTPLKLANGTKYRPPAKLLKERGFFGAIAGFLEGGWEGMIAGWHGYTSHGAHGVAVAADLKSTQEAINKITKNLNSLSELEVKNLQRLSGAMDELHNEILELDEKVDDLRADTISSQIELAVLLSNEGIINSEDEHLLALERKLKKMLGPSAVEIGNGCFETKHKCNQTCLDRIAAGTFNAGEFSLPTFDSLNITAASLNDDGLDNHTILLYYSTAASSLAVTLMLAIFIVYMVSRDNVSCSICL

SEQ ID NO: 27733 - protein, 584 aa, synthetic construct; identical to SEQ ID NO: 27047
  REGION 1..584: note = hemagglutinin__InfluenzaB__AGX24161

SEQ ID NO: 27734 - protein, 584 aa, synthetic construct; identical to SEQ ID NO: 26820
  REGION 1..584: note = hemagglutinin__InfluenzaB__AGX24172

SEQ ID NO: 27735 - protein, 584 aa, synthetic construct; identical to SEQ ID NO: 26820
  REGION 1..584: note = hemagglutinin__InfluenzaB__AGX24183

SEQ ID NO: 27736 - protein, 584 aa, synthetic construct; identical to SEQ ID NO: 26820
  REGION 1..584: note = hemagglutinin__InfluenzaB__AGX24194

SEQ ID NO: 27737 - protein, 584 aa, synthetic construct; identical to SEQ ID NO: 26567
  REGION 1..584: note = hemagglutinin__InfluenzaB__AGX24205

SEQ ID NO: 27738 - protein, 584 aa, synthetic construct; identical to SEQ ID NO: 26731
  REGION 1..584: note = hemagglutinin__InfluenzaB__AGX24227

SEQ ID NO: 27739 - protein, 584 aa, synthetic construct; identical to SEQ ID NO: 26820
  REGION 1..584: note = hemagglutinin__InfluenzaB__AGX24238

SEQ ID NO: 27740 - protein, 584 aa, synthetic construct
  REGION 1..584: note = hemagglutinin__InfluenzaB__AGX24249
MKAIIVLLMVVTSNADRICTGITSSKSPHVVKTATQGEVNVTGVIPLTTTPTKSYFANLKGTRTRGKLCPDCLNCTDLDVALGRPMCVGTTPSAKASILHEVRPVTSGCFPIMHDRTKIRQLPNLLRGYENIRLSTQNVIDAEKAPGGPYRLGTSGSCPNATSKIGFFATMAWAVPKDNYKNATNPLTVEVPYICTEGEDQITVWGFHSDNKTQMKNLYGDSNPQKFTSSANGVTTHYVSQIGDFPDQTEDGGLPQSGRIVVDYMMQKPGKTGTIVYQRGVLLPQKVWCASGRSKVIKGSLPLIGEADCLHEKYGGLNKSKPYYTGEHAKAIGNCPIWVKTPLKLANGTKYRPPAKLLKERGFFGAIAGFLEGGWEGMIAGWHGYTSHGAHGVAVAADLKSTQEAINKITKNLNSLSELEVKNLQRLSGAMDELHNEILELDEKVDDLRADTISSQIELAVLLSNEGIINSEDEHLLALERKLKKMLGPSAVDIGNGCFETKHKCNQTCLDRIAAGTFNAGEFSLPTFDSLNITAASLNDDGLDNHTILLYYSTAASSLAVTLMLAIFIVYMVSRDNVSCSICL

SEQ ID NO: 27741 - protein, 584 aa, synthetic construct; identical to SEQ ID NO: 26567
  REGION 1..584: note = hemagglutinin__InfluenzaB__AGX24260

SEQ ID NO: 27742 - protein, 584 aa, synthetic construct; identical to SEQ ID NO: 27056
  REGION 1..584: note = hemagglutinin__InfluenzaB__AGX24271

SEQ ID NO: 27743 - protein, 584 aa, synthetic construct
  REGION 1..584: note = hemagglutinin__InfluenzaB__AGX24282
MKAIIVLLMVVTSNADRICTGITSSNSPHVVKTATQGEVNVTGVIPLTTTPTKSYFANLKGTRTRGKLCPDCLNCTDLDVALGRPMCVGTTPSAKASILHEVRPVTSGCFPIMHDRTKIRQLPNLLRGYENIRLSTQNVIDAEKAPGGPYRLGTSGSCPNATSKSGFFATMAWAVPKDNNKNATNPLTVEVPYICTKGEDQITVWGFHSDNKTQMKNLYGDSNPQKFTSSANGVTTHYVSQIGSFPDQTEDGGLPQSGRIVVDYMMQKPGKTGTIVYQRGVLLPQRVWCASGRSKVIKGSLPLIGEADCLHEKYGGLNKSKPYYTGEHAKAIGNCPIWVKTPLKLANGTKYRPPAKLLKERGFFGAIAGFLEGGWEGMIAGWHGYTSHGAHGVAVAADLKSTQEAINKITKNLNSLSELEVKNLQRLSGAMDELHNEILELDEKVDDLRADTISSQIELAVLLSNEGIINSEDEHLLALERKLKKMLGPSAVEIGNGCFETKHKCNQTCLDRIAAGTFNAGEFSLPTFDSLNITAASLNDDGLDNHTILLYYSTAASSLAVTLMLAIFIVYMVSRDNVSCSICL

SEQ ID NO: 27744 - protein, 584 aa, synthetic construct; identical to SEQ ID NO: 26567
  REGION 1..584: note = hemagglutinin__InfluenzaB__AGX24293

SEQ ID NO: 27745 - protein, 584 aa, synthetic construct; identical to SEQ ID NO: 26567
  REGION 1..584: note = hemagglutinin__InfluenzaB__AGX24304

SEQ ID NO: 27746 - protein, 584 aa, synthetic construct; identical to SEQ ID NO: 27056
  REGION 1..584: note = hemagglutinin__InfluenzaB__AGX24315

SEQ ID NO: 27747 - protein, 584 aa, synthetic construct
  REGION 1..584: note = hemagglutinin__InfluenzaB__AGX24326
MKAIIVLLMVVTSNADRICTGITSSNSPHVVKTATQGEVNVTGVIPLTTTPTKSYFANLKGTRTRGKLCPDCLNCTDLDVALGRPTCVGTTPSAKASILHEVRPVTSGCFPIMHDRTKIRQLPNLLRGYENIRLSTQNVIDAEKAPGGPYRLGTSGSCPNATSKSGFFATMAWAVPKDNNKNATNPLTVEVPYICTEGEDQITVWGFHSDNKTQMKNLYGDSNPQKFTSSANGVTTHYVSQIGSFPDQTEDGGLPQSGRIVVDYMMQKPGKTGTIVYQRGILLPQKVWCASGRSKVIKGSLPLIGEADCLHEKYGGLNKSKPYYTGEHAKAIGNCPIWVKTPLKLANGTKYRPPAKLLKERGFFGAIAGFLEGGWEGMIAGWHGYTSHGAHGVAVAADLKSTQEAINKITKNLNSLSELEVKNLQRLSGAMDELHNEILELDEKVDDLRADTISSQIELAVLLSNEGIINSEDEHLLALERKLKKMLGPSAVEIGNGCFETKHKCNQTCLDRIAAGTFNAGEFSLPTFDSLNITAASLNDDGLDNHTILLYYSTAASSLAVTLMLAIFIVYMVSRDNVSCSICL

SEQ ID NO: 27748 - protein, 584 aa, synthetic construct
  REGION 1..584: note = hemagglutinin__InfluenzaB__AGX24337
MKAIIVLLMVVTSNADRICTGITSSNSPHVVKTATQGEVNVTGVIPLTTTPTKSYFANLKGTRTRGKLCPDCLNCTDLDVALGMPMCVGTTPSAKASILHEVRPVTSGCFPIMHDRTKIRQLPNLLRGYENIRLSTQNVIDAEKAPGGPYRLGTSGSCPNATSKIGFFATMAWAVPKDNYKNATNPLTVEVPYICTEGEDQITVWGFHSDNKTQMKNLYGDSNPQKFTSSANGVTTHYVSQIGDFPDQTEDGGLPQSGRIVVDYMMQKPGKTGTIVYQRGVLLPQKVWCASGRSKVIKGSLPLIGEADCLHEKYGGLNKSKPYYTGEHAKAIGNCPIWVKTPLKLANGTKYRPPAKLLKERGFFGAIAGFLEGGWEGMIAGWHGYTSHGAHGVAVAADLKSTQEAINKITKNLNSLSELEVKNLQRLSGAMDELHNEILELDEKVDDLRADTISSQIELAVLLSNEGIINSEDEHLLALERKLKKMLGPSAVDIGNGCFETKHKCNQTCLDRIAAGTFNAGEFSLPTFDSLNITAASLNDDGLDNHTILLYYSTAASSLAVTLMLAIFIVYMVSRDNVSCSICL

SEQ ID NO: 27749 - protein, 584 aa, synthetic construct; identical to SEQ ID NO: 26820
  REGION 1..584: note = hemagglutinin__InfluenzaB__AGX24348

SEQ ID NO: 27750 - protein, 584 aa, synthetic construct; identical to SEQ ID NO: 26567
  REGION 1..584: note = hemagglutinin__InfluenzaB__AGX24359

SEQ ID NO: 27751 - protein, 584 aa, synthetic construct; identical to SEQ ID NO: 26820
  REGION 1..584: note = hemagglutinin__InfluenzaB__AGX24381

SEQ ID NO: 27752 - protein, 584 aa, synthetic construct
  REGION 1..584: note = hemagglutinin__InfluenzaB__AGX24392
MKAIIVLLMVVTSNADRICTGITSSNSPHVVKTATQGEVNVTGVIPLTTTPTKSYFANLKGTRTRGKLCPDCLNCTDLDVALGRPMCVGTTPSAKASILHEVRPVTSGCFPIMHDRTKIRQLPNLLRGYENIRLSTQNVIDAEKAPGGPYRLGTSGSCPNATSKSGFFATMAWAVPKDNNKNATNPLTVEIPYICTEGEDQITVWGFHSDNKTQMKNLYGDSNPQKFTSSANGVTTHYVSQIGSFPDQTEDGGLPQSGRIVVDYMMQKPGKTGTIVYQRGVLLPQKVWCASGRSKVIKGSLPLIGEADCLHEKYGGLNKSKPYYTGEHAKAIGNCPIWVKTPLKLANGTKYRPPAKLLKERGFFGAIAGFLEGGWEGMIAGWHGYTSHGAHGVAVAADLKSTQEAINKITKNLNSLSELEVKNLQRLSGAMDELHNEILELDEKVDDLRADTISSQIELAVLLSNEGIINSEDEHLLALERKLKKMLGPSAVEIGNGCFETKHKCNQTCLDRIAAGTFNAGEFSLPTFDSLNITAASLNDDGLDNHTILLYYSTAASSLAVTLMLAIFIVYMVSRDNVSCSICL

SEQ ID NO: 27753 - protein, 584 aa, synthetic construct; identical to SEQ ID NO: 26567
  REGION 1..584: note = hemagglutinin__InfluenzaB__AGX24403

SEQ ID NO: 27754 - protein, 584 aa, synthetic construct; identical to SEQ ID NO: 26820
  REGION 1..584: note = hemagglutinin__InfluenzaB__AGX24414

SEQ ID NO: 27755 - protein, 584 aa, synthetic construct; identical to SEQ ID NO: 26567
  REGION 1..584: note = hemagglutinin__InfluenzaB__AGX24425

SEQ ID NO: 27756 - protein, 584 aa, synthetic construct; identical to SEQ ID NO: 26567
  REGION 1..584: note = hemagglutinin__InfluenzaB__AGX24436

SEQ ID NO: 27757 - protein, 584 aa, synthetic construct; identical to SEQ ID NO: 27056
  REGION 1..584: note = hemagglutinin__InfluenzaB__AGX24447

SEQ ID NO: 27758 - protein, 584 aa, synthetic construct; identical to SEQ ID NO: 27747
  REGION 1..584: note = hemagglutinin__InfluenzaB__AGX24458

SEQ ID NO: 27759 - protein, 584 aa, synthetic construct
  REGION 1..584: note = hemagglutinin__InfluenzaB__AGX24469
MKAIIVLLMVVTSNADRICTGITSSNSPHVVKTATQGEVNVTGVIPLTTTPTKSYFANLKGTRTRGKLCPDCLNCTDLDVALGRPTCVGTTPSAKASILHEVRPVTSGCFPIMHDRTKIRQLPNLLRGYENIRLSTQNVIDAEKAPGGPYRLGTSGSCPNATSKSGFFATMAWAVPKDNNKNATNPLTVEVPYICTEGEDQITVWGFHSDNKTQMKNLYGDSNPQKFTSSANGVTTHYVSQIGSFPDQTEDGGLPQSGRIVVDYMMQKPGKTGTIVYQRGILLPQKVWCASGRSKVIKGSLPLIGEADCLHEKYGGLNKSKPYYTGEHAKAIGNCPIWVKTPLKLANGTKYRPPAKLLKERGFFGAIAGFLEGGWEGMVAGWHGYTSHGAHGVAVAADLKSTQEAINKITKNLNSLSELEVKNLQRLSGAMDELHNEILELDEKVDDLRADTISSQIELAVLLSNEGIINSEDEHLLALERKLKKMLGPSAVEIGNGCFETKHKCNQTCLDRIAAGTFNAGEFSLPTFDSLNITAASLNDDGLDNHTILLYYSTAASSLAVTLMLAIFIVYMVSRDNVSCSICL

SEQ ID NO: 27760 - protein, 584 aa, synthetic construct; identical to SEQ ID NO: 27056
  REGION 1..584: note = hemagglutinin__InfluenzaB__AGX24480

SEQ ID NO: 27761 - protein, 584 aa, synthetic construct; identical to SEQ ID NO: 27056
  REGION 1..584: note = hemagglutinin__InfluenzaB__AGX24491

SEQ ID NO: 27762 - protein, 584 aa, synthetic construct
  REGION 1..584: note = hemagglutinin__InfluenzaB__AGX24502
MKAIIVLLMVVTSNADRICTGITSSNSPHVVKTATQGEVNVTGVIPLTTTPTKSYFANLKGTRTRGKLCPDCLNCTDLDVALGRPMCVGTTPSAKASILHEVRPVTSGCFPIMHDRTKIRQLPNLLRGYENIRLSTQNVIDAEKAPGGPYRLGTSGSCPNATSKSGFFATMAWAVQKDNNKNATNPLTVEVPYICTEGEDQITVWGFHSDNKTQMKNLYGDSNPQKFTSSANGVTTHYVSQIGSFPDQTEDGGLPQSGRIVVDYMMQKPGKTGTIVYQRGVLLPQRVWCASGRSKVIKGSLPLIGEADCLHEKYGGLNKSKPYYTGEHAKAIGNCPIWVKTPLKLANGTKYRPPAKLLKERGFFGAIAGFLEGGWEGMIAGWHGYTSHGAHGVAVAADLKSTQEAINKITKNLNSLSELEVKNLQRLSGAMDELHNEILELDEKVDDLRADTISSQIELAVLLSNEGIINSEDEHLLALERKLKKMLGPSAVEIGNGCFETKHKCNQTCLDRIAAGTFNAGEFSLPTFDSLNITAASLNDDGLDNHTILLYYSTAASSLAVTLMLAIFIVYMVSRDNVSCSICL

SEQ ID NO: 27763 - protein, 584 aa, synthetic construct; identical to SEQ ID NO: 26731
  REGION 1..584: note = hemagglutinin__InfluenzaB__AGX24513

SEQ ID NO: 27764 - protein, 584 aa, synthetic construct; identical to SEQ ID NO: 27056
  REGION 1..584: note = hemagglutinin__InfluenzaB__AGX24524

SEQ ID NO: 27765 - protein, 584 aa, synthetic construct
  REGION 1..584: note = hemagglutinin__InfluenzaB__AGX24535
MKAIIVLLMVVTSNADRICTGITSSNSPHVVKTATQGEVNVTGVIPLTTTPTKSYFANLKGTRTRGKLCPDCLNCTDLDVALGRPMCVGTTPSAKASILHEVRPVTSGCFPIMHDRTKIRQLPNLLRGYENIRLSTQNVIDAEKAPGGPYRLGTSGSCPNATSKIGFFATMAWAVPKDNYKNATNPLTVEVPYICTEGEDQITVWGFHSDNKTQMKNLYGDSNPQKFTSSANGVTTHYVSQIGDFPDQTEDGGLPQSGRIVVDYMMQKPGKTGTIVYQRGVLLPQKVWCASGRSKVIKGSLPLIGEADCLHEKYGGLNKSKPYYTGEHAKAIGNCPIWVKTPLKLANGTKYRPPAKLLKERGFFGAIAGFLEGGWEGMIAGWHGYTSHGAHGVAVAADLKSTQEAINKITKNLNSLSELEVKNLQRLSGAMDELHNEILELDEKVDDLRADTISAQIELAVLLSNEGIINSEDEHLLALERKLKKMLGPSAVDIGNGCFETKHKCNQTCLDRIAAGTFNAGEFSLPTFDSLNITAASLNDDGLDNHTILLYYSTAASSLAVTLMLAIFIVYMVSRDNVSCSICL

SEQ ID NO: 27766 - protein, 584 aa, synthetic construct; identical to SEQ ID NO: 26567
  REGION 1..584: note = hemagglutinin__InfluenzaB__AGX24546

SEQ ID NO: 27767 - protein, 584 aa, synthetic construct
  REGION 1..584: note = hemagglutinin__InfluenzaB__AGX24557
MKTIIVLLMVVTSNADRICTGITSSNSPHVVKTATQGEVNVTGVIPLTTTPTKSYFANLKGTRTRGKLCPDCLNCTDLDVALGRPTCVGTTPSAKASILHEVRPVTSGCFPIMHDRTKIRQLPNLLRGYENIRLSTQNVIDAEKAPGGPYRLGTSGSCPNATSKSGFFATMAWAVPKDNNKNATNPLTVEVPYICTEGEDQITVWGFHSDNKTQMKNLYGDSNPQKFTSSANGVTTHYVSQIGSFPDQTEDGGLPQSGRIVVDYMMQKPGKTGTIVYQRGILLPQKVWCASGRSKVIKGSLPLIGEADCLHEKYGGLNKSKPYYTGEHAKAIGNCPIWVKTPLKLANGTKYRPPAKLLKERGFFGAIAGFLEGGWEGMIAGWHGYTSHGAHGVAVAADLKSTQEAINKITKNLNSLSELEVKNLQRLSGAMDELHNEILELDEKVDDLRADTISSQIELAVLLSNEGIINSEDEHLLALERKLKKMLGPSAVEIGNGCFETKHKCNQTCLDRIAAGTFNAGEFSLPTFDSLNITAASLNDDGLDNHTILLYYSTAASSLAVTLMLAIFIVYMVSRDNVSCSICL

SEQ ID NO: 27768 - protein, 584 aa, synthetic construct; identical to SEQ ID NO: 27056
  REGION 1..584: note = hemagglutinin__InfluenzaB__AGX24579

SEQ ID NO: 27769 - protein, 584 aa, synthetic construct; identical to SEQ ID NO: 27056
  REGION 1..584: note = hemagglutinin__InfluenzaB__AGX24590

SEQ ID NO: 27770 - protein, 584 aa, synthetic construct; identical to SEQ ID NO: 27056
  REGION 1..584: note = hemagglutinin__InfluenzaB__AGX24601

SEQ ID NO: 27771 - protein, 584 aa, synthetic construct; identical to SEQ ID NO: 27056
  REGION 1..584: note = hemagglutinin__InfluenzaB__AGX24612

SEQ ID NO: 27772 - protein, 584 aa, synthetic construct; identical to SEQ ID NO: 26567
  REGION 1..584: note = hemagglutinin__InfluenzaB__AGX24623

SEQ ID NO: 27773 - protein, 584 aa, synthetic construct; identical to SEQ ID NO: 27056
  REGION 1..584: note = hemagglutinin__InfluenzaB__AGX24634

SEQ ID NO: 27774 - protein, 584 aa, synthetic construct; identical to SEQ ID NO: 27765
  REGION 1..584: note = hemagglutinin__InfluenzaB__AGX24656

SEQ ID NO: 27775 - protein, 584 aa, synthetic construct; identical to SEQ ID NO: 26567
  REGION 1..584: note = hemagglutinin__InfluenzaB__AGX24667

SEQ ID NO: 27776 - protein, 584 aa, synthetic construct; identical to SEQ ID NO: 26820
  REGION 1..584: note = hemagglutinin__InfluenzaB__AGX24678

SEQ ID NO: 27777 - protein, 584 aa, synthetic construct; identical to SEQ ID NO: 27056
  REGION 1..584: note = hemagglutinin__InfluenzaB__AGX24689

SEQ ID NO: 27778 - protein, 584 aa, synthetic construct; identical to SEQ ID NO: 27056
  REGION 1..584: note = hemagglutinin__InfluenzaB__AGX24700

SEQ ID NO: 27779 - protein, 584 aa, synthetic construct; identical to SEQ ID NO: 27056
  REGION 1..584: note = hemagglutinin__InfluenzaB__AGX24711

SEQ ID NO: 27780 - protein, 584 aa, synthetic construct; identical to SEQ ID NO: 26567
  REGION 1..584: note = hemagglutinin__InfluenzaB__AGX24722

SEQ ID NO: 27781 - protein, 584 aa, synthetic construct; identical to SEQ ID NO: 26567
  REGION 1..584: note = hemagglutinin__InfluenzaB__AGX24733

SEQ ID NO: 27782 - protein, 584 aa, synthetic construct; identical to SEQ ID NO: 26567
  REGION 1..584: note = hemagglutinin__InfluenzaB__AGX24744

SEQ ID NO: 27783 - protein, 584 aa, synthetic construct; identical to SEQ ID NO: 26567
  REGION 1..584: note = hemagglutinin__InfluenzaB__AGX24755

SEQ ID NO: 27784 - protein, 584 aa, synthetic construct; identical to SEQ ID NO: 27056
  REGION 1..584: note = hemagglutinin__InfluenzaB__AGX24766

SEQ ID NO: 27785 - protein, 584 aa, synthetic construct; identical to SEQ ID NO: 26567
  REGION 1..584: note = hemagglutinin__InfluenzaB__AGX24777

SEQ ID NO: 27786 - protein, 584 aa, synthetic construct; identical to SEQ ID NO: 26567
  REGION 1..584: note = hemagglutinin__InfluenzaB__AGX24788

SEQ ID NO: 27787 - protein, 584 aa, synthetic construct; identical to SEQ ID NO: 26567
  REGION 1..584: note = hemagglutinin__InfluenzaB__AGX24799

SEQ ID NO: 27788 - protein, 584 aa, synthetic construct; identical to SEQ ID NO: 27056
  REGION 1..584: note = hemagglutinin__InfluenzaB__AGX24810

SEQ ID NO: 27789 - protein, 584 aa, synthetic construct; identical to SEQ ID NO: 27056
  REGION 1..584: note = hemagglutinin__InfluenzaB__AGX24821

SEQ ID NO: 27790 - protein, 584 aa, synthetic construct
  REGION 1..584: note = hemagglutinin__InfluenzaB__AGX24832
MKAIIVLLMVVTSNADRICTGITSSNSPHVVKTATQGEVNVTGVIPLTTTPTKSYFANLKGTRTRGKLCPDCLNCTDLDVALGRPMCVGTTPSAKASILHEVRPVTSGCFPIMHDRTKIRQLPNLLRGYENIRLSTQNVIDAEKAPGGPYRLGTSGSCPNATSKSGFFATMAWAVPKDNNKNATNPLTVEVPYICTEGEDQITVWGFHSDNKTQMKNLYGDSNPQKFTSSANGVTTHYVSQIGSFPDQTEDGGLPQSGRIVVDYMMQKPGKTGTIVYQRGILLPQRVWCASGRSKVIKGSLPLIGEADCLHEKYGGLNKSKPYYTGEHAKAIGNCPIWVKTPLKLANGTKYRPPAKLLKERGFFGAIAGFLEGGWEGMIAGWHGYTSHGAHGVAVAADLKSTQEAINKITKNLNSLSELEVKNLQRLSGAMDELHNEILELDEKVDDLRADTISSQIELAVLLSNEGIINSEDEHLLALERKLKKMLGPSAVEIGNGCFETKHKCNQTCLDRIAAGTFNAGEFSLPTFDSLNITAASLNDDGLDNHTILLYYSTAASSLAVTLMLAIFIVYMVSRDNVSCSICL

SEQ ID NO: 27791 - protein, 584 aa, synthetic construct
  REGION 1..584: note = hemagglutinin__InfluenzaB__AGX24843
MKAIIVLLMVVTSNADRICTGITSSNSPHVVKTATQGEVNVTGVIPLTTTPTKSYFANLKGTRTRGKLCPDCLNCTDLDVALGRPMCVGTTPSAKASILHEVRPVTSGCFPIMHDRTKIRQLPNLLRGYENIRLSTQNVIDAEKAPGGPYRLGTSGSCPNATSKIGFFATMAWAVPKDNYKNATNPLTVEVPYICTEGEDQITVWGFHSDNKTQMKNLYGDSNPQKFTSSANGVTTHYVSQIGDFPDQTEDGGLPQSGRIVVDYMVQKPGKTGTIVYQRGVLLPQRVWCTSGRSKVIKGSLPLIGEADCLHEKYGGLNKSKPYYTGEHAKAIGNCPIWVKTPLKLANGTKYRPPAKLLKERGFFGAIAGFLEGGWEGMIAGWHGYTSHGAHGVAVAADLKSTQEAINKITKNLNSLSELEVKNLQRLSGAMDELHNEILELDEKVDDLRADTISSQIELAVLLSNEGIINSEDEHLLALERKLKKMLGPSAVDIGNGCFETKHKCNQTCLDRIAAGTFNAGEFSLPTFDSLNITAASLNDDGLDNHTILLYYSTAASSLAVTLMLAIFIVYMVSRDNVSCSICL

SEQ ID NO: 27792 - protein, 584 aa, synthetic construct
  REGION 1..584: note = hemagglutinin__InfluenzaB__AGX24854
MKAIIVLLMVVTSNADRICTGITSSNSPHVVKTATQGEVNVTGVIPLTTTPTKSYFANLKGTRTRGKLCPECLNCTDLDVALGRPMCVGTTPSAKASILHEVRPVTSGCFPIMHDRTKIRQLPNLLRGYENIRLSTQNVIDAEKAPGGPYRLGTSGSCPNATSKIGFFATMAWAVPKDNYKNATNPLTVEVPYICAEGEDQITVWGFHSDNKTQMKNLYGDSNPQKFTSSANGVTTHYVSQIGDFPDQTEDGGLPQSGRIVVDYMVQRPGKTGTIVYQRGVLLPQKVWCASGRSKVIKGSLPLIGEADCLHEKYGGLNKSKPYYTGEHAKAIGNCPIWVKTPLKLANGTKYRPPAKLLKERGFFGAIAGFLEGGWEGMIAGWHGYTSHGAHGVAVAADLKSTQEAINKITKNLNSLSELEVKNLQRLSGAMDELHNEILELDEKVDDLRADTISSQIELAVLLSNEGIINSEDEHLLALERKLKKMLGPSAVDIGNGCFETKHKCNQTCLDRIAAGTFNAGEFSLPTFDSLNITAASLNDDGLDNHTILLYYSTAASSLAVTLMLAIFIVYMVSRDNVSCSICL

SEQ ID NO: 27793 - protein, 584 aa, synthetic construct
  REGION 1..584: note = hemagglutinin__InfluenzaB__AGX24865
MKAIIVLLMVVTSNADRICTGITSSNSPHVVKTATQGEVNVTGVIPLTTTPTKSYFANLKGTRTRGKLCPDCLNCTDLDVALGRPMCVGTTPSAKASILHEVRPVTSGCFPIMHDRTKIRQLPNLLRGYENIRLSTQNVIDAEKAPGGPYRLGTSGSCPNATSKIGFFATMAWAVPKDNYKNATNPLTVEVPYICAEGEDQITVWGFHSDNKTQMKNLYGDSNPQKFTSSANGVTTHYVSQIGDFPDQTEDGGLPQSGRIVVDYMVQRPGKTGTIVYQRGVLLPQKVWCASGRSKVIKGSLPLIGEADCLHEKYGGLNKSKPYYTGEHAKAIGNCPIWVKTPLKLANGTKYRPPAKLLKERGFFGAIAGFLEGGWEGMIAGWHGYTSHGAHGVAVAADLKSTQEAINKITKNLNSLSELEVKNLQRLSGAMDELHNEILELDEKVDDLRADTISSQIELAVLLSNEGIINSEDEHLLALERKLKKMLGPSAVDIGNGCFETKHKCNQTCLDRIAAGTFNAGEFSLPTFDSLNITAASLNDDGLDNHTILLYYSTAASSLAVTLMLAIFIVYMVSRDNVSCSICL

SEQ ID NO: 27794 - protein, 584 aa, synthetic construct
  REGION 1..584: note = hemagglutinin__InfluenzaB__AGX24876
MKAIIVLLMVVTSNADRICTGITSSNSPHVVKTATQGEVNVTGVIPLTTTPTKSYFANLKGTRTRGKLCPDCLNCTDLDVALGRPMCVGTTPSAKASILHEVRPVTSGCFPIMHDRTKIRQLPNLLRGYENIRLSTQNVIDAEKAPGGPYRLGTSGSCPNATSKIGFFATMAWAVPKDNYKNATNSLTVEVPYICKEGEDQITVWGFHSDNKPQMKNLYGDSNPQKFTSSANGVTTHYVSQVGDFPDQTEDGGLPQSGRIVVDYMMQKPGRTGTIVYQRGVLLPQKVWCASGRSKVIKGSLPLIGEADCLHEKYGGLNKSKPYYTGEHAKAIGNCPIWVKTPLKLANGTKYRPPAKLLKERGFFGAIAGFLEGGWEGMIAGWHGYTSHGAHGVAVAADLKSTQEAINKITKNLNSLSELEVKNLQRLSGAMDELHNEILELDEKVDDLRADTISSQIELAVLLSNEGIINSEDEHLLALERKLKKMLGPSAVDIGNGCFETKHKCNQTCLDRIAAGTFNAGEFSLPTFDSLNITAASLNDDGLDNHTILLYYSTAASSLAVTLMLAIFIVYMVSRDNVSCSICL

SEQ ID NO: 27795 - protein, 584 aa, synthetic construct
  REGION 1..584: note = hemagglutinin__InfluenzaB__AGX24887
MKAIIVLLMVVTSNADRICTGITSSNSPHVVKTATQGEVNVTGAIPLTTTPTKSYFANLKGTRTRGKLCPDCLNCTDLDVALGRPMCVGTTPSAKASILHEVRPVTSGCFPIMHDRTKIRQLPNLLRGYENIRLSTQNVIDAEKAPGGPYRLGTSGSCPNATSKIGFFATMAWAVPKDNYKNATNPQTVEVPYICTEGEDQITVWGFHSDNKTQMKNLYGDSNPQKFTSSANGVTTHYVSQIGDFPDQTEDGGLPQSGRIVVDYMVQKPGKTGTIVYQRGVLLPQKVWCASGRSKVIKGSLPLIGEADCLHEKYGGLNKSKPYYTGEHAKAIGNCPIWVKTPLKLANGTKYRPPAKLLKERGFFGAIAGFLEGGWEGMIAGWHGYTSHGAHGVAVAADLKSTQEAINKITKNLNSLSELEVKNLQRLSGAMDELHNEILELDEKVDDLRADTMSSQIELAVLLSNEGIINSEDEHLLALERKLKKMLGPSAVDIGNGCFETKHKCNQTCLDRIAAGTFNAGEFSLPTFDSLNITAASLNDDGLDNHTILLYYSTAASSLAVTLMLAIFIVYMVSRDNVSCSICL

SEQ ID NO: 27796 - protein, 584 aa, synthetic construct
  REGION 1..584: note = hemagglutinin__InfluenzaB__AGX24898
MKAIIVLLMVVTSNADRICTGITSSNSPHVVKTATQGEVNVTGVIPLTTTPTKSYFANLKGTRTRGKLCPDCLNCTDLDVALGRPMCVGTTPSAKASILHEVRPVTSGCFPIMHDRTKIRQLPNLLRGYEKIRLSTQNVIDAEKAPGGPYRLGTSGSCPNATSKIGFFATMAWAVPKDNYKNATNPLTVEVPYICTGGEDQITVWGFHSDNKTQMKSLYGDSNPQKFTSSANGVTTHYVSQIGDFPDQTEDGGLPQSGRIVVDYMMQKPGKTGTIVYQRGVLLPQKVWCASGRSKVIKGSLPLIGEADCLHEKYGGLNKSKPYYTGEHAKAIGNCPIWVKTPLKLANGTKYRPPAKLLKERGFFGAIAGFLEGGWEGMIAGWHGYTSHGAHGVAVAADLKSTQEAINKITKNLNSLSELEVKNLQRLSGAMDELHNEILELDEKVDDLRADTISSQIELAVLLSNEGIINSEDEHLLALERKLKKMLGPSAVDIGNGCFETKHKCNQTCLDRIAAGTFNAGEFSLPTFDSLNITAASLNDDGLDNHTILLYYSTAASSLAVTLMLAIFIVYMVSRDNVSCSICL

SEQ ID NO: 27797 - protein, 585 aa, synthetic construct; identical to SEQ ID NO: 26683
  REGION 1..585: note = hemagglutinin__InfluenzaB__AGX84854

SEQ ID NO: 27798 - protein, 585 aa, synthetic construct
  REGION 1..585: note = hemagglutinin__InfluenzaB__AGX84865
MKAIIVLLMVVTSNADRICTGITSSNSPHIVKTATQGEVNVTGVIPLTTTPTKSHFANLKGTETRGKLCPKCPNCTDLDVALGRPKCTGKIPSARVSILHEVRPVTSGCFPIMHDRTKIRQLPNLLRGYEHIRLSTHNVINAENAPGGPYKIGTSGSCPNVTNGNGFFATMAWAVPKNDKNKTATNPLTIEVPYICTEGEDQITVWGFHSDNETQMAKLYGDSKPQKFTSSANGVTTHYVSQIGGFPNQTEDGGLPQSGRIVVDYMVQKSGKTGTITYQRGILLPQKVWCASGRSKVIKGSLPLIGEADCLHEKYGGLNKSKPYYTGEHAKAIGNCPIWVKTPLKLANGTKYRPPAKLLKERGFFGAIAGFLEGGWEGMIAGWHGYTSHGAHGVAVAADLKSTQEAINKITKNLNSLSELEVKNLQRLSGAMDELHNEILELDEKVDDLRADTISSQIELAVLLSNEGIINSEDEHLLALERKLKKMLGPSAVEIGNGCFETKHKCNQTCLDRIAAGTFDAGEFSLPTFDSLNITAASLNDDGLDNHTILLYYSTAASSLAVTLMIAIFVVYMVSRDNVSCSICL

SEQ ID NO: 27799 - protein, 585 aa, synthetic construct; identical to SEQ ID NO: 27798
  REGION 1..585: note = hemagglutinin__InfluenzaB__AGX84876

SEQ ID NO: 27800 - protein, 585 aa, synthetic construct; identical to SEQ ID NO: 27798
  REGION 1..585: note = hemagglutinin__InfluenzaB__AGX84887

SEQ ID NO: 27801 - protein, 585 aa, synthetic construct; identical to SEQ ID NO: 26683
  REGION 1..585: note = hemagglutinin__InfluenzaB__AGX84898

SEQ ID NO: 27802 - protein, 585 aa, synthetic construct
  REGION 1..585: note = hemagglutinin__InfluenzaB__AGX84920
MKAIIVLLMVVTSNADRICTGITSSNSPHVVKTATQGEVNVTGVIPLTTTPTKSHFANLKGTETRGKLCPKCPNCTDLDVALGRPKCTGKIPSAGVSILHEVRPVTSGCFPIMHDRTKIRQLPNLLRGYEHIRLSTHNVINAENAPGGPYKIGTSGSCPNVTNGNGFFATMAWAVPKNDKNKTATNPLTIEVPYICTEGEDQITVWGFHSDNETQMAKLYGDSKPQKFTSSANGVTTHYVSQIGGFPNQTEDGGLPQSGRIVVDYMVQKSGKTGTITYQRGILLPQKVWCASGRSKVIKGSLPLIGEADCLHEKYGGLNKSKPYYTGEHAKAIGNCPIWVKTPLKLANGTKYRPPAKLLKERGFFGAIAGFLEGGWEGMIAGWHGYTSHGAHGVAVAADLKSTQEAINKITKNLNSLSELEVKNLQRLSGAMDELHNEILELDEKVDDLRADTISSQIELAVLLSNEGIINSEDEHLLALERKLKKMLGPSAVEIGNGCFETKHKCNQTCLDRIAAGTFDAGEFSLPTFDSLNITAASLNDDGLDNHTILLYYSTAASSLAVTLMIAIFVVYMVSRDNVSCSICL

SEQ ID NO: 27803 - protein, 585 aa, synthetic construct
  REGION 1..585: note = hemagglutinin__InfluenzaB__AGZ59821
MKAIIVLLMVVTSNADRICTGITSSNSPHVVKTATQGEVNVTGVIPLTTTPTKSHFANLKGTKTRGKLCPKCFNCTDLDVALGRPKCTGNIPSAKVSILHEVRPVTSGCFPIMHDRTKVRQLPNLLRGYEHIRLSTHNVINAEKAPGGPYKIGTSGSCPNVTNGNGFFATMAWAVPKNDNNKTATNSLTIEVPYICTEGEDQITVWGFHSDNETQMAKLYGDSKPQKFTSSANGVTTHYVSQIGGFPNQTEDGGLPQSGRIVVDYMVQKSGKTGTITYQRGILLPQKVWCASGRSKVIKGSLPLIGEADCLHEKYGGLNKSKPYYTGEHAKAIGNCPIWVKTPLKLANGTKYRPPAKLLKERGFFGAIAGFLEGGWEGMIAGWHGYTSHGAHGVAVAADLKSTQEAINKITKNLNSLSELEVKNLQRLSGAMDELHNEILELDEKVDDLRADTISSQIELAVLLSNEGIINSEDEHLLALERKLKKMLGPSAVEIGNGCFETKHKCNQTCLDRIAAGTFDAGEFSLPTFDSLNITAASLNDDGLDNHTILLYYSTAASSLAVTLMIAIFVVYMVSRDNVSCSICL

SEQ ID NO: 27804 - protein, 585 aa, synthetic construct
  REGION 1..585: note = hemagglutinin__InfluenzaB__AGZ59832
MKAIIVLLMVVTSNADRICTGITSSNSPHVVKTATQGEVNVTGVIPLTTTPTKSHFANLKGTKTRGKLCPKCLNCTDLDVALGRPKCTGNIPSAKVSILHEVRPVTSGCFPIMHDRTKIRQLPNLLRGYEHIRLSTHNVINAEKAPGGPYKIGTSGSCPNVTNGNGFFATMAWAVPKNDNNKTATNSLTIEVPYICTEGEDQITVWGFHSDNETQMAKLYGDSKPQKFTSSANGVTTHYVSQIGGFPNQTEDGGLPQSGRIVVDYMVQKSGKTGTITYQRGILLPQKVWCASGKSKVIKGSLPLIGEADCLHEKYGGLNKSKPYYTGEHAKAIGNCPIWVKTPLKLANGTKYRPPAKLLKERGFFGAIAGFLEGGWEGMIAGWHGYTSHGAHGVAVAADLKSTQEAINKITKNLNSLSELEVKNLQRLSGAMDELHNEILELDEKVDDLRADTISSQIELAVLLSNEGIINSEDEHLLALERKLKKMLGPSAVEIGNGCFETKHKCNQTCLDRIAAGTFDAGEFSLPTFDSLNITAASLNEDGLDNHTILLYYSTAASSLAVTLMIAIFVVYMVSRDNVSCSICL

SEQ ID NO: 27805 - protein, 585 aa, synthetic construct
  REGION 1..585: note = hemagglutinin__InfluenzaB__AGZ59843
MKAIIVLLMVVTSNADRICTGITSSNSPHVVKTATQGEVNVTGVIPLTTTPTKSHFANLKGTETRGKLCPKCLNCTDLDVALGRPKCTGNIPSARVSILHEVRPVTSGCFPIMHDRTKIRQLPNLLRGYEHIRLSTHNVINAENAPGGPYKIGTSGSCPNVTNGNGFFATMAWAVPKNDNNKTATNSLTIEVPYICTEGEDQITVWGFHSDNETQMAKLYGDSKPQKFTSSANGVTTHYVSQIGGFPNQTEDGGLPQSGRIVVDYMVQKSGKTGTITYQRGILLPQKVWCASGRSKVIKGSLPLIGEADCLHEKYGGLNKSKPYYTGEHAKAIGNCPIWVKTPLKLANGTKYRPPAKLLKERGFFGAIAGFLEGGWEGMIAGWHGYTSHGAHGVAVAADLKSTQEAINKITKNLNSLSELEVKNLQRLSGAMDELHNEILELDEKVDDLRADTISSQIELAVLLSNEGIINSEDEHLLALERKLKKMLGPSAVEIGNGCFETKHKCNQTCLDRIAAGTFDAGEFSLPTFDSLNITAASLNDDGLDNHTILLYYSTAASSLAVTLMIAIFIVYMVSRDNVSCSICL

SEQ ID NO: 27806 - protein, 585 aa, synthetic construct; identical to SEQ ID NO: 27152
  REGION 1..585: note = hemagglutinin__InfluenzaB__AGZ59854

SEQ ID NO: 27807 - protein, 585 aa, synthetic construct; identical to SEQ ID NO: 26514
  REGION 1..585: note = hemagglutinin__InfluenzaB__AGZ59865

SEQ ID NO: 27808 - protein, 585 aa, synthetic construct
  REGION 1..585: note = hemagglutinin__InfluenzaB__AGZ59876
MKAIIVLLMVVTSNADRICTGITSSNSPHVVKTATQGEVNVTGVIPLTTTPTKSHFANLKGTETRGKLCPKCLNCTDLDVALGRPKCTGNIPSARVSILHEVRPVTSGCFPIMHDRTKIRQLPNLLRGYEHIRLSTHNVINAENAPGGPYKIGTSGSCPNVTNGNGFFATMAWAVPKNDKNKTATNSLTIEVPYICTEGEDQITVWGFHSDNETQMAKLYGDSKPQKFTSSANGVTTHYVSQIGGFPNQTEDGGLPQSGRIVVDYMVQKSGKTGTITYQRGILLPQKVWCTSGRSKVIKGSLPLIGEADCLHEKYGGLNKSKPYYTGEHAKAIGNCPIWVKTPLKLANGTKYRPPAKLLKERGFFGAIAGFLEGGWEGMIAGWHGYTSHGAHGVAVAADLKSTQEAINKITKNLNSLSELEVKNLQRLSGAMDELHNEILELDEKVDDLRADTISSQIELAVLLSNEGIINSEDEHLLALERKLKKMLGPSAVEIGNGCFETKHKCNQTCLDRIAAGTFDAGEFSLPTFDSLNITAASLNDDGLDNHTILLYYSTAASSLAVTLMIAIFVVYMVSRDNVSCSICL

SEQ ID NO: 27809 - protein, 584 aa, synthetic construct; identical to SEQ ID NO: 26567
  REGION 1..584: note = hemagglutinin__InfluenzaB__AGZ59887

SEQ ID NO: 27810 - protein, 585 aa, synthetic construct; identical to SEQ ID NO: 26989
  REGION 1..585: note = hemagglutinin__InfluenzaB__AGZ59898

SEQ ID NO: 27811 - protein, 585 aa, synthetic construct; identical to SEQ ID NO: 27355
  REGION 1..585: note = hemagglutinin__InfluenzaB__AGZ59909

SEQ ID NO: 27812 - protein, 585 aa, synthetic construct; identical to SEQ ID NO: 26989
  REGION 1..585: note = hemagglutinin__InfluenzaB__AGZ59920

SEQ ID NO: 27813 - protein, 585 aa, synthetic construct; identical to SEQ ID NO: 26989
  REGION 1..585: note = hemagglutinin__InfluenzaB__AGZ59931

SEQ ID NO: 27814 - protein, 585 aa, synthetic construct; identical to SEQ ID NO: 26989
  REGION 1..585: note = hemagglutinin__InfluenzaB__AGZ59942

SEQ ID NO: 27815 - protein, 585 aa, synthetic construct; identical to SEQ ID NO: 26989
  REGION 1..585: note = hemagglutinin__InfluenzaB__AGZ59953

SEQ ID NO: 27816 - protein, 585 aa, synthetic construct
  REGION 1..585: note = hemagglutinin__InfluenzaB__AGZ59965
MKAIIVLLMVVTSNADRICTGITSSNSPHVVKTATQGEVNVTGVIPLTTTPTKSHFANLKGTETRGKLCPKCLNCTDLDVALGRPKCTGKIPSARVSILHEVRPVTSGCFPIMHDRTKIRQLPNLLRGYEHIRLSTHNVINAENAPGGPYKIGTSGSCPNITNGNGFFATMAWAVPKNDKNKTATNPLTIEVPYICTEGEDQITVWGFHSDNETQMAKLYGDSKPQKFTSSANGVTTHYVSQIGGFPNQTEDGGLPQSGRVVVDYMMQKSGKTGTITYQRGILLPQKVWCASGRSKVIKGSLPLIGEADCLHEKYGGLNKSKPYYTGEHAKAIGNCPIWVKTPLKLANGTKYRPPAKLLKERGFFGAIAGFLEGGWEGMIAGWHGYTSHGAHGVAVAADLKSTQEAINKITKNLNSLSELEVKNLQRLSGAMDELHNEILELDEKVDDLRADTISSQIELAVLLSNEGIINSEDEHLLALERKLKKMLGPSAVEIGNGCFETKHKCNQTCLDRIAAGTFDAGEFSLPTFDSLNITAASLNDDGLDNHTILLYYSTAASSLAVTLMIAIFVVYMVSRDNVSCSICL

SEQ ID NO: 27817 - protein, 585 aa, synthetic construct; identical to SEQ ID NO: 26989
  REGION 1..585: note = hemagglutinin__InfluenzaB__AGZ59976

SEQ ID NO: 27818 - protein, 585 aa, synthetic construct; identical to SEQ ID NO: 26989
  REGION 1..585: note = hemagglutinin__InfluenzaB__AGZ59987

SEQ ID NO: 27819 - protein, 585 aa, synthetic construct; identical to SEQ ID NO: 26989
  REGION 1..585: note = hemagglutinin__InfluenzaB__AGZ59999

SEQ ID NO: 27820 - protein, 585 aa, synthetic construct; identical to SEQ ID NO: 26608
  REGION 1..585: note = hemagglutinin__InfluenzaB__AGZ60010

SEQ ID NO: 27821 - protein, 585 aa, synthetic construct; identical to SEQ ID NO: 26608
  REGION 1..585: note = hemagglutinin__InfluenzaB__AGZ60021

SEQ ID NO: 27822 - protein, 585 aa, synthetic construct; identical to SEQ ID NO: 26608
  REGION 1..585: note = hemagglutinin__InfluenzaB__AGZ60033

SEQ ID NO: 27823 - protein, 584 aa, synthetic construct
  REGION 1..584: note = hemagglutinin__InfluenzaB__AGZ60044
MKAIIVLLMVVTSNADRICTGITSSNSPHVVKTATQGEVNVTGVIPLTTTPTKSYFANLKGTRTRGKLCPDCLNCTDLDVALGRPMCVGTTPSAKASILHEVRPVTSGCFPIMHDRTKIRQLPNLLRGYENIRLSTQNVIDAENAPGGPYRLGTSGSCPNATSKSGFFATMAWAVPKDNNKNATNPLTVEVPYVCTEGEDQITVWGFHSDNKTQMKNLYGDSNPQKFTSSANGVTTHYVSQIGGFPAQTEDGGLPQSGRIVVDYMVQKPRKTGTIVYQRGVLLPQKVWCASGRSKVIKGSLPLIGEADCLHEKYGGLNKSKPYYTGEHAKAIGNCPIWVKTPLKLANGTKYRPPAKLLKERGFFGAIAGFLEGGWEGMIAGWHGYTSHGAHGVAVAADLKSTQEAINKITKNLNSLSELEVKNLQRLSGAMDELHNEILELDEKVDDLRADTISSQIELAVLLSNEGIINSEDEHLLALERKLKKMLGPSAVDIGNGCFETKHKCNQTCLDRIAAGTFNAGEFSLPTFDSLNITAASLNDDGLDNHTILLYYSTAASSLAVTLMLAIFIVYMVSRDNVSCSICL

SEQ ID NO: 27824 - protein, 584 aa, synthetic construct; identical to SEQ ID NO: 27026
  REGION 1..584: note = hemagglutinin__InfluenzaB__AGZ60055

SEQ ID NO: 27825 - protein, 584 aa, synthetic construct
  REGION 1..584: note = hemagglutinin__InfluenzaB__AGZ60066
MKAIIVLLMVVTSNADRICTGITSSNSPHVVKTATQGEVNVTGVIPLTTTPTKSHFANLKGTRTRGKLCPDCLNCTDLDVALGRPMCVGTTPSAKASILHEVRPVTSGCFPIMHDRTKIRQLPNLLRGYENIRLSTQNVIDAEKALGGPYRLGTSGSCPNATSKSGFFATMAWAVPKDNNKNATNPLTVEVPYICTEGEDQITVWGFHSDNKTQMKNLYGDSNPQKFTSSANGVTTHYVSQIGGFPDQTEDGGLPQSGRIVVDYMVQKPGKTGTIVYQRGVLLPQKVWCASGRSKVIKGSLPLIGEADCLHEKYGGLNKSKPYYTGEHAKAIGNCPIWVKTPLKLANGTKYRPPAKLLKERGFFGAIAGFLEGGWEGMIAGWHGYTSHGAHGVAVAADLKSTQEAINKITKNLNSLSELEVKNLQRLSGAMDELHNEILELDEKVDDLRADTISSQIELAVLLSNEGIINSEDEHLLALERKLKKMLGPSAVDIGNGCFETKHKCNQTCLDRIAAGTFNAGEFSLPTFDSLNITAASLNDDGLDNHTILLYYSTAASSLAVTLMLAIFIVYMVSRDNVSCSICL

SEQ ID NO: 27826 - protein, 584 aa, synthetic construct
  REGION 1..584: note = hemagglutinin__InfluenzaB__AGZ60077
MKAIIVLLMVVTSNADRICTGITSSNSPHVVKTATQGEVNVTGVIPLTTTPTKSYFANLKGTRTRGKLCPDCLNCTDLDVALGSPMCVGTTPSAKASILHEVRPVTSGCFPIMHDRTKIRQLANLLRGYENIRLSTQNVIDAEKAPGGPYRLGTSGSCPNATSKSGFFATMAWAVPKDNNKNATNPLTVEVPYICTEGEDQITVWGFHSDNKTQMKNLYGDSNPQKFTSSANGVTTHYVSQIGGFPDQTEDGGLPQSGRIVVDYMMQKSGKTGTIVYQRGVLLPQKVWCASGRSKVIKGSLPLIGEADCLHEKYGGLNKSKPYYTGEHAKAIGNCPIWVKTPLKLANGTKYRPPAKLLKERGFFGAIAGFLEGGWEGMIAGWHGYTSHGAHGVAVAADLKSTQEAINKITKNLNSLSELEVKNLQRLSGAMDELHSEILELDEKVDDLRADTISSQIELAVLLSNEGIINSEDEHLLALERKLKKMLGPSAVDIGNGCFETKHKCNQTCLDRIAAGTFNAGEFSLPTFDSLNITAASLNDDGLDNHTILLYYSTAASSLAVTLMLAIFIVYMVSRDNVSCSICL

SEQ ID NO: 27827 - protein, 584 aa, synthetic construct; identical to SEQ ID NO: 26731
  REGION 1..584: note = hemagglutinin__InfluenzaB__AGZ60088

SEQ ID NO: 27828 - protein, 584 aa, synthetic construct; identical to SEQ ID NO: 26426
  REGION 1..584: note = hemagglutinin__InfluenzaB__AGZ60099

SEQ ID NO: 27829 - protein, 584 aa, synthetic construct
  REGION 1..584: note = hemagglutinin__InfluenzaB__AGZ60131
MKAIIVLLMVVTSNADRICTGITSSNSPHVVKTATQGEVNVTGVIPLTTTPTKSYFANLKGTRTRGKLCPDCLNCTDLDVALGRPMCVGTTPSAKASILHEVRPITSGCFPIMHDRTKIRQLPNLLRGYENIRLSTQNVIDAEKAPGGPYRLGTSGSCPNATSKSGFFATMAWAVPKDNNKNATNPLTVEVPYICTEGEDQITVWGFHSDNKTQMKNLYGDSNPQKFTSSANGVTTHYVSQIGSFPDQTEDGGLPQSGRIVVDYMMQKPGKTGTIVYQRGVLLPQKVWCASGRSKVIKGSLPLIGEADCLHEKYGGLNKSKPYYTGEHAKAIGNCPIWVKTPLKLANGTKYRPPAKLLKERGFFGAIAGFLEGGWEGMIAGWHGYTSHGAHGVAVAADLKSTQEAINKITKNLNSLSELEVKNLQRLSGAMDELHNEILELDEKVDDLRADTISSQIELAVLLSNEGIINSEDEHLLALERKLKKMLGPSAVEIGNGCFETKHKCNQTCLDRIAAGTFNAGEFSLPTFDSLNITAASLNDDGLDNHTILLYYSTAASSLAVTLMLAIFIVYMVSRDNVSCSICL

SEQ ID NO: 27830 - protein, 584 aa, synthetic construct; identical to SEQ ID NO: 26731
  REGION 1..584: note = hemagglutinin__InfluenzaB__AGZ60142

SEQ ID NO: 27831 - protein, 584 aa, synthetic construct; identical to SEQ ID NO: 26731
  REGION 1..584: note = hemagglutinin__InfluenzaB__AGZ60160

SEQ ID NO: 27832 - protein, 584 aa, synthetic construct; identical to SEQ ID NO: 26820
  REGION 1..584: note = hemagglutinin__InfluenzaB__AGZ60172

SEQ ID NO: 27833 - protein, 584 aa, synthetic construct; identical to SEQ ID NO: 26820
  REGION 1..584: note = hemagglutinin__InfluenzaB__AGZ60183

SEQ ID NO: 27834 - protein, 584 aa, synthetic construct
  REGION 1..584: note = hemagglutinin__InfluenzaB__AGZ60194
MKAIIVLLMVVTSNADRICTGITSSNSPHVVKTATQGEVNVTGVIPLTTTPTKSYFANLKGTRTRGKLCPDCLNCTDLDVALGRPMCVGTTPSAKASILHEVRPVTSGCFPIMHDRTKIRQLPNLLRGYENIRLSTQNVIDAEKAPGGPYRLGTSGSCPNATSKIGFFATMAWAVPKDNYKNATNPLTVEVPYICTEGEDQITVWGFHSDNKTQMKNLYGDSNPQKFTSSANGVTTHYVSQIGDFPDQTEDGGLPQSGRIVVDYMMQKTGKTGTIVYQRGVLLPQKVWCASGRSKVIKGSLPLIGEADCLHEKYGGLNKSKPYYTGEHAKAIGNCPIWVKTPLKLANGTKYRPPAKLLKERGFFGAIAGFLEGGWEGMIAGWHGYTSHGAHGVAVAADLKSTQEAINKITKNLNSLSELEVKNLQRLSGAMDELHNEILELDEKVDDLRADTISSQIELAVLLSNEGIINSEDEHLLALERKLKKMLGPSAVDIGNGCFETKHKCNQTCLDRIAAGTFNAGEFSLPTFDSLNITAASLNDDGLDNHTILLYYSTAASSLAVTLMLAIFIVYMVSRDNVSCSICL

SEQ ID NO: 27835 - protein, 584 aa, synthetic construct
  REGION 1..584: note = hemagglutinin__InfluenzaB__AGZ60206
MKAIIVLLMVVTSNADRICTGITSSNSPHVVKTATQGEVNVTGVIPLTTTPIKSYFANLKGTRTRGKLCPDCLNCTDLDVALGRPMCVGTTPSAKASILHEVRPVTSGCFPIMHDRTKIRQLPNLLRGYENIRLSTQNVIDAEKAPGGPYRLGTSGSCPNATSKIGFFATMAWAVPKDNYKNATNPLTVEVPYICTEGEDQITVWGFHSDNKTQMKNLYGDSNPQKFTSSANGVTTHYVSQIGDFPDQTEDGGLPQSGRIVVDYMMQKPGKTGTIVYQRGVLLPQKVWCASGRSKVIKGSLPLIGEADCLHEKYGGLNKSKPYYTGEHAKAIGNCPIWVKTPLKLANGTKYRPPAKLLKERGFFGAIAGFLEGGWEGMIAGWHGYTSHGAHGVAVAADLKSTQEAINKITKNLNSLSELEVKNLQRLSGAMDELHNEILELDEKVDDLRADTISSQIELAVLLSNEGIINSEDEHLLALERKLKKMLGPSAVDIGNGCFETKHKCNQTCLDRIAAGTFNAGEFSLPTFDSLNITAASLNDDGLDNHTILLYYSTAASSLAVTLMLAIFIVYMVSRDNVSCSICL

SEQ ID NO: 27836 - protein, 584 aa, synthetic construct; identical to SEQ ID NO: 27765
  REGION 1..584: note = hemagglutinin__InfluenzaB__AGZ60217

SEQ ID NO: 27837 - protein, 584 aa, synthetic construct
  REGION 1..584: note = hemagglutinin__InfluenzaB__AGZ60268
MKAIIVLLMVVTSNADRICTGITSSNSPHVVKTATQGEVNVTGVIPLTTTPTKSYFANLKGTRTRGKLCPDCLNCTDLDVALGRPMCVGTTPSAKASILHEVRPVTSGCFPIMHDRTKIRQLANLLRGYENIRLSTQNVIDAEKAPGGPYRLGTSGSCPNATSKSGFFATMAWAVPKDNNKNATNPLTVEVPYICTEGEDQITVWGFHSDNKTQMKNLYGDSNPQKFTSSANGVTTHYVSQIGGFPDQTEDGGLPQSGRIVVDYMMQKPGKTGTIVYQRGVLLPQKVWCASGRSKVIKGSLPLIGEADCLHEKYGGLNKSKPYYTGEHAKAIGNCPIWVKTPLKLANGTKYRPPAKLLKERGFFGAIAGFLEGGWEGMIAGWHGYTSHGAHGVAVAADLKSTQEAINKITKNLNSLSELEVKNLQRLSGAMDELHNEILELDEKVDDLRADTISSQIELAVLLSNEGIINSEDEHLLALERKLKKMLGPSAIDIGNGCFETKHKCNQTCLDRIAAGTFNAGEFSLPTFDSLNITAASLNDDGLDNHTILLYYSTAASSLAVTLMLAIFIVYMVSRDNVSCSICL

SEQ ID NO: 27838 - protein, 584 aa, synthetic construct; identical to SEQ ID NO: 26854
  REGION 1..584: note = hemagglutinin__InfluenzaB__AHE37993

SEQ ID NO: 27839 - protein, 584 aa, synthetic construct; identical to SEQ ID NO: 26899
  REGION 1..584: note = hemagglutinin__InfluenzaB__AHE37994

SEQ ID NO: 27840 - protein, 584 aa, synthetic construct; identical to SEQ ID NO: 26854
  REGION 1..584: note = hemagglutinin__InfluenzaB__AHE37995

SEQ ID NO: 27841 - protein, 584 aa, synthetic construct; identical to SEQ ID NO: 26854
  REGION 1..584: note = hemagglutinin__InfluenzaB__AHE37996

SEQ ID NO: 27842 - protein, 584 aa, synthetic construct; identical to SEQ ID NO: 26899
  REGION 1..584: note = hemagglutinin__InfluenzaB__AHE37997

SEQ ID NO: 27843 - protein, 584 aa, synthetic construct; identical to SEQ ID NO: 26899
  REGION 1..584: note = hemagglutinin__InfluenzaB__AHE37998

SEQ ID NO: 27844 - protein, 584 aa, synthetic construct; identical to SEQ ID NO: 26899
  REGION 1..584: note = hemagglutinin__InfluenzaB__AHE37999

SEQ ID NO: 27845 - protein, 584 aa, synthetic construct; identical to SEQ ID NO: 26854
  REGION 1..584: note = hemagglutinin__InfluenzaB__AHE38000

SEQ ID NO: 27846 - protein, 584 aa, synthetic construct; identical to SEQ ID NO: 26854
  REGION 1..584: note = hemagglutinin__InfluenzaB__AHE38001

SEQ ID NO: 27847 - protein, 584 aa, synthetic construct
  REGION 1..584: note = hemagglutinin__InfluenzaB__AHE38002
MKAIIVLLMVVTSNADRICTGITSSNSPHVVKTATQGEVNVTGVIPLTTTPTKSYFANLKGTKTRGKLCPDCLNCTDLDVALGRPMCVGTTPSAKASILHEVRPVTSGCFPIMHDRTKIRQLANLLRGYENIRLSTQNVIDAKKAPGGPYRLGTSGSCPNATSKSGFFATMAWAVPKDNNKNATNPLTVEVPYICAEGEDQITVWGFHSDNKTQMKNLYGDSNPQKFTSSANGVTTHYVSQIGGFPDQTEDGGLPQSGRIVVDYMMQKPGKTGTIVYQRGVLLPQKVWCASGRSKVIKGSLPLIGEADCLHEKYGGLNKSKPYYTGEHAKAIGNCPIWVKTPLKLANGTKYRPPAKLLKERGFFGAIAGFLEGGWEGMIAGWHGYTSHGAHGVAVAADLKSTQEAINKITKNLNSLSELEVKNLQRLSGAMDELHNEILELDEKVDDLRADTISSQIELAVLLSNEGIINSEDEHLLALERKLKKMLGPSAVDIGNGCFETKHKCNQTCLDRIAAGTFNAGEFSLPTFDSLNITAASLNDDGLDNHTILLYYSTAASSLAVTLMLAIFIVYMVSRDNVSCSICL

SEQ ID NO: 27848 - protein, 584 aa, synthetic construct; identical to SEQ ID NO: 26854
  REGION 1..584: note = hemagglutinin__InfluenzaB__AHE38003

SEQ ID NO: 27849 - protein, 584 aa, synthetic construct; identical to SEQ ID NO: 26854
  REGION 1..584: note = hemagglutinin__InfluenzaB__AHE38004

SEQ ID NO: 27850 - protein, 584 aa, synthetic construct; identical to SEQ ID NO: 26854
  REGION 1..584: note = hemagglutinin__InfluenzaB__AHE38005

SEQ ID NO: 27851 - protein, 584 aa, synthetic construct
  REGION 1..584: note = hemagglutinin__InfluenzaB__AHE38006
MKAIIVLLMVVTSNADRICTGITSSNSPHVVKTATQGEVNVTGVIPLTTTPTKSYFANLKGTKTRGKLCPDCLNCTDLDVALGRPMCVGATPSAKASILHEVRPVTSGCFPIMHDRTKIRQLANLLRGYENIRLSTQNVIDAEKAPGGPYRLGTSGSCPNATSKSGFFATMAWAVPKDNNKNATNPLTVEVPYICAEGEDQITVWGFHSDNKTQMKNLYGDSNPQKFTSSANGVTTHYVSQIGGFPDQTEDGGLPQSGRIVVDYMMQKPGKTGTIVYQRGVLLPQKVWCASGRSKVIKGSLPLIGEADCLHEKYGGLNKSKPYYTGEHAKAIGNCPIWVKTPLKLANGTKYRPPAKLLKERGFFGAIAGFLEGGWEGMIAGWHGYTSHGAHGVAVAADLKSTQEAINKITKNLNSLSELEVKNLQRLSGAVDELHNEILELDEKVDDLRADTISSQIELAVLLSNEGIINSEDEHLLALERKLKKMLGPSAVDIGNGCFETKHKCNQTCLDRIAAGTFNAGEFSLPTFDSLNITAASLNDDGLDNHTILLYYSTAASSLAVTLMLAIFIVYMVSRDNVSCSICL

SEQ ID NO: 27852 - protein, 584 aa, synthetic construct; identical to SEQ ID NO: 26854
  REGION 1..584: note = hemagglutinin__InfluenzaB__AHE38007

SEQ ID NO: 27853 - protein, 584 aa, synthetic construct
  REGION 1..584: note = hemagglutinin__InfluenzaB__AHE38008
MKAIIALLMVVTSNADRICTGITSSNSPHVVKTATQGEVNVTGVIPLTTTPTKSYFANLKGTKTRGKLCPDCLNCTDLDVALGRPMCVGTTPSAKASILHEVRPVTSGCFPIMHDRTKIRQLANLLRGYENIRLSTQNVIDAEKAPGGPYRLGTSGSCPNATSKSGFFATMAWAVPKDNNKNATNPLTVEVPYICAEGEDQIAVWGFHSDNKTQMKNLYGDSNPQKFTSSANGVTTHYVSQIGGFPDQTEDGGLPQSGRIVVDYMMQKPGKTGTIVYQRGVLLPQKVWCASGRSKVIKGSLPLIGEADCLHEKYGGLNKSKPYYTGEHAKAIGNCPIWVKTPLKLANGTKYRPPAKLLKERGFFGAIAGFLEGGWEGMIAGWHGYTSHGAHGVAVAADLKSTQEAINKITKNLNSLSELEVKNLQRLSGAMDELHNEILELDEKVDDLRADTISSQIELAVLLSNEGIINSEDEHLLALERKLKKMLGPSAVDIGNGCFETKHKCNQTCLDRIAAGTFNAGEFSLPTFDSLNITAASLNDDGLDNHTILLYYSTAASSLAVTLMLAIFIVYMVSRDNVSCSICL

SEQ ID NO: 27854 - protein, 584 aa, synthetic construct; identical to SEQ ID NO: 26899
  REGION 1..584: note = hemagglutinin__InfluenzaB__AHE38009

SEQ ID NO: 27855 - protein, 584 aa, synthetic construct; identical to SEQ ID NO: 26899
  REGION 1..584: note = hemagglutinin__InfluenzaB__AHE38010

SEQ ID NO: 27856 - protein, 584 aa, synthetic construct; identical to SEQ ID NO: 26854
  REGION 1..584: note = hemagglutinin__InfluenzaB__AHE38012

SEQ ID NO: 27857 - protein, 584 aa, synthetic construct
  REGION 1..584: note = hemagglutinin__InfluenzaB__AHE38013
MKAIIVLLMVVTSNADRICTGITSSNSPHVVKTATQGEVNVTGVIPLTTTPTKSYFANLKGTKTRGKLCPDCLNCTDLDVALGRPMCVGTTPSAKASILHEVRPVTSGCFPIMHDRTKIRQLANLLRGYENIRLSTQNVIDAEKAPGGPYRLGTSGSCPNATSKSGFFATMAWAVPKDNNKNATNPLTVEVPYICAEGEDQITVWGFHSDNKTQMKNLYGDSNPQKFTSSANGVTTHYVSQIGGFPDQTEDGGLPQSGRIVVDYMMQKPGKTGTIVYQRGVLLPQKVWCVSGRSKVIKGSLPLIGEADCLHEKYGGLNKSKPYYTGEHAKAIGNCPIWVKTPLKLANGTKYRPPAKLLKERGFFGAIAGFLEGGWEGMIAGWHGYTSHGAHGMAVAADLKSTQEAINKITKNLNSLSELEVKNLQRLSGAMDELHNEILELDEKVDDLRADTISSQIELAVLLSNEGIINSEDEHLLALERKLKKMLGPSAVDIGNGCFETKHKCNQTCLDRIAAGTFNAGEFSLPTFDSLNITAASLNDDGLDNHTILLYYSTAASSLAVTLMLAIFIVYMVSRDNVSCSICL

SEQ ID NO: 27858 - protein, 584 aa, synthetic construct; identical to SEQ ID NO: 26854
  REGION 1..584: note = hemagglutinin__InfluenzaB__AHE38014

SEQ ID NO: 27859 - protein, 585 aa, synthetic construct; identical to SEQ ID NO: 26645
  REGION 1..585: note = hemagglutinin__InfluenzaB__AHE38015

SEQ ID NO: 27860 - protein, 585 aa, synthetic construct
  REGION 1..585: note = hemagglutinin__InfluenzaB__AHE38016
MKAIIVLLMVVTSNADRICTGITSSNSPHVVKTATQGEVNVTGVIPLTTTPTKSHFANLKGTETRGKLCPKCLNCTDLDVALGRPKCTGKIPSARVSILHEVRPVTSGCFPIMHDRTKIRQLPNLLRGYEHIRLSTHNVINAENAPGGPYKIGTSGSCPNVTNGNGFFATMAWAVPKNDKNKTATNPLTIEVPYICTEGEDQITVWGFHSDNETQMAKLYGDSKPQKFTSSANGVTTHYVSQIGGFPNQTEDGGLPQSGRIVVDYMVQKSGKTGTITYQRGILLPQKVWCASGKSKVIKGSLPLIGEADCLHEKYGGLNKSKPYYTGEHAKAIGNCPIWVKTPLKLANGTKYRPPAKLLKERGFFGAIAGFLEGGWEGMIAGWHGYTSHGAHGVAVAADLKSTQEAINKITKNLNSLSELEVKNLQRLSGAMDELHNEILELDEKVDDLRADTISSQIELAVLLSNEGIINSEDEHLLALERKLKKMLGPSAVEIGNGCFETKHKCNQTCLDRIAAGTFDAGEFSLPTFDSLNITAASLNDDGLDNHIILLYYSTAASSLAVTLMIAIFVVYMVSRDNVSCSICL

SEQ ID NO: 27861 - protein, 585 aa, synthetic construct; identical to SEQ ID NO: 26964
  REGION 1..585: note = hemagglutinin__InfluenzaB__AHE38017

SEQ ID NO: 27862 - protein, 585 aa, synthetic construct; identical to SEQ ID NO: 26887
  REGION 1..585: note = hemagglutinin__InfluenzaB__AHE38018

SEQ ID NO: 27863 - protein, 585 aa, synthetic construct; identical to SEQ ID NO: 26872
  REGION 1..585: note = hemagglutinin__InfluenzaB__AHE38019

SEQ ID NO: 27864 - protein, 585 aa, synthetic construct
  REGION 1..585: note = hemagglutinin__InfluenzaB__AHE38020
MKAIIVLLMVVTSNADRICTGITSSNSPHVVKTATQGEVNVTGVIPLTITPTKSHFANLKGTETRGKLCPKCLNCTDLDVALGRPKCTGKIPSARVSILHEVRPVTSGCFPIMHDRTKIRQLPNLLRGYEHIRLSTHNVINAEDAPGGPYKIGTSGSCPNVTNGNGFFATMAWAVPKNDKNKTATNPLTIEVPYICTEGEDQITVWGFHSDNETQMAKLYGDSKPQKFTSSANGVTTHYVSQIGGFPNQTEDGGLPQSGRIVVDYMVQKSGKTGTITYQRGILLPQKVWCASGRSKVIKGSLPLIGEADCLHEKYGGLNKSKPYYTGEHAKAIGNCPIWVKTPLKLANGTKYRPPAKLLKERGFFGAIAGFLEGGWEGMIAGWHGYTSHGAHGVAVAADLKSTQEAINKITKNLNSLSELEVKNLQRLSGAMDELHNEILELDEKVDDLRADTISSQIELAVLLSNEGIINSEDEHLLALERKLKKMLGPSAVEIGNGCFETKHKCNQTCLDRIAAGTFDAGEFSLPTFDSLNITAASLNDDGLDNHTILLYYSTAASSLAVTLMIAIFVVYMVSRDNVSCSICL

SEQ ID NO: 27865 - protein, 585 aa, synthetic construct
  REGION 1..585: note = hemagglutinin__InfluenzaB__AHE38021
MKAIIVLLMVVTSNADRICTGITSSNSPHVVKTATQGEVNVTGVIPLTTTPTKSHFANLKGTETRGKLCPKCLNCTDLDVALGRPKCTGKIPSARVSILHEVRPVTSGCFPIMHDRTKIRQLPNLLRGYEHIRLSTHNVINAENAPGGPYKIGTSGSCPNVTNGNGFFATMAWAVPKNDKNKTATNPLTIEVPYICTEGEDQITVWGFHSDNETQMAKLYGDSNPQKFTSSANGVTTHYVSQIGGFPNQTEDGGLPQSGRIVVDYMVQKSGKTGTITYQRGILLPQKVWCASGRSKVIKGSLPLIGEADCLHEKYGGLNKSKPYYTGEHAKAIGNCPIWVKTPLKLANGTKYRPPAKLLKERGFFGAIAGFLEGGWEGMIAGWHGYTSHGAHGVAVAADLKSTQEAINKITKNLNSLSELEVKNLQRLSGAMDELHNEILELDEKVDDLRADTISSQIELAVLLSNEGIINSEDEHLLALERKLKKMLGPSAVEIGNGCFETKHKCNQTCLDRIAAGTFDAGEFSLPTFDSLNITAASLNDDGLDNHTILLYYSTAASSLAVTLMIAIFVVYMVSRDNVSCSICL

SEQ ID NO: 27866 - protein, 585 aa, synthetic construct; identical to SEQ ID NO: 26887
  REGION 1..585: note = hemagglutinin__InfluenzaB__AHE38022

SEQ ID NO: 27867 - protein, 583 aa, synthetic construct
  REGION 1..583: note = hemagglutinin__InfluenzaB__AHL91189
MKAIIVLLMVATSNADRICTGITSSNSPHVVKTATQGEVNVTGVISLTTTPTKSHFANLKGTKTRGKLCPNCLNCTDLDVALGRPICIGTIPSAKASILHEVRPVTSGCFPIMHDRTKIRQLPNLLRGYEHIRLSTHNVINAERAPGGPYRLGTSGSCPNVTSRSGFFATMAWAVPRDNKTATNPLTVEVPYICTKGEDQITVWGFHSDNKTQMKNLYGDSNPQKFTSSANGVTTHYVSQIGGFPNQTEDGGLPQSGRIVVDYMVQKPGKTGTIVYQRGVLLPQKVWCASGRSKVIKGSLPLIGEADCLHEKYGGLNKSKPYYTGEHAKAIGNCPIWVKTPLKLANGTKYRPPAKLLKERGFFGAIAGFLEGGWEGMIAGWHGYTSHGAHGVAVAADLKSTQEAINKITKNLNSLSELEVKNLQRLSGAMDELHNEILELDEKVDDLRADTISSQIELAVLLSNEGIINSEDEHLLALERKLKKMLGPSAVDIGNGCFETKHKCNQTCLDRIAAGTFNAGEFSLPTFDSLNITAASLNDDGLDNHTILLYYSTAASSLAVTLMIAIFIVYMVSRDNVSCSICL

SEQ ID NO: 27868 - protein, 583 aa, synthetic construct
  REGION 1..583: note = hemagglutinin__InfluenzaB__AHL91200
MKAIIVLLMVVTSNADRICTGITSSNSPHVVKTATQGEVNVTGVIPLTTTPTKSHFANLKGTKTRGKLCPNCLNCTDLDVALGRPMCIGTIPSAKASILHEVRPVTSGCFPIMHDRTKIRQLPNLLRGYEHIRLSTHNVINAERAPGGPYRLGTSGSCPNVTSRSGFFATMAWAVPRDNKTATNPLTVEVPYICTKGEDQITVWGFHSDNKTQMKNLYGDSNPQKFTSSANGVTTHYVSQIGDFPNQTEDGGLPQSGRIVVDYMVQKPGKTGTIVYQRGVLLPQKVWCASGRSKVIKGSLPLIGEADCLHEKYGGLNKSKPYYTGEHAKAIGNCPIWVKTPLKLANGTKYRPPAKLLKERGFFGAIAGFLEGGWEGMIAGWHGYTSHGAHGVAVAADLKSTQEAINKITKNLNSLSELEVKNLQRLSGAMDELHNEILELDEKVDDLRADTISSQIELAVLLSNEGIINSEDEHLLALERKLKKMLGPSAVDIGNGCFETKHKCNQTCLDRIAAGTFNAGEFSLPTFDSLNITAASLNDDGLDNHTILLYYSTAASSLAVTLMIAIFIVYMVSRDNVSCSICL

SEQ ID NO: 27869 - protein, 583 aa, synthetic construct
  REGION 1..583: note = hemagglutinin__InfluenzaB__AHL91211
MKAIIVLLMVATSNADRICTGITSSNSPHVVKTATQGEVNVTGVISLTTTPTKSHFANLKGTKTRGKLCPNCLNCTDLDVALGRPMCIGTIPSAKASILHEVRPVTSGCFPIMHDRTKIRQLPNLLRGYEHIRLSTHNVINAERAPGGPYRLGTSGSCPNVTSRSGFFATMAWAVPRDNKTATNPLTVEVPYICTKGEDQITVWGFHSDNKTQMKNLYGDSNPQKFTSSANGVTTHYVSQIGGFPNQTEDGGLPQSGRIVVDYMVQKPGKTGTIVYQRGVLLPQKVWCASGRSKVIKGSLPLIGEADCLHEKYGGLNKSKPYYTGEHAKAIGNCPIWVKTPLKLANGTKYRPPAKLLKERGFFGAIAGFLEGGWEGMIAGWHGYTSHGAHGVAVAADLKSTQEAINKITKNLNSLSELEVKNLQRLSGAMDELHNEILELDEKVDDLRADTISSQIELAVLLSNEGIINSEDEHLLALERKLKKMLGPSAVDIGNGCFETKHKCNQTCLDRIAAGTFNAGEFSLPTFDSLNITAASLNDDGLDNHTILLYYSTAASSLAVTLMIAIFIVYMVSRDNVSCSICL

SEQ ID NO: 27870 - protein, 584 aa, synthetic construct
  REGION 1..584: note = hemagglutinin__InfluenzaB__AHL91222
MKAIIVLLMVVTSNADRICTGITSSNSPHVVKTATQGEVNVTGVIPLTTTPTKSHFANLKGTKTRGKLCPNCLNCTDLDVALGRPMCVGTTPSAKASILHEVRPVTSGCFPIMHDRTKIRQLPNLLRGYENIRLSTQNVINAEKAPGGPYRLGTSGSCPNATSRSGFFATMAWAVPRDNNKTATNPLTVEVPYVCTEGEDQITVWGFHSDNKTQMKNLYGDSNPQKFTSSANGVTTHYVSQIGGFPDQTEDGGLPQSGRIVVDYMVQKPGKTGTIVYQRGVLLPQKVWCASGRSKVIKGSLPLIGEADCLHEKYGGLNKSKPYYTGEHAKAIGNCPIWVKTPLKLANGTKYRPPAKLLKERGFFGAIAGFLEGGWEGMIAGWHGYTSHGAHGVAVAADLKSTQEAINKITKNLNSLSELEVKNLQRLSGAMDELHNEILELDEKVDDLRADTISSQIELAVLLSNEGIINSEDEHLLALERKLKKMLGPSAVDIGNGCFETKHKCNQTCLDRIAAGTFNAGEFSLPTFDSLNITAASLNDDGLDNHTILLYYSTAASSLAVTLMIAIFIVYMVSRDNISCSICL

SEQ ID NO: 27871 - protein, 584 aa, synthetic construct
  REGION 1..584: note = hemagglutinin__InfluenzaB__AHL91244
MKAIIVLLMVVTSNADRICTGITSSNSPHVVKTATQGEVNVTGVIPLTTTPTKSHFANLKGTKTRGKLCPTCLNCTDLDVALGRPMCVGTTPSAKASILHEVRPVTSGCFPIMHDRTKIRQLPNLLRGYEKIRLSTQNVINAEKAPGGPYRLGTSGSCPNATSRSGFFATMAWAVPRDNNKTATNPLTVEVPYICTKEEDQITVWGFHSDNKTQMKNLYGDSNPQKFTSSANGVTTHYVSQIGGFPDQTEDGGLPQSGRIVVDYMVQKPGKTGTIVYQRGVLLPQKVWCASGRSKVIKGSLPLIGEADCLHEKYGGLNKSKPYYTGEHAKAIGNCPIWVKTPLKLANGTKYRPPAKLLKERGFFGAIAGFLEGGWEGMIAGWHGYTSHGAHGVAVAADLKSTQEAINKITKNLNSLSELEVKNLQRLSGAMDELHNEILELDEKVDDLRADTISSQIELAVLLSNEGIINSEDEHLLALERKLKKMLGPSAVDIGNGCFETKHKCNQTCLDRIAAGTFNAGEFSLPTFDSLNITAASLNDDGLDNHTILLYYSTAASSLAVTLMIAIFIVYMVSRDNVSCSICL

SEQ ID NO: 27872 - protein, 584 aa, synthetic construct; identical to SEQ ID NO: 26501
  REGION 1..584: note = hemagglutinin__InfluenzaB__AHL91255

SEQ ID NO: 27873 - protein, 584 aa, synthetic construct; identical to SEQ ID NO: 26501
  REGION 1..584: note = hemagglutinin__InfluenzaB__AHL91266

SEQ ID NO: 27874 - protein, 583 aa, synthetic construct
  REGION 1..583: note = hemagglutinin__InfluenzaB__AHL91277
MKAIIVLLMVVTSNADRICTGITSSNSPHVVKTATQGEVNVTGVIPLTTTPTKSHFANLKGTKTRGKLCPNCLNCTDLDVALGRPMCIGITPSAKASILHEVRPVTSGCFPIMHDRTKIRQLPNLLRGYEHIRLSTHNVINAERAPGGPYRLGTSGSCPNVTSRSGFFATMAWAVPRDNKTATNPLTVEVPYICTKGEDQITVWGFHSDNKTQMKNLYGDSNPQKFTSSANGITTHYVSQIGGFPNQTEDGGLPQSGRIVVDYMVQKPGKTGTIVYQRGVLLPQKVWCASGRSKVIKGSLPLIGEADCLHEKYGGLNKSKPYYTGEHAKAIGNCPIWVKTPLKLANGTKYRPPAKLLKERGFFGAIAGFLEGGWEGMIAGWHGYTSHGAHGVAVAADLKSTQEAINKITKNLNSLSELEVKNLQRLSGAMDELHNEILELDEKVDDLRADTISSQIELAVLLSNEGIINSEDEHLLALERKLKKMLGPSAVDIGNGCFETKHKCNQTCLDRIAAGTFNAGEFSLPTFDSLNITAASLNDDGLDNHTILLYYSTAASSLAVTLMIAIFIVYMVSRDNVSCSICL

SEQ ID NO: 27875 - protein, 584 aa, synthetic construct
  REGION 1..584: note = hemagglutinin__InfluenzaB__AHL91299
MKAIIVLLMVVTSNADRICTGITSSNSPHVVKTATQGEVNVTGVIPLTTTPTRSHFANLKGTKTRGKLCPTCLNCTDLDVALGRPMCVGTTPSAKASILHEVRPVTSGCFPIMHDRTKIRQLPNLLRGYEKIRLSTQNVINAEKAPGGPYRLGTSGSCPNATSRSGFFATMAWAVPRDNNKTATNPLTVEVPYICTKEEDQITVWGFHSDNKTQMKNLYGDSNPQKFTSSANGVTTHYVSQIGGFPDQTEDGGLPQSGRIVVDYMVQKPGKTGTIVYQRGILLPQKVWCASGRSKVIKGSLPLIGEADCLHEKYGGLNKSKPYYTGEHAKAIGNCPIWVKTPLKLANGTKYRPPAKLLKERGFFGAIAGFLEGGWEGMIAGWHGYTSHGAHGVAVAADLKSTQEAINKITKNLNSLSELEVKNLQRLSGAMDELHNEILELDEKVDDLRADTISSQIELAVLLSNEGIINSEDEHLLALERKLKKMLGPSAVDIGNGCFETKHKCNQTCLDRIAAGTFNAGEFSLPTFDSLNITAASLNDDGLDNHTILLYYSTAASSLAVTLMIAIFIVYMISRDNVSCSICL

SEQ ID NO: 27876 - protein, 584 aa, synthetic construct
  REGION 1..584: note = hemagglutinin__InfluenzaB__AHL91310
MKAIIVLLMVVTSNADRICTGITSSNSPHVVKTATQGEVNVTGVIPLTTTPTKSHFANLKGTKTRGKLCPTCLNCTDLDVALGRPMCVGTTPSAKASILHEVRPVTSGCFPIMHDRTKIRQLPNLLRGYEKIRLSTQNVINAEKAPGGPYRLGTSGSCPNATSRSGFFATMAWAVPRDNNKTATNPLTVEVPYICTKEEDQITVWGFHSDNKTQMKNLYGDSNPQKFTSSANGVTTHYVSQIGGFPDQTEDGGLPQSGRIVVDYMVQKPGKTGTIVYQRGILLPQKVWCASGRSKVIKGSLPLIGEADCLHEKYGGLNKSKPYYTGEHAKAIGNCPIWVKTPLKLANGTKYRPPAKLLKERGFFGAIAGFLEGGWEGMIAGWHGYTSHGAHGVAVAADLKSTQEAINKITKNLNSLSELEVKNLQRLSGAMDELHNEILELDEKVDDLRADTISSQIELAVLLSNEGIINSEDEHLLALERKLKKMLGPSAVDIGNGCFETKHKCNQTCLDRIAAGTFNAGEFSLPTFDSLNITAASLNDDGLDNHTILLYYSTAASSLAVTLMIAIFIVYMISRDNVSCSICL

SEQ ID NO: 27877 - protein, 584 aa, synthetic construct
  REGION 1..584: note = hemagglutinin__InfluenzaB__AHL91321
MKAIIVLLMVVTSNADRICTGITSSNSPHVVKTATQGEVNVTGVIPLTTTPTKSHFANLKGTKTRGKLCPTCLNCTDLDVALGRPMCVGTTPSAKASILHEVRPVTSGCFPIMHDRTKIRQLPNLLRGYEKIRLSTQNVINAEKAPGGPYRLGTSGSCPNATSRSGFFATMAWAVPRDNNKTATNPLTVEVPYICTKEEDQITVWGFHSDNKTQMKNLYGDSNPQKFTSSANGVTTHYVSQIGGFPDQTEDGGLPQSGRIVVDYMVQKPGKTGTIVYQRGVLLPQKVWCASGRSKVIKGSLPLIGEADCLHEKYGGLNKSKPYYTGEHAKAIGNCPIWVKTPLKLANGTKYRPPAKLLKEKGFFGAIAGFLEGGWEGMIAGWHGYTSHGAHGVAVAADLKSTQEAINKITKNLNSLSELEVKNLQRLSGAMDELHNEILELDEKVDDLRADTISSQIELAVLLSNEGIINSEDEHLLALERKLKKMLGPSAVDIGNGCFETKHKCNQTCLDRIAAGTFNAGEFSLPTFDSLNITAASLNDDGLDNHTILLYYSTAASSLAVTLMIAIFIVYMVSRDNVSCSICL

SEQ ID NO: 27878 - protein, 584 aa, synthetic construct; identical to SEQ ID NO: 27876
  REGION 1..584: note = hemagglutinin__InfluenzaB__AHL91332

SEQ ID NO: 27879 - protein, 584 aa, synthetic construct; identical to SEQ ID NO: 27876
  REGION 1..584: note = hemagglutinin__InfluenzaB__AHL91343

SEQ ID NO: 27880 - protein, 584 aa, synthetic construct; identical to SEQ ID NO: 27876
  REGION 1..584: note = hemagglutinin__InfluenzaB__AHL91354

SEQ ID NO: 27881 - protein, 584 aa, synthetic construct; identical to SEQ ID NO: 26479
  REGION 1..584: note = hemagglutinin__InfluenzaB__AHL91365

SEQ ID NO: 27882 - protein, 584 aa, synthetic construct
  REGION 1..584: note = hemagglutinin__InfluenzaB__AHL91376
MKAIIVLLMVVTSNADRICTGITSSNSPHVVKTATQGEVNVTGVIPLTATPTKSHFANLKGTKTRGKLCPTCLNCTDLDVALGRPMCVGVTPSAKASILHEVRPVTSGCFPIMHDRTKIRQLPNLLRGYEKIRLSTQNVINAEKAPGGPYRLGTSGSCPNATSRSGFFATMAWAVPRDNNKTATNPLTVEVPHICTKEEDQITVWGFHSDNKTQMKNLYGDSNPQKFTSSANGVTTHYVSQIGGFPDQTEDGGLPQSGRIVVDYMVQKPGKTGTIVYQRGILLPQKVWCASGRSKVIKGSLPLIGEADCLHEKYGGLNKSKPYYTGEHAKAIGNCPIWVKTPLKLANGTKYRPPAKLLKERGFFGAIAGFLEGGWEGMIAGWHGYTSHGAHGVAVAADLKSTQEAINKITKNLNSLSELEVKNLQRLSGAMDELHNEILELDEKVDDLRADTISSQIELAVLLSNEGIINSEDEHLLALERKLKKMLGPSAVDIGNGCFETKHKCNQTCLDRIAAGTFNAGEFSLPTFDSLNITAASLNDDGLDNHTILLYYSTAASSLAVTLMIAIFIVYMISRDNVSCSICL

SEQ ID NO: 27883 - protein, 584 aa, synthetic construct
  REGION 1..584: note = hemagglutinin__InfluenzaB__AHL91387
MKAIIVLLMVVTSNADRICTGITSSNSPHVVKTATQGEVNVTGVIPLTTTPAKSHFANLKGTKTRGKLCPTCLNCTDLDVALGRPMCVGVTPSAKASILHEVRPVTSGCFPIMHDRTKIRQLPNLLRGYEKIRLSTQNVINAEKAPGGPYRLGTSGSCPNATSRSGFFATMAWAVPRDNNKTATNPLTVEVPHICTKEEDQITVWGFHSDNKTQMKNLYGDSNPQKFTSSANGVTTHYVSQIGGFPDQTEDGGLPQSGRIVVDYMVQKPGKTGTIVYQRGILLPQKVWCASGRSKVIKGSLPLIGEADCLHEKYGGLNKSKPYYTGEHAKAIGNCPIWVKTPLKLANGTKYRPPAKLLKERGFFGAIAGFLEGGWEGMIAGWHGYTSHGAHGVAVAADLKSTQEAINKITKNLNSLSELEVKNLQRLSGAMDELHNEILELDEKVDDLRADTISSQIELAVLLSNEGIINSEDEHLLALERKLKKMLGPSAVDIGNGCFETKHKCNQTCLDRIAAGTFNAGEFSLPTFDSLNITAASLNDDGLDNHTILLYYSTAASSLAVTLMIAIFIVYMISRDNVSCSICL

SEQ ID NO: 27884 - protein, 584 aa, synthetic construct
  REGION 1..584: note = hemagglutinin__InfluenzaB__AHL91409
MKAIIVLLMVVTSNADRICTGITSSDSPHVVKTATQGEVNVTGAIPLTTTPTKSYFANLKGTKTRGKLCPTCLNCTDLDVALGRPMCVGITPSAKASILHEVRPVTSGCFPIMHDRTKIRQLPNLLRGYEKIRLSTQNVINAEKAPGGPYRLGTSGSCPNATSRSGFFATMAWAVPRDNNKTATNPLTVEVPHICTKEEDQITVWGFHSDNKTQMKNLYGDSNPQKFTSSANGITTHYVSQIGGFPDQTEDGGLPQSGRIVVDYMVQKPGKTGTIVYQRGILLPQKVWCASGRSKVIKGSLPLIGEADCLHEKYGGLNKSKPYYTGEHAKAIGNCPIWVKTPLKLANGTKYRPPAKLLKERGFFGAIAGFLEGGWEGMVAGWHGYTSHGAHGVAVAADLKSTQEAINKITKNLNSLSELEVKNLQRLSGAMDELHNEILELDEKVDDLRADTISSQIELAVLLSNEGIINSEDEHLLALERKLKKMLGPSAVDIGNGCFETKHKCNQTCLDRIAAGTFNAGEFSLPTFDSLNITAASLNDDGLDNHTILLYYSTAASSLAVTLMIAIFIVYMISRDNVSCSICL

SEQ ID NO: 27885 - protein, 584 aa, synthetic construct
  REGION 1..584: note = hemagglutinin__InfluenzaB__AHL91431
MKAIIVLLMVVTSNADRICTGITSSNSPHVVKTATQGEVNVTGAIPLTTTPTKSHFANLKGTKTRGKLCPTCLNCTDLDVALGRPMCVGITPSAKASILHEVRPVTSGCFPIMHDRTKIRQLPNLLRGYEKIRLSTQNVINAEKAPGGPYRLGTSGSCPNATSKSGFFATMAWAVPRDNNKTATNPLTVEVPHICTKEEDQITVWGFHSDNKTQMKNLYGDSNPQKFTSSANGITTHYVSQIGGFPDQTEDGGLPQSGRIVVDYMVQKPGKTGTIVYQRGILLPQKVWCASGRSKVIKGSLPLIGEADCLHEKYGGLNKSKPYYTGEHAKAIGNCPIWVKTPLKLANGTKYRPPAKLLKERGFFGAIAGFLEGGWEGMIAGWHGYTSHGAHGVAVAADLKSTQEAINKITKNLNFLSELEVKNLQRLSGAMDELHNEILELDEKVDDLRADTISSQIELAVLLSNEGIINSEDEHLLALERKLKKMLGPSAVDIGNGCFETKHKCNQTCLDRIAAGTFNAGEFSLPTFDSLNITAASLNDDGLDNHTILLYYSTAASSLAVTLMIAIFIVYMISRDNVSCSICL

SEQ ID NO: 27886 - protein, 584 aa, synthetic construct
  REGION 1..584: note = hemagglutinin__InfluenzaB__AHL91442
MKAIIVLLMVVTSNADRICTGITSSNSPHVVKTATQGEVNVTGAIPLTTTPTKSHFANLKGTKTRGKLCPTCLNCTDLDVALGRPMCVGITPSAKASILHEVRPVTSGCFPIMHDRTKIRQLPNLLRGYEKIRLSTQNVINAETAPGGPYRLGTSGSCPNATSKSGFFATMAWAVPRDNNKTATNPLTVEVPHICTKEEDQITVWGFHSDNKTQMKNLYGDSNPQKFTSSANGITTHYVSQIGGFPDQTEDGGLPQSGRIVVDYMVQKPGKTGTIVYQRGILLPQKVWCASGRSKVIKGSLPLIGEADCLHEKYGGLNKSKPYYTGEHAKAIGNCPIWVKTPLKLANGTKYRPPAKLLKERGFFGAIAGFLEGGWEGMIAGWHGYTSHGAHGVAVAADLKSTQEAINKITKNLNSLSELEVKNLQRLSGAMDELHNEILELDEKVDDLRADTISSQIELAVLLSNEGIINSEDEHLLALERKLKKMLGPSAVDIGNGCFETKHKCNQTCLDRIAAGTFNAGEFSLPTFDSLNITAASLNDDGLDNHTILLYYSTAASSLAVTLMIAIFIVYMISRDNVSCSICL

SEQ ID NO: 27887 - protein, 584 aa, synthetic construct
  REGION 1..584: note = hemagglutinin__InfluenzaB__AHL91453
MKAIIVLLMVVTSNADRICTGITSSNSPHVVKTATQGEVNVTGAIPLTTTPTKSHFANLKGTKTRGKLCPTCLNCTDLDVALGRPMCVGITPSAKASILHEVRPVTSGCFPIMHDRTKIRQLPNLLRGYEKIRLSTQNVINAEKAPGGPYRLGTSGSCPNATSKSGFFATMAWAVPRDNNKTATNPLTIEVPHVCTKEEDQITVWGFHSDNKTQMKNLYGDSNPQKFTSSANGITTHYVSQIGGFPDQTEDGGLPQSGRIVVDYMVQKPGKTGTIVYQRGILLPQKVWCASGRSKVIKGSLPLIGEADCLHEKYGGLNKSKPYYTGEHAKAIGNCPIWVKTPLKLANGTKYRPPAKLLKERGFFGAIAGFLEGGWEGMIAGWHGYTSHGAHGVAVAADLKSTQEAINKITKNLNSLSELEVKNLQRLSGAMDELHNEILELDEKVDDLRADTISSQIELAVLLSNEGIINSEDEHLLALERKLKKMLGPSAVDIGNGCFETKHKCNQTCLDRIAAGTFNAGEFSLPTFDSLNITAASLNDDGLDNHTILLYYSTAASSLAVTLMIAIFIVYMISRDNVSCSICL

SEQ ID NO: 27888 - protein, 584 aa, synthetic construct; identical to SEQ ID NO: 26405
  REGION 1..584: note = hemagglutinin__InfluenzaB__AHL91464

SEQ ID NO: 27889 - protein, 584 aa, synthetic construct; identical to SEQ ID NO: 26511
  REGION 1..584: note = hemagglutinin__InfluenzaB__AHL91475

SEQ ID NO: 27890 - protein, 584 aa, synthetic construct; identical to SEQ ID NO: 27886
  REGION 1..584: note = hemagglutinin__InfluenzaB__AHL91486

SEQ ID NO: 27891 - protein, 584 aa, synthetic construct; identical to SEQ ID NO: 27886
  REGION 1..584: note = hemagglutinin__InfluenzaB__AHL91497

SEQ ID NO: 27892 - protein, 584 aa, synthetic construct; identical to SEQ ID NO: 27886
  REGION 1..584: note = hemagglutinin__InfluenzaB__AHL91530

SEQ ID NO: 27893 - protein, 584 aa, synthetic construct; identical to SEQ ID NO: 26405
  REGION 1..584: note = hemagglutinin__InfluenzaB__AHL91541

SEQ ID NO: 27894 - protein, 584 aa, synthetic construct; identical to SEQ ID NO: 27886
  REGION 1..584: note = hemagglutinin__InfluenzaB__AHL91552

SEQ ID NO: 27895 - protein, 584 aa, synthetic construct; identical to SEQ ID NO: 27886
  REGION 1..584: note = hemagglutinin__InfluenzaB__AHL91574

SEQ ID NO: 27896 - protein, 584 aa, synthetic construct
  REGION 1..584: note = hemagglutinin__InfluenzaB__AHL91585
MKAIIVLLMVVTSNADRICTGITSSNSPHVVKTATQGEVNVTGAIPLTTTPTKSHFANLKGTKTRGKLCPTCLNCTDLDVALGRPMCVGITPSAKASILHEVRPVTSGCFPIMHDRTKIRQLPNLLRGYEKIRLSTQNVINAEKAPGGPYRLGTSGSCPNATSKSGFFATMAWAVPRDNNKTATNPLTVEVPHICTKEEDQITVWGFHSDNKTQMKNLYGDSNPQKFTSSANGMTTHYVSQIGGFPDQTEDGGLPQSGRIVVDYMVQKPGKTGTIVYQRGILLPQKVWCASGRSKVIKGSLPLIGEADCLHEKYGGLNKSKPYYTGEHAKAIGNCPIWVKTPLKLANGTKYRPPAKLLKERGFFGAIAGFLEGGWEGMIAGWHGYTSHGAHGVAVAADLKSTQEAINKITKNLNSLSELEVKNLQRLSGAMDELHNEILELDEKVDDLRADTISSQIELAVLLSNEGIINSEDEHLLALERKLKKMLGPSAVDIGNGCFETKHKCNQTCLDRIAAGTFNAGEFSLPTFDSLNITAASLNDDGLDNHTILLYYSTAASSLAVTLMIAIFIVYMISRDNVSCSICL

SEQ ID NO: 27897 - protein, 584 aa, synthetic construct
  REGION 1..584: note = hemagglutinin__InfluenzaB__AHL91596
MKAIIVLLMVVTSNADRICTGITSSNSPHVVKTATQGEVNVTGAIPLTTTPTKSHFANLKGTKTRGKLCPTCLNCTDLDVALGRPMCVGITPSAKASILHEVRPVTSGCFPIMHDRTKIRQLPNLLRGYEKIRLSTQNVINAEKAPGGPYRLGTSGSCPNATSKSGFFATMAWAVPRDNNKTATNPLTVEVPHICTKEEDQITVWGFHSDNKTQMKNLYGDSNPQKFTSSANGITTHYVSQIGGFPDQTEDGGLPQSGRIVVDYMVQKPGKTGTIVYQRGILLPQKVWCASGRSKVIKGSLPLIGEADCLHEKYGGLNKSKPYYTGEHAKAIGNCPIWVKTPLKLANGTKYRPPAKILKERGFFGAIAGFLEGGWEGMIAGWHGYTSHGAHGVAVAADLKSTQEAINKITKNLNSLSELEVKNLQRLSGAMDELHNEILELDEKVDDLRADTISSQIELAVLLSNEGIINSEDEHLLALERKLKKMLGPSAVDIGNGCFETKHKCNQTCLDRIAAGTFNAGEFSLPTFDSLNITAASLNDDGLDNHTILLYYSTAASSLAVTLMIAIFIVYMISRDNVSCSICL

SEQ ID NO: 27898 - protein, 584 aa, synthetic construct; identical to SEQ ID NO: 27897
  REGION 1..584: note = hemagglutinin__InfluenzaB__AHL91607

SEQ ID NO: 27899 - protein, 584 aa, synthetic construct
  REGION 1..584: note = hemagglutinin__InfluenzaB__AHL91618
MKAIIVLLMVVTSNADRICTGITSSNSPHVVKTATQGEVNVTGAIPLTTTPTKSHFANLKGTKTRGKLCPTCLNCTDLDVALGRPMCVGITPSAKASILHEVRPVTSGCFPIMHDRTKIRQLPNLLRGYEKIRLSTQNVINAETAPGGPYRLGTSGSCPNATSKSGFFATMAWAVPRDNNKTATNPLTVEVPHICTKEEDQITVWGFHSDNKTQMKNLYGDSNPQKFTSSANGITTHYVSQIGGFPDQTEDGGLPQSGRIVVDYMVQKPGKTGTIVYQRGILLPQKVWCASGRSKVIKGSLPLIGEADCLHEKYGGLNKSKPYYTGEHAKAIGNCPIWVKTPLKLANGTKYRPPAKLLKERGFFGAIAGFLEGGWEGMIAGWHGYTSHGAHGVAVAADLKSTQEAINKITKNLNSLSELEVKNLQRLSGAMDELHNEILELDEKVDDLRADTISSQIELAVLLSNEGIINSEDEHLLALERKLKKMLGPSAVDIGNGCFETKHKCNQTCLDRIAAGTFNVGEFSLPTFDSLNITAASLNDDGLDNHTILLYYSTAASSLAVTLMIAIFIVYMISRDNVSCSICL

SEQ ID NO: 27900 - protein, 584 aa, synthetic construct
  REGION 1..584: note = hemagglutinin__InfluenzaB__AHL91629
MKAIIVLLMVVTSNADRICTGITSSNSPHVVKTATQGEVNVTGAIPLTTTPTKSHFANLKGTKTRGKLCPTCFNCTDLDVALGRPMCVGITPSAKASILHEVRPVTSGCFPIMHDRTKIRQLPNLLRGYEKIRLSTQNVIDAEKAPGGPYKLGTSGSCPNATSKSGFFATMAWAVPRDNNKTATNPLTVEVPHICTKEEDQITVWGFHSDNKTQMKNLYGDSNPQKFTSSANGITTHYVSQIGGFPDQTEDGGLPQSGRIVVDYMVQKPGKTGTIVYQRGILLPQKVWCASGRSKVIKGSLPLIGEADCLHEKYGGLNKSKPYYTGEHAKAIGNCPIWVKTPLKLANGTKYRPPAKLLKERGFFGAIAGFLEGGWEGMIAGWHGYTSHGAHGVAVAADLKSTQEAINKITKNLNSLSELEVKNLQRLSGAMDELHNEILELDEKVDDLRADTISSQIELAVLLSNEGIINSEDEHLLALERKLKKMLGPSAVDIGNGCFETKHKCNQTCLDRIAAGTFNAGEFSLPTFDSLNITAASLNDDGLDNHTILLYYSTAASSLAVTLMIAIFIVYMISRDNVSCSICL

SEQ ID NO: 27901 - protein, 584 aa, synthetic construct; identical to SEQ ID NO: 27900
  REGION 1..584: note = hemagglutinin__InfluenzaB__AHL91640

SEQ ID NO: 27902 - protein, 584 aa, synthetic construct; identical to SEQ ID NO: 26407
  REGION 1..584: note = hemagglutinin__InfluenzaB__AHL91651

SEQ ID NO: 27903 - protein, 583 aa, synthetic construct
  REGION 1..583: note = hemagglutinin__InfluenzaB__AHL91662
MKAIIVLLMVVTSNADRICTGITSSNSPHVVKTATQGEVNVTGAIPLTTTPTKSHFANLKGTKTRGKLCPTCLNCTDLDVALGRPMCVGITPSAKASILHEVRPVTSGCFPIMHDRTKIRQLPNLLRGYEKIRLSTQNVINAETAPGGPYRLGTSGSCPNATSKSGFFATMAWAVPRDNNKTATNPLTVEVPHICTKEEDQITVWGFHSDNKTQMKNLYGDSNPQKFTSSANGITTHYVSQIGGFPDQTEDGGLPQSGRIVVDYMVQKPGKTGTIVYQRGILLPQKVWCASGRSKVIKGSLPLIGEADCLHEKYGGLNKSKPYYTGEHAKAIGNCPIWVKTPLKLANGTKYRPPAKLLKERGFFGAIAGFLEGGWEGMIAGWHGYTSHGAHGVAVAADLKSTQEAINKITKNLNSLSELEVKNLQRLSGAMDELHNEILELDEKVDDLRADTISSQIELAVLLSNEGIINSEDEHLLALERKLKKMLGPSAVDIGNGCFETKHKCNQTCLDRIAAGTFNAGEFSLPTFDSLNITAASLNDGLDNHTILLYYSTAASSLAVTLMIAIFIVYMISRDNVSCSICL

SEQ ID NO: 27904 - protein, 584 aa, synthetic construct; identical to SEQ ID NO: 26511
  REGION 1..584: note = hemagglutinin__InfluenzaB__AHL91673

SEQ ID NO: 27905 - protein, 584 aa, synthetic construct
  REGION 1..584: note = hemagglutinin__InfluenzaB__AHL91684
MKAIIVLLMVVTSNADRICTGITSSNSPHVVKTATQGEVNVTGAIPLTTTPTKSHFANLKGTKTRGKLCPTCLNCTDLDVALGRPMCVGITPSAKASILHEVRPVTSGCFPIMHDRTKIRQLPNLLRGYEKIRLSTQNVINAEKAPGGPYRLGTSGSCPNATSKSGFFATMAWAVPRDNNKTATNPLTIEVPHICTKEEDQITVWGFHSDNKTQMKNLYGDSNPQKFTSSANGITTHYVSQIGGFPDQTEDGGLPQSGRIVVDYMVQKPGKTGTIVYQRGILLPQKVWCASGRSKVIKGFLPLIGEADCLHEKYGGLNKSKPYYTGEHAKAIGNCPIWVKTPLKLANGTKYRPPAKLLKERGFFGAIAGFLEGGWEGMIAGWHGYTSHGAHGVAVAADLKSTQEAINKITKNLNSLSELEVKNLQRLSGAMDELHNEILELDEKVDDLRADTISSQIELAVLLSNEGIINSEDEHLLALERKLKKMLGPSAVDIGNGCFETKHKCNQTCLDRIAAGTFNAGEFSLPTFDSLNITAASLNDDGLDNHTILLYYSTAASSLAVTLMIAIFIVYMISRDNVSCSICL

SEQ ID NO: 27906 - protein, 584 aa, synthetic construct; identical to SEQ ID NO: 26407
  REGION 1..584: note = hemagglutinin__InfluenzaB__AHL91695

SEQ ID NO: 27907 - protein, 584 aa, synthetic construct; identical to SEQ ID NO: 26511
  REGION 1..584: note = hemagglutinin__InfluenzaB__AHL91706

SEQ ID NO: 27908 - protein, 585 aa, synthetic construct; identical to SEQ ID NO: 26979
  REGION 1..585: note = hemagglutinin__InfluenzaB__AHL91717

SEQ ID NO: 27909 - protein, 585 aa, synthetic construct; identical to SEQ ID NO: 26979
  REGION 1..585: note = hemagglutinin__InfluenzaB__AHL91728

SEQ ID NO: 27910 - protein, 585 aa, synthetic construct; identical to SEQ ID NO: 26979
  REGION 1..585: note = hemagglutinin__InfluenzaB__AHL91739

SEQ ID NO: 27911 - protein, 584 aa, synthetic construct; identical to SEQ ID NO: 26511
  REGION 1..584: note = hemagglutinin__InfluenzaB__AHL91750

SEQ ID NO: 27912 - protein, 585 aa, synthetic construct; identical to SEQ ID NO: 26979
  REGION 1..585: note = hemagglutinin__InfluenzaB__AHL91761

SEQ ID NO: 27913 - protein, 585 aa, synthetic construct
  REGION 1..585: note = hemagglutinin__InfluenzaB__AHL91772
MKAIIVLLMVVTSNADRICTGITSSNSPHVVKTATQGEVNVTGVIPLTTTPTKSHFANLKGTKTRGKLCPKCLNCTDLDVALGRPKCTGNIPSAKVSILHEVRPVTSGCFPIMHDRTKIRQLPNLLRGYEHIRLSTHNVINAEKAPGGPYKIGTSGSCPNITNGNGFFATMAWAVPKNDNNKTATNSLTIEVPYICTEGEDQITVWGFHSDNETQMAKLYGDSKPQKFTSSANGVTTHYVSQIGGFPNQTEDGGLPQSGRIVVDYMVQKSGKTGTITYQRGILLPQKVWCASGRSKVIKGSLPLIGEADCLHEKYGGLNKSKPYYTGEHAKAIGNCPIWVKTPLKLANGTKYRPPAKLLKERGFFGAIAGFLEGGWEGMIAGWHGYTSHGAHGVAVAADLKSTQEAINKITKNLNSLSELEVKNLQRLSGAMDELHNEILELDEKVDDLRADTISSQIELAVLLSNEGIINSEDEHLLALERKLKKMLGPSAVEIGNGCFETKHKCNQTCLDRIAAGTFDAGEFSLPTFDSLNITAASLNDDGLDNHTILLYYSTAASSLAVTLMIAIFVVYMVSRDNVSCSICL

SEQ ID NO: 27914 - protein, 585 aa, synthetic construct; identical to SEQ ID NO: 27913
  REGION 1..585: note = hemagglutinin__InfluenzaB__AHL91783

SEQ ID NO: 27915 - protein, 585 aa, synthetic construct; identical to SEQ ID NO: 27913
  REGION 1..585: note = hemagglutinin__InfluenzaB__AHL91794

SEQ ID NO: 27916 - protein, 585 aa, synthetic construct
  REGION 1..585: note = hemagglutinin__InfluenzaB__AHL91805
MKAIIVLLMVVTSNADRICTGITSSNSPHVVKTATQGEVNVTGVIPLTTTPTKSHFANLKGTKTRGKLCPKCFNCTDLDVALGRPKCTGNIPSAEVSILHEVRPVTSGCFPIMHDRTKIRQLPNLLRGYEHIRLSTHNVINAEKAPGGPYKIGTSGSCPNVTNGNGFFATMAWAVPKNDNNKTATNSLTIEVPYICTEGEDQITVWGFHSDNETQMAKLYGDSKPQKFTSSANGVTTHYVSQIGGFPNQTEDGGLPQSGRIVVDYMVQKSGKTGTITYQRGILLPQKVWCASGRSKVIKGSLPLIGEADCLHEKYGGLNKSKPYYTGEHAKAIGNCPIWVKTPLKLANGTKYRPPAKLLKERGFFGAIAGFLEGGWEGMIAGWHGYTSHGAHGVAVAADLKSTQEAINKITKNLNSLSELEVKNLQRLSGAMDELHNEILELDEKVDDLRADTISSQIELAVLLSNEGIINSEDEHLLALERKLKKMLGPSAVEIGNGCFETKHKCNQTCLDRIAAGTFDAGEFSLPTFDSLNITAASLNDDGLDNHTILLYYSTAASSLAVTLMIAIFVVYMVSRDNVSCSICL

SEQ ID NO: 27917 - protein, 585 aa, synthetic construct; identical to SEQ ID NO: 26419
  REGION 1..585: note = hemagglutinin__InfluenzaB__AHL91816

SEQ ID NO: 27918 - protein, 585 aa, synthetic construct; identical to SEQ ID NO: 26419
  REGION 1..585: note = hemagglutinin__InfluenzaB__AHL91827

SEQ ID NO: 27919 - protein, 584 aa, synthetic construct; identical to SEQ ID NO: 27026
  REGION 1..584: note = hemagglutinin__InfluenzaB__AHL91838

SEQ ID NO: 27920 - protein, 584 aa, synthetic construct
  REGION 1..584: note = hemagglutinin__InfluenzaB__AHL91849
MKAIIVLLMVVTSNADRICTGITSSNSPHVVKTATQGEVNVTGVIPLTTTPTKSYFANLKGTRTRGKLCPDCLNCTDLDVALGRPMCVGTTPSAKASILHEARPVTSGCFPIMHDRTKIRQLPNLLRGYENIRLSTQNVIDAENAPGGPYRLGTSGSCPNATSKSGFFATMAWAVPKDNNKNATNPLTVEVPYICKEGEDQITVWGFHSDNKTQMKNLYGDSNPQKFTSSANGVTTHYVSQISGFPAQTEDGGLPQSGRIVVDYMVQKPRKTGTIVYQRGVLLPQKVWCASGRSKVIKGSLPLIGEADCLHEKYGGLNKSKPYYTGEHAKAIGNCPIWVKTPLKLANGTKYRPPAKLLKERGFFGAIAGFLEGGWEGMIAGWHGYTSHGAHGVAVAADLKSTQEAINKITKNLNSLSELEVKNLQRLSGAMDELHNEILELDEKVDDLRADTISSQIELAVLLSNEGIINSEDEHLLALERKLKKMLGPSAVDIGNGCFETKHKCNQTCLDRIAAGTFNAGEFSLPTFDSLNITAASLNDDGLDNHTILLYYSTAASSLAVTLMLAIFIVYMVSRDNVSCSICL

SEQ ID NO: 27921 - protein, 584 aa, synthetic construct
  REGION 1..584: note = hemagglutinin__InfluenzaB__AHL91860
MKAIIVLLMVVTSNADRICTGITSSNSPHVVKTATQGEVNVTGVIPLTTTPTKSYFANLKGTRTRGKLCPDCLNCTDLDVALGRPMCVGTTPSAKASILHEVRPVTSGCFPIMHDRTKIRQLPNLLRGYENIRLSTQNVIDAEKAPGGPYRLGTSGSCPNATSKSGFFATMAWAVPKDNNKNATNPLTVEIPYICTEGEDQITVWGFHSDNKTQMKNLYGDSNPQKFTSSANGVTTHYVSQIGGFPDQTEDGGLPQSGRIVVDYMMQKPGKTGTIVYQRGVLLPQKVWCASGRSKVIKGSLPLIGEADCLHEKYGGLNKSKPYYTGEHAKAIGNCPIWVKTPLKLANGTKYRPPAKLLKERGFFGAIAGFLEGGWEGMIAGWHGYTSHGAHGVAVAADLKSTQEAINKITKNLNSLSELEVKNLQRLSGAMDELHNEILELDEKVDDLRADTISSQIELAVLLSNEGIINSEDEHLLALERKLKKMLGPSAVEIGNGCFETKHKCNQTCLDRIAAGTFNAGEFSLPTFDSLNITAASLNDDGLDNHAILLYYSTAASSLAVTLMLAIFIVYMVSRDNVSCSICL

SEQ ID NO: 27922 - protein, 584 aa, synthetic construct
  REGION 1..584: note = hemagglutinin__InfluenzaB__AHL91871
MKAIIVLLMVVTSNADRICTGITSSNSPHVVKTATQGEVNVTGVIPLTTTPTKSYFANLKGTRTRGKLCPDCLNCTDLDVALGRPMCVGTTPSAKASILHEVRPVTSGCFPIMHDRTKIRQLPNLLRGYENIRLSTQNVIDAEKAPGGPYRLGTSGSCPNATSKSGFFATMAWAVPKDNNKNATNPLTVEIPYICTEGEDQITVWGFHSDNKTQMKNLYGDSNPQKFTSSANGVTTHYVSQIGGFPDQTEDGGLPQSGRIVVDYMMQKPGKTGTIVYQRGVLLPQKVWCASGRSKVIKGSLPLIGEADCLHEKYGGLNKSKPYYTGEHAKAIGNCPIWVKTPLKLANGTKYRPPAKLLKERGFFGAIAGFLEGGWEGMIAGWHGYTSHGAHGVAVAADLKSTQEAINKITKNLNSLSELEVKNLQRLSGAMDELHNEILELDEKVDDLRADTISSQIELAVLLSNEGIINSEDEHLLALERKLKKMLGPSAVEIGNGCFETKHKCNQTCLDRIAAGTFNAGEFSLPTFDSLNITAASLNDDGLDNHTILLYYSTAASSLAVTLMLAIFIVYMVSRDNVSCSICL

SEQ ID NO: 27923 - protein, 584 aa, synthetic construct; identical to SEQ ID NO: 26426
  REGION 1..584: note = hemagglutinin__InfluenzaB__AHL91882

SEQ ID NO: 27924 - protein, 584 aa, synthetic construct
  REGION 1..584: note = hemagglutinin__InfluenzaB__AHL91904
MKAIIVLLMVVTSNADRICTGITSSNSPHVVKTATQGEVNVTGVIPLTTTPTKSYFANLKGTRTRGKLCPDCLNCTDLDVALGRPMCVGTTPSAKASILHEVRPVTSGCFPIMHDRTKIRQLANLLRGYENIRLSTQNVIDAEKAPGGPYRLGTSGSCPNATSKSGFFATMAWAVPKDNNKNATNPLTVEVPYICTEGEDQITVWGFHSDNKTQMKNLYGDSNPQKFTSSANGVTTHYVSQIGGFPDQTEDGGLPQSGRIVVDYMMQKHGKTGTIVYQRGVLLPQKVWCASGRSKVIKGSLPLIGEADCLHEKYGGLNKSKPYYTGEHAKAIGNCPIWVKTPLKLANGTKYRPPAKLLKERGFFGAIAGFLEGGWEGMIAGWHGYTSHGAHGVAVAADLKSTQEAINKITKNLNSLSELEVKNLQRLSGAMDELHNEILELDEKVDDLRADTISSQIELAVLLSNEGIINSEDEHLLALERKLKKMLGPSAVDIGNGCFETKHKCNQTCLDRIAAGTFNAGEFSLPTFDSLNITAASLNDDGLDNHTILLYYSTAASSLAVTLMLAIFIVYMVSRDNVSCSICL

SEQ ID NO: 27925 - protein, 584 aa, synthetic construct
  REGION 1..584: note = hemagglutinin__InfluenzaB__AHL91915
MKAIIVLLMVVTSNADRICTGITSSNSPHVVKTATQGEVNVTGVIPLTTTPTKSYFANLKGTRTRGKLCPDCLNCTDLDVALGRPMCVGTTPSAKASILHEVRPVTSGCFPIMHDRTKIRQLPNLLRGYENIRLSTQNVIDAEKAPGGPYRLGTSGSCPNATSKSGFFATMAWAVPKDNYKNATNPLTVEVPYICTEGEDQITVWGFHSDNKTQMKNLYGDSNPQKFTSSANGVTTHYVSQIGGFPDQTEDGGLPQSGRIVVDYMMQKPGKTGTIVYQRGVLLPQKVWCASGRSKVIKGSLPLIGEADCLHEKYGGLNKSKPYYTGEHAKAIGNCPIWVKTPLKLANGTKYRPPAKLLKERGFFGAIAGFLEGGWEGMIAGWHGYTSHGAHGVAVAADLKSTQEAINKITKNLNSLSELEVKNLQRLSGAMDELHNEILELDEKVDDLRADTISSQIELAVLLSNEGIINSEDEHLLALERKLKKMLGPSAVDIGNGCFETKHKCNQTCLDRIAAGTFNAGEFSLPTFDSLNITAASLNDDGLDNHTILLYYSTAASSLAVTLMLAIFIVYMVSRDNVSCSICL

SEQ ID NO: 27926 - protein, 584 aa, synthetic construct; identical to SEQ ID NO: 27024
  REGION 1..584: note = hemagglutinin__InfluenzaB__AHL91926

SEQ ID NO: 27927 - protein, 584 aa, synthetic construct; identical to SEQ ID NO: 27599
  REGION 1..584: note = hemagglutinin__InfluenzaB__AHL91937

SEQ ID NO: 27928 - protein, 584 aa, synthetic construct; identical to SEQ ID NO: 26426
  REGION 1..584: note = hemagglutinin__InfluenzaB__AHL91948

SEQ ID NO: 27929 - protein, 585 aa, synthetic construct
  REGION 1..585: note = hemagglutinin__InfluenzaB__AHL91959
MKAIIVLLMVVTSNADRICTGITSSNSPHVVKTATQGEVNVTGVIPLTTTPTKSHFANLKGTKTRGKLCPKCLNCTDLDVALGRPKCTGNIPSAEVSILHEVRPVTSGCFPIMHDRTKIRQLPNLLRGYEHIRLSTHNVINAEKAPGGPYKIGTSGSCPNVTNGNGFFATMAWAVPKNDNNKTATNSLTIEVPYICTEGEDQITIWGFHSDNETQMAKLYGDSKPQKFTSSANGVTTHYVSQIGGFPNQTEDGGLPQSGRIVVDYMVQKSGKTGTITYQRGILLPQKVWCASGRSKVIKGSLPLIGEADCLHEKYGGLNKSKPYYTGEHAKAIGNCPIWVKTPLKLANGTKYRPPAKLLKERGFFGAIAGFLEGGWEGMIAGWHGYTSHGAHGVAVAADLKSTQEAINKITKNLNSLSELEVKNLQRLSGAMDELHNEILELDEKVDDLRADTISSQIELAVLLSNEGIINSEDEHLLALERKLKKMLGPSAVEIGNGCFETKHKCNQTCLDRIAAGTFDAGEFSLPTFDSLNITAASFNDDGLDNHTILLYYSTAASSLAVTLMIAIFVVYMVSRDNVSCSICL

SEQ ID NO: 27930 - protein, 585 aa, synthetic construct; identical to SEQ ID NO: 26638
  REGION 1..585: note = hemagglutinin__InfluenzaB__AHL91970

SEQ ID NO: 27931 - protein, 584 aa, synthetic construct
  REGION 1..584: note = hemagglutinin__InfluenzaB__AHL91991
MKAIIVLLMVVTSNADRICTGITSSNSPHVVKTATQGEVNVTGVIPLTTTPTKSYFANLKGTRTRGKLCPDCLNCTDLDVALGRPMCVGTTPSAKASILHEVRPVTSGCFPIMHDRTKIRQLANLLRGYENIRLSTQNVIDAEKAPGGPYRLGTSGSCPNATNKSGFFATMAWAVPKDNNKNATNPLTVEVPYICTEGEDQITVWGFHSDNKTQMKNLYGDSNPQKFTSSANGVTTHYVSQIGGFPDQTEDGGLPQSGRIVVDYMMQKPGKTGTIVYQRGVLLPQKVWCASGRSKVIKGSLPLIGEADCLHEKYGGLNKSKPYYTGEHAKAIGNCPIWVKTPLKLANGTKYRPPAKLLKERGFFGAIAGFLEGGWEGMIAGWHGYTSHGAHGVAVAADLKSTQEAINKITKNLNSLSELEVKNLQRLSGAMDELHNEILELDEKVDDLRADTISSQIELAVLLSNEGIINSEDEHLLALERKLKKMLGPSAVDIGNGCFETKHKCNQTCLDRIAAGTFNAGEFSLPTFDSLNITAASLNDDGLDNHTILLYYSTAASSLAVTLMLAIFIVYMVSRDNVSCSICL

SEQ ID NO: 27932 - protein, 585 aa, synthetic construct; identical to SEQ ID NO: 26514
  REGION 1..585: note = hemagglutinin__InfluenzaB__AHL92002

SEQ ID NO: 27933 - protein, 585 aa, synthetic construct; identical to SEQ ID NO: 26514
  REGION 1..585: note = hemagglutinin__InfluenzaB__AHL92013

SEQ ID NO: 27934 - protein, 585 aa, synthetic construct; identical to SEQ ID NO: 26514
  REGION 1..585: note = hemagglutinin__InfluenzaB__AHL92024

SEQ ID NO: 27935 - protein, 585 aa, synthetic construct; identical to SEQ ID NO: 26514
  REGION 1..585: note = hemagglutinin__InfluenzaB__AHL92035

SEQ ID NO: 27936 - protein, 585 aa, synthetic construct; identical to SEQ ID NO: 26514
  REGION 1..585: note = hemagglutinin__InfluenzaB__AHL92046

SEQ ID NO: 27937 - protein, 585 aa, synthetic construct; identical to SEQ ID NO: 26514
  REGION 1..585: note = hemagglutinin__InfluenzaB__AHL92057

SEQ ID NO: 27938 - protein, 585 aa, synthetic construct
  REGION 1..585: note = hemagglutinin__InfluenzaB__AHL92068
MKAIIVLLMVVTSNADRICTGITSSNSPHVVKTATQGEVNVTGVIPLTTTPTKSHFANLKGTETRGKLCPKCLNCTDLDVALGRPKCTGNIPSARVSILHEVRPVTSGCFPIMHDRTKIRQLPNLLRGYEHIRLSTHNVINAENAPGGPYKIGTSGSCPNITNGNGFFATMAWAVPKNDNNKTATNSLTIEVPYICTEGEDQITVWGFHSDNETQMAKLYGDSKPQKFTSSANGVTTHYVSQVGGFPNQTEDGGLPQSGRIVVDYMVQKSGKTGTITYQRGILLPQKVWCASGRSKVIKGSLPLIGEADCLHEKYGGLNKSKPYYTGEHAKAIGNCPIWVKTPLKLANGTKYRPPAKLLKERGFFGAIAGFLEGGWEGMIAGWHGYTSHGAHGVAVAADLKSTQEAINKITKNLNSLSELEVKNLQRLSGAMDELHNEILELDEKVDDLRADTISSQIELAVLLSNEGIINSEDEHLLALERKLKKMLGPSAVEIGNGCFETKHKCNQTCLDRIAAGTFDAGEFSLPTFDSLNITAASLNDDGLDNHTILLYYSTAASSLAVTLMIAIFVVYMVSRDNVSCSICL

SEQ ID NO: 27939 - protein, 585 aa, synthetic construct
  REGION 1..585: note = hemagglutinin__InfluenzaB__AHL92079
MKAIIVLLMVVTSNADRICTGITSSNSPHVVKTATQGEVNVTGVIPLTTTPTKSHFANLKGTETRGKLCPKCLNCTDLDVALGRPKCTGNIPSARVSILHEVRPVTSGCFPIMHDRTKIRQLPNLLRGYEHIRLSTHNVINAENAPGGPYKIGTSGSCPNITNGNGFFATMAWAVPKNDNNKTATNSLTIEVPYICTEGEDQITVWGFHSDNETQMAKLYGDSKPQKFTSSANGVTTHYVSQIGGFPNQTEDGGLPQSGRIVVDYMVQKSGKTGTITYQRGILLPQKVWCASGRSKVIKGSLPLIGEADCLHEKYGGLNKSKPYYTGEHAKAIGNCPIWVKTPLKLANGTKYRPPAKLLKERGFFGAIAGFLEGGWEGMIAGWHGYTSHGAHGVAVAADLKSTQEAINKITKNLNSLSELEVKNLQRLSGAMDELHNEILELDEKVDDLRADTISSQIELAVLLSNEGIINSEDEHLLALERKLKKMLGPSAVEIGNGCFETKHKCNQTCLDRIAAGTFDAGEFSLPTFDSLNITAASLNDDGLDNHTILLYYSTAASSLAVTLMIAIFVVYMVSRDNVSCSICL

SEQ ID NO: 27940 - protein, 585 aa, synthetic construct; identical to SEQ ID NO: 27939
  REGION 1..585: note = hemagglutinin__InfluenzaB__AHL92090

SEQ ID NO: 27941 - protein, 585 aa, synthetic construct; identical to SEQ ID NO: 26514
  REGION 1..585: note = hemagglutinin__InfluenzaB__AHL92101

SEQ ID NO: 27942 - protein, 584 aa, synthetic construct; identical to SEQ ID NO: 26567
  REGION 1..584: note = hemagglutinin__InfluenzaB__AHL92112

SEQ ID NO: 27943 - protein, 585 aa, synthetic construct; identical to SEQ ID NO: 26514
  REGION 1..585: note = hemagglutinin__InfluenzaB__AHL92123

SEQ ID NO: 27944 - protein, 585 aa, synthetic construct; identical to SEQ ID NO: 27939
  REGION 1..585: note = hemagglutinin__InfluenzaB__AHL92134

SEQ ID NO: 27945 - protein, 585 aa, synthetic construct; identical to SEQ ID NO: 27939
  REGION 1..585: note = hemagglutinin__InfluenzaB__AHL92145

SEQ ID NO: 27946 - protein, 585 aa, synthetic construct; identical to SEQ ID NO: 26514
  REGION 1..585: note = hemagglutinin__InfluenzaB__AHL92156

SEQ ID NO: 27947 - protein, 585 aa, synthetic construct; identical to SEQ ID NO: 27939
  REGION 1..585: note = hemagglutinin__InfluenzaB__AHL92167

SEQ ID NO: 27948 - protein, 585 aa, synthetic construct; identical to SEQ ID NO: 26514
  REGION 1..585: note = hemagglutinin__InfluenzaB__AHL92178

SEQ ID NO: 27949 - protein, 585 aa, synthetic construct; identical to SEQ ID NO: 26514
  REGION 1..585: note = hemagglutinin__InfluenzaB__AHL92189

SEQ ID NO: 27950 - protein, 584 aa, synthetic construct; identical to SEQ ID NO: 26567
  REGION 1..584: note = hemagglutinin__InfluenzaB__AHL92200

SEQ ID NO: 27951 - protein, 585 aa, synthetic construct; identical to SEQ ID NO: 26514
  REGION 1..585: note = hemagglutinin__InfluenzaB__AHL92211

SEQ ID NO: 27952 - protein, 585 aa, synthetic construct; identical to SEQ ID NO: 26514
  REGION 1..585: note = hemagglutinin__InfluenzaB__AHL92222

SEQ ID NO: 27953 - protein, 584 aa, synthetic construct; identical to SEQ ID NO: 27829
  REGION 1..584: note = hemagglutinin__InfluenzaB__AHL92233

SEQ ID NO: 27954 - protein, 585 aa, synthetic construct; identical to SEQ ID NO: 27939
  REGION 1..585: note = hemagglutinin__InfluenzaB__AHL92244

SEQ ID NO: 27955 - protein, 585 aa, synthetic construct; identical to SEQ ID NO: 26514
  REGION 1..585: note = hemagglutinin__InfluenzaB__AHL92255

SEQ ID NO: 27956 - protein, 585 aa, synthetic construct; identical to SEQ ID NO: 26514
  REGION 1..585: note = hemagglutinin__InfluenzaB__AHL92266

SEQ ID NO: 27957 - protein, 585 aa, synthetic construct
  REGION 1..585: note = hemagglutinin__InfluenzaB__AHL92277
MKAIIVLLMVVTSNADRICTGITSSNSPHVVKTATQGEVNVTGVIPLTTTPTKSHFANLKGTETRGKLCPKCLNCTDLDVALGRPKCTGNIPSARVSILHEVRPVTSGCFPIMHDRTKIRQLPNLLRGYEHIRLSTHNVINAENAPGGPYKIGTSGSCPNVTNGNGFFATMAWAVPKNDNNKTATNSLTIEVPYICTEGEDQITVWGFHSDNETQMAKLYGDSKPQKFTSSANGVTTHYVSQIGGFPNQTEDGGLPQSGRIVVDYMVQKSGKTGTITYQRGILLPQKVWCASGRSKVIKGSLPLIGEADCLHEKYGGLNKSKPYYTGEHAKAIGNCPIWVKTPLKLANGTKYRPPAKLLKERGFFGAIAGFLEGGWEGMIAGWHGYTSHGAHGVAVAADLKSTQEAINKITKNLNSLSELEVKNLQRLSGAMDELHNEILELDEKVDDLRADTISSQIELAVLLSNEGIINSEDEHLLALERKLKKMLGPSAVEIGNGCFETKHKCNQTCLDRIATGTFDAGEFSLPTFDSLNITAASLNDDGLDNHTILLYYSTAASSLAVTLMIAIFVVYMVSRDNVSCSICL

SEQ ID NO: 27958 - protein, 585 aa, synthetic construct; identical to SEQ ID NO: 26514
  REGION 1..585: note = hemagglutinin__InfluenzaB__AHL92288

SEQ ID NO: 27959 - protein, 585 aa, synthetic construct; identical to SEQ ID NO: 26514
  REGION 1..585: note = hemagglutinin__InfluenzaB__AHL92299

SEQ ID NO: 27960 - protein, 584 aa, synthetic construct; identical to SEQ ID NO: 27632
  REGION 1..584: note = hemagglutinin__InfluenzaB__AHL92310

SEQ ID NO: 27961 - protein, 584 aa, synthetic construct; identical to SEQ ID NO: 26567
  REGION 1..584: note = hemagglutinin__InfluenzaB__AHL92321

SEQ ID NO: 27962 - protein, 584 aa, synthetic construct; identical to SEQ ID NO: 26567
  REGION 1..584: note = hemagglutinin__InfluenzaB__AHL92332

SEQ ID NO: 27963 - protein, 584 aa, synthetic construct
  REGION 1..584: note = hemagglutinin__InfluenzaB__AHL92354
MKAIIVLLMVVTSNADRICTGITSSNSPHVVKTATQGEVNVTGVIPLTTTPTKSYFANLKGTRTRGKLCPDCLNCTDLDVALGRPMCVGITPSAKASILHEVRPVTSGCFPIMHDRTKIRQLANLLRGYENIRLSTQNVVDAEKAPGGPYRLGTSGSCPNATSKSGFFATMAWAVPKDNNKNATNPLTVEVPYICTEGEDQITVWGFHSDNKTQMKNLYGDSNPQKFTSSANGVTTHYVSQIGGFPDQTEDGGLPQSGRIVVDYMMQKPGKTGTIVYQRGVLLPQKVWCASGRSKVIKGSLPLIGEADCLHEKYGGLNKSKPYYTGEHAKAIGNCPIWVKTPLKLANGTKYRPPAKLLKERGFFGAIAGFLEGGWEGMIAGWHGYTSHGAHGVAVAADLKSTQEAINKITKNLNSLSELEVKNLQRLSGAMDELHNEILELDEKVDDLRADTISSQIELAVLLSNEGIINSEDEHLLALERKLKKMLGPSAVDIGNGCFETKHKCNQTCLDRIAAGTFNAGEFSLPTFDSLNITAASLNDDGLDNHTILLYYSTAASSLAVTLMLAIFIVYMVSRDNVSCSICL

SEQ ID NO: 27964 - protein, 584 aa, synthetic construct; identical to SEQ ID NO: 27963
  REGION 1..584: note = hemagglutinin__InfluenzaB__AHL92365

SEQ ID NO: 27965 - protein, 584 aa, synthetic construct; identical to SEQ ID NO: 26820
  REGION 1..584: note = hemagglutinin__InfluenzaB__AHL92376

SEQ ID NO: 27966 - protein, 584 aa, synthetic construct; identical to SEQ ID NO: 26820
  REGION 1..584: note = hemagglutinin__InfluenzaB__AHL92387

SEQ ID NO: 27967 - protein, 584 aa, synthetic construct; identical to SEQ ID NO: 26820
  REGION 1..584: note = hemagglutinin__InfluenzaB__AHL92398

SEQ ID NO: 27968 - protein, 584 aa, synthetic construct; identical to SEQ ID NO: 26820
  REGION 1..584: note = hemagglutinin__InfluenzaB__AHL92409

SEQ ID NO: 27969 - protein, 584 aa, synthetic construct; identical to SEQ ID NO: 26820
  REGION 1..584: note = hemagglutinin__InfluenzaB__AHL92420

SEQ ID NO: 27970 - protein, 584 aa, synthetic construct; identical to SEQ ID NO: 26567
  REGION 1..584: note = hemagglutinin__InfluenzaB__AHL92431

SEQ ID NO: 27971 - protein, 584 aa, synthetic construct; identical to SEQ ID NO: 26820
  REGION 1..584: note = hemagglutinin__InfluenzaB__AHL92442

SEQ ID NO: 27972 - protein, 584 aa, synthetic construct; identical to SEQ ID NO: 26820
  REGION 1..584: note = hemagglutinin__InfluenzaB__AHL92453

SEQ ID NO: 27973 - protein, 584 aa, synthetic construct; identical to SEQ ID NO: 26820
  REGION 1..584: note = hemagglutinin__InfluenzaB__AHL92464

SEQ ID NO: 27974 - protein, 584 aa, synthetic construct
  REGION 1..584: note = hemagglutinin__InfluenzaB__AHL92475
MKAIIVLLMVVTSNADRICTGITSSNSPHVVKTATQGEVNVTGVIPLTTTPTKSYFANLKGTRTRGKLCPDCLNCTDLDVALGRPMCVGTTPSAKASILHEVRPVTSGCFPIMHDRTKIRQLPNLLRGYENIRLSTQNVIDAEKAPGGPYRLGTSGSCPNATSKIGFFATMAWAVPKDNYKNATNPLTVEVPYICTEGEDQITVWGFHSDNKTQMKNLYGDSNPQKFTSSANGVTTHYVSQIGDFPDQTEDGGLPQSGRIVVDYMMQKPGKTGTIVYQRGVLLPQKVWCASGRSKVIKGSLPLIGEADCLHEKYGGLNKSKPYYTGEHAKAIGNCPIWVKTPLKLANGTKYRPPAKLLKERGFFGAIAGFLEGGWEGMIAGWHGYTSHGAHGVAVAADLKSTQEAINKITKNLNSLSELEVKNLQRLSGAMDELHNEILELDEKVDDLRADTISSQIELAVLLSNEGIINSEDEHLLALERKLKKMLGPSAVDIGNGCFETKHKCNQACLDRIAAGTFNAGEFSLPTFDSLNITAASLNDDGLDNHTILLYYSTAASSLAVTLMLAIFIVYMVSRDNVSCSICL

SEQ ID NO: 27975 - protein, 584 aa, synthetic construct; identical to SEQ ID NO: 26567
  REGION 1..584: note = hemagglutinin__InfluenzaB__AHL92486

SEQ ID NO: 27976 - protein, 584 aa, synthetic construct; identical to SEQ ID NO: 26820
  REGION 1..584: note = hemagglutinin__InfluenzaB__AHL92497

SEQ ID NO: 27977 - protein, 584 aa, synthetic construct; identical to SEQ ID NO: 26820
  REGION 1..584: note = hemagglutinin__InfluenzaB__AHL92508

SEQ ID NO: 27978 - protein, 584 aa, synthetic construct; identical to SEQ ID NO: 26820
  REGION 1..584: note = hemagglutinin__InfluenzaB__AHL92519

SEQ ID NO: 27979 - protein, 584 aa, synthetic construct; identical to SEQ ID NO: 26820
  REGION 1..584: note = hemagglutinin__InfluenzaB__AHL92530

SEQ ID NO: 27980 - protein, 584 aa, synthetic construct; identical to SEQ ID NO: 26567
  REGION 1..584: note = hemagglutinin__InfluenzaB__AHL92541

SEQ ID NO: 27981 - protein, 583 aa, synthetic construct
  REGION 1..583: note = hemagglutinin__InfluenzaB__AHL92563
MKAIIVLLMVVTSNADRICTGITSSNSPHVVKTATQGEVNVTGVIPLTTTPKKSYFANLKGTRTRGKLCPDCLNCTDLDVALGRPMCVGTTPSAKASILHEVRPVTSGCFPIMHDRTKIRQLPNLLRGYENIRLSTQNVIDAEKAPGGPYRLGTSGSCPNATSKIGFFATMAWAVPKDNYKNATNPLTVEVPYICTEGEDQITVWGFHSDNKTQMKNLYGDSNPQKFTSSANGVTTHYVSQIGDFPDQTEDGGLPQSGRIVVDYMMQKPGKTGTIVYQRGVLLPQKVWCASGRSKVIKGSLPLIGEADCLHEKYGGLNKSKPYYTGEHAKAIGNCPIWVKTPLKLANGTKYRPPAKLLKERGFFGAIAGFLEGGWEGMIAGWHGYTSHGAHGVAVAADLKSTQEAINKITKNLNSLSELEVKNLQRLSGAMDELHNEILELDEKVDDLRADTISSQIELAVLLSNEGIINSEDEHLLALERKLKKMLGPSAVDIGNGCFETKHKCNQTCLDRIAAGTFNAGEFSLPTFDSLNITAASLNDGLDNHTILLYYSTAASSLAVTLMLAIFIVYMVSRDNVSCSICL

SEQ ID NO: 27982 - protein, 584 aa, synthetic construct; identical to SEQ ID NO: 26820
  REGION 1..584: note = hemagglutinin__InfluenzaB__AHL92574

SEQ ID NO: 27983 - protein, 584 aa, synthetic construct
  REGION 1..584: note = hemagglutinin__InfluenzaB__AHL92585
MKAIIVLLMVVTSNADRICTGITSSNSPHVVKTATQGEVNVTGVIPLTTTPTKSYFANLKGTRTRGKLCPDCLNCTDLDVALGRPMCVGATPSAKASILHEVRPVTSGCFPIMHDRTKIRQLPNLLRGYENIRLSTQNVIDAEKAPGGPYRLGTSGSCPNATSKSGFFATMAWAVPKDNNKNATNPLTVEVPYICTEGEDQITVWGFHSDNKTQMKNLYGDSNPQKFTSSANGVTTHYVSQIGSFPDQTEDGGLPQSGRIVVDYMMQKPGKTGTIVYQRGVLLPQKVWCASGRSKVIKGSLPLIGEADCLHEKYGGLNKSKPYYTGEHAKAIGNCPIWVKTPLKLANGTKYRPPAKLLKERGFFGAIAGFLEGGWEGMIAGWHGYTSHGAHGVAVAADLKSTQEAINKITKNLNSLSELEVKNLQRLSGAMDELHNEILELDEKVDDLRADTISSQIELAVLLSNEGIINSEDEHLLALERKLKKMLGPSAVEIGNGCFETKHKCNQTCLDRIAAGTFNAGEFSLPTFDSLNITAASLNDDGLDNHTILLYYSTAASSLAVTLMLAIFIVYMVSRDNVSCSICL

SEQ ID NO: 27984 - protein, 584 aa, synthetic construct; identical to SEQ ID NO: 26820
  REGION 1..584: note = hemagglutinin__InfluenzaB__AHL92596

SEQ ID NO: 27985 - protein, 584 aa, synthetic construct; identical to SEQ ID NO: 26567
  REGION 1..584: note = hemagglutinin__InfluenzaB__AHL92607

SEQ ID NO: 27986 - protein, 584 aa, synthetic construct
  REGION 1..584: note = hemagglutinin__InfluenzaB__AHL92629
MKAIIVLLMVVTSNADRICTGITSSNSPHVVKTATQGEVNVTGVIPLTTTPEKSYFANLKGTRTRGKLCPDCLNCTDLDVALGRPMCVGTTPSAKASILHEVRPVTSGCFPIMHDRTKIRQLPNLLRGYENIRLSTQNVIDAEKAPGGPYRLGTSGSCPNATSKIGFFATMAWAVPKDNYKNATNPLTVEVPYICTEGEDQITVWGFHSDNKTQMKNLYGDSNPQKFTSSANGVTTHYVSQIGDFPDQTEDGGLPQSGRIVVDYMMQKPGKTGTIVYQRGVLLPQKVWCASGRSKVIKGSLPLIGEADCLHEKYGGLNKSKPYYTGEHAKAIGNCPIWVKTPLKLANGTKYRPPAKLLKERGFFGAIAGFLEGGWEGMIAGWHGYTSHGAHGVAVAADLKSTQEAINKITKNLNSLSELEVKNLQRLSGAMDELHNEILELDEKVDDLRADTISSQIELAVLLSNEGIINSEDEHLLALERKLKKMLGPSAVDIGNGCFETKHKCNQTCLDRIAAGTFNAGEFSLPTFDSLNITAASLNDDGLDNHTILLYYSTAASSLAVTLMLAIFIVYMVSRDNVSCSICL

SEQ ID NO: 27987 - protein, 584 aa, synthetic construct; identical to SEQ ID NO: 26567
  REGION 1..584: note = hemagglutinin__InfluenzaB__AHL92640

SEQ ID NO: 27988 - protein, 584 aa, synthetic construct; identical to SEQ ID NO: 26567
  REGION 1..584: note = hemagglutinin__InfluenzaB__AHL92651

SEQ ID NO: 27989 - protein, 584 aa, synthetic construct
  REGION 1..584: note = hemagglutinin__InfluenzaB__AHL92684
MKAIIVLLMVVTSNADRICTGITSSNSPHVVKTATQGEVNVTGVIPLTTTPTKSYFANLKGTRTRGKLCPDCLNCTDLDVALGRPMCVGTTPSAKASILHEVRPVTSGCFPIMHDRTKIRQLPNLLRGYENIRLSTQNVIDAEKAPGGPYRLGTSGSCPNATSKSGFFATMAWAVPKDNNKNATNPLTVEVPYICTEGEDQITVWGFHSDNKTQMKNLYGDSNPQKFTSSANGVTTHYVSQIGSFPDQTEDGGLPQSGRIVVDYMMQKPGKTGTIVYQRGVLLPQKVWCASGRSKVIKGSLPLIGEADCLHEKYGGLNKSKPYYTGEHAKAIGNCPIWVKTPLKLANGTKYRPPAKLLKERGFFGAIAGFLEGGWEGMIAGWHGYTSHGAHGVAVAADLKSTQEAINKITKNLNSLSELEVKNLQRLSGAMDELHNEILELDEKVDDLRADTISSQIELAVLLSNEGIINSEDEHLLALERKLKKMLGPSAVEIGNGCFETKHKCNQTCLDRIAAGTFNAGEFSLPTFDSLNITAASLNDDGLDNHIILLYYSTAASSLAVTLMLAIFIVYMVSRDNVSCSICL

SEQ ID NO: 27990 - protein, 584 aa, synthetic construct; identical to SEQ ID NO: 26820
  REGION 1..584: note = hemagglutinin__InfluenzaB__AHL92695

SEQ ID NO: 27991 - protein, 584 aa, synthetic construct; identical to SEQ ID NO: 26820
  REGION 1..584: note = hemagglutinin__InfluenzaB__AHL92706

SEQ ID NO: 27992 - protein, 584 aa, synthetic construct
  REGION 1..584: note = hemagglutinin__InfluenzaB__AHL92728
MKAIIVLLMVVTSNADRICTGITSSNSPHVVKTATQGEVNVTGVIPLTTTPTKSYFANLKGTRTRGKLCPDCLNCTDLDVALGRPMCVGTTPSAKASILHEVRPVTSGCFPIMHDRTKIRQLPNLLRGYENIRLSTQNVIDAEKAPGGPYRLGTSGSCPNATSKIGFFATMAWAVPKDNYKNATNPLTVEVPYICTEGEDQITVWGFHSDNKTQMKNLYGDSNPQKFTSSANGVTTHYVSQIGDFPDQTEDGGLPQSGRIVVDYMMQKPGKTGTIVYQRGVLLPQKVWCASGRSKVIKGSLPLIGEADCLHEKYGGLNKSKPYYTGKHAKAIGNCPIWVKTPLKLANGTKYRPPAKLLKERGFFGAIAGFLEGGWEGMIAGWHGYTSHGAHGVAVAADLKSTQEAINKITKNLNSLSELEVKNLQRLSGAMDELHNEIIELDEKVDDLRADTISSQIELAVLLSNEGIINSEDEHLLALERKLKKMLGPSAVDIGNGCFETKHKCNQTCLDRIAAGTFNAGEFSLPTFDSLNITAASLNDDGLDNHTILLYYSTAASSLAVTLMLAIFIVYMVSRDNVSCSICL

SEQ ID NO: 27993 - protein, 584 aa, synthetic construct; identical to SEQ ID NO: 27992
  REGION 1..584: note = hemagglutinin__InfluenzaB__AHL92739

SEQ ID NO: 27994 - protein, 584 aa, synthetic construct; identical to SEQ ID NO: 27992
  REGION 1..584: note = hemagglutinin__InfluenzaB__AHL92750

SEQ ID NO: 27995 - protein, 584 aa, synthetic construct; identical to SEQ ID NO: 26820
  REGION 1..584: note = hemagglutinin__InfluenzaB__AHL92761

SEQ ID NO: 27996 - protein, 584 aa, synthetic construct
  REGION 1..584: note = hemagglutinin__InfluenzaB__AHL92772
MKAIIVLLMVVTSNADRICTGITSSNSPHVVKTATQGEVNVTGVIPLTTTPTKSYFANLKGTRTRGKLCPDCLNCTDLDVALGRPMCMGTTPSAKASILHEVRPVTSGCFPIMHDRTKIRQLPNLLRGYENIRLSTQNVIDAEKAPGGPYRLGTSGSCPNATSKIGFFATMAWAVPKDNYKNATNPLTVEVPYICTEGEDQITVWGFHSDNKTQMKNLYGDSNPQKFTSSANGVTTHYVSQIGDFPDQTEDGGLPQSGRIVVDYMMQKPGKTGTIVYQRGVLLPQKVWCASGRSKVIKGSLPLIGEADCLHEKYGGLNKSKPYYTGEHAKAIGNCPIWVKTPLKLANGTKYRPPAKLLKERGFFGAIAGFLEGGWEGMIAGWHGYTSHGAHGVAVAADLKSTQEAINKITKNLNSLSELEVKNLQRLSGAMDELHNEILELDEKVDDLRADTISSQIELAVLLSNEGIINSEDEHLLALERKLKKMLGPSAVDIGNGCFETKHKCNQTCLDRIAAGTFNAGEFSLPTFDSLNITAASLNDDGLDNHTILLYYSTAASSLAVTLMLAIFIVYMVSRDNVSCSICL

SEQ ID NO: 27997 - protein, 584 aa, synthetic construct; identical to SEQ ID NO: 26820
  REGION 1..584: note = hemagglutinin__InfluenzaB__AHL92794

SEQ ID NO: 27998 - protein, 584 aa, synthetic construct; identical to SEQ ID NO: 26820
  REGION 1..584: note = hemagglutinin__InfluenzaB__AHL92805

SEQ ID NO: 27999 - protein, 584 aa, synthetic construct; identical to SEQ ID NO: 26820
  REGION 1..584: note = hemagglutinin__InfluenzaB__AHL92816

SEQ ID NO: 28000 - protein, 584 aa, synthetic construct
  REGION 1..584: note = hemagglutinin__InfluenzaB__AHL92827
MKAIIVLLMVVTSNADRICTGITSSNSPHVVKTATQGEVNVTGVIPLTTTPTKSYFANLKGTRTRGKLCPDCLNCTDLDVALGRPMCVGTTPSAKASILHEVRPVTSGCFPIMHDRTKIRQLPNLLRGYENIRLSTQNVIDAEKAPGGPYRLGTSGSCPNATSKIGFFATMAWAVPKDNYKNATNPLTVEVPYICTEGEDQITVWGFHSDNKTQMKNLYGDSNPQKFTSSANGVTTHYVSQIGDFPDQTEDGGLPQSGRIVVDYMMQKPGKTGTIVYQRGVLLPQKVWCASGRSKVIKGSLPLIGEADCLHEKYGGLNKSKPYYTGEHAKAIGNCPIWVKTPLKLANGTKYRPPAKLLKERGFFGAIAGFLEGGWEGMIAGWHGYTSHGAHGVAVAADLKSTQEAINKITKNLNSLSELEVKNLQRLSGAMDELHNEILELDEKVDDLRADTISSQIELAVLLSNEGIINSEDEHLLALERKLKKMLGPSAVDIGNGCFETKHKCNQTCLDRIAAGTFNAGEFSLPTFDSLNITAASLNDDGLDNHTILLYYSTAASSLAVTLMLAIFVVYMVSRDNVSCSICL

SEQ ID NO: 28001 - protein, 584 aa, synthetic construct; identical to SEQ ID NO: 26820
  REGION 1..584: note = hemagglutinin__InfluenzaB__AHL92838

SEQ ID NO: 28002 - protein, 584 aa, synthetic construct; identical to SEQ ID NO: 26820
  REGION 1..584: note = hemagglutinin__InfluenzaB__AHL92849

SEQ ID NO: 28003 - protein, 584 aa, synthetic construct; identical to SEQ ID NO: 26820
  REGION 1..584: note = hemagglutinin__InfluenzaB__AHL92860

SEQ ID NO: 28004 - protein, 585 aa, synthetic construct; identical to SEQ ID NO: 26638
  REGION 1..585: note = hemagglutinin__InfluenzaB__AHL92871

SEQ ID NO: 28005 - protein, 584 aa, synthetic construct; identical to SEQ ID NO: 26426
  REGION 1..584: note = hemagglutinin__InfluenzaB__AHL92882

SEQ ID NO: 28006 - protein, 585 aa, synthetic construct
  REGION 1..585: note = hemagglutinin__InfluenzaB__AHL92893
MKAIIVLLMVVTSNADRICTGITSSNSPHVVKTATQGEVNVTGVIPLTTTPTKSHFANLKGTKTRGKLCPKCLNCTDLDVALGRPKCTGNIPSAEVSILHEVRPVTSGCFPIMHDRTKIRQLPNLLRGYEHIRLSTHNVINAEKAPGGPYKIGTSGSCPNVTNGNGFFATMAWAVPKNDNNKTATNSLTIEVPYICTEGEDQITIWGFHSDKETQMAKLYGDSKPQKFTSSANGVTTHYVSQIGGFPNQTEDGGLPQSGRIVVDYMVQKSGKTGTITYQRGILLPQKVWCASGRSKVIKGSLPLIGEADCLHEKYGGLNKSKPYYTGEHAKAIGNCPIWVKTPLKLANGTKYRPPAKLLKERGFFGAIAGFLEGGWEGMIAGWHGYTSHGAHGVAVAADLKSTQEAINKITKNLNSLSELEVKNLQRLSGAMDELHNEILELDEKVDDLRADTISSQIELAVLLSNEGIINSEDEHLLALERKLKKMLGPSAVEIGNGCFETKHKCNQTCLDRIAAGTFDAGEFSLPTFDSLNITAASLNDDGLDNHTILLYYSTAASSLAVTLMIAIFIVYMVSRDNVSCSICL

SEQ ID NO: 28007 - protein, 584 aa, synthetic construct; identical to SEQ ID NO: 27023
  REGION 1..584: note = hemagglutinin__InfluenzaB__AHL92904

SEQ ID NO: 28008 - protein, 585 aa, synthetic construct
  REGION 1..585: note = hemagglutinin__InfluenzaB__AHL92915
MKAIIVLLMVVTSNADRICTGITSSNSPHVVKTATQGEVNVTGVIPLTTTPTKSHFANLKGTKTRGKLCPKCLNCTDLDVALGRPKCTGNIPSAEVSILHEVRPVTSGCFPIMHDRTKIRQLPNLLRGYEHIRLSTHNVINAEKAPGGPYKIGTSGSCPNVTNGNGFFATMAWAVPKNDNNKTATNSLTIEVPYICTEGEDQITIWGFHSDNETQMAKLYGDSKPQKFTSSANGVTTHYVSQIGGFPNQTEDGGLPQSGRIVVDYMVQKSGKTGTITYQRGILLPQKVWCASGRSKVIKGSLPLIGEADCLHEKYGGLNKSKPYYTGEHAKAIGNCPIWVKTPLKLANGTKYRPPAKLLKERGFFGAIAGFLEGGWEGMIAGWHGYTSHGAHGVAVAADLKSTQEAINKITKNLNSLSELEVKNLQRLSGAMDELHNEILELDEKVDDLRADTISSQIELAVLLSNEGIINSEDEHLLALERKLKKMLGPSAVEIGNGCFETKHKCNQTCLDRIAAGTFDAGEFSLPTFDSLNITAASLNDDGLDNHTILLYYSTAASSLAVTLMIAIFIVYMVSRDNVSCSICL

SEQ ID NO: 28009 - protein, 585 aa, synthetic construct; identical to SEQ ID NO: 26638
  REGION 1..585: note = hemagglutinin__InfluenzaB__AHL92926

SEQ ID NO: 28010 - protein, 584 aa, synthetic construct; identical to SEQ ID NO: 27599
  REGION 1..584: note = hemagglutinin__InfluenzaB__AHL92937

SEQ ID NO: 28011 - protein, 585 aa, synthetic construct; identical to SEQ ID NO: 26514
  REGION 1..585: note = hemagglutinin__InfluenzaB__AHL92948

SEQ ID NO: 28012 - protein, 585 aa, synthetic construct; identical to SEQ ID NO: 26514
  REGION 1..585: note = hemagglutinin__InfluenzaB__AHL92959

SEQ ID NO: 28013 - protein, 585 aa, synthetic construct; identical to SEQ ID NO: 26514
  REGION 1..585: note = hemagglutinin__InfluenzaB__AHL92970

SEQ ID NO: 28014 - protein, 585 aa, synthetic construct; identical to SEQ ID NO: 26514
  REGION 1..585: note = hemagglutinin__InfluenzaB__AHL92981

SEQ ID NO: 28015 - protein, 585 aa, synthetic construct; identical to SEQ ID NO: 26514
  REGION 1..585: note = hemagglutinin__InfluenzaB__AHL92992

SEQ ID NO: 28016 - protein, 585 aa, synthetic construct; identical to SEQ ID NO: 27939
  REGION 1..585: note = hemagglutinin__InfluenzaB__AHL93004

SEQ ID NO: 28017 - protein, 585 aa, synthetic construct; identical to SEQ ID NO: 26514
  REGION 1..585: note = hemagglutinin__InfluenzaB__AHL93015

SEQ ID NO: 28018 - protein, 585 aa, synthetic construct; identical to SEQ ID NO: 26514
  REGION 1..585: note = hemagglutinin__InfluenzaB__AHL93026

SEQ ID NO: 28019 - protein, 584 aa, synthetic construct; identical to SEQ ID NO: 27963
  REGION 1..584: note = hemagglutinin__InfluenzaB__AHL93037

SEQ ID NO: 28020 - protein, 584 aa, synthetic construct; identical to SEQ ID NO: 27963
  REGION 1..584: note = hemagglutinin__InfluenzaB__AHL93048

SEQ ID NO: 28021 - protein, 584 aa, synthetic construct; identical to SEQ ID NO: 27992
  REGION 1..584: note = hemagglutinin__InfluenzaB__AHL93059

SEQ ID NO: 28022 - protein, 584 aa, synthetic construct; identical to SEQ ID NO: 26820
  REGION 1..584: note = hemagglutinin__InfluenzaB__AHL93070

SEQ ID NO: 28023 - protein, 584 aa, synthetic construct
  REGION 1..584: note = hemagglutinin__InfluenzaB__AHL93081
MKAIIVLLMVVTSNADRICTGITSSNSPHVVKTATQGEVNVTGVIPLTTTPTKSYFANLKGTRTRGKLCPDCLNCTDLDVALGRPMCVGTTPSAKASILHEVRPVTSGCFPIMHDRTKIRQLPNLLRGYENIRLSTQNVIDAEKAPGGPYRLGTSGSCPNATSKIGFFATMAWAVPKDNYKNATNPLTVEVPYICTEGEDQITVWGFHSDNKTQMKNLYGDSNPQKFTSSANGVTTHYVSQIGDFPDQTEDGGLPQSGRIVVDYMMQKPGKTGTIVYQRGVLLPQKVWCASGRSKVIKGSLPLIGEADCLHEKYGGLNKSKPYYTGEHAKAIGNCPIWVKTPLKLANGTKYRPPAKLLKERGFFGAIAGFLEGGWEGMIAGWHGYTSHGAHGVAVAADLKSTQEAINKITKNLNSLSELEVKNLQRLSGAMDELHNEILELDGKVDDLRADTISSQIELAVLLSNEGIINSEDEHLLALERKLKKMLGPSAVDIGNGCFETKHKCNQTCLDRIAAGTFNAGEFSLPTFDSLNITAASLNDDGLDNHTILLYYSTAASSLAVTLMLAIFIVYMVSRDNVSCSICL

SEQ ID NO: 28024 - protein, 584 aa, synthetic construct; identical to SEQ ID NO: 26820
  REGION 1..584: note = hemagglutinin__InfluenzaB__AHL93092

SEQ ID NO: 28025 - protein, 584 aa, synthetic construct; identical to SEQ ID NO: 26820
  REGION 1..584: note = hemagglutinin__InfluenzaB__AHL93103

SEQ ID NO: 28026 - protein, 584 aa, synthetic construct; identical to SEQ ID NO: 26820
  REGION 1..584: note = hemagglutinin__InfluenzaB__AHL93114

SEQ ID NO: 28027 - protein, 584 aa, synthetic construct; identical to SEQ ID NO: 26567
  REGION 1..584: note = hemagglutinin__InfluenzaB__AHL93125

SEQ ID NO: 28028 - protein, 584 aa, synthetic construct
  REGION 1..584: note = hemagglutinin__InfluenzaB__AHL93136
MKAIIVLLMVVTSNADRICTGITSSNSPHVVKTATQGEVNVTGVIPLTTTPTKSYFANLKGTRTRGKLCPDCLNCTDLDVALGRPMCVGTTPSAKASILHEVRPVTSGCFPIMHDRTKIRQLPNLLRGYENIRLSTQNVIDAEKAPGGPYRLGTSGSCPNATSKIGFFATMAWAVPKDNYKNATNPLTVEVPYICTEGEDQITVWGFHSDNKTQMKNLYGDSNPQKFTSSANGVTTHYVSQIGDFPDQTEDGGLPQSGRIVVDYMMQKPGKTGTIVYQRGVLLPQRVWCASGRSKVIKGSLPLIGEADCLHEKYGGLNKSKPYYTGEHAKAIGNCPIWVKTPLKLANGTKYRPPAKLLKERGFFGAIAGFLEGGWEGMIAGWHGYTSHGAHGVAVAADLKSTQEAINKITKNLNSLSELEVKNLQRLSGAMDELHNEILELDEKVDDLRADTISSQIELAVLLSNEGIINSEDEHLLALERKLKKMLGPSAVDIGNGCFETKHKCNQTCLDRIAAGTFNAGEFSLPTFDSLNITAASLNDDGLDNHTILLYYSTAASSLAVTLMLAIFIVYMVSRDNVSCSICL

SEQ ID NO: 28029 - protein, 584 aa, synthetic construct; identical to SEQ ID NO: 26567
  REGION 1..584: note = hemagglutinin__InfluenzaB__AHL93147

SEQ ID NO: 28030 - protein, 584 aa, synthetic construct; identical to SEQ ID NO: 26820
  REGION 1..584: note = hemagglutinin__InfluenzaB__AHL93158

SEQ ID NO: 28031 - protein, 584 aa, synthetic construct
  REGION 1..584: note = hemagglutinin__InfluenzaB__AHL93169
MKAIIVLLMVVTSNADRICTGITSSNSPHVVKTATQGEVNVTGVIPLTTTPTKSYFANLKGTRTRGKLCPDCFNCTDLDVALGRPMCVGTTPSAKASILHEVRPVTSGCFPIMHDRTKIRQLPNLLRGYENIRLSTQNVIDAEKAPGGPYRLGTSGSCPNATSKIGFFATMAWAVPKDNYKNATNPLTVEVPYICTEGEDQITVWGFHSDNKTQMKNLYGDSNPQKFTSSANGVTTHYVSQIGDFPDQTEDGGLPQSGRIVVDYMMQKPGKTGTIVYQRGVLLPQKVWCASGRSKVIKGSLPLIGEADCLHEKYGGLNKSKPYYTGEHAKAIGNCPIWVKTPLKLANGTKYRPPAKLLKERGFFGAIAGFLEGGWEGMIAGWHGYTSHGAHGVAVAADLKSTQEAINKITKNLNSLSELEVKNLQRLSGAMDELHNEILELDEKVDDLRADTISSQIELAVLLSNEGIINSEDEHLLALERKLKKMLGPSAVDIGNGCFETKHKCNQTCLDRIAAGTFNAGEFSLPTFDSLNITAASLNDDGLDNHTILLYYSTAASSLAVTLMLAIFIVYMVSRDNVSCSICL

SEQ ID NO: 28032 - protein, 584 aa, synthetic construct
  REGION 1..584: note = hemagglutinin__InfluenzaB__AHL93180
MKAIIVLLMVVTSNADRICTGITSSNSPHVVKTATQGEVNVTGVIPLTTTPTKSYFANLKGTRTRGKLCPDCLNCTDLDVALGRPMCVGTTPSAKASILHEVRPVTSGCFPIIHDRTKIRQLPNLLRGYENIRLSTQNVIDAEKAPGGPYRLGTSGSCPNATSKSGFFATMAWAVPKDNNKNATNPLTVEVPYICTEGEDQITVWGFHSDNKTQMKNLYGDSNPQKFTSSANGVTTHYVSQIGSFPDQTEDGGLPQSGRIVVDYMMQKPGKTGTIVYQRGVLLPQRVWCASGRSKVIKGSLPLIGEADCLHEKYGGLNKSKPYYTGEHAKAIGNCPIWVKTPLKLANGTKYRPPAKLLKERGFFGAIAGFLEGGWEGMIAGWHGYTSHGAHGVAVAADLKSTQEAINKITKNLNSLSELEVKNLQRLSGAMDELHNEILELDEKVDDLRADTISSQIELAVLLSNEGIINSEDEHLLALERKLKKMLGPSAVEIGNGCFETKHKCNQTCLDRIAAGTFNAGEFSLPTFDSLNITAASLNDDGLDNHTILLYYSTAASSLAVTLMLAIFIVYMVSRDNVSCSICL

SEQ ID NO: 28033 - protein, 584 aa, synthetic construct
  REGION 1..584: note = hemagglutinin__InfluenzaB__AHL93191
MKAIIVLLMVVTSNADRICTGITSSNSPHVVKTATQGEVNVTGVIPLTTTPTKSYFANLKGTRTRGKLCPDCLNCTDLDVALGRPMCVGTTPSAKASILHEVRPVTSGCFPIMHDRTKIRQLPNLLRGYENIRLSTQNVIDAEKAPGGPYRLGTSGSCPNDTSKIGFFATMAWAVPKDNYKNATNPLTVEVPYICTEGEDQITVWGFHSDNKTQMKNLYGDSNPQKFTSSANGVTTHYVSQIGDFPDQTEDGGLPQSGRIVVDYMMQKPGKTGTIVYQRGVLLPQKVWCASGRSKVIKGSLPLIGEADCLHEKYGGLNKSKPYYTGEHAKAIGNCPIWVKTPLKLANGTKYRPPAKLLKERGFFGAIAGFLEGGWEGMIAGWHGYTSHGAHGVAVAADLKSTQEAINKITKNLNSLSELEVKNLQRLSGAMDELHNEILELDEKVDDLRADTISSQIELAVLLSNEGIINSEDEHLLALERKLKKMLGPSAVDIGNGCFETKHKCNQTCLDRIAAGTFNAGEFSLPTFDSLNITAASLNDDGLDNHTILLYYSTAASSLAVTLMLAIFIVYMVSRDNVSCSICL

SEQ ID NO: 28034 - protein, 584 aa, synthetic construct
  REGION 1..584: note = hemagglutinin__InfluenzaB__AHL93202
MKAIIVLLMVVTSNADRICTGITSSNSPHVVKTATQGEVNVTGVIPLTTTPTKSYFANLKGTRTRGKLCPDCLNCTDLDVALGRPMCVGTTPSAKASILHEVRPVTSGCFPIMHDRTKIRQLPNLLRGYENIRLSTQNVIDAEKAPGGPYRLGTSGSCPNATSKIGFFATMAWAVPKDNYKNATNPLTVEVPYICTEGEDQITVWGFHSDNKTQMKNLYGDSNPQKFTSSANGVTTHYVSQIGDFPDQTEDGGLPQSGRIVVDYMMQKPGKTGTIVYQRGVLLPQKVWCASGRSKVIKGSLPLIGEADCLHEKYGGLNKSKPYYTGEHAKAIGNCPIWVKTPLKLANGTKYRPPAKLLKERGFFGAIAGFLEGGWEGMIAGWHGYTSHGAHGVAVAADLKSTQEAINKITKNLNSLSELEVKNLQRLSGAMDEFHNEILELDEKVDDLRADTISSQIELAVLLSNEGIINSEDEHLLALERKLKKMLGPSAVDIGNGCFETKHKCNQTCLDRIAAGTFNAGEFSLPTFDSLNITAASLNDDGLDNHTILLYYSTAASSLAVTLMLAIFIVYMVSRDNVSCSICL

SEQ ID NO: 28035 - protein, 585 aa, synthetic construct; identical to SEQ ID NO: 26989
  REGION 1..585: note = hemagglutinin__InfluenzaB__AHL93213

SEQ ID NO: 28036 - protein, 585 aa, synthetic construct; identical to SEQ ID NO: 26989
  REGION 1..585: note = hemagglutinin__InfluenzaB__AHL93224

SEQ ID NO: 28037 - protein, 585 aa, synthetic construct
  REGION 1..585: note = hemagglutinin__InfluenzaB__AHL93235
MKAIIVLLMVVTSNADRICTGITSSNSPHVVKTATQGEVNVTGVIPLTTTPTKSHFANLKGTETRGKLCPKCPNCTDLDVALGRPKCTGKIPSARVSILHEVRPVTSGCFPIMHDRTKIRQLPNLLRGYEHIRLSTHNVINAENAPGGPYKIGTSGSCPNVTNGNGFFATMAWAVPKNDKNKTATNPLTIEVPYICTEGEDQITVWGFHSDNETQMAKLYGDSKPQKFTSSANGVTTHYVSQIGGFPNQTEDGGLPQSGRIVVDYMVQKSGKTGTITYQRGILLPQKVWCASGRSKVIKGSLPLIGEADCLHEKYGGLNKSKPYYTGEHAKAIGNCPIWVKTPLKLANGTKYRPPAKLLKERGFFGAIAGFLEGGWEGMIAGWHGYTSHGAHGVAVAADLKSTQEAINKITKNLNSLSELEVKNLQRLSGAMDELHNEILELDEKVDDLRADTISSQIELAVLLSNEGIINSEDEHLLALERKLKKMLGPSAVEIGNGCFETKHKCNQTCLDRIAAGTFDAGEFSLPTFDSLNITAASLNNDGLDNHTILLYYSTAASSLAVTLMIAIFVVYMVSRDNVSCSICL

SEQ ID NO: 28038 - protein, 585 aa, synthetic construct
  REGION 1..585: note = hemagglutinin__InfluenzaB__AHL93246
MKAIIVLLMVVTSNADRICTGITSSNSPHVVKTATQGEVNVTGVIPLTTTPTKSHFANLKGTETRGKLCPKCLNCTDLDVALGRPKCTGNIPSARVSILHEVRPVTSGCFPIMHDRTKIRQLPNLLRGYEHIRLSTHNVINAENAPGGPYKIGTSGSCPNVTNGNGFFATMAWAVPKNDKNKTATNSLTIEVPYICTEGEDQITIWGFHSDNETQMAKLYGDSKPQKFTSSANGVTTHYVSQIGGFPNQTEDGGLPQSGRIVVDYMVQKSGKTGTITYQRGILLPQKVWCASGRSKVIKGSLPLIGEADCLHEKYGGLNKSKPYYTGEHAKAIGNCPIWVKTPLKLANGTKYRPPAKLLKERGFFGAIAGFLEGGWEGMIAGWHGYTSHGAHGVAVAADLKSTQEAINKITKNLNSLGELEVKNLQRLSGAMDELHNEILELDEKVDDLRADTISSQIELAVLLSNEGIINSEDEHLLALERKLKKMLGPSAVEIGNGCFETKHKCNQTCLDRIAAGTFDAGEFSLPTFDSLNITAASLNDDGLDNHTILLYYSTAASSLAVTLMIAIFVVYMVSRDNVSCSICL

SEQ ID NO: 28039 - protein, 585 aa, synthetic construct; identical to SEQ ID NO: 26989
  REGION 1..585: note = hemagglutinin__InfluenzaB__AHL93257

SEQ ID NO: 28040 - protein, 585 aa, synthetic construct; identical to SEQ ID NO: 27322
  REGION 1..585: note = hemagglutinin__InfluenzaB__AHL93268

SEQ ID NO: 28041 - protein, 585 aa, synthetic construct
  REGION 1..585: note = hemagglutinin__InfluenzaB__AHL93279
MKAIIVLLMVVTSNADRICTGITSSNSPHVVKTATQGEVNVTGVIPLTTTPTKSHFANLKGTETRGKLCPKCLNCTDLDVALGRPKCTGKIPSARVSILHEVRPVTSGCFPIMHDRTKIRQLPNLLRGYEHIRLSTHNVINAENAPGGPYKIGTSGSCPNITNGNGFFATMAWAVPKNDKNKTATNPLTIEVPYICTEGEDQITVWGFHSDNETQMAKLYGDSKPQKFTSSANGVTTHYVSQIGGFPNQTEDGGLPQSGRIVVDYMVQKSGKTGTITYQRGILLPQKVWCASGKSKVIKGSLPLIGEADCLHEKYGGLNKSKPYYTGEHAKAIGNCPIWVKTPLKLANGTKYRPPAKLLKERGFFGAIAGFLEGGWEGMIAGWHGYTSHGAHGVAVAADLKSTQEAINKITKNLNSLSELEVKNLQRLSGAMDELHNEILELDEKVDDLRADTISSQIELAVLLSNEGIINSEDEHLLALERKLKKMLGPSAVEIGNGCFETKHKCNQTCLDRIAAGTFDAGEFSLPTFDSLNITAASLNDDGLDNHTILLYYSTAASSLAVTLMIAIFVVYMVSRDNVSCSICL

SEQ ID NO: 28042 - protein, 585 aa, synthetic construct; identical to SEQ ID NO: 26989
  REGION 1..585: note = hemagglutinin__InfluenzaB__AHL93290

SEQ ID NO: 28043 - protein, 585 aa, synthetic construct
  REGION 1..585: note = hemagglutinin__InfluenzaB__AHL93301
MKAIIVLLMVVTSNADRICTGITSSNSPHVVKTATQGEVNVTGVIPLTTTPTKSHFANLKGTETRGKLCPKCLNCTDLDVALGRPKCTGKIPSARVSILHEVRPVTSGCFPIMHDRTKIRQLPNLLRGYEHIRLSTHNVINAENAPGGPYKIGTSGSCPNITNGNGFFATMAWAVPKNDKNKTATNPLTIEVPYICTEGEDQITVWGFHSDNETQMAKLYGDSKPQKFTSSANGVTTHYVSQIGGFPNQTEDGGLPQSGRIVVDYMVQKSGKTGTITYQRGILLPQKVWCASGRSKVIKGSLPLIGEADCLHEKYGGLNKSKPYYTGEHAKAIGNCPIWVKTPLKLANGTKYRPPAKLLKERGFFGAIAGFLEGGWEGMIAGWHGYTSHGAHGVAVAADLKSTQEAINKITKNLNSLSELEVKNLQRLSGAMDELHNEILELDEKVDDLRADTISSQIELAVLLSNEGIINSEDEHLLALERKLKKMLGPSAVEIGNGCFETKHKCNQTCLDRIAAGTFNAGEFSLPTFDSLNITAASLNDDGLDNHTILLYYSTAASSLAVTLMIAIFVVYMVSRDNVSCSICL

SEQ ID NO: 28044 - protein, 585 aa, synthetic construct
  REGION 1..585: note = hemagglutinin__InfluenzaB__AHL93312
MKAIIVLLMVVTSNADRICTGITSSNSPHVVKTATQGEVNVTGVIPLTTTPTKSHFANLKGTETRGKLCPKCLNCTDLDVALGRPKCTGKIPSARVSILHEVRPVTSGCFPIMHDRTKIRQLPNLLRGYEHIRLSTHNVINAENAPGGPYKIGTSGSCPNITNGNGFYATMAWAVPKNDKNKTATNPLTIEVPYICTEGEDQITVWGFHSDNETQMAKLYGDSKPQKFTSSANGVTTHYVSQIGGFPNQTEDGGLPQSGRIVVDYMVQKSGKTGTITYQRGILLPQKVWCASGRSKVIKGSLPLIGEADCLHEKYGGLNKSKPYYTGEHAKAIGNCPIWVKTPLKLANGTKYRPPAKLLKERGFFGAIAGFLEGGWEGMIAGWHGYTSHGAHGVAVAADLKSTQEAINKITKNLNSLSELEVKNLQRLSGAMDELHNEILELDEKVDDLRADTISSQIELAVLLSNEGIINSEDEHLLALERKLKKMLGPSAVEIGNGCFETKHKCNQTCLDRIAAGTFDAGEFSLPTFDSLNITAASLNDDGLDNHTILLYYSTAASSLAVTLMIAIFVVYMVSRDNVSCSICL

SEQ ID NO: 28045 - protein, 585 aa, synthetic construct
  REGION 1..585: note = hemagglutinin__InfluenzaB__AHL93323
MKAIIVLLMVVTSNADRICTGITSSNSPHVVKTATQGEVNVTGVIPLTTTPTKSHFANLKGTETRGKLCPKCLNCTDLDVALGRPKCTGKIPSARVSILHEVRPVTSGCFPIMHDRTKIRQLPNLLRGYEHIRLSTHNVINAENAPGGPYKIGTSGSCPNITNGNGFFATMAWAVPKNDKNKTATNPLTIEVPYICTEGEDQITVWGFHSDNETQMAKLYGDSKPQKFTSSANGVTTHYVSQIGGFPNQTEDGGLPQSGRIVVDYMVQKSGKTGTITYQRGILLPQKVWCTSGRSKVIKGSLPLIGEADCLHEKYGGLNKSKPYYTGEHAKAIGNCPIWVKTPLKLANGTKYRPPAKLLKERGFFGAIAGFLEGGWEGMIAGWHGYTSHGAHGVAVAADLKSTQEAINKITKNLNSLSELEVKNLQRLSGAMDELHNEILELDEKVDDLRADTISSQIELAVLLSNEGIINSEDEHLLALERKLKKMLGPSAVEIGNGCFETKHKCNQTCLDRIAAGTFDAGEFSLPTFDSLNITAASLNDDGLDNHTILLYYSTAASSLAVTLMIAIFVVYMVSRDNVSCSICL

SEQ ID NO: 28046 - protein, 585 aa, synthetic construct
  REGION 1..585: note = hemagglutinin__InfluenzaB__AHL93334
MKAIIVLLMVVTSNADRICTGITSSNSPHVVKTATQGEVNVTGVIPLTTTPTKSHFANLKGTETRGKLCPKCPNCTDLDVALGRPKCTGKIPSARVSILHEVRPVTSGCFPIMHDRTKIRQLPNLLRGYEHIRLSTHNVINAENAPGGPYKIGTSGSCPNITNGNGFFATMAWAVPKNDKNKTATNPLTIEVPYICTEGEDQITVWGFHSDNETQMAKLYGDSKPQKFTSSANGVTTHYVSQIGGFPNQTEDGGLPQSGRIVVDYMVQKSGKTGTITYQRGILLPQKVWCTSGRSKVIKGSLPLIGEADCLHEKYGGLNKSKPYYTGEHAKAIGNCPIWVKTPLKLANGTKYRPPAKLLKERGFFGAIAGFLEGGWEGMIAGWHGYTSHGAHGVAVAADLKSTQEAINKITKNLNSLSELEVKNLQRLSGAMDELHNEILELDEKVDDLRADTISSQIELAVLLSNEGIINSEDEHLLALERKLKKMLGPSAVEIGNGCFETKHKCNQTCLDRIAAGTFDAGEFSLPTFDSLNITAASLNDDGLDNHTILLYYSTAASSLAVTLMIAIFVVYMVSRDNVSCSICL

SEQ ID NO: 28047 - protein, 585 aa, synthetic construct; identical to SEQ ID NO: 26989
  REGION 1..585: note = hemagglutinin__InfluenzaB__AHL93345

SEQ ID NO: 28048 - protein, 585 aa, synthetic construct; identical to SEQ ID NO: 26989
  REGION 1..585: note = hemagglutinin__InfluenzaB__AHL93356

SEQ ID NO: 28049 - protein, 585 aa, synthetic construct
  REGION 1..585: note = hemagglutinin__InfluenzaB__AHL93367
MKAIIVLLMVVTSNADRICTGITSSNSPHVVKTATQGEVNVTGVIPLTTTPTKSHFANLKGTETRGKLCPKCLNCTDLDVALGRPKCTGKIPSARVSILHEVRPVTSGCFPIMHDRTKIRQLPNLLRGYEYIRLSTHNVINAENAPGGPYKIGTSGSCPNITNGNGFFATMAWAVPKNDKNKTATNPLTIEVPYICTEGEDQITVWGFHSDNETQMAKLYGDSKPQKFTSSANGVTTHYVSQIGGFPNQTEDGGLPQSGRIVVDYMVQKSGKTGTITYQRGILLPQKVWCASGRSKVIKGSLPLIGEADCLHEKYGGLNKSKPYYTGEHAKAIGNCPIWVKTPLKLANGTKYRPPAKLLKERGFFGAIAGFLEGGWEGMIAGWHGYTSHGAHGVAVAADLKSTQEAINKITKNLNSLSELEVKNLQRLSGAMDELHNEILELDEKVDDLRADTISSQIELAVLLSNEGIINSEDEHLLALERKLKKMLGPSAVEIGNGCFETKHKCNQTCLDRIAAGTFDAGEFSLPTFDSLNITAASLNDDGLDNHTILLYYSTAASSLAVTLMIAIFVVYMVSRDNVSCSICL

SEQ ID NO: 28050 - protein, 585 aa, synthetic construct; identical to SEQ ID NO: 26989
  REGION 1..585: note = hemagglutinin__InfluenzaB__AHL93378

SEQ ID NO: 28051 - protein, 585 aa, synthetic construct
  REGION 1..585: note = hemagglutinin__InfluenzaB__AHL93389
MKAIIVLLMVVTSNADRICTGITSSNSPHVVKTATQGEVNVTGVIPLTTTPTKSYFANLKGTETRGKLCPKCLNCTDLDVALGRPKCTGKIPSARVSILHEVRPVTSGCFPIMHDRTKIRQLPNLLRGYEHIRLSTHNVINAENAPGGPYKIGTSGSCPNITNGNGFFATMAWAVPKNDKNKTATNPLTIEVPYICTEGEDQITVWGFHSDNETQMAKLYGDSKPQKFTSSANGVTTHYVSQIGGFPNQTEDGGLPQSGRIVVDYMVQKSGKTGTITYQRGILLPQKVWCASGRSKVIKGSLPLIGEADCLHEKYGGLNKSKPYYTGEHAKAIGNCPIWVKTPLKLANGTKYRPPAKLLKERGFFGAIAGFLEGGWEGMIAGWHGYTSHGAHGVAVAADLKSTQEAINKITKNLNSLSELEVKNLQRLSGAMDELHNEILELDEKVDDLRADTISSQIELAVLLSNEGIINSEDEHLLALERKLKKMLGPSAVEIGNGCFETKHKCNQTCLDRIAAGTFDAGEFSLPTFDSLNITAASLNDDGLDNHTILLYYSTAASSLAVTLMIAIFVVYMVSRDNVSCSICL

SEQ ID NO: 28052 - protein, 585 aa, synthetic construct; identical to SEQ ID NO: 26989
  REGION 1..585: note = hemagglutinin__InfluenzaB__AHL93400

SEQ ID NO: 28053 - protein, 585 aa, synthetic construct; identical to SEQ ID NO: 27322
  REGION 1..585: note = hemagglutinin__InfluenzaB__AHL93411

SEQ ID NO: 28054 - protein, 585 aa, synthetic construct; identical to SEQ ID NO: 27322
  REGION 1..585: note = hemagglutinin__InfluenzaB__AHL93422

SEQ ID NO: 28055 - protein, 585 aa, synthetic construct; identical to SEQ ID NO: 27322
  REGION 1..585: note = hemagglutinin__InfluenzaB__AHL93433

SEQ ID NO: 28056 - protein, 585 aa, synthetic construct; identical to SEQ ID NO: 26989
  REGION 1..585: note = hemagglutinin__InfluenzaB__AHL93444

SEQ ID NO: 28057 - protein, 585 aa, synthetic construct
  REGION 1..585: note = hemagglutinin__InfluenzaB__AHL93455
MKAIIVLLMVVTSNADRICTGITSSNSPHVVKTATQGEVNVTGVIPLTTTPTKSHFANLKGTETRGKLCPKCLNCTDLDVALGRPKCTGKIPSARVSILHEVRPVTSGCFPIMHDRTKIRQLPNLLRGYEHIRLSTHNVINAENAPGGPYKIGTSGSCPNITNGNGFFATMAWAVPKNDKNKTATNPLTIEVPYICTEGEDQITVWGFHSDNETQMAKLYGDSKPQKFTSSANGVTTHYVSQIGGFPNQTEDGGLPQSGRIVVDYMVQKSGKTGTITYQRGILLPQKVWCASGRSKVIKGSLPLIGEADCLHEKYGGLNKSKPYYTGEHAKAIGNCPIWVKTPLKLANGTKYRPPAKLLKERGFFGAIAGFLEGGWEGMIAGWHGYTSHGAHGVAVAADLKSTQEAINKITKNLNSLSELEVKNLQRLSGAMNELHNEILELDEKVDDLRADTISSQIELAVLLSNEGIINSEDEHLLALERKLKKMLGPSAVEIGNGCFETKHKCNQTCLDRIAAGTFDAGEFSLPTFDSLNITAASLNDDGLDNHTILLYYSTAASSLAVTLMIAIFVVYMVSRDNVSCSICL

SEQ ID NO: 28058 - protein, 585 aa, synthetic construct; identical to SEQ ID NO: 26989
  REGION 1..585: note = hemagglutinin__InfluenzaB__AHL93466

SEQ ID NO: 28059 - protein, 585 aa, synthetic construct; identical to SEQ ID NO: 26608
  REGION 1..585: note = hemagglutinin__InfluenzaB__AHL93477

SEQ ID NO: 28060 - protein, 585 aa, synthetic construct; identical to SEQ ID NO: 26683
  REGION 1..585: note = hemagglutinin__InfluenzaB__AHL93488

SEQ ID NO: 28061 - protein, 584 aa, synthetic construct
  REGION 1..584: note = hemagglutinin__InfluenzaB__AHL93499
MKAIIVLLMVVTSNADRICTGITSSNSPHVVKTATQGEVNVTGVIPLTTTPTKSYFANLKGTRTRGKLCPDCLNCTDLDVALGRPMCVGTTPSAKASILHEIRPVTSGCFPIMHDRTKIRQLPNLLRGYENIRLSTQNVIDAEKAPGGPYRLGTSGSCPNATSKIGFFATMAWAVPKDNYKNATNPLTVEVPYICTEGEDQITVWGFHSDNKTQMKNLYGDSNPQKFTSSANGVTAHYVSQIGDFPDQTEDGGLPQSGRIVVDYMMQKPGKTGTIVYQRGVLLPQKVWCASGRSKVIKGSLPLIGEADCLHEKYGGLNKSKPYYTGEHAKAIGNCPIWVKTPLKLANGTKYRPPAKLLKERGFFGAIAGFLEGGWEGMIAGWHGYTSHGAHGVAVAADLKSTQEAINKITKNLNSLSELEVKNLQRLSGAMDELHNEILELDEKVDDLRADTISSQIELAVLLSNEGIINSEDEHLLALERKLKKMLGPSAVDIGNGCFETKHKCNQTCLDRIAAGTFNAGEFSLPTFDSLNITAASLNDDGLDNHTILLYYSTAASSLAVTLMLAIFIVYMVSRDNVSCSICL

SEQ ID NO: 28062 - protein, 585 aa, synthetic construct; identical to SEQ ID NO: 26608
  REGION 1..585: note = hemagglutinin__InfluenzaB__AHL93510

SEQ ID NO: 28063 - protein, 584 aa, synthetic construct
  REGION 1..584: note = hemagglutinin__InfluenzaB__AHL93521
MKAIIALLMVVTSNADRICTGITSSNSPHVVKTATQGEVNVTGVIPLTTTPTKSYFANLKGTRTRGKLCPDCLNCTDLDVALGRPMCVGTTPSAKASILHEVRPVTSGCFPIMHDRTKIRQLPNLLRGYENIRLSTQNVIDAEKAPGGPYRLGTSGSCPNATSKIGFFATMAWAVPKDNYKNATNPLTVEVPYICTEGEDQITVWGFHSDNKTQMKNLYGDSNPQRFTSSANGVTTHYVSQIGDFPDQTEDGGLPQSGRIVVDYMVQKPGKTGTIVYQRGVLLPQKVWCASGRSKVIKGSLPLIGEADCLHEKYGGLNKSKPYYTGEHAKAIGNCPIWVKTPLKLANGTKYRPPAKLLKERGFFGAIAGFLEGGWEGMIAGWHGYTSHGAHGVAVAADLKSTQEAINKITKNLNSLSELEVKNLQRLSGAMDELHNEILELDEKVDDLRADTISSQIELAVLLSNEGIINSEDEHLLALERKLKKMLGPSAVDIGNGCFETKHKCNQTCLDRIAAGTFNAGEFSLPTFDSLNITAASLNDDGLDNHTILLYYSTAASSLAVTLMLAIFIVYMVSRDNVSCSICL

SEQ ID NO: 28064 - protein, 585 aa, synthetic construct; identical to SEQ ID NO: 26683
  REGION 1..585: note = hemagglutinin__InfluenzaB__AHL93532

SEQ ID NO: 28065 - protein, 585 aa, synthetic construct; identical to SEQ ID NO: 26645
  REGION 1..585: note = hemagglutinin__InfluenzaB__AHL93543

SEQ ID NO: 28066 - protein, 585 aa, synthetic construct; identical to SEQ ID NO: 26645
  REGION 1..585: note = hemagglutinin__InfluenzaB__AHL93554

SEQ ID NO: 28067 - protein, 585 aa, synthetic construct; identical to SEQ ID NO: 26645
  REGION 1..585: note = hemagglutinin__InfluenzaB__AHL93565

SEQ ID NO: 28068 - protein, 585 aa, synthetic construct; identical to SEQ ID NO: 26683
  REGION 1..585: note = hemagglutinin__InfluenzaB__AHL93576

SEQ ID NO: 28069 - protein, 585 aa, synthetic construct; identical to SEQ ID NO: 26683
  REGION 1..585: note = hemagglutinin__InfluenzaB__AHL93587

SEQ ID NO: 28070 - protein, 585 aa, synthetic construct
  REGION 1..585: note = hemagglutinin__InfluenzaB__AHL93609
MKAIIVLLMVVTSNADRICTGITSSNSPHVVKTATQGEVNVTGVIPLTTTPTKSHFANLKGTETRGKLCPKCPNCTDLDVALGRPKCTGKIPSARVSILHEVRPVTSGCFPIMHDRTKIRQLPNLLRGYEHIRLSTHNVINAENAPGGPYKIGTSGSCPNVTNGNGFFATMAWAVPKNDKNKTATNPLTIEVPYICTEGEDQITVWGFHSDNETQMAKLYGDSKPQKFTSSANGVTTHYVSQIGGFPNQTEDGGLPQSGRIVVDYMVQKSGKTGTITYQRGILLPQKVWCASGRSKVIKGSLPLIGEADCLHEKYGGLNKSKPYYTGEHAKAIGNCPIWVKTPLKLANGTKYRPPAKLLTERGFFGAIAGFLEGGWEGMIAGWHGYTSHGAHGVAVAADLKSTQEAINKITKNLNSLSELEVKNLQRLSGAMDELHNEILELDEKVDDLRADTISSQIELAVLLSNEGIINSEDEHLLALERKLKKMLGPSAVEIGNGCFETKHKCNQTCLDRIAAGTFDAGEFSLPTFDSLNITAASLNDDGLDNHTILLYYSTAASSLAVTLMIAIFVVYMVSRDNVSCSICL

SEQ ID NO: 28071 - protein, 585 aa, synthetic construct; identical to SEQ ID NO: 26683
  REGION 1..585: note = hemagglutinin__InfluenzaB__AHL93620

SEQ ID NO: 28072 - protein, 585 aa, synthetic construct; identical to SEQ ID NO: 28070
  REGION 1..585: note = hemagglutinin__InfluenzaB__AHL93631

SEQ ID NO: 28073 - protein, 585 aa, synthetic construct; identical to SEQ ID NO: 28070
  REGION 1..585: note = hemagglutinin__InfluenzaB__AHL93642

SEQ ID NO: 28074 - protein, 584 aa, synthetic construct
  REGION 1..584: note = hemagglutinin__InfluenzaB__AHL93653
MKAIIVLLMVVTSNADRICTGITSSNSPHVVKTATQGEVNVTGVIPLTTTPTKSYFANLKGTRTRGKLCPDCLNCTDLDVALGRPMCVGTTPSAKASILHEVRPVTSGCFPIMHDRTKIRQLPNLLRGYENIRLSTQNVIDAEKAPGGPYRLGTSGSCPNATSKIGFFATMAWAVPKDNYKNATNPLTVEVPYICTEGEDQITVWGFHSDNKTQMKNLYGDSNPQKFTSSANGVTTHYVSQIGDFPDQTEDGGLPQSGRIVVDYMVQKPGKTGTIVYQRGVLLPQKVWCASGRSKVIKGSLPLIGEADCLHEKYGGLNKSKPYYTGEHAKAIGDCPIWVKTPLKLANGTKYRPPAKLLKERGFFGAIAGFLEGGWEGMIAGWHGYTSHGAHGVAVAADLKSTQEAINKITKNLNSLSELEVKNLQRLSGAMDELHNEILELDEKVDDLRADTISSQIELAVLLSNEGIINSEDEHLLALERKLKKMLGPSAVDIGNGCFETKHKCNQTCLDRIAAGTFNAGEFSLPTFDSLNITAASLNDDGLDNHTILLYYSTAASSLAVTLMLAIFIVYMVSRDNVSCSICL

SEQ ID NO: 28075 - protein, 585 aa, synthetic construct; identical to SEQ ID NO: 26683
  REGION 1..585: note = hemagglutinin__InfluenzaB__AHL93664

SEQ ID NO: 28076 - protein, 585 aa, synthetic construct; identical to SEQ ID NO: 26608
  REGION 1..585: note = hemagglutinin__InfluenzaB__AHL93675

SEQ ID NO: 28077 - protein, 585 aa, synthetic construct; identical to SEQ ID NO: 28070
  REGION 1..585: note = hemagglutinin__InfluenzaB__AHL93686

SEQ ID NO: 28078 - protein, 585 aa, synthetic construct; identical to SEQ ID NO: 28070
  REGION 1..585: note = hemagglutinin__InfluenzaB__AHL93697

SEQ ID NO: 28079 - protein, 585 aa, synthetic construct
  REGION 1..585: note = hemagglutinin__InfluenzaB__AHL93708
MKAIIVLLMVVTSNADRICTGITSSNSPHVVKTATQGEVNVTGVIPLTTTPTKSHFANLKGTETRGKLCPKCPNCTDLDVALGRPKCTGKIPSARVSILHEVRPVTSGCFPIMHDRTKIRQLPNLLRGYEHIRLSTHNVINAENAPGGPYKIGTSGSCPNVTNGNGFFATMAWAVPKNDKNKTATNPLTIEVPYICTEGEDQITVWGFHSDNETQMAKLYGDSKPQKFTSSANGVTTHYVSQIGGFPNQTEDGGLPQSGRIVVDYMVQKSGKTGTITYQRGILLPQKVWCASGRSKVIKGSLPLIGEADCLHEKYGGLNKSKPYYTGKHAKAIGNCPIWVKTPLKLANGTKYRPPAKLLTERGFFGAIAGFLEGGWEGMIAGWHGYTSHGAHGVAVAADLKSTQEAINKITKNLNSLSELEVKNLQRLSGAMDELHNEILELDEKVDDLRADTISSQIELAVLLSNEGIINSEDEHLLALERKLKKMLGPSAVEIGNGCFETKHKCNQTCLDRIAAGTFDAGEFSLPTFDSLNITAASLNDDGLDNHTILLYYSTAASSLAVTLMIAIFVVYMVSRDNVSCSICL

SEQ ID NO: 28080 - protein, 585 aa, synthetic construct
  REGION 1..585: note = hemagglutinin__InfluenzaB__AHL93719
MKAIIVLLMVVTSNADRICTGITSSNSPHIVKTATQGEVNVTGVIPLTTTPTKSHFANLKGTETRGKLCPKCLNCTDLDVALGRPKCTGKIPSARVSILHEVIPVTSGCFPIMHDRTKIRQLPNLLRGYEHIRLSTHNVINAENAPGGPYKIGTSGSCPNITNGNGFFATMAWAVPKNDKNKTATNPLTIEVPYICTEGEDQITVWGFHSDNETQMAKLYGDSKPQKFTSSANGVTTHYVSQIGGFPNQTEDGGLPQSGRIVVDYMVQKSGKTGTITYQRGILLPQKVWCASGRSKVIKGSLPLIGEADCLHEKYGGLNKSKPYYTGEHAKAIGNCPIWVKTPLKLANGTKYRPPAKLLKERGFFGAIAGFLEGGWEGMIAGWHGYTSHGAHGVAVAADLKSTQEAINKITKNLNSLSELEVKNLQRLSGAMDELHNEILELDEKVDDLRADTISSQIELAVLLSNEGIINSEDEHLLALERKLKKMLGPSAVEIGNGCFETKHKCNQTCLDRIAAGTFDAGEFSLPTFDSLNITAASLNDDGLDNHTILLYYSTAASSLAVTLMIAIFVVYMVSRDNVSCSICL

SEQ ID NO: 28081 - protein, 585 aa, synthetic construct; identical to SEQ ID NO: 26683
  REGION 1..585: note = hemagglutinin__InfluenzaB__AHL93730

SEQ ID NO: 28082 - protein, 585 aa, synthetic construct; identical to SEQ ID NO: 26683
  REGION 1..585: note = hemagglutinin__InfluenzaB__AHL93741

SEQ ID NO: 28083 - protein, 585 aa, synthetic construct; identical to SEQ ID NO: 26645
  REGION 1..585: note = hemagglutinin__InfluenzaB__AHL93752

SEQ ID NO: 28084 - protein, 585 aa, synthetic construct; identical to SEQ ID NO: 28070
  REGION 1..585: note = hemagglutinin__InfluenzaB__AHL93763

SEQ ID NO: 28085 - protein, 585 aa, synthetic construct; identical to SEQ ID NO: 26608
  REGION 1..585: note = hemagglutinin__InfluenzaB__AHL93774

SEQ ID NO: 28086 - protein, 585 aa, synthetic construct; identical to SEQ ID NO: 28070
  REGION 1..585: note = hemagglutinin__InfluenzaB__AHL93785

SEQ ID NO: 28087 - protein, 585 aa, synthetic construct; identical to SEQ ID NO: 26683
  REGION 1..585: note = hemagglutinin__InfluenzaB__AHL93796

SEQ ID NO: 28088 - protein, 585 aa, synthetic construct; identical to SEQ ID NO: 26608
  REGION 1..585: note = hemagglutinin__InfluenzaB__AHL93818

SEQ ID NO: 28089 - protein, 585 aa, synthetic construct
  REGION 1..585: note = hemagglutinin__InfluenzaB__AHL93829
MKAIIVLLMVVTSNADRICTGITSSNSPHIVKTATQGEVNVTGVIPLTTTPTKSHFANLKGTETRGKLCPKCLNCTDLDVALGRPKCTGKIPSARVSILHEVRPVTSGCFPIMHDRTKIRQLPNLLRGYEHIRLSTHNVINTENAPGGPYKIGTSGSCPNITNGNGFFATMAWAVPKNDKNKTATNPLTIEVPYICTEGEDQITVWGFHSDNETQMAKLYGDSKPQKFTSSANGVTTHYVSQIGGFPNQTEDGGLPQSGRIVVDYMVQKSGKTGTITYQRGILLPQKVWCASGRSKVIKGSLPLIGEADCLHEKYGGLNKSKPYYTGEHAKAIGNCPIWVKTPLKLANGTKYRPPAKLLKERGFFGAIAGFLEGGWEGMIAGWHGYTSHGAHGVAVAADLKSTQEAINKITKNLNSLSELEVKNLQRLSGAMDELHNEILELDEKVDDLRADTISSQIELAVLLSNEGIINSEDEHLLALERKLKKMLGPSAVEIGNGCFETKHKCNQTCLDRIAAGTFDAGEFSLPTFDSLNITAASLNDDGLDNHTILLYYSTAASSLAVTLMIAIFVVYMVSRDNVSCSICL

SEQ ID NO: 28090 - protein, 585 aa, synthetic construct; identical to SEQ ID NO: 26989
  REGION 1..585: note = hemagglutinin__InfluenzaB__AHL93840

SEQ ID NO: 28091 - protein, 585 aa, synthetic construct; identical to SEQ ID NO: 26683
  REGION 1..585: note = hemagglutinin__InfluenzaB__AHL93851

SEQ ID NO: 28092 - protein, 585 aa, synthetic construct; identical to SEQ ID NO: 26683
  REGION 1..585: note = hemagglutinin__InfluenzaB__AHL93862

SEQ ID NO: 28093 - protein, 585 aa, synthetic construct
  REGION 1..585: note = hemagglutinin__InfluenzaB__AHL93873
MKAIIVLLMVVTSNADRICTGITSSNSPHIVKTATQGEVNVTGVIPLTTTPTKSHFANLKGTETRGELCPKCLNCTDLDVALGRPKCTGKIPSARVSILHEVRPVTSGCFPIMHDRTKIRQLPNLLRGYEHIRLSTHNVINAENAPGGPYKIGTSGSCPNITNGNGFFATMAWAVPKNDKNKTATNPLTIEVPYICTEGEDQITVWGFHSDNETQMAKLYGDSKPQKFTSSANGVTTHYVSQIGGFPNQTEDGGLPQSGRIVVDYMVQKSGKTGTITYQRGILLPQKVWCASGRSKVIKGSLPLIGEADCLHEKYGGLNKSKPYYTGEHAKAIGNCPIWVKTPLKLANGTKYRPPAKLLKERGFFGAIAGFLEGGWEGMIAGWHGYTSHGAHGVAVAADLKSTQEAINKITKNLNSLSELEVKNLQRLSGAMDELHNEILELDEKVDDLRADTISSQIELAVLLSNEGIINSEDEHLLALERKLKKMLGPSAVEIGNGCFETKHKCNQTCLDRIAAGTFDAGEFSLPTFDSLNITAASLNDDGLDNHTILLYYSTAASSLAVTLMIAIFVVYMVSRDNVSCSICL

SEQ ID NO: 28094 - protein, 585 aa, synthetic construct; identical to SEQ ID NO: 26683
  REGION 1..585: note = hemagglutinin__InfluenzaB__AHL93884

SEQ ID NO: 28095 - protein, 585 aa, synthetic construct; identical to SEQ ID NO: 26683
  REGION 1..585: note = hemagglutinin__InfluenzaB__AHL93895

SEQ ID NO: 28096 - protein, 585 aa, synthetic construct; identical to SEQ ID NO: 26683
  REGION 1..585: note = hemagglutinin__InfluenzaB__AHL93906

SEQ ID NO: 28097 - protein, 585 aa, synthetic construct; identical to SEQ ID NO: 26683
  REGION 1..585: note = hemagglutinin__InfluenzaB__AHL93917

SEQ ID NO: 28098 - protein, 585 aa, synthetic construct; identical to SEQ ID NO: 26608
  REGION 1..585: note = hemagglutinin__InfluenzaB__AHL93928

SEQ ID NO: 28099 - protein, 585 aa, synthetic construct; identical to SEQ ID NO: 26645
  REGION 1..585: note = hemagglutinin__InfluenzaB__AHL93939

SEQ ID NO: 28100 - protein, 585 aa, synthetic construct; identical to SEQ ID NO: 26683
  REGION 1..585: note = hemagglutinin__InfluenzaB__AHL93950

SEQ ID NO: 28101 - protein, 585 aa, synthetic construct; identical to SEQ ID NO: 26645
  REGION 1..585: note = hemagglutinin__InfluenzaB__AHL93961

SEQ ID NO: 28102 - protein, 585 aa, synthetic construct
  REGION 1..585: note = hemagglutinin__InfluenzaB__AHL93972
MKAIIVLLMVVTSTADRICTGITSSNSPHVVKTATQGEVNVTGVIPLTTTPTKSHFANLKGTETRGKLCPKCLNCTDLDVALGRPKCTGKIPSARVSILHEVRPVTSGCFPIMHDRTKIRQLPNLLRGYEHIRLSTHNVINAENAPGGPYKIGTSGSCPNVTNGNGFFATMAWAVPKNDKNKTATNPLTIEVPYICTEGEDQITVWGFHSDNETQMAKLYGDSKPQKFTSSANGVTTHYVSQIGGFPNQTEDGGLPQSGRIVVDYMVQKSGKTGTITYQRGILLPQKVWCASGRSKVIKGSLPLIGEADCLHEKYGGLNKSKPYYTGEHAKAVGNCPIWVKTPLKLANGTKYRPPAKLLKERGFFGAIAGFLEGGWEGMIAGWHGYTSHGAHGVAVAADLKSTQEAINKITKNLNSLSELEVKNLQRLSGAMDELHNEILELDEKVDDLRADTISSQIELAVLLSNEGIINSEDEHLLALERKLKKMLGPSAVEIGNGCFETKHKCNQTCLDRIAAGTFDAGEFSLPTFDSLNITAASLNDDGLDNHTILLYYSTAASSLAVTLMIAIFVVYMVSRDNVSCSICL

SEQ ID NO: 28103 - protein, 585 aa, synthetic construct; identical to SEQ ID NO: 26608
  REGION 1..585: note = hemagglutinin__InfluenzaB__AHL93983

SEQ ID NO: 28104 - protein, 584 aa, synthetic construct
  REGION 1..584: note = hemagglutinin__InfluenzaB__AHL93994
MKAIIVLLMVVTSNADRICTGITSSNSPHVVKTATQGEVNVTGVIPLTTTPKKSYFANLKGTKTRGKLCPDCLNCTDLDVALGRPMCVGTTPSAKASILHEVRPVTSGCFPIMHDRTKIRQLANLLRGYENIRLSTQNVIDAEKAPGGPYRLGTSGSCPNATSKSGFFATMAWAVPKDNNKNATNPLTVEVPYICAEGEDQITVWGFHSDNKTQMKNLYGDSNPQKFTSSANGVTTHYVSQIGGFPDQTEDGGLPQSGRIVVDYMMQKPGKTGTIVYQRGVLLPQKVWCASGRSKVIKGSLPLIGEADCLHEKYGGLNKSKPYYTGEHAKAIGNCPIWVKTPLKLANGTKYRPPAKLLKERGFFGAIAGFLEGGWEGMIAGWHGYTSHGAHGVAVAADLKSTQEAINKITKNLNSLSELEVKNLQRLSGAMDELHNEILELDEKVDDLRADTISSQIELAVLLSNEGIINSEDEHLLALERKLKKMLGPSAVDIGNGCFETKHKCNQTCLDRIAAGTFNAGEFSLPTFDSLNITAASLNDDGLDNHTILLYYSTAASSLAVTLMLAIFIVYMISRDNVSCSICL

SEQ ID NO: 28105 - protein, 585 aa, synthetic construct; identical to SEQ ID NO: 26683
  REGION 1..585: note = hemagglutinin__InfluenzaB__AHL94005

SEQ ID NO: 28106 - protein, 585 aa, synthetic construct; identical to SEQ ID NO: 26683
  REGION 1..585: note = hemagglutinin__InfluenzaB__AHL94016

SEQ ID NO: 28107 - protein, 585 aa, synthetic construct
  REGION 1..585: note = hemagglutinin__InfluenzaB__AHL94027
MKAIIVLLMVVTSNADRICTGITSSNSPHIVKTATQGEVNVTGVIPLTTTPTKSHFANLKGTETRGKLCPKCLNCTDLDVALGRPKCTGKIPSARVSILHEVRPVTSGCFPIMHDRTKIRQLPNLLRGYEHIRLSTHNVINAENAPGGPYKIGTSGSCPNITNGNGFFATMAWAVPKNDKNKTATNPLTIEVPYICTEGEDQITVWGFHSDNETQMAKLYGDSKPQKFTSSANGVTTHYVSQIGGFPNQTEDGGLPQSGRIVVDYMVQKSGKTGTITYQMGVLLPQKVWCASGRSKVIKGSLPLIGEADCLHEKYGGLNKSKPYYTGEHAKAIGNCPIWVKTPLKLANGTKYRPPAKLLKERGFFGAIAGFLEGGWEGMIAGWHGYTSHGAHGVAVAADLKSTQEAINKITKNLNSLSELEVKNLQRLSGAMDELHNEILELDEKVDDLRADTISSQIELAVLLSNEGIINSEDEHLLALERKLKKMLGPSAVEIGNGCFETKHKCNQTCLDRIAAGTFDAGEFSLPTFDSLNITAASLNDDGLDNHTILLYYSTAASSLAVTLMIAIFVVYMVSRDNVSCSICL

SEQ ID NO: 28108 - protein, 585 aa, synthetic construct; identical to SEQ ID NO: 26645
  REGION 1..585: note = hemagglutinin__InfluenzaB__AHL94038

SEQ ID NO: 28109 - protein, 585 aa, synthetic construct; identical to SEQ ID NO: 26608
  REGION 1..585: note = hemagglutinin__InfluenzaB__AHL94049

SEQ ID NO: 28110 - protein, 585 aa, synthetic construct; identical to SEQ ID NO: 26683
  REGION 1..585: note = hemagglutinin__InfluenzaB__AHL94060

SEQ ID NO: 28111 - protein, 585 aa, synthetic construct
  REGION 1..585: note = hemagglutinin__InfluenzaB__AHL94071
MKAIIVLLMVVTSNADRICTGITSSNSPHIVKTATQGEVNVTGVIPLTTTPTKSHFANLKGTETRGKLCPKCLNCTDLDVALGRPKCTGKIPSARVSILHEVRPVTSGCFPIMHDRTKIRQLPNLLRGYEHIRLSTHNVINAENAPGGPYKIGTSGSCPNITNGNGFFATMAWAVPKNDKNKTATNPLTIEVPYICTEGEDQITVWGFHSDNETQMAKLYGDSKPQKFTSSANGVTTHYVSQIGGFPNQTEDGGLPQSGRIVVDYMMQKSGKTGTITYQRGILLPQKVWCASGRSKVIKGSLPLIGEADCLHEKYGGLNKSKPYYTGEHAKAIGNCPIWVKTPLKLANGTKYRPPAKLLKERGFFGAIAGFLEGGWEGMIAGWHGYTSHGAHGVAVAADLKSTQEAISKITKNLNSLSELEVKNLQRLSGAMDELHNEILELDEKVDDLRADTISSQIELAVLLSNEGIINSEDEHLLALERKLKKMLGPSAVEIGNGCFETKHKCNQTCLDRIAAGTFDAGEFSLPTFDSLNITAASLNDDGLDNHTILLYYSTAASSLAVTLMIAIFVVYMVSRDNVSCSICL

SEQ ID NO: 28112 - protein, 584 aa, synthetic construct
  REGION 1..584: note = hemagglutinin__InfluenzaB__AHL94082
MKAIIVLLMVVTSNADRICTGITSSNSPHVVKTATQGEVNVTGVIPLTTTPTKSYFANLKGTRTRGKLCPDCLNCTDLDVALGRPMCVGTTPSAKASILHEIRPVTSGCFPIMHDRTKIRQLPNLLRGYENIRLSTQNVIDAEKAPGGPYRLGTSGSCPNATSKIGFFATMAWAVPKDNYKNATNPLTVEVPYICTEGEDQITVWGFHSDNKTQMKNLYGDSNPQKFTSSANGVTTHYVSQIGDFPDQTEDGGLPQSGRIVVDYMMQKPGKTGTIVYQRGVLLPQKVWCASGRSKVIKGSLPLIGEADCLHEKYGGLNKSKPYYTGEHAKAIGNCPIWVKTPLKLANGTKYRPPAKLLKERGFFGAIAGFLEGGWEGMIAGWHGYTSHGAHGVAVAADLKSTQEAINKITKNLNSLSELEVKNLQRLSGAMDELHNEILELDEKVDDLRADTISSQIELAVLLSNEGIINSEDEHLLALERKLKKMLGPSAVDIGNGCFETKHKCNQTCLDRIAAGTFNAGEFSLPTFDSLNITAASLNDDGLDNHTILLYYSTAASSLAVTLMLAIFIVYMVSRDNVSCSICL

SEQ ID NO: 28113 - protein, 585 aa, synthetic construct; identical to SEQ ID NO: 26645
  REGION 1..585: note = hemagglutinin__InfluenzaB__AHL94093

SEQ ID NO: 28114 - protein, 585 aa, synthetic construct; identical to SEQ ID NO: 26683
  REGION 1..585: note = hemagglutinin__InfluenzaB__AHL94102

SEQ ID NO: 28115 - protein, 585 aa, synthetic construct
  REGION 1..585: note = hemagglutinin__InfluenzaB__AHL94113
MKAIIVLLMVVTSNADRICTGITSSNSPHIVKTATQGEVNVTGVIPLTTTPTKSHFANLKGTETRGKLCPKCLNCTDLDVALGRPKCTGKIPSARVSILHEVRPVTSGCFPIMHDRTKIRQLPNLLRGYEHIRLSTHNVINAENAPGGPYKIGTSGSCLNITNGNGFFATMAWAVPKNDKNKTATNPLTIEVPYICTEGEDQITVWGFHSDNETQMAKLYGDSKPQKFTSSANGVTTHYVSQIGGFPNQTEDGGLPQSGRIVVDYMVQKSGKTGTITYQRGILLPQKVWCASGRSKVIKGSLPLIGEADCLHEKYGGLNKSKPYYTGEHAKAIGNCPIWVKTPLKLANGTKYRPPAKLLKERGFFGAIAGFLEGGWEGMIAGWHGYTSHGAHGVAVAADLKSTQEAINKITKNLNSLSELEVKNLQRLSGAMDELHNEILELDEKVDDLRADTISSQIELAVLLSNEGIINSEDEHLLALERKLKKMLGPSAVEIGNGCFETKHKCNQTCLDRIAAGTFDAGEFSLPTFDSLNITAASLNDDGLDNHTILLYYSTAASSLAVTLMIAIFVVYMVSRDNVSCSICL

SEQ ID NO: 28116 - protein, 585 aa, synthetic construct
  REGION 1..585: note = hemagglutinin__InfluenzaB__AHL94124
MKAIIVLLMVVTSNADRICTGITSSNSPHIVKTATQGEVNVTGVIPLTTTPTKSHFANLKGTETRGKLCPKCLNCTDLDVALGRPKCTGKIPSARVSILHEIRPVTSGCFPIMHDRTKIRQLPNLLRGYEHIRLSTHNVINAENAPGGPYKIGTSGSCPNITNGNGFFATMAWAVPKNDKNKTATNPLTIEVPYICTEGEDQITVWGFHSDNETQMAKLYGDSKPQKFTSSANGVTTHYVSQIGGFPNQTEDGGLPQSGRIVVDYMVQKSGKTGTITYQRGILLPQKVWCASGRSKVIKGSLPLIGEADCLHEKYGGLNKSKPYYTGEHAKAIGNCPIWVKTPLKLANGTKYRPPAKLLKERGFFGAIAGFLEGGWEGMIAGWHGYTSHGAHGVAVAADLKSTQEAINKITKNLNSLSELEVKNLQRLSGAMDELHNEILELDEKVDDLRADTISSQIELAVLLSNEGIINSEDEHLLALERKLKKMLGPSAVEIGNGCFETKHKCNQTCLDRIAAGTFDAGEFSLPTFDSLNITAASLNDDGLDNHTILLYYSTAASSLAVTLMIAIFVVYMVSRDNVSCSICL

SEQ ID NO: 28117 - protein, 585 aa, synthetic construct; identical to SEQ ID NO: 26608
  REGION 1..585: note = hemagglutinin__InfluenzaB__AHL94135

SEQ ID NO: 28118 - protein, 585 aa, synthetic construct; identical to SEQ ID NO: 26608
  REGION 1..585: note = hemagglutinin__InfluenzaB__AHL94146

SEQ ID NO: 28119 - protein, 585 aa, synthetic construct; identical to SEQ ID NO: 26683
  REGION 1..585: note = hemagglutinin__InfluenzaB__AHL94157

SEQ ID NO: 28120 - protein, 585 aa, synthetic construct; identical to SEQ ID NO: 26683
  REGION 1..585: note = hemagglutinin__InfluenzaB__AHL94168

SEQ ID NO: 28121 - protein, 585 aa, synthetic construct; identical to SEQ ID NO: 26608
  REGION 1..585: note = hemagglutinin__InfluenzaB__AHL94179

SEQ ID NO: 28122 - protein, 585 aa, synthetic construct; identical to SEQ ID NO: 26608
  REGION 1..585: note = hemagglutinin__InfluenzaB__AHL94190

SEQ ID NO: 28123 - protein, 585 aa, synthetic construct
  REGION 1..585: note = hemagglutinin__InfluenzaB__AHL94201
MKAIIVLLMVVTSNADRICTGITSSNSPHIVKTATQGEVNVTGVIPLTTTPTKSHFANLKGTETRGKLCPKCLNCTDLDVALGRPKCTGKIPSARVSILHEVRPVTSGCFPIMHDRTKIRQLPNLLRGYEHIRLSTHNVINAENAPGGPYKIGTSGSCPNITNGNGFFETMAWAVPKNDKNKTATNPLTIEVPYICTEGEDQITVWGFHSDNETQMAKLYGDSKPQKFTSSANGVTTHYVSQIGGFPNQTEDGGLPQSGRIVVDYMVQKSGKTGTITYQRGILLPQKVWCASGRSKVIKGSLPLIGEADCLHEKYGGLNKSKPYYTGEHAKAIGNCPIWVKTPLKLANGTKYRPPAKLLKERGFFGAIAGFLEGGWEGMIAGWHGYTSHGAHGVAVAADLKSTQEAINKITKNLNSLSELEVKNLQRLSGAMDELHNEILELDEKVDDLRADTISSQIELAVLLSNEGIINSEDEHLLALERKLKKMLGPSAVEIGNGCFETKHKCNQTCLDRIAAGTFDAGEFSLPTFDSLNITAASLNDDGLDNHTILLYYSTAASSLAVTLMIAIFVVYMVSRNNVSCSICL

SEQ ID NO: 28124 - protein, 585 aa, synthetic construct
  REGION 1..585: note = hemagglutinin__InfluenzaB__AHL94212
MKAIIVLLMVVTSNADRICTGITSSNSPHVVKTATQGEVNVTGVIPLTTTPTKSHFANLKGTETRGKLCPKCLNCTDLDVALGRPKCTGKIPSARVSILHEVRPVTSGCFPIMHDRTKIRQLPNLLRGYEHIRLSTHNVINAENAPGGPYKIGTSGSCPNVTNGNGFFATMAWAVPKNDKNKTATNPLTIEVPYICTEGEDQVTVWGFHSDNETQMAKLYGDSKPQKFTSSANGVTTHYVSQIGGFPNQTEDGGLPQSGRIVVDYMVQKSGKTGTITYQRGILLPQKVWCASGRSKVIKGSLPLIGEADCLHEKYGGLNKSKPYYTGEHAKAIGNCPIWVKTPLKLANGTKYRPPAKLLKERGFFGAIAGFLEGGWEGMIAGWHGYTSHGAHGVAVAADLKSTQEAINKITKNLNSLSELEVKNLQRLSGAMDELHNEILELDEKVDDLRADTISSQIELAVLLSNEGIINSEDEHLLALERKLKKMLGPSAVEIGNGCFETKHKCNQTCLDRIAAGTFDAGEFSLPTFDSLNITAASLNDDGLDNHTILLYYSTAASSLAVTLMIAIFVVYMVSRDNVSCSICL

SEQ ID NO: 28125 - protein, 585 aa, synthetic construct; identical to SEQ ID NO: 26683
  REGION 1..585: note = hemagglutinin__InfluenzaB__AHL94220

SEQ ID NO: 28126 - protein, 585 aa, synthetic construct; identical to SEQ ID NO: 26683
  REGION 1..585: note = hemagglutinin__InfluenzaB__AHL94231

SEQ ID NO: 28127 - protein, 585 aa, synthetic construct
  REGION 1..585: note = hemagglutinin__InfluenzaB__AHL94242
MKAIIVLLMVVTSNADRICTGITSSNSPHVVKTATQGEVNVTGVIPLTTTPTKSHFANLKGTETRGKLCPKCLNCTDLDVALGRPKCTGKIPSARVSILHEVRPVTSGCFPIMHDRTKIRQLPNLLRGYEHIRLSTHNVINAENAPGGPYKIGTSGSCPNVTNGNGFFATMAWAVPKNDKNKTATNPLTIEVPYICTEGEDQITVWGFHSDNETQMAKLYGDSKPQKFTSSANGVTTHYVSQIGGFPNQTEDGGLPQSGRIVVDYMVQKSGKTGTITYQRGILLPQKVWCANGRSKVIKGSLPLIGEADCLHEKYGGLNKSKPYYTGEHAKAIGNCPIWVKTPLKLANGTKYRPPAKLLKERGFFGAIAGFLEGGWEGMIAGWHGYTSHGAHGVAVAADLKSTQEAINKITKNLNSLSELEVKNLQRLSGAMDELHNEILELDEKVDDLRADTISSQIELAVLLSNEGIINSEDEHLLALERKLKKMLGPSAVEIGNGCFETKHKCNQTCLDRIAAGTFDAGEFSLPTFDSLNITAASLNDDGLDNHTILLYYSTAASSLAVTLMIAIFVVYMVSRDNVSCSICL

SEQ ID NO: 28128 - protein, 585 aa, synthetic construct; identical to SEQ ID NO: 26645
  REGION 1..585: note = hemagglutinin__InfluenzaB__AHL94253

SEQ ID NO: 28129 - protein, 584 aa, synthetic construct
  REGION 1..584: note = hemagglutinin__InfluenzaB__AHL94274
MKAIIVLLMVVTSNADRICTGITSSNSPHVVKTATQGEVNVTGVIPLTTTPTKSYFANLKGTRTRGKLCPDCLNCTDLDVALGRPMCVGTTPSAKASILHEVRPVTSGCFPIMHDRTKIRQLPNLLRGYEKIRLSTQNVIDAEKAPGGPYRLGTSGSCPNATSKIGFFATMAWAVPKDNYKNATNPLTVEVPYICTEGEDQITVWGFHSDNKTQMKSLYGDSNPQKFTSSANGVTTHYVSQIGDFPDQTEDGGLPQSGRIVVDYMMQKPGKTGTIVYQRGVLLPQKVWCASGRSKVIKGSLPLIGEADCLHEEYGGLNKSKPYYTGKHAKAIGNCPIWVKTPLKLANGTKYRPPAKLLKERGFFGAIAGFLEGGWEGMIAGWHGYTSHGAHGVAVAADLKSTQEAINKITKNLNSLSELEVKNLQRLSGAMDELHNEILELDEKVDDLRADTISSQIELAVLLSNEGIINSEDEHLLALERKLKKMLGPSAVDIGNGCFETKHKCNQTCLDRIAAGTFNAGEFSLPTFDSLNITAASLNDDGLDNHTILLYYSTAASSLAVTLMLAIFIVYMVSRDNVSCSICL

SEQ ID NO: 28130 - protein, 584 aa, synthetic construct; identical to SEQ ID NO: 28129
  REGION 1..584: note = hemagglutinin__InfluenzaB__AHL94295

SEQ ID NO: 28131 - protein, 584 aa, synthetic construct
  REGION 1..584: note = hemagglutinin__InfluenzaB__AHL94306
MKAIIVLLMVVTSNADRICTGITSSNSPHVVKTATQGEVNVTGAIPLTTTPTKSYFANLKGTRTRGKLCPDCLNCTDLDVALGRPMCVGTTPSAKASILHEVRPVTSGCFPIMHDRTKIRQLPNLLRGYENIRLSTQNVIDAEKAPGGPYRLGTSGSCPNATSKIGFFATMAWAVPKDNYKNATNPQTVEVPYICTEGEDQITVWGFHSDNKTQMKNLYGDSNPQKFTSSANGVTTHYVSQIGDFPDQTEDGGLPQSGRIVVDYMVQKPGKTGTIVYQRGVLLPQKVWCASGRSKVIKGSLPLIGEADCLHEKYGGLNKSKPYYTGEHAKAIGNCPIWVKTPLKLANGTKYRPPAKLLKERGFFGAIAGFLEGGWEGMIAGWHGYTSHGAHGVAVAADLKSTQEAINKITKNLNSLSELEVKNLQRLSGAMDELHNEILELDEKVDDLRADTISSQIELAVLLSNEGIINSEDEHLLALERKLKKMLGPSAVDIGNGCFETKHKCNQTCLDRIAAGTFNAGEFSLPTFDSLNITAASLNDDGLDNHTILLYYSTAASSLAVTLMLAIFIVYMVSRDNVSCSICL

SEQ ID NO: 28132 - protein, 584 aa, synthetic construct
  REGION 1..584: note = hemagglutinin__InfluenzaB__AHL94317
MKAIIVLLMVVTSNADRICTGITSSNSPHVVKTATQGEVNVTGAIPLTTTPTKSYFANLKGIRTRGKLCPDCLNCTDLDVALGRPMCVGTTPSAKASILHEVRPVTSGCFPIMHDRTKIRQLPNLLRGYENIRLSTQNVIDAEKAPGGPYRLGTSGSCPNATSKIGFFATMAWAVPRDNYKNATNPQTVEVPYICTEGEDQITVWGFHSDNKTQMKNLYGDSNPQKFTSSANGVTTHYVSQIGDFPDQTEDGGLPQSGRIVVDYMVQKPGKTGTIVYQRGVLLPQKVWCASGRSKVIKGSLPLIGEADCLHEKYGGLNKSKPYYTGEHAKAIGNCPIWVKTPLKLANGTKYRPPAKLLKERGFFGAIAGFLEGGWEGMIAGWHGYTSHGAHGVAVAADLKSTQEAINKITKNLNSLSELEVKNLQRLSGAMDELHNEILELDEKVDDLRADTISSQIELAVLLSNEGIINSEDEHLLALERKLKKMLGPSAVDIGNGCFETKHKCNQTCLDRIAAGTFNAGEFSLPTFDSLNITAASLNDDGLDNHTILLYYSTAASSLAVTLMLAIFIVYMVSRDNVSCSICL

SEQ ID NO: 28133 - protein, 584 aa, synthetic construct; identical to SEQ ID NO: 28131
  REGION 1..584: note = hemagglutinin__InfluenzaB__AHL94328

SEQ ID NO: 28134 - protein, 584 aa, synthetic construct; identical to SEQ ID NO: 28129
  REGION 1..584: note = hemagglutinin__InfluenzaB__AHL94339

SEQ ID NO: 28135 - protein, 585 aa, synthetic construct
  REGION 1..585: note = hemagglutinin__InfluenzaB__AHL94350
MKAIIVLLMVVTSNADRICTGITSSNSPHVVKTATQGEVNVTGVIPLTTTPTKSHFANLKGTETRGKLCPKCLNCTDLDVALGRPKCTGKIPSARVSILHEVRPVTSGCFPIMHDRTKIRQLPNLLRGYEHIRLSTHNVINAENAPGGPYKIGTSGSCPNVTNGNGFFATMAWAVPKNDKNKTATNPLTIEVPYICTEGEDQITVWGFHSDNETQMAKLYGDSNPQKFTSSANGVTTHYVSQIGGFPNQTEDGGLPQSGRIVVDYMVQKSGKTGTITYQRGILLPQKVWCASGRSKVIKGSLPLIGEADCLHEKYGGLNKSKPYYTGEHAKAIGNCPIWVKTPLKLANGTKYRPPAKLLKERGFFGAIAGFLEGGWEGMIAGWHGYTSHGAHGVAVAADLKSTQEAINKITKNLNSLSELEVKNLQRLSGAMDELHNEILELDEKVDDLRADTISSQIELAVLLSNEGIINSEDEHLLALERKLKKMLGPSAVEIGNGCFETKHKCNQTCLDRIAAGTFDAGEFSLPTFDSLNITAASLNDDGLDNHTILLYYSTAASSLAVTLMIAIFVVYMVSKDNVSCSICL

SEQ ID NO: 28136 - protein, 585 aa, synthetic construct
  REGION 1..585: note = hemagglutinin__InfluenzaB__AHL94361
MKAIIVLLMVVTSNADRICTGITSSNSPHVVKTATQGEVNVTGVIPLTTTPTKSHFANLKGTETRGKLCPKCLNCTDLDVALGRPKCTGKIPSARVSILHEVRPVTSGCFPIMHDRTKIRQLPNLLRGYEHIRLSTHNVINAENAPGGPYKIGTSGSCPNVTNGNGFFATMAWAVPKNDKNKTATNPLTIEVPYICTEGEDQITVWGFHSDNETQMAKLYGDSNPQKFTSSANGVTTHYVSQIGGFPNQTEDGGLPQSGRIVVDYMVQKSGKTGTIAYQRGILLPQKVWCASGRSKVIKGSLPLIGEADCLHEKYGGLNKSKPYYTGEHAKAIGNCPIWVKTPLKLANGTKYRPPAKLLKERGFFGAIAGFLEGGWEGMIAGWHGYTSHGAHGVAVAADLKSTQEAINKITKNLNSLSELEVKNLQRLSGAMDELHNEILELDEKVDDLRADTISSQIELAVLLSNEGIINSEDEHLLALERKLKKMLGPSAVEIGNGCFETKHKCNQTCLDRIAAGTFDAGEFSLPTFDSLNITAASLNDDGLDNHTILLYYSTAASSLAVTLMIAIFVVYMVSRDSVSCSICL

SEQ ID NO: 28137 - protein, 585 aa, synthetic construct
  REGION 1..585: note = hemagglutinin__InfluenzaB__AHL94383
MKAIIVLLMVVTSNADRICTGITSSNSPHVVKTATQGEVNVTGVIPLTTTPTKSHFANLKGTETRGKLCPKCLNCTDLDVALGRPKCTGKIPSARVSILHEVRPVTSGCFPIMHDRTKIRQLPNLLRGYEHIRLSTHNVINAENAPGGPYKIGTSGSCPNVTNGNGFFATMAWAVPKNDKNKTATNPLTIEVPYICTEGEDQITVWGFHSDNETQMEKLYGDSKPQKFTSSANGVTTHYVSQIGGFPNQTEDGGLPQSGRIVVDYMVQKSGKTGTITYQRGILLPQKVWCASGRSKVIKGSLPLIGEADCLHEKYGGLNKSKPYYTGEHAKAIGNCPIWVKTPLKLANGTKYRPPAKLLKERGFFGAIAGFLEGGWEGMIAGWHGYTSHGAHGVAVAADLKSTQEAINKITKNLNSLSELEVKNLQRLSGAMDELHNEILELDEKVDDLRADTISSQIELAVLLSNEGIINSEDEHLLALERKLKKMLGPSAVEIGNGCFETKHKCNQTCLDRIAAGTFDAGEFSLPTFDSLNITAASLNDDGLDNHTILLYYSTAASSLAVTLMIAIFVVYMVSRDNVSCSICL

SEQ ID NO: 28138 - protein, 585 aa, synthetic construct; identical to SEQ ID NO: 26645
  REGION 1..585: note = hemagglutinin__InfluenzaB__AHL94394

SEQ ID NO: 28139 - protein, 585 aa, synthetic construct
  REGION 1..585: note = hemagglutinin__InfluenzaB__AHL94405
MKAIIVLLMVVTSNADRICTGITSSNSPHVVKTATQGEVNVTGVIPLTTTPTKSHFANLKGTETRGKLCPKCLNCTDLDVALGRPKCTGKIPSARVSILHEVRPVTSGCFPIMHDRTKIRQLPNLLRGYEHIRLSTHNVINAENAPGGPYKIGTSGSCPNVTNGNGFFATMAWAVPKNDKNKTATNPLTIEVPYICTEGEDQITVWGFHSDNETQMAKLYGDSKPQKFTSSANGVTTHYVSQIGGFPNQTEDGGLPQSGRIVVDYMVQKSGKTGTITYQRGILLPQKVWCASGRSKVIKGSLPLIGEADCLHEKYGGLNKSKPYYTGEHAKAIGNCPIWVKTPLKLANGTKYRPPAKLLKERGFFGAIAGFLEGGWEGMIAGWHGYTSHGAHGVAVAADLKSTQEAINKITKNLNSLSELEVKNLQRLSGAMDELHNEILELDEKVDDLRADTISSQIELAVLLSNEGIINSEDEHLLALERKLKKMLGPSAVEIGNGCFETKHKCNQTCLDRIAAGTFNAGEFSLPTFDSLNITAASLNDDGLDNHTILLYYSTAASSLAVTLMIAIFVVYMVSRDNVSCSICL

SEQ ID NO: 28140 - protein, 585 aa, synthetic construct; identical to SEQ ID NO: 26645
  REGION 1..585: note = hemagglutinin__InfluenzaB__AHL94416

SEQ ID NO: 28141 - protein, 584 aa, synthetic construct; identical to SEQ ID NO: 26854
  REGION 1..584: note = hemagglutinin__InfluenzaB__AHL94427

SEQ ID NO: 28142 - protein, 584 aa, synthetic construct
  REGION 1..584: note = hemagglutinin__InfluenzaB__AHL94438
MKAIIVLLMVVTSNADRICTGITSSNSPHVVKTATQGEVNVTGAIPLTTTPTKSYFANLKGTRTRGKLCPDCLNCTDLDVALGRPMCVGTTPSAKASILHEVRPVTSGCFPIMHDRTKIRQLPNLLRGYENIRLSTQNVIDAEKAPGGPYRLGTSGSCPNATSKIGFFETMAWAVPKDNYKNATNPQTVEVPYICTEGEDQITVWGFHSDNKTQMKNLYGDSNPQKFTSSANGVTTHYVSQIGDFPDQTEDGGLPQSGRIVVDYMVQKPGKTGTIVYQRGVLLPQKVWCASGRSKVIKGSLPLIGEADCLHEKYGGLNKSKPYYTGEHAKAIGNCPIWVKTPLKLANGTKYRPPAKLLKERGFFGAIAGFLEGGWEGMIAGWHGYTSHGAHGVAVAADLKSTQEAINKITKNLNSLSELEVKNLQRLSGAMDELHNEILELDEKVDDLRADTISSQIELAVLLSNEGIINSEDEHLLALERKLKKMLGPSAVDIGNGCFETKHKCNQTCLDRIAAGTFNAGEFSLPTFDSLNITAASLNDDGLDNHTILLYYSTAASSLAVTLMLAIFIVYMVSRDNVSCSICL

SEQ ID NO: 28143 - protein, 584 aa, synthetic construct
  REGION 1..584: note = hemagglutinin__InfluenzaB__AHL94460
MKAIIVLLMVVTSNADRICTGITSSNSPHVVKTATQGEVNVTGAIPLTTTPTKSYFANLKGTRTRGKLCPDCLNCTDLDVALGRPMCVGTTPSAKASILHEVRPVTSGCFPIMHDRTKIRQLPNLLRGYENIRLSTQNVIDAEKAPGGPYRLGTSGSCPNATSKIGFFATMAWAVPKDNYKNATNPQTVEVPYICTEEEDQITVWGFHSDNKTQMKNLYGDSNPQKFTSSANGVTTHYVSQIGDFPDQTEDGGLPQSGRIVVDYMVQKPGKTGTIVYQRGVLLPQKVWCASGRSKVIKGSLPLIGEADCLHEKYGGLNKSKPYYTGEHAKAIGNCPIWVKTPLKLANGTKYRPPAKLLKERGFFGAIAGFLEGGWEGMIAGWHGYTSHGAHGVAVAADLKSTQEAINKITKNLNSLSELEVKNLQRLSGAMDELHNEILELDEKVDDLRADTISSQIELAVLLSNEGIINSEDEHLLALERKLKKMLGPSAVDIGNGCFETKHKCNQTCLDRIAAGTFNAGEFSLPTFDSLNITAASLNDDGLDNHTILLYYSTAASSLAVTLMLAIFIVYMVSRDNVSCSICL

SEQ ID NO: 28144 - protein, 584 aa, synthetic construct
  REGION 1..584: note = hemagglutinin__InfluenzaB__AHL94471
MKAIIVLLMVVTSNADRICTGITSSNSPHVVKTATQGEVNVTGVIPLTTTPTKSYFANLKGTRTRGKLCPDCLNCTDLDVALGRPMCVGTTPSAKASILHEVRPVTSGCFPIMHDRTKIRQLPNLLRGYEKIRLSTQNVIDAEKAPGGPYRLGTSGSCPNATSKIGFFATMAWAVPKDNYKNATNPLTVEVPYICTEGEDQITVWGFHSDNKTQMKSLYGDSNPQKFTSSANGVTTHYVSQIGDFPDQTEDGGLPQSGRIVVDYMMQKPGKTGTIVYQRGVLLPQKVWCASGRSKVIKGSLPLIGEADCLHEEYGGLNKSKPYYTGKHAKAIGNCPIWVKTPLKLANGTKYRPPAKLLKERGFFGAIAGFLEGGWEGMIAGWHGYTSHGAHGVAVAADLKSTQEAINKITKNLNSLSELEVKNLQRLSGAMDELHNEILELDEKVDDLRADTISSQIELAVLLSNEGIINSEDEHLLALERKLKKMLGPSAVDIGNGCFETKHKCNQTCLDRIAAGTFNAGEFSLPTFDSLNITAASLNDDGLDNHTILLYYSTAASSLAVTLMLAIFIVYMVSRDNISCSICL

SEQ ID NO: 28145 - protein, 585 aa, synthetic construct
  REGION 1..585: note = hemagglutinin__InfluenzaB__AHL94482
MKAIIVLLMVVTSNADRICTGITSSNSPHVVKTATQGEVNVTGVIPLTTTPTKSHFANLKGTETRGKLCPKCLNCTDLDVALGRPKCTGKIPSARVSILHEVRPVTSGCFPIMHDRTKIRQLPNLLRGYEHIRLSTHNVINAENAPGGPYKIGTSGSCPNVTNGNGFFTTMAWAVPKNDKNKTATNPLTIEVPYICTEGEDQITVWGFHSDNETQMAKLYGDSKPQKFTSSANGVTTHYVSQIGGFPNQTEDGGLPQSGRIVVDYMVQKSGKTGTITYQRGILLPQKVWCASGRSKVIKGSLPLIGEADCLHEKYGGLNKSKPYYTGEHAKAIGNCPIWVKTPLKLANGTKYRPPAKLLKERGFFGAIAGFLEGGWEGMIAGWHGYTSHGAHGVAVAADLKSTQEAINKITKNLNSLSELEVKNLQRLSGAMDELHNEILELDEKVDDLRADTISSQIELAVLLSNEGIINSEDEHLLALERKLKKMLGPSAVEIGNGCFETKHKCNQTCLDRIAAGTFDAGEFSLPTFDSLNITAASLNDDGLDNHTILLYYSTAASSLAVTLMIAIFVVYMVSRDNVSCSICL

SEQ ID NO: 28146 - protein, 584 aa, synthetic construct; identical to SEQ ID NO: 28129
  REGION 1..584: note = hemagglutinin__InfluenzaB__AHL94493

SEQ ID NO: 28147 - protein, 584 aa, synthetic construct; identical to SEQ ID NO: 28131
  REGION 1..584: note = hemagglutinin__InfluenzaB__AHL94504

SEQ ID NO: 28148 - protein, 585 aa, synthetic construct
  REGION 1..585: note = hemagglutinin__InfluenzaB__AHL94515
MKAIIVLLMVVTSNADRICTGITSSNSPHVVKTATQGEVNVTGVIPLTTTPTKSHFANLKGTETRGKLCPKCLNCTDLDVALGRPKCTGKIPSARVSILHEVRPVTSGCFPIMHDRTKIRQLPNLLRGYEHIRLSTYNVINAEDAPGGPYKIGTSGSCPNVTNGNGFFATMAWAVPKNDKNKTATNPLTIEVPYICTEGEDQITVWGFHSDNETQMEKLYGDSKPQKFTSSANGVTTHYVSQIGGFPNQTEDGGLPQSGRIVVDYMVQKSGKTGTITYQRGILLPQKVWCASGRSKVIKGSLPLIGEADCLHEKYGGLNKSKPYYTGEHAKAIGNCPIWVKTPLKLANGTKYRPPAKLLKERGFFGAIAGFLEGGWEGMIAGWHGYTSHGAHGVAVAADLKSTQEAINKITKNLNSLSELEVKNLQRLSGAMDELHNEILELDEKVDDLRADTISSQIELAVLLSNEGIINSEDEHLLALERKLKKMLGPSAVEIGNGCFETKHKCNQTCLDRIAAGTFDAGEFSLPTFDSLNITAASLNDDGLDNHTILLYYSTAASSLAVTLMIAIFVVYMVSRDNVSCSICL

SEQ ID NO: 28149 - protein, 584 aa, synthetic construct; identical to SEQ ID NO: 28131
  REGION 1..584: note = hemagglutinin__InfluenzaB__AHL94526

SEQ ID NO: 28150 - protein, 585 aa, synthetic construct
  REGION 1..585: note = hemagglutinin__InfluenzaB__AHL94537
MKAIIVLLMVVTSNADRICTGITSSNSPHVVKTATQGEVNVTGVIPLTTTPTKSHFANLKGTETRGKLCPKCLNCTDLDVALGRPKCTGKIPSARVSILHEVRPVTSGCFPIMHDRTKIRQLPNLLRGYEHIRLSTHNVINAENAPGGPYKIGTSGSCPNVTNGNGFFATMAWAVPKNDKNKTATNPLTIEVPYICTEGEDQITVWGFHSDNETQMAKLYGDSNPQKFTSSANGVTTHYISQIGGFPNQTEDGGLPQSGRIVVDYMVQKSGKTGTITYQRGILLPQKVWCASGRSKVIKGSLPLIGEADCLHEKYGGLNKSKPYYTGEHAKAIGNCPIWVKTPLKLANGTKYRPPAKLLKERGFFGAIAGFLEGGWEGMIAGWHGYTSHGAHGVAVAADLKSTQEAINKITKNLNSLSELEVKNLQRLSGAMDELHNEILELDEKVDDLRADTISSQIELAVLLSNEGIINSEDEHLLALERKLKKMLGPSAVEIGNGCFETKHKCNQTCLDRIAAGTFDAGEFSLPTFDSLNITAASLNDDGLDNHTILLYYSTAASSLAVTLMIAIFVVYMVSRDNVSCSICL

SEQ ID NO: 28151 - protein, 584 aa, synthetic construct
  REGION 1..584: note = hemagglutinin__InfluenzaB__AHL94548
MKAIIVLLMVVTSNADRICTGITSSNSPHVVKTATQGEVNVTGVIPLTTTPIKSYFANLKGTKTRGKLCPDCLNCTDLDVALGRPMCVGTTPSAKASILHEVRPVTSGCFPIMHDRTKIRQLANLLRGYENIRLSTQNVIDAERAPGGPYRLGTSGSCPNATSKSGFFATMAWAVPKDNNKNATNPLTVEVPYICAEGEDQITVWGFHSDNKTQMKNLYGDSNPQKFTSSANGVTTHYVSQIGGFPDQTEDGGLPQSGRIVVDYMMQKPGKTGTIVYQRGVLLPQKVWCASGRSKVIKGSLPLIGEADCLHEKYGGLNKSKPYYTGEHAKAIGNCPIWVKTPLKLANGTKYRPPAKLLKERGFFGAIAGFLEGGWEGMIAGWHGYTSHGAHGVAVAADLKSTQEAINKITKNLNSLSELEVKNLQRLSGAMDELHNEILELDEKVDDLRADTISSQIELAVLLSNEGIINSEDEHLLALERKLKKMLGPSAVDIGNGCFETKHKCNQTCLDRIAAGTFNAGEFSLPTFDSLNITAASLNDDGLDNHTILLYYSTAASSLAVTLMLAIFIVYMVSRDNVSCSICL

SEQ ID NO: 28152 - protein, 584 aa, synthetic construct; identical to SEQ ID NO: 28129
  REGION 1..584: note = hemagglutinin__InfluenzaB__AHL94559

SEQ ID NO: 28153 - protein, 584 aa, synthetic construct; identical to SEQ ID NO: 26854
  REGION 1..584: note = hemagglutinin__InfluenzaB__AHL94570

SEQ ID NO: 28154 - protein, 584 aa, synthetic construct; identical to SEQ ID NO: 26854
  REGION 1..584: note = hemagglutinin__InfluenzaB__AHL94581

SEQ ID NO: 28155 - protein, 584 aa, synthetic construct; identical to SEQ ID NO: 26854
  REGION 1..584: note = hemagglutinin__InfluenzaB__AHL94592

SEQ ID NO: 28156 - protein, 585 aa, synthetic construct
  REGION 1..585: note = hemagglutinin__InfluenzaB__AHL94603
MKAIIVLLMVVTSNADRICTGITSSNSPHVVKTATQGEVNVTGVIPLTTTPTKSHFANLKGTETRGKLCPKCLNCTDLDVALGRPKCTGKIPSARVSILHEVRPVTSGCFPIMHDRTKIRQLPNLLRGYENIRLSTHNVINAENAPGGPYKIGTSGSCPNVTNGNGFFATMAWAVPKNDKNKTATNPLTIEVPYICTEGEDQITVWGFHSDNETQMAKLYGDSKPQKFTSSANGVTTHYVSQIGGFPNQTEDGGLPQSGRIVVDYMVQKSGKTGTITYQRGILLPQKVWCASGRSKVIKGSLPLIGEADCLHEKYGGLNKSKPYYTGEHAKAIGNCPIWVKTPLKLANGTKYRPPAKLLKERGFFGAIAGFLEGGWEGMIAGWHGYTSHGAHGVAVAADLKSTQEAINKITKNLNSLSELEVKNLQRLSGAMDELHNEILELDEKVDDLRADTISSQIELAVLLSNEGIINSEDEHLLALERKLKKMLGPSAVEIGNGCFETKHKCNQTCLDRIAAGTFDAGEFSLPTFDSLNITAASLNDDGLDNHTILLYYSTAASSLAVTLMIAIFVVYMVSRDNVSCSICL

SEQ ID NO: 28157 - protein, 585 aa, synthetic construct
  REGION 1..585: note = hemagglutinin__InfluenzaB__AHL94614
MKAIIVLLMVVTSNADRICTGITSSNSPHVVKTATQGEVNVTGVIPLTTTPTKSHFANLKGTETRGKLCPKCLNCTDLDVALGRPKCTGKIPSARVSILHEVRPVTSGCFPIMHDRTKIRQLPNLLRGYEHIRLSTHNVINAENAPGGPYKIGTSGSCPNVTNGNGFFATMAWAVPKNDKNKTATNPLTIEVPYICTEGEDQITVWGFHSDNETQMAKLYGDSKPQKFTSSANGVTTHYVSQIGGFPNQTEDGGLPQSGRIVVDYMVQKSGKTGTITYQRGILLPQKVWCASGRSKVIKGSLPLIGEADCLHEKYGGLNKSKPYYTGEHAKAIGNCPIWVKTPLKLANGTKYRPPAKLLKERGFFGAIAGFLEGGWEGMIAGWHGYISHGAHGVAVAADLKSTQEAINKITKNLNSLSELEVKNLQRLSGAMDELHNEILELDEKVDDLRADTISSQIELAVLLSNEGIINSEDEHLLALERKLKKMLGPSAVEIGNGCFETKHKCNQTCLDRIAAGTFDAGEFSLPTFDSLNITAASLNDDGLDNHTILLYYSTAASSLAVTLMIAIFVVYMVSRDNVSCSICL

SEQ ID NO: 28158 - protein, 584 aa, synthetic construct; identical to SEQ ID NO: 28131
  REGION 1..584: note = hemagglutinin__InfluenzaB__AHL94624

SEQ ID NO: 28159 - protein, 585 aa, synthetic construct
  REGION 1..585: note = hemagglutinin__InfluenzaB__AHL94646
MKAIIVLLMVVTSNADRICTGITSSNSPHVVKTATQGEVNVTGVIPLTTTPTKSHFANLKGTETRGKLCPKCLNCTDLDVALGRPKCTGKIPSARVSILHEVRPVTSGCFPIMHDRTKIRQLPNLLRGYEHIRLSTHNVINAENAPGGPYKIGTSGSCLNVTNGNGFFATMAWAVPKNDKNKTATNPLTIEVPYICTEGEDQITVWGFHSDNETQMAKLYGDSKPQKFTSSANGVTTHYVSQIGGFPNQTEDGGLPQSGRIVVDYMVQKSGKTGTITYQRGILLPQKVWCASGRSKVIKGSLPLIGEADCLHEKYGGLNKSKPYYTGEHAKAIGNCPIWVKTPLKLANGTKYRPPAKLLKERGFFGAIAGFLEGGWEGMIAGWHGYTSHGAHGVAVAADLKSTQEAINKITKNLNSLSELEVKNLQRLSGAMDELHNEILELDEKVDDLRADTISSQIELAVLLSNEGIINSEDEHLLALERKLKKMLGPSAVEIGNGCFETKHKCNQTCLDRIAAGTFDAGEFSLPTFDSLNITAASLNDDGLDNHTILLYYSTAASSLAVTLMIAIFVVYMVSRDNVSCSICL

SEQ ID NO: 28160 - protein, 585 aa, synthetic construct
  REGION 1..585: note = hemagglutinin__InfluenzaB__AHL94657
MKAIIVLLMVVTSNADRICTGITSSNSPHVVKTATQGEVNVTGVIPLTTTPTKSHFANLKGTETRGKLCPKCPNCTDLDVALGRPKCTGKIPSARVSILHEVRPVTSGCFPIMHDRTKIRQLPNLLRGYEHIRLSTHNVINAESAPGGPYKIGTSGSCPNVTNGNGFFATMAWAVPKNDKNKTATDPLTIEVPYICTEGEDQITVWGFHSDNETQMAKLYGDSKPQKFTSSANGVTTHYVSQIGGFPNQTEDGGLPQSGRIVVDYMVQKSGKTGTITYQRGILLPQKVWCASGRSKVIKGSLPLIGEADCLHEKYGGLNKSKPYYTGEHAKAIGNCPIWVKTPLKLANGTKYRPPAKLLKERGFFGAIAGFLEGGWEGMIAGWHGYTSHGAHGVAVAADLKSTQEAINKITKNLNSLSELEVKNLQRLSGAMDELHNEILELDEKVDDLRADTISSQIELAVLLSNEGIINSEDEHLLALERKLKKMLGPSAVEIGNGCFETKHKCNQTCLDRIAAGTFDAGEFSLPTFDSLNITAASLNDDGLDNHTILLYYSTAASSLAVTLMIAIFVVYMVSRDNVSCSICL

SEQ ID NO: 28161 - protein, 584 aa, synthetic construct; identical to SEQ ID NO: 28131
  REGION 1..584: note = hemagglutinin__InfluenzaB__AHL94668

SEQ ID NO: 28162 - protein, 584 aa, synthetic construct; identical to SEQ ID NO: 28131
  REGION 1..584: note = hemagglutinin__InfluenzaB__AHL94679

SEQ ID NO: 28163 - protein, 585 aa, synthetic construct; identical to SEQ ID NO: 28156
  REGION 1..585: note = hemagglutinin__InfluenzaB__AHL94690

SEQ ID NO: 28164 - protein, 585 aa, synthetic construct
  REGION 1..585: note = hemagglutinin__InfluenzaB__AHL94701
MKAIIVLLMVVTSNADRICTGITSSNSPHVVKTATQGEVNVTGVIPLTTTLTKSHFANLKGTETRGKLCPKCLNCTDLDVALGRPKCTGKIPSARVSILHEVRPVTSGCFPIMHDRTKIRQLPNLLRGYEHIRLSTHNVINAENAPGGPYKIGTSGSCLNVTNGNGFFATMAWAVPKNDKNKTATNPLTIEVPYICTEGEDQITVWGFHSDNETQMAKLYGDSKPQKFTSSANGVTTHYVSQIGGFPNQTEDGGLPQSGRIVVDYMVQKSGKTGTITYQRGILLPQKVWCASGRSKVIKGSLPLIGEADCLHEKYGGLNKSKPYYTGEHAKAIGNCPIWVKTPLKLANGTKYRPPAKLLKERGFFGAIAGFLEGGWEGMIAGWHGYTSHGAHGVAVAADLKSTQEAINKITKNLNSLSELEVKNLQRLSGAMDELHNEILELDEKVDDLRADTISSQIELAVLLSNEGIINSEDEHLLALERKLKKMLGPSAVEIGNGCFETKHKCNQTCLDRIAAGTFDAGEFSLPTFDSLNITAASLNDDGLDNHTILLYYSTAASSLAVTLMIAIFVVYMVSRDNVSCSICL

SEQ ID NO: 28165 - protein, 584 aa, synthetic construct; identical to SEQ ID NO: 28129
  REGION 1..584: note = hemagglutinin__InfluenzaB__AHL94712

SEQ ID NO: 28166 - protein, 585 aa, synthetic construct; identical to SEQ ID NO: 28160
  REGION 1..585: note = hemagglutinin__InfluenzaB__AHL94723

SEQ ID NO: 28167 - protein, 584 aa, synthetic construct; identical to SEQ ID NO: 28129
  REGION 1..584: note = hemagglutinin__InfluenzaB__AHL94734

SEQ ID NO: 28168 - protein, 585 aa, synthetic construct
  REGION 1..585: note = hemagglutinin__InfluenzaB__AHL94745
MKAIIVLLMVVTSNADRICTGITSSNSPHVVKTATQGEVNVTGVIPLTTTPTKSHFANLKGTETRGKLCPKCLNCTDLDVALGRPKCTGKIPSARVSILHEVRPVTSGCFPIMHDRTKIRQLPNLLRGYEHIRLSTHNVINAENAPGGPYKIGTSGSCLNVTNGNGFFATMAWAVPKNDKNKTATNPLTIEVPYICTEGEDQITVWGFHSDNETQMAKLYGDSKPQKFTSSANGVTTHYVSQIGGFPNQTEDGGLPQSGRIVVDYMVQKSGKTGTITYQRGILLPQKVWCASGRSKVIKGSLPLIGEADCLHEKYGGLNKSKPYYTGEHAKAIGNCPIWVKTPLKLANGTKYRPPAKLLKERGFFGAIAGFLEGGWEGMIAGWHGYTSHGAHGVAVAADLKSTQEAINKITKNLNSLSELEVKNLQRLSGAMDELHNEILELDEKVDDLRADTISSQIELAVLLSNEGIINSEDEHLLALERKLKKMLGPSAVEIGNGCFETKHKCNQTCLDRIAAGTFDAGEFSLPTFDSLNITAASLNGDGLDNHTILLYYSTAASSLAVTLMIAIFVVYMVSRDNVSCSICL

SEQ ID NO: 28169 - protein, 584 aa, synthetic construct; identical to SEQ ID NO: 26854
  REGION 1..584: note = hemagglutinin__InfluenzaB__AHL94756

SEQ ID NO: 28170 - protein, 585 aa, synthetic construct; identical to SEQ ID NO: 28159
  REGION 1..585: note = hemagglutinin__InfluenzaB__AHL94766

SEQ ID NO: 28171 - protein, 584 aa, synthetic construct
  REGION 1..584: note = hemagglutinin__InfluenzaB__AHL94777
MKAIIVLLMVVTSNADRICTGITSSNSPHVVKTATQGEVNVTGAIPLTTTPTKSYFANLKGTRTRGKLCPDCFNCTDLDVALGRPMCVGTTPSAKASILHEVRPVTSGCFPIMHDRTKIRQLPNLLRGYENIRLSTQNAIDAEKAPGGPYRLGTSGSCPNATSKIGFFATMAWAVPKDNYKNATNPQTVEVPYICTEGEDQITVWGFHSDNKTQMKNLYGDSNPQKFTSSANGVTTHYVSQIGDFPDQTEDGGLPQSGRIVVDYMVQKPGKTGTIVYQRGVLLPQKVWCASGRSKVIKGSLPLIGEADCLHEKYGGLNKSKPYYTGEHAKAIGNCPIWVKTPLKLANGTKYRPPAKLLKERGFFGAIAGFLEGGWEGMIAGWHGYTSHGAHGVAVAADLKSTQEAINKITKNLNSLSELEVKNLQRLSGAMDELHNEILELDEKVDDLRADTISSQIELAVLLSNEGIINSEDEHLLALERKLKKMLGPSAVDIGNGCFETKHKCNQTCLDRIAAGTFNAGEFSLPTFDSLNITAASLNDDGLDNHTILLYYSTAASSLAVTLMLAIFIVYMVSRDNVSCSICL

SEQ ID NO: 28172 - protein, 585 aa, synthetic construct; identical to SEQ ID NO: 28156
  REGION 1..585: note = hemagglutinin__InfluenzaB__AHL94797

SEQ ID NO: 28173 - protein, 584 aa, synthetic construct
  REGION 1..584: note = hemagglutinin__InfluenzaB__AHL94808
MKAIIVLLMVVTSNADRICTGITSSNSPHVVKTATQGEVNVTGAIPLTTTPTKSYFANLKGIRTRGKLCPDCLNCTDLDVALGRPMCVGTTPSAKASILHEVRPVTSGCFPIMHDRTKIRQLPNLLRGYENIRLSTQNVIDAEKAPGGPYRLGTSGSCPNATSKIGFFATMAWAVPKDNYKNATNPQTVEVPYICTEGEDQITVWGFHSDNKTQMKNLYGDSNPQKFTSSANGVTTHYVSQIGDFPDQTEDGGLPQSGRIVVDYMVQKPGKTGTIVYQRGVLLPQKVWCASGRSKVIKGSLPLIGEADCLHEKYGGLNKSKPYYTGEHAKAIGNCPIWVKTPLKLANGTKYRPPAKLLKERGFFGAIAGFLEGGWEGMIAGWHGYTSHGAHGVAVAADLKSTQEAINKITKNLNSLSELEVKNLQRLSGAMDELHNEILELDEKVDDLRADTISSQIELAVLLSNEGIINSEDEHLLALERKLKKMLGPSAVDIGNGCFETKHKCNQTCLDRIAAGTFNAGEFSLPTFDSLNITAASLNDDGLDNHTILLYYSTAASSLAVTLMLAIFIVYMVSRDNVSCSICL

SEQ ID NO: 28174 - protein, 584 aa, synthetic construct
  REGION 1..584: note = hemagglutinin__InfluenzaB__AHL94817
MKAIIVLLMVVTSNADRICTGITSSNSPHVVKTATQGEVNVTGAIPLTTTPTKSYFANLKGTRTRGKLCPDCLNCTDLDVALGRPMCVGTTPSAKASILHEVRPVTSGCFPIMHDRTKIRQLPNLLRGYENIRLSTQNVIDAEKAPGGPYRLGTSGSCPNATSKIGFFATMAWAVPKDNYKNATNPQTVEVPYICTEGEDQITVWGFHSDNKTQMKNLYGDSNPQKFTSSANGVTTHYVSQIGDFPDQTEDGGLPQSGRIVVDYMVQKPGKTGTIVYQRGVLLPQKVWCASGRSKVIKGSLPLIGEADCLHEKYGGLNKSKPYYTGEHAKAIGNCPIWVKTPLKLANGTKYRPPAKLLKERGFFGAIAGFLEGGWEGMIAGWHGYTSHGAHGVAVAADLKSTQEAINKITKNLNSLSELEVKNLQRLSGAMDELHNEIIELDEKVDDLRADTISSQIELAVLLSNEGIINSEDEHLLALERKLKKMLGPSAVDIGNGCFETKHKCNQTCLDRIAAGTFNAGEFSLPTFDSLNITAASLNDDGLDNHTILLYYSTAASSLAVTLMLAIFIVYMVSRDNVSCSICL

SEQ ID NO: 28175 - protein, 585 aa, synthetic construct; identical to SEQ ID NO: 27865
  REGION 1..585: note = hemagglutinin__InfluenzaB__AHL94827

SEQ ID NO: 28176 - protein, 584 aa, synthetic construct
  REGION 1..584: note = hemagglutinin__InfluenzaB__AHL94837
MKAIIVLLMVVTSNADRICTGITSSNSPHVVKTATQGEVNVTGVIPLTTTPAKSYFANLKGTRTRGKLCPDCLNCTDLDVALGRPMCVGTTPSAKASILHEVRPVTSGCFPIMHDRTKIRQLPNLLRGYENIRLSTQNVIDAEKAPGGPYKLGTSGSCPNATSKIGFFATMAWAVPKDNYKNATNPLTVEVPYICKEGEDQITVWGFHSDNKTQMKNLYGDSNPQKFTSSANGVTTHYVSQIGDFPDQTEDGGLPQSGRIVVDYMMQKPGKTGTIVYQRGVLLPQKVWCASGRSKVIKGSLPLIGEADCLHEEYGGLNKSKPYYTGKHAKAIGNCPIWVKTPLKLANGTKYRPPAKLLKERGFFGAIAGFLEGGWEGMIAGWHGYTSHGAHGVAVAADLKSTQEAINKITKNLNSLSELEVKNLQRLSGAMDELHNEILELDEKVDDLRADTISSQIELAVLLSNEGIINSEDEHLLALERKLKKMLGPSAVDIGNGCFETKHKCNQTCLDRIAAGTFNAGEFSLPTFDSLNITAASLNDDGLDNHTILLYYSTAASSLAVTLMLAIFIVYMVSRDNVSCSICL

SEQ ID NO: 28177 - protein, 584 aa, synthetic construct; identical to SEQ ID NO: 26854
  REGION 1..584: note = hemagglutinin__InfluenzaB__AHL94847

SEQ ID NO: 28178 - protein, 585 aa, synthetic construct
  REGION 1..585: note = hemagglutinin__InfluenzaB__AHL94858
MKAIIVLLMVVTSNADRICTGITSSNSPHVVKTATQGEVNVTGVIPLTTTPTKSHFANLKGTETRGKLCPKCLNCTDLDVALGRPKCTGNIPSARVSILHEVRPVTSGCFPIMHDRTKIRQLPNLLRGYEHIRLSTHNVINAENAPGGPYKIGTSGSCPNVTNGNGFFATMAWAVPKNDNNKTATNSLTIEVPYICTEGEDQITVWGFHSDNETQMAKLYGDSKPQKFTSSANGVTTHYVSQIGGFPNQTEDGGLPQSGRIVVDYMVQKSGKAGTITYQRGILLPQKVWCASGRSKVIKGSLPLIGEADCLHEKYGGLNKSKPYYTGEHAKAIGNCPIWVKTPLKLANGTKYRPPAKLLKERGFFGAIAGFLEGGWEGMIAGWHGYTSHGAHGVAVAADLKSTQEAINKITKNLNSLSELEVKNLQRLSGAMDELHNEILELDEKVDDLRADTISSQIELAVLLSNEGIINSEDEHLLALERKLKKMLGPSAVEIGNGCFETKHKCNQTCLDRIAAGTFDAGEFSLPTFDSLNITAASLNDDGLDNHTILLYYSTAASSLAVTLMIAIFVVYMVSRDNVSCSICL

SEQ ID NO: 28179 - protein, 584 aa, synthetic construct; identical to SEQ ID NO: 26820
  REGION 1..584: note = hemagglutinin__InfluenzaB__AHL94869

SEQ ID NO: 28180 - protein, 585 aa, synthetic construct; identical to SEQ ID NO: 26989
  REGION 1..585: note = hemagglutinin__InfluenzaB__AHL94880

SEQ ID NO: 28181 - protein, 585 aa, synthetic construct; identical to SEQ ID NO: 27322
  REGION 1..585: note = hemagglutinin__InfluenzaB__AHL94889

SEQ ID NO: 28182 - protein, 585 aa, synthetic construct; identical to SEQ ID NO: 26989
  REGION 1..585: note = hemagglutinin__InfluenzaB__AHL94900

SEQ ID NO: 28183 - protein, 585 aa, synthetic construct
  REGION 1..585: note = hemagglutinin__InfluenzaB__AHL94911
MKAIIVLLMVVTSNADRICTGITSSNSPHVVKTATQGEVNVTGVIPLTTTPTKSHFANLKGTETRGKLCPKCPNCTDLDVALGRPKCTGKIPSARVSILHEVRPVTSGCFPIMHDRTKIRQLPNLLRGYEHIRLSTHNVINAENAPGGPYKIGTSGSCPNVTNGNGFFATMAWAVPKNDKNKTATNPLTIEVPYICTEGEDQITVWGFHSDNETQMAKLYGDSKPQKFTSSANGVTTHYVSQIGGFPNQTEDGGLPQSGRIVVDYMVQKSGRTGTITYQRGILLPQKVWCASGRSKVIKGSLPLIGEADCLHEKYGGLNKSKPYYTGEHAKAIGNCPIWVKTPLKLANGTKYRPPAKLLKERGFFGAIAGFLEGGWEGMIAGWHGYTSHGAHGVAVAADLKSTQEAINKITKNLNSLSELEVKNLQRLSGAMDELHNEILELDEKVDDLRADTISSQIELAVLLSNEGIINSEDEHLLALERKLKKMLGPSAVEIGNGCFETKHKCNQTCLDRIAAGTFDAGEFSLPTFDSLNITAASLNDDGLDNHTILLYYSTAASSLAVTLMIAIFVVYMVSRDNVSCSICL

SEQ ID NO: 28184 - protein, 585 aa, synthetic construct; identical to SEQ ID NO: 26989
  REGION 1..585: note = hemagglutinin__InfluenzaB__AHL94922

SEQ ID NO: 28185 - protein, 585 aa, synthetic construct
  REGION 1..585: note = hemagglutinin__InfluenzaB__AHL94933
MKAIIVLLMVVTSNADRICTGITSSNSPHVVKTATQGEVNVTGVIPLTTTPTKSHFANLKGTETRGKLCPKCLNCTDLDVALGRPKCTGKIPSARVSILHEVRPVTSGCFPIMHDRTKIRQLPNLLRGYEHIRLSTHNVINAENAPGGPYKIGTSGSCPNITNGNGFFATMAWAVPKNDKNKTATNPLTIEVPYICTEGEDQITVWGFHSDNETQMAKLYGDSKPQKFTSSANGVTTHYVSQIGGFPNQTEDGGLPQSGRIVVDYMVQKSGKAGTITYQRGILLPQKVWCASGRSKVIKGSLPLIGEADCLHEKYGGLNKSKPYYTGEHAKAIGNCPIWVKTPLKLANGTKYRPPAKLLKERGFFGAIAGFLEGGWEGMIAGWHGYTSHGAHGVAVAADLKSTQEAINKITKNLNSLSELEVKNLQRLSGAMDELHNEILELDEKVDDLRADTISSQIELAVLLSNEGIINSEDEHLLALERKLKKMLGPSAVEIGNGCFETKHKCNQTCLDRIAAGTFDAGEFSLPTFDSLNITAASLNDDGLDNHTILLYYSTAASSLAVTLMIAIFVVYMVSRDNVSCSICL

SEQ ID NO: 28186 - protein, 585 aa, synthetic construct; identical to SEQ ID NO: 28070
  REGION 1..585: note = hemagglutinin__InfluenzaB__AHL94944

SEQ ID NO: 28187 - protein, 585 aa, synthetic construct; identical to SEQ ID NO: 26683
  REGION 1..585: note = hemagglutinin__InfluenzaB__AHL94955

SEQ ID NO: 28188 - protein, 585 aa, synthetic construct; identical to SEQ ID NO: 26683
  REGION 1..585: note = hemagglutinin__InfluenzaB__AHL94965

SEQ ID NO: 28189 - protein, 585 aa, synthetic construct; identical to SEQ ID NO: 26683
  REGION 1..585: note = hemagglutinin__InfluenzaB__AHL94975

SEQ ID NO: 28190 - protein, 584 aa, synthetic construct; identical to SEQ ID NO: 26854
  REGION 1..584: note = hemagglutinin__InfluenzaB__AHM00986

SEQ ID NO: 28191 - protein, 585 aa, synthetic construct; identical to SEQ ID NO: 26887
  REGION 1..585: note = hemagglutinin__InfluenzaB__AHM00997

SEQ ID NO: 28192 - protein, 585 aa, synthetic construct
  REGION 1..585: note = hemagglutinin__InfluenzaB__AHM01008
MKAIIVLLMVVTSNADRICTGITSSNSPHVVKTATQGEVNVTGVIPLTTTPTKSHFANLKGTETRGKLCPKCLNCTDLDVALGRPKCTGKIPSARVSILHEVRPVTSGCFPIMHDRTKIRQLPNLLRGYEHIRLSTHNVINAEDAPGGPYKIGTSGSCPNVTNGNGFFATMAWTVPKNDKNKTATNPLTIEVPYICTEGEDQITVWGFHSDNETQMAKLYGDSKPQKFTSSANGVTTHYVSQIGGFPNQTEDGGLPQSGRIVVDYMVQKSGKTGTITYQRGILLPQKVWCASGRSKVIKGSLPLIGEADCLHEKYGGLNKSKPYYTGEHAKAIGNCPIWVKTPLKLANGTKYRPPAKLLKERGFFGAIAGFLEGGWEGMIAGWHGYTSHGAHGVAVAADLKSTQEAINKITKNLNSLSELEVKNLQRLSGAMDELHNEILELDEKVDDLRADTISSQIELAVLLSNEGIINSEDEHLLALERKLKKMLGPSAVEIGNGCFETKHKCNQTCLDRIAAGTFDAGEFSLPTFDSLNITAASLNDDGLDNHTILLYYSTAASSLAVTLMIAIFVVYMVSRDNVSCSICL

SEQ ID NO: 28193 - protein, 585 aa, synthetic construct; identical to SEQ ID NO: 26887
  REGION 1..585: note = hemagglutinin__InfluenzaB__AHM01019

SEQ ID NO: 28194 - protein, 585 aa, synthetic construct; identical to SEQ ID NO: 26887
  REGION 1..585: note = hemagglutinin__InfluenzaB__AHM01030

SEQ ID NO: 28195 - protein, 585 aa, synthetic construct
  REGION 1..585: note = hemagglutinin__InfluenzaB__AHM01041
MKAIIVLLMVVTSNADRICTGITSSNSPHVVKTATQGEVNVTGVIPLTTTPTKSHFANLKGTETRGKLCPKCLNCTDLDVALGRPKCTGKIPSARVSILHEVRPVTSGCFPIMHDRTKIRQLPNLLRGYEHIRLSTHNVINAEDAPGGPYKIGTSGSCPNVTNGNGFFATMAWAVPKNDKNKTATNPLTIEVPYICTEGEDQITVWGFHSDNETQMAKLYGDSKPQKFTSSANGVTTHYVSQIGGFPNQTEDGGLPQSGRIVVDYMVQKSEKTGTITYQRGILLPQKVWCASGRSKVIKGSLPLIGEADCLHEKYGGLNKSKPYYTGEHAKAIGNCPIWVKTPLKLANGTKYRPPAKLLKERGFFGAIAGFLEGGWEGMIAGWHGYTSHGAHGVAVAADLKSTQEAINKITKNLNSLSELEVKNLQRLSGAMDELHNEILELDEKVDDLRADTISSQIELAVLLSNEGIINSEDEHLLALERKLKKMLGPSAVEIGNGCFETKHKCNQTCLDRIAAGTFDAGEFSLPTFDSLNITAASLNDDGLDNHTILLYYSTAASSLAVTLMIAIFVVYMVSRDNVSCSICL

SEQ ID NO: 28196 - protein, 585 aa, synthetic construct
  REGION 1..585: note = hemagglutinin__InfluenzaB__AHM01052
MKAIIVLLMVVTSNADRICTGITSSNSPHVVKTATQGEVNVTGVIPLTTTPTKSHFANLKGTETRGKLCPKCLNCTDLDVALGRPKCTGKIPSARVSILHEVRPVTSGCFPIMHDRTKIRQLPNLLRGYEHIRLSTHNVINAENAPGGPYKIGTSGSCPNVTNGNGFFATMAWAVPKNDKNKTATNPLTIEVPYICTEGEDQITVWGFHSDNETQMAKLYGDSKPQKFTSSANGVTTHYVSQIGGFPNQTEDGGLPQSGRIVVDYMVQKSGKTGTITYQRGILLPQKVWCASGRSKVIKGSLPLIGEADCLHEKYGGLNKSKPYYTGEHAKAIGNCPIWVKTPLKLANGTKYRPPAKLLKERGFFGAIAGFLEGGWEGMIAGWHGYTSHGAHGVAVAADLKSTQEAINKITKNLNSLSELEVKNLQRLSGAMDELHNEILELDEKVDDLRADTISSQIELAVLLSNEGIINSEDEHLLALERKLKKMLGPSAVEIGNGCFETKHKCNQTCLDRIAAGTFDAGEFSLPTFDSLNITAASLNDDGLDNHTIMLYYSTAASSLAVTLMIAIFVVYMVSRDNVSCSICL

SEQ ID NO: 28197 - protein, 585 aa, synthetic construct; identical to SEQ ID NO: 26887
  REGION 1..585: note = hemagglutinin__InfluenzaB__AHM01063

SEQ ID NO: 28198 - protein, 584 aa, synthetic construct; identical to SEQ ID NO: 26854
  REGION 1..584: note = hemagglutinin__InfluenzaB__AHM01074

SEQ ID NO: 28199 - protein, 584 aa, synthetic construct
  REGION 1..584: note = hemagglutinin__InfluenzaB__AHM01096
MKAIIVLLMVVTSNADRICTGITSSNSPHVVKTATQGEVNVTGVIPLTTTPTKSYFANLKGTKTRGKLCPDCLNCTDLDVALGRPMCVGTTPSAKASILHEVRPVTSGCFPIMHDRTKIRQLANLLRGYENIRLSTQNVIDAEKAPGGPYRLGTSGSCPNATSKSGFFATMAWAVPKDNNKNATNPLTVEVPYICAEGEDQITVWGFHSDNKTQMKNLYGDSNPQKFTSSANGVTTHYVSQIGGFPDQTEDGGLPQSGRIVVDYMMQKPGKTGTIVYQRGILLPQKVWCASGRSKVIKGSLPLIGEADCLHEKYGGLNKSKPYYTGEHAKAIGNCPIWVKTPLKLANGTKYRPPAKLLKERGFFGAIAGFLEGGWEGMIAGWHGYTSHGAHGVAVAADLKSTQEAINKITKNLNSLSELEVKNLQRLSGAMDELHNEILELDEKVDDLRADTISSQIELAVLLSNEGIINSEDEHLLALERKLKKMLGPSAVDIGNGCFETKHKCNQTCLDRIAAGTFNAGEFSLPTFDSLNITAASLNDDGLDNHTILLYYSTAASSLAVTLMLAIFIVYMVSRDNVSCSICL

SEQ ID NO: 28200 - protein, 585 aa, synthetic construct; identical to SEQ ID NO: 26887
  REGION 1..585: note = hemagglutinin__InfluenzaB__AHM01107

SEQ ID NO: 28201 - protein, 585 aa, synthetic construct
  REGION 1..585: note = hemagglutinin__InfluenzaB__AHM01118
MKAIIVLLMVVTSNADRICTGITSSNSPHVVKTATQGEVNVTGVIPLTTTPTKSHFANLKGTETRGKLCPKCLNCTDLDVALGRPKCTGKIPSARVSILHEVRPVTSGCFPIMHDRTKIRQLPNLLRGYEHIRLSTHNVINAEDAPGGPYKIGTSGSCPNVTNGNGFFATMAWAVPKNDKNKTATNPLTIEVPYICTEGEDQITVWGFHSDNETQMAKLYGDSKPQKFTSSANGVTTHYVSQIGGFPNQTEDGGLPQSGRIVVDYMVQKSGKTGTITYQRGILLPQKVWCASGRSKVIKGSLPLIGEADCLHEKYGGLNKSKPYYTGEHAKAIGNCPIWVKTPLKLANGTKYRPPAKLLKERGFFGAIAGFLEGGWEGMIAGWHGYTSHGAHGVAVAADLKSTQEAINKITKNLNSLSELEVKNLQRLSGAMDELHNEILELDEKVDDLRADTISSQIELAVLLSNEGIINSEDEHLLALERKLKKMLGPSAVEIGNGCFETKHKCNQTCLDRIAAGTFDAGEFSLPTFDSLNITAVSLNDDGLDNHTILLYYSTAASSLAVTLMIAIFVVYMVSRDNVSCSICL

SEQ ID NO: 28202 - protein, 585 aa, synthetic construct; identical to SEQ ID NO: 26887
  REGION 1..585: note = hemagglutinin__InfluenzaB__AHM01129

SEQ ID NO: 28203 - protein, 585 aa, synthetic construct
  REGION 1..585: note = hemagglutinin__InfluenzaB__AHM01140
MKAIIVLLMVVTSNADRICTGITSSNSPHVVKTATQGEVNVTGVIPLTTTPTKSHFANLKGTETRGKLCPKCLNCTDLDVALGRPKCTGKIPSARVSILHEVRPVTSGCFPIMHDRTKIRQLPNLLRGYEHIRLSAHNVINAENAPGGPYKIGTSGSCPNVTNGNGFFATMAWAVPKNDKNKTATNPLTIEVPYICTEGEDQITVWGFHSDNETQMAKLYGDSKPQKFTSSANGVTTHYVSQIGGFPNQTEDGGLPQSGRIVVDYMVQKSGKTGTITYQRGILLPQKVWCASGRSKVIKGSLPLIGEADCLHEKYGGLNKSKPYYTGEHAKAIGNCPIWVKTPLKLANGTKYRPPAKLLKERGFFGAIAGFLEGGWEGMIAGWHGYTSHGAHGVAVAADLKSTQEAINKITKNLNSLSELEVKNLQRLSGAMDELHNEILELDEKVDDLRADTISSQIELAVLLSNEGIINSEDEHLLALERKLKKMLGPSAVEIGNGCFETKHKCNQTCLDRIAAGTFDAGEFSLPTFDSLNITAASLNDDGLDNHTILLYYSTAASSLAVTLMIAIFVVYMVSRDNVSCSICL

SEQ ID NO: 28204 - protein, 585 aa, synthetic construct; identical to SEQ ID NO: 26872
  REGION 1..585: note = hemagglutinin__InfluenzaB__AHM01151

SEQ ID NO: 28205 - protein, 585 aa, synthetic construct
  REGION 1..585: note = hemagglutinin__InfluenzaB__AHM01162
MKAIIVLLMVVTSNADRICTGITSSNSPHVVKTATQGEVNVTGVIPLTTTPTKSHFANLKGTETRGKLCPKCLNCTDLDVALGRPKCTGKIPSARVSILHEVRPVTSGCFPIMHDRTKIRQLPNLLRGYEHIRLSTHNVINAKDAPGGPYKIGTSGSCPNVTNGNGFFATMAWAVPKNDKNKTATNPLTIEVPYICTEGEDQITVWGFHSDNETQMAKLYGDSKPQKFTSSANGVTTHYVSQIGGFPNQTEDGGLPQSGRIVVDYMVQKSGKTGTITYQRGILLPQKVWCASGRSKVIKGSLPLIGEADCLHEKYGGLNKSKPYYTGEHAKAIGNCPIWVKTPLKLANGTKYRPPAKLLKERGFFGAIAGFLEGGWEGMIAGWHGYTSHGAHGVAVAADLKSTQEAINKITKNLNSLSELEVKNLQRLSGAMDELHNEILELDEKVDDLRADTISSQIELAVLLSNEGIINSEDEHLLALERKLKKMLGPSAVEIGNGCFETKHKCNQTCLDRIAAGTFDAGEFSLPTFDSLNITAASLNDDGLDNHTILLYYSTAASSLAVTLMIAIFVVYMVSRDNVSCSICL

SEQ ID NO: 28206 - protein, 584 aa, synthetic construct; identical to SEQ ID NO: 26854
  REGION 1..584: note = hemagglutinin__InfluenzaB__AHM01173

SEQ ID NO: 28207 - protein, 585 aa, synthetic construct
  REGION 1..585: note = hemagglutinin__InfluenzaB__AHM01184
MKAIIVLLMVVTSNADRICTGITSSNSPHVVKTATQGEVNVTGVITLTTTPTKSHFANLKGTETRGKLCPKCLNCTDLDVALGRPKCTGKIPSARVSILHEVRPVTSGCFPIMHDRTKIRQLPNLLRGYEHIRLSTHNVINAEDAPGGPYKIGTSGSCPNVTNGNGFFATMAWAVPKNDKNKTATNPLTIEVPYICTEGEDQITVWGFHSDNETQMAKLYGDSKPQKFTSSANGVTTHYVSQIGGFPNQTEDGGLPQSGRIVVDYMVQKSGKTGTITYQRGILLPQKVWCASGRSKVIKGSLPLIGEADCLHEKYGGLNKSKPYYTGEHAKAIGNCPIWVKTPLKLANGTKYRPPAKLLKERGFFGAIAGFLEGGWEGMIAGWHGYTSHGAHGVAVAADLKSTQEAINKITKNLNSLSELEVKNLQRLSGAMDELHNEILELDEKVDDLRADTISSQIELAVLLSNEGIINSEDEHLLALERKLKKMLGPSAVEIGNGCFETKHKCNQTCLDRIAAGTFDAGEFSLPTFDSLNITAASLNDDGLDNHTILLYYSTAASSLAVTLMIAIFVVYMVSRDNVSCSICL

SEQ ID NO: 28208 - protein, 585 aa, synthetic construct; identical to SEQ ID NO: 28203
  REGION 1..585: note = hemagglutinin__InfluenzaB__AHM01195

SEQ ID NO: 28209 - protein, 585 aa, synthetic construct
  REGION 1..585: note = hemagglutinin__InfluenzaB__AHM01206
MKAIIVLLMVVTSNADRICTGITSSNSPHVVKTATQGEVNVTGVIPLTTTPTKSHFANLKGTETRGKLCPKCLNCTDLDVALGRPKCTGKIPSARVSILHEVRPVTSGCFPIMHDRTKIRQLPNLLRGYEHIRLSTHNVINAEDAPGGPYKIGTSGSCPNVTNGNGFFATMAWAVPKNDKNKTATNPLTIEVPYICTEGEDQITVWGFHSDNETQMAKLYGDSKPQKFTSSANGVTTHYVSQIGGFPNQTEDGGLPQSGRIVVDYMVQKSEKTGTITYQRGILLPQKVWCASGRSKVIKGSLPLIGEADCLHEKYGGLNKSKPYYTGEHAKAIGNCPIWVKTPLKLANGTKYRPPAKLLKERGFFGAIAGFLEGGWEGMIAGWHGYTSHGAHGVAVAADLKSTQEAINKITKNLNSLSELEVKNLQRLSGAMDELHNEILELDEKVDDLRADTISSQIELAVLLSNEGIINSEDEHLLALERKLKKMLGPSAVEIGNGCFETKHKCNQTCLDRIAAGTFDAGEFSLPTFDSLNITAASLNDDGLGNHTILLYYSTAASSLAVTLMIAIFVVYMVSRDNVSCSICL

SEQ ID NO: 28210 - protein, 585 aa, synthetic construct; identical to SEQ ID NO: 26872
  REGION 1..585: note = hemagglutinin__InfluenzaB__AHM01217

SEQ ID NO: 28211 - protein, 584 aa, synthetic construct; identical to SEQ ID NO: 26854
  REGION 1..584: note = hemagglutinin__InfluenzaB__AHM01228

SEQ ID NO: 28212 - protein, 585 aa, synthetic construct; identical to SEQ ID NO: 26887
  REGION 1..585: note = hemagglutinin__InfluenzaB__AHM01239

SEQ ID NO: 28213 - protein, 585 aa, synthetic construct; identical to SEQ ID NO: 26887
  REGION 1..585: note = hemagglutinin__InfluenzaB__AHM01250

SEQ ID NO: 28214 - protein, 585 aa, synthetic construct
  REGION 1..585: note = hemagglutinin__InfluenzaB__AHM01261
MKAIIVLLMVVTSNADRICTGITSSNSPHVVKTATQGEVNVTGVIPLTTTPTKSHFANLKGTETRGKLCPKCLNCTDLDVALGRPKCTGKIPSARVSILHEVRPVTSGCFPIMHDRTKIRQLPNLLRGYEHIRLSTHNVINAENAPGGPYKIGTSGSCPNVTNGNGFFATMAWAVPKNDKNKTATNPLTIEVPYICTEGEDQITIWGFHSDNETQMAKLYGDSNPQKFTSSANGVTTHYVSQIGGFPNQTEDGGLPQSGRIVVDYMVQKSGKTGTITYQRGILLPQKVWCAGGRSKVIKGSLPLIGEADCLHEKYGGLNKSKPYYTGEHAKAIGNCPIWVKTPLKLANGTKYRPPAKLLKERGFFGAIAGFLEGGWEGMIAGWHGYTSHGAHGVAVAADLKSTQEAINKITKNLNSLSELEVKNLQRLSGAMDELHNEILELDEKVDDLRADTISSQIELAVLLSNEGIINSEDEHLLALERKLKKMLGPSAVEIGNGCFETKHKCNQTCLDRIAAGTFDAGEFSLPTFDSLNITAASLNDDGLDNHTILLYYSTAASSLAVTLMIAIFVVYMVSRDNVSCSICL

SEQ ID NO: 28215 - protein, 584 aa, synthetic construct; identical to SEQ ID NO: 26854
  REGION 1..584: note = hemagglutinin__InfluenzaB__AHM01272

SEQ ID NO: 28216 - protein, 585 aa, synthetic construct; identical to SEQ ID NO: 28203
  REGION 1..585: note = hemagglutinin__InfluenzaB__AHM01283

SEQ ID NO: 28217 - protein, 585 aa, synthetic construct; identical to SEQ ID NO: 28203
  REGION 1..585: note = hemagglutinin__InfluenzaB__AHM01294

SEQ ID NO: 28218 - protein, 584 aa, synthetic construct; identical to SEQ ID NO: 26854
  REGION 1..584: note = hemagglutinin__InfluenzaB__AHM01305

SEQ ID NO: 28219 - protein, 585 aa, synthetic construct; identical to SEQ ID NO: 26887
  REGION 1..585: note = hemagglutinin__InfluenzaB__AHM01316

SEQ ID NO: 28220 - protein, 585 aa, synthetic construct; identical to SEQ ID NO: 28203
  REGION 1..585: note = hemagglutinin__InfluenzaB__AHM01327

SEQ ID NO: 28221 - protein, 585 aa, synthetic construct; identical to SEQ ID NO: 26887
  REGION 1..585: note = hemagglutinin__InfluenzaB__AHM01338

SEQ ID NO: 28222 - protein, 585 aa, synthetic construct; identical to SEQ ID NO: 26887
  REGION 1..585: note = hemagglutinin__InfluenzaB__AHM01349

SEQ ID NO: 28223 - protein, 585 aa, synthetic construct
  REGION 1..585: note = hemagglutinin__InfluenzaB__AHM01360
MKAIIVLLMVVTSNADRICTGITSSNSPHVVKTATQGEVNVTGVIPLTTTPTKSHFANLKGTETRGKLCPKCLNCTDLDVALGRPKCTGKIPSARVSILHEVRPVTSGCFPIMHDRTKIRQLPNLLRGYEHIRLSTHNVINAENAPGGPYKIGTSGSCPNVTNGNGFFATMAWAVPKNDKNKTATNPLTIEVPYICTKGEDQITVWGFHSDNETQMAKLYGDSNPQKFTSSANGVTTHYVSQIGGFPNQTEDGGLPQSGRIVVDYMVQKSGKTGTITYQRGILLPQKVWCASGRSKVIKGSLPLIGEADCLHEKYGGLNKSKPYYTGEHAKAIGNCPIWVKTPLKLANGTKYRPPAKLLKERGFFGAIAGFLEGGWEGMIAGWHGYTSHGAHGVAVAADLKSTQEAINKITKNLNSLSELEVKNLQRLSGAMDELHNEILELDEKVDDLRADTISSQIELAVLLSNEGIINSEDEHLLALERKLKKMLGPSAVEIGNGCFETKHKCNQTCLDRIAAGTFDAGEFSLPTFDSLNITAASLNDDGLDNHTILLYYSTAASSLAVTLMIAIFVVYMVSRDNVSCSICL

SEQ ID NO: 28224 - protein, 584 aa, synthetic construct
  REGION 1..584: note = hemagglutinin__InfluenzaB__AHM01371
MKAIIVLLMVVTSNADRICTGITSSNSPHVVKTATQGEVNVTGVIPLTTTPTKSYFANLKGTKTRGKLCPDCLNCTDLDVALGRPMCVGTTPSAKASILHEVRPVTSGCFPIMHDRTKIRQLANLLRGYENIRLSTQNVIDAEKAPGGPYRLGTSGSCPNATSKNGFFATMAWAVPKDNNKNATNPLTVEVPYICAEGEDQIAVWGFHSDNKTQMKNLYGDSNPQKFTSSANGVTTHYVSQIGGFPDQTEDGGLPQSGRIVVDYMMQKPGKTGTIVYQRGVLLPQKVWCASGRSKVIKGSLPLIGEADCLHEKYGGLNKSKPYYTGEHAKAIGNCPIWVKTPLKLANGTKYRPPAKLLKERGFFGAIAGFLEGGWEGMIAGWHGYTSHGAHGVAVAADLKSTQEAINKITKNLNSLSELEVKNLQRLSGAMDELHNEILELDEKVDDLRADTISSQIELAVLLSNEGIINSEDEHLLALERKLKKMLGPSAVDIGNGCFETKHKCNQTCLDRIAAGTFNAGEFSLPTFDSLNITAASLNDDGLDNHTILLYYSTAASSLAVTLMLAIFIVYMVSRDNVSCSICL

SEQ ID NO: 28225 - protein, 584 aa, synthetic construct; identical to SEQ ID NO: 26854
  REGION 1..584: note = hemagglutinin__InfluenzaB__AHM01382

SEQ ID NO: 28226 - protein, 585 aa, synthetic construct
  REGION 1..585: note = hemagglutinin__InfluenzaB__AHM01393
MKAIIVLLMVVTSNADRICTGITSSNSPHIVKTATQGEVNVTGVIPLTTTPTKSHFANLKGTETRGKLCPKCLNCTDLDVALGRPKCTGKIPSARVSILHEVRPVTSGCFPIMHDRTKIRQLPNLLRGYEHIRLSTHNVINAENAPGGPYKIGTSGSCPNVTNGNGFFATMAWAVPKNDKNKTATNPLTIEVPYICTEGEDQITVWGFHSDNETQMAKLYGDSKPQKFTSSANGVTTHYVSQIGGFPNQTEDGGLPQSGRIVVDYMVQKSGKTGTITYQRGILLPQKVWCASGRSKVIKGSLPLIGEADCLHEKYGGLNKSKPYYTGEHAKAIGNCPIWVKTPLKLANGTKYRPPAKLLKERGFFGAIAGFLEGGWEGMIAGWHGYTSHGAHGVAVAADLKSTQEAINKITKNLNSLSELEVKNLQRLSGAMDELHNEILELDEKVDDLRADTISSQIELAVLLSNEGIINSEDEHLLALERKLKKMLGPSAVEIGNGCFETKHKCNQTCLDRIAAGTFDAGEFSLPTFDSLNITAASLNDDGLDNHTILLYYSTAASSLAVTLMIAIFVVYMVSRDNVSCSICL

SEQ ID NO: 28227 - protein, 585 aa, synthetic construct; identical to SEQ ID NO: 26887
  REGION 1..585: note = hemagglutinin__InfluenzaB__AHM01404

SEQ ID NO: 28228 - protein, 585 aa, synthetic construct
  REGION 1..585: note = hemagglutinin__InfluenzaB__AHM01415
MKAIIVLLMVVTSNADRICTGITSSNSPHVVKTATQGEVNVTGVIPLTTTPTKSHFANLKGTETRGKLCPKCLNCTDLDVALGRPKCTGKIPSARVSILHEVRPVTSGCFPIMHDRTKIRQLPNLLRGYEHIRLSTHNVINAEDAPGGPYKIGTSGSCPNVTNGNGFFATMAWAVPKNDKNKTATNPLTIEVPYICTEGEDQITVWGFHSDNETQMAKLYGDSKPQKFTSSANGVTTHYVSQIGGFPNQTEDGGLPQSGRIVIDYMVQKSGKTGTITYQRGILLPQKVWCASGRSKVIKGSLPLIGEADCLHEKYGGLNKSKPYYTGEHAKAIGNCPIWVKTPLKLANGTKYRPPAKLLKERGFFGAIAGFLEGGWEGMIAGWHGYTSHGAHGVAVAADLKSTQEAINKITKNLNSLSELEVKNLQRLSGAMDELHNEILELDEKVDDLRADTISSQIELAVLLSNEGIINSEDEHLLALERKLKKMLGPSAVEIGNGCFETKHKCNQTCLDRIAAGTFDAGEFSLPTFDSLNITAASLNDDGLDNHTILLYYSTAASSLAVTLMIAIFVVYMVSRDNVSCSICL

SEQ ID NO: 28229 - protein, 585 aa, synthetic construct
  REGION 1..585: note = hemagglutinin__InfluenzaB__AHM01426
MKAIIVLLMVVTSNADRICTGITSSNSPHVVKTATQGEVNVTGVIPLTTTPTKSHFANLKGTETRGKLCPKCLNCTDLDVALGRPKCTGKIPSARVSILHEVRPVTSGCFPIMHDRTKIRQLPNLLRGYEHIRLSTHNVINAENAPGGPYKIGTSGSCPNVTNGNGFFATMAWAVPKNDKNKTATNPLTIEVPYICTEGEDQITIWGFHSDNETQMAKLYGDSNPQKFTSSANGVTTHYVSQIGGFPNQTEDGGLPQSGRIVVDYMVQKSGKTGTITYQRGILLPQKVWCASGRSKVIKGSLPLIGEADCLHEKYGGLNKSKPYYTGEHAKAIGNCPIWVKTPLKLANGTKYRPPAKLLKERGFFGAIAGFLEGGWEGMIAGWHGYTSHGAHGVAVAADLKSTQEAINKITKNLNSLSELEVKNLQRLSGAMDELHNEILELDEKVDDLRADTISSQIELAVLLSNEGIINSEDEHLLALERKLKKMLGPSAVEIGNGCFETKHKCNQTCLDRIAAGTFDAGEFSLPTFDSLNITAASLNDDGLDNHTILLYYSTAASSLAVTLMIAIFVVYMVSRDNVSCSICL

SEQ ID NO: 28230 - protein, 584 aa, synthetic construct
  REGION 1..584: note = hemagglutinin__InfluenzaB__AHM01437
MKAVIVLLMVVTSNADRICTGITSSNSPHVVKTATQGEVNVTGVIPLTTTPTKSYFANLKGTKTRGKLCPDCLNCTDLDVALGRPMCVGTTPSAKASILHEVRPVTSGCFPIMHDRTKIRQLANLLRGYENIRLSTQNVIDAEKAPGGPYRLGTSGSCPNATSKSGFFATMAWAVPKDNNKNATNPLTVEVPYICAEEEDQITVWGFHSDNKTQMKNLYGDSNPQKFTSSANGVTTHYVSQIGGFPDQTEDGGLPQSGRIVVDYMMQKPGKTGTIVYQRGVLLPQKVWCASGRSKVIKGSLPLIGEADCLHEKYGGLNKSKPYYTGEHAKAIGNCPIWVKTPLKLANGTKYRPPAKLLKERGFFGAIAGFLEGGWEGMIAGWHGYTSHGAHGVAVAADLKSTQEAINKITKNLNSLSELEVKNLQRLSGAMDELHNEILELDEKVDDLRADTISSQIELAVLLSNEGIINSEDEHLLALERKLKKMLGPSAVDIGNGCFETKHKCNQTCLDRIAAGTFNAGEFSLPTFDSLNITAASLNDDGLDNHTILLYYSTAASSLAVTLMLAIFIVYMVSRDNVSCSICL

SEQ ID NO: 28231 - protein, 584 aa, synthetic construct
  REGION 1..584: note = hemagglutinin__InfluenzaB__AHM01448
MKAIIVLLMVVTSNADRICTGITSSNSPHVVKTATQGEVNVTGVIPLTTTPTKSYFANLKGTKTRGKLCPDCLNCTDLDVALGRPMCVGTTPSAKASILHEVRPVTSGCFPIMHDRTKIRQLANLLRGYENIRLSTQNVIDAEKAPGGPYRLGTSGSCPNATSKSGFFATMAWAVPKDNNKNATNPLTAEVPYICAEGEDQITVWGFHSDNKTQMKNLYGDSNPQKFTSSANGVTTHYVSQIGGFPDQTEDGGLPQSGRIVVDYMMQKPGKTGTIVYQRGVLLPQKVWCASGRSKVIKGSLPLIGEADCLHEKYGGLNKSKPYYTGEHAKAIGNCPIWVKTPLKLANGTKYRPPAKLLKERGFFGAIAGFLEGGWEGMIAGWHGYTSHGAHGVAVAADLKSTQEAINKITKNLNSLSELEVKNLQRLSGAMDELHNEILELDEKVDDLRADTISSQIELAVLLSNEGIINSEDEHLLALERKLKKMLGPSAVDIGNGCFETKHKCNQTCLDRIAAGTFNAGEFSLPTFDSLNITAASLNDDGLDNHTILLYYSTAASSLAVTLMLAIFIVYMVSRDNVSCSICL

SEQ ID NO: 28232 - protein, 585 aa, synthetic construct; identical to SEQ ID NO: 26645
  REGION 1..585: note = hemagglutinin__InfluenzaB__AHM01459

SEQ ID NO: 28233 - protein, 584 aa, synthetic construct
  REGION 1..584: note = hemagglutinin__InfluenzaB__AHM01470
MKAIIVLLMVVTSNADRICTGITSSNSPHVVKTATQGEVNVTGVIPLTTTPTKSYFANLKGTKTRGKLCPDCLNCTDLDVALGRPMCVGTTPSAKASILHEVRPVTSGCFPIMHDRTKIRQLANLLRGYENIRLSTQNVIDAEKAPGGPYRLGTSGSCPNATSKSGFFATMAWAVPKDNNKNATNPLTVEVPYICTEGEDQIAVWGFHSDNKTQMKNLYGDSNPQKFTSSANGVTTHYVSQIGGFPDQTEDGGLPQSGRIVVDYMMQKPGKTGTIVYQRGVLLPQKVWCASGRSKVIKGSLPLIGEADCLHEKYGGLNKSKPYYTGEHAKAIGNCPIWVKTPLKLANGTKYRPPAKLLKERGFFGAIAGFLEGGWEGMIAGWHGYTSHGAHGVAVAADLKSTQEAVNKITKNLNSLSELEVKNLQRLSGAMDELHNEILELDEKVDDLRADTISSQIELAVLLSNEGIINSEDEHLLALERKLKKMLGPSAVDIGNGCFETKHKCNQTCLDRIAAGTFNAGEFSLPTFDSLNITAASLNDDGLDNHTILLYYSTAASSLAVTLMLAIFIVYMVSRDNVSCSICL

SEQ ID NO: 28234 - protein, 584 aa, synthetic construct
  REGION 1..584: note = hemagglutinin__InfluenzaB__AHM01481
MKAIIVLLMVVTSNADRICTGITSSNSPHVVKTATQGEVNVTGVIPLTTTPTKSYFANLKGTKTRGKLCPDCLNCTDLDVALGRPMCVGTTPSAKASILHEVRPVTSGCFPIMHDRTKIRQLANLLRGYENIRLSTQNVIDAEKAPGGPYRLGTSGSCPNATSKSGFFATMAWAVPKDNNKNATNPLTVEVPYICAEGEDQITVWGFHSDNKTQMKNLYGDSNPQKFTSSANGVTTHYVSQIGGFPDQTEDGGLPQSGRIVVDYMMQKPGKTGTIVYQRGVLLPQRVWCASGRSKVIKGSLPLIGEADCLHEKYGGLNKSKPYYTGEHAKAIGNCPIWVKTPLKLANGTKYRPPAKLLKERGFFGAIAGFLEGGWEGMIAGWHGYTSHGAHGVAVAADLKSTQEAINKITKNLNSLSELEVKNLQRLSGAMDELHNEILELDEKVDDLRADTISSQIELAVLLSNEGIINSEDEHLLALERKLKKMLGPSAVDIGNGCFETKHKCNQTCLDRIAAGTFNAGEFSLPTFDSLNITAASLNDDGLDNHTILLYYSTAASSLAVTLMLAIFIVYMVSRDNVSCSICL

SEQ ID NO: 28235 - protein, 584 aa, synthetic construct; identical to SEQ ID NO: 26899
  REGION 1..584: note = hemagglutinin__InfluenzaB__AHM01492

SEQ ID NO: 28236 - protein, 584 aa, synthetic construct; identical to SEQ ID NO: 26854
  REGION 1..584: note = hemagglutinin__InfluenzaB__AHM01503

SEQ ID NO: 28237 - protein, 584 aa, synthetic construct; identical to SEQ ID NO: 26854
  REGION 1..584: note = hemagglutinin__InfluenzaB__AHM01514

SEQ ID NO: 28238 - protein, 584 aa, synthetic construct
  REGION 1..584: note = hemagglutinin__InfluenzaB__AHM01525
MKAIIVLLMVVTSNADRICTGITSSNSPHVVKTATQGEVNVTGVIPLTTTPTKSYFANLKGTKTRGKLCPDCLNCTDLDVALGRPMCVGTTPSAKASILHEVRPVTSGCFPIMHDRTKIRQLANLLRGYENIRLSTQNVIDAEKAPGGPYRLGTSGSCPNATSKSGFFATMAWAVPKDNNKNATNPLTVEVPYICAEGEDQITVWGFHSDNKTQMKNLYGDSNPQKFTSSANGVTTHYVSQIGGFPDQTEDGGLPQSGRIVVDYMIQKPGKTGTIVYQRGVLLPQKVWCASGRSKVIKGSLPLIGEADCLHEKYGGLNKSKPYYTGEHAKAIGNCPIWVKTPLKLANGTKYRPPAKLLKERGFFGAIAGFLEGGWEGMIAGWHGYTSHGAHGVAVAADLKSTQEAINKITKNLNSLSELEVKNLQRLSGAMDELHNEILELDEKVDDLRADTISSQIELAVLLSNEGIINSEDEHLLALERKLKKMLGPSAVDIGNGCFETKHKCNQTCLDRIAAGTFNAGEFSLPTFDSLNITAASLNDDGLDNHTILLYYSTAASSLAVTLMLAIFIVYMVSRDNVSCSICL

SEQ ID NO: 28239 - protein, 584 aa, synthetic construct
  REGION 1..584: note = hemagglutinin__InfluenzaB__AHM01536
MKAIIVLLMVVTSNADRICTGITSSNSPHVVKTATQGEVNVTGVIPLTTTPTKSYFANLKGTKTRGKLCPDCLNCTDLDVALGRPMCVGTTPSAKASILHEVRPVTSGCFPIMHDRTKIRQLANLLRGYENIRLSTQNVIDAEKAPGGPYRLGTSGSCPNATSKSGFFATMAWAVPKDNNKNATNPLTVEVPYICAEGEDQITVWGFHSDNKTQMKNLYGDSNPQKFTSSANGVTTHYVSQIGGFPDQTEDGGLPQSGRIVVDYMMQKPGKTGTIVYQRGVLLPQKVWCASGRSKVIKGSLPLIGEADCLHEKYGGLNKSKPYYTGEHAKAIGNCPIWVKTPLKLANGTKYRPPAKLLKERGFFGAIAGFLEGGWEGMIAGWHGYTSHGVHGVAVAADLKSTQEAINKITKNLNSLSELEVKNLQRLSGAMDELHNEILELDEKVDDLRADTISSQIELAVLLSNEGIINSEDEHLLALERKLKKMLGPSAVDIGNGCFETKHKCNQTCLDRIAAGTFNAGEFSLPTFDSLNITAASLNDDGLDNHTILLYYSTAASSLAVTLMLAIFIVYMVSRDNVSCSICL

SEQ ID NO: 28240 - protein, 584 aa, synthetic construct; identical to SEQ ID NO: 26854
  REGION 1..584: note = hemagglutinin__InfluenzaB__AHM01547

SEQ ID NO: 28241 - protein, 584 aa, synthetic construct; identical to SEQ ID NO: 26899
  REGION 1..584: note = hemagglutinin__InfluenzaB__AHM01558

SEQ ID NO: 28242 - protein, 585 aa, synthetic construct; identical to SEQ ID NO: 26740
  REGION 1..585: note = hemagglutinin__InfluenzaB__AHV83951

SEQ ID NO: 28243 - protein, 584 aa, synthetic construct; identical to SEQ ID NO: 28129
  REGION 1..584: note = hemagglutinin__InfluenzaB__AHV83952

SEQ ID NO: 28244 - protein, 585 aa, synthetic construct; identical to SEQ ID NO: 26683
  REGION 1..585: note = hemagglutinin__InfluenzaB__AHZ36697

SEQ ID NO: 28245 - protein, 585 aa, synthetic construct
  REGION 1..585: note = hemagglutinin__InfluenzaB__AHZ36708
MKAIIVLLMVVTSNADRICTGITSSNSPHVVKTATQGEVNVTGVIPLTTTPTKSHFANLKGTETRGKLCPKCLNCTDLDVALGRPKCTGKIPSARVSILHEVRPVTSGCFPIMHDRTKIRQLPNLLRGYEHIRLSTHNVINAENAPGGPYKIGTSGSCLNVTNGNGFFATMAWAVPKNDKNKTATNPLTIEVPYICTEGEDQITVWGFHSDNETQMAKLYGDSKPQKFTSSANGVTTHYVSQIGGFPNQTEDGGLPQSGRIVVDYMVQKSGKTGTITYQRGILLPQKVWCTSGRSKVIKGSLPLIGEADCLHEKYGGLNKSKPYYTGEHAKAIGNCPIWVKTPLKLANGTKYRPPAKLLKERGFFGAIAGFLEGGWEGMIAGWHGYTSHGAHGVAVAADLKSTQEAINKITKNLNSLSELEVKNLQRLSGAMDELHNEILELDEKVDDLRADTISSQIELAVLLSNEGIINSEDEHLLALERKLKKMLGPSAVEIGNGCFETKHKCNQTCLDRIAAGTFDAGEFSLPTFDSLNITAASLNDDGLDNHTILLYYSTAASSLAVTLMIAIFVVYMVSRDNVSCSICL

SEQ ID NO: 28246 - protein, 585 aa, synthetic construct
  REGION 1..585: note = hemagglutinin__InfluenzaB__AHZ36719
MKAIIVLLMVVTSNADRICTGITSSNSPHVVKTATQGEVNVTGVIPLTTTPTKSHFANLKGTETRGKLCPKCLNCTDLDVALGRPKCTGKIPSARVSILHEVRPVTSGCFPIMHDRTKIRQLPNLLRGYEHIRLSTHNVINAENAPGGPYKIGTSGSCPNVTNGNGFFATMAWAVPKNDKNKTATNPLTIEVPYVCTEGEDQITVWGFHSDNETQMAKLYGDSKPQKFTSSANGVTTHYVSQIGGFPNQTEDGGLPQSGRIVVDYMVQKSGKTGTITYQRGILLPQKVWCASGRSKVIKGSLPLIGEADCLHEKYGGLNKSKPYYTGEHAKAIGNCPIWVKTPLKLANGTKYRPPAKLLKERGFFGAIAGFLEGGWEGMIAGWHGYTSHGAHGVAVAADLKSTQEAINKITKNLNSLSELEVKNLQRLSGAMDELHNEILELDEKVDDLRADTISSQIELAVLLSNEGIINSEDEHLLALERKLKKMLGPSAVEIGNGCFETKHKCNQTCLDRIAAGTFDAGEFSLPTFDSLNITAASLNDDGLDNHTILLYYSTAASSLAVTLMIAIFVVYMVSRDNVSCSICL

SEQ ID NO: 28247 - protein, 585 aa, synthetic construct; identical to SEQ ID NO: 26683
  REGION 1..585: note = hemagglutinin__InfluenzaB__AHZ36730

SEQ ID NO: 28248 - protein, 585 aa, synthetic construct; identical to SEQ ID NO: 26683
  REGION 1..585: note = hemagglutinin__InfluenzaB__AHZ36752

SEQ ID NO: 28249 - protein, 585 aa, synthetic construct; identical to SEQ ID NO: 26645
  REGION 1..585: note = hemagglutinin__InfluenzaB__AHZ36763

SEQ ID NO: 28250 - protein, 585 aa, synthetic construct
  REGION 1..585: note = hemagglutinin__InfluenzaB__AHZ36774
MKAIIVLLMVVTSNADRICTGITSSNSPHVVKTATQGEVNVTGVIPLTTTPTKSHFANLKGTETRGKLCPKCPNCTDLDVALGRPKCTGKIPSARVSILHEVRPVTSGCFPIMHDRTKIRQLPNLLRGYEHIRLSTHNVINAESAPGGPYKIGTSGSCPNVTNGNGFFATMAWAVPKNDKNKTATDPLTIEVPYICTEEEDQITVWGFHSDNETQMAKLYGDSKPQKFTSSANGVTTHYVSQIGGFPNQTEDGGLPQSGRIVVDYMVQKSGKTGTITYQRGILLPQKVWCASGRSKVIKGSLPLIGEADCLHEKYGGLNKSKPYYTGEHAKAIGNCPIWVKTPLKLANGTKYRPPAKLLKERGFFGAIAGFLEGGWEGMIAGWHGYTSHGAHGVAVAADLKSTQEAINKVTKNLNSLSELEVKNLQRLSGAMDELHNEILELDEKVDDLRADTISSQIELAVLLSNEGIINSEDEHLLALERKLKKMLGPSAVEIGNGCFETKHKCNQTCLDRIAAGTFDAGEFSLPTFDSLNITAASLNDDGLDNHTILLYYSTAASSLAVTLMIAIFVVYMVSRDNVSCSICL

SEQ ID NO: 28251 - protein, 585 aa, synthetic construct; identical to SEQ ID NO: 28159
  REGION 1..585: note = hemagglutinin__InfluenzaB__AHZ36785

SEQ ID NO: 28252 - protein, 585 aa, synthetic construct; identical to SEQ ID NO: 28159
  REGION 1..585: note = hemagglutinin__InfluenzaB__AHZ36796

SEQ ID NO: 28253 - protein, 584 aa, synthetic construct
  REGION 1..584: note = hemagglutinin__InfluenzaB__AHZ36807
MKAIIVLLMVVTSNADRICTGITSSNSPHVVKTATQGEVNVTGVIPLTTTPTKSYFANLKGTKTRGKLCPDCLNCTDLDVALGRPMCVGTTPSAKASILHEVRPVTSGCFPIMHDRTKIRQLANLLRGYENIRLSTQNVIDAEKAPGGPYRLGTSGSCPNATSKSGFFATMAWAVPKDNNKNATNPLTVEVPYICAEGEDQITVWGFHSDNKTQMKNLYGDSNPQKFTSSANGVTTHYVSQIGGFPDQTEDGGLPQSGRIVVDYMMQKPEKTGTIVYQRGVLLPQKVWCASGRSKVIKGSLPLIGEADCLHEKYGGLNKSKPYYTGEHAKAIGNCPIWVKTPLKLANGTKYRPPAKLLKERGFFGAIAGFLEGGWEGMIAGWHGYTSHGAHGVAVAADLKSTQEAINKITKNLNSLSELEVKNLQRLSGAMDELHNEILELDEKVDDLRADTISSQIELAVLLSNEGIINSEDEHLLALERKLKKMLGPSAVDIGNGCFETKHKCNQTCLDRIAAGTFNAGEFSLPTFDSLNITAASLNDDGLDNHTILLYYSTAASSLAVTLMLAIFIVYMVSRDNVSCSICL

SEQ ID NO: 28254 - protein, 585 aa, synthetic construct; identical to SEQ ID NO: 26683
  REGION 1..585: note = hemagglutinin__InfluenzaB__AHZ36818

SEQ ID NO: 28255 - protein, 585 aa, synthetic construct; identical to SEQ ID NO: 26645
  REGION 1..585: note = hemagglutinin__InfluenzaB__AHZ36829

SEQ ID NO: 28256 - protein, 585 aa, synthetic construct; identical to SEQ ID NO: 26645
  REGION 1..585: note = hemagglutinin__InfluenzaB__AHZ36840

SEQ ID NO: 28257 - protein, 585 aa, synthetic construct; identical to SEQ ID NO: 28159
  REGION 1..585: note = hemagglutinin__InfluenzaB__AHZ36851

SEQ ID NO: 28258 - protein, 585 aa, synthetic construct; identical to SEQ ID NO: 26683
  REGION 1..585: note = hemagglutinin__InfluenzaB__AHZ36862

SEQ ID NO: 28259 - protein, 585 aa, synthetic construct; identical to SEQ ID NO: 26645
  REGION 1..585: note = hemagglutinin__InfluenzaB__AHZ36873

SEQ ID NO: 28260 - protein, 585 aa, synthetic construct
  REGION 1..585: note = hemagglutinin__InfluenzaB__AHZ36884
MKAIIVLLMVVTSNADRICTGITSSNSPHIVKTATQGEVNVTGVIPLTTTPTKSHFANLKGTETRGKLCPKCLNCTDLDVALGRPKCTGKIPSARVSILHEVRPVTSGCFPIMHDRTKIRQLPNLLRGYEHIRLSTHNVINAENAPGGPYKIGTSGSCPNITNGNGFFETMAWAVPKNDKNKTATNPLTIEVPYICTEGEDQITVWGFHSDNETQMAKLYGDSKPQKFTSSANGVTTHYVSQIGGFPNQTEDGGLPQSGRIVVDYMVQKSGKTGTITYQRGILLPQKVWCASGRSKVIKGSLPLIGEADCLHEKYGGLNKSKPYYTGEHAKAIGNCPIWVKTPLKLANGTKYRPPAKLLKERGFFGAIAGFLEGGWEGMIAGWHGYTSHGAHGVAVAADLKSTQEAINKITKNLNSLSELEVKNLQRLSGAMDELHNEILELDEKVDDLRADTISSQIELAVLLSNEGIINSEDEHLLALERKLKKMLGPSAVEIGNGCFETKHKCNQTCLDRIAAGTFDAGEFSLPTFDSLNITAASLNDDGLDNHTILLYYSTAASSLAVTLMIAIFVVYMVSRDNVSCSICL

SEQ ID NO: 28261 - protein, 585 aa, synthetic construct; identical to SEQ ID NO: 26683
  REGION 1..585: note = hemagglutinin__InfluenzaB__AHZ36895

SEQ ID NO: 28262 - protein, 585 aa, synthetic construct; identical to SEQ ID NO: 26683
  REGION 1..585: note = hemagglutinin__InfluenzaB__AHZ36906

SEQ ID NO: 28263 - protein, 585 aa, synthetic construct
  REGION 1..585: note = hemagglutinin__InfluenzaB__AHZ36928
MKAIIVLLMVVTSNADRICTGITSSNSPHVVKTATQGEVNVTGVIPLTTTPTKSHFANLKGTKTRGKLCPKCLNCTDLDVALGRPKCTGKIPSARVSILHEVRPVTSGCFPIMHDRTKIRQLPNLLRGYEHIRLSTHNVINAENAPGGPYKIGTSGSCLNVTNGNGFFATMAWAVPKNDKNKTATNPLTIEVPYICTEGEDQITVWGFHSDNETQMAKLYGDSKPQKFTSSANGVTTHYVSQIGGFPNQTEDGGLPQSGRIVVDYMVQKSGKTGTITYQRGILLPQKVWCASGRSKVIKGSLPLIGEADCLHEKYGGLNKSKPYYTGEHAKAIGNCPIWVKTPLKLANGTKYRPPAKLLKERGFFGAIAGFLEGGWEGMIAGWHGYTSHGAHGVAVAADLKSTQEAINKITKNLNSLSELEVKNLQRLSGAMDELHNEILELDEKVDDLRADTISSQIELAVLLSNEGIINSEDEHLLALERKLKKMLGPSAVEIGNGCFETKHKCNQTCLDRIAAGTFDAGEFSLPTFDSLNITAASLNDDGLDNHTILLYYSTAASSLAVTLMIAIFVVYMVSRDNVSCSICL

SEQ ID NO: 28264 - protein, 585 aa, synthetic construct; identical to SEQ ID NO: 28159
  REGION 1..585: note = hemagglutinin__InfluenzaB__AHZ36939

SEQ ID NO: 28265 - protein, 585 aa, synthetic construct
  REGION 1..585: note = hemagglutinin__InfluenzaB__AHZ36950
MKAIIVLLMVVTSNADRICTGITSSNSPHIVKTATQGEVNVTGVIPLTTTPTKSHFANLKGTETRGKLCPKCLNCTDLDVALGRPKCTGKIPSARVSILHEVRPITSGCFPIMHDRTKIRQLPNLLRGYEHIRLSTHNVINAENAPGGPYKIGTSGSCPNITNGNGFFATMAWAVPKNDKNKTATNPLTIEVPYICTEGEDQITVWGFHSDNETQMAKLYGDSKPQKFTSSANGVTTHYVSQIGGFPNQTEDGGLPQSGRIVVDYMVQKSGKTGTITYQRGILLPQKVWCASGRSKVIKGSLPLIGEADCLHEKYGGLNKSKPYYTGEHAKAIGNCPIWVKTPLKLANGTKYRPPAKLLKERGFFGAIAGFLEGGWEGMIAGWHGYTSHGAHGVAVAADLKSTQEAINKITKNLNSLSELEVKNLQRLSGAMDELHNEILELDEKVDDLRADTISSQIELAVLLSNEGIINSEDEHLLALERKLKKMLGPSAVEIGNGCFETKHKCNQTCLDRIAAGTFDAGEFSLPTFDSLNITAASLNDDGLDNHTILLYYSTAASSLAVTLMIAIFVVYMVSRDNVSCSICL

SEQ ID NO: 28266 - protein, 585 aa, synthetic construct
  REGION 1..585: note = hemagglutinin__InfluenzaB__AHZ36961
MKAIIVLLMVVTSNADRICTGITSSNSPHVVKTATQGEVNVTGVIPLTTTPTKSHFANLKGTETRGKLCPKCLNCTDLDVALGRPKCTGKIPSARVSILHEVRPVTSGCFPIMHDRTKIRQLPNLLRGYEHIRLSTHNVINAENAPGGPYKIGTSGSCPNVTNGNGFFATMAWAVPKNDKNKTATNPLTIEVPYICTEGEDQITVWGFHSDNETQMAKLYGDSKPQKFTSSANGVTTHYVSQIGGFPNQTEDGGLPQSGRIVVDYMVQKSGKTGTITYQRGILLPQKVWCASGGSKVIKGSLPLIGEADCLHEKYGGLNKSKPYYTGEHAKAIGNCPIWVKTPLKLANGTKYRPPAKLLKERGFFGAIAGFLEGGWEGMIAGWHGYTSHGAHGVAVAADLKSTQEAINKITKNLNSLSELEVKNLQRLSGAMDELHNEILELDEKVDDLRADTISSQIELAVLLSNEGIINSEDEHLLALERKLKKMLGPSAVEIGNGCFETKHKCNQTCLDRIAAGTFDAGEFSLPTFDSLNITAASLNDDGLDNHTILLYYSTAASSLAVTLMIAIFVVYMVSRDNVSCSICL

SEQ ID NO: 28267 - protein, 585 aa, synthetic construct; identical to SEQ ID NO: 26683
  REGION 1..585: note = hemagglutinin__InfluenzaB__AHZ36972

SEQ ID NO: 28268 - protein, 585 aa, synthetic construct
  REGION 1..585: note = hemagglutinin__InfluenzaB__AHZ36983
MKAIIVLLMVVTSNADRICTGITSSNSPHIVKTATQGEVNVTGVIPLTTTPTKSHFANLKGTETRGKLCPKCLNCTDLDVALGRPKCTGKIPSARVSILHEVRPVTSGCFPIMHDRTKIRQLPNLLRGYEHIRLSTHNVINAENAPGGPYKIGTSGSCPNITNGNGFFATMAWAVPKNDKNKTATNPLTIEVPYICTEGEDQITVWGFHSDNETQMAKLYGDSKPQKFTSSANGVTAHYVSQIGGFPNQTEDGGLPQSGRIVVDYMVQKSGKTGTITYQRGILLPQKVWCASGRSKVIKGSLPLIGEADCLHEKYGGLNKSKPYYTGEHAKAIGNCPIWVKTPLKLANGTKYRPPAKLLKERGFFGAIAGFLEGGWEGMIAGWHGYTSHGAHGVAVAADLKSTQEAINKITKNLNSLSELEVKNLQRLSGAMDELHNEILELDEKVDDLRADTISSQIELAVLLSNEGIINSEDEHLLALERKLKKMLGPSAVEIGNGCFETKHKCNQTCLDRIAAGTFDAGEFSLPTFDSLNITAASLNDDGLDNHTILLYYSTAASSLAVTLMIAIFVVYMVSRDNVSCSICL

SEQ ID NO: 28269 - protein, 585 aa, synthetic construct
  REGION 1..585: note = hemagglutinin__InfluenzaB__AHZ37005
MKAIIVLLMVVTSNADRICTGITSSNSPHVVKTATQGEVNVTGVIPLTTTPTKSHFANLKGTETRGKLCPKCPNCTDLDVALGRPKCTGKIPSARVSILHEVRPVTSGCFPIMHDRTKIRQLPNLLRGYEHIRLSTHNVINAESAPGGPYKIGTSGSCPNVTNGNGFFATMAWAVPKNDKNKTATDPLTIEVPYICTEEEDQITVWGFHSDNETQMAKLYGDSKPQKFTSSANGVTTHYVSQIGGFPNQTEDGGLPQSGRIVVDYMVQKSGKTGTITYQRGILLPQKVWCASGRSKVIKGSLPLIGEADCLHEKYGGLNKSKPYYTGEHAKAIGNCPIWVKTPLKLANGTKYRPPAKLLKERGFFGAIAGFLEGGWEGMIAGWHGYTSHGAHGVAVAADLKSTQEAINKITKNLNSLSELEVKNLQRLSGAMDELHNEILELDEKVDDLRADTISSQIELAVLLSNEGIINSEDEHLLALERKLKKMLGPSAVEIGNGCFETKHKCNQTCLDRIAAGTFDAGEFSLPTFDSLNITAASLNDDGLDNHTILLYYSTAASSLAVTLMIAIFVVYMVSRDNVSCSICL

SEQ ID NO: 28270 - protein, 585 aa, synthetic construct; identical to SEQ ID NO: 26645
  REGION 1..585: note = hemagglutinin__InfluenzaB__AHZ37016

SEQ ID NO: 28271 - protein, 585 aa, synthetic construct
  REGION 1..585: note = hemagglutinin__InfluenzaB__AHZ37027
MKAIIVLLMVVTSNADRICTGITSSNSPHVVKTATQGEVNVTGVIPLTTTPTKSHFANLKGTETRGKLCPKCLNCTDLDVALGRPKCTGKIPSARVSIIHEVRPVTSGCFPIMHDRTKIRQLPNLLRGYEHIRLSTHNVINAENAPGGPYKIGTSGSCLNVTNGNGFFATMAWAVPKNDKNKTATNPLTIEVPYICTEGEDQITVWGFHSDNETQMAKLYGDSKPQKFTSSANGVTTHYVSQIGGFPNQTEDGGLPQSGRIVVDYMVQKSGKTGTITYQRGILLPQKVWCASGRSKVIKGSLPLIGEADCLHEKYGGLNKSKPYYTGEHAKAIGNCPIWVKTPLKLANGTKYRPPAKLLKERGFFGAIAGFLEGGWEGMIAGWHGYTSHGAHGVAVAADLKSTQEAINKITKNLNSLSELEVKNLQRLSGAMDELHNEILELDEKVDDLRADTISSQIELAVLLSNEGIINSEDEHLLALERKLKKMLGPSAVEIGNGCFETKHKCNQTCLDRIAAGTFDAGEFSLPTFDSLNITAASLNDDGLDNHTILLYYSTAASSLAVTLMIAIFVVYMVSRDNVSCSICL

SEQ ID NO: 28272 - protein, 585 aa, synthetic construct; identical to SEQ ID NO: 26645
  REGION 1..585: note = hemagglutinin__InfluenzaB__AHZ37038

SEQ ID NO: 28273 - protein, 585 aa, synthetic construct; identical to SEQ ID NO: 28159
  REGION 1..585: note = hemagglutinin__InfluenzaB__AHZ37049

SEQ ID NO: 28274 - protein, 585 aa, synthetic construct; identical to SEQ ID NO: 28159
  REGION 1..585: note = hemagglutinin__InfluenzaB__AHZ37060

SEQ ID NO: 28275 - protein, 585 aa, synthetic construct; identical to SEQ ID NO: 26645
  REGION 1..585: note = hemagglutinin__InfluenzaB__AHZ37071

SEQ ID NO: 28276 - protein, 585 aa, synthetic construct; identical to SEQ ID NO: 26645
  REGION 1..585: note = hemagglutinin__InfluenzaB__AHZ37082

SEQ ID NO: 28277 - protein, 585 aa, synthetic construct; identical to SEQ ID NO: 28159
  REGION 1..585: note = hemagglutinin__InfluenzaB__AHZ37093

SEQ ID NO: 28278 - protein, 585 aa, synthetic construct
  REGION 1..585: note = hemagglutinin__InfluenzaB__AHZ37104
MKAIIVLLMVVTSNADRICTGITSSNSPHVVKTATQGEVNVTGVIPLTTTPTKSHFANLKGTETRGKLCPKCLNCTDLDVALGRPKCTGKIPSARVSILHEVRPVTSGCFPIMHDRTKIRQLPNLLRGYEHIRLSTHNVINAENAPGGPYKIGTSGSCPNVTNGNGFFATMAWAVPKNDKNKTATNPLTIEVPYICTEGEDQITVWGFHSDNETQMAKLYGDSKPQKFTSSANGVTTHYVSQIGGFPNQTEDGGLPQSGRIVVDHMVQKSGKTGTITYQRGILLPQKVWCASGRSKVIKGSLPLIGEADCLHEKYGGLNKSKPYYTGEHAKAIGNCPIWVKTPLKLANGTKYRPPAKLLKERGFFGAIAGFLEGGWEGMIAGWHGYTSHGAHGVAVAADLKSTQEAINKITKNLNSLSELEVKNLQRLSGAMDELHNEILELDEKVDDLRADTISSQIELAVLLSNEGIINSEDEHLLALERKLKKMLGPSAVEIGNGCFETKHKCNQTCLDRIAAGTFDAGEFSLPTFDSLNITAASLNDDGLDNHTILLYYSTAASSLAVTLMIAIFVVYMVSRDNVSCSICL

SEQ ID NO: 28279 - protein, 585 aa, synthetic construct
  REGION 1..585: note = hemagglutinin__InfluenzaB__AHZ41770
MKAIIVLLMVVTSNADRICTGITSSNSPHIVKTATQGEVNVTGVIPLTTTPTKSHFANLKGTETRGKLCPKCLNCTDLDVALGRPKCTGKIPSARVSILHEVRPVTSGCFPIMHDRTKIRQLPNLLRGYEHIRLSTHNVINAENAPGGPYKIGTSGSCPNITNGNGFFATMAWAVPKNDKNKTAINPLTIEVPYICTEGEDQITVWGFHSDNETQMAKLYGDSEPQKFTSSANGVTTHYVSQIGGFPNQTEDGGLPQSGRIVVDYMVQKSGKTGTITYQRGILLPQKVWCASGRSKVIKGSLPLIGEADCLHEKYGGLNKSKPYYTGEHAKAIGNCPIWVKTPLKLANGTKYRPPAKLLKERGFFGAIAGFLEGGWEGMIAGWHGYTSHGAHGVAVAADLKSTQEAINKITKNLNSLSELEVKNLQRLSGAMDELHNEILELDEKVDDLRADTISSQIELAVLLSNEGIINSEDEHLLALERKLKKMLGPSAVEIGNGCFETKHKCNQTCLDRIAAGTFDAGEFSLPTFDSLNITAASLNDDGLDNHTILLYYSTAASSLAVTLMIAIFVVYMVSRDNVSCSICL

SEQ ID NO: 28280 - protein, 585 aa, synthetic construct; identical to SEQ ID NO: 26683
  REGION 1..585: note = hemagglutinin__InfluenzaB__AHZ41781

SEQ ID NO: 28281 - protein, 585 aa, synthetic construct; identical to SEQ ID NO: 26683
  REGION 1..585: note = hemagglutinin__InfluenzaB__AHZ41792

SEQ ID NO: 28282 - protein, 585 aa, synthetic construct; identical to SEQ ID NO: 26683
  REGION 1..585: note = hemagglutinin__InfluenzaB__AHZ41803

SEQ ID NO: 28283 - protein, 585 aa, synthetic construct
  REGION 1..585: note = hemagglutinin__InfluenzaB__AHZ41814
MKAIIVLLMVVTSNADRICTGITSSNSPHVVKTATQGEVNVTGVIPLTTTPTKSHFANLKGTETRGKLCPKCPNCTDLDVALGRPKCTGKIPSARVSILHEVRPVTSGCFPIMHDRTKIRQLPNLLRGYEHIRLSTHNVINAENAPGGPYKIGTSGSCPNVTNGNGFFATMAWAVPKNDKNKTATNPLTIEVPYICTEGEDQITVWGFHSDNETQMAKLYGDSKPQKFTSSANGVTTHYVSQIGGFPNQTEDGGLPQSGRIVVDYMVQKSGKTGTVTYQRGILLPQKVWCASGRSKVIKGSLPLIGEADCLHEKYGGLNKSKPYYTGEHAKAIGNCPIWVKTPLKLANGTKYRPPAKLLKERGFFGAIAGFLEGGWEGMIAGWHGYTSHGAHGVAVAADLKSTQEAINKITKNLNSLSELEVKNLQRLSGAMDELHNEILELDEKVDDLRADTISSQIELAVLLSNEGIINSEDEHLLALERKLKKMLGPSAVEIGNGCFETKHKCNQTCLDRIAAGTFDAGEFSLPTFDSLNITAASLNDDGLDNHTILLYYSTAASSLAVTLMIAIFVVYMVSRDNVSCSICL

SEQ ID NO: 28284 - protein, 585 aa, synthetic construct; identical to SEQ ID NO: 26683
  REGION 1..585: note = hemagglutinin__InfluenzaB__AHZ41825

SEQ ID NO: 28285 - protein, 585 aa, synthetic construct; identical to SEQ ID NO: 26683
  REGION 1..585: note = hemagglutinin__InfluenzaB__AHZ41836

SEQ ID NO: 28286 - protein, 585 aa, synthetic construct; identical to SEQ ID NO: 26683
  REGION 1..585: note = hemagglutinin__InfluenzaB__AHZ41847

SEQ ID NO: 28287 - protein, 584 aa, synthetic construct; identical to SEQ ID NO: 28131
  REGION 1..584: note = hemagglutinin__InfluenzaB__AHZ41858

SEQ ID NO: 28288 - protein, 585 aa, synthetic construct; identical to SEQ ID NO: 28156
  REGION 1..585: note = hemagglutinin__InfluenzaB__AHZ41869

SEQ ID NO: 28289 - protein, 584 aa, synthetic construct
  REGION 1..584: note = hemagglutinin__InfluenzaB__AIC73844
MKAIIVLLMVVTSNADRICTGITSSNSPHVVKTATQGEVNVTGVIPLTTTPTKSYFANLKGTRTRGKLCPDCLNCTDLDVALGRPMCVGTTPSAKASILHEVRPVTSGCFPIMHDRTKIRQLPNLLRGYEKIRLSTQNVIDAEKAPGGPYRLGTSGSCPNATSKIGFFATMAWAVPKDNYKNATNPQTVEVPYICTEGEDQITVWGFHSDNKTQMKSLYGDSNPQKFTSSANGVTTHYVSQIGDFPDQTEDGGLPQSGRIVVDYMMQKPGKTGTIVYQRGVLLPQKVWCASGRSKVIKGSLPLIGEADCLHEEYGGLNKSKPYYTGKHAKAIGNCPIWVKTPLKLANGTKYRPPAKLLKERGFFGAIAGFLEGGWEGMIAGWHGYTSHGAHGVAVAADLKSTQEAINKITKNLNSLSELEVKNLQRLSGAMDELHNEILELDEKVDDLRADTISSQIELAVLLSNEGIINSEDEHLLALERKLKKMLGPSAVDIGNGCFETKHKCNQTCLDRIAAGTFNAGEFSLPTFDSLNITAASLNDDGLDNHTILLYYSTAASSLAVTLMLAIFIVYMVSRDNVSCSICL

SEQ ID NO: 28290 - protein, 585 aa, synthetic construct; identical to SEQ ID NO: 27865
  REGION 1..585: note = hemagglutinin__InfluenzaB__AIC73845

SEQ ID NO: 28291 - protein, 585 aa, synthetic construct; identical to SEQ ID NO: 27865
  REGION 1..585: note = hemagglutinin__InfluenzaB__AIC73846

SEQ ID NO: 28292 - protein, 585 aa, synthetic construct
  REGION 1..585: note = hemagglutinin__InfluenzaB__AIC73847
MKAIIVLLMVVTSNADRICTGITSSNSPHVVKTATQGEVNVTGVIPLTTTPTKSHFANLKGTETRGKLCPKCLDCTDLDVALGRPKCTGKIPSARVSILHEVRPVTSGCFPIMHDRTKIRQLPNLLRGYEHIRLSTHNVINAEDAPGGPYKIGTSGSCPNVTNGNGFFATMAWAVPKNDKNKTATNPLTIEVPYICTEGEDQITVWGFHSDNETQMAKLYGDSKPQKFTSSANGVTTHYVSQIGGFPNQTEDGGLPQSGRIVVDYMVQKSGKTGTITYQRGILLPQKVWCASGRSKVIKGSLPLIGEADCLHEKYGGLNKSKPYYTGEHAKAIGNCPIWVKTPLKLANGTKYRPPAKLLKERGFFGAIAGFLEGGWEGMIAGWHGYTSHGAHGVAVAADLKSTQEAINKITKNLNSLSELEVKNLQRLSGAMDELHNEILELDEKVDDLRADTISSQIELAVLLSNEGIINSEDEHLLALERKLKKMLGPSAVEIGNGCFETKHKCNQTCLDRIAAGTFDAGEFSLPTFDSLNITAASLNDDGLDNHTILLYYSTAASSLAVTLMIAIFVVYMVSRDNVSCSICL

SEQ ID NO: 28293 - protein, 585 aa, synthetic construct; identical to SEQ ID NO: 27865
  REGION 1..585: note = hemagglutinin__InfluenzaB__AIC73848

SEQ ID NO: 28294 - protein, 584 aa, synthetic construct; identical to SEQ ID NO: 28129
  REGION 1..584: note = hemagglutinin__InfluenzaB__AIC73849

SEQ ID NO: 28295 - protein, 585 aa, synthetic construct
  REGION 1..585: note = hemagglutinin__InfluenzaB__AIC73850
MKAIIVLLMVATSNADRICTGITSSNSPHVVKTATQGEVNVTGVIPLTTTPTKSHFANLKGTETRGKLCPKCLNCTDLDVALGRPKCTGKIPSARVSILHEVRPVTSGCFPIMHDRTKIRQLPNLLRGYEHIRLSTHNVINAEDAPGGPYKIGTSGSCPNVTNGNGFFATMAWAVPKNDKNKTATNPLTIEVPYICTEGEDQITVWGFHSDNETQMAKLYGDSKPQKFTSSANGVTTHYVSQIGGFPNQTEDGGLPQSGRIVVDYMVQKSGKTGTITYQRGILLPQKVWCASGRSKVIKGSLPLIGEADCLHEKYGGLNKSKPYYTGEHAKAIGNCPIWVKTPLKLANGTKYRPPAKLLKERGFFGAIAGFLEGGWEGMIAGWHGYTSHGAHGVAVAADLKSTQEAINKITKNLNSLSELEVKNLQRLSGAMDELHNEILELDEKVDDLRADTISSQIELAVLLSNEGIINSEDEHLLALERKLKKMLGPSAVEIGNGCFETKHKCNQTCLDRIAAGTFDAGEFSLPTFDSLNITAASLNDDGLDNHTILLYYSTAASSLAVTLMIAIFVVYMVSRDNVSCSICL

SEQ ID NO: 28296 - protein, 585 aa, synthetic construct; identical to SEQ ID NO: 26887
  REGION 1..585: note = hemagglutinin__InfluenzaB__AIC73851

SEQ ID NO: 28297 - protein, 584 aa, synthetic construct; identical to SEQ ID NO: 28289
  REGION 1..584: note = hemagglutinin__InfluenzaB__AIC73852

SEQ ID NO: 28298 - protein, 584 aa, synthetic construct; identical to SEQ ID NO: 28289
  REGION 1..584: note = hemagglutinin__InfluenzaB__AIC73853

SEQ ID NO: 28299 - protein, 585 aa, synthetic construct
  REGION 1..585: note = hemagglutinin__InfluenzaB__AIC73855
MKAIIVLLMVVTSNADRICTGITSSNSPHVVKTATQGEVNVTGVIPLTTTPTKSHFANLKGTETRGKLCPKCLNCTDLDVALGRPKCTGKIPSARVSILHEVRPVTSGCFPIMHDRTKIRQLPNLLRGYEHIRLSTHNVINAENAPGGPYIIGTSGSCPNVTNGNGFFATMAWAVPKNDKNKTATNPLTIEVPYICTEGEDQITVWGFHSDNETQMAKLYGDSNPQKFTSSANGVTTHYVSQIGGFPNQTEDGGLPQSGRIVVDYMVQKSGKTGTITYQRGILLPQKVWCASGRSKVIKGSLPLIGEADCLHEKYGGLNKSKPYYTGEHAKAIGNCPIWVKTPLKLANGTKYRPPAKLLKERGFFGAIAGFLEGGWEGMIAGWHGYTSHGAHGVAVAADLKSTQEAINKITKNLNSLSELEVKNLQRLSGAMDELHNEILELDEKVDDLRADTISSQIELAVLLSNEGIINSEDEHLLALERKLKKMLGPSAVEIGNGCFETKHKCNQTCLDRIAAGTFDAGEFSLPTFDSLNITAASLNDDGLDNHTILLYYSTAASSLAVTLMIAIFVVYMVSRDNVSCSICL

SEQ ID NO: 28300 - protein, 585 aa, synthetic construct; identical to SEQ ID NO: 27865
  REGION 1..585: note = hemagglutinin__InfluenzaB__AIC73856

SEQ ID NO: 28301 - protein, 585 aa, synthetic construct; identical to SEQ ID NO: 27865
  REGION 1..585: note = hemagglutinin__InfluenzaB__AIC73857

SEQ ID NO: 28302 - protein, 585 aa, synthetic construct; identical to SEQ ID NO: 27865
  REGION 1..585: note = hemagglutinin__InfluenzaB__AIC73859

SEQ ID NO: 28303 - protein, 585 aa, synthetic construct
  REGION 1..585: note = hemagglutinin__InfluenzaB__AIC73860
MKAIIVLLMVVTSNADRICTGITSSNSPHVVKTATQGEVNVTGVIPLTTTPTKSHFANLKGTETRGKLCPKCLNCTDLDVALGRPKCTGKIPSARVSILHEVRPVTSGCFPIMHDRTKIRQLPNLLRGYEHIRLSTHNVINAENAPGGPYKIGTSGSCPNVTNGNGFFATMAWAVPKNDKNKTATNPLTIEVPYICTEGEDQITVWGFHSDNETQMAKLYGDSNPQKFTSSANGVTTHYVSQIGGFPNQTEDGGLPQSGRIVVDYMVQKSGKTGTITYQRGILLPQKVWCASGRSKVIKGSLPLIGEADCLHEKYGGLNKSKPYYTGEHAKAIGNCPIWVKTPLKLANGTKYRPPAKLLKERGFFGAIAGFLEGGWEGMIAGWHGYTSHGAHGVAVAADLKSTQEAINKITKNLNSLSELEVKNLQRLSGAMDELHNEILELDEKVDDLRADTMSSQIELAVLLSNEGIINSEDEHLLALERKLKKMLGPSAVEIGNGCFETKHKCNQTCLDRIAAGTFDAGEFSLPTFDSLNITAASLNDDGLDNHTILLYYSTAASSLAVTLMIAIFVVYMVSRDNVSCSICL

SEQ ID NO: 28304 - protein, 585 aa, synthetic construct
  REGION 1..585: note = hemagglutinin__InfluenzaB__AIC73861
MKAIIVLLMVVTSNADRICTGITSSNSPHVVKTATQGEVNVTGVIPLTTTPTKSHFANLKGTETRGKLCPKCLNCTDLDVALGRPKCTGKIPSARVSILHEVRPVTSGCFPIMHDRTKIRQLPNLLRGYEHIRLSTHNVINTENAPGGPYKIGTSGSCPNVTNGNGFFATMAWAVPKNDKNKTATNPLTIEVPYICTEGEDQITVWGFHSDNETQMAKLYGDSNPQKFTSSANGVTIHYVSQIGGFPNQTEDGGLPQSGRIVVDYMVQKSGKTGTITYQRGILLPQKVWCASGRSKVIKGSLPLIGEADCLHEKYGGLNKSKPYYTGEHAKAIGNCPIWVKTPLKLANGTKYRPPAKLLKERGFFGAIAGFLEGGWEGMIAGWHGYTSHGAHGVAVAADLKSTQEAINKITKNLNSLSELEVKNLQRLSGAMDELHNEILELDEKVDDLRADTISSQIELAVLLSNEGIINSEDEHLLALERKLKKMLGPSAVEIGNGCFETKHKCNQTCLDRIAAGTFDAGEFSLPTFDSLNITAASLNDDGLDNHTILLYYSTAASSLAVTLMIAIFVVYMVSRDNVSCSICL

SEQ ID NO: 28305 - protein, 585 aa, synthetic construct; identical to SEQ ID NO: 28303
  REGION 1..585: note = hemagglutinin__InfluenzaB__AIC73862

SEQ ID NO: 28306 - protein, 585 aa, synthetic construct; identical to SEQ ID NO: 28303
  REGION 1..585: note = hemagglutinin__InfluenzaB__AIC73863

SEQ ID NO: 28307 - protein, 585 aa, synthetic construct; identical to SEQ ID NO: 28303
  REGION 1..585: note = hemagglutinin__InfluenzaB__AIC73864

SEQ ID NO: 28308 - protein, 584 aa, synthetic construct
  REGION 1..584: note = hemagglutinin__InfluenzaB__AIC73865
MKAIIVLLMVVTSNADRICTGITSSNSPHVVKTATQGEVNVTGVIPLTTTPTKSYFANLKGTKTRGKLCPDCLNCTDLDVALGRPMCVGTTPSAKASILHEVRPVTSGCFPIMHDRTKIRQLANLLRGYENIRLSTQNVIDAEKAPGGPYRLGTSGSCPNATSKSGFFATMAWAVPKDNNKNATNPLTVEVPYICAEGEDQITVWGFHSDNKTQMKNLYGDSNPQKFTSSANGVTTHYVSQIGGFPDQREDGGLPQSGRIVVDYMMQKPGKTGTIVYQRGVLLPQKVWCASGRSKVIKGSLPLIGEADCLHEKYGGLNKSKPYYTGEHAKAIGNCPIWVKTPLKLANGTKYRPPAKLLKERGFFGAIAGFLEGGWEGMIAGWHGYTSHGAHGVAVAADLKSTQEAINKITKNLNSLSELEVKNLQRLSGAMDELHNEILELDEKVDDLRADTISSQIELAVLLSNEGIINSEDEHLLALERKLKKMLGPSAVDIGNGCFETKHKCNQTCLDRIAAGTFNAGEFSLPTFDSLNITAASLNDDGLDNHTILLYYSTAASSLAVTLMLAIFIVYMVSRDNVSCSICL

SEQ ID NO: 28309 - protein, 585 aa, synthetic construct
  REGION 1..585: note = hemagglutinin__InfluenzaB__AIC73867
MKAIIVLLMVVTSNADRICTGITSSNSPHVVKTATQGEVNVTGVIPLTTTPTKSHFANLKGTETRGKLCPKCLNCTDLDVALGRPKCTGKIPSARVSILHEVRPVTSGCFPIMHDRTKIRQLPNLLRGYEHIRLSTHNVIDAENAPGGPYKIGTSGSCPNVTNGNGFFATMAWAVPKNDKNKTATNPLTIEVPYICTEGEDQITVWGFHSDNETQMAKLYGDSNPQKFTSSANGVTTHYVSQIGGFPNQTEDGGLPQSGRIVVDYMVQKSGKTGTITYQRGILLPQKVWCASGRSKVIKGSLPLIGEADCLHEKYGGLNKSKPYYTGEHAKAIGNCPIWVKTPLKLANGTKYRPPAKLLKERGFFGAIAGFLEGGWEGMIAGWHGYTSHGAHGVAVAADLKSTQEAINKITKNLNSLSELEVKNLQRLSGAMDELHNEILELDEKVDDLRADTISSQIELAVLLSNEGIINSEDEHLLALERKLKKMLGPSAVEIGNGCFETKHKCNQTCLDRIAAGTFDAGEFSLPTFDSLNITAASLNDDGLDNHTILLYYSTAASSLAVTLMIAIFVVYMVSRDNVSCSICL

SEQ ID NO: 28310 - protein, 585 aa, synthetic construct; identical to SEQ ID NO: 26887
  REGION 1..585: note = hemagglutinin__InfluenzaB__AIC73868

SEQ ID NO: 28311 - protein, 585 aa, synthetic construct; identical to SEQ ID NO: 28303
  REGION 1..585: note = hemagglutinin__InfluenzaB__AIC73869

SEQ ID NO: 28312 - protein, 585 aa, synthetic construct; identical to SEQ ID NO: 28303
  REGION 1..585: note = hemagglutinin__InfluenzaB__AIC73870

SEQ ID NO: 28313 - protein, 585 aa, synthetic construct; identical to SEQ ID NO: 27865
  REGION 1..585: note = hemagglutinin__InfluenzaB__AIC73871

SEQ ID NO: 28314 - protein, 584 aa, synthetic construct; identical to SEQ ID NO: 28289
  REGION 1..584: note = hemagglutinin__InfluenzaB__AIC73872

SEQ ID NO: 28315 - protein, 584 aa, synthetic construct; identical to SEQ ID NO: 28129
  REGION 1..584: note = hemagglutinin__InfluenzaB__AIC73873

SEQ ID NO: 28316 - protein, 584 aa, synthetic construct; identical to SEQ ID NO: 28289
  REGION 1..584: note = hemagglutinin__InfluenzaB__AIC73874

SEQ ID NO: 28317 - protein, 584 aa, synthetic construct; identical to SEQ ID NO: 28308
  REGION 1..584: note = hemagglutinin__InfluenzaB__AIC73875

SEQ ID NO: 28318 - protein, 584 aa, synthetic construct
  REGION 1..584: note = hemagglutinin__InfluenzaB__AIC73876
MKAIIVLLMVVTSNADRICTGITSSNSPHVVKTATQGEVNVTGVIPLTTTPTKSYFANLKGTKTRGKLCPDCLNCTDLDVALGRPMCVGTTPSAKASILHEVRPVTSGCFPIMHDRTKIRQLANLLRGYENIRLSTQNVIDAEKAPGGPYRLGTSGSCPNATSKSGFFATMAWAVPKDNNKNATNPLTVEVPYICAEGEDQITVWGFHSDNKTQMKNLYGDSNPQKFTSSANGVTTHYVSQIGGFPDQREDGGLPQSGRIVVDYMMQKPGKTGTIVYQRGVLLPQKVWCASGRSKVIKGSLPLIGEADCLHEKYGGLNKSKPYYTGEHAKAIGNCPIWVKTPLKLANGTKYRPPAKLLKERGFFGAIAGFLEGGWEGMIAGWHGYTSHGAHGVAVAADLKSTQEAINKITKNLNSLSELEVKNLQRLSGAMDELHNEILELDEKVDDLRADTISSQIELAVLLSNEGIINSEDEHLLALERKLKKMLGPSAVDIGNGCFETKHKCNQTCLNRIAAGTFNAGEFSLPTFDSLNITAASLNDDGLDNHTILLYYSTAASSLAVTLMLAIFIVYMVSRDNVSCSICL

SEQ ID NO: 28319 - protein, 584 aa, synthetic construct; identical to SEQ ID NO: 28308
  REGION 1..584: note = hemagglutinin__InfluenzaB__AIC73877

SEQ ID NO: 28320 - protein, 584 aa, synthetic construct; identical to SEQ ID NO: 28308
  REGION 1..584: note = hemagglutinin__InfluenzaB__AIC73878

SEQ ID NO: 28321 - protein, 584 aa, synthetic construct; identical to SEQ ID NO: 28308
  REGION 1..584: note = hemagglutinin__InfluenzaB__AIC73879

SEQ ID NO: 28322 - protein, 584 aa, synthetic construct; identical to SEQ ID NO: 28308
  REGION 1..584: note = hemagglutinin__InfluenzaB__AIC73880

SEQ ID NO: 28323 - protein, 584 aa, synthetic construct; identical to SEQ ID NO: 28308
  REGION 1..584: note = hemagglutinin__InfluenzaB__AIC73881

SEQ ID NO: 28324 - protein, 584 aa, synthetic construct; identical to SEQ ID NO: 28308
  REGION 1..584: note = hemagglutinin__InfluenzaB__AIC73882

SEQ ID NO: 28325 - protein, 584 aa, synthetic construct; identical to SEQ ID NO: 28129
  REGION 1..584: note = hemagglutinin__InfluenzaB__AIC73883

SEQ ID NO: 28326 - protein, 584 aa, synthetic construct; identical to SEQ ID NO: 28308
  REGION 1..584: note = hemagglutinin__InfluenzaB__AIC73884

SEQ ID NO: 28327 - protein, 585 aa, synthetic construct
  REGION 1..585: note = hemagglutinin__InfluenzaB__AIC73885
MEAIIVLLMVVTSNADRICTGITSSNSPHVVKTATQGEVNVTGVIPLTTTPTKSHFANLKGTETRGKLCPKCLNCTDLDVALGRPKCTGKIPSARVSILHEVRPVTSGCFPIMHDRTKIRQLPNLLRGYEHIRLSTHNVINAEDAPGGPYKIGTSGSCPNVTNGNGFFATMAWAVPKNDKNKTATNPLTIEVPYICTEGEDQITVWGFHSDNETQMAKLYGDSKPQKFTSSANGVTTHYVSQIGGFPNQTEDGGLPQSGRIVVDYMVQKSGKTGTITYQRGILLPQKVWCASGRSKVIKGSLPLIGEADCLHEKYGGLNKSKPYYTGEHAKAIGNCPIWVKTPLKLANGTKYRPPAKLLKERGFFGAIAGFLEGGWEGMIAGWHGYTSHGAHGVAVAADLKSTQEAINKITKNLNSLSELEVKNLQRLSGAMDELHNEILELDEKVDDLRADTISSQIELAVLLSNEGIINSEDEHLLALERKLKKMLGPSAVEIGNGCFETKHKCNQTCLDRIAAGTFDAGEFSLPTFDSLNITAASLNDDGLDNHTILLYYSTAASSLAVTLMIAIFVVYMVSRDNVSCSICL

SEQ ID NO: 28328 - protein, 585 aa, synthetic construct; identical to SEQ ID NO: 27865
  REGION 1..585: note = hemagglutinin__InfluenzaB__AIC73886

SEQ ID NO: 28329 - protein, 585 aa, synthetic construct; identical to SEQ ID NO: 28309
  REGION 1..585: note = hemagglutinin__InfluenzaB__AIC73887

SEQ ID NO: 28330 - protein, 584 aa, synthetic construct; identical to SEQ ID NO: 28129
  REGION 1..584: note = hemagglutinin__InfluenzaB__AIC73888

SEQ ID NO: 28331 - protein, 584 aa, synthetic construct; identical to SEQ ID NO: 28289
  REGION 1..584: note = hemagglutinin__InfluenzaB__AIC73889

SEQ ID NO: 28332 - protein, 584 aa, synthetic construct; identical to SEQ ID NO: 28289
  REGION 1..584: note = hemagglutinin__InfluenzaB__AIC73890

SEQ ID NO: 28333 - protein, 585 aa, synthetic construct
  REGION 1..585: note = hemagglutinin__InfluenzaB__AIC73892
MKAIIVLLMVVTSNADRICTGITSSNSPHVVKTATQGEVNVTGVIPLTTTPTKSHFANLKGTETRGKLCPKCLNCTDLDVALGRPKCTGKIPSARVSILHEVRPVTSGCFPIMHDRTKIRQLPNLLRGYEHIRLSTHNVINAEDAPGGPYKIGTSGSCPNVTNGNGFFATMAWAVPKNDKNKTATNPLTIEVPYICTEGEDQITVWGFHSDNETQMAKLYGDSKPQKFTSSANGVTTHYVSQIGGFPNQTEDGGLPQSGRIVVDYMVQKSGKTGTITYQRGILLPQKVWCASGRSKVIKGSLPLIGEADCLHEKYGGLNKSKPYYTGEHAKAIGNCPIWVKTSLKLANGTKYRPPAKLLKERGFFGAIAGFLEGGWEGMIAGWHGYTSHGAHGVAVAADLKSTQEAINKITKNLNSLSELEVKNLQRLSGAMDELHNEILELDEKVDDLRADTISSQIELAVLLSNEGIINSEDEHLLALERKLKKMLGPSAVEIGNGCFETKHKCNQTCLDRIAAGTFDAGEFSLPTFDSLNITAASLNDDGLDNHTILLYYSTAASSLAVTLMIAIFVVYMVSRDNVSCSICL

SEQ ID NO: 28334 - protein, 584 aa, synthetic construct; identical to SEQ ID NO: 28129
  REGION 1..584: note = hemagglutinin__InfluenzaB__AIC73893

SEQ ID NO: 28335 - protein, 584 aa, synthetic construct; identical to SEQ ID NO: 28289
  REGION 1..584: note = hemagglutinin__InfluenzaB__AIC73894

SEQ ID NO: 28336 - protein, 584 aa, synthetic construct; identical to SEQ ID NO: 28289
  REGION 1..584: note = hemagglutinin__InfluenzaB__AIC73895

SEQ ID NO: 28337 - protein, 584 aa, synthetic construct; identical to SEQ ID NO: 28289
  REGION 1..584: note = hemagglutinin__InfluenzaB__AIC73896

SEQ ID NO: 28338 - protein, 584 aa, synthetic construct; identical to SEQ ID NO: 28289
  REGION 1..584: note = hemagglutinin__InfluenzaB__AIC73897

SEQ ID NO: 28339 - protein, 584 aa, synthetic construct; identical to SEQ ID NO: 28289
  REGION 1..584: note = hemagglutinin__InfluenzaB__AIC73898

SEQ ID NO: 28340 - protein, 584 aa, synthetic construct; identical to SEQ ID NO: 28289
  REGION 1..584: note = hemagglutinin__InfluenzaB__AIC73899

SEQ ID NO: 28341 - protein, 584 aa, synthetic construct; identical to SEQ ID NO: 28289
  REGION 1..584: note = hemagglutinin__InfluenzaB__AIC73900

SEQ ID NO: 28342 - protein, 584 aa, synthetic construct; identical to SEQ ID NO: 28289
  REGION 1..584: note = hemagglutinin__InfluenzaB__AIC73902

SEQ ID NO: 28343 - protein, 584 aa, synthetic construct
  REGION 1..584: note = hemagglutinin__InfluenzaB__AIC73903
MKAIIVLLMVVTSNADRICTGITSSNSPHVVKTATQGEVNVTGVIPLTTTPTKSYFANLKGTRTRGKLCPDCLNCTDLDVALGRPMCVGTTPSAKASILHEVRPVTSGCFPIMHDRTKIRQLPNLLRGYEKIRLSTQNVIDAEKAPGGPYRLGTSGSCPNATSKIGFFATMAWAVPKDNYKNATNPQTVEVPYICTEGEDQITVWGFHSDNKTQMKSLYGDSNPQKFTSSANGITTHYVSQIGDFPDQTEDGGLPQSGRIVVDYMMQKPGKTGTIVYQRGVLLPQKVWCASGRSKVIKGSLPLIGEADCLHEEYGGLNKSKPYYTGKHAKAIGNCPIWVKTPLKLANGTKYRPPAKLLKERGFFGAIAGFLEGGWEGMIAGWHGYTSHGAHGVAVAADLKSTQEAINKITKNLNSLSELEVKNLQRLSGAMDELHNEILELDEKVDDLRADTISSQIELAVLLSNEGIINSEDEHLLALERKLKKMLGPSAVDIGNGCFETKHKCNQTCLDRIAAGTFNAGEFSLPTFDSLNITAASLNDDGLDNHTILLYYSTAASSLAVTLMLAIFIVYMVSRDNVSCSICL

SEQ ID NO: 28344 - protein, 584 aa, synthetic construct
  REGION 1..584: note = hemagglutinin__InfluenzaB__AIC73904
MKAIIVLLMVVTSNADRICTGITSSNSPHVVKTATQGEVNVTGVIPLTTTPTKSYFANLKGTRTRGKLCPDCLNCTDLDVALGRPMCVGITPSAKASILHEVRPVTSGCFPIMHDRTKIRQLPNLLRGYEKIRLSTQNVIDAEKAPGGPYRLGTSGSCPNATSKIGFFATMAWAVPKDNYKNATNPQTVEVPYICTEGEDQITVWGFHSDNKTQMKSLYGDSNPQKFTSSANGVTTHYVSQIGDFPDQTEDGGLPQSGRIVVDYMMQKPGKTGTIVYQRGVLLPQKVWCASGRSKVIKGSLPLIGEADCLHEEYGGLNKSKPYYTGKHAKAIGNCPIWVKTPLKLANGTKYRPPAKLLKERGFFGAIAGFLEGGWEGMIAGWHGYTSHGAHGVAVAADLKSTQEAINKITKNLNSLSELEVKNLQRLSGAMDELHNEILELDEKVDDLRADTISSQIELAVLLSNEGIINSEDEHLLALERKLKKMLGPSAVDIGNGCFETKHKCNQTCLDRIAAGTFNAGEFSLPTFDSLNITAASLNDDGLDNHTILLYYSTAASSLAVTLMLAIFIVYMVSRDNVSCSICL

SEQ ID NO: 28345 - protein, 584 aa, synthetic construct; identical to SEQ ID NO: 28289
  REGION 1..584: note = hemagglutinin__InfluenzaB__AIC73905

SEQ ID NO: 28346 - protein, 584 aa, synthetic construct; identical to SEQ ID NO: 28289
  REGION 1..584: note = hemagglutinin__InfluenzaB__AIC73906

SEQ ID NO: 28347 - protein, 584 aa, synthetic construct; identical to SEQ ID NO: 28289
  REGION 1..584: note = hemagglutinin__InfluenzaB__AIC73907

SEQ ID NO: 28348 - protein, 584 aa, synthetic construct; identical to SEQ ID NO: 28289
  REGION 1..584: note = hemagglutinin__InfluenzaB__AIC73908

SEQ ID NO: 28349 - protein, 584 aa, synthetic construct; identical to SEQ ID NO: 28289
  REGION 1..584: note = hemagglutinin__InfluenzaB__AIC73909

SEQ ID NO: 28350 - protein, 584 aa, synthetic construct; identical to SEQ ID NO: 28289
  REGION 1..584: note = hemagglutinin__InfluenzaB__AIC73910

SEQ ID NO: 28351 - protein, 584 aa, synthetic construct; identical to SEQ ID NO: 28289
  REGION 1..584: note = hemagglutinin__InfluenzaB__AIC73911

SEQ ID NO: 28352 - protein, 584 aa, synthetic construct; identical to SEQ ID NO: 28289
  REGION 1..584: note = hemagglutinin__InfluenzaB__AIC73912

SEQ ID NO: 28353 - protein, 584 aa, synthetic construct; identical to SEQ ID NO: 28289
  REGION 1..584: note = hemagglutinin__InfluenzaB__AIC73913

SEQ ID NO: 28354 - protein, 584 aa, synthetic construct; identical to SEQ ID NO: 28289
  REGION 1..584: note = hemagglutinin__InfluenzaB__AIC73914

SEQ ID NO: 28355 - protein, 584 aa, synthetic construct; identical to SEQ ID NO: 28289
  REGION 1..584: note = hemagglutinin__InfluenzaB__AIC73915

SEQ ID NO: 28356 - protein, 584 aa, synthetic construct; identical to SEQ ID NO: 28289
  REGION 1..584: note = hemagglutinin__InfluenzaB__AIC73916

SEQ ID NO: 28357 - protein, 584 aa, synthetic construct; identical to SEQ ID NO: 28289
  REGION 1..584: note = hemagglutinin__InfluenzaB__AIC73917

SEQ ID NO: 28358 - protein, 584 aa, synthetic construct; identical to SEQ ID NO: 28289
  REGION 1..584: note = hemagglutinin__InfluenzaB__AIC73918

SEQ ID NO: 28359 - protein, 584 aa, synthetic construct; identical to SEQ ID NO: 28129
  REGION 1..584: note = hemagglutinin__InfluenzaB__AIC73919

SEQ ID NO: 28360 - protein, 584 aa, synthetic construct; identical to SEQ ID NO: 28289
  REGION 1..584: note = hemagglutinin__InfluenzaB__AIC73920

SEQ ID NO: 28361 - protein, 585 aa, synthetic construct; identical to SEQ ID NO: 27865
  REGION 1..585: note = hemagglutinin__InfluenzaB__AIC73921

SEQ ID NO: 28362 - protein, 584 aa, synthetic construct; identical to SEQ ID NO: 28289
  REGION 1..584: note = hemagglutinin__InfluenzaB__AIC73922

SEQ ID NO: 28363 - protein, 585 aa, synthetic construct; identical to SEQ ID NO: 26887
  REGION 1..585: note = hemagglutinin__InfluenzaB__AIC73924

SEQ ID NO: 28364 - protein, 585 aa, synthetic construct
  REGION 1..585: note = hemagglutinin__InfluenzaB__AIC73925
MKATIVLLMVVTSNADRICTGITSSNSPHVVKTATQGEVNVTGVIPLTTTPTKSHFANLKGTETRGKLCPKCLNCTDLDVALGRPKCTGKIPSARVSILHEVRPVTSGCFPIMHDRTKIRQLPNLLRGYEHIRLSTHNVINAEDAPGGPYKIGTSGSCPNVTNGNGFFATMAWAVPKNDKNKTATNPLTIEVPYICTEGEDQITVWGFHSDNETQMAKLYGDSKPQKFTSSANGVTTHYVSQIGGFPNQTEDGGLPQSGRIVVDYMVQKSGKTGTITYQRGILLPQKVWCASGRSKVIKGSLPLIGEADCLHEKYGGLNKSKPYYTGEHAKAIGNCPIWVKTPLKLANGTKYRPPAKLLKERGFFGAIAGFLEGGWEGMIAGWHGYTSHGAHGVAVAADLKSTQEAINKITKNLNSLSELEVKNLQRLSGAMDELHNEILELDEKVDDLRADTISSQIELAVLLSNEGIINSEDEHLLALERKLKKMLGPSAVEIGNGCFETKHKCNQTCLDRIAAGTFDAGEFSLPTFDSLNITAASLNDDGLDNHTILLYYSTAASSLAVTLMIAIFVVYMVSRDNVSCSICL

SEQ ID NO: 28365 - protein, 584 aa, synthetic construct; identical to SEQ ID NO: 28289
  REGION 1..584: note = hemagglutinin__InfluenzaB__AIC73926

SEQ ID NO: 28366 - protein, 584 aa, synthetic construct; identical to SEQ ID NO: 26567
  REGION 1..584: note = hemagglutinin__InfluenzaB__AIL94977

SEQ ID NO: 28367 - protein, 584 aa, synthetic construct; identical to SEQ ID NO: 26567
  REGION 1..584: note = hemagglutinin__InfluenzaB__AIL94988

SEQ ID NO: 28368 - protein, 584 aa, synthetic construct
  REGION 1..584: note = hemagglutinin__InfluenzaB__AIL94999
MKAIIVLLMVVTSNADRICTGITSSNSPHVVKTATQGEVNVTGVIPLTTTPTKSYFANLKGTRTRGKLCPDCLNCTDLDVALGRPMCVGTTPSAKASILHEVRPVTSGCFPIMHDRTKIRQLPNLLRGYENIRLSTQNVIDAEKAPGGPYRLGTSGSCPNATSKTGFFATMAWAVPKDNYKNATNPLTVEVPYICTEGEDQITVWGFHSDNKTQMKNLYGDSNPQKFTSSANGVTTHYVSQIGDFPDQTEDGGLPQSGRIVVDYMMQKPGKTGTIVYQRGVLLPQKVWCASGRSKVIKGSLPLIGEADCLHEKYGGLNKSKPYYTGEHAKAIGNCPIWVKTPLKLANGTKYRPPAKLLKERGFFGAIAGFLEGGWEGMIAGWHGYTSHGAHGVAVAADLKSTQEAINKITKNLNSLSELEVKNLQRLSGAMDELHNEILELDEKVDDLRADTISSQIELAVLLSNEGIINSEDEHLLALERKLKKMLGPSAVDIGNGCFETKHKCNQTCLDRIAAGTFNAGEFSLPTFDSLNITAASLNDDGLDNHTILLYYSTAASSLAVTLMLAIFIVYMVSRDNVSCSICL

SEQ ID NO: 28369 - protein, 584 aa, synthetic construct; identical to SEQ ID NO: 26567
  REGION 1..584: note = hemagglutinin__InfluenzaB__AIL95010

SEQ ID NO: 28370 - protein, 584 aa, synthetic construct; identical to SEQ ID NO: 26820
  REGION 1..584: note = hemagglutinin__InfluenzaB__AIL95021

SEQ ID NO: 28371 - protein, 585 aa, synthetic construct; identical to SEQ ID NO: 26648
  REGION 1..585: note = hemagglutinin__InfluenzaB__AIL95032

SEQ ID NO: 28372 - protein, 584 aa, synthetic construct; identical to SEQ ID NO: 26820
  REGION 1..584: note = hemagglutinin__InfluenzaB__AIL95043

SEQ ID NO: 28373 - protein, 585 aa, synthetic construct; identical to SEQ ID NO: 26694
  REGION 1..585: note = hemagglutinin__InfluenzaB__AIL95054

SEQ ID NO: 28374 - protein, 585 aa, synthetic construct; identical to SEQ ID NO: 26648
  REGION 1..585: note = hemagglutinin__InfluenzaB__AIL95065

SEQ ID NO: 28375 - protein, 585 aa, synthetic construct; identical to SEQ ID NO: 26645
  REGION 1..585: note = hemagglutinin__InfluenzaB__AIL95076

SEQ ID NO: 28376 - protein, 585 aa, synthetic construct; identical to SEQ ID NO: 26648
  REGION 1..585: note = hemagglutinin__InfluenzaB__AIL95087

SEQ ID NO: 28377 - protein, 584 aa, synthetic construct; identical to SEQ ID NO: 26820
  REGION 1..584: note = hemagglutinin__InfluenzaB__AIL95098

SEQ ID NO: 28378 - protein, 585 aa, synthetic construct; identical to SEQ ID NO: 28159
  REGION 1..585: note = hemagglutinin__InfluenzaB__AIL95109

SEQ ID NO: 28379 - protein, 585 aa, synthetic construct
  REGION 1..585: note = hemagglutinin__InfluenzaB__AIL95120
MKAIIVLLMVVTSNADRICTGITSSNSPHVVKTATQGEVNVTGVIPLTTTPTKSHFANLKGTETRGKLCPKCLNCTDLDVALGRPKCTGKIPSARVSILHEVRPVTSGCFPIMHDRTKIRQLPNLLRGYEHIRLSTHNVINAENAPGGPYKIGTSGSCPNVTNGNGFFATMAWAVPKNDKNKTATNPLTIEVPYICTEGEDQITVWGFHSDNETQMAKLYGDSKPQKFTSSANGVTTHYVSQIGGFPNQTEDGGLPQSGRIVVDYMVQKSGKTGTITYQRGILLPQKVWCASGRSKVIKGSLPLIGEADCLHEKYGGLNKSKPYYTGEHAKAIGNCPIWVKTPLKLANGTKYRPPAKLLKERGFFGAIAGFLEGGWEGMIAGWHGYTSHGAHGVAVAADLKSTQEAINKITKNLNSLSELEVKNLQRLSGAMDELHNEILELDEKVDDLRADTISSQIELAVLLSNEGIINSEDEHLLALERKLKKMLGPSAVEIGNGCFETKHKCNQTCLDKIAAGTFDAGEFSLPTFDSLNITAASLNDDGLDNHTILLYYSTAASSLAVTLMIAIFVVYMVSRDNVSCSICL

SEQ ID NO: 28380 - protein, 584 aa, synthetic construct; identical to SEQ ID NO: 28289
  REGION 1..584: note = hemagglutinin__InfluenzaB__AKA54644

SEQ ID NO: 28381 - protein, 584 aa, synthetic construct
  REGION 1..584: note = hemagglutinin__InfluenzaB__AKA54645
MKAITVLLMVVTSNADRICTGITSSNSPHVVKTATQGEVNVTGVIPLTTTPTKSYFANLKGTRTRGKLCPDCLNCTDLDVALGRPMCVGTTPSAKASILHEVRPVTSGCFPIMHDRTKIRQLPNLLRGYEKIRLSTQNVIDAEKAPGGPYRLGTSGSCPNATSKIGFFATMAWAVPKDNYKNATNPLTVEVPYICTEGEDQITVWGFHSDNKTQMKSLYGDSNPQKFTSSADGVTTHYVSQIGDFPDQTEDGGLPQSGRIVVDYMMQKPGKTGTIVYQRGVLLPQKVWCASGRSKVIKGSLPLIGEADCLHEEYGGLNKSKPYYTGKHAKAIGNCPIWVKTPLKLANGTKYRPPAKLLKERGFFGAIAGFLEGGWEGMIAGWHGYTSHGAHGVAVAADLKSTQEAINKITKNLNSLSELEVKNLQRLSGAMDELHNEILELDEKVDDLRADTISSQIELAVLLSNEGIINSEDEHLLALERKLKKMLGPSAVDIGNGCFETKHKCNQTCLDRIAAGTFNAGEFSLPTFDSLNITAASLNDDGLDNHTILLYYSTAASSLAVTLMLAIFIVYMVSRDNVSCSICL

SEQ ID NO: 28382 - protein, 584 aa, synthetic construct; identical to SEQ ID NO: 28289
  REGION 1..584: note = hemagglutinin__InfluenzaB__AKA54646

SEQ ID NO: 28383 - protein, 584 aa, synthetic construct; identical to SEQ ID NO: 28289
  REGION 1..584: note = hemagglutinin__InfluenzaB__AKA54647

SEQ ID NO: 28384 - protein, 585 aa, synthetic construct; identical to SEQ ID NO: 26887
  REGION 1..585: note = hemagglutinin__InfluenzaB__AKA54648

SEQ ID NO: 28385 - protein, 584 aa, synthetic construct
  REGION 1..584: note = hemagglutinin__InfluenzaB__AKA54649
MKAIIVLLMVVTSNADRICTGITSSNSPHVVKTATQGEVNVTGVIPLTTTPTKSYFANLKGTRTRGKLCPDCLNCTDLDVALGRPMCVGTTPSAKASILHEVRPVTSGCFPIMHDRTKIRQLPNLLRGYEKIRLSTQNVIDAEKAPGGPYRLGTSGSCPNTTSKIGFFATMAWAVPKDNYKNATNPLTVEVPYICTEGEDQITVWGFHSDNKTQMKSLYGDSNPQKFTSSANGVTTHYVSQIGDFPDQTEDGGLPQSGRIVVDYMMQKPGKTGTIVYQRGVLLPQKVWCASGRSKVIKGSLPLIGEADCLHEEYGGLNKSKPYYTGKHAKAIGNCPIWVKTPLKLANGTKYRPPAKLLKERGFFGAIAGFLEGGWEGMIAGWHGYTSHGAHGVAVAADLKSTQEAINKITKNLNSLSELEVKNLQRLSGAMDELHNEILELDEKVDDLRADTISSQIELAVLLSNEGIINSEDEHLLALERKLKKMLGPSAVDIGNGCFETKHKCNQTCLDRIAAGTFNAGEFSLPTFDSLNITAASLNDDGLDNHTILLYYSTAASSLAVTLMLAIFIVYMVSRDNVSCSICL

SEQ ID NO: 28386 - protein, 584 aa, synthetic construct; identical to SEQ ID NO: 28289
  REGION 1..584: note = hemagglutinin__InfluenzaB__AKU40581

SEQ ID NO: 28387 - protein, 584 aa, synthetic construct; identical to SEQ ID NO: 28289
  REGION 1..584: note = hemagglutinin__InfluenzaB__AKU40592

SEQ ID NO: 28388 - protein, 584 aa, synthetic construct; identical to SEQ ID NO: 28129
  REGION 1..584: note = hemagglutinin__InfluenzaB__AKU40603

SEQ ID NO: 28389 - protein, 584 aa, synthetic construct; identical to SEQ ID NO: 28289
  REGION 1..584: note = hemagglutinin__InfluenzaB__AKU40614

SEQ ID NO: 28390 - protein, 584 aa, synthetic construct; identical to SEQ ID NO: 28129
  REGION 1..584: note = hemagglutinin__InfluenzaB__AKU40625

SEQ ID NO: 28391 - protein, 584 aa, synthetic construct
  REGION 1..584: note = hemagglutinin__InfluenzaB__AKU40636
MKAIIVLLMVVTSNADRICTGITSSNSPHVVKTATQGEVNVTGVIPLTTTPAKSYFANLKGTRTRGKLCPDCLNCTDLDVALGRPMCVGTTPSAKASILHEVRPVTSGCFPIMHDRTKIRQLPNLLRGYENIRLSTKNVIDAEKAPGGPYRLGTSGSCPNATSKIGFFATMAWAVPKDNYKNATNPLTVEVPYICKEGEDQITVWGFHSDNKTQMKNLYGDSNPQKFTSSANGVTTHYVSQIGDFPDQTEDGGLPQSGRIVVDYMMQKPGKTGTIVYQRGVLLPQKVWCASGRSKVIKGSLPLIGEADCLHEEYGGLNKSKPYYTGKHAKAIGNCPIWVKTPLKLANGTKYRPPAKLLKERGFFGAIAGFLEGGWEGMIAGWHGYTSHGAHGVAVAADLKSTQEAINKITKNLNSLSELEVKNLQRLSGAMDELHNEILELDEKVDDLRADTISSQIELAVLLSNEGIINSEDEHLLALERKLKKMLGPSAVDIGNGCFETKHKCNQTCLDRIAAGTFNAGEFSLPTFDSLNITAASLNDDGLDNHTILLYYSTAASSLAVTLMLAIFIVYMVSRDNVSCSICL

SEQ ID NO: 28392 - protein, 584 aa, synthetic construct
  REGION 1..584: note = hemagglutinin__InfluenzaB__AKU40647
MKAIIVLLMVVTSNADRICTGITSSNSPHVVKTATQGEVNVTGVIPLTTTPTKSYFANLKGTRTRGKLCPDCLNCTDLDVALGRPMCVGTTPSAKASILHEVRPVTSGCFPIMHDRTKIRQLPNLLRGYEKIRLSTQNVIDAEKAPGGPYRLGTSGSCPNATSKIGFFATMAWAVPKDNYKNATNPQTVEIPYICTEGEDQITVWGFHSDNKTQMKSLYGDSNPQKFTSSANGVTTHYVSQIGDFPDQTEDGGLPQSGRIVVDYMMQKPGKTGTIVYQRGVLLPQKVWCASGRSKVIKGSLPLIGEADCLHEEYGGLNKSKPYYTGKHAKAIGNCPIWVKTPLKLANGTKYRPPAKLLKERGFFGAIAGFLEGGWEGMIAGWHGYTSHGAHGVAVAADLKSTQEAINKITKNLNSLSELEVKNLQRLSGAMDELHNEILELDEKVDDLRADTISSQIELAVLLSNEGIINSEDEHLLALERKLKKMLGPSAVDIGNGCFETKHKCNQTCLDRIAAGTFNAGEFSLPTFDSLNITAASLNDDGLDNHTILLYYSTAASSLAVTLMLAIFIVYMVSRDNVSCSICL

SEQ ID NO: 28393 - protein, 584 aa, synthetic construct; identical to SEQ ID NO: 28289
  REGION 1..584: note = hemagglutinin__InfluenzaB__AKU40658

SEQ ID NO: 28394 - protein, 584 aa, synthetic construct; identical to SEQ ID NO: 28289
  REGION 1..584: note = hemagglutinin__InfluenzaB__AKU40669

SEQ ID NO: 28395 - protein, 584 aa, synthetic construct; identical to SEQ ID NO: 28289
  REGION 1..584: note = hemagglutinin__InfluenzaB__AKU40680

SEQ ID NO: 28396 - protein, 584 aa, synthetic construct
  REGION 1..584: note = hemagglutinin__InfluenzaB__AKU40691
MKAIIVLLMVVTSNADRICTGITSSNSPHVVKTATQGEVNVTGVIPLTTTPTKSYFANLKGTRTRGKLCPDCLNCTDLDVALGRPMCVGTTPSAKASILHEVRPVTSGCFPIMHDRTKIRQLPNLLRGYEKIRLSTQNVIDAEKAPGGPYRLGTSGSCPNATSKIGFFATMAWAVPKDNYKNATNPQTVEVPYICTEGEDQITVWGFHSDNKTQMKSLYGDSNPQKFTSSANGVTTHYVSQIGDFPDQTEDGGLPQSGRIVVDYMMQKPGKTGTIVYQRGVLLPQKVWCASGRSKVIKGSLPLIGEADCLHEEYGGLNKSKPYYTGKHAKAIGNCPIWVKTPLKLANGTKYRPPAKLLKERGFFGAIAGFLEGGWEGMIAGWHGYTSHGAHGVAVAADLKSTQEAINKITKNLNSLSELEVKNLQRLSGAMDEFHNEILELDEKVDDLRADTISSQIELAVLLSNEGIINSEDEHLLALERKLKKMLGPSAVDIGNGCFETKHKCNQTCLDRIAAGTFNAGEFSLPTFDSLNITAASLNDDGLDNHTILLYYSTAASSLAVTLMLAIFIVYMVSRDNVSCSICL

SEQ ID NO: 28397 - protein, 584 aa, synthetic construct; identical to SEQ ID NO: 28289
  REGION 1..584: note = hemagglutinin__InfluenzaB__AKU40702

SEQ ID NO: 28398 - protein, 584 aa, synthetic construct; identical to SEQ ID NO: 28289
  REGION 1..584: note = hemagglutinin__InfluenzaB__AKU40713

SEQ ID NO: 28399 - protein, 584 aa, synthetic construct; identical to SEQ ID NO: 28129
  REGION 1..584: note = hemagglutinin__InfluenzaB__AKU40724

SEQ ID NO: 28400 - protein, 584 aa, synthetic construct; identical to SEQ ID NO: 28392
  REGION 1..584: note = hemagglutinin__InfluenzaB__AKU40735

SEQ ID NO: 28401 - protein, 584 aa, synthetic construct; identical to SEQ ID NO: 28289
  REGION 1..584: note = hemagglutinin__InfluenzaB__AKU40746

SEQ ID NO: 28402 - protein, 584 aa, synthetic construct; identical to SEQ ID NO: 28289
  REGION 1..584: note = hemagglutinin__InfluenzaB__AKU40757

SEQ ID NO: 28403 - protein, 584 aa, synthetic construct; identical to SEQ ID NO: 28289
  REGION 1..584: note = hemagglutinin__InfluenzaB__AKU40768

SEQ ID NO: 28404 - protein, 584 aa, synthetic construct; identical to SEQ ID NO: 28289
  REGION 1..584: note = hemagglutinin__InfluenzaB__AKU40779

SEQ ID NO: 28405 - protein, 584 aa, synthetic construct; identical to SEQ ID NO: 28129
  REGION 1..584: note = hemagglutinin__InfluenzaB__AKU40790

SEQ ID NO: 28406 - protein, 584 aa, synthetic construct; identical to SEQ ID NO: 28289
  REGION 1..584: note = hemagglutinin__InfluenzaB__AKU40801

SEQ ID NO: 28407 - protein, 584 aa, synthetic construct
  REGION 1..584: note = hemagglutinin__InfluenzaB__AKU40812
MKAIIVLLMVVTSNADRICTGITSSNSPHVVKTATQGEVNVTGVIPLTTTPTKSYFANLKGTRTRGKLCPDCLNCTDLDVALGRPMCVGTTPSAKASILHEVRPVTSGCFPIMHDRTKIRQLPNLLRGYEKIRLSTQNVIDAEKAPGGPYRLGTSGSCPNATSKIGFFATMAWAVPKDNYKNATNPQTVEVPYICTEGEDQITVWGFHSDNKTQMKSLYGDSNPQKFTSSANGVTTHYVSQIGDFPDQTEDGGLPQSGRIVVDYMMQKPGKTGTIVYQRGVLLPQKVWCASGRSKVIKGSLPLIGEADCLHEEYGGLNKSKPYYTGKHAKAIGNCPIWVKTPLKLANGTKYRPPAKLLKERGFFGAIAGFLEGGWEGMIAGWHGYTSHGAHGVAVAADLKSTQEAINKITKNLNSLSELEVKNLQRLSGAMDELHNEILELDEKVDDLRADTISSQIELAVLLSNEGIINSEDEHLLALERKLKKMLGPSAVDIGNGCFETKHKCNQTCLDRIAAGTFNAGEFSLPTFDSLNITAASLNDDGLDSHTILLYYSTAASSLAVTLMLAIFIVYMVSRDNVSCSICL

SEQ ID NO: 28408 - protein, 584 aa, synthetic construct; identical to SEQ ID NO: 28289
  REGION 1..584: note = hemagglutinin__InfluenzaB__AKU40823

SEQ ID NO: 28409 - protein, 584 aa, synthetic construct; identical to SEQ ID NO: 28289
  REGION 1..584: note = hemagglutinin__InfluenzaB__AKU40834

SEQ ID NO: 28410 - protein, 584 aa, synthetic construct; identical to SEQ ID NO: 28289
  REGION 1..584: note = hemagglutinin__InfluenzaB__AKU40845

SEQ ID NO: 28411 - protein, 584 aa, synthetic construct; identical to SEQ ID NO: 28289
  REGION 1..584: note = hemagglutinin__InfluenzaB__AKU40856

SEQ ID NO: 28412 - protein, 584 aa, synthetic construct; identical to SEQ ID NO: 28289
  REGION 1..584: note = hemagglutinin__InfluenzaB__AKU40867

SEQ ID NO: 28413 - protein, 584 aa, synthetic construct; identical to SEQ ID NO: 28289
  REGION 1..584: note = hemagglutinin__InfluenzaB__AKU40878

SEQ ID NO: 28414 - protein, 585 aa, synthetic construct
  REGION 1..585: note = hemagglutinin__InfluenzaB__AKU40889
MKAIIVLLMVVTSNADRICTGITSSNSPHVVKTATQGEVNVTGVIPLTTTPTKSHFANLKGTETRGKLCPKCLNCTDLDVALGRPKCTGKIPSARVSILHEVRPVTSGCFPIMHDRTKIRQLPNLLRGYEHIRLSTHNVINAEDAPGGPYKIGTSGSCPNVTNGNGFFATMAWAVPKNDKNKTATNPLTTEVPYICTEGEDQITVWGFHSDNETQMAKLYGDSKPQKFTSSANGVTTHYVSQIGGFPNQTEDGGLPQSGRIVVDYMVQKSGKTGTITYQRGILLPQKVWCASGRSKVIKGSLPLIGEADCLHEKYGGLNKSKPYYTGEHAKAIGNCPIWVKTPLKLANGTKYRPPAKLLKERGFFGAIAGFLEGGWEGMIAGWHGYTSHGAHGVAVAADLKSTQEAINKITKNLNSLSELEVKNLQRLSGAMDELHNEILELDEKVDDLRADTISSQIELAVLLSNEGIINSEDEHLLALERKLKKMLGPSAVEIGNGCFETKHKCNQTCLDRIAAGTFDAGEFSLPTFDSLNITAASLNDDGLDNHTILLYYSTAASSLAVTLMIAIFVVYMVSRDNVSCSICL

SEQ ID NO: 28415 - protein, 584 aa, synthetic construct; identical to SEQ ID NO: 28289
  REGION 1..584: note = hemagglutinin__InfluenzaB__AKU40900

SEQ ID NO: 28416 - protein, 584 aa, synthetic construct; identical to SEQ ID NO: 28129
  REGION 1..584: note = hemagglutinin__InfluenzaB__AKU40911

SEQ ID NO: 28417 - protein, 584 aa, synthetic construct
  REGION 1..584: note = hemagglutinin__InfluenzaB__AKU40922
MKAIIVLLMVVTSNADRICTGITSSNSPHVVKTVTQGEVNVTGVIPLTTTPTKSYFANLKGTRTRGKLCPDCLNCTDLDVALGRPMCVGTTPSAKASILHEVRPVTSGCFPIMHDRTKIRQLPNLLRGYEKIRLSTQNVIDAEKAPGGPYRLGTSGSCPNATSKIGFFATMAWAVPKDNYKNATNPQTVEVPYICTEGEDQITVWGFHSDNKTQMKSLYGDSNPQKFTSSANGVTTHYVSQIGDFPDQTEDGGLPQSGRIVVDYMMQKPGKTGTIVYQRGVLLPQKVWCASGRSKVIKGSLPLIGEADCLHEEYGGLNKSKPYYTGKHAKAIGNCPIWVKTPLKLANGTKYRPPAKLLKERGFFGAIAGFLEGGWEGMIAGWHGYTSHGAHGVAVAADLKSTQEAINKITKNLNSLSELEVKNLQRLSGAMDELHNEILELDEKVDDLRADTISSQIELAVLLSNEGIINSEDEHLLALERKLKKMLGPSAVDIGNGCFETKHKCNQTCLDRIAAGTFNAGEFSLPTFDSLNITAASLNDDGLDNHTILLYYSTAASSLAVTLMLAIFIVYMVSRDNVSCSICL

SEQ ID NO: 28418 - protein, 584 aa, synthetic construct; identical to SEQ ID NO: 28392
  REGION 1..584: note = hemagglutinin__InfluenzaB__AKU40933

SEQ ID NO: 28419 - protein, 584 aa, synthetic construct; identical to SEQ ID NO: 28289
  REGION 1..584: note = hemagglutinin__InfluenzaB__AKU40944

SEQ ID NO: 28420 - protein, 584 aa, synthetic construct; identical to SEQ ID NO: 28289
  REGION 1..584: note = hemagglutinin__InfluenzaB__AKU40955

SEQ ID NO: 28421 - protein, 584 aa, synthetic construct; identical to SEQ ID NO: 28289
  REGION 1..584: note = hemagglutinin__InfluenzaB__AKU40966

SEQ ID NO: 28422 - protein, 584 aa, synthetic construct; identical to SEQ ID NO: 28289
  REGION 1..584: note = hemagglutinin__InfluenzaB__AKU40977

SEQ ID NO: 28423 - protein, 584 aa, synthetic construct; identical to SEQ ID NO: 28289
  REGION 1..584: note = hemagglutinin__InfluenzaB__AKU40987

SEQ ID NO: 28424 - protein, 584 aa, synthetic construct; identical to SEQ ID NO: 28289
  REGION 1..584: note = hemagglutinin__InfluenzaB__AKU40998

SEQ ID NO: 28425 - protein, 584 aa, synthetic construct; identical to SEQ ID NO: 28289
  REGION 1..584: note = hemagglutinin__InfluenzaB__AKU41009

SEQ ID NO: 28426 - protein, 584 aa, synthetic construct; identical to SEQ ID NO: 28289
  REGION 1..584: note = hemagglutinin__InfluenzaB__AKU41020

SEQ ID NO: 28427 - protein, 584 aa, synthetic construct; identical to SEQ ID NO: 28289
  REGION 1..584: note = hemagglutinin__InfluenzaB__ALA08485

SEQ ID NO: 28428 - protein, 584 aa, synthetic construct; identical to SEQ ID NO: 28289
  REGION 1..584: note = hemagglutinin__InfluenzaB__ALA08486

SEQ ID NO: 28429 - protein, 584 aa, synthetic construct; identical to SEQ ID NO: 28289
  REGION 1..584: note = hemagglutinin__InfluenzaB__ALA08487

SEQ ID NO: 28430 - protein, 584 aa, synthetic construct; identical to SEQ ID NO: 28289
  REGION 1..584: note = hemagglutinin__InfluenzaB__ALA08564

SEQ ID NO: 28431 - protein, 584 aa, synthetic construct; identical to SEQ ID NO: 28289
  REGION 1..584: note = hemagglutinin__InfluenzaB__ALA08565

SEQ ID NO: 28432 - protein, 584 aa, synthetic construct; identical to SEQ ID NO: 28289
  REGION 1..584: note = hemagglutinin__InfluenzaB__ALA08566

SEQ ID NO: 28433 - protein, 584 aa, synthetic construct; identical to SEQ ID NO: 28289
  REGION 1..584: note = hemagglutinin__InfluenzaB__ALA08567

SEQ ID NO: 28434 - protein, 584 aa, synthetic construct; identical to SEQ ID NO: 28289
  REGION 1..584: note = hemagglutinin__InfluenzaB__ALA08568

SEQ ID NO: 28435 - protein, 584 aa, synthetic construct; identical to SEQ ID NO: 28289
  REGION 1..584: note = hemagglutinin__InfluenzaB__ALA08569

SEQ ID NO: 28436 - protein, 585 aa, synthetic construct
  REGION 1..585: note = hemagglutinin__InfluenzaB__ALA08689
MKAIIVLLMVVTSNADRICTGITSSNSPHVVKTATQGEVNVTGVIPLTTTPTKSHFANLKGTETRGKLCPKCPNCTDLDVALGRPKCTGKIPSARVSILHEVRPVTSGCFPIMHDRTKIRQLPNLLRGYEHIRLSTHNVINAENAPGGPYKIGTSGSCPNVTNGNGFFATMAWAVPKNDKNKTATNPLTIEVPYICTEGEDQITVWGFHSDNETQMAKLYGDSNPQKFTSSANGVTTHYVSQIGGFPNQTEDGGLPQSGRIVVDYMVQKSGKTGTITYQRGILLPQKVWCASGRSKVIKGSLPLIGEADCLHEKYGGLNKSKPYYTGEHAKAIGNCPIWVKTPLKLANGTKYRPPAKLLKERGFFGAIAGFLEGGWEGMIAGWHGYTSHGAHGVAVAADLKSTQEAINKITKNLNSLSELEVKNLQRLSGAMDELHNEILELDEKVDDLRADTISSQIELAVLLSNEGIINSEDEHLLALERKLKKMLGPSAVEIGNGCFETKHKCNQTCLDRIAAGTFDAGEFSLPTFDSLNITAASLNDDGLDNHTILLYYSTAASSLAVTLMIAIFVVYMVSRDNVSCSICL

SEQ ID NO: 28437 - protein, 585 aa, synthetic construct
  REGION 1..585: note = hemagglutinin__InfluenzaB__ALA08690
MKAIIVLLMVVTSNADRICTGITSSNSPHVVKTATQGEVNVTGVIPLTTTPTKSHFANLKGTETRGKLCPKCLNCTDLDVALGRPKCTGKIPSARVSILHEVRPVTSGCFPIMHDRTKIRQLPNLLRGYEHIRLSTHNVINAEDAPGGPYKIGTSGSCPNITNGNGFFATMAWAVQKNDKNKTATNPLTIEVPYICTEGEDQITVWGFHSDNETQMAKLYGDSKPQKFTSSANGVTTHYVSQIGGFPNQTEDGGLPQSGRIVVDYMVQKSGKTGTITYQRGILLPQKVWCASGRSKVIKGSLPLIGEADCLHEKYGGLNKSKPYYTGEHAKAIGNCPIWVKTPLKLANGTKYRPPAKLLKERGFFGAIAGFLEGGWEGMIAGWHGYTSHGAHGVAVAADLKSTQEAINKITKNLNSLSELEVKNLQRLSGAMDELHNEILELDEKVDDLRADTISSQIELAVLLSNEGIINSEDEHLLALERKLKKMLGPSAVEIGNGCFETKHKCNQTCLDRIAAGTFDAGEFSLPTFDSLNITAASLNDDGLDDHTILLYYSTAASSLAVTLMIAIFVVYMVSRDNVSCSICL

SEQ ID NO: 28438 - protein, 584 aa, synthetic construct; identical to SEQ ID NO: 28289
  REGION 1..584: note = hemagglutinin__InfluenzaB__ALE31766

SEQ ID NO: 28439 - protein, 585 aa, synthetic construct
  REGION 1..585: note = hemagglutinin__InfluenzaB__ALE31768
MKAIIVLLMVVTSNADRICTGITSSNSPHVVKTATQGEVNVTGVIPLTTTPTKSHFANLKGTETRGKLCPKCLNCTDLDVALGRPKCTGKIPSARVSILHEVRPVTSGCFPIMHDRTKIRQLPNLLRGYEHIRLSTHNVINAEDAPGGPYKIGTSGSCPNITNGNGFFATMAWAVPKNDKNKTATNPLTIEVPYICTEGEDQITVWGFHSDNETQMAKLYGDSKPQKFTSSANGVTTHYVSQIGGFPNQTEDGGLPQSGRIVVDYMVQKSGKTGTITYQRGILLPQKVWCASGRSKVIKGSLPLIGEADCLHEKYGGLNKSKPYYTGEHAKAIGNCPIWVKTPLKLANGTKYRPPAKLLKERGFFGAIAGFLEGGWEGMIAGWHGYTSHGAHGVAVAADLKSTQEAINKITKNLNSLSELEVKNLQRLSGAMDELHNEILELDEKVDDLRADTISSQIELAVLLSNEGIINSEDEHLLALERKLKKMLGPSAVEIGNGCFETKHKCNQTCLDRIAAGTFDAGEFSLPTFDSLNITAASLNDDGLDNHTILLYYSTAASSLAVTLMIAIFVVYMVSRDNVSCSICL

SEQ ID NO: 28440 - protein, 585 aa, synthetic construct
  REGION 1..585: note = hemagglutinin__InfluenzaB__ALE31770
MKAIIVLLMVVTSNADRICTGITSSNSPHVVKTATQGEVNVTGVIPLTTTPTKSHFANLKGTETRGKLCPKCLNCTDLDVALGRPKCTGKIPSARVSILHEVRPVTSGCFPIMHDRTKIRQLPNLLRGYEHISLSTHNVINAEDAPGGPYKIGTSGSCPNVTNGNGFFATMAWAVPKNDKNKTATNPLTIEVPYICTEGEDQITVWGFHSDNETQMAKLYGDSKPQKFTSSANGVTTHYVSQIGGFPNQTEDGGLPQSGRIVVDYMVQKSGKTGTITYQRGILLPQKVWCASGRSKVIKGSLPLIGEADCLHEKYGGLNKSKPYYTGEHAKAIGNCPIWVKTPLKLANGTKYRPPAKLLKERGFFGAIAGFLEGGWEGMIAGWHGYTSHGAHGVAVAADLKSTQEAINKITKNLNSLSELEVKNLQRLSGAMDELHNEILELDEKVDDLRADTISSQIELAVLLSNEGIINSEDEHLLALERKLKKMLGPSAVEIGNGCFETKHKCNQTCLDRIAAGTFDAGEFSLPTFDSLNITAASLNDDGLDNHTILLYYSTAASSLAVTLMIAIFVVYMVSRDNVSCSICL

SEQ ID NO: 28441 - protein, 584 aa, synthetic construct; identical to SEQ ID NO: 28289
  REGION 1..584: note = hemagglutinin__InfluenzaB__ALE31772

SEQ ID NO: 28442 - protein, 584 aa, synthetic construct; identical to SEQ ID NO: 28289
  REGION 1..584: note = hemagglutinin__InfluenzaB__ALE31773

SEQ ID NO: 28443 - protein, 584 aa, synthetic construct
  REGION 1..584: note = hemagglutinin__InfluenzaB__ALE31884
MKAIIVLLMVVTSNADRICTGITSSNSPHVVKTATQGEVNVTGVIPLTTTPTKSYFANLKGTRTRGKLCPDCLNCTDLDVALGRPMCVGTTPSAKASILHEVRPVTSGCFPIMHDRTKIRQLPNLLRGYEKIRLSTQNVIDAEKAPGGPYRLGTSGSCPNATSKIGFFATMAWAVPKDNYKNATNPQTVEVPYICTEGEDQITVWGFHSDNKTQMKSLYGDSNPQKFTSSANGVTTHYVSQIGDFPDQTEDGGLPQSGRIVVDYMMQKPGKTGTIVYQRGVLLPQKVWCASGRSKVIKGSLPLIGEADCLHEEYGGLNKSKPYYTGKHAKAIGNCPIWVKTPLKLANGTKYRPPAKLLKERGFFGAIAGFLEGGWEGMIAGWHGYTSHGAHGVAVAADLKSTQEAINKITKNLNSLSELEVKNLQRLSGAMDELHNEILELDEKVDDLRADTISSQIELAVLLSNEGIINSEDEHLLALERKLKKMLGPSAVDIGNGCFETKHKCNQTCLDRIAAGTFNAGEFSLPTFDSLNITAASLNDDGLDNHTILLYYSTAASSLAVTLMLAIFIVYMVSRDNVSCSVCL

SEQ ID NO: 28444 - protein, 584 aa, synthetic construct
  REGION 1..584: note = hemagglutinin__InfluenzaB__ALE31885
MKAIIVLLMVVTSNADRICTGITSSNSPHVVKTATQGEVNVTGVIPLTTTPTKSYFANLKGTRTRGKLCPDCLNCTDLDVALGRPMCVGTTPSAKASILHEVRPVTSGCFPIMHDRTKIRQLPNLLRGYEKIRLSTQNVIDAEKAPGGPYRLGTSGSCPNATSKIGFFATMAWAVPKDNYKNATNPQTVEVPYICTEGEDQITVWGFHSDNKTQMKSLYGDSNPQKFTSSANGVTTHYVSQIGDFPDQTEDGGLPQSGRIVVDYMMQKPGKTGTIVYQRGVLLPQKVWCASGRSKVIKGSLPLIGEADCLHEEYGGLNKSKPYYTGKHAKAIGNCPIWVKTPLKLANGTKYRPPAKLLKERGFFGAIAGFLEGGWEGMIAGWHGYTSHGAHGVAVAADLKSTQEAINKITKNLNSLSELEVKNLQRLSGAMDELHNEILELDEKVDDLRADTISSQIELAVLLSNEGIINSEDEHLLALERKLKKMLGPSAVDIGNGCFETKHKCNQTCLDRIAAGTFNAGEFSLPTFDSLNITAASLNDDGLDNHTILLYYSTAASSLAVTLMLAIFVVYMVSRDNVSCSICL

SEQ ID NO: 28445 - protein, 584 aa, synthetic construct; identical to SEQ ID NO: 28289
  REGION 1..584: note = hemagglutinin__InfluenzaB__ALE31886

SEQ ID NO: 28446 - protein, 584 aa, synthetic construct
  REGION 1..584: note = hemagglutinin__InfluenzaB__ALE31887
MKAIIVLLMVVTSNADRICTGITSSNSPHVVKTATQGEINVTGVIPLTTTPTKSYFANLKGTRTRGKLCPDCLNCTDLDVALGRPMCVGTTPSAKASILHEVRPVTSGCFPIMHDRTKIRQLPNLLRGYEKIRLSTQNVIDAEKAPGGPYRLGTSGSCPNATSKIGFFATMAWAVPKDNYKNATNPQTVEVPYICTEGEDQITVWGFHSDNKTQMKSLYGDSNPQKFTSSANGVTTHYVSQIGDFPDQTEDGGLPQSGRIVVDYMMQKPGKTGTIVYQRGVLLPQKVWCASGRSKVIKGSLPLIGEADCLHEEYGGLNKSKPYYTGKHAKAIGNCPIWVKTPLKLANGTKYRPPAKLLKERGFFGAIAGFLEGGWEGMIAGWHGYTSHGAHGVAVAADLKSTQEAINKITKNLNSLSELEVKNLQRLSGAMDELHNEILELDEKVDDLRADTISSQIELAVLLSNEGIINSEDEHLLALERKLKKMLGPSAVDIGNGCFETKHKCNQTCLDRIAAGTFNAGEFSLPTFDSLNITAASLNDDGLDNHTILLYYSTAASSLAVTLMLAIFIVYMVSRDNVSCSICL

SEQ ID NO: 28447 - protein, 584 aa, synthetic construct; identical to SEQ ID NO: 28289
  REGION 1..584: note = hemagglutinin__InfluenzaB__ALE31982

SEQ ID NO: 28448 - protein, 584 aa, synthetic construct
  REGION 1..584: note = hemagglutinin__InfluenzaB__ALE31983
MKAIIVLLMVVTSNADRICTGITSSNSPHVVKTATQGEVNVTGVIPLTTTPTKSYFANLKGTRTRGKLCPDCLNCTDLDVALGRPMCVGTTPSAKASILHEVRPVTSGCFPIMHDRTKIRQLPNLLRGYEKIRLSTQNVIDAEKAPGGPYRLGTSGSCPNATSKIGFFATMAWAVPKDNYKNATNPQTVEVPYICTEGEDQITVWGFHSDNKTQMKSLYGDSNPQKFTSSANGVTTHYVSQIGDFPDQTEDGGLPQSGRIVVDYMMQKPGKTGTIVYQRGVLLPQKVWCASGRSKVIKGSLPLIGEADCLHEEYGGLNKSKPYYTGKHAKAIGNCPIWVKTPLKLANGTKYRPPAKLLKERGFFGAIAGFLEGGWEGMIAGWHGYTSHGAHGVAVAADLKSTQEAINKITKNLNSLSELEVKNLQRLSGAMDELHNEILELDEKVDDLRADTISSQIELAVLLSNEGIINSEDEHLLALERKLKKMLGPSAVDIGNGCFETKHKCNQTCLDRIAAGTFNAGEFSLPTFDSLNITAASLNDDGLDNHTILLYYSTAASSLAVTLMLALFIVYMVSRDNVSCSICL

SEQ ID NO: 28449 - protein, 584 aa, synthetic construct
  REGION 1..584: note = hemagglutinin__InfluenzaB__ALE31984
MKAIIVLLMVVTSNADRICTGITSSNSPHVVKTATQGEVNVTGVIPLTTTPTKSYFANLKGTRTRGKLCPDCLNCTDLDVALGRPMCVGTTPSAKASILHEVRPVTSGCFPIMHDRTKIRQLPNLLRGYEKIRLSTQNVIDAEKAPGGPYRLGTSGSCPNATSKIGFFATMAWAVPKDNYKNATNPQTVEVPYICTEEEDQITVWGFHSDNKTQMKSLYGDSNPQKFTSSANGVTTHYVSQIGDFPDQTEDGGLPQSGRIVVDYMVQKPGKTGTIVYQRGVLLPQKVWCASGRSKVIKGSLPLIGEADCLHEEYGGLNKSKPYYTGKHAKAIGNCPIWVKTPLKLANGTKYRPPAKLLKERGFFGAIAGFLEGGWEGMIAGWHGYTSHGAHGVAVAADLKSTQEAINKITKNLNSLSELEVKNLQRLSGAMDELHNEILELDEKVDDLRADTISSQIELAVLLSNEGIINSEDEHLLALERKLKKMLGPSAVDIGNGCFETKHKCNQTCLDRIAAGTFNAGEFSLPTFDSLNITAASLNDDGLDNHTILLYYSTAASSLAVTLMLAIFIVYMVSRDNVSCSICL

SEQ ID NO: 28450 - protein, 584 aa, synthetic construct; identical to SEQ ID NO: 28289
  REGION 1..584: note = hemagglutinin__InfluenzaB__ALE31985

SEQ ID NO: 28451 - protein, 585 aa, synthetic construct
  REGION 1..585: note = hemagglutinin__InfluenzaB__ALE31986
MKAIIVLLMVVTSNADRICTGITSSNSPHVVKTATQGEVNVTGVIPLTTTPTKSHFANLKGTETRGKLCPKCLNCTDLDVALGRPKCTGKIPSARVSILHEVRPVTSGCFPIMHDRTKIRQLPNLLRGYEHIRLSTHNVINAEDAPGGPYKIGTSGSCPNITNGNGFFATMAWAVPKNDKNKTATNPLTIEVPYICTEGEDQITVWGFHSDNETQMAKLYGDSKPQKFTSSANGVTTHYVSQIGGFPNQTEDGGLPQSGRIVIDYMVQKSGKTGTITYQRGILLPQKVWCASGRSKVIKGSLPLIGEADCLHEKYGGLNKSKPYYTGEHAKAVGNCPIWVKTPLKLANGTKYRPPAKLLKERGFFGAIAGFLEGGWEGMIAGWHGYTSHGAHGVAVAADLKSTQEAINKITKNLNSLSELEVKNLQRLSGAMDELHNEILELDEKVDDLRADTISSQIELAVLLSNEGIINSEDEHLLALERKLKKMLGPSAVEIGNGCFETKHKCNQTCLDRIAAGTFDAGEFSLPTFDSLNITAASLNDDGLDNHTILLYYSTAASSLAVTLMIAIFVVYMVSRDNVSCSICL

SEQ ID NO: 28452 - protein, 584 aa, synthetic construct
  REGION 1..584: note = hemagglutinin__InfluenzaB__ALE31988
MKAIIVLLMVVTSNADRICTGITSSNSPHVVKTATQGEVNVTGVIPLTTTPTKSYFANLKGTRTRGKLCPDCLNCTDLDVALGRPMCVGTTPSAKASILHEVRPVTSGCFPIMHDRTKIRQLPNLLRGYEKIRLSTQNVIDAEKAPGGPYRLGTSGSCPNATSKIGFFATMAWAVPKDNYKNATNPQTVEVPYICTEGEDQITVWGFHSDNKTQMKSLYGDSNPQKFTSSANGVTTHYVSQIGDFPDQTEDGGLPQSGRIVVDYMVQKPGKTGTIVYQRGVLLPQKVWCASGRSKVIKGSLPLIGEADCLHEEYGGLNKSKPYYTGKHAKAIGNCPIWVKTPLKLANGTKYRPPAKLLKERGFFGAIAGFLEGGWEGMIAGWHGYTSHGAHGVAVAADLKSTQEAINKITKNLNSLSELEVKNLQRLSGAMDELHNEILELDEKVDDLRADTISSQIELAVLLSNEGIINSEDEHLLALERKLKKMLGPSAVDIGNGCFETKHKCNQTCLDRIAAGTFNAGEFSLPTFDSLNITAASLNDDGLDNHTILLYYSTAASSLAVTLMLAIFIVYMVSRDNVSCSICL

SEQ ID NO: 28453 - protein, 585 aa, synthetic construct; identical to SEQ ID NO: 28451
  REGION 1..585: note = hemagglutinin__InfluenzaB__ALE31989

SEQ ID NO: 28454 - protein, 585 aa, synthetic construct; identical to SEQ ID NO: 28451
  REGION 1..585: note = hemagglutinin__InfluenzaB__ALE31990

SEQ ID NO: 28455 - protein, 584 aa, synthetic construct; identical to SEQ ID NO: 28289
  REGION 1..584: note = hemagglutinin__InfluenzaB__ALE31991

SEQ ID NO: 28456 - protein, 585 aa, synthetic construct
  REGION 1..585: note = hemagglutinin__InfluenzaB__ALE31992
MKAIIVLLMVVTSNADRICTGITSSNSPHVVKTATQGEVNVTGVIPLTTTPTKSHFANLKGTETRGKLCPKCLNCTDLDVALGRPKCTGKIPSARVSILHEVRPVTSGCFPIMHDRTKIRQLPNLLRGYEHVRLSTHNVINAEDAPGGPYKIGTSGSCPNITNGNGFFATMAWAVPKNDKNKTATNPLTIEVPYICTEREDQITVWGFHSDNETQMAKLYGDSKPQKFTSSANGVTTHYVSQIGGFPNQTEDGGLPQSGRIVVDYMVQKSGKTGTITYQRGILLPQKVWCASGRSKVIKGSLPLIGEADCLHEKYGGLNKSKPYYTGEHAKAIGNCPIWVKTPLKLANGTKYRPPAKLLKERGFFGAIAGFLEGGWEGMIAGWHGYTSHGAHGVAVAADLKSTQEAINKITKNLNSLSELEVKNLQRLSGAMDELHNEILELDEKVDDLRADTISSQIELAVLLSNEGIINSEDEHLLALERKLKKMLGPSAVEIGNGCFETKHKCNQTCLDRIAAGTFDAGEFSLPTFDSLNITAASLNDDGLDNHTILLYYSTAASSLAVTLMIAIFVVYMVSRDNVSCSICL

SEQ ID NO: 28457 - protein, 585 aa, synthetic construct; identical to SEQ ID NO: 27865
  REGION 1..585: note = hemagglutinin__InfluenzaB__ALE31993

SEQ ID NO: 28458 - protein, 585 aa, synthetic construct
  REGION 1..585: note = hemagglutinin__InfluenzaB__ALE31994
MKAIIVLLMVVTSNADRICTGITSSNSPHVVKTATQGEVNVTGVIPLTTTPTKSHFANLKGTETRGKLCPKCLNCTDLDVALGRPKCTGKIPSARVSILHEVRPVTSGCFPIMHDRTKIRQLPNLLRGYEHVRLSTHNVINAEDAPGGPYKIGTSGSCPNITNGNGFFATMAWAVPKNDKNKTATNPLTIEVPYICTEGEDQITVWGFHSDNETQMAKLYGDSKPQKFTSSANGVTTHYVSQIGGFPNQTEDGGLPQSGRIVVDYMVQKSGKTGTITYQRGILLPQKVWCASGRSKVIKGSLPLIGEADCLHEKYGGLNKSKPYYTGEHAKAIGNCPIWVRTPLKLANGTKYRPPAKLLKERGFFGAIAGFLEGGWEGMIAGWHGYTSHGAHGVAVAADLKSTQEAINKITKNLNSLSELEVKNLQRLSGAMDELHNEILELDEKVDDLRADTISSQIELAVLLSNEGIINSEDEHLLALERKLKKMLGPSAVEIGNGCFETKHKCNQTCLDRIAAGTFDAGEFSLPTFDSLNITAASLNDDGLDNHTILLYYSTAASSLAVTLMIAIFVVYMVSRDNVSCSICL

SEQ ID NO: 28459 - protein, 584 aa, synthetic construct; identical to SEQ ID NO: 28448
  REGION 1..584: note = hemagglutinin__InfluenzaB__ALN39719

SEQ ID NO: 28460 - protein, 584 aa, synthetic construct; identical to SEQ ID NO: 28289
  REGION 1..584: note = hemagglutinin__InfluenzaB__ALN39720

SEQ ID NO: 28461 - protein, 584 aa, synthetic construct; identical to SEQ ID NO: 28289
  REGION 1..584: note = hemagglutinin__InfluenzaB__ALN39721

SEQ ID NO: 28462 - protein, 584 aa, synthetic construct; identical to SEQ ID NO: 28289
  REGION 1..584: note = hemagglutinin__InfluenzaB__ALN39723

SEQ ID NO: 28463 - protein, 584 aa, synthetic construct; identical to SEQ ID NO: 28289
  REGION 1..584: note = hemagglutinin__InfluenzaB__ALN39724

SEQ ID NO: 28464 - protein, 584 aa, synthetic construct; identical to SEQ ID NO: 28452
  REGION 1..584: note = hemagglutinin__InfluenzaB__ALN39725

SEQ ID NO: 28465 - protein, 584 aa, synthetic construct
  REGION 1..584: note = hemagglutinin__InfluenzaB__ALN39726
MKAIIVLLMVVTSNADRICTGITSSNSPHVVKTATQGEVNVTGVIPLTTTPTKSYFANLKGTRTRGKLCPDCLNCTDLDVALGRPMCVGTTPSAKASILHEVRPVTSGCFPIMHDRTKIRQLPNLLRGYEKIRLSTQNVIDAEKAPGGPYRLGTSGSCPNATSKIGFFATMAWAVPKDNYKNATNPQTVEVPYICTEGEDQITVWGFHSDNKTQMKSLYGDSNPQKFTSSADGVTTHYVSQIGDFPDQTEDGGLPQSGRIVVDYMMQKPGKTGTIVYQRGVLLPQKVWCASGRSKVIKGSLPLIGEADCLHEEYGGLNKSKPYYTGKHAKAIGNCPIWVKTPLKLANGTKYRPPAKLLKERGFFGAIAGFLEGGWEGMIAGWHGYTSHGAHGVAVAADLKSTQEAINKITKNLNSLSELEVKNLQRLSGAMDELHNEILELDEKVDDLRADTISSQIELAVLLSNEGIINSEDEHLLALERKLKKMLGPSAVDIGNGCFETKHKCNQTCLDRIAAGTFNAGEFSLPTFDSLNITAASLNDDGLDNHTILLYYSTAASSLAVTLMLAIFIVYMVSRDNVSCSICL

SEQ ID NO: 28466 - protein, 584 aa, synthetic construct; identical to SEQ ID NO: 28452
  REGION 1..584: note = hemagglutinin__InfluenzaB__ALN39727

SEQ ID NO: 28467 - protein, 584 aa, synthetic construct; identical to SEQ ID NO: 28289
  REGION 1..584: note = hemagglutinin__InfluenzaB__ALN39728

SEQ ID NO: 28468 - protein, 584 aa, synthetic construct; identical to SEQ ID NO: 28289
  REGION 1..584: note = hemagglutinin__InfluenzaB__ALN39729

SEQ ID NO: 28469 - protein, 585 aa, synthetic construct
  REGION 1..585: note = hemagglutinin__InfluenzaB__ALN39730
MKAIIVLLMVVTSNADRICTGITSSNSPHVVKTATQGEVNVTGVIPLTTTPTKSHFANLKGTETRGKLCPKCLNCTDLDVALGRPKCTGKIPSARVSILHEVRPVTSGCFPIMHDRTKIRQLPNLLRGYEHVRLSTHNVINAEDAPGGPYKIGTSGSCPNITNGNGFFATMAWAVPKNDKNKTATNPLTIEVPYICTEGEDQITVWGFHSDNETQMAKLYGDSKPQKFTSSANGVTTHYVSQIGGFPNQTEDGGLPQSGRIVVDYMVQKSGKTGTITYQRGILLPQKVWCASGRSKVIKGSLPLIGEADCLHEKYGGLNKSKPYYTGEHAKAIGNCPIWVKTPLKLANGTKYRPPAKLLKERGFFGAIAGFLEGGWEGMIAGWHGYTSHGAHGVAVAADLKSTQEAINKITKNLNSLSELEVKNLQRLSGAMDELHNEILELDEKVDDLRADTISSQIELAVLLSNEGIINSEDEHLLALERKLKKMLGPSAVEIGNGCFETKHKCNQTCLDRIAAGTFDAGEFFLPTFDSLNITAASLNDDGLDNHTILLYYSTAASSLAVTLMIAIFVVYMVSRDNVSCSICL

SEQ ID NO: 28470 - protein, 584 aa, synthetic construct; identical to SEQ ID NO: 28289
  REGION 1..584: note = hemagglutinin__InfluenzaB__ALN39732

SEQ ID NO: 28471 - protein, 584 aa, synthetic construct
  REGION 1..584: note = hemagglutinin__InfluenzaB__ALN39733
MKAIIVLLMVVTSNADRICTGITSSNSPHVVKTATQGEVNVTGVIPLTTTPTKSYFANLKGTRTRGKLCPDCLNCTDLDVALGRPMCVGTTPSAKASILHEVRPVTSGCFPIMHDRTKIRQLPNLLRGYEKIRLSTQNVIDAEKAPGGPYRLGTSGSCPNATSKIGFFATMAWAVPKDNYKNATNPQTVEVPYICTEGEDQITVWGFHSDNKTQMKSLYGDSNPQKFTSSANGVTTHYVSQIGDFPDQTEDGGLPQSGRIVVDYMMQKPGKTGTIVYQRGVLLPQKVWCASGRSKVIKGSLPLIGEADCLHEEYGGLNKSKPYYTGKHAKAIGNCPIWVKTPLKLANGTKYRPPAKLLKERGFFGAIAGFLEGGWEGMIAGWHGYTSHGAHGVAVAADLKSTQEAINKITKNLNSLSELEVKNLQRLSGAMDELHNEILELDEKVDDLRADTISSQIELAVLLSNEGIINSEDEHLLALERKLKKMLGPSAVDIGNGCFETKHRCNQTCLDRIAAGTFNAGEFSLPTFDSLNITAASLNDDGLDNHTILLYYSTAASSLAVTLMLAIFIVYMVSRDNVSCSICL

SEQ ID NO: 28472 - protein, 584 aa, synthetic construct
  REGION 1..584: note = hemagglutinin__InfluenzaB__ALN39751
MKAIIVLLMVVTSNADRICTGITSSNSPHVVKTATQGEVNVTGVIPLTTTPTKSYFANLKGTRTRGKLCPDCLNCTDLDVALGRPMCVGTTPSAKASILHEVRPVTSGCFPIMHDRTKIRQLPNLLRGYEKIRLSTQNVIDAEKAPGGPYRLGTSGSCPNATSKIGFFATMAWAVPKDNYKNATNPQTVEVPYICTEGEDQITVWGFHSDNKTQMKSLYGDSNPQKFTSSANGVTTHYVSQIGDFPDQTEDGGLPQSGRIVVDYMMQKPGKTGTIVYQRGVLLPQKVWCASGRSKVIKGSLPLIGEADCLHEEYGGLNKSKPYYTGKHAKAIGNCPIWVKTPLKLANGTKYRPPAKLLKERGFFGAIAGFLEGGWEGMVAGWHGYTSHGAHGVAVAADLKSTQEAINKITKNLNSLSELEVKNLQRLSGAMDELHNEILELDEKVDDLRADTISSQIELAVLLSNEGIINSEDEHLLALERKLKKMLGPSAVDIGNGCFETKHKCNQTCLDRIAAGTFNAGEFSLPTFDSLNITAASLNDDGLDNHTILLYYSTAASSLAVTLMLALFIVYMVSRDNVSCSICL

SEQ ID NO: 28473 - protein, 584 aa, synthetic construct; identical to SEQ ID NO: 28448
  REGION 1..584: note = hemagglutinin__InfluenzaB__ALN39752

SEQ ID NO: 28474 - protein, 584 aa, synthetic construct; identical to SEQ ID NO: 28289
  REGION 1..584: note = hemagglutinin__InfluenzaB__ALN39753

SEQ ID NO: 28475 - protein, 585 aa, synthetic construct
  REGION 1..585: note = hemagglutinin__InfluenzaB__ALN39754
MKAIIVLLMVVTSNADRICTGITSSNSPHVVKTATQGEVNVTGVIPLTTTPTKSHFANLKGTETRGKLCPKCLNCTDLDVALGRPKCTGKIPSARVSILHEVRPVTSGCFPIMHDRTKIRQLPNLLRGYEHVRLSTHNVINAEDAPGGPYKIGTSGSCPNITNGNGFFATMAWAVPKNDKNKTATNPLTIEVPYICTEGEDQITVWGFHSDNETQMAKLYGDSKPQKFTSSANGVTTHYVSQIGGFPNQTEDGGLPQSGRIVVDYMVQKSGKTGTITYQRGILLPQKVWCASGRSKVIKGSLPLIGEADCLHEKYGGLNKSKPYYTGEHAKAIGNCPIWVKTPLKLANGTKYRPPAKLLKERGFFGAIAGFLEGGWEGMIAGWHGYTSHGAHGVAVAADLKSTQEAINKITKNLNSLSELEVKNLQRLSGAMDELHNEILELDEKVDDLRADTISSQIELAVLLSNEGIINSEDEHLLALERKLKKMLGPSAVEIGNGCFETKHKCNQTCLDRIAAGTFDAGEFSLPTFDSLNITAASLNDDGLDNHTILLYYSTAASSLAVTLMIAIFVVYMVSRDNVSCSICL

SEQ ID NO: 28476 - protein, 585 aa, synthetic construct
  REGION 1..585: note = hemagglutinin__InfluenzaB__ALN39755
MKAIIVLLLVVTSNADRICTGITSSNSPHVVKTATQGEVNVTGVIPLTTTPTKSHFANLKGTETRGKLCPKCLNCTDLDVALGRPKCTGKIPSARVSILHEVRPVTSGCFPIMHDRTKIRQLPNLLRGYEHVRLSTHNVINAEDAPGGPYKIGTSGSCPNITNGNGFFATMAWAVPKNDKNKTATNPLTIEVPYICTEGEDQITVWGFHSDNETQMAKLYGDSKPQKFTSSANGVTTHYVSQIGGFPNQTEDGGLPQSGRIVVDYMVQKSGKTGTITYQRGILLPQKVWCASGRSKVIKGSLPLIGEADCLHEKYGGLNKSKPYYTGEHAKAIGNCPIWVKTPLKLANGTKYRPPAKLLKERGFFGAIAGFLEGGWEGMIAGWHGYTSHGAHGVAVAADLKSTQEAINKITKNLNSLSELEVKNLQRLSGAMDELHNEILELDEKVDDLRADTISSQIELAVLLSNEGIINSEDEHLLALERKLKKMLGPSAVEIGNGCFETKHKCNQTCLDRIAAGTFDAGEFSLPTFDSLNITAASLNDDGLDNHTILLYYSTAASSLAVTLMIAIFVVYMVSRDNVSCSICL

SEQ ID NO: 28477 - protein, 584 aa, synthetic construct
  REGION 1..584: note = hemagglutinin__InfluenzaB__ALN39756
MKAIIVLLMVVTSNADRICTGITSSNSPHVVKTATQGEVNVTGVIPLTTTPTKSYFANLKGTRTRGKLCPDCLNCTDLDVALGRPMCVGTTPSAKASILHEVRPVTSGCFPIMHDRTKIRQLPNLLRGYEKIRLSTQNVIDAEKAPGGPYRLGTSGSCPNATSKIGFFATMAWAVPKDNYKNATNPQTVEVPYICTEGEDQITVWGFHSDNKTQMKSLYGDSNPQKFTSSANGVTTHYVSQIGDFPDQTEDGGLPQSGRIVVDYMMQKPGKTGTIVYQRGVLLPQKVWCASGRSKVIKGSLPLIGEADCLHEEYGGLNKSKPYYTGKHAKAIGNCPIWVKTPLKLANGTKYRPPAKLLKERGFFGAIAGFLEGGWEGMIAGWHGYTSHGAHGVAVAADLKSTQEAINKITKNLNSLSELEVKNLQRLSGAMDELHNEILELDEKVDDLRADTISSQIELAVLLSNEGIINSEDEHLLALERKLKKMLGPSAVDIGNGCFETKHKCNQTCLDRIAAGTFNVGEFSLPTFDSLNITAASLNDDGLDNHTILLYYSTAASSLAVTLMLAIFIVYMVSRDNVSCSICL

SEQ ID NO: 28478 - protein, 585 aa, synthetic construct; identical to SEQ ID NO: 28475
  REGION 1..585: note = hemagglutinin__InfluenzaB__ALN39757

SEQ ID NO: 28479 - protein, 584 aa, synthetic construct; identical to SEQ ID NO: 28289
  REGION 1..584: note = hemagglutinin__InfluenzaB__ALN39758

SEQ ID NO: 28480 - protein, 584 aa, synthetic construct
  REGION 1..584: note = hemagglutinin__InfluenzaB__ALN39759
MKTIIVLLMVVTSNADRICTGITSSNSPHVVKTATQGEVNVTGVIPLTTTPTKSYFANLKGTRTRGKLCPDCLNCTDLDVALGRPMCVGTTPSAKASILHEVRPVTSGCFPIMHDRTKIRQLPNLLRGYEKIRLSTQNVIDAEKAPGGPYRLGTSGSCPNATSKIGFFATMAWAVPKDNYKNATNPQTVEVPYICTEGEDQITVWGFHSDNKTQMKSLYGDSNPQKFTSSANGVTTHYVSQIGDFPDQTEDGGLPQSGRIVVDYMMQKPGKTGTIVYQRGVLLPQKVWCASGRSKVIKGSLPLIGEADCLHEEYGGLNKSKPYYTGKHAKAIGNCPIWVKTPLKLANGTKYRPPAKLLKERGFFGAIAGFLEGGWEGMIAGWHGYTSHGAHGVAVAADLKSTQEAINKITKNLNSLSELEVKNLQRLSGAMDELHNEILELDEKVDDLRADTISSQIELAVLLSNEGIINSEDEHLLALERKLKKMLGPSAVDIGNGCFETKHKCNQTCLDRIAAGTFNAGEFSLPTFDSLNITAASLNDDGLDNHTILLYYSTAASSLAVTLMLAIFIVYMVSRDNVSCSICL

SEQ ID NO: 28481 - protein, 585 aa, synthetic construct; identical to SEQ ID NO: 28439
  REGION 1..585: note = hemagglutinin__InfluenzaB__ALN39760

SEQ ID NO: 28482 - protein, 584 aa, synthetic construct; identical to SEQ ID NO: 28289
  REGION 1..584: note = hemagglutinin__InfluenzaB__ALN39761

SEQ ID NO: 28483 - protein, 584 aa, synthetic construct; identical to SEQ ID NO: 28289
  REGION 1..584: note = hemagglutinin__InfluenzaB__ALN39762

SEQ ID NO: 28484 - protein, 584 aa, synthetic construct; identical to SEQ ID NO: 28289
  REGION 1..584: note = hemagglutinin__InfluenzaB__ALN39763

SEQ ID NO: 28485 - protein, 585 aa, synthetic construct; identical to SEQ ID NO: 28475
  REGION 1..585: note = hemagglutinin__InfluenzaB__ALN39764

SEQ ID NO: 28486 - protein, 584 aa, synthetic construct
  REGION 1..584: note = hemagglutinin__InfluenzaB__ALN39765
MKAIIVLLMVVTSNADRICTGITSSNSPHVVKTATQGEVNVTGVIPLTTTPTKSYFANLKGTRTRGKLCPDCLNCTDLDVALGRPMCVGTTPSAKASILHEVRPVTSGCFPIMHDRTKIRQLPNLLRGYEKIRLSTQNVIDAEKAPGGPYRLGTSGSCPNATSKIGFFATMAWAVPKDNYKNATNPQTVEVPYICTEGEDQITVWGFHSDNKTQMKSLYGDSNPQKFTSSANGVTTHYVSQIGDFPDQTEDGGLPQSGRIVVDYMMQKPGKTGTIVYQRGVLLPQKVWCASGRSKVIKGSLPLIGEADCLHEEYGGLNKSKPYYTGKHAKAIGNCPIWVKTPLKLANGTKYRPPAKLLKERGFFGAIAGFLEGGWEGMIAGWHGYTSHGAHGVAVAADLKSTQEAINKITKNLNSLSELEVNNLQRLSGAMDELHNEILELDEKVDDLRADTISSQIELAVLLSNEGIINSEDEHLLALERKLKKMLGPSAVDIGNGCFETKHKCNQTCLDRIAAGTFNAGEFSLPTFDSLNITAASLNDDGLDNHTILLYYSTAASSLAVTLMLALFIVYMVSRDNVSCSICL

SEQ ID NO: 28487 - protein, 584 aa, synthetic construct; identical to SEQ ID NO: 28452
  REGION 1..584: note = hemagglutinin__InfluenzaB__ALN39766

SEQ ID NO: 28488 - protein, 584 aa, synthetic construct; identical to SEQ ID NO: 28289
  REGION 1..584: note = hemagglutinin__InfluenzaB__ALN39767

SEQ ID NO: 28489 - protein, 584 aa, synthetic construct; identical to SEQ ID NO: 28452
  REGION 1..584: note = hemagglutinin__InfluenzaB__ALN39768

SEQ ID NO: 28490 - protein, 584 aa, synthetic construct
  REGION 1..584: note = hemagglutinin__InfluenzaB__ALN39769
MKAIIVLLMVVTSNADRICTGITSSNSPHVVKTATQGEVNVTGVIPLTTTPTKSYFANLKGTRTRGKLCPDCLNCTDLDVALGRPMCVGTTPSAKASILHEVRPVTSGCFPIMHGRTKIRQLPNLLRGYEKIRLSTQNVIDAEKAPGGPYRLGTSGSCPNATSKIGFFATMAWAVPKDNYKNATNPQTVEVPYICTEGEDQITVWGFHSDNKTQMKSLYGDSNPQKFTSSANGVTTHYVSQIGDFPDQTEDGGLPQSGRIVVDYMMQKPGKTGTIVYQRGVLLPQKVWCASGRSKVIKGSLPLIGEADCLHEEYGGLNKSKPYYTGKHAKAIGNCPIWVKTPLKLANGTKYRPPAKLLKERGFFGAIAGFLEGGWEGMIAGWHGYTSHGAHGVAVAADLKSTQEAINKITKNLNSLSELEVKNLQRLSGAMDELHNEILELDEKVDDLRADTISSQIELAVLLSNEGIINSEDEHLLALERKLKKMLGPSAVDIGNGCFETKHKCNQTCLDRIAAGTFNAGEFSLPTFDSLNITAASLNDDGLDNHTILLYYSTAASSLAVTLMLAIFIVYMVSRDNVSCSICL

SEQ ID NO: 28491 - protein, 584 aa, synthetic construct; identical to SEQ ID NO: 28448
  REGION 1..584: note = hemagglutinin__InfluenzaB__ALN39770

SEQ ID NO: 28492 - protein, 584 aa, synthetic construct; identical to SEQ ID NO: 28448
  REGION 1..584: note = hemagglutinin__InfluenzaB__ALN39771

SEQ ID NO: 28493 - protein, 584 aa, synthetic construct; identical to SEQ ID NO: 28289
  REGION 1..584: note = hemagglutinin__InfluenzaB__ALN39773

SEQ ID NO: 28494 - protein, 584 aa, synthetic construct; identical to SEQ ID NO: 28289
  REGION 1..584: note = hemagglutinin__InfluenzaB__ALN39774

SEQ ID NO: 28495 - protein, 585 aa, synthetic construct
  REGION 1..585: note = hemagglutinin__InfluenzaB__ALN39775
MQAIIVLLMVVTSNADRICTGITSSNSPHVVKTATQGEVNVTGVIPLTTTPTKSHFANLKGTETRGKLCPKCLNCTDLDVALGRPKCTGKIPSARVSILHEVRPVTSGCFPIMHDRTKIRQLPNLLRGYEHIRLSTHNVINAEDAPGGPYKIGTSGSCPNITNGNGFFATMAWAVPKNDKNKTATNPLTIEVPYICTEGEDQITVWGFHSDNETQMAKLYGDSKPQKFTSSANGVTTHYVSQIGGFPNQTEDGGLPQSGRIVIDYMVQKSGKTGTITYQRGILLPQKVWCVSGRSKVIKGSLPLIGEADCLHEKYGGLNKSKPYYTGEHAKAVGNCPIWVKTPLKLANGTKYRPPAKLLKERGFFGAIAGFLEGGWEGMIAGWHGYTSHGAHGVAVAADLKSTQEAINKITKNLNSLSELEVKNLQRLSGAMDELHNEILELDEKVDDLRADTISSQIELAVLLSNEGIINSEDEHLLALERKLKKMLGPSAVEIGNGCFETKHKCNQTCLDRIAAGTFDAGEFSLPTFDSLNITAASLNDDGLDNHTILLYYSTAASSLAVTLMIAIFVVYMVSRDNVSCSICL

SEQ ID NO: 28496 - protein, 584 aa, synthetic construct
  REGION 1..584: note = hemagglutinin__InfluenzaB__ALN39776
MKAIIILLMVVTSNADRICTGITSSNSPHVVKTATQGEVNVTGVIPLTTTPTKSYFANLKGTRTRGKLCPDCLNCTDLDVALGRPMCVGTTPSAKASILHEVRPVTSGCFPIMHDRTKIRQLPNLLRGYEKIRLSTQNVIDAEKAPGGPYRLGTSGSCPNATSKIGFFATMAWAVPKDNYKNATNPQTVEVPYICTEGEDQITVWGFHSDNKTQMKSLYGDSNPQKFTSSANGVTTHYVSQIGDFPDQTEDGGLPQSGRIVVDYMMQKPGKTGTIVYQRGVLLPQKVWCASGRSKVIKGSLPLIGEADCLHEEYGGLNKSKPYYTGKHAKAIGNCPIWVKTPLKLANGTKYRPPAKLLKERGFFGAIAGFLEGGWEGMIAGWHGYTSHGAHGVAVAADLKSTQEAINKITKNLNSLSELEVKNLQRLSGAMDELHNEILELDEKVDDLRADTISSQIELAVLLSNEGIINSEDEHLLALERKLKKMLGPSAVDIGNGCFETKHKCNQTCLDRIAAGTFNAGEFSLPTFDSLNITAASLNDDGLDNHTILLYYSTAASSLAVTLMLAIFIVYMVSRDNVSCSICL

SEQ ID NO: 28497 - protein, 584 aa, synthetic construct; identical to SEQ ID NO: 28452
  REGION 1..584: note = hemagglutinin__InfluenzaB__ALN39778

SEQ ID NO: 28498 - protein, 585 aa, synthetic construct; identical to SEQ ID NO: 28475
  REGION 1..585: note = hemagglutinin__InfluenzaB__ALN39779

SEQ ID NO: 28499 - protein, 584 aa, synthetic construct; identical to SEQ ID NO: 28289
  REGION 1..584: note = hemagglutinin__InfluenzaB__ALN39780

SEQ ID NO: 28500 - protein, 585 aa, synthetic construct; identical to SEQ ID NO: 28475
  REGION 1..585: note = hemagglutinin__InfluenzaB__ALN39781

SEQ ID NO: 28501 - protein, 585 aa, synthetic construct; identical to SEQ ID NO: 28439
  REGION 1..585: note = hemagglutinin__InfluenzaB__ALN39782

SEQ ID NO: 28502 - protein, 584 aa, synthetic construct
  REGION 1..584: note = hemagglutinin__InfluenzaB__ALN39783
MKAIIVLLMVVTSNADRICTGITSSNSPHVVKTATQGEVNVTGVIPLTTTPTKSYFANLKGTRTRGKLCPDCLNCTDLDVALGRPMCVGTTPSAKASILHEVRPVTSGCFPIMHDRTKIRQLPNLLRGYEKIRLSTQNVIDAEKAPGGPYRLGTSGSCPNATSKIGFFATMAWAVPKDNYKNATNLQTVEVPYICTEGEDQITVWGFHSDNKTQMKSLYGDSNPQKFTSSANGVTTHYVSQIGDFPDQTEDGGLPQSGRIVVDYMVQKPGKTGTIVYQRGVLLPQKVWCASGRSKVIKGSLPLIGEADCLHEEYGGLNKSKPYYTGKHAKAIGNCPIWVKTPLKLANGTKYRPPAKLLKERGFFGAIAGFLEGGWEGMIAGWHGYTSHGAHGVAVAADLKSTQEAINKITKNLNSLSELEVKNLQRLSGAMDELHNEILELDEKVDDLRADTISSQIELAVLLSNEGIINSEDEHLLALERKLKKMLGPSAVDIGNGCFETKHKCNQTCLDRIAAGTFNAGEFSLPTFDSLNITAASLNDDGLDNHTILLYYSTAASSLAVTLMLAIFIVYMVSRDNVSCSICL

SEQ ID NO: 28503 - protein, 585 aa, synthetic construct; identical to SEQ ID NO: 28451
  REGION 1..585: note = hemagglutinin__InfluenzaB__ALN39784

SEQ ID NO: 28504 - protein, 585 aa, synthetic construct; identical to SEQ ID NO: 28475
  REGION 1..585: note = hemagglutinin__InfluenzaB__ALN39785

SEQ ID NO: 28505 - protein, 584 aa, synthetic construct; identical to SEQ ID NO: 28289
  REGION 1..584: note = hemagglutinin__InfluenzaB__ALN39786

SEQ ID NO: 28506 - protein, 585 aa, synthetic construct; identical to SEQ ID NO: 28475
  REGION 1..585: note = hemagglutinin__InfluenzaB__ALN39787

SEQ ID NO: 28507 - protein, 585 aa, synthetic construct; identical to SEQ ID NO: 28475
  REGION 1..585: note = hemagglutinin__InfluenzaB__ALN39788

SEQ ID NO: 28508 - protein, 584 aa, synthetic construct
  REGION 1..584: note = hemagglutinin__InfluenzaB__ALN39790
MKAIIVLLMVVTSDADRICTGITSSNSPHVVKTATQGEVNVTGVIPLTTTPTKSYFANLKGTRTRGKLCPDCLNCTDLDVALGRPMCVGTTPSAKASILHEVRPVTSGCFPIMHDRTKIRQLPNLLRGYEKIRLSTQNVIDAEKAPGGPYRLGTSGSCPNATSKIGFFATMAWAVPKDNYKNATNPQTVEVPYICTEGEDQITVWGFHSDNKTQMKSLYGDSNPQRFTSSANGVTTHYVSQIGDFPDQTEDGGLPQSGRIVVDYMVQKPGKTGTIVYQRGVLLPQKVWCASGRSKVIKGSLPLIGEADCLHEEYGGLNKSKPYYTGKHAKAIGNCPIWVKTPLKLANGTKYRPPAKLLKERGFFGAIAGFLEGGWEGMIAGWHGYTSHGAHGVAVAADLKSTQEAINKITKNLNSLSELEVKNLQRLSGAMDELHNEILELDEKVDDLRADTISSQIELAVLLSNEGIINSEDEHLLALERKLKKMLGPSAVDIGNGCFETKHKCNQTCLDRIAAGTFNAGEFSLPTFDSLNITAASLNDDGLDNHTILLYYSTAASSLAVTLMLAIFIVYMVSRDNVSCSICL

SEQ ID NO: 28509 - protein, 584 aa, synthetic construct
  REGION 1..584: note = hemagglutinin__InfluenzaB__ALN39791
MKAIIVLLMVVMSNADRICTGITSSNSPHVVKTATQGEVNVTGVIPLTTTPTKSYFANLKGTRTRGKLCPDCLNCTDLDVALGRPMCVGTTPSAKASILHEVRPVTSGCFPIMHDRTKIRQLPNLLRGYEKIRLSTQNVIDAEKAPGGPYRLGTSGSCPNATSKIGFFATMAWAVPKDNYKNATNPQTVEVPYICTEGEDQITVWGFHSDNKTQMKSLYGDSNPQKFTSSANGVTTHYVSQIGDFPDQTEDGGLPQSGRIVVDYMVQKPGKTGTIVYQRGVLLPQKVWCASGRSKVIKGSLPLIGEADCLHEEYGGLNKSKPYYTGKHAKAIGNCPIWVKTPLKLANGTKYRPPAKLLKERGFFGAIAGFLEGGWEGMIAGWHGYTSHGAHGVAVAADLKSTQEAINKITKNLNSLSELEVKNLQRLSGAMDELHNEILELDEKVDDLRADTISSQIELAVLLSNEGIINSEDEHLLALERKLKKMLGPSAVDIGNGCFETKHKCNQTCLDRIAAGTFNAGEFSLPTFDSLNITAASLNDDGLDNHTILLYYSTAASSLAVTLMLAIFIVYMVSRDNVSCSICL

SEQ ID NO: 28510 - protein, 585 aa, synthetic construct; identical to SEQ ID NO: 28475
  REGION 1..585: note = hemagglutinin__InfluenzaB__ALN39792

SEQ ID NO: 28511 - protein, 585 aa, synthetic construct; identical to SEQ ID NO: 28475
  REGION 1..585: note = hemagglutinin__InfluenzaB__ALN39793

SEQ ID NO: 28512 - protein, 584 aa, synthetic construct
  REGION 1..584: note = hemagglutinin__InfluenzaB__ALN39794
MKAIIILLMVVTSNADRICTGITSSNSPHVVKTATQGEVNVTGVIPLTTTPTKSYFANLKGTRTRGKLCPDCLNCTDLDVALGRPMCVGTTPSAKASILHEVRPVTSGCFPIMHDRTKIRQLPNLLRGYEKIRLSTQNVIDAEKAPGGPYRLGTSGSCPNATSKIGFFATMAWAVPKDNYKNATNPQTVEVPYICTEGEDQITVWGFHSDNKTQMKSLYGDSNPQKFTSSADGVTTHYVSQIGDFPDQTEDGGLPQSGRIVVDYMMQKPGKTGTIVYQRGVLLPQKVWCASGRSKVIKGSLPLIGEADCLHEEYGGLNKSKPYYTGKHAKAIGNCPIWVKTPLKLANGTKYRPPAKLLKERGFFGAIAGFLEGGWEGMIAGWHGYTSHGAHGVAVAADLKSTQEAINKITKNLNSLSELEVKNLQRLSGAMDELHNEILELDEKVDDLRADTISSQIELAVLLSNEGIINSEDEHLLALERKLKKMLGPSAVDIGNGCFETKHKCNQTCLDRIAAGTFNAGEFSLPTFDSLNITAASLNDDGLDNHTILLYYSTAASSLAVTLMLAIFIVYMVSRDNVSCSICL

SEQ ID NO: 28513 - protein, 584 aa, synthetic construct; identical to SEQ ID NO: 28452
  REGION 1..584: note = hemagglutinin__InfluenzaB__ALN39795

SEQ ID NO: 28514 - protein, 585 aa, synthetic construct
  REGION 1..585: note = hemagglutinin__InfluenzaB__ALN39796
MKAIIVLLMVVTSNADRICTGITSSNSPHVVKTATQGEVNVTGVIPLTTTPTKSHFANLKGTETRGKLCPKCLNCTDLDVALGRPKCTGKIPSARVSILHEVRPVTSGCFPIMHDRTKIRQLPNLLRGYEHIRLSTHNVINAEDAPGGPYKIGTSGSCPNATNGNGFFATMAWAVPKNDKNKTATNPLTIEVPYICTEGEDQITVWGFHSDNETQMAKLYGDSKPQKFTSSANGVTTHYVSQIGGFPNQTEDGGLPQSGRIVVDYMVQKSGKTGTITYQRGILLPQKVWCASGRSKVIKGSLPLIGEADCLHEKYGGLNKSKPYYTGEHAKAIGNCPIWVKTPLKLANGTKYRPPAKLLKERGFFGAIAGFLEGGWEGMIAGWHGYTSHGAHGVAVAADLKSTQEAINKITKNLNSLSELEVKNLQRLSGAMDELHNEILELDEKVDDLRADTISSQIELAVLLSNEGIINSEDEHLLALERKLKKMLGPSAVEIGNGCFETKHKCNQTCLDRIAAGTFDAGEFSLPTFDSLNITAASLNDDGLDNHTILLYYSTAASSLAVTLMIAIFVVYMVSRDNVSCSICL

SEQ ID NO: 28515 - protein, 584 aa, synthetic construct; identical to SEQ ID NO: 28452
  REGION 1..584: note = hemagglutinin__InfluenzaB__ALN39797

SEQ ID NO: 28516 - protein, 584 aa, synthetic construct
  REGION 1..584: note = hemagglutinin__InfluenzaB__ALN39798
MKAIIVLLMVVTSNADRICTGITSSSSPHVVKTATQGEVNVTGVIPLTTTPTKSYFANLKGTRTRGKLCPDCLNCTDLDVALGRPMCVGTTPSAKASILHEVRPVTSGCFPIMHDRTKIRQLPNLLRGYEKIRLSTQNVIDAEKAPGGPYRLGTSGSCPNATSKIGFFATMAWAVPKDNYKNATNPQTVEVPYICTEGEDQITVWGFHSDNKTQMKSLYGDSNPQKFTSSANGVTTHYVSQIGDFPDQTEDGGLPQSGRIVVDYMMQKPGKTGTIVYQRGVLLPQKVWCASGRSKVIKGSLPLIGEADCLHEEYGGLNKSKPYYTGKHAKAIGNCPIWVKTPLKLANGTKYRPPAKLLKERGFFGAIAGFLEGGWEGMIAGWHGYTSHGAHGVAVAADLKSTQEAINKITKNLNSLSELEVKNLQRLSGAMDELHNEILELDEKVDDLRADTISSQIELAVLLSNEGIINSEDEHLLALERKLKKMLGPSAVDIGNGCFETKHKCNQTCLDRIAAGTFNAGEFSLPTFDSLNITAASLNDDGLDNHTILLYYSTAASSLAVTLMLAIFIVYMVSRDNVSCSICL

SEQ ID NO: 28517 - protein, 584 aa, synthetic construct; identical to SEQ ID NO: 28289
  REGION 1..584: note = hemagglutinin__InfluenzaB__ALN39799

SEQ ID NO: 28518 - protein, 584 aa, synthetic construct
  REGION 1..584: note = hemagglutinin__InfluenzaB__ALN39800
MKAIIVLLMVVTSNADRICTGITSSNSPHVVKTATQGEVNVTGVIPLTTTPTKSYFANLKGTRTRGKLCPDCLNCTDLDVALGRPMCVGTTPSAKASILHEVRPVTSGCFPIMHDRTKIRQLPNLLRGYEKIRLSTQNVIDAEKAPGGPYRLGTSGSCPNATSKIGFFATMAWAVPKDNYKNATNPQTVEVPYICTEGEDQITVWGFHSDNKTQMKSLYGDSNPQKFTSSANGVTTHYVSQIGDFPDQTEDGGLPQSGRIVVDYMMQKPGKTGTIVYQRGVLLPQKVWCASGRSKVIKGSLPLIGEADCLHEEYGGLNKSKPYYTGKHAKAIGNCPIWVKTPLKLANGTKYRPPAKLLKERGFFGAIAGFLEGGWEGMIAGWHGYTSHGAHGVAVAADLKSTQEAINKITKNLNSLSELEVKNLQRLSGAMDELHNEILELDEKVDDLRADTISSQIELAVLLSNEGIINSEDEHLLALEKKLKKMLGPSAVDIGNGCFETKHKCNQTCLDRIAAGTFNAGEFSLPTFDSLNITAASLNDDGLDNHTILLYYSTAASSLAVTLMLAIFIVYMVSRDNVSCSICL

SEQ ID NO: 28519 - protein, 584 aa, synthetic construct; identical to SEQ ID NO: 28509
  REGION 1..584: note = hemagglutinin__InfluenzaB__ALN39801

SEQ ID NO: 28520 - protein, 584 aa, synthetic construct; identical to SEQ ID NO: 28452
  REGION 1..584: note = hemagglutinin__InfluenzaB__ALN39802

SEQ ID NO: 28521 - protein, 584 aa, synthetic construct; identical to SEQ ID NO: 28509
  REGION 1..584: note = hemagglutinin__InfluenzaB__ALN39803

SEQ ID NO: 28522 - protein, 584 aa, synthetic construct; identical to SEQ ID NO: 28448
  REGION 1..584: note = hemagglutinin__InfluenzaB__ALN39804

SEQ ID NO: 28523 - protein, 585 aa, synthetic construct; identical to SEQ ID NO: 28475
  REGION 1..585: note = hemagglutinin__InfluenzaB__ALN39805

SEQ ID NO: 28524 - protein, 585 aa, synthetic construct; identical to SEQ ID NO: 26989
  REGION 1..585: note = hemagglutinin__InfluenzaB__ACN29380

SEQ ID NO: 28525 - protein, 585 aa, synthetic construct; identical to SEQ ID NO: 27321
  REGION 1..585: note = hemagglutinin__InfluenzaB__EPI498048

SEQ ID NO: 28526 - protein, 585 aa, synthetic construct
  REGION 1..585: note = hemagglutinin__InfluenzaB__ANC28539
MKAIIVLLMVVTSNADRICTGITSSNSPHVVKTATQGEVNVTGVIPLTTTPTKSHFANLKGTETRGKLCPKCLNCTDLDVALGRPKCTGKIPSARVSILHEVRPVTSGCFPIMHDRTKIRQLPNLLRGYEHIRLSTHNVINAENAPGGPYKIGTSGSCPNITNGNGFFATMAWAVPKNDKNKTATNPLTIEVPYICTEGEDQITVWGFHSDNEAQMAKLYGDSKPQKFTSSANGVTTHYVSQIGGFPNQTEDGGLPQSGRIVVDYMVQKSGKTGTITYQRGILLPQKVWCASGRSKVIKGSLPLIGEADCLHEKYGGLNKSKPYYTGEHAKAIGNCPIWVKTPLKLANGTKYRPPAKLLKERGFFGAIAGFLEGGWEGMIAGWHGYTSHGAHGVAVAADLKSTQEAINKITKNLNSLSELEVKNLQRLSGAMDELHNEILELDEKVDDLRADTISSQIELAVLLSNEGIINSEDEHLLALERKLKKMLGPSAVEIGNGCFETKHKCNQTCLDRIAAGTFDAGEFSLPTFDSLNITAASLNDDGLDNHTILLYYSTAASSLAVTLMIAIFVVYMVSRDNVSCSICL

SEQ ID NO: 28527 - protein, 585 aa, synthetic construct
  REGION 1..585: note = hemagglutinin__InfluenzaB__EPI827073
MKAIIVLLMVVTSNADRICTGITSSNSPHVVKTATQGEVNVTGVIPLTTTPTKSHFANLKGTETRGKLCPKCLNCTDLDVALGRPKCTGKIPSARVSILHEVRPVTSGCFPIMHDRTKIRQLPNLLRGYEHIRLSTHNVINAENAPGGPYKIGTSGSCPNITNGNGFFATMAWAVPKNDKNKTATNPLTIEVPYICTEGEDQITVWGLHSDNEIQMAKLYGDSKPQKFTSSANGVTTHYVSQIGGFPNQTEDGGLPQSGRIVVDYMVQKSGKTGTITYQRGILLPQKVWCASGRSKVIKGSLPLIGEADCLHEKYGGLNKSKPYYTGEHAKAIGNCPIWVKTPLKLANGTKYRPPAKLLKERGFFGAIAGFLEGGWEGMIAGWHGYTSHGAHGVAVAADLKSTQEAINKITKNLNSLSELEVKNLQRLSGAMDELHNEILELDEKVDDLRADTISSQIELAVLLSNEGIINSEDEHLLALERKLKKMLGPSAVEIGNGCFETKHKCNQTCLDRIAAGTFDAGEFSLPTFDSLNITAASLNDDGLDNHTILLYYSTAASSLAVTLMIAIFVVYMVSRDNVSCSICL

SEQ ID NO: 28528 - protein, 585 aa, synthetic construct; identical to SEQ ID NO: 26747
  REGION 1..585: note = hemagglutinin__InfluenzaB__EPI244699

SEQ ID NO: 28529 - protein, 585 aa, synthetic construct; identical to SEQ ID NO: 26740
  REGION 1..585: note = hemagglutinin__InfluenzaB__EPI244702

SEQ ID NO: 28530 - protein, 584 aa, synthetic construct; identical to SEQ ID NO: 28129
  REGION 1..584: note = hemagglutinin__InfluenzaB__EPI540671

SEQ ID NO: 28531 - protein, 584 aa, synthetic construct
  REGION 1..584: note = hemagglutinin__InfluenzaB__EPI573303
MKAIIVLLMVVTSNADRICTGITSSNSPHVVKTATQGEVNVTGVIPLTTTPTKSYFANLKGTRTRGKLCPDCLNCTDLDVALGRPMCVGTTPSAKASILHEVRPVTSGCFPIMHDRTKIRQLPNLLRGYEKIRLSTQNVIDAEKAPGGPYRLGTSGSCPNATSKIGFFATMAWAVPKDNYKNATNPLTVEVPYICTEGEDQITVWGFHSDDKTQMKSLYGDSNPQKFTSSANGVTTHYVSQIGDFPDQTEDGGLPQSGRIVVDYMMQKPGKTGTIVYQRGVLLPQKVWCASGRSKVIKGSLPLIGEADCLHEEYGGLNKSKPYYTGKHAKAIGNCPIWVKTPLKLANGTKYRPPAKLLKERGFFGAIAGFLEGGWEGMIAGWHGYTSHGAHGVAVAADLKSTQEAINKITKNLNSLSELEVKNLQRLSGAMDELHNEILELDEKVDDLRADTISSQIELAVLLSNEGIINSEDEHLLALERKLKKMLGPSAVDIGNGCFETKHKCNQTCLDRIAAGTFNAGEFSLPTFDSLNITAASLNDDGLDNHTILLYYSTAASSLAVTLMLAIFIVYMVSRDNVSCSICL

SEQ ID NO: 28532 - protein, 584 aa, synthetic construct
  REGION 1..584: note = hemagglutinin__InfluenzaB__EPI829466
MKAIIVLLMVVTSNADRICTGITSSNSPHVVKTATQGEVNVTGVIPLTTTPTKSYFANLKGTRTRGKLCPDCLNCTDLDVALGRPMCVGTTPSAKASILHEVRPVTSGCFPIMHDRTKIRQLPNLLRGYEKIRLSTQNVIDAEKAPGGPYRLGTSGSCPNATSKIGFFATMAWAVPKDNYKNATNPLTVEVPYICTEGEDQITVWGFHSDDKTQMKSLYGDSNPQKFTSSANGVTTHYVSQIGDFPDQTEDEGLPQSGRIVVDYMMQKPGKTGTIVYQRGVLLPQKVWCASGRSKVIKGSLPLIGEADCLHEEYGGLNKSKPYYTGKHAKAIGNCPIWVKTPLKLANGTKYRPPAKLLKERGFFGAIAGFLEGGWEGMIAGWHGYTSHGAHGVAVAADLKSTQEAINKITKNLNSLSELEVKNLQRLSGAMDELHNEILELDEKVDDLRADTISSQIELAVLLSNEGIINSEDEHLLALERKLKKMLGPSAVDIGNGCFETKHKCNQTCLDRIAAGTFNAGEFSLPTFDSLNITAASLNDDGLDNHTILLYYSTAASSLAVTLMLAIFIVYMVSRDNVSCSICL

SEQ ID NO: 28533 - protein, 584 aa, synthetic construct
  REGION 1..584: note = hemagglutinin__InfluenzaB__EPI684429
MKAIIVLLMVVMSNADRICTGITSSNSPHVVKTATQGEVNVTGVIPLTTTPTKSYFANLKGTRTRGKLCPDCLNCTDLDVALGRPMCVGTTPSAKASILHEVRPVTSGCFPIMHDRTKIRQLPNLLRGYEKIRLSTQNVIDAEKAPGGPYRLGTSGSCPNATSKIGFFATMAWAVPKDNYKNATNPQTVEVPYICTEGEDQITVWGFHSDNKTQMKSLYGDSNPQKFTSSANGVTTHYVSQIGDFPDQTEDGGLPQSGRIVVDYMVQKPGKTGTIVYQRGVLLPQKVWCVSGRSKVIKGSLPLIGEADCLHEEYGGLNKSKPYYTGKHAKAIGNCPIWVKTPLKLANGTKYRPPAKLLKERGFFGAIAGFLEGGWEGMIAGWHGYTSHGAHGVAVAADLKSTQEAINKITKNLNSLSELEVKNLQRLSGAMDELHNEILELDEKVDDLRADTISSQIELAVLLSNEGIINSEDEHLLALERKLKKMLGPSAVDIGNGCFETKHKCNQTCLDRIAAGTFNAGEFSLPTFDSLNITAASLNDDGLDNHTILLYYSTAASSLAVTLMLAIFIVYMVSRDNVSCSICL

SEQ ID NO: 28534 - protein, 585 aa, synthetic construct; identical to SEQ ID NO: 26752
  REGION 1..585: note = hemagglutinin__InfluenzaB__AFH58447

SEQ ID NO: 28535 - protein, 585 aa, synthetic construct
  REGION 1..585: note = hemagglutinin__InfluenzaB__EPI173279
MKAIIVILMVVTSNADRICTGITSSNSPHVVKTATQGEVNVTGVIPLTTTPTKSHFANLKGTETRGKLCPKCLNCTDLDVALGRPKCTGKIPSARVSILHEVRPVTSGCFPIMHDRTKIRQLPNLLRGYEHIRLSTHNVINAENAPGGPYKIGTSGSCPNITNGNGFFATMAWAVPKNDKNKTATNPLTIEVPYICTEGEDQITVWGFHSDSETQMAKLYGDSKPQKFTSSANGVTTHYVSQIGGFPNQTEDGGLPQSGRIVVDYMVQKSGKTGTITYQRGILLPQKVWCASGRSKVIKGSLPLIGEADCLHEKYGGLNKSKPYYTGEHAKAIGNCPIWVKTPLKLANGTKYRPPAKLLKERGFFGAIAGFLEGGWEGMIAGWHGYTSHGAHGVAVAADLKSTQEAINKITKNLNSLSELEVKNLQRLSGAMDELHNEILELDEKVDDLRADTISSQIELAVLLSNEGIINSEDEHLLALERKLKKMLGPSAVEIGNGCFETKHKCNQTCLDRIAAGTFDAGEFSLPTFDSLNITAASLNDDGLDNHTILLYYSTAASSLAVTLMIAIFVVYMVSRDNVSCSICL

SEQ ID NO: 28536 - protein, 585 aa, synthetic construct; identical to SEQ ID NO: 27321
  REGION 1..585: note = hemagglutinin__InfluenzaB__EPI163726

SEQ ID NO: 28537 - protein, 585 aa, synthetic construct; identical to SEQ ID NO: 28475
  REGION 1..585: note = hemagglutinin__InfluenzaB__EPI636340

SEQ ID NO: 28538 - protein, 585 aa, synthetic construct
  REGION 1..585: note = hemagglutinin__InfluenzaB__EPI645995
MKAIIVLLMVVTSNADRICTGITSSNSPHVVKTATQGEVNVTGVIPLTTTPTKSHFANLKGTETRGKLCPKCLNCTDLDVALGRPKCTGKIPSARVSILHEVRPVTSGCFPIMHDRTKIRQLPNLLRGYEHVRLSTHNVINAEDAPGGPYKIGTSGSCPNITNGNGFFATMAWAVPKNDKNKTATNPLTIEVPYICTEGEDQITVWGFHSDDETQMAKLYGDSKPQKFTSSANGVTTHYVSQIGGFPNQTEDGGLPQSGRIVVDYMVQKSGKTGTITYQRGILLPQKVWCASGRSKVIKGSLPLIGEADCLHEKYGGLNKSKPYYTGEHAKAIGNCPIWVKTPLKLANGTKYRPPAKLLKERGFFGAIAGFLEGGWEGMIAGWHGYTSHGAHGVAVAADLKSTQEAINKITKNLNSLSELEVKNLQRLSGAMDELHNEILELDEKVDDLRADTISSQIELAVLLSNEGIINSEDEHLLALERKLKKMLGPSAVEIGNGCFETKHKCNQTCLDRIAAGTFDAGEFSLPTFDSLNITAASLNDDGLDNHTILLYYSTAASSLAVTLMIAIFVVYMVSRDNVSCSICL

SEQ ID NO: 28539 - protein, 584 aa, synthetic construct; identical to SEQ ID NO: 28129
  REGION 1..584: note = hemagglutinin__InfluenzaB__EPI539769

SEQ ID NO: 28540 - protein, 584 aa, synthetic construct; identical to SEQ ID NO: 28531
  REGION 1..584: note = hemagglutinin__InfluenzaB__EPI551249

SEQ ID NO: 28541 - protein, 584 aa, synthetic construct
  REGION 1..584: note = hemagglutinin__InfluenzaB__EPI544259
MKAIIVLLMVVTSNADRICTGITSSNSPHVVKTATQGEVNVTGVIPLTTTPTKSYFANLKGTRTRGKLCPDCLNCTDLDVALGRPMCVGTTPSAKASILHEVRPVTSGCFPIMHDRTKIRQLPNLLRGYEKIRLSTQNVIDAEKAPGGPYRLGTSGSCPNATSKIGFFATMAWAVPKDNYKNATNPLTVEVPYICTEGEDQITVWGFHSDNKNQMKSLYGDSNPQKFTSSANGVTTHYVSQIGDFPDQTEDGGLPQSGRIVVDYMMQKPGKTGTIVYQRGVLLPQKVWCASGRSKVIKGSLPLIGEADCLHEEYGGLNKSKPYYTGKHAKAIGNCPIWVKTPLKLANGTKYRPPAKLLKERGFFGAIAGFLEGGWEGMIAGWHGYTSHGAHGVAVAADLKSTQEAINKITKNLNSLSELEVKNLQRLSGAMDELHNEILELDEKVDDLRADTISSQIELAVLLSNEGIINSEDEHLLALERKLKKMLGPSAVDIGNGCFETKHKCNQTCLDRIAAGTFNAGEFSLPTFDSLNITAASLNDDGLDNHTILLYYSTAASSLAVTLMLAIFIVYMVSRDNVSCSICL

SEQ ID NO: 28542 - protein, 584 aa, synthetic construct
  REGION 1..584: note = hemagglutinin__InfluenzaB__EPI592699
MKAIIVLLMVVTSNADRICTGITSSNSPHVVKTATQGEVNVTGVIPLTTTPTKSYFANLKGTRTRGKLCPDCLNCTDLDVALGRPMCVGTTPSAKASILHEVRPVTSGCFPIMHDRTKIRQLPNLLRGYEKIRLSTQNVIDAEKAPGGPYRLGTSGSCPNATSKIGFFATMAWAVPKDNYKNATNPQTVEVPYICTEGEDQITVWGFHSDNKIQMKSLYGDSNPQKFTSSANGVTTHYVSQIGDFPDQTEDGGLPQSGRIVVDYMVQKPGKTGTIVYQRGVLLPQKVWCASGRSKVIKGSLPLIGEADCLHEEYGGLNKSKPYYTGKHAKAIGNCPIWVKTPLKLANGTKYRPPAKLLKERGFFGAIAGFLEGGWEGMIAGWHGYTSHGAHGVAVAADLKSTQEAINKITKNLNSLSELEVKNLQRLSGAMDELHNEILELDEKVDDLRADTISSQIELAVLLSNEGIINSEDEHLLALERKLKKMLGPSAVDIGNGCFETKHKCNQTCLDRIAAGTFNAGEFSLPTFDSLNITAASLNDDGLDNHTILLYYSTAASSLAVTLMLAIFIVYMVSRDNVSCSICL

SEQ ID NO: 28543 - protein, 584 aa, synthetic construct; identical to SEQ ID NO: 28452
  REGION 1..584: note = hemagglutinin__InfluenzaB__EPI592707

SEQ ID NO: 28544 - protein, 584 aa, synthetic construct
  REGION 1..584: note = hemagglutinin__InfluenzaB__EPI693094
MKAIIVLLMVVTSNADRICTGITSSNSPHVVKTATQGEVNVTGVIPLTTTPTKSYFANLKGTRTRGKLCPDCLNCTDLDVALGRPMCVGTTPSAKASILHEVRPVTSGCFPIMHDRTKIRQLPNLLRGYEKIRLSTQNVIDAEKAPGGPYRLGTSESCPNATSKIGFFATMAWAVPKDNYKNATNPQTVEVPYICTEGEDQITVWGFHSDNKIQMKSLYGDSNPQKFTSSANGVTTHYVSQIGDFPDQTEDGGLPQSGRIVVDYMVQKPGKTGTIVYQRGVLLPQKVWCASGRSKVIKGSLPLIGEADCLHEEYGGLNKSKPYYTGKHAKAIGNCPIWVKTPLKLANGTKYRPPAKLLKERGFFGAIAGFLEGGWEGMIAGWHGYTSHGAHGVAVAADLKSTQEAINKITKNLNSLSELEVKNLQRLSGAMDELHNEILELDEKVDDLRADTISSQIELAVLLSNEGIINSEDEHLLALERKLKKMLGPSAVDIGNGCFETKHKCNQTCLDRIAAGTFNAGEFSLPTFDSLNITAASLNDDGLDNHTILLYYSTAASSLAVTLMLAIFIVYMVSRDNVSCSICL

SEQ ID NO: 28545 - protein, 585 aa, synthetic construct; identical to SEQ ID NO: 28475
  REGION 1..585: note = hemagglutinin__InfluenzaB__EPI678796

SEQ ID NO: 28546 - protein, 585 aa, synthetic construct
  REGION 1..585: note = hemagglutinin__InfluenzaB__EPI721064
MKAIIVLLMVVTSNADRICTGITSSNSPHVVKTATQGEVNVTGVIPLTTTPTKSHFANLKGTETRGKLCPKCLNCTDLDVALGRPKCTGKIPSARVSILHEVRPVTSGCFPIMHDRTKIRQLPNLLRGYEHVRLSTHNVINAEDAPGGPYKIGTSRSCPNITNGNGFFATMAWAVPKNDKNKTATNPLTIEVPYICTEGEDQITVWGFHSDNETQMAKLYGDSKPQKFTSSANGVTTHYVSQIGGFPNQTEDGGLPQSGRIVVDYMVQKSGKTGTITYQRGILLPQKVWCASGRSKVIKGSLPLIGEADCLHEKYGGLNKSKPYYTGEHAKAIGNCPIWVKTPLKLANGTKYRPPAKLLKERGFFGAIAGFLEGGWEGMIAGWHGYTSHGAHGVAVAADLKSTQEAINKITKNLNSLSELEVKNLQRLSGAMDELHNEILELDEKVDDLRADTISSQIELAVLLSNEGIINSEDEHLLALERKLKKMLGPSAVEIGNGCFETKHKCNQTCLDRIAAGTFDAGEFSLPTFDSLNITAASLNDDGLDNHTILLYYSTAASSLAVTLMIAIFVVYMVSRDNVSCSICL

SEQ ID NO: 28547 - protein, 585 aa, synthetic construct; identical to SEQ ID NO: 26756
  REGION 1..585: note = hemagglutinin__InfluenzaB__EPI328904

SEQ ID NO: 28548 - protein, 584 aa, synthetic construct
  REGION 1..584: note = hemagglutinin__InfluenzaB__EPI543191
MKAIIVLLMVVTSNADRICTGITSSNSPHVVKTATQGEVNVTGVIPLTTTPTKSYFANLKGTRTRGKLCPDCLNCTDLDVALGRPMCVGTTPSAKASILHEVRPVTSGCFPIMHDRTKIRQLPNLLRGYEKIRLSTQNVIDAEKAPGGPYRLGTSGSCPNATSKIGFFATMAWAVPKDNYKNATNPLTVEVPYICTEGEDQITVWGFHSDKKTQMKSLYGDSNPQKFTSSANGVTTHYVSQIGDFPDQTEDGGLPQSGRIVVDYMMQKPGKTGTIVYQRGVLLPQKVWCASGRSKVIKGSLPLIGEADCLHEEYGGLNKSKPYYTGKHAKAIGNCPIWVKTPLKLANGTKYRPPAKLLKERGFFGAIAGFLEGGWEGMIAGWHGYTSHGAHGVAVAADLKSTQEAINKITKNLNSLSELEVKNLQRLSGAMDELHNEILELDEKVDDLRADTISSQIELAVLLSNEGIINSEDEHLLALERKLKKMLGPSAVDIGNGCFETKHKCNQTCLDRIAAGTFNAGEFSLPTFDSLNITAASLNDDGLDNHTILLYYSTAASSLAVTLMLAIFIVYMVSRDNVSCSICL

SEQ ID NO: 28549 - protein, 584 aa, synthetic construct; identical to SEQ ID NO: 28129
  REGION 1..584: note = hemagglutinin__InfluenzaB__EPI500359

SEQ ID NO: 28550 - protein, 584 aa, synthetic construct
  REGION 1..584: note = hemagglutinin__InfluenzaB__EPI543185
MKAIIVLLMVVTSNADRICTGITSSNSPHVVKTATQGEVNVTGVIPLTTTPTKSYFANLKGTRTRGKLCPDCLNCTDLDVALGRPMCVGTTPSAKASILHEVRPVTSGCFPIMHDRTKIRQLPNLLRGYEKIRLSTQNVIDAEKAPGGPYRLGTSGSCPNATSKIGFFATMAWAVPKDNYKNATNPQTVEVPYICTEGEDQITVWGFHSDNKNQMKSLYGDSNPQKFTSSANGVTTHYVSQIGDFPDQTEDGGLPQSGRIVVDYMMQKPGKTGTIVYQRGVLLPQKVWCASGRSKVIKGSLPLIGEADCLHEEYGGLNKSKPYYTGKHAKAIGNCPIWVKTPLKLANGTKYRPPAKLLKERGFFGAIAGFLEGGWEGMIAGWHGYTSHGAHGVAVAADLKSTQEAINKITKNLNSLSELEVKNLQRLSGAMDELHNEILELDEKVDDLRADTISSQIELAVLLSNEGIINSEDEHLLALERKLKKMLGPSAVDIGNGCFETKHKCNQTCLDRIAAGTFNAGEFSLPTFDSLNITAASLNDDGLDNHTILLYYSTAASSLAVTLMLAIFIVYMVSRDNVSCSICL

SEQ ID NO: 28551 - protein, 584 aa, synthetic construct; identical to SEQ ID NO: 28289
  REGION 1..584: note = hemagglutinin__InfluenzaB__EPI536447

SEQ ID NO: 28552 - protein, 584 aa, synthetic construct; identical to SEQ ID NO: 26758
  REGION 1..584: note = hemagglutinin__InfluenzaB__NP_056660

SEQ ID NO: 28553 - protein, 584 aa, synthetic construct
  REGION 1..584: note = hemagglutinin__InfluenzaB__ABG85167
MKAIIVLLMVVTSNADRICTGITSSNSPHVVKTATQGEVNVTGVIPLTTTPTRSHFANLKGTQTRGKLCPNCFNCTDLDVALGRPKCMGNIPSAKVSILHEVKPVTSGCFPIMHDRTKIRQLPNLLRGYENIRLSTSNVINAETAPGGPYKVGTSGSCPNVANRNGFFNTMAWVIPKDNNKTAINPVTVEVPYICSEGEDQITVWGFHSDDKTQMERLYGDSNPQKFTSSANGVTTHYVSQIGGFPNQTEDEGLKQSGRIVVDYMVQKPGKTGTIVYQRGILLPQKVWCASGRSKVIKGSLPLIGEADCLHEKYGGLNKSKPYYTGEHAKAIGNCPIWVKTPLKLANGTKYRPPAKLLKERGFFGAIAGFLEGGWEGMIAGWHGYTSHGAHGVAVAADLKSTQEAINKITKNLNSLSELEVKNLQRLSGAMNGLHDEILELDEKVDDLRADTISSQIELAVLLSNEGIINSEDEHLLALERKLKKMLGPSAVEIGNGCFETKHKCNQTCLDRIAAGTFNAGDFSLPTFDSLNITAASLNDDDLDNHTILLYYSTAASSLAVTLMIAIFIVYMVSRDNVSCSICL

SEQ ID NO: 28554 - protein, 584 aa, synthetic construct
  REGION 1..584: note = hemagglutinin__InfluenzaB__EPI376346
MKAIIVLLMVVTSNADRICTGITSSNSPHVVKTATQGEVNVTGVIPLTTTPTKSYFANLKGTKTRGKLCPDCLNCTDLDVALGRPMCVGTTPSAKASILHEVRPVTSGCFPIMHDRTKIRQLANLLRGYENIRLSTQNVIDAEKAPGGPYRLGTSGSCPNATSKSGFFATMAWAVPKDNNKNATNPLTVEVPYICAEGEDQITVWGFHSDDKTQMKNLYGDSNPQKFTSSANGVTTHYVSQIGGFPDQTEDGGLPQSGRIVVDYMMQKPGKTGTIVYQRGVLLPQKVWCASGRSKVIKGSLPLIGEADCLHEKYGGLNKSKPYYTGEHAKAIGNCPIWVKTPLKLANGTKYRPPAKLLKERGFFGAIAGFLEGGWEGMIAGWHGYTSHGAHGVAVAADLKSTQEAINKITKNLNSLSELEVKNLQRLSGAMDELHNEILELDEKVDDLRADTISSQIELAVLLSNEGIINSEDEHLLALERKLKKMLGPSAVDIGNGCFETKHKCNQTCLDRIAAGTFNAGEFSLPTFDSLNITAASLNDDGLDNHTILLYYSTAASSLAVTLMLAIFIVYMVSRDNVSCSICL

SEQ ID NO: 28555 - protein, 584 aa, synthetic construct; identical to SEQ ID NO: 26854
  REGION 1..584: note = hemagglutinin__InfluenzaB__EPI368425

SEQ ID NO: 28556 - protein, 584 aa, synthetic construct; identical to SEQ ID NO: 26820
  REGION 1..584: note = hemagglutinin__InfluenzaB__ACH53430

SEQ ID NO: 28557 - protein, 585 aa, synthetic construct; identical to SEQ ID NO: 26645
  REGION 1..585: note = hemagglutinin__InfluenzaB__EPI331151

SEQ ID NO: 28558 - protein, 585 aa, synthetic construct
  REGION 1..585: note = hemagglutinin__InfluenzaB__EPI356777
MKAIIVLLMVVTSNADRICTGITSSNSPHVVKTATQGEVNVTGVIPLTTTPTKSHFANLKGTETRGKLCPKCLNCTDLDVALGRPKCTGKIPSARVSILHEVRPVTSGCFPIMHDRTKIRQLPNLLRGYEHIRLSTHNVINAENAPGGPYKIGTSGSCPNVTNGNGFFATMAWAVPKNDKNKTATNPLTIEVPYICTEGEDQITVWGFHSDDETQMAKLYGDSKPQKFTSSANGVTTHYVSQIGGFPNQTEDGGLPQSGRIVVDYMVQKSGKTGTITYQRGILLPQKVWCASGRSKVIKGSLPLIGEADCLHEKYGGLNKSKPYYTGEHAKAIGNCPIWVKTPLKLANGTKYRPPAKLLKERGFFGAIAGFLEGGWEGMIAGWHGYTSHGAHGVAVAADLKSTQEAINKITKNLNSLSELEVKNLQRLSGAMDELHNEILELDEKVDDLRADTISSQIELAVLLSNEGIINSEDEHLLALERKLKKMLGPSAVEIGNGCFETKHKCNQTCLDRIAAGTFDAGEFSLPTFDSLNITAASLNDDGLDNHTILLYYSTAASSLAVTLMIAIFVVYMVSRDNVSCSICL

SEQ ID NO: 28559 - protein, 583 aa, synthetic construct; identical to SEQ ID NO: 26427
  REGION 1..583: note = hemagglutinin__InfluenzaB__CY018349

SEQ ID NO: 28560 - protein, 583 aa, synthetic construct
  REGION 1..583: note = hemagglutinin__InfluenzaB__AY581945
MKAIIVLLMVVTSNADRICTGITSSNSPHVVKTATQGEVNVTGVIPLTTTPTKSHFANLKGTKTRGKLCPNCLNCTDLDVALARPMCVGTTPSAKASILHEVRPVTSGCFPIMHDRTKIRQLPNLLRGYENIRLSTQNVINAERAPGGPYRLGTSGSCPNVTSRDGFFATMAWAVPRDNKTATNPLTVEVPYICTKGEDQITVWGFHSDNKTQMKNLYGDSNPQKFTSSANGVTTHYVSQIGGFPNQTEDGGLPQSGRIVVDYMVQKPGKTGTIVYQRGVLLPQKVWCASGRSKVIKGSLPLIGEADCLHEKYGGLNKSKPYYTGEHAKAIGNCPIWVKTPLKLANGTKYRPPAKLLKERGFFGAIAGFLEGGWEGMIAGWHGYTSHGAHGVAVAADLKSTQEAINKITKNLNSLSELEVKNLQRLSGAMDELHNEILELDEKVDDLRADTISSQIELAVLLSNEGIINSEDEHLLALERKLKKMLGPSAVDIGNGCFETKHKCNQTCLDRIAAGTFNAGEFSLPTFDSLNITAASLNDDGLDNHTILLYYSTAASSLAVTLMIAIFIVYMVSRDNVSCSICL

SEQ ID NO: 28561 - protein, 584 aa, synthetic construct; identical to SEQ ID NO: 28308
  REGION 1..584: note = hemagglutinin__InfluenzaB__EPI541351

SEQ ID NO: 28562 - protein, 584 aa, synthetic construct
  REGION 1..584: note = hemagglutinin__InfluenzaB__EPI541760
MKAVIVLLMVVTSNADRICTGITSSNSPHVVKTATQGEVNVTGVIPLTTTPTKSYFANLKGTRTRGKLCPDCLNCTDLDVALGRPMCVGTTPSAKASILHEVRPVTSGCFPIMHDRTKIRQLPNLLRGYEKIRLSTQNVIDAEKAPGGPYRLGTSGSCPNATSKIGFFATMAWAVPKDNYKNATNPLTVEVPYICTEGEDQITVWGFHSDNKTQMKSLYGDSNPQKFTSSANGVTTHYVSQIGDFPDQTEDGGLPQSGRIVVDYMMQKPGKTGTIVYQRGVLLPQKVWCASGRSKVIKGSLPLIGEADCLHEEYGGLNKSKPYYTGKHAKAIGNCPIWVKTPLKLANGTKYRPPAKLLKERGFFGAIAGFLEGGWEGMIAGWHGYTSHGAHGVAVAADLKSTQEAINKITKNLNSLSELEVKNLQRLSGAMDELHNEILELDEKVDDLRADTISSQIELAVLLSNEGIINSEDEHLLALERKLKKMLGPSAVDIGNGCFETKHKCNQTCLDRIAAGTFNAGEFSLPTFDSLNITAASLNDDGLDNHTILLYYSTAASSLAVTLMLAIFIVYMVSRDNVSCSICL

SEQ ID NO: 28563 - protein, 585 aa, synthetic construct; identical to SEQ ID NO: 26887
  REGION 1..585: note = hemagglutinin__InfluenzaB__EPI477397

SEQ ID NO: 28564 - protein, 585 aa, synthetic construct
  REGION 1..585: note = hemagglutinin__InfluenzaB__EPI492571
MKAIIVLLMVVTSNADRICTGITSSNSPHVVKTATQGEVNVTGVIPLTTTPTKSHFANLKGTETRGKLCPKCLNCTDLDVALGRPKCTGKIPSARVSILHEVRPVTSGCFPIMHDRTKIRQLPNLLRGYEHIRLSTHNVINAEDAPGGPYKIGTSGSCPNVTNGNGFFATMAWAVPKNDKNKTATNPLTIEVPYICTEGEDQITVWGFHSDIETQMAKLYGDSKPQKFTSSANGVTTHYVSQIGGFPNQTEDGGLPQSGRIVVDYMVQKSGKTGTITYQRGILLPQKVWCASGRSKVIKGSLPLIGEADCLHEKYGGLNKSKPYYTGEHAKAIGNCPIWVKTPLKLANGTKYRPPAKLLKERGFFGAIAGFLEGGWEGMIAGWHGYTSHGAHGVAVAADLKSTQEAINKITKNLNSLSELEVKNLQRLSGAMDELHNEILELDEKVDDLRADTISSQIELAVLLSNEGIINSEDEHLLALERKLKKMLGPSAVEIGNGCFETKHKCNQTCLDRIAAGTFDAGEFSLPTFDSLNITAASLNDDGLDNHTILLYYSTAASSLAVTLMIAIFVVYMVSRDNVSCSICL

SEQ ID NO: 28565 - protein, 585 aa, synthetic construct
  REGION 1..585: note = hemagglutinin__InfluenzaB__EPI498340
MKAIIVLLMVVTSNADRICTGITSSNSPHVVKTATQGEVNVTGVIPLTTTPTKSHFANLKGTETRGKLCPKCLNCTDLDVALGRPKCTGKIPSARVSILHEVRPVTSGCFPIMHDRTKIRQLPNLLRGYEHIRLSTHNVINTEDAPGGPYKIGTSGSCPNVTNGNGFFATMAWAVPKNDKNKTATNPLTIEVPYICTEGEDQITVWGFHSDIETQMAKLYGDSKPQKFTSSANGVTTHYVSQIGGFPNQTEDGGLPQSGRIVVDYMVQKSGKTGTITYQRGILLPQKVWCASGRSKVIKGSLPLIGEADCLHEKYGGLNKSKPYYTGEHAKAIGNCPIWVKTPLKLANGTKYRPPAKLLKERGFFGAIAGFLEGGWEGMIAGWHGYTSHGAHGVAVAADLKSTQEAINKITKNLNSLSELEVKNLQRLSGAMDELHNEILELDEKVDDLRADTISSQIELAVLLSNEGIINSEDEHLLALERKLKKMLGPSAVEIGNGCFETKHKCNQTCLDRIAAGTFDAGEFSLPTFDSLNITAASLNDDGLDNHTILLYYSTAASSLAVTLMIAIFVVYMVSRDNVSCSICL

SEQ ID NO: 28566 - protein, 585 aa, synthetic construct
  REGION 1..585: note = hemagglutinin__InfluenzaB__EPI516490
MKAIIVLLMVVTSNADRICTGITSSNSPHVVKTATQGEVNVTGVIPLTTTPTKSHFANLKGTETRGKLCPKCLNCTDLDVALGRPKCTGKIPSARVSILHEVRPVTSGCFPIMHDRTKIRQLPNLLRGYEHIRLSTHNVINAEDAPGGPYKIGTSGSCPNVTNGNGFFATMAWAVPKNDKNKTATNPLTIEVPYICTEGEDQITVWGFHSDNEIQMAKLYGDSKPQKFTSSANGVTTHYVSQIGGFPNQTEDGGLPQSGRIVVDYMVQKSGKTGTITYQRGILLPQKVWCASGRSKVIKGSLPLIGEADCLHEKYGGLNKSKPYYTGEHAKAIGNCPIWVKTPLKLANGTKYRPPAKLLKERGFFGAIAGFLEGGWEGMIAGWHGYTSHGAHGVAVAADLKSTQEAINKITKNLNSLSELEVKNLQRLSGAMDELHNEILELDEKVDDLRADTISSQIELAVLLSNEGIINSEDEHLLALERKLKKMLGPSAVEIGNGCFETKHKCNQTCLDRIAAGTFDAGEFSLPTFDSLNITAASLNDDGLDNHTILLYYSTAASSLAVTLMIAIFVVYMVSRDNVSCSICL

SEQ ID NO: 28567 - protein, 584 aa, synthetic construct; identical to SEQ ID NO: 28129
  REGION 1..584: note = hemagglutinin__InfluenzaB__EPI538119

SEQ ID NO: 28568 - protein, 584 aa, synthetic construct; identical to SEQ ID NO: 28548
  REGION 1..584: note = hemagglutinin__InfluenzaB__EPI538125

SEQ ID NO: 28569 - protein, 584 aa, synthetic construct
  REGION 1..584: note = hemagglutinin__InfluenzaB__EPI556422
MKAIIVLLMVVTSNADRICTGITSSNSPHVVKTATQGEVNVTGVIPLTTTPTKSYFANLKGTRTRGKLCPDCLNCTDLDVALGRPMCVGTTPSAKASILHEVRPVTSGCFPIMHDRTKIRQLPNLLRGYEKIRLSTQNVIDAEKAPGGPYRLGTSGSCPNATSKIGFFATMAWAVPKDNYKNATNPLTVEVPYICTEGEDQITVWGFHSDIKTQMKSLYGDSNPQKFTSSANGVTTHYVSQIGDFPDQTEDGGLPQSGRIVVDYMMQKPGKTGTIVYQRGVLLPQKVWCASGRSKVIKGSLPLIGEADCLHEEYGGLNKSKPYYTGKHAKAIGNCPIWVKTPLKLANGTKYRPPAKLLKERGFFGAIAGFLEGGWEGMIAGWHGYTSHGAHGVAVAADLKSTQEAINKITKNLNSLSELEVKNLQRLSGAMDELHNEILELDEKVDDLRADTISSQIELAVLLSNEGIINSEDEHLLALERKLKKMLGPSAVDIGNGCFETKHKCNQTCLDRIAAGTFNAGEFSLPTFDSLNITAASLNDDGLDNHTILLYYSTAASSLAVTLMLAIFIVYMVSRDNVSCSICL

SEQ ID NO: 28570 - protein, 584 aa, synthetic construct
  REGION 1..584: note = hemagglutinin__InfluenzaB__EPI614608
MKAIIVLLMVVTSNADRICTGITSSNSPHVVKTATQGEVNVTGVIPLTTTPTKSYFANLKGTRTRGKLCPDCLNCTDLDVALGRPMCVGTTPSAKASILHEVRPITSGCFPIMHDRTKIRQLPNLLRGYEKIRLSTQNVIDAEKAPGGPYRLGTSGSCPNATSKIGFFATMAWAVPKDNYKNATNPLTVEVPYICTEGEDQITVWGFHSDEKTQMKSLYGDSNPQKFTSSANGVTTHYVSQIGDFPDQTEDGGLPQSGRIVVDYMMQKPGKTGTIVYQRGVLLPQKVWCASGRSKVIKGSLPLIGEADCLHEEYGGLNKSKPYYTGKHAKAIGNCPIWVKTPLKLANGTKYRPPAKLLKERGFFGAIAGFLEGGWEGMIAGWHGYTSHGAHGVAVAADLKSTQEAINKITKNLNSLSELEVKNLQRLSGAMDELHNEILELDEKVDDLRADTISSQIELAVLLSNEGIINSEDEHLLALERKLKKMLGPSAVDIGNGCFETKHKCNQTCLDRIAAGTFNAGEFSLPTFDSLNITAASLNDDGLDNHTILLYYSTAASSLAVTLMLAIFIVYMVSRDNVSCSICL

SEQ ID NO: 28571 - protein, 584 aa, synthetic construct
  REGION 1..584: note = hemagglutinin__InfluenzaB__EPI614610
MKAIIVLLMVVTSNADRICTGITSSNSPHVVKTATQGEVNVTGVIPLTTTPTKSYFANLKGTRTRGKLCPDCLNCTDLDVALGRPMCVGTTPSAKASILHEVRPVTSGCFPIMHDRTKIRQLPNLLRGYEKIRLSTQNVIDAEKAPGGPYRLGTSGSCPNATSKIGFFATMAWAVPKDNYKNATNPLTVEVPYICTEGEDQITVWGFHSDEKTQMKSLYGDSNPQKFTSSANGVTTHYVSQIGDFPDQTEDGGLPQSGRIVVDYMMQKPGKTGTIVYQRGVLLPQKVWCASGRSKVIKGSLPLIGEADCLHEEYGGLNKSKPYYTGKHAKAIGNCPIWVKTPLKLANGTKYRPPAKLLKERGFFGAIAGFLEGGWEGMIAGWHGYTSHGAHGVAVAADLKSTQEAINKITKNLNSLSELEVKNLQRLSGAMDELHNEILELDEKVDDLRADTISSQIELAVLLSNEGIINSEDEHLLALERKLKKMLGPSAVDIGNGCFETKHKCNQTCLDRIAAGTFNAGEFSLPTFDSLNITAASLNDDGLDNHTILLYYSTAASSLAVTLMLAIFIVYMVSRDNVSCSICL

SEQ ID NO: 28572 - protein, 585 aa, synthetic construct
  REGION 1..585: note = hemagglutinin__InfluenzaB__AAA43697
MKAIIVLLMVVTSNADRICTGITSSNSPHVVKTATQGEVNVTGVIPLTTTPTKSHFANLKGTKTRGKLCPKCLNCTDLDVALARPKCMGTIPSAKASILHEVKPVTSGCFPIMHDRTKIRQLPNLLRGYEHIRLSTHNVINAETAPGGPYKVGTSGSCPNVTNGNGFFATMAWAVPKNDNNKTATNPLTVEVPYICTEGEDQITVWGFHSDSETQMVKLYGDSKPQKFTSSANGVTTHYVSQIGGFPNQAEDGGLPQSGRIVVDYMVQKSGKTGTITYQRGILLPQKVWCASGRSKVIKGSLPLIGEADCLHEKYGGLNKSKPYYTGEHAKAIGNCPIWVKTPLKLANGTKYRPPAKLLKERGFFGAIAGFLEGGWEGMIAGWHGYTSHGAHGVAVAADLKSTQEAINKITKNLNSLSELEVKNLQRLSGAMDELHNEILELDEKVDDLRADTISSQIELAVLLSNEGIINSEDEHLLALERKLKKMLGPSAVEIGNGCFETKHKCNQTCLDRIAAGTFNAGEFSLPTFDSLNITAASLNDDGLDNHTILLYYSTAASSLAVTLMIAIFIVYMVSRDNVSCSICL

SEQ ID NO: 28573 - protein, 584 aa, synthetic construct
  REGION 1..584: note = hemagglutinin__InfluenzaB__EPI271545
MKAIIVLLMVVTSNADRICTGITSSNSPHVVKTATQGEVNVTGVIPLTTTPTKSYFANLKGTRTRGKLCPDCLNCTDLDVALGRPMCVGTTPSAKASILHEVRPVTSGCFPIMHDRTKIRQLPNLLRGYENIRLSTQNVIDAEKAPGGPYRLGTSGSCPNATSKIGFFATMAWAVPKDNYKNATNPLTVEVPYICTEGEDQITVWGFHSDNKTQMKSLYGDSNPQKFTSSANGVTTHYVSQIGDFPDQTEDGGLPQSGRIVVDYMMQKPGKTGTIVYQRGVLLPQKVWCASGRSKVIKGSLPLIGEADCLHEKYGGLNKSKPYYTGEHAKAIGNCPIWVKTPLKLANGTKYRPPAKLLKERGFFGAIAGFLEGGWEGMIAGWHGYTSHGAHGVAVAADLKSTQEAINKITKNLNSLSELEVKNLQRLSGAMDELHNEILELDEKVDDLRADTISSQIELAVLLSNEGIINSEDEHLLALERKLKKMLGPSAVDIGNGCFETKHKCNQTCLDRIAAGTFNAGEFSLPTFDSLNITAASLNDDGLDNHTILLYYSTAASSLAVTLMLAIFIVYMVSRDNVSCSICL

SEQ ID NO: 28574 - protein, 584 aa, synthetic construct
  REGION 1..584: note = hemagglutinin__InfluenzaB__AGB08329
MKAIIVLLMVVTSNADRICTGITSSNSPHVVKTATQGEVNVTGVIPLTTTPTKSYFANLKGTRTRGKLCPDCLNCTDLDVALGRPMCVGTTPSAKASILHEVRPVTSGCFPIMHDRTKIRQLPNLLRGYENIRLSTQNVIDAEKAPGGPYRLGTSGSCPNATSKIGFFATMAWAVPKDNYKNATNPLTVEVPYICTEGEDQITVWGFHSDNKIQMKSLYGDSNPQKFTSSANGVTTHYVSQIGDFPDQTEDGGLPQSGRIVVDYMMQKPGKTGTIVYQRGVLLPQKVWCASGRSKVIKGSLPLIGEADCLHEKYGGLNKSKPYYTGEHAKAIGNCPIWVKTPLKLANGTKYRPPAKLLKERGFFGAIAGFLEGGWEGMIAGWHGYTSHGAHGVAVAADLKSTQEAINKITKNLNSLSELEVKNLQRLSGAMDELHNEILELDEKVDDLRADTISSQIELAVLLSNEGIINSEDEHLLALERKLKKMLGPSAVDIGNGCFETKHKCNQTCLDRIAAGTFNAGEFSLPTFDSLNITAASLNDDGLDNHTILLYYSTAASSLAVTLMLAIFIVYMVSRDNVSCSICL

SEQ ID NO: 28575 - protein, 584 aa, synthetic construct; identical to SEQ ID NO: 26755
  REGION 1..584: note = hemagglutinin__InfluenzaB__EPI294880

SEQ ID NO: 28576 - protein, 583 aa, synthetic construct; identical to SEQ ID NO: 26466
  REGION 1..583: note = hemagglutinin__InfluenzaB__CY018765

SEQ ID NO: 28577 - protein, 466 aa, synthetic construct
  REGION 1..466: note = neuraminidase_glycoprotein__InfluenzaB__AAN39743
MLPSTIQTLTLFLTSGGVLLSLYVSALLSYLLYSDILLKFSPTKVIAPTMSLDCANASNVQAVNHSATEEMTFLLPEPEWTYPRLSCQGSTFQKALLISPHRFGEAKGNSAPLIIREPFIACGPKECIHFALTHYAAQPGGYYNGTREDRNKLRHLISVNLGKIPTVENSIFHMAAWSGSACHDGREWTYIGVDGPDSNALIKIKYGEAYTDTYHSYANNILRTQESACNCIGGDCYLMITDGSASGISRCRFLKIREGRIIKEIFPTGRVEHTEECTCGFASNKTIECVCRDNSYTAKRPFVKLNVETDTAEIRLMCTETYLDTPRPDDGSITGPCESNGDKGNGGIKGGFVHQRMASRIGRWYSRTMSKTKRMGMELYVKYDGDPWTDSDALAPSGVMVSMEEPGWYSFGFEIKDKKCDVPCIGIEMVHDGGKKTWHSAATAIYCLMGSGQLLWDTVTGVDMAL

SEQ ID NO: 28578 - protein, 466 aa, synthetic construct
  REGION 1..466: note = neuraminidase_glycoprotein__InfluenzaB__AAN39747
MLPSTIQTLILFLTSGGVLLSLYVSALLSYLLYSDILLKFSPTKIIAPTMSLDCANASNVQAVNHSATKEMTFLLPEPEWTYPRLSCQGSTFQKALLISPHRFGEAKGNSAPLIIREPFIACGPKECKHFALTHYAAQPGGYYNGTREDRNKLRHLISVNLGKIPTVENSIFHMAAWSGSACHDGREWTYIGVDGPDSNALIKIKYGEAYTDTYHSYANNILRTQESACNCIGGDCYLMITDGSASGISKCRFLKIREGRIIKEIFPTGRVEHTEECTCGFASNKTIECACRDNSYTAKRPFVKLNVETDTAEIRLMCTKTYLDTPRPDDGSITGPCESNGDKGSGGIKGGFVHQRMASKIGRWYSRTMSKTKRMGMELYVKYDGDPWTDSDALAPSGVMVSIEEPGWYSFGFEIKDKKCDVPCIGIEMVHDGGKKTWHSAATAIYCLMGSGQLLWDTVTGVDMAL

SEQ ID NO: 28579 - protein, 466 aa, synthetic construct
  REGION 1..466: note = neuraminidase_glycoprotein__InfluenzaB__AAN39749
MLPSTIQTLTLFLTSGGVLLSLYVSALLSYLLYSDILLKFSPTKVIAPTMSLDCANASNVQAVNHSATEEMTFLLPEPEWTYPRLSCQGSTFQKALLISPHRFGEAKGNSAPLIIREPFIACGPKECKHFALTHYAAQPGGYYNGTREDRNKLRHLISVNLGKIPTVENSIFHMAAWSGSACHDGREWTYIGVDGPDSNALIKIKYGEAYTDTYHSYANNILRTQESACNCIGGDCYLMITDGSASGISRCRFLKIREGRIIKEIFPTGRVEHTEECTCGFASNKTIECACRDNSYTAKRPFVKLNVETDTAEIRLMCTETYLDTPRPDDGSITGPCESNGDKGNGGIKGGFVHQRMASRIGRWYSRTMSKTKRMGMELYVKYDGDPWTDSDALAPSGVMVSMEEPGWYSFGFEIKDKKCDVPCIGIEMVHDGGKKTWHSAATAIYCLMGSGQLLWDTVTGVDMAL

SEQ ID NO: 28580 - protein, 466 aa, synthetic construct
  REGION 1..466: note = neuraminidase_glycoprotein__InfluenzaB__AAN39751
MLPSTIQTLTLFLTSGGVLLSLYVSALLSYLLYSDILLKFSPTKVIAPTMSLDCANASNVQAVNHSATEEMTFLLPEPEWTYPRLSCQGSTFQKALLISPHRFGEAKGNSAPLIIREPFIACGPKECKHFALTHYAAQPGGYYNGTREDRNKLRHLISVNLGKIPTVENSIFHMAAWSGSACHDGREWTYIGVDGPDSNALIKIKYGEAYTDTYHSYANNILRTQESACNCIGGDCYLMITDGSASGISRCRFLKIREGRILKEIFPTGRVEHTEECTCGFASNKTIECACRDNSYTAKRPFVQLNVETDTAEIRLMCTETYLDTPRPDDGSITGPCESNGDKGNGGIKGGFVHQRMASRIGRWYSRTMSKTKRMGMDLYVKYDGDPWTDSDALAPSGVMVSMEEPGWYSFGFEIKDKKCDVPCIGIEMVHDGGKKTWHSAATAIYCLMGSGQLLWDTVTGVDMAL

SEQ ID NO: 28581 - protein, 466 aa, synthetic construct
  REGION 1..466: note = neuraminidase_glycoprotein__InfluenzaB__AAN39753
MLPSTIQTLTLFLTSGGVLLSLYVSALLSYLLYSDILLKFSPTKVIAPTMSLDCANASNVQAVNHSATEEMTFLLPEPEWTYPRLSCQGSTFQKALLISPHRFGEAKGNSAPLIIREPFIACGPKECKHFALTHYAAQPGEYYNGTREDRNKLRHLISVNLGKIPTVENSIFHMAAWSGSACHDGREWTYIGVDGPDSNALIKIKYGEAYTDTYHSYANNILRTQESACNCIGGDCYLMITDGSASGISRCRFLKIREGRIIKEIFPTGRVEHTEECTCGFASNKTIECACRDNSYTAKRPFVKLNVETDTAEIRLMCTETYLDTPRPDDGSITGPCESNGDKGNGGIKGGFVHQRMASRIGRWYSRTMSKTKRMGMELYVKYDGDPWTDSDALAPSGVMVSMEEPGWYSFGFEIKDKKCDVPCIGIEMVHDGGKKTWHSAATAIYCLMGSGQLLWDTVTGVDMAL

SEQ ID NO: 28582 - protein, 466 aa, synthetic construct
  REGION 1..466: note = neuraminidase_glycoprotein__InfluenzaB__AAN39759
MLPSTIQTLTLFLTSGGVLLSLYVSASLSYLLYSDILLKLSPTEITAPTMPLDCANASNVQAVNRSATKGVTLLLPEPEWTYPRLSCPGSTFQKALLISPHRFGETKGNSAPLIIREPFIACGPKECKHFALTHYAAQPGGYYNGTREDRNKLRHLISVKLGKIPTVENSIFHMAAWSGSACHDGKEWTYIGVDGPDSNALLKIKYGEAYTDTYHSYANNILRTQESACNCIGGNCYLMITDGSASGISECRFLKIREGRIIKEIFPTGRVKHTEECTCGFASNKTIECACRDNSYTAKRPFVKLNVETDTAEIRLMCTETYLDTPRPDDGSITGPCESNGDKGSGGIKGGFVHQRMESKIGRWYSRTMSKTKRMGMGLYVKYDGDPWTDSDALALSGVMVSIEEPGWYSFGFEIKDKKCDVPCIGIEMVHDGGKETWHSAATAIYCLMGSGQLLWDTVTGVDMAL

SEQ ID NO: 28583 - protein, 466 aa, synthetic construct
  REGION 1..466: note = neuraminidase_glycoprotein__InfluenzaB__AAN39761
MLPSTIQTLTLFLTSGGVLLSLYVSASLSYLLYSDILLKFSQTEITAPTMPLDCANASNVQAVNRSATKGVTLLLPEPEWTYPRLSCPGSTFQKALLISPHRFGETKGNSAPLIIREPFIACGPKECKHFALTHYAAQPGGYYNGTREDRNKLRHLISVKLGKIPTVENSIFHMAAWSGSACHDGREWTYIGVDGPDSNALLKIKYGEAYTDTYHSYAKNILRTQESACNCIGGDCYLMITDGSASGISECRFLKIREGRIIKEIFPTGRIKHTEECTCGFASNKTIECACRDNSYTAKRPFVKLNVETDTAEIRLMCTETYLDTPRPDDGSITGPCESNGDKGSGGIKGGFVHQRMASKIGRWYSRTMSKTKRMGMGLYVKYDGDPWTDSEALALSGVMVSMEEPGWYSFGFEIKDKKCDVPCIGIEMVHDGGKTTWHSAATAIYCLMGSGQLLWDTVTGVDMAL

SEQ ID NO: 28584 - protein, 466 aa, synthetic construct
  REGION 1..466: note = neuraminidase_glycoprotein__InfluenzaB__AAN39769
MLPSTIQTLTLFLTSGGVLLSLYVSALLSYLLYSDILLKFSPTKIIAPTTSLDSANASNFQAVNHSATKEMTFLLPEPEWTYPRLSCQGSTFQKALLISPHRFGEAKGNSAPLIIREPFIACGPKECKHFALTHYAAQPGGYYNGTREDRNKLRHLISVNLGKIPTVENSIFHMAAWSGSACHDGREWTYIGVDGPDSNALIKIKYGEAYTDTYHSYANNILRTQESACNCIGGDCYLMITDGSASGISKCRFLKIREGRIIKEIFPTGRVEHTEECTCGFASNKTIECACRDNSYTAKRPFVKLNVETDTAEIRLMCTETYLDTPRPDDGSITGPCESNGDKGSGGIKGGFVHQRMASKIGRWYSRTMSKTKRMGMELYVKYDGDPWTDSDALAPSGVMVSIEEPGWYSFGFEIKDKKCDVPCIGIEMVHDGGKTTWHSAATAIYCLMGSGQLLWDTVTGVDMAL

SEQ ID NO: 28585 - protein, 466 aa, synthetic construct
  REGION 1..466: note = neuraminidase_glycoprotein__InfluenzaB__AAN39771
MLPSTIQTLTLFLTSGGVLLSLYVSALLSYLLYSDILLKFSPTKIIAPTTSLDSANASNFQAVNHSATKEMTFLLPEPEWTYPRLSCQGSTFQKALLISPHRFGEAKGNSAPLIIREPFIACGPKECKHFALTHYAAQPGGYYNGTREDRNKLRHLISVNLGKIPTVENSIFHMAAWSGSACHDGREWTYIGVDGPDSNALIKIKYGEAYTDTYHSYANNILRTQESACNCIGGDCYLMITDGSASGISKCRFLKIREGRIVKEIFPTGRVEHTEECTCGFASNKTIECACRDNSYTAKRPFVKLNVETDTAEIRLMCTETYLDTPRPDDGSITGPCESNGDKGSGGIKGGFVHQRMASKIGRWYSRTMSKTKRMGMELYVKYDGDPWTDSDALDPSGVMVSIEEPGWYSFGFEIKDKKCDVPCIGIEMVHDGGKTTWHSAATAIYCLMGSGQLLWDTITGVDMAL

SEQ ID NO: 28586 - protein, 466 aa, synthetic construct
  REGION 1..466: note = neuraminidase_glycoprotein__InfluenzaB__AAN39773
MLPSTIQTLTLFLTSGGVLLSLYVSALLSYLLYSDILLKFSPTKIIAPTTSLDSANASNFQAVNHSATKEMTFLLPEPEWTYPRLSCQGSTFQKALLISPHRFGEAKGNSAPLIIREPFIACGPKECKHFALTHYAAQPGGYYNGTREDRNKLRHLISVNFGKIPTVENSIFHMAAWSGSACHDGREWTYIGVDGPDSNALIKIKYGEAYTDTYHSYANNILRTQESACNCIGGDCYLMITDGSASGISKCRFLKIREGRIVKEIFPTGRVEHTEECTCGFASNKTIECACRDNSYTAKRPFVKLNVETDTAEIRLMCTETYLDTPRPDDGSITGPCESNGDKGSGGIKGGFVHQRMASKIGRWYSRTMSKTKRMGMELYVKYDGDPWTDSDALAPSGVMVSIEEPGWYSFGFEIKDKKCDVPCIGIEMVHDGGKTTWHSAATAIYCLMGSGQLLWDTITGVDMAL

SEQ ID NO: 28587 - protein, 466 aa, synthetic construct
  REGION 1..466: note = neuraminidase_glycoprotein__InfluenzaB__AAN39775
MLPSTIQTLTLFLTSGGVLLSLYVSALLSYLLYSDILLKFSPTKIIAPTTSLDSANASNFQAVNHSATKEMTFLLPEPEWTYPRLSCQGSTFQKALLISPHRFGEAKGNSAPLIIREPFIACGPKECKHFALTHYAAQPGGYYNGTREDRNKLRHLISVNLGKIPTVENSIFHMAAWSGSACHDGKEWTYIGVDGPDSNALIKIKYGEAYTDTYHSYANNILRTQESACNCIGGDCYLMITDGSASGISKCRFLKIREGRIIKEIFPTGRVEHTEECTCGFASNKTIECACRDNSYTAKRPFVKLNVETDTAEIRLMCTETYLDTPRPDDGSITGPCESNGDKGSGGIKGGFVHQRMASKIGRWYSRTMSKTKRMGMELYVKYDGDPWTDSDALAPSGVMVSIEEPGWYSFGFEIKDKKCDVPCIGIEMVHDGGKTTWHSAATAIYCLMGSGQLLWDTVTGVDMAL

SEQ ID NO: 28588 - protein, 466 aa, synthetic construct
  REGION 1..466: note = neuraminidase_glycoprotein__InfluenzaB__AAN39777
MLPSTIQTLTLFLTSGGVLLSLYVSASLSYLLYSDILLKFSQTEITAPTMPLDCANASNVQAVNRSATKGVTLLPPEPEWTYPRLSCPGSTFQKALLISPHRFGETKGNSAPLIIREPFIACGPKECKHFALTHYAAQPGGYYNGTREDRNKLRHLISVKLGKIPTVENSIFHMAAWSGSACHDGREWTYIGVDGPDSNALLKIKYGEAYTDTYHSYAKNILRTQESACNCIGGDCYLMITDGSASGISECRFLKIREGRIIKEIFPTGRVKHTEECTCGFASNKTIECACRDNSYTAKRPFVKLNVETDTAEIRLMCTETYLDTPRPDDGSITGPCESNGNKGSGGIKGGFVHQRMASKIGRWYSRTMSKTKRMGMGLYVKYDGDPWTDSEALALSGVMVSMEEPGWYSFGFEIKDKKCDVPCIGIEMVHDGGKTTWHSAATAIYCLMGSGQLLWDTVTGVDMAL

SEQ ID NO: 28589 - protein, 466 aa, synthetic construct; identical to SEQ ID NO: 28584
  REGION 1..466: note = neuraminidase_glycoprotein__InfluenzaB__AAN39779

SEQ ID NO: 28590 - protein, 466 aa, synthetic construct
  REGION 1..466: note = neuraminidase_glycoprotein__InfluenzaB__AAN39781
MLPSTIQTLTLFLTSGGVLLSLYVSASLSYLLYSDILLKFSSTEITAPTMPLNCANASNVQAVNHSATKGVTLPLPEPEWTYPRLSCPGSTFQKALLISPHRFGETKGNSAPLIIREPFIACGPKECKHFALTHYAAQPGGYYNGTREDRNKLRHLISVKLGKIPTVENSIFHMAAWSGSACHDGREWTYIGVDGPDSNALLKIKYGEAYTDTYHSYANNILRTQESACNCIGGDCYLMITDGSASGVSECRFLKIREGRIIKEIFPTGRVEHTEECTCGFASNKTIECACRDNSYTAKRPFVKLNVETDTAEIRLMCTETYLDTPRPDDGSITGPCESNGDKGSGGIKGGFVHQRMASKIGRWYSRTMSKNKRMGMGLYVKYDGDPWIDSDALTLSGVMVSMEEPGWYSFGFEIKDKKCDVPCIGIEMVHDGGKETWHSAATAIYCLMGSGQLLWDTVTGVNMAL

SEQ ID NO: 28591 - protein, 466 aa, synthetic construct
  REGION 1..466: note = neuraminidase_glycoprotein__InfluenzaB__AAN39783
MLPSTIQTLTLFLTSGGVLLSLYVSASLSYLLYSDILLKFSQTEITAPTMPLDCANASNVQAVNRSATKGVTLLLPEPEWTYPRLSCPGSTFQKALLISPHRFGETKGNSAPLIIREPFIACGPKECKHFALTHYAAQPGGYYNGTREDRNKLRHLISVKLGKIPTVENSIFHMAAWSGSACHDGREWTYIGVDGPDSNALLKIKYGEAYTDTYHSYAKNILRTQESACNCIGGDCYLMITDGSASGISECRFLKIREGRIIKEIFPTGRVKHTEECTCGFASNKTIECACRDNSYTAKRPFVKLNVETDTAEIRLMCTETYLDTPRPNDGSITGPCESNGDKGSGGIKGGFVHQRMASKIGRWYSRTMSKTKRMGMGLYVKYDGDPWTDSEALALSGVMVSMEEPGWYSFGFEIKDKKCDVPCIGIEMVHDGGKTTWHSAATAIYCLMGSGQLLWDTVTGVDMAL

SEQ ID NO: 28592 - protein, 466 aa, synthetic construct
  REGION 1..466: note = neuraminidase_glycoprotein__InfluenzaB__AAN39785
MLPSTIQTLTLFLTSGGVLLSLYVSALLSYLLYSDILLKFSPTKVIAPTMSLDYANASNVQAVNHSATEEMTFLLPEPEWTYPRLSCQGSTFQKALLISPHRFGEAKGNSAPLIIREPFIACGPKECKHFALTHYAAQPGGYYNGTREDRNKLRHLISVNLGKIPTVENSIFHMAAWSGSACHDGREWTYIGVDGPDSNALIKIKYGEAYTDTYHSYANNILRTQESACNCIGGDCYLMITDGSASGISRCRFLKIREGRIIKEIFPTGRVEHTEECTCGFASNKTIECACRDNSYTAKRPFVKLNVETDTAEIRLMCTETYLDTPRPDDGSITGPCESNGDKGSGGIKGGFVHQRMTSRIGRWYSRTMSKTKRMGMELYVKYDGDPWTDSDALAPSGVMVSMEEPGWYSFGFEIKDKKCDVPCIGIEMVHDGGKKTWHSAATAIYCLMGSGQLLWDTVTGVDMAL

SEQ ID NO: 28593 - protein, 466 aa, synthetic construct
  REGION 1..466: note = neuraminidase_glycoprotein__InfluenzaB__AAN39787
MLPSTIQTLTLFLTSGGVLLSLYVSALLSYLLYSDILLKFSPTKVIAPTMSLDYANASNVQAVNHSATEEMTFLLPEPEWTYPRLSCQGSTFQKALLISPHRFGEAKGNSAPLIIREPFIACGPKECKHFALTHYAAQPGGYYNGTREDRNKLRHLISVNLGKIPTVENSIFHMAAWSGSACHDGREWTYIGVDGPDSNALIKIKYGEAYTDTYHSYANNILRTQESACNCIGGDCYLMITDGSASGISRCRFLKIREGRIIKEIFPTGRVEHTEECTCGFASNKTIECACRDNSYTAKRPFVKLNVETDTAEIRLMCTETYLDTPRPDDGSITGPCESNGDKGNGGIKGGFVHQRMASRIGRWYSRTMSKTKRMGMELYVKYDGDPWTDSDALAPSGVMVSMEEPGWYSFGFEIKDKKCDVPCIGIEMVHDGGKKTWHSAATAIYCLMGSGQLLWDTVTGVDMAL

SEQ ID NO: 28594 - protein, 466 aa, synthetic construct
  REGION 1..466: note = neuraminidase_glycoprotein__InfluenzaB__AAN39795
MLPSTIQTLTLFLTSGGVLLSLYVSASLSYLLYSDILLKFSPTEITAPTMPLDCANASNVQAVNRSATKGVTLLLPEPEWTYPRLSCPGSTFQKALLISPHRFGETRGNSAPLIIREPFIACGPKECKHFALTHYAAQPGGYYNGTREDRNKLRHLISVKLGKIPTVENSIFHMAAWSGSACHDGREWTYIGVDGPDSNALLKIKYGEAYTDTYHSYANNILRTQESACNCIGGDCYLMITDGSASGTSKCRFLKIREGRIIKEIFPTGRVEHTEECTCGFASNKTIECACRDNNYTAKRPFVKLNVETDAAEIRLMCTETYLDTPRPDDGSITGPCESNGDKGRGGIKGGFVHQRMASKIGRWYSRTMSKTERMGMELYVKYDGDPWTDSDALALSGVMVSMEEPGWYSFGFEIKDKKCDVPCIGIEMVHDGGKKTWHSAATAIYCLMGSGQLLWDTVTGVDMAL

SEQ ID NO: 28595 - protein, 466 aa, synthetic construct; identical to SEQ ID NO: 28579
  REGION 1..466: note = neuraminidase_glycoprotein__InfluenzaB__AAN39797

SEQ ID NO: 28596 - protein, 466 aa, synthetic construct
  REGION 1..466: note = neuraminidase_glycoprotein__InfluenzaB__AAN39799
MLPSTIQTLTLFLTSGGVLLSLYVSALLSYLLYSDVLLKFSPTKIIAPTMSLDCANASNVQAVNHSATEEMTFLLPEPEWTYPRLSCQGSTFQKALLISPHRFGEAKGNSAPLIIREPFIACGPKECKHFALTHYAAQPGGYYNGTREDRNKLRHLISVNLGKIPTVENSIFHMAAWSGSACHDGREWTYIGVDGPDSNALIKIEYGEAYTDTYHSYAYNILRTQESACNCIGGDCYLMITDGSASGISKCRFLKIREGRIIKEIFPTGRVEHTEECTCGFASNKTIECACRDNSYTAKRPFVKLNVETDTAEIRLMCTETYLDTPRPDDGSITGPCESNGDKGSGGIKGGFVHQRMASKIGRWYSRTMSKTKRMGMELYVKYDGDPWTDSDALAPSGVMVSMEEPGWYSFGFEIKDKKCDVPCIGIEMVHDGGKKTWHSAATAIYCLMGSGQLLWDTVTGVDMAL

SEQ ID NO: 28597 - protein, 466 aa, synthetic construct
  REGION 1..466: note = neuraminidase_glycoprotein__InfluenzaB__AAN39801
MLPSTIQTLTLFLTSGGVLLSLYVSASLSYLLYSDILLKFSPTEITAPTMPLDCANASNAQAVNRSATKGVTLLLPEPEWTYPRLSCPGSTFQKALLISPHRFGETKGNSAPLIIREPFIACGPKECKHFALTHYAAQPGGYYNGTREDRNKLRHLISVKLGKIPTVENSIFHMAAWSGSACHDGKEWTYIGVDGPDSNALLKIKYGEAYTDTYHSYANNILRTQESACNCIGGNCYLMITDGSASGISECRFLKIREGRIIKEIFPTGRVKHTEECTCGFASNKTIECACRDNSYTAKRPFVKLNVETDTAEIRLMCTETYLDTPRPDDGSITGPCESNGDKGSGGIKGGFVHQRMASKIGRWYSRTMSKTKRMGMGLYVKYDGDPWTDSDALALSGVMVSMEEPGWYSFGFEIKDKKCDVPCIGIEMVHDGGKETWHSAATAIYCLMGSGQLLWDTVTGVDMAL

SEQ ID NO: 28598 - protein, 466 aa, synthetic construct
  REGION 1..466: note = neuraminidase_glycoprotein__InfluenzaB__AAN39803
MLPSTIQTLTLFLTSGGVLLSLYVSASLSYLLYSDILLKFSPTEITAPKVPLDCANASNVQAVNRSATKGMTLLLSEPEWTYPRLSCQGSTFQKALLISPHRFGETRGNSAPLIIREPFIACGPKECKHFALTHYAAQPGGYYNGTREDRNKLRHLISVKLGKIPTVENSIFHMAAWSGSACHDGREWTYIGLDGPDSNALIKIKYGEAYTDTYHSYANNILRTQESACNCIGGDCYLMITDGSASGISKCRFLKIREGRIIKEIFPTGRVEHTEECTCGFASNKTIECACRDNSYTAKRPFVKLNVETDTAEIRLMCTETYLDTPRPDDGSITGPCESNGDKGRGGIKGGFVHQRMASKIGRWYSRTMSKTERMGMELYVKYDGDPWTDSDALAPSGVMVSMKEPGWYSFGFEIKDKKCDVPCIGIEMVHDGGKETWHSAATAIYCLMGSGQLLWDTVTGVDMAL

SEQ ID NO: 28599 - protein, 466 aa, synthetic construct
  REGION 1..466: note = neuraminidase__InfluenzaB__ABA02232
MLPSTIQTLTLFLTSGGVLLSLYVSASLSYLLYSDILLKFSPTEITAPTMPLDCANASNVQAVNRSATKGVTLLLPEPEWTYPRLSCPGSTFQKALLISPHRFGETKGNSAPLIIREPFIACGPKECKHFALTHYAAQPGGYYNGTRGDRNKLRHLISVKLGKIPTVENSIFHMAAWSGSACHDGKEWTYIGVDGPENNALLKIKYGEAYTDTYHSYANNILRTQESACNCIGGNCYLMITDGSASGISECRFLKIREGRIIKEIFPTGRVKHTEECTCGFASNKTIECACRDNSYTAKRPFVKLNVETDTAEIRLMCTETYLDTPRPDDGSITGPCESNGDKGSGGIKGGFVHQRMASKIGRWYSRTMSKTKRMGMGLYVKYDGDPWTDSDALALSGVMVSMEEPGWYSFGFEIKDKKCDVPCIGIEMVHDGGKETWHSAATAIYCLMGSGQLLWDTVTGVDMAL

SEQ ID NO: 28600 - protein, 466 aa, synthetic construct
  REGION 1..466: note = neuraminidase__InfluenzaB__ABI84039
MLPSTIQTLTLFLTSGGVLLSLYVSASLSYLLYSDILLKFSPTEITAPTMPLDCANASNVQAVNRSATKGVTLLLPEPEWTYPRLSCPGSTFQKALLISPHRFGETKGNSAPLIIREPFIACGPNECKHFALTHYAAQPGGYYNGTRGDRNKLRHLISVKLGKIPTVENSIFHMAAWSGSACHDGKEWTYIGVDGPDNNALLKIKYGEAYTDTYHSYANNILRTQESACNCIGGNCYLMITDGSASGVSECRFLKIREGRIIKEIFPTGRVKYTEECTCGFASNKTIECACRDNSYTAKRPFVKLNVETDTAEIRLMCTDTYLDTPRPDDGSITGPCESNGDKGSGGIKGGFVHQRMASKIGRWYSRTMSKTERMGMGLYVKYDGDPWADSDALAFSGVMVSMKEPGWYSFGFEIKDKKCDVPCIGIEMVHDGGKETWHSAATAIYCLMGSGQLLWDTVTGVDMAL

SEQ ID NO: 28601 - protein, 466 aa, synthetic construct
  REGION 1..466: note = neuraminidase__InfluenzaB__ABI84051
MLPSTIQTLTLFLTSGGVLLSLYVSASLSYLLYSDILLRFSQTEITAPIMPLDCANASNVQAVNHSATKGVTLLLPEPEWTYPRLSCPGSTFQKALLISPHRFGETKGNSAPLIIREPFIACGPKECKHFALTHYAAQPGGYYNGTREDRNKLRHLISVKLGKIPTVENSIFHMAAWSGSACHDGREWTYIGVDGPDSNALLKIKYGEAYTDTYHSYAKNILRTQESACNCIGGDCYLMITDGPASGISECRFLKIREGRIIKEIFPTGRVKHTEECTCGFASNKTIECACRDNSYTAKRPFVKLNVETDTAEIRLMCTETYLDTPRPNDGSITGPCESNGDKGSGGIKGGFVHQRMASKIGRWYSRTMSKTKRMGMGLYVKYDGDPWTDSEALALSGVMVSMEEPGWYSFGFEIKDKKCDVPCIGIEMVHDGGKTTWHSAATAIYCLMGSGQLLWDTVTGVDMAL

SEQ ID NO: 28602 - protein, 466 aa, synthetic construct
  REGION 1..466: note = neuraminidase__InfluenzaB__ABI84062
MLPSTIQTLTLFLTSGGVLLSLYVSASLSYLLYSDILLKFSPTEIIAPIMPLDCANASNVQAVNRSTTKGVTLLLPEPEWTYPRLSCPGSTFQKALLISPHRFGETKGNSAPLIIREPFIACGPKECKHFALTHYAAQPGGYYNGTRGDRNKLRHLISVKLGKIPTVENSIFHMAAWSGSACHDGKEWTYIGVDGPDNNALLKIKYGEAYTDTYHSYANNILRTQESACNCIGGNCYLMITDGPASGISECRFLKIREGRIIKEIFPTGRVKHTEECTCGFASNKTIECACRDNSYTAKRPFVKLNVETDTAEIRLMCTETYLDTPRPDDGSITGPCESNGDKGSGGIKGGFVHQRMASKIGRWYSRTMSKTERMGMGLYVKYDGDPWADSDALALSGVMVSMEEPGWYSFGFEIKDKKCDVPCIGIEMVHDGGKETWHSAATAIYCLMGSGQLLWDTVTGVDMAL

SEQ ID NO: 28603 - protein, 466 aa, synthetic construct
  REGION 1..466: note = neuraminidase__InfluenzaB__ABL76280
MLPSTIQTLTLFLTSGGVLLSLYVSASLSYLLYSDILLKFSPTEITAPTMPLNCANASNVQAVNRSATKGVTLLLPEPEWTYPRLSCPGSTFQKALLISPHRFGETKGNSAPLIIREPFIACGPKECKHFALTHYAAQPGGYYNGTREDRNKLRHLISVKLGKIPTVENSIFHMAAWSGSACHDGREWTYIGVDGPDSNALLKIKYGEAYTDTYHSYANNILRTQESACNCIGGDCYLMITDGSASGISECRFLKIREGRIIKEIFPTGRVEHTEECTCGFASNKTIECACRDNSYTAKRPFVKLNVETDTAEIRLMCTETYLDTPRPDDGSITGPCESNGDKGSGGIKGGFVHQRMASKIGRWYSRTMSKTKRMGMGLYVKYDGDPWIDSDALTLSGVMVSMEEPGWYSFGFEIKDKKCDVPCIGIEMVHDGGKKTWHSAATAIYCLMGSGQLLWDTVTGVDMAL

SEQ ID NO: 28604 - protein, 466 aa, synthetic construct
  REGION 1..466: note = neuraminidase__InfluenzaB__ABL76302
MLPSTIQTLTLFLTSGGVLLSLYVSASLSYLLYSDILLKFPPTEITAPTMPLDCANASNVQAVNRSATKGVTLLLPEPEWTYPRLSCPGSTFQKALLISPHRFGETKGNSAPLIIREPFIACGPKECKHFALTHYAAQPGGYYNGTREDRNKLRHLISVKLGKIPTVENSIFHMAAWSGSACHDGREWTYIGVDGPDSNALLKIKYGEAYTDTYHSYANNILRTQESACNCIGGNCYLMITDGSASGISECRFLKIREGRIIKEIFPTGRVKHTEECTCGFASNKTIECACRDNSYTAKRPFVKLNVETDTAEIRLMCTETYLDTPRPDDGSITGPCESNGDKGSGGIKGGFVHQRMASKIGRWYSRTMSKTKRMGMGLYVKYDGDPWTDSDPLALSGVMVSMEEPGWYSFGFEIKDKKCDVPCIGIEMVHDGGKETWHSAATAIYCLMGSGQMLWDTVTGVDMAL

SEQ ID NO: 28605 - protein, 466 aa, synthetic construct
  REGION 1..466: note = neuraminidase__InfluenzaB__ABL76313
MLPSTIQTLTLFLTSGGVLLSLYVSASLSYLLYSDILLKFSPKEITAPTMPLNCANASNVQAVNRSATKGVTFPLPEPEWTYPRLSCPGSTFQKALLISPHRFGETKGNSAPLIIREPFIACGPKECKHFALTHYAAQPGGYYNGTREDRNKLRHLISVKLGKIPTVENSIFHMAAWSGSACHDGREWTYIGVDGPDSNALLKIKYGEAYTDTYHSYANNILRTQESACNCIGGDCYLMITDGSASGISECRFLKIREGRIIKEIFPTGRVEHTEECTCGFASNKTIECACRDNSYTAKRPFVKLNVETDTAEIRLMCTETYLDTPRPDDGSITGPCESNGDKGSGGIKGGFVHQRMASKIGRWYSRTMSKTKRMGMGLYVKYDGDPWIDSDALTLSGVMVSVEEPGWYSFGFEIKDKKCDVPCIGIEMVHDGGKTTWHSAATAIYCLMGSGQLLWDTVTGVDMAL

SEQ ID NO: 28606 - protein, 466 aa, synthetic construct
  REGION 1..466: note = neuraminidase__InfluenzaB__ABL76335
MLPSTIQTLTLFLTSGGVLLSLYVSASLSYLLYSDILLKFSPTEITAPTMPLNCANASNVQAVNRSATKGVTLPLPEPEWTYPRLSCPGSTFQKALLISPHRFGETKGNSAPLIIREPFIACGPKECKHFALTHYAAQPGGYYNGTREDRNKLRHLISVKLGKIPTVENSIFHMAAWSGSACHDGREWTYIGVDGPDSNALLKIKYGEAYTDTYHSYANNILRTQESACNCIGGDCYLMITDGSASGISECRFLKIREGRIIKEIFPTGRVEHTEECTCGFASNKTIECACRDNSYTAKRPFVKLNVETDTAEIRLMCTETYLDTPRPDDGSITGPCESNGDKGSGGIKGGFVHQRMASKIGRWYSRTMSKTKRMGMGLYVKYDGDPWIDSDALTLSGVMVSMEEPGWYSFGFEIKDKKCDVPCIGIEMVHDGGKTTWHSAATAIYCLMGSGQLLWDTVTGVDMAL

SEQ ID NO: 28607 - protein, 466 aa, synthetic construct
  REGION 1..466: note = neuraminidase__InfluenzaB__ABL76346
MLPSTIQTLTLFLTSGGVLLSLYVSASLSYLLYSDILLKFSPKEITTPTMPLNCANASNVQAVNRSATKGVTLLLPEPEWTYPRLSCPGSTFQKALLISPHRFGETKGNSAPLIIREPFIACGPKECKHFALTHYAAQPGGYYNGTREDRNKLRHLISVKLGKIPTVENSIFHMAAWSGSACHDGREWTYIGVDGPDSNALLKIKYGEAYTDTYHSYANNILRTQESACNCIGGDCYLMITDGSASGISECRFLKIREGRIIKEIFPTGRVEHTEECTCGFASNKTIECACRDNSYTAKRPFVKLNVETDTAEIRLMCTETYLDTPRPDDGSITGPCESNGDKGSGGIKGGFVHQRMASKIGRWYSRTMSKTKRMGMGLYVKYDGDPWIDSDALTLSGVMVSMEEPGWYSFGFEIKDKKCDVPCIGIEMVHDGGKTTWHSAATAIYCLMGSGQLLWDTVTGVDMAL

SEQ ID NO: 28608 - protein, 466 aa, synthetic construct; identical to SEQ ID NO: 28607
  REGION 1..466: note = neuraminidase__InfluenzaB__ABL76357

SEQ ID NO: 28609 - protein, 466 aa, synthetic construct
  REGION 1..466: note = neuraminidase__InfluenzaB__ABL76368
MLPSTIQTLTLFLTSGGVLLSLYVSASLSYLLYSDILLKFSPTEITAPTMPLDCANASNVQAVNRSATKGVTLLLPEPEWTYPRLSCPGSTFQKALLISPHRFGETKGNSAPLIIREPFIACGPKECKHFALTHYAAQPGGYYNGTREDRNKLRHLISVKLGKIPTVENSIFHMAAWSGSACHDGKEWTYIGVDGPDSNALLKIKYGEAYTDTYHSYANNILRTQESACNCIGGNCYLMITDGSASGISECRFLKIREGRIIKEIFPTGRVKHTEECTCGFASNKTIECACRDNSYTAKRPFVKLNVETDTAEIRLMCTETYLDTPRPDDGSITGPCESNGDKGSGGIKGGFVHQRMASKIGRWYSRTMSKTKRMGMGLYVKYDGDPWTDSGALALSGVMVSMEEPGWYSFGFEIKDKKCDVPCIGIEMVHDGGKETWHSAATAIYCLMGSGQLLWDTVTGVDMAL

SEQ ID NO: 28610 - protein, 467 aa, synthetic construct
  REGION 1..467: note = neuraminidase__InfluenzaB__ABL76379
MLPSTIQTLTLFLTSGGVLLSLYVSASLSYLLYSDILLKFSPTEITAPTMPLDCANASNVQAVNRSATKGVTFLLLPEPEWTYPRLSCPGSTFQKALLISPHRFGETKGNSAPLIIREPFIACGPKECKHFALTHYAAQPGGYYNGTRGDRNKLRHLISVKLGKIPTVENSIFHMAAWSGSACHDGKEWTYIGVDGPDSNALLKIKYGEAYTDTYHSYANNILRTQESACNCIGGNCYLMITDGSASGISECRFLKIREGRIIKEIFPTGRVKHTEECTCGFASNKTIECACRDNSYTAKRPFVKLNVETDTAEIRLMCTETYLDTPRPDDGSITGPCESNGDKGSGGIKGGFVHQRMASKIGRWYSRTMSKTKRMGMGLYVKYDGDPWTDSDALALSGVMVSMEEPGWYSFGFEIKDKKCDVPCIGIEMVHDGGKETWHSAATAIYCLMGSGQLLWDTVTGVDMAL

SEQ ID NO: 28611 - protein, 466 aa, synthetic construct
  REGION 1..466: note = neuraminidase__InfluenzaB__ABL76390
MLPSTIQTLTLFLTSGGVLLSLYVSASLSYLLYSDILLKFSPTEITAPTMPLDCANASNVQAVNRSSTKGVTFLLPEPEWTYPRLSCPGSTFQKALLISPHRFGETKGNSAPLIIREPFIACGPKECKHFALTHYAAQPGGYYNGTREDRNKLRHLISVKLGKIPTVENSIFHMAAWSGSACHDGKEWTYIGVDGPDSNALLKIKYGEAYTDTYHSYANNILRTQESACNCIGGNCYLMITDGSASGISECRFLKIREGRIIKEIFPTGRVKHTEECTCGFASNKTIECACRDNSYTAKRPFVKLNVETDTAEIRLMCTETYLDTPRPDDGSITGSCESDGDKGSGGIKGGFVHQRMASKIGRWYSRTMSKTKRMGMGLYVRYDGDPWTDSSALALSGVMVSMEEPGWYSFGFEIKDKKCDVPCIGIEMVHDGGKETWHSAATAIYCLMGSGQLLWDTVTGVDMAL

SEQ ID NO: 28612 - protein, 466 aa, synthetic construct
  REGION 1..466: note = neuraminidase__InfluenzaB__ABL76412
MLPSTIQTLTLFLTSGGVLLSLYVSASLSYLLYSDILLKFSPTEITAPTMPLDCANASNVQAVNRSATKGVTLLIPEPEWTYPRLSCPGSTFQKALLISPHRFGETKGNSAPLIIREPFIACGPKECKHFALTHYTAQPGGYYNGTRGDRNKLRHLISVKLGKIPTVENSIFHMAAWSGSACHDGKEWTYIGVDGPDSNALLKIKYGEAYTDTYHSYANNILRTQESACNCIGGNCYLMITDGSASGISECRFLKIREGRIIKEIFPTGRVKHTEECTCGFASNKTIECACRDNSYTAKRPFVKLNVETDTAEIRLMCTETYLDTPRPDDGSITGPCESNGDKGSGGIKGGFVHQRMASKIGRWYSRTMSKTKRMGMGLYVKYDGDPWTDSDALALSGVMVSMEEPGWYSFGFEIKDKKCDVPCIGIEMVHDGGKETWHSAATAIYCLMGSGQLLWDTVTGVDMAL

SEQ ID NO: 28613 - protein, 466 aa, synthetic construct
  REGION 1..466: note = neuraminidase__InfluenzaB__ABL76423
MLPSTIQTLTLFLTSGGVLLSLYVSASLSYLLYSDILLKFSPTEITAPTMPLDCANASNVQAVNHSATKGVTLLLPEPEWTYPRLSCPGSTFQKALLISPHRFGETKGNSAPLIIREPFIACGPKECKHFALTHYAAQPGGYYNGTRGDRNKLRHLISVKLGKIPTVENSIFHMAAWSGSACHDGKEWTYIGVDGPDSNALLKIKYGEAYTDTYHSYANNILRTQESACNCIGGNCYLMITDGSASGISECRFLKIREGRIIKEIFPTGRVKHTEECTCGFASNKTIECACRDNSYTAKRPFVKLNVETDTAEIRLMCTETYLDTPRPDDGSITGPCESNGDKGSGGIKGGFVHQRMASKIGRWYSRTMSKTKRMGMGLYVKYDGDPWTDSDALAFSGVMVSMEEPGWYSFGFEIKDKKCDVPCIGIEMVHDGGKETWHSAATAIYCLMGSGQLLWDTVTGVDMAL

SEQ ID NO: 28614 - protein, 466 aa, synthetic construct
  REGION 1..466: note = neuraminidase__InfluenzaB__ABL76434
MLPSTIQTLTLFLTSGGVLLSLYVSASLSYLLYSDILLKFSPTEITAPTMPLDCANASNVQAVNRSATKGVTLLLPEPEWTYPRLSCPGSTFQKALLISPHRFGETKGNSAPLIIREPFIACGPKECKHFALTHYAAQPGGYYNGTRGDRNKLRHLISVKLGKIPTVENSIFHMAAWSGSACHDGKEWTYIGVDGPDNNALLKIKYGEAYTDTYHSYANNILRTQESACNCIGGNCYLMITDGSASGISECRFLKIREGRIIKEIFPTGRVKHTEECTCGFASNKTIECACRDNSYTAKRPFVKLNVETDTAEIRLMCTETYLDTPRPDDGSITGPCESNGDKGSGGIKGGFVHQRMASKIGRWYSRTMSKTKRMGMGLYVKYDGDPWADSDALALSGVMVSMEEPGWYSFGFEIRDKKCDVPCIGIEMVHDGGKETWHSAATAIYCLMGSGQLLWDTVTGVDMAL

SEQ ID NO: 28615 - protein, 466 aa, synthetic construct
  REGION 1..466: note = neuraminidase__InfluenzaB__ABL76456
MLPSTIQTLTLFLTSGGVLLSLYVSASLSYLLYSDILLKFSPTEITAPTMPLDCANASNVQAVNRSATKGVKLLLPEPEWTYPRLSCPGSTFQKALLISPHRFGETKGNSAPLIIREPFIACGPKECKHFALTHYAAQPGGYYNGTRGDRNKLRHLISVKLGKIPTVENSIFHMAAWSGSACHDGKEWTYIGVDGPDNNALLKIKYGEAYTDTYHSYANNILRTQESACNCIGGNCYLMITDGSASGVSECRFLKIREGRIIKEIFPTGRVKHTEECTCGFASNKTIECACRDNSYTAKRPFVKLNVETDTAEIRLMCTETYLDTPRPDDGSITGPCESNGDKGSGGIKGGFVHQRMASKIGRWYSRTMSKTKRMGMGLYVKYDGDPWADSDALALSGVMVSMEEPGWYSFGFEIKDKKCDVPCIGIEMVHDGGKETWHSAATAIYCLMGSGQLLWDTVTGVDMAL

SEQ ID NO: 28616 - protein, 466 aa, synthetic construct
  REGION 1..466: note = neuraminidase__InfluenzaB__ABL76467
MLPSTIQTLTLFLTSGGVLLSLYVSASLSYLLYSDILLKFSPTEITAPTMPLDCANASNVQAVNRSATKGVTLLLPEPEWTYPRLSCPGSTFQKALLISPHRFGETKGNSAPLIIREPFIACGPKECKHFALTHYAAQPGGYYNGTRGDRNKLRHLISVKLGKIPTVENSIFHMAAWSGSACHDGKEWTYIGVDGPDNNALLKIKYGEAYTDTYHSYANNILRTQESACNCIGGNCYLMITDGSASGISECRFLKIREGRIIKEIFPTGRVKHTEECTCGFASNKTIECACRDNSYTAKRPFVKLNVETDTAEIRLMCTETYLDTPRPDDGSITGPCESNGDKGSGGIKGGFVHQRMASKIGRWYSRTMSKTKRMGMGLYVKYDGDPWADSDALALSGVMVSMEEPGWYSFGFEIKDKKCDVPCIGIEMVHDGGKETWHSAATAIYCLMGSGQLLWDTVTGVDMAL

SEQ ID NO: 28617 - protein, 466 aa, synthetic construct
  REGION 1..466: note = neuraminidase__InfluenzaB__ABL76478
MLPSTIQTLTLFLTSGGVLLSLYVSASLSYLLYSDILLKFSPTEITAPTMPLDCANASNVQAVNRSATKGVKLLLPEPEWTYPRLSCPGSTFQKALLISPHRFGETKGNSAPLIIREPFIACGPKECKHFALTHYAAQPGGYYNGTRGDRNKLRHLISVKLGKIPTVENSIFHMAAWSGSACHDGKEWTYIGVDGPDNNALLKIKYGEAYTDTYHSYANNILRTQESACNCIGGNCYLMITDGSASGVSECRFLKIREGRIIKEIFPTGRVKHTEECTCGFASNKTIECACRDNSYTAKRPFVKLNVETDTAEIRLMCTKTYLDTPRPDDGSITGPCESNGDKGSGGIKGGFVHQRMASKIGRWYSRTMSKTKRMGMGLYVKYDGDPWADSDALALSGVMVSMEEPGWYSFGFEIKDKKCDVPCIGIEMVHDGGKETWHSAATAIYCLMGSGQLLWDTVTGVDMAL

SEQ ID NO: 28618 - protein, 466 aa, synthetic construct
  REGION 1..466: note = neuraminidase__InfluenzaB__ABL76522
MLPSTIQTLTLFLTSGGVLLSLYVSASLSYLLYSDILLKFSPTEITAPTMPLDCANASNVQAVNRSATKGVTLLLPEPEWTYPRLSCPGSTFQKALLISPHRFGETKGNSAPLIIREPFIACGPNECKHFALTHYAAQPGGYYNGTRGDRNKLRHLISVKLGKIPTVENSIFHMAAWSGSACHDGKEWTYIGVDGPDNNALLKIKYGEAYTDTYHSYANNILRTQESACNCIGGNCYLMITDGSASGVSECRFLKIREGRIIKEIFPTGRVKHTEECTCGFASNKTIECACRDNSYTAKRPFVKLNVETDTAEIRLMCTETYLDTPRPDDGSITGPCESNGDKGSGGIKGGFVHQRMASKIGRWYSRTMSKTERMGMGLYVKYDGDPWADSDALALSGVMVSMEEPGWYSFGFEIKDKKCDVPCIGIEMVHDGGKETWHSAATAIYCLMGSGQLLWDTVTGVDMAL

SEQ ID NO: 28619 - protein, 466 aa, synthetic construct
  REGION 1..466: note = neuraminidase__InfluenzaB__ABL76533
MLPSTIQTLTLFLTSGGVLLSLYVSASLSYLLYSDILLKFSPTEITAPTMPLDCANASNVQAVNRSATKGVTLLLPEPEWTYPRLSCPGSTFQKALLISPHRFGETKGNSAPLIIREPFIACGPNECKHFALTHYAAQPGGYYNGKRGDRNKLRHLISVKLGKIPTVENSIFHMAAWSGSACHDGKEWTYIGVDGPDNNALLKIKYGEAYTDTYHSYANNILRTQESACNCIGGNCYLMITDGSASGVSECRFLKIREGRIIKEIFPTGRVKHTEECTCGFASNKTIECACRDNSYTAKRPFVKLNVETDTAEIRLMCTETYLDTPRPDDGSITGPCESNGDKGSGGIKGGFVHQRMASKIGRWYSRTMSKTERMGMGLYVKYDGDPWADSDALALSGVMVSMEEPGWYSFGFEIKDKKCDVPCIGIEMVHDGGKETWHSAATAIYCLMGSGQLLWDTVTGVDMAL

SEQ ID NO: 28620 - protein, 466 aa, synthetic construct
  REGION 1..466: note = neuraminidase__InfluenzaB__ABL76544
MLPSTIQTLTLFLTSGGVLLSLYVSASLSYLLYSDILLKFSPTEITAPTMPLDCANASNVQAVNRSATKGVTLLLPEPEWTYPRLSCPGSTFQKALLISPHRFGETKGNSAPLIIREPFIACGPNECKHFALTHYAAQPGGYYNGTRGERNKLRHLISVKLGKIPTVENSIFHMAAWSGSACHDGKEWTYIGVDGPDNNALLKIKYGEAYTDTYHSYANNILRTQESACNCIGGNCYLMITDGSASGVSECRFLKIREGRIIKEIFPTGRVKHTEECTCGFASNKTIECACRDNSYTAKRPFVKLNVETDTAEIRLMCTETYLDTPRPDDGSITGPCESNGDKGSGGIKGGFVHQRMASKIGRWYSRTMSKTERMGMGLYVKYDGDPWADSDALALSGVMVSMEEPGWYSFGFEIKDKKCDVPCIGIEMVHDGGKETWHSAATAIYCLMGSGQLLWDTVTGVDMAL

SEQ ID NO: 28621 - protein, 466 aa, synthetic construct; identical to SEQ ID NO: 28619
  REGION 1..466: note = neuraminidase__InfluenzaB__ABL76566

SEQ ID NO: 28622 - protein, 466 aa, synthetic construct
  REGION 1..466: note = neuraminidase__InfluenzaB__ABL76588
MLPSTIQTLTLFLTSGGVLLSLYVSASLSYLLYSDILLKFSPTEITAPTMPLDYANASNVQAVNRSATKGVTLLLPEPEWTYPRLSCPGSTFQKALLISPHRFGETKGNSAPLIIREPFIACGPNECKHFALTHYAAQPGGYYNGTRGDRNKLRHLISVKLGKIPTVENSIFHMAAWSGSACHDGKEWTYIGVDGPDNNALLKIKYGEAYTDTYHSYANNILRTQESACNCIGGNCYLMITDGSASGVSECRFLKIREGRIIKEIFPTGRVKHTEECTCGFASNKTIECACRDNSYTAKRPFVKLNVETDTAEIRLMCTETYLDTPRPDDGSITGPCESNGDKGSGGIKGGFVHQRMASKIGRWYSRTMSKTERMGMGLYVKYDGDPWADSDALALSGVMVSMEEPGWYSFGFEIKDKKCDVPCIGIEMVHDGGKETWHSAATAIYCLMGSGQLLWDTVTGVDMAL

SEQ ID NO: 28623 - protein, 466 aa, synthetic construct; identical to SEQ ID NO: 28618
  REGION 1..466: note = neuraminidase__InfluenzaB__ABL76599

SEQ ID NO: 28624 - protein, 466 aa, synthetic construct; identical to SEQ ID NO: 28618
  REGION 1..466: note = neuraminidase__InfluenzaB__ABL76610

SEQ ID NO: 28625 - protein, 466 aa, synthetic construct
  REGION 1..466: note = neuraminidase__InfluenzaB__ABL76621
MLPSTIQTLTLFLTSGGVLLSLYVSASLSYLLYSDILLKFSPTEITAPTMPLDCANASNVQAVNRSATKGVTLLLPEPEWTYPRLSCPGSTFQKALLISPHRFGETKGNSAPLIIREPFIACGPKECKHFALTHYAAQPGGYYNGTRGDRNKLRHLISVKLGKIPTVENSIFHMAAWSGSACHDGKEWTYIGVDGPDNNALLKIKYGEAYTDTYHSYANNILRTQESACNCIGGNCYLMITDGSASGVSECRFLKIREGRIIKEIFPTGRVKHTEECTCGFASNKTIECACRDNSYTAKRPFVKLNVETDTAEIRLMCTETYLDTPRPDDGSITGPCESNGEKGSGGIKGGFVHQRMASKIGRWYSRTMSKTKRMGMGLYVKYDGDPWADSDALALSGVMVSMEEPGWYSFGFEIKDKKCDIPCIGIEMVHDGGKETWHSAATAIYCLMGSGQLLWDTVTGVDMAL

SEQ ID NO: 28626 - protein, 466 aa, synthetic construct
  REGION 1..466: note = neuraminidase__InfluenzaB__ABL76632
MLPSTIQTLTLFLTSGGVLLSLYVSASLSYLLYSDILLKFSQTEITAPIMPLDCANASNVQAVNRSATKGVTLLLPEPEWTYPRLSCPGSTFQKALLISPHRFGETKGNSAPLIIREPFIACGPTECKHFALTHYAAQPGGYYNGTREDRNKMRHLISVKLGKIPTVENSIFHMAAWSGSACHDGKEWTYIGVDGPDSNALLKIKYGEAYTDTYHSYAKNILRTQESACNCIGGDCYLMITDGPASGISECRFLKIREGRIIKEIFPTGRVKHTEECTCGFASNKTIECACRDNSYTAKRPFVKLNVETDTAEIRLMCTETYLDTPRPNDGSITGPCESDGDKGSGGIKGGFVHQRMASKIGRWYSRTMSKTKRMGMGLYVKYDGDPWTDSEALALSGVMVSMEEPGWYSFGFEIKDKKCDVPCIGIEMVHDGGKTTWHSAATAVYCLMGSGQLLWDTVTGVDMAL

SEQ ID NO: 28627 - protein, 466 aa, synthetic construct
  REGION 1..466: note = neuraminidase__InfluenzaB__ABL76643
MLPSTIQTLTLFLTSGGVLLSLYVSASLSYLLYSDILLKFSQTEITAPIMPLDCANASNVQAVNRSATKGVTLLLPEPEWTYPRLSCPGSTFQKALLISPHRFGETKGNSAPLIIREPFIACGPTECKHFALTHYAAQPGGYYNGTREDRNKLRHLISVKLGKIPTVENSIFHMAAWSGSACHDGKEWTYIGVDGPDSNALLKIKYGEAYTDTYHSYAKNILRTQESACNCIGGDCYLMITDGPASGISECRFLKIREGRIIKEIFPTGRVKHTEECTCGFASNKTIECACRDNSYTAKRPFVKLNVETDTAEIRLMCTETYLDTPRPNDGSITGPCESDGDKGSGGIKGGFVHQRMASKIGRWYSRTMSKTKRMGMGLYVKYDGDPWTDSEALALSGVMVSMEEPGWYSFGFEIKDKKCDVPCIGIEMVHDGGKTTWHSAATAIYCLMGSGQLLWDTVTGVDMAL

SEQ ID NO: 28628 - protein, 466 aa, synthetic construct
  REGION 1..466: note = neuraminidase__InfluenzaB__ABL76654
MLPSTIQTLTLFLTSGGVLLSLYVSASLSYLLYSDILLKFSQTEITAPIMPLDCANASNVQAVNRSTTKGVTLLLPEPEWTYPRLSCPGSTFQKALLISPHRFGETKGNSAPLIIREPFIACGPTECKHFALTHYAAQPGGYYNGTREDRNKLRHLISVKLGKIPTVENSIFHMAAWSGSACHDGKEWTYIGVDGPDSNALLKIKYGEAYTDTYHSYAKNILRTQESACNCIGGDCYLMITDGPASGISECRFLKIREGRIIKEIFPTGRVKHTEECTCGFASNKTIECACRDNSYTAKRPFVKLNVETDTAEIRLMCTETYLDTPRPNDGSITGPCESDGDKGSGGIKGGFVHQRMASKIGRWYSRTMSKTKRMGMGLYVKYDGDPWTDSEALALSGVMVSMEEPGWYSFGFEIKDKKCDVPCIGIEMVHDGGKTTWHSAATAIYCLMGSGQLLWDTVTGVDMAL

SEQ ID NO: 28629 - protein, 466 aa, synthetic construct
  REGION 1..466: note = neuraminidase__InfluenzaB__ABL76665
MLPSTIQTLTLFLTSGGVLLSLYVSASLSYLLYSDILLKFSQTEITAPIMPLDCANASNVQAVNRSATKGVTLLLPEPEWTYPRLSCPGSTFQKALLISPHRFGETKGNSAPLIIREPFIACGPTECKHFALTHYAAQPGGYYNGTREDRNKLRHLISVKLGKIPTVENSIFHMAAWSGSACHDGKEWTYIGVDGPDSNALLKIKYGEAYTDTYHSYAKNILRTQESACNCIGGDCYLMITDGPASGISECRFLKIREGRIIKEIFPTGRVKHTEECTCGFASNKTIECACRDNSYTAKRPFVKLNVETDTAEIRLMCTETYLDTPRPNDGSITGPCEFDGDKGSGGIKGGFVHQRMASKIGRWYSRTMSKTKRMGMGLYVKYDGDPWTDSEALALSGVMVSMEEPGWYSFGFEIKDKKCDVPCIGIEMVHDGGKTTWHSAATAIYCLMGSGQLLWDTVTGVDMAL

SEQ ID NO: 28630 - protein, 466 aa, synthetic construct
  REGION 1..466: note = neuraminidase__InfluenzaB__ABL76676
MLPSTIQTLTLFLTSGGVLLSLYVSASLSYLLYSDILLKFSQTGITAPIMPLDCANASNVQAVNRSATKGVTLLLPEPEWTYPRLSCPGSTFQKALLISPHRFGETKGNSAPLIIREPFIACGPKECKHFALTHYAAQPGGYYNGTREDRNKLRHLISVKLGKIPTVENSIFHMAAWSGSACHDGREWTYIGVDGPDSNALLKIKYGEAYTDTYHSYAKNILRTQESACNCIGGDCYLMITDGPASGISECRFLKIREGRIIKEIFPTGRVKHTEECTCGFASNKTIECACRDNSYTAKRPFVKLNVETDTAEIRLMCTETYLDTPRPNDGSITGPCESNGDKGSGGIKGGFVHQRMASKIGRWYSRTMSKTKRMGMGLYVKYDGDPWTDSEALALSGVMVSMEEPGWYSFGFEIKDKKCDVPCIGIEMVHDGGKTTWHSAATAIYCLMGSGQLLWDTVTGVDMAL

SEQ ID NO: 28631 - protein, 466 aa, synthetic construct
  REGION 1..466: note = neuraminidase__InfluenzaB__ABL76687
MLPSTIQTLTLFLTSGGVLLSLYVSASLSYLLYSDILLKFSQTEITAPIMPLDCANASNVQAVNRSATKGVTLLLPEPEWTYPRLSCPGSTFQKALLISPHRFGETKGNSAPLIIREPFIACGPTECKHFALTHYAAQPGGYYNGTREDRNKLRHLISVKLGKIPTVENSIFHMAAWSGSACHDGKEWTYIGVDGPDSNALLKIKYGEAYTDTYHSYAKNILRTQESACNCIGGDCYLMITDGPASGISECRFLKIREGRIIKEIFPTGRVKHTEECTCGFASNKTIECACRDNSYTAKRPFVKLNVETDTAEIRLMCTETYLDTPRPNDGSITGPCEFDGDKGSGGIKGGFVHQRMASKIGRWYSRTMSKTKRMGMGLYVKYDGDPWTDSEALALSGVMVPMEEPGWYSFGFEIKDKKCDVPCIGIEMVHDGGKTTWHSAATAIYCLMGSGQLLWDTVTGVDMAL

SEQ ID NO: 28632 - protein, 466 aa, synthetic construct
  REGION 1..466: note = neuraminidase__InfluenzaB__ABL76698
MLPSTIQTLTLFLTSGGVLLSLYVSASLSYLLYSDILLKFSPTEITAPTMPLDCANASNVQAVNRSATKGMTLLLPEPEWTYPRLSCPGSTFQKALLISPHRFGETRGNSAPLTIREPFIACGPKECKHFALTHYAAQPGGYYNGTREDRNKLRHLISVKLGKIPTVENSIFHMAAWSGSACHDGREWTYIGVDGPDSNALIKIKYGEAYTDTYHSYANNILRTQESACNCIGGDCYLMITDGSASGISKCRFLKIREGRIIKEIFPTGRVEHTEECTCGFASNKTIECACRDNSYTAKRPFVKLNVETDTAEIRLMCTETYLDTPRPDDGSITGPCESNGDKGRGGIKGGFVHQRMASKIGRWYSRTMSKTERMGMELYVKYDGDPWTDSEALAPSGVMVSMEEPGWYSFGFEIKDKKCDVPCIGIEMVHDGGKKTWHSAATAIYCLMGSGQLLWDTVTGVDMAL

SEQ ID NO: 28633 - protein, 466 aa, synthetic construct
  REGION 1..466: note = neuraminidase__InfluenzaB__ABL76720
MLPSTIQTLTLFLTSGGVLLSLYVSASLSYLLYSDILLKFSPTEITAPTMPLDCANASNVQAVNRSATKGVTLLLPEPEWTYPRLSCPGSTFQKALLISPHRFGETKGNSAPLIIREPFIACGPNECKHFALTHYAAQPGGYYNGTRGDRNKLRHLISVKLGKIPTVENSIFHMAAWSGSACHDGKEWTYIGVDGPDNNALLKIKYGEAYTDTYHSYANKILRTQESACNCIGGNCYLMITDGSASGVSECRFLKIREGRIIKEIFPTGRVKHTEECTCGFASNKTIECACRDNSYTAKRPFVKLNVETDTAEIRLMCTDTYLDTPRPDDGSITGPCESNGDKGSGGIKGGFVHQRMASKIGRWYSRTMSKTERMGMGLYVKYDGDPWADSDALAFSGVMVSMKEPGWYSFGFEIKDKKCDVPCIGIEMVHDGGKETWRSAATAIYCLMGSGQLLWDTVTGVDMAL

SEQ ID NO: 28634 - protein, 466 aa, synthetic construct
  REGION 1..466: note = neuraminidase__InfluenzaB__ABL76731
MLPSTIQTLTLFLTSGGVLLSLYVSASLSYLLYSDILLKFSPTEITAPTMPLDCANASNVHAVNRSATKGVTLLLPEPEWTYPRLSCPGSTFQKALLISPHRFGETKGNSAPLIIREPFIACGPNECKHFAITHYAAQPGGYYNGTRGDRNKLRHLISVKLGKIPTVENSIFHMAAWSGSACHDGKEWTYIGVDGPDNNALLKIKYGEAYTDTYHSYANNILRTQESACNCIGGNCYLMITDGSASGVSECRFLKIREGRIIKEIFPTGRVKHTEECTCGFASNKTIECACRDNSYTAKRPFVKLNVETDTAEIRLMCTDTYLDTPRPDDGSITGPCESNGDKGSGGIKGGFVHQRMASKIGRWYSRTMSKTERMGMGLYVKYDGDPWADSDALAFSGVMVSMKEPGWYSFGFEIKDKKCDVPCIGIEMVHDGGKETWHSAATAIYCLMGSGQLLWDTVTGVDMAL

SEQ ID NO: 28635 - protein, 466 aa, synthetic construct
  REGION 1..466: note = neuraminidase__InfluenzaB__ABL76742
MLPSTIQTLTLFLTSGGVLLSLYVSASLSYLLYSDILLKFSPTEITAPTMPLDCANASNVQAVNRSATKGVTLLLPEPEWTYPRLSCPGSTFQKALLISPHRFGETKGNSAPLIIREPFIACGPNECKHFALTHYAAQPGGYYNGTRGDRNKLRHLISVKLGKIPTVENSIFHMAAWSGSACHDGKEWTYIGVDGPDNNALLKIKYGEAYTDTYHSYANKILRTQESACNCIGGNCYLMITDGSASGVSECRFLKIREGRIIKEIFPTGRVKHTEECTCGFASNKTIECACRDNSYTAKRPFVKLNVETDTAEIRLMCTDTYLDTPRPDDGSITGPCESNGDKGSGGIKGGFVHQRMASKIGRWYSRTMSKTERMGMGLYVKYDGDPWADSDALAFSGVMVSMKEPGWYSFGFEIKDKKCDVPCIGIEMVHDGGKETWHSAATAIYCLMGSGQLLWDTVTGVDMAL

SEQ ID NO: 28636 - protein, 466 aa, synthetic construct
  REGION 1..466: note = neuraminidase__InfluenzaB__ABL76753
MLPSTIQTLTLFLTSGGVLLSLYVSASLSYLLYSDILLKFSQTEITAPIMPLDCANASNVQAVNRSATKGVTLLLPEPEWTYPRLSCPGSTFQKALLISPHRFGETTGNSAPLIIREPFIACGPKECKHFALTHYAAQPGGYYNGTREDRNKLRHLISVKLGKIPTVENSIFHMAAWSGSACHDGREWTYIGVDGPDNNALLKIKYGEAYTDTYHSYAKNILRTQESACNCIGGDCYLMITDGPASGISECRFLKIREGRIIKEIFPTGRVKHTEECTCGFASNKTIECACRDNSYTAKRPFVKLNVETDTAEIRLMCTETYLDTPRPNDGSITGPCESNGDKGSGGIKGGFVHQRMASKIGRWYSRTMSKTKRMGMGLYVKYDGDPWTDSEALALSGVMVSMEEPGWYSFGFEIKDKKCDVPCIGIEMVHDGGKTTWHSAATAIYCLMGSGQLLWDTVTGVDMAL

SEQ ID NO: 28637 - protein, 466 aa, synthetic construct; identical to SEQ ID NO: 28606
  REGION 1..466: note = neuraminidase__InfluenzaB__ABL76764

SEQ ID NO: 28638 - protein, 466 aa, synthetic construct; identical to SEQ ID NO: 28606
  REGION 1..466: note = neuraminidase__InfluenzaB__ABL76775

SEQ ID NO: 28639 - protein, 466 aa, synthetic construct
  REGION 1..466: note = neuraminidase__InfluenzaB__ABL76797
MLPSTIQTLTLFLTSGGVLLSLYVSASLSYLLYSDILLKFSPTEITAPTMPLDCANASNVQAVNRSATKGVTLLLPEPEWTYPRLSCPGSTFQKALLISPHRFGETKGNSAPLIIREPFIACGPKECKHFALTHYAAQPGGYYNGTREDRNKLRHLISVKLGKIPTVENSIFHMAAWSGSACHDGKEWTYIGVDGPDSNALLKIKYGEAYTDTYHSYANNILRTQESACNCIGGNCYLMITDGSASGISECRFLKIREGRIIKEIFPTGRVEHTEECTCGFASNKTIECACRDNSYTAKRPFVKLNVETDTAEIRLMCTETYLDTPRPDDGSITGPCESNGDKGSGGIKGGFVHQRMASKIGRWYSRTMSKTKRMGMGLYVKYDGDPWTDSDALALSGVMVSMEEPGWYSFGFEIKDKKCDVPCIGIEMVHDGGKETWHSAATAIYCLMGSGQLLWDTVTGVNMAL

SEQ ID NO: 28640 - protein, 466 aa, synthetic construct
  REGION 1..466: note = neuraminidase__InfluenzaB__ABL76819
MLPSTIQTLTLFLTSGGVLLSLYVSASLSYLLYSDILLKFSPTEITAPTMPLDCANASNVQAVNRSATKGVTLLLPEPEWTYPRLSCPGSTFQKALLISPHRFGETKGNSAPLIIREPFIACGPKECKHFALTHYAAQPGGYYNGTREDRNKLRHLISVKLGKIPTVENSIFHMAAWSGSACHDGKEWTYIGVDGPDSNALLKIKYGEAYTDTYHSYANNILRTQESACNCIGGNCYLMITDGSASGISECRFLKIREGRIIKEIFPTGRVKHTEECTCGFASNKTIECACRDNSYTAKRPFVKLNVETDTAEIRLMCTETYLDTPRPDDGSITGPCESNGDKGSGGIKGGFVHQRMASKIGRWYSRTMSKTKRMGMGLYVKYDGDPWTDSDALALSGVMVSMEEPGWYSFGFEIKDKKCDVPCIGIEMVHDGGKETWHSAATAIYCLMGSGQLLWDTVTGVDMAL

SEQ ID NO: 28641 - protein, 466 aa, synthetic construct
  REGION 1..466: note = neuraminidase__InfluenzaB__ABL76830
MLPSTIQTLTLFLTSGGVLLSLYVSASLSYLLYSDILLKFSPTKITAPTMPLDCANASNVQAVNRSATKGVTLLLPEPEWTYPRLSCPGSTFQKALLISPHRFGETKGNSAPLIIREPFIACGPKECKHFALTHYAAQPGGYYNGTRGDRNKLRHLISVKLGKIPTVENSIFHMAAWSGSACHDGKEWTYIGVDGPDNNALLKIKYGEAYTDTYHSYANNILRTQESACNCIGGNCYLMITDGSASGVSECRFLKIREGRIIKEIFPTGRVKHTEECTCGFASNKTIECACRDNSYTAKRPFVKLNVETDTAEIRLMCTKTYLDTPRPDDGSITGPCESNGDKGSGGIKGGFVHQRMASKIGRWYSRTMSKTKRMGMGLYVKYDGDPWADSDALALSGVMVSMEEPGWYSFGFEIKDKKCDVPCIGIEMVHDGGKETWHSAATAIYCLMGSGQLLWDTVTGVDMAL

SEQ ID NO: 28642 - protein, 466 aa, synthetic construct
  REGION 1..466: note = neuraminidase__InfluenzaB__ABL76852
MLPSTIQTLTLFLTSGGVLLSLYVSASLSYLLYSDILLKFSPTEITAPTMPLDCANASNVQAVNRSATKGVTLLLPEPEWTYPRLSCPGSTFQKALLISPHRFGETKGNSAPLIIREPFIACGPKECKHFALTHYAAQPGGYYNGTREDRNKLRHLISVKLGKIPTVENSIFHMAAWSGSACHDGKEWTYIGVDGPDSNALLKIKYGEAYTDTYHSYANNILRTQESACNCIGGNCYLMITDGSASGISECRFLKIREGRIIKEIFPTGRVKHTEECTCGFASNKTIECACRDNSYTAKRPFVKLNVETDTAEIRLMCTETYLDTPRPDDGSITGPCESNGDKGSGGIKGGFVHQRMESKIGRWYSRTMSKTKRMGMGLYVKYDGDPWTDSDALALSGVMVSIEEPGWYSFGFEIKDKKCDVPCIGIEMVHDGGKETWHSAATAIYCLMGSGQLLWDTVTGVDMAL

SEQ ID NO: 28643 - protein, 466 aa, synthetic construct
  REGION 1..466: note = neuraminidase__InfluenzaB__ABL76863
MLPSTIQTLTLFLTSGGVLLSLYVSASLSYLLYSDILLKFSPTEITAPTMPLDCANASNVQAVNRSATKGVTLLLPEPEWTYPRLSCPGSTFQKALLISPHRFGETKGNSAPLIIREPFIACGPKECKHFALTHYAAQPGGYYNGTREDRNKLRHLISVKLGKIPTVENSIFHMAAWSGSACHDGKEWTYIGVDGPDSNALLKIKYGEAYTDTYHSYANNILRTQESACNCIGGNCYLMITDGSASGISECRFLKIREGRIIKEIFPTGRVKHTEECTCGFASNKTIECACRDNSYTAKRPFVKLNVETDTAEIRLMCTETYLDTPRPDDGSITGPCESNGDKGSGGIKGGFVHQRMASKIGRWYSRTMSKTKRMGMGLYVKYDGDPWTDSDALALSGVMVSMEEPGWYSFGFEIKDKKCDVPCIGIEMVHDGGKETWHSAATAIYCLMGSGQLLWDTVTGVDMAM

SEQ ID NO: 28644 - protein, 466 aa, synthetic construct
  REGION 1..466: note = neuraminidase__InfluenzaB__ABL76874
MLPSTIQTLTLFLTSGGVLLSLYVSASLSYLLYSDILLKFSPTEITAPTMPLDCANASNVQAVNSSATKGVTLLLPEPEWTYPRLSCPGSTFQKALLISPHRFGETKGNSAPLIIREPFIACGPKECKHFALTHYAAQPGGYYNGTRGDRNKLRHLISVKLGKIPTVENSIFHMAAWSGSACHDGKEWTYIGVDGPDSNALLKIKYGEAYTDTYHSYANNILRTQESACNCIGGNCYLMITDGSASGISECRFLKIREGRIIKEIFPTGRVKHTEECTCGFASNKTIECACRDNSYTAKRPFVKLNVETDTAEIKLMCTETYLDTPRPDDGSITGPCESNGDKGSGGIKGGFVHQRMASKIGRWYSRTMSKTKRMGMGLYVKYDGDPWTDSDALALSGVMVSMEEPGWYSFGFEIKDKKCDVPCIGIEMVHDGGKETWHSAATAIYCLMGSGQLLWDTVTGVDMAL

SEQ ID NO: 28645 - protein, 466 aa, synthetic construct
  REGION 1..466: note = neuraminidase__InfluenzaB__ABL76885
MLPSTIQTLTLFLTSGGVLLSLYVSASLSYLLYSDILLKFSQTEITAPTMPLDYANASNVQAVNRSATKGVTLLLPEPEWTYPRLSCPGSTFQKALLISPHRFGETKGNSAPLIIREPFIACGPKECKHFALTHYAAQPGGYYNGTREDRNKLRHLISVKLGKIPTVENSIFHMAAWSGSACHDGREWTYIGVDGPDSNALLKIKYGEAYTDTYHSYAKNILRTQESACNCIGGDCYLMITDGSASGISECRFLKIREGRIIKEIFPTGRVKHTEECTCGFASNKTIECACRDNSYTAKRPFVKLNVETDTAEIRLMCTETYLDTPRPDDGSITGPCESNGDKGSGGIKGGFVHQRMASKIGRWYSRTMSKTKRMGMGLYVKYDGDPWTDSEALALSGVMVSMEEPGWYSFGFEIKDKKCDVPCIGIEMVHDGGKTTWHSAATAIYCLMGSGQLLWDTVTGVDMAL

SEQ ID NO: 28646 - protein, 466 aa, synthetic construct
  REGION 1..466: note = neuraminidase__InfluenzaB__ABL76896
MLPSTIQTLTLFLTSGGVLLSLYVSASLSYLLYSDILLKFSQTEITAPTMPLDCANASNVQAVNRSATKGVTLLLPEPEWMYPRLSCPGSTFQKALLISPHRFGETKGNSAPLIIREPFIACGPKECKHFALTHYAAQPGGYYNGTREDRNKLRHLISVKLGKIPTVENSIFHMAAWSGSACHDGREWTYIGVDGPDSNALLKIKYGEAYTDTYHSYAKNILRTQESACNCIGGDCYLMITDGSASGISECRFLKIREGRIIKEIFPTGRVKHTEECTCGFASNKTIECACRDNSYTAKRPFVKLNVETDTAEIRLMCTETYLDTPRPDDGSITGPCESNGDKGSGGIKGGFVHQRMASKIGRWYSRTMSKTKRMGMGLYVKYDGDPWTDSEALALSGVMVSMEEPGWYSFGFEIKDKKCDVPCIGIEMVHDGGKTTWHSAATAIYCLMGSGQLLWDAVTGVDMAL

SEQ ID NO: 28647 - protein, 466 aa, synthetic construct
  REGION 1..466: note = neuraminidase__InfluenzaB__ABL76918
MLPSTIQTLTLFLTSGGVLLSLYVSASLSYLLYSDILLKFSPTEITAPTMPLDCANASNVQAVNRSATKGVTLLLPEPEWTYPRLSCPGSTFQKALLISPHRFGETKGNSAPLIIREPFIACGPNECKHFALTHYAAQPGGYYNGTRGDRNKLRHLISVKLGKIPTVENSIFHMAAWSGSACHDGKEWTYIGVDGPDNNALLKIKYGEAYTDTYHSYANNILRTQESACNCIGGNCYLMITDGSASGVSECRFLKIREGRIIKEIFPTGRVKHTEECTCGFASNKTIECACRDNSYTAKRPFVKLNVETDTAEIRLMCTETYLDTPRPDDGSITGPCESNGDKGSGGIKGGFVHQRMASKIGRWYSRTMSKTERMGMGLYVKYDGDPWADSDALALIGVMVSMEEPGWYSFGFEIKDKKCDVPCIGIEMVHDGGKETWHSAATAIYCLMGSGQLLWDTVTGVNMAL

SEQ ID NO: 28648 - protein, 466 aa, synthetic construct
  REGION 1..466: note = neuraminidase__InfluenzaB__ABL76962
MLPSTIQTLTLFLTSGGVLLSLYVSALLSYLLYSDILLKFSPTKIIAPTMSLDCANASNVQAVNHSATEEMTFLLPEPEWTYPRLSCQGSTFQKALLISPHRFGEAKGNSAPLIIREPFIACGPKECKHFALTHYAAQPGGYYNGTREDRNKLRHLISVNLGKIPTVENSIFHMAAWSGSACHDGREWTYIGVDGPDSNALIKIKYGEAYTDTYHSYANNILRTQESACNCIGGDCYLMITDGSASGISKCRFLKIREGRIIKEIFPTGRVEHTEECTCGFASNKTIECACRDNSYTAKRPFVKLNVETDTAEIRLMCTETYLDTPRPDDGSITGPCESNGDKGSGGIKGGFVHQRMASKIGRWYSRTMSKTKRMGMELYVKYDGDPWTDSDALAPSGVMVSMEEPGWYSFGFEIKDKKCDVPCIGIEMVHDGGKKTWHSAATAIYCLMGSGQLLWDTVTGVDMAL

SEQ ID NO: 28649 - protein, 466 aa, synthetic construct; identical to SEQ ID NO: 28579
  REGION 1..466: note = neuraminidase__InfluenzaB__ABL76973

SEQ ID NO: 28650 - protein, 466 aa, synthetic construct
  REGION 1..466: note = neuraminidase__InfluenzaB__ABL76984
MLPSTIQTLTLFLTSGGVLLSLYVSASLSYLLYSDILLKFSQTEITAPTMPLDCANASNVQAVNLSATKGVTLLLPEPEWTYPRLSCPGSTFQKALLISPHRFGETKGNSAPLIIREPFIACGPKECKHFALTHYAAQPGGYYNGTREDRNKLRHLISVKLGKIPTVENSIFHMAAWSGSACHDGREWTYIGVDGPDSNALLKIKYGEAYTDTYHSYANNILRTQESACNCIGGNCYLMITDGSASGISECRFLKIREGRIIKEIFPTGRVEHTEECTCGFASNKTIECACRDNSYTAKRPFVKLNVETDTAEIRLMCTETYLDTPRPDDGSITGPCESNGDKGSGGIKGGFVHQRMASKIGRWYSRTMSKTKRMGMGLYVKYDGDPWTDSDALALSGVMVSMEEPGWYSFGFEIKDKKCDVPCIGIEMVHDGGKRTWHSAATAIYCLMGSGQLLWDTVTGVDMAL

SEQ ID NO: 28651 - protein, 466 aa, synthetic construct; identical to SEQ ID NO: 28606
  REGION 1..466: note = neuraminidase__InfluenzaB__ABL77006

SEQ ID NO: 28652 - protein, 466 aa, synthetic construct; identical to SEQ ID NO: 28650
  REGION 1..466: note = neuraminidase__InfluenzaB__ABL77017

SEQ ID NO: 28653 - protein, 466 aa, synthetic construct
  REGION 1..466: note = neuraminidase__InfluenzaB__ABL77028
MLPSTIQTLTLFLTSGGVLLSLYVSASLSYLLYSDILLKFSPTEITAPTMPLDCANASNVQAVNRSATKGVTLLLPEPEWTYPRLSCPGSTFQKALLISPHRFGETKGNSAPLIIREPFIACGPKECKHFALTHYAAQPGGYYNGTREDRNKLRHLISVKLGKIPTVENSIFHMAAWSGSACHDGKEWTYIGVDGPDSNALLKIKYGEAYTDTYHSYANNILRTQESACNCIGGNCYLMITDGSASGISECRFLKIREGRIIKEIFPTGRVEHTEECTCGFASNKTIECACRDNSYTAKRPFVKLNVETDTAEIRLMCTETYLDTPRPDDGSITGPCESNGDKGSGGIKGGFVHQRMASKIGRWYSRTMSKTKRMGMGLYVKYDGDPWTDSDALALSGVMVSMEEPGWYSFGFEIKDKKCDVPCIGIEMVHDGGKETWHSAATAIYCLMGSGQLLWDTVTGVDMAL

SEQ ID NO: 28654 - protein, 466 aa, synthetic construct
  REGION 1..466: note = neuraminidase__InfluenzaB__ABL77039
MLPSTIQTLTLFLTSGGVLLSLYVSASLSYLLYSDILLKFSPTETTAPTMPLDCANASNVQAVNCSATKGVTLLLPEPEWTYPRLSCPGSTFQKALLISPHRFGETKGNSAPLIIREPFIACGPKECKHFALTHYAAQPGGYYNGTREDRNKLRHLISVKLGKIPTVENSIFHMAAWSGSACHDGKEWTYIGVDGPDSNALLKIKYGEAYTDTYHSYANNILRTQESACNCIGGNCYLMITDGSASGISECRFLKIREGRIIKEIFPTGRVEHTEECTCGFASNKTIECACRDNSYTAKRPFVKLNVETDTAEIRLMCTETYLDTPRPDDGSITGPCESNGDKGSGGIKGGFVHQRMASKIGRWYSRTMSKTKRMGMGLYVKYDGDPWTDSDALALSGVMVSMEEPGWYSFGFEIKDKKCDVPCIGIEMVHDGGKETWHSAATAIYCLMGSGQLLWDTVTGVDMAL

SEQ ID NO: 28655 - protein, 466 aa, synthetic construct
  REGION 1..466: note = neuraminidase__InfluenzaB__ABL77050
MLPSTIQTLTLFLTSGGVLLSLYVSASLSYLLYSDILLKFSPTEITAPAMPLDCANASNVQAVNRSATKGVTLLLPEPEWTYPRLSCPGSTFQKALLISPHRFGETKGNSAPLIIREPFIACGPKECKHFALTHYAAQPGGYYNGTREDRNKLRHLISVKLGKIPTVENSIFHMAAWSGSACHDGKEWTYIGVDGPDSNALLKIKYGEAYTDTYHSYANNILRTQESACNCIGGNCYLMITDGSASGISECRFLKIREGRIIKEIFPTGRVKHTEECTCGFASNKTIECACRDNSYTAKRPFVKLNVETDTAEIRLMCTETYLDTPRPDDGSITGPCESNGDKGSGGIKGGFVHQRMASKIGRWYSRTMSKTKRMGMGLYVKYDGDPWTDSDALALSGVMVSMEEPGWYSFGFEIKDKKCDVPCIGIEMVHDGGKETWHSAATAIYCLMGSGQLLWDTVTGVDMAL

SEQ ID NO: 28656 - protein, 466 aa, synthetic construct
  REGION 1..466: note = neuraminidase__InfluenzaB__ABL77072
MLPSTIQTLTLFLTSGGVLLSLYVSALLSYLLYSDILLKFSPTKIIAPTTSLDSANASNFQAVNHSATKEMTFLLPEPEWTYPRLSCQGSTFQKALLISPHRFGEAKGNSAPLIIREPFIACGPKECKHFALTHYAAQPGGYYNGTREDRNKLRHLISVNLGKIPTVENSIFHMAAWSGSACHDGREWTYIGVDGPDSNALIKIKYGEAYTDTYHSYANNILRTQESACNCIGGDCYLMITDGSASGISKCRFLKIREGRIIKEIFPTGRVEHTEECTCGFASNKTIECACRDNSYTAKRPFVKLNVETDTAEIRLMCTETYLDTPRPDDGSITGPCESNGDKGSGGIKGGFVHQRMASKIGRWYSRTMSKTKRMGMELYVKYDGDPWTDSDALAPSGVMVSIKESGWYSFGFEIKDKKCDVPCIGIEMVHDGGKTTWHSAATAIYCLMGSGQLLWDTVTGVDMAL

SEQ ID NO: 28657 - protein, 466 aa, synthetic construct; identical to SEQ ID NO: 28584
  REGION 1..466: note = neuraminidase__InfluenzaB__ABL77083

SEQ ID NO: 28658 - protein, 466 aa, synthetic construct; identical to SEQ ID NO: 28584
  REGION 1..466: note = neuraminidase__InfluenzaB__ABL77094

SEQ ID NO: 28659 - protein, 466 aa, synthetic construct
  REGION 1..466: note = neuraminidase__InfluenzaB__ABL77105
MLPSTIQTLTLFLTSGGVLLSLYVSASLSYLLYSDILLKFSSTEITAPTMPLDCANASNVQAVNRSATEGVTLLLPEPEWTYPRLSCPGSTFQKALLISPHRFGETKGNSAPLIIREPFIACGPKECKHFALTHYAAQPGGYYNGTREDRNKLRHLISVKLGKIPTVENSIFHMAAWSGSACHDGKEWTYIGVDGPDSNALLKIKYGEAYTDTYHSYANNILRTQESACNCIGGNCYLMITDGSASGISECRFLKIREGRIIKEIFPTGRVEHTEECTCGFASNKTIECACRDNSYTAKRPFVKLNVETDTAEIRLMCTETYLDTPRPDDGSITGPCESNGDKGSGGIKGGFVHQRMASKIGRWYSRTMSKTKRMGMGLYVKYDGDPWTDSDALALSGVMVSMEEPGWYSFGFEIKDKKCDVPCIGIEMVHDGGKETWHSAATAIYCLMGSGQLLWDTVTGVDMAL

SEQ ID NO: 28660 - protein, 466 aa, synthetic construct; identical to SEQ ID NO: 28584
  REGION 1..466: note = neuraminidase__InfluenzaB__ABL77127

SEQ ID NO: 28661 - protein, 466 aa, synthetic construct
  REGION 1..466: note = neuraminidase__InfluenzaB__ABL77138
MLPSTIQTLTLFLTSGGVLLSLYVSALLSYLLYSDILLKFSPTKIIAPTTSLDSANASNFQAVNHSATKEMTFLLPEPEWTYPRLSCQGSTFQKALLISPHRFGEAKGNSAPLIIREPFIACGPKECKHFALTHYAAQPGGYYNGTREDRNKLRHLISVNLGKIPTVENSIFHMAAWSGSACHDGREWTYIGVDGPDSNALIKIKYGEAYTDTYHSYANNILRTQESACNCIGGDCYLMITDGSASGISKCRFLKIREGRIIKEIFPTGRVEHTEECTCGFASNKTIECACRDNSYTAKRPFVKLNVETDTAEIRLMCTETYLDTPRPDDGSITGPCESNGDKGSGGIKGGFVHQRMASKIGRWYSRTMSKTKRMGMELYVKYDGDPWTDSDALAPSGVMVSIEEPGWYSFGFEIKDKKCDVPCIGIEMVHDGGKTTWYSAATAIYCLMGSGQLLWDTVTGVDMAL

SEQ ID NO: 28662 - protein, 466 aa, synthetic construct; identical to SEQ ID NO: 28584
  REGION 1..466: note = neuraminidase__InfluenzaB__ABL77149

SEQ ID NO: 28663 - protein, 466 aa, synthetic construct
  REGION 1..466: note = neuraminidase__InfluenzaB__ABL77160
MLPSTIQTLTLFLTSGGVLLSLYVSASLSYLLYSDILLKFSQTKITAPTMPLDCANASNVQAVNRSATKGVTLLLPEPEWTYPRLSCPGSTFQKALLISPHRFGETKGNSAPLIIREPFIACGPKECKHFALTHYAAQPGGYYNGTREDRNKLRHLISVKLGKIPTVENSIFHMAAWSGSACHDGREWTYIGVDGPDSNALLKIKYGEAYTDTYHSYAKNILRTQESACNCIGGDCYLMITDGSASGISECRFLKIREGRIIKEIFPTGRVKHTEECTCGFASNKTIECACRDNSYTAKRPFVKLNVETDTAEIRLMCTETYLDTPRPNDGSITGPCESDGDRGSGGIKGGFVHQRMESKIGRWYSRTMSKTKRMGMGLYVKYDGDPWTDSEALALSGVMVSMEEPGWYSFGFEIKDKKCDVPCIGIEMVHDGGKTTWHSAATTIYCLMGSGQLLWDTVTGVDMAL

SEQ ID NO: 28664 - protein, 466 aa, synthetic construct; identical to SEQ ID NO: 28616
  REGION 1..466: note = neuraminidase__InfluenzaB__ABL77171

SEQ ID NO: 28665 - protein, 466 aa, synthetic construct
  REGION 1..466: note = neuraminidase__InfluenzaB__ABL77182
MLPSTIQTLTLFLTSGGVLLSLYVSALLSYLLYSDILLKFSPTKIIAPTTSLDSANASNFQAVNHSATKEMTFLLPEPEWTYPRLSCQGSTFQKALLISPHRFGEAKGNSAPLIIREPFIACGPKECKHFALTHYAAQPGGYYNGTREDRNKLRHLISVNLGKIPTVENSIFHMAAWSGSACHDGREWTYIGVDGPDSNALIKIKYGEAYTDTYHSYANNILRTQESACNCIGGDCYLMITDGSASGISKCRFLKIREGRIVKEIFPTGRVEHTEECTCGFASNKTIECACRDNSYTAKRPFVKLNVETDTAEIRLMCTETYLDTPRPDDGSITGPCESNGDKGSGGIKGGFVHQRMASKIGRWYSRTMSKTKRMGMELYVKYDGDPWTDSDALAPSGVMVSIEEPGWYSFGFEIKDKKCDVPCIGIEMVHDGGKTTWHSAATAIYCLMGSGQLLWDTITGVDMAL

SEQ ID NO: 28666 - protein, 466 aa, synthetic construct; identical to SEQ ID NO: 28591
  REGION 1..466: note = neuraminidase__InfluenzaB__ABL77193

SEQ ID NO: 28667 - protein, 466 aa, synthetic construct
  REGION 1..466: note = neuraminidase__InfluenzaB__ABL77204
MLPSTIQTLTLFLTSGGVLLSLYVSASLSYLLYSDILLKFSPTEITAPTMPLDCANASNVQAVNRSATKGVTLLIPEPEWTYPRLSCPGSTFQKALLISPHRFGETKGNSAPLIIREPFIACGPKECKHFALTHYAAQPGGYYNGTRGDRNKLRHLISVKLGKIPTVENSIFHMAAWSGSACHDGKEWTYIGVDGPDNSALLKIKYGEAYTDTYHSYANNILRTQESACNCIGGNCYLMITDGSASGVSECRFLKIREGRIIKEIFPTGRVKHTEECTCGFASNKTIECACRDNSYTAKRPFVKLNVETDTAEIRLMCTETYLDTPRPDDGSITGPCESNGDKGSGGIKGGFVHQRMASKIGRWYSRTMSKTKRMGMGLYVKYDGDPWADSDALALSGVMVSMEEPGWYSFGFEIKDKKCDVPCIGIEMVHDGGKETWHSAATAIYCLMGSGQLLWDTVTGVDMAL

SEQ ID NO: 28668 - protein, 466 aa, synthetic construct
  REGION 1..466: note = neuraminidase__InfluenzaB__ABL77215
MLPSTIQTLTLFLTSGGVLLSLYVSASLSYLLYSDILLKFPSTEITAPTMPLDCANASNVQAVNRSATKGVTLLLPEPEWTYPRLSCPGSTFQKALLISPHRFGETKGNSAPLIIREPFIACGPKECKHFALTHYAAQPGGYYNGTRGDRNKLRHLISVKLGKIPTVENSIFHMAAWSGSACHDGKEWTYIGVDGPDNNALLKIKYGEAYTDTYHSYANNILRTQESACNCIGGNCYLMITDGSASGVSECRFLKIREGRIIKEIFPTGRIKHTEECTCGFASNKTIECACRDNSYTAKRPFVKLNVETDTAEIRLMCTETYLDTPRPDDGSITGPCESNGDKGSGGIKGGFVHQRMASKIGRWYSRTMSKTKRMGMGLYVKYDGDPWADSDALAFSGVMVSMEEPGWYSFGFEIKDKKCDVPCIGIEMVHDGGKETWHSAATAIYCLMGSGQLLWDTVTGVNMAL

SEQ ID NO: 28669 - protein, 466 aa, synthetic construct; identical to SEQ ID NO: 28627
  REGION 1..466: note = neuraminidase__InfluenzaB__ABL77226

SEQ ID NO: 28670 - protein, 466 aa, synthetic construct
  REGION 1..466: note = neuraminidase__InfluenzaB__ABL77237
MLPSTIQTLTLFLTSGGVLLSLYVSASLSYLLYSDILLKFSPTEITAPTMPLDCANASNVQAVNRSATKGVTLLLPEPEWTYPRLSCPGSTFQKALLISPHRFGETKGNSAPLIIREPFIACGPNECKHFALTHYAAQPGGYYNGTRGDRNKLRHLISVKLGKIPTVENSIFHMAAWSGSACHDGKEWTYIGVDGPDNNALLKIKYGEAYTDTYHSYANNILRTQESACNCIGGNCYLMITDGSASGVSECRFLKIREGRIIKEIFPTGRVKHTEECTCGFASNKTIECACRDNSYTAKRPFVKLNVETDTAEIRLMCTDTYLDTPRPDDGSITGPCESNGDKGSGGIKGGFVHQRMASKIGRWYSRTMSKTERMGMGLYVKYDGDPWADSDALAFSGVMVSMKEPGWYSFGFEIKDKKCDVPCIGIEMVHDGGKETWHSAATAIYCLMGSGQLLWDTVTGVDMAL

SEQ ID NO: 28671 - protein, 466 aa, synthetic construct
  REGION 1..466: note = neuraminidase__InfluenzaB__ABL77248
MLPSTIQTLTLFLTSGGVLLSLYVSALLSYLLYSDILLKFSPTKIIAPTMSLDCANASNVQAANHSATKEMTFLLPEPEWTYPRLSCQGSTFQKALLISPHRFGEAKGNSAPLIIREPFIACGPKECKHFALTHYAAQPGGYYNGTREDRNKLRHLISVNLGKIPTVENSIFHMAAWSGSACHDGREWTYIGVDGPDSNALIKIKYGEAYTDTYHSYANNILRTQESACNCIGGDCYLMITDGSASGISKCRFLKIREGRIIKEIFPTGRVEHTEECTCGFASNKTIECACRDNSYTAKRPFVKLNVETDTAEIRLMCTETYLDTPRPDDGSITGPCESNGEKGRGGIKGGFVHQRMASKIGRWYSRTMSKTERMGMELYVKYDGDPWTDSDALAPSGVMVSMKEPGWYSFGFEIKDKKCDVPCIGIEMVHDGGKKTWHSAATAIYCLMGSGQLLWDTVTGVDMAL

SEQ ID NO: 28672 - protein, 466 aa, synthetic construct
  REGION 1..466: note = neuraminidase__InfluenzaB__ABL77259
MLPSTIQTLTLFLTSGGVLLSLYVSASLSYLLYSDILLKFSPTEITAPKVPLDCANASNVQAVNRSATKGMTLLLSEPEWTYPRLSCQGSTFQKALLISPHRFGETRGNSAPLIIREPFIACGPKECKHFALTHYAAQPGGYYNGTREDRNKLRHLISVKLGKIPTVENSIFHMAAWSGSACHDGREWTYIGVDGPDSNALIKIKYGEAYTDTYHSYANNILRTQESACNCIGGDCYLMITDGSASGISKCRFLKIREGRIIKEIFPTGRVEHTEECTCGFASNKTIECACRDNSYTAKRPFVKLNVETDTAEIRLMCTETYLDTPRPDDGSITGPCESNGDKGRGGIKGGFVHQRMASKIGRWYSRTMSKTERMGMELYVKYDGDPWTDSDALAPSGVMVSMKEPGWYSFGFEIKDKKCDVPCIGIEMVHDGGKKTWHSAATAIYCLMGSGQLLWDTVTGVDMAL

SEQ ID NO: 28673 - protein, 466 aa, synthetic construct
  REGION 1..466: note = neuraminidase__InfluenzaB__ABL77270
MLPSTIQTLTLFLTSGGVLLSLYVSASLSYLLYSDILLKFSPTEITAPTMPLDCANASNVQAVNRSATKGMTLLLPEPEWTYPRLSCPGSTFQKALLISPHRFGETRGNSAPLIIREPFIACGPKECKHFALTHYAAQPGGYYNGTREDRNKLRHLISVKLGKIPTVENSIFHMAAWSGSACHDGREWTYIGVDGPDSNALIKIKYGEAYTDTYHSYANNILRTQESACNCIGGDCYLMITDGSASGISKCRFLKIREGRIIKEIFPTGRVEHTEECTCGFASNKTIECACRDNSYTAKRPFVKLNVETDTAEIRLMCTETYLDTPRPDDGSITGPCESNGDKGRGGIKGGFVHQRMASKIGRWYSRTMSKTERMGMELYVKYDGDPWTDSEALAPSGVMVSMEEPGWYSFGFEIKDKKCDVPCIGIEMVHDGGKKTWHSAATAIYCLMGSGQLLWDTVTGVDMAL

SEQ ID NO: 28674 - protein, 466 aa, synthetic construct
  REGION 1..466: note = neuraminidase__InfluenzaB__ABL77281
MLPSTIQTLTLFLTSGGVLLSLYVSVSLSYLLYSDILLRFSPTEITAPTMPLDCANASNVQAVNRSATKGMTLRLPEPEWTYPRLSCPGSTFQKALLISPHRFGETRGNSAPLIIREPFIACGPKECKHFALTHYAAQPGGYYNGTREDRNKLRHLISVKLGKIPTVENSIFHMAAWSGSACHDGREWTYIGVDGPDSNALIKIKYGEAYTDTYHSYANNILRTQESACNCIGGDCYLMITDGSASEISKCRFLKIREGRIIKEIFPTGRVEHTEECTCGFASNKTIECACRDNSYTAKRPFVKLNVETDTAEIRLMCTETYLDTPRPDDGSITGPCESNGDKGRGGIKGGFVHQRMASKIGRWYSRTMSKTERMGMELYVKYDGDPWTDSEALAPSGVMVSMEEPGWYSFGFEIKDKKCDVPCIGIEMVHDGGKKTWHSAATAIYCLMGSGQLLWDTVTGVDMAL

SEQ ID NO: 28675 - protein, 466 aa, synthetic construct
  REGION 1..466: note = neuraminidase__InfluenzaB__ABL77292
MLPSTIQTLTLFLTSGGVLLSLYVSASLSYLLYSGVLLKFSPTEITAPTMPLDCANASNVQAVNRSATKGVTLLLPEPEWTYPRLSCPGSTFQKALLISPHRFGETRGNSAPLIIREPFIACGPKECKHFALTHYAAQPGGYYNGTREDRNKMRHLISVKLGKIPTVENSIFHMAAWSGSACHDGREWTYIGVDGPDSNALIKIKYGEAYTDTYHSYANNILRTQESACNCIGGDCYLMITDGSASGISKCRFLKIREGRIIKEIFPTGRVEHTEECTCGFASNKTIECACRDNSYTAKRPFVKLNVETDTAEIRLMCTETYLDTPRPDDGSITGPCESNGDKGLGGIKGGFVHQRMASKIGRWYSRTMSKTERMGMELYVKYDGDPWTDSDALALSGVMVSMEEPGWYSFGFEIKDKKCDVPCIGIEMVHDGGKKTWHSAATAIYCLMGSGQLLWDTVTGVDMAL

SEQ ID NO: 28676 - protein, 465 aa, synthetic construct
  REGION 1..465: note = neuraminidase__InfluenzaB__ABL77303
MLPSTIQTLTLFLTSGGVLLSLYVSALLSYLLYSDILLKFSPKIIAPTISLDCANASNVQAVNHSATKEMTFLLPEPEWTYPRLSCQGSIFQKALLISPHRFGEAKGNSAPLIIREPFIACGPKECKHFALTHYAAQPGGYYNGTREDRNKLRHLISVNLGKIPTVENSIFHMAAWSGSACHDGREWTYIGVDGPDSNALIKIKYGEAYTDTYHSYANNILRTQESACNCIGGDCYLMITDGSASGISKCRFLKIREGRIIKEIFPTGRVEHTEECTCGFASNKTIECACRDNSYTAKRPFVKLNVETDTAEIRLMCTETYLDTPRPDDGSITGPCESNGDKGRGGVKGGFVHQRIASKIGRWYSRTMSKTERMGMELYVKYDGDPWTDSDALAPSGVMVSMEEPGWYSFGFEIKDKKCDVPCIGIEMVHDGGKKTWHSAATAIYCLMGSGQLLWDTVTGVDMAL

SEQ ID NO: 28677 - protein, 465 aa, synthetic construct
  REGION 1..465: note = neuraminidase__InfluenzaB__ABL77314
MLPSTIQTLTLFLTSGGVLLSLYVSALLSYLLYSDVLLKFSPKIIAPTMSLDCANASNVQAVNHSATEEMTFLLPEPEWTYPRLSCQGSTFQKALLISPHRFGEAKGNSAPLIIREPFIACGPKECKHFALTHYAAQPGGYYNGTREDRNKLRHLISVNLGKIPTVENSIFHMAAWSGSACHDGREWTYIGVDGPDSNALIKIKYGEAYTDTYHSYANNILRTQESACNCIGGDCYLMITDGSASGISKCRFLKIREGRIIKEIFPTGRVEHTEECTCGFASNKTIECACRDNSYTAKRPFVKLNVETDTAEIRLMCTETYLDTPRPDDGSITGPCESNGDKGHGGIKGGFVHQRMASKIGRWYSRTMSKTKRMGMELYVKYDGDPWTDSDALAPSGVMVSMEEPGWYSFGFEIRDKKCDVPCIGIEMVHDGGKKTWHSAATAIYCLMGSGQLLWDTVTGVDMAL

SEQ ID NO: 28678 - protein, 466 aa, synthetic construct
  REGION 1..466: note = neuraminidase__InfluenzaB__ABL77325
MLPSTIQTLTLFLTSGGVLLSLYVSALLSYSLYSDILLKFSPTKTIAPTMSLDCANASNVQAVNHSATKGMTLLLPEPEWTYPRLSCQGSTFQKALLISPHRFGETKGNSAPLIIREPFIACGPKECKHFALTHYAAQPGGYYNGTREDRNKLRHLISVSLGKIPTVENSIFHMAAWSGSACHDGREWTYIGVDGPDSNALIKIKYGEAYTDTYHSYANNILRTQESACNCIGGDCYLMITDGSASGISKCRFLKIREGRIIKEIFPTGRVDHTEECTCGFASNKTIECACRDNSYTAKRPFVKLNVETDTAEIRLMCTETYLDTPRPDDGSITGPCESNGDKGRGGIKGGFVHQRMASKIGRWYSRTMSKTERLGMELYVKYDGDPWTDSDALAPSGVMVSAEEPGWYSFGFEIKDKKCDVPCIGIEMVHDGGKKTWHSAATAIYCLMGSGQLLWDTVTGVDMAL

SEQ ID NO: 28679 - protein, 466 aa, synthetic construct
  REGION 1..466: note = neuraminidase__InfluenzaB__ABL77336
MLPSTIQTLTLFLTSGGVLLSLYVSASLSYLLYSDILLKFSPTEITAPPMPLDCANASNVQAVNRSATKGVTLLLPEPEWTYPRLSCPGSTFQKALLISPHRFGETRGNSAPLIIREPFIACGPKECKHFAITHYAAQPGGYYNGTREDRNKLRHLISVKLGKIPTVENSIFHMAAWSGSACHDGREWTYIGVDGPDSNALLKIKYGEAYTDTYHSYANNILRTQESACNCIGGDCYLMITDGSASGISKCRFLKIREGRIIKEIFPTGRVEHTEECTCGFASNKTIECACRDNSYTAKRPFVKLNVETDTAEIRLMCTETYLDTPRPDDGSITGPCESNGDKGRGGIKGGFVHQRMASKIGRWYSRTMSKTDRMGMELYVKYDGDPWTDSDALALSGVMVSMEEPGWYSFGFEIKDKKCDVPCIGIEMVHDGGKKTWHSAATTIYCLMGSGQLLWDTVTGVDMAL

SEQ ID NO: 28680 - protein, 466 aa, synthetic construct
  REGION 1..466: note = neuraminidase__InfluenzaB__ABL77347
MLPSTIQTLTLFLTSGGVLLSLYVSASLSYLLYSDILLKFSPTKITAPTMPLDCANASNVQAVNHSATKGVTLLLPEPEWTYPRLSCPGSTFQKALLISPHRFGETRGNSAPLIIREPFIACGPKECKHFALTHYAAQPGGYYNGTREDRNKLRHLISVKLGKIPTVENSIFHMAAWSGSACHDGREWTYIGVDGPDSNALLKIKYGEAYTDTYHSYANNILRTQESACNCIGGDCYLMITDGSASGISECRFLKIREGRIIKEIFPTGRVEHTEECTCGFASNKTIECACRDNSYTAKRPFVKLNVETDTAEIRLMCTETYLDTPRPDDGSITGPCESNGDKGSGGIKGGFVHQRMASKIGRWYSRTMSKTKRMGMGLYVKYDGDPWTDSDALALSGVMVSMEEPGWYSFGFEIKDKKCDVPCIGIEMVHDGGKKTWHSAATAIYCLMGSGQLLWDTVTGVDMAL

SEQ ID NO: 28681 - protein, 465 aa, synthetic construct
  REGION 1..465: note = neuraminidase__InfluenzaB__ABL77380
MLPSTIQTLTLFLTSGGVLLSLYVSALLSYLLYSDILLKFSPKIIAPTTSLDCANASNVQAVNHSATKEMKFLPPEPEWTYPRLSCQGSTFQKALLISPHRFGEAKGNSAPLIIREPFIACGPKECKHFALTHYAAQPGGYYNGTREDRNKLRHLISVNLGKIPTVENSIFHMAAWSGSACHDGREWTYIGVDGPDSNALIKIKYGEAYTDTYHSYANNILRTQESACNCIGGDCYLMITDGSASGISKCRFLKIREGRIIKEIFPTGRVEHTEECTCGFASNKTIECACRDNSYTAKRPFVKLNVETDTAEIRLMCTETYLDTPRPDDGSITGPCESNGDKGSGGVKGGFVHQRMASKIGRWYSRTMSKTKRMGMELYVKYDGDPWTDSDALAPSGVMVSMEEPGWYSFGFEIKDKKCDVPCIGIEMVHDGGKRTWHSAATAIYCLMGSGQLLWDTVTGVNMAL

SEQ ID NO: 28682 - protein, 466 aa, synthetic construct
  REGION 1..466: note = neuraminidase__InfluenzaB__ABL77391
MLPSTIQTLTLFLTSGGVLLSLYVSASLSYLLYSDILLKFSPTEITAPTMPLDCANASNVQAVNRSATKGVTLLLPEPEWTYPRLSCPGSTFQKALLISPHRFGETKGNSAPLIIREPFIACGPKECKHFALTHYAAQPGGYYNGTRGDRNKLRHLISVKLGKIPTVENSIFHMAAWSGSACHDGKEWTYIGVDGPDNNALLKIKYGEAYTDTYHSYANNILRTQESACNCIGGNCYLMITDGSASGVSECRFLKIREGRIIKEIFPTGRVKHTEECTCGFASNKTIECACRDNSYTAKRPFVKLNVETDTAEIRLMCTETYLDTPRPDDGSITGPCESNGDKGSGGIKGGFVHQRMASKIGRWYSRTMSKTKRMGMGLYVKYDGDPWADSDALALSGVMVSMEEPGWYSFGFEIKDKKCDVPCIGIEMVHDGGKETWHSAATAIYCLMGSGQLLWDTVTGVDMAL

SEQ ID NO: 28683 - protein, 466 aa, synthetic construct
  REGION 1..466: note = neuraminidase__InfluenzaB__ABL84344
MLPSTIQTLTLFLTSGGVLLSLYVSASLSYLLYSDILLKFSSTEITAPTMPLNCANASNVQAVNHSATKGVTLPLPEPEWTYPRLSCPGSTFQKALLISPHRFGETKGNSAPLIIREPFIACGPKECKHFALTHYAAQPGGYYNGTREDRNKLRHLISVKLGKIPTVENSIFHMAAWSGSACHDGREWTYIGVDGPDSNALLKIKYGEAYTDTYHSYANNILRTQESACNCIGGDCYLMITDGSASGVSECRFLKIREGRIIKEIFPTGRVEHTEECTCGFASNKTIECACRDNSYTAKRPFVKLNVETDTAEIRLMCTETYLDTPRPDDGSITGPCESNGDKGSGGIKGGFVHQRMASKIGRWYSRTMSKTKRMGMGLYVKYDGDPWIDSDALTLSGVMVSMEEPGWYSFGFEIKDKKCDVPCIGIEMVHDGGKETWHSAATAIYCLMGSGQLLWDTVTGVDMAL

SEQ ID NO: 28684 - protein, 466 aa, synthetic construct
  REGION 1..466: note = neuraminidase__InfluenzaB__ABN50397
MLPSTIQTLTLFLTSGGVLLSLYVSASLSYLLYSDILLKFSPTEITAPTMPLNCANASNVQAVNRSATKGVTLLLPEPEWTYPRLSCPGSTFQKALLISPHRFGETKGNSAPLIIREPFIACGPKECKHFALTHYAAQPGGYYNGTREDRNKLRHLISVKLGKIPTVENSIFHMAAWSGSACHDGREWTYIGVDGPDSNALLKIKYGEAYTDTYHSYANNILRTQESACNCIGGDCYLMITDGSASGISECRFLKIREGRIIKEIFPTGRVEHTEECTCGFASNKTIECACRDNSYTAKRPFVKLNVETDTAEIRLMCTETYLDTPRPDDGSITGPCESNGDKGSGGIKGGFVHQRMASKIGRWYSRTMSKTKRMGMGLYVKYDGDPWIDSDALTLSGVMVSMEEPGWYSFGFEIKDKKCDVPCIGIEMVHDGGKKTWHSAATAIYCLMGSGQLLWDTVTGVDMDL

SEQ ID NO: 28685 - protein, 466 aa, synthetic construct
  REGION 1..466: note = neuraminidase__InfluenzaB__ABN50408
MLPSTIQTLTLFLTSGGVLLSLYVSASLSYLLYSDILLKFSPTEITAPTMPLNCANASNVQAVNRSATKGVTLPLPEPEWTYPRLSCPGSTFQKALLISPHRFGETKGNSAPLIIREPFIACGPKECKHFALTHYAAQPGGYYNGTREDRNKLRHLISVKLGKIPTVENSIFHMAAWSGSACHDGREWTYIGVDGPDSNALLKIKYGEAYTDTYHSYANNILRTQESACNCIGGDCYLMITDGSASGISECRFLKIREGRIIKEIFPTGRVEHTEECTCGFASNKTIECACRDNSYTAKRPFVKLNVETDTAEIRLMCTETYLDTPRPDDGSITGPCESNGDKGSGGIKGGFVHQRMASKIGRWYSRTMSKTKRMGMGLYVKYDGDPWIDSDALTLSGVMVSMEEPGWYSFGFEIKDKKCDVPCIGIEMVHDGGKKTWHSAATAIYCLMGSGQLLWDTVTGVDMAL

SEQ ID NO: 28686 - protein, 466 aa, synthetic construct
  REGION 1..466: note = neuraminidase__InfluenzaB__ABN50419
MLPSTIQTLTLFLTSGGVLLSLYVSASLSYLLYSDILLKFSPTEITAPTMPLDCANASNVQAVNRSATKGVTLLLPEPEWTYPRLSCPGSTFQKALLISPHRFGETKGNSAPLIIREPFIACGPKECKHFALTHYAAQPGGYYNGTRGDRNKLRHLISVKLGKIPTVENSIFHMAAWSGSACHDGKEWTYIGVDGPDSNALLKIKYGEAYTDTYHSYANNILRTQESACNCIGGNCYLMITDGSASGISECRFLKIREGRIIKEIFPTGRVKHTEECTCGFASNKTIECACRDNSYTAKRPFVKLNVETDTAEIRLMCTETYLDTPRPDDGSITGLCESNGDKGSGGIKGGFVHQRMASKIGRWYSRTMSKTKRMGMGLYVKYDGDPWTDSDALALSGVMVSMEEPGWYSFGFEIKDKKCDVPCIGIEMVHDGGKETWHSAATAIYCLMGSGQLLWDTVTGVDMAL

SEQ ID NO: 28687 - protein, 466 aa, synthetic construct
  REGION 1..466: note = neuraminidase__InfluenzaB__ABN50430
MLPSTIQTLTLFLTSGGVLLSLYVSASLSYLLYSDILLKFSPTEITAPTMPLDCANASNVQAVNRSATKGVTLLLPEPEWTYPRLSCPGSTFQKALLISPHRFGETKGNSAPLIIREPFIACGPKECKHFALTHYAAQPGGYYNGTRGDRNKLRHLISVKLGKIPTVENSIFHMAAWSGSACHDGKEWTYIGVDGPDSNALLKIKYGEAYTDTYHSYANNILRTQESACNCIGGNCYLMITDGSASGISECRFLKIREGRIIKEIFPTGRVKHTEECTCGFASNKTIECACRDNSYTAKRPFVKLNVETDTAEIRLMCTETYLDTPRPDDGSITGPCESNGDKGSGGIKGGFVHQRMASKIGRWYSRTMSKTKRMGMGLYVKYDGDPWTDSDALALSGVMVSMEEPGWYSFGFEIKDKKCDVPCIGIEMVHDGGKETWHSAATAIYCLMGSGQLLWDTVTGVDMAL

SEQ ID NO: 28688 - protein, 466 aa, synthetic construct; identical to SEQ ID NO: 28670
  REGION 1..466: note = neuraminidase__InfluenzaB__ABN50463

SEQ ID NO: 28689 - protein, 466 aa, synthetic construct; identical to SEQ ID NO: 28584
  REGION 1..466: note = neuraminidase__InfluenzaB__ABN50474

SEQ ID NO: 28690 - protein, 466 aa, synthetic construct
  REGION 1..466: note = neuraminidase__InfluenzaB__ABN50485
MLPSTIQTLTLFLTSGGVLLSLYVSASLSYLLYSDILLKFSPTEITAPTMPLDCANASNVQAVNRSATKGVTLLLPEPEWTYPRLSCPGSTFQKALLISPHRFGETKGNSAPLIIREPFIACGPKECKHFALTHYAAQPGGYYNGTRGDRNKLRHLISVKLGKIPTVENSIFHMAAWSGSACHDGKEWTYIGVDGPDSNALLKIKYGEAYTDTYHSYANNILRTQESACNCIGGNCYLMITDGSASGISECRFLKIREGRIIKEIFPTGRVKHTEECTCGFASNKTIECACRDNSYTAKRPFVKLNVETDTAEIRLMCTETYLDTPRPDDGSITGPCEFNGDKGSGGIKGGFVHQRMASKIGRWYSRTMSKTKRMGMGLYVKYDGDPWTDSDALALSGVMVSMEEPGWYSFGFEIKDKKCDVPCIGIEMVHDGGKETWHSAATAIYCLMGSGQLLWDTVTGVDMAL

SEQ ID NO: 28691 - protein, 466 aa, synthetic construct
  REGION 1..466: note = neuraminidase__InfluenzaB__ABN50496
MLPSTIQTLTLFLTSGGVLLSLYVSASLSYLLYSDILLKFPSTEITAPTMPLDCANASNVQAVNRSATKRVTLLLPEPEWTYPRLSCPGSTFQKALLISPHRFGETKGNSAPLIIREPFIACGPKECKHFALTHYAAQPGGYYNGTRGDRNKLRHLISVKLGKIPTVENSIFHMAAWSGSACHDGKEWTYIGVDGPDNNALLKIKYGEAYTDTYHSYANNILRTQESACNCIGGNCYLMITDGSASGVSECRFLKIREGRIIKEIFPTGRIKHTEECTCGFASNKTIECACRDNSYTAKRPFVKLNVETDTAEIRLMCTETYLDTPRPDDGSITGPCESNGDKGSGGIKGGFVHQRMASKIGRWYSRTMSKTKRMGMGLYVKYDGDPWADSDALAFSGVMVSMEEPGWYSFGFEIKDKKCDVPCIGIEMVHDGGKETWHSAATAIYCLMGSGQLLWDTVTGVNMAL

SEQ ID NO: 28692 - protein, 466 aa, synthetic construct
  REGION 1..466: note = neuraminidase__InfluenzaB__ABN50507
MLPSTIQTLTLFLTSGGVLLSLYVSASLSYLLYSDILLKFSPTEITAPTMPLNCANASNVQAVNRSATKGVTLPLPEPEWTYPRLSCPGSTFQKALLISPHRFGETKGNSAPLIIREPFIACGPKECRHFALTHYAAQPGGYYNGTREDRNKLRHLISVKLGKIPTVENSIFHMAAWSGSACHDGREWTYIGVDGPDSNALLKIKYGEAYTDTYHSYANNILRTQESACNCIGGDCYLMITDGSASGISECRFLKIREGRIIKEIFPTGRVEHTEECTCGFASNKTIECACRDNSYTAKRPFVKLNVETDTAEIRLMCTETYLDTPRPDDGSITGPCESNGDKGSGGIKGGFVHQRMASKIGRWYSRTMSKTKRMGMGLYVKYDGDPWIDSDALTLSGVMVSMEEPGWYSFGFEIKDKKCDVPCIGIEMVHDGGKKTWHSAATAIYCLMGSGQLLWDTVTGVDMAL

SEQ ID NO: 28693 - protein, 466 aa, synthetic construct; identical to SEQ ID NO: 28591
  REGION 1..466: note = neuraminidase__InfluenzaB__ABN50518

SEQ ID NO: 28694 - protein, 466 aa, synthetic construct; identical to SEQ ID NO: 28591
  REGION 1..466: note = neuraminidase__InfluenzaB__ABN50529

SEQ ID NO: 28695 - protein, 466 aa, synthetic construct; identical to SEQ ID NO: 28584
  REGION 1..466: note = neuraminidase__InfluenzaB__ABN50540

SEQ ID NO: 28696 - protein, 466 aa, synthetic construct; identical to SEQ ID NO: 28616
  REGION 1..466: note = neuraminidase__InfluenzaB__ABN50551

SEQ ID NO: 28697 - protein, 466 aa, synthetic construct
  REGION 1..466: note = neuraminidase__InfluenzaB__ABN50562
MLPSTIQTLTLFLTSGGALLSLYVSALLSYLLYSDILLKFSPTKVIAPTMSLDYTNASNVQAVNHSATEEMTFLLPEPEWTYPRLSCQGSTFQKALLISPHRFGEAKGNSAPLIIREPFIACGPKECKHFALTHYAAQPGGYYNGTREDRNKLRHLISVNLGKIPTVENSIFHMAAWSGSACHDGREWTYIGVDGPDSNALIKIKYGEAYTDTYHSYANNILRTQESACNCIGGDCYLMITDGSASGISRCRFLKIREGRIIKEIFPTGRVEHTEECTCGFASNKTIECACRDNSYTAKRPFVKLNVETDTAEIRLMCTETYLDTPRPDDGSITGPCESNGDKGNGGIKGGFVHQRMASRIGRWYSRTMSKTKRMGMELYVKYDGDPWTDSDALAPSGVMVSMEEPGWYSFGFEIKDKKCDVPCIGIEMVHDGGKKTWHSAATAIYCLMGSGQLLWDTVTGVDMAL

SEQ ID NO: 28698 - protein, 466 aa, synthetic construct; identical to SEQ ID NO: 28687
  REGION 1..466: note = neuraminidase__InfluenzaB__ABN50573

SEQ ID NO: 28699 - protein, 466 aa, synthetic construct
  REGION 1..466: note = neuraminidase__InfluenzaB__ABN50584
MLPSTIQTLTLFLTSGGVLLSLYVSASLSYLLYSDILLKFSPTEITASTMPLDCANASNVQAVNRSATKGVTLLLPEPEWTYPRLSCPGSTFQKALLISPHRFGETKGNSAPLIIREPFIACGPNECKHFALTHYAAQPGGYYNGTRGDRNKLRHLISVKLGKIPTVENSIFHMAAWSGSACHDGKEWTYIGVDGPDNNALLKIKYGEAYTDTYHSYANNILRTQESACNCIGGNCYLMITDGSASGVSECRFLKIREGRIIKEIFPTGRVKHTEECTCGFASNKTIECACRDNSYTAKRPFVKLNVESDTAEIRLMCTETYLDTPRPDDGSITGPCESNGDKGSGGIKGGFVHQRMASKIGRWYSRTMSKTERMGMGLYVKYDGDPWADSDALALSGVMVSMEEPGWYSFGFEIKDKKCDVPCIGIEMVHDGGKETWHSAATAIYCLMGSGQLLWDTVTGVDMAL

SEQ ID NO: 28700 - protein, 466 aa, synthetic construct; identical to SEQ ID NO: 28584
  REGION 1..466: note = neuraminidase__InfluenzaB__ABN50595

SEQ ID NO: 28701 - protein, 465 aa, synthetic construct
  REGION 1..465: note = neuraminidase__InfluenzaB__ABN50606
MLPSTIQTLTLFLTSGGVLLSLYVSASLSYLLYSDILLRFSSKITAPTMTLDCANASNVQAVNRSATKEMTFLLPEPEWTYPRLSCQGSTFQKALLISPHRFGEARGNSAPLIIREPFIACGPKECKHFALTHYAAQPGGYYNGTREDRNKLRHLISVKLGKIPTVENSIFHMAAWSGSACHDGREWTYIGVDGPDSNALIKIKYGEAYTDTYHSYANNILRTQESACNCIGGDCYLMITDGSASGISECRFLKIREGRIIKEIFPTGRVEHTEECTCGFASNKTIECACRDNSYTAKRPFVKLNVETDTAEIRLMCTETYLDTPRPDDGSITGPCESDGDKGRGGIKGGFVHQRMASKIGRWYSRTMSKTERMGMELYVKYDGDPWTDSDALAPSGVMVSMKEPGWYSFGFEIKDKKCDVPCIGIEMVHDGGKKTWHSAATAIYCLMGSGQLLWDTVTGVDMAL

SEQ ID NO: 28702 - protein, 465 aa, synthetic construct
  REGION 1..465: note = neuraminidase__InfluenzaB__ABN50628
MLPSTIQTLTLFLTSGGVLLSLYVSALLSYLLYSDILLKFSPKIIAPTMSLDCANASNVQAVNHSATKEMTFLLPEPEWTYPRLSCQGSTFQKALLISPHRFGEAKGNSAPLIIREPFIACGPKECKHFALTHYAAQPGGYYNGTREDRNKLRHLISVNLGKIPTVENSIFHMAAWSGSACHDGREWTYIGVDGPDSNALIKIKYGEAYTDTYHSYANNILRTQESACNCIGGDCYLMITDGSASGISKCRFLKIREGRIIKEIFPTGRVEHTEECTCGFASNKTIECACRDNSYTAKRPFVKLNVETDTAEIRLMCTETYLDTPRPDDGSITGPCESNGDKGRGGVKGGFVHQRMASKIGRWYSRTMSKTERMGMELYVKYDGDPWTDSDALAPSGVMVSMEEPGWYSFGFEIKDKKCDVPCIGIEMVHDGGKKTWHSAATAIYCLMGSGQLLWDTVTGVDMAL

SEQ ID NO: 28703 - protein, 465 aa, synthetic construct
  REGION 1..465: note = neuraminidase__InfluenzaB__ABN50639
MLPSTIQTLTLFLTSGGVLLSLYVSALLSYLLYSDILLKFSPKIIAPTMSLDCANASNVQAVNHSATKEMTFLLPEPEWTYPRLSCQGSTFQKALLISPHRFGEAKGNSAPLIIREPFIACGPKECKHFALTHYAAQPGGYYNGTREDRNKLRHLISVKLGKIPTVENSIFHMAAWSGSACHDGREWTYIGVDGPDSNALVKIKYGEAYTDTYHSYANNILRTQESACNCIGGDCYLMITDGSASGISKCRFLKIREGRIIKEIFPTGRVEHTEECTCGFASNKTIECACRDNSYTAKRPFVKLNVETDTAEIRLMCTETYLDTPRPDDGSITGPCESNGDKGRGGVKGGFVHQRMASKIGRWYSRTMSKTERMGMELYVKYDGDPWTDSDALAPSGVMVSMEEPGWYSFGFEIKDKKCDVPCIGIEMVHDGGKKTWHSAATAIYCLMGSGQLLWDTVTGVDMAL

SEQ ID NO: 28704 - protein, 465 aa, synthetic construct
  REGION 1..465: note = neuraminidase__InfluenzaB__ABN50650
MLPSTIQTLTLFLTSGGVLLSLYVSALLSYLLYSDVLLKFSPKIIAPTMSLDCANASNVQAVNHSATEEMTFLLPEPEWTYPRLSCQGSTFQKALLISPHRFGEAKGNSAPLIIREPFIACGPKECKHFALTHYAAQPGGYYNGTREDRNKLRHLISVNLGKIPTVENSIFHMAAWSGSACHDGREWTYIGVDGPDSNALIKIKYGEAYTDTYHSYANNILRTQESACNCIGGDCYLMITDGSASGISKCRFLKIREGRIIKEIFPTGRVEHTEECTCGFASNKTIECACRDNSYTAKRPFVKLNVETDTAEIRLMCTETYLDTPRPDDGSITGPCESNGDKGHGGIKGGFVHQRMASKIGRWYSRTMSKTKRMGMELYVKYDGDPWTDSDALAPSGVMVSMEEPGWYSFGFEIKDKKCDVPCIGIEMVHDGGKKTWHSAATAIYCLMGSGQLLWDTVTGVDMAL

SEQ ID NO: 28705 - protein, 465 aa, synthetic construct
  REGION 1..465: note = neuraminidase__InfluenzaB__ABN50661
MLPSTIQTLTLFLTSGGVLLSLYVSALLSYLLYSDVLLKFSPKMIAPTMSLDCANASNVQAVNHSATEEMTFLLPEPEWTYPRLSCQGSTFQKALLISPHRFGEAKGNSAPLIIREPFIACGPKECKHFALTHYAAQPGGYYNGTREDRNKLRHLISVNLGKIPTVENSIFHMAAWSGSACHDGREWTYIGVDGPDSNALIKIKYGEAYTDTYHSYANNILRTQESACNCIGGDCYLMITDGSASGISKCRFLKIREGRIIKEIFPTGRVEHTEECTCGFASNKTIECACRDNSYTAKRPFVKLNVETDTAEIRLMCTETYLDTPRPDDGSITGPCESNGDKGHGGIKGGFVHQRMASKIGRWYSRTMSKTKRMGMELYVKYDGDPWTDSDALAPSGVMVSMEEPGWYSFGFEIKDKKCDVPCIGIEMVHDGGKKTWHSAATAIYCLMGSGQLLWDTVTGVDMAL

SEQ ID NO: 28706 - protein, 466 aa, synthetic construct
  REGION 1..466: note = neuraminidase__InfluenzaB__ABN50683
MLPSTIQTLTLFLTSGGVLLSLYVSASLSYLLYSDILLKFSPTEITAPTMPLDCANASNVQAVNRSATKGVTLLLPEPEWTYPRLSCPGSTFQKALLISPHRFGETRGNSAPLIIREPFIACGPKECKHFALTHYAAQPGGYYNGTREDRNKLRHLISVKLGKIPTVENSIFHMAAWSGSACHDGREWTYIGVDGPDSNALLKIKYGEAYTDTYHSYANNILRTQESACNCIGGDCYLMITDGSASGISKCRFLKIREGRIIKEIFPTGRVEHTEECTCGFASNKTIECACRDNSYTAKRPFVKLNVETDTAEIRLMCTETYLDTPRPDDGSITGPCESNGDKGLGGIKGGFVHQRMASKIGRWYSRTMSKTKRMGMELYVKYDGDPWTDSDALALSGVMVPMEEPGWYSFGFEIKDKKCDVPCIGIEMVHDGGKKTWHSAATAIYCLMGSGQLLWDTVTGVDMAL

SEQ ID NO: 28707 - protein, 466 aa, synthetic construct
  REGION 1..466: note = neuraminidase__InfluenzaB__ABN50694
MLPSTIQTLTLFLTSGGVLLSLYVSASLSYLLYSDILLKFSPTEITAPTMPLDCANASNVQAVNRSATKGVTLLLPEPEWTYPRLSCPGSTFQKALLISPHRFGETRGNSAPLIIREPFIACGPKECKHFALTHYAAQPGGYYNGTREDRNKLRHLISVKLGKIPTVENSIFHMAAWSGSACHDGREWTYIGVDGPDSNALLKIKYGEAYTDTYHSYANNILRTQESACNCIGGDCYLMITDGSASGISKCRFLKIREGRIIKEIFPTGRVEHTEECTCGFASNKTIECACRDNSYTAKRPFVKLNVETDTAEIRLMCTETYLDTPRPDDGSITGPCESNGDKGSGGIKGGFVHQRMASKIGRWYSRTMSKTKRMGMGLYVKYDGDPWTDSDALALSGVMVSMEEPGWYSFGFEIKDKKCDVPCIGIEMVHDGGKKTWHSAATAIYCLMGSGQLLWDTVTGVDMAL

SEQ ID NO: 28708 - protein, 465 aa, synthetic construct
  REGION 1..465: note = neuraminidase__InfluenzaB__ABN50705
MLPSTIQTLTLFLTLGGVLLSLYVSALLSYLLYSDVLLKFSPKMIAPTMSLDCANASNVQAVNHSATEEMTFLLPEPEWTYPRLSCQGSTFQKALLISPHRFGEAKGNSAPLIIREPFIACGPKECKHFALTHYAAQPGGYYNGTREDRNKLRHLISVNLGKIPTVENSIFHMAAWSGSACHDGREWTYIGVDGPDSNALIKIKYGEAYTDTYHSYANNILRTQESACNCIGGDCYLMITDGSASGISKCRFLKIREGRIIKEIFPTGRVEHTEECTCGFASNKTIECACRDNSYTAKRPFVKLNVETDTAEIRLMCTETYLDTPRPDDGSITGPCESNGDKGHGGIKGGFVHQRMASKIGRWYSRTMSKTKRMGMELYVKYDGDPWTDSDALAPSGVMVSMEEPGWYSFGFEIKDKKCDVPCIGIEMVHDGGKKTWHSAATAIYCLMGSGQLLWDTVTGVDMAL

SEQ ID NO: 28709 - protein, 466 aa, synthetic construct
  REGION 1..466: note = neuraminidase__InfluenzaB__ABN50716
MLPSTIQTLTLFLTSGGVLLSLYVSASLSYLLYSGILLKFSPTEITAPTMPLDCANASNVQAVNRSATKGVTLLLPEPEWTYPRLSCPGSTFQKALLISPHRFGETRGNSAPLIIREPFIACGPKECKHFALTHYAAQPGGYYNGTREDRNKLRHLISVKLGKIPTVENSIFHMAAWSGSACHDGREWTYIGVDGPDSNALLKIKYGEAYTDTYHSYANNILRTQESACNCIGGDCYLMITDGSASGISKCRFLKIREGRIIKEIFPTGRVEHTEECTCGFASNKTIECACRDNSYTAKRPFVKLNVETDTAEIRLMCTETYLDTPRPDDGSITGPCESNGDKGSGGIKGGFVHQRMASKIGRWYSRTMSKTKRMGMGLYVKYDGDPWTDSDALALSGVMVSMEEPGWYSFGFEIKDKKCDVPCIGIEMVHDGGKKTWHSAATAIYCLMGSGQLLWDTVTGVDMAL

SEQ ID NO: 28710 - protein, 466 aa, synthetic construct
  REGION 1..466: note = neuraminidase__InfluenzaB__ABN50727
MLPSTIQTLTLFLTSGGVLLSLYVSASLSYLLYSDILLKFSPTEITAPTMPLDCANASNVQAVNRSATKGVTLLLPEPEWTYPRLSCPGSTFQKALLISPHRFGETKGNSAPLIIREPFIACGPKECKHFALTHYAAQPGGYYNGTREDRNKLRHLISVKLGKIPTVENSIFHMAAWSGSACHDGREWTYIGVDGPDSNALLKIKYGEAYTDTYHSYANNILRTQESACNCIGGDCYLMITDGSASGISECRFLKIREGRIIKEIFPTGRVEHTEECTCGFASNKTIECACRDNSYTAKRPFVKLNVETDTAEIRLMCTETYLDTPRPDDGSITGPCESNGDKGSGGIKGGFVHQRMASKIGRWYSRTMSKTKRMGMGLYVKYDGDPWTDSDALALSGVMVSMEEPGWYSFGFEIKDKKCDVPCIGIEMVHDGGKKTWHSAATAIYCLMGSGQLLWDTVTGVDMAL

SEQ ID NO: 28711 - protein, 466 aa, synthetic construct; identical to SEQ ID NO: 28653
  REGION 1..466: note = neuraminidase__InfluenzaB__ABN50738

SEQ ID NO: 28712 - protein, 466 aa, synthetic construct
  REGION 1..466: note = neuraminidase__InfluenzaB__ABN50749
MLPSTIQTLTLFLTSGGVLLSLYVSASLSYLLYSDILLKFSPTEITAPTMPLDCANASNVQAVNRSATKGVTLLLPEPEWTYPRLSCPGSTFQKALLISPHRFGETKGNSAPLIIREPFIACGPKECKHFALTHYAAQPGGYYNGTRGDRNKLRHLISVKLGKIPTVENSIFHMAAWSGSACHDGKEWTYIGVDGPDSNALLKIKYGEAYTDTYHSYANNILRTQESACNCIGGNCYLMITDGSASGISECRFLKIREGRIIKEIFPTGRVKHTEECTCGFASNKTIECACRDNSYTAKRPFVKLNVETDTAEIRLMCTETYLDTPRPDDGSITGPCESNGDKGSGGIKGGFVHQRMASKIGRWYSRTMSKTKRMGMGLYVKYDGDPWADSDALALSGVMVSMEEPGWYSFGFEIKDKKCDVPCIGIEMVHDGGKETWHSAATAIYCLMGSGQLLWDTVTGVDMAL

SEQ ID NO: 28713 - protein, 465 aa, synthetic construct
  REGION 1..465: note = neuraminidase__InfluenzaB__ABN51188
MLPSTIQTLTLFLTSGGVLLSLYVSALLSYLLYSDILLKFSPKIIAPTMLLDCANASNVQAVNHSATKEMTFLLPEPEWTYPRLSCQGSTFQKALLISPHRFGEAKGNSAPLIIREPFIACGPKECKHFALTHYAAQPGGYYNGTREDRNKLRHLISVNLGKIPTVENSIFHMAAWSGSACHDGREWTYIGVDGPDSNALIKIKYGEAYTDTYHSYANNILRTQESACNCIGGDCYLMITDGSASGISKCRFLKIREGRIIKEIFPTGRVEHTEECTCGFASNKTIECACRDNSYTAKRPFVKLNVETDTAEIRLMCTETYLDTPRPDDGSITGPCESNGDKGRGGVKGGFVHQRMASKIGRWYSRTMSKTERMGMELYVKYDGDPWTDSDALAPSGVMVSMEEPGWYSFGFEIKDKKCDVPCIGIEMVHDGGKKTWHSAATAIYCLMGSGQLLWDTVTGVDMAL

SEQ ID NO: 28714 - protein, 465 aa, synthetic construct; identical to SEQ ID NO: 28702
  REGION 1..465: note = neuraminidase__InfluenzaB__ABN51199

SEQ ID NO: 28715 - protein, 466 aa, synthetic construct
  REGION 1..466: note = neuraminidase__InfluenzaB__ABN58665
MLPSTIQTLTLFLTSGGVLLSLYVSALLSYLLYSDILLKFSPTKIIAPTMSLDCANASNVQAVNHSATEEMTFLLPEPEWTYPRLSCQGSTFQKALLISPHRFGEAKGNSAPLIIREPFIACGPKECKHFALTHYAAQPGGYYNGTREDRNKLRHLISVNLGKIPTVENSIFHMAAWSGSACHDGREWTYIGVDGPDSNALIKIKYGEAYTDTYHSYANNILRTQESACNCIGGDCYLMITDGSASGISKCRFLKIREGRIIKEIFPTGRVEHTEECTCGFASNKTIECACRDNSYTAKRPFVKLNVETDTAEIRLMCTETYLDTPRPDDGSITGPCESNGGKGSGGIKGGFVHQRMASKIGRWYSRTMSKTKRMGMELYVKYDGDPWTDSDALAPSGVMVSMEEPGWYSFGFEIKDKKCDVPCIGIEMVHDGGKKTWHSAATAIYCLMGSGQLLWDTVTGVDMAL

SEQ ID NO: 28716 - protein, 466 aa, synthetic construct; identical to SEQ ID NO: 28603
  REGION 1..466: note = neuraminidase__InfluenzaB__ABN59449

SEQ ID NO: 28717 - protein, 465 aa, synthetic construct; identical to SEQ ID NO: 28681
  REGION 1..465: note = neuraminidase__InfluenzaB__ABR15999

SEQ ID NO: 28718 - protein, 466 aa, synthetic construct; identical to SEQ ID NO: 28710
  REGION 1..466: note = neuraminidase__InfluenzaB__ABR16010

SEQ ID NO: 28719 - protein, 466 aa, synthetic construct
  REGION 1..466: note = neuraminidase__InfluenzaB__ABR16021
MLPSTIQTLTLFLTSGGVLLSLYVSASLSYLLYSDILLKFSPTEITAPTMPLDCANASNVQAVNRSATKGVTLLLPEPEWTYPRLSCPGSTFQKALLISPHRFGETKGNSAPLIIREPFIACGPNECKHFALTHYAAQPGGYYNGTRGDRNKLRHLISVKLGKIPTVENSIFHMAAWSGSACHDGKEWTYIGVDGPDNNALLKIKYGEAYTDTYHSYANKILRTQESACNCIGGNCYLMITDGSASGVSECRFLKIRKGRIIKEIFPTGRVKHTEECTCGFASNKTIECACRDNSYTAKRPFVKLNVETDTAEIRLMCTDTYLDTPRPDDGSITGPCESNGDKGSGGIKGGFVHQRMASKIGRWYSRTMSKTERMGMGLYVKYDGDPWADSDALAFSGVMVSMKEPGWYSFGFEIKDKKCDVPCIGIEMVHDGGKETWHSAATAIYCLMGSGQLLWDTVTGVDMAL

SEQ ID NO: 28720 - protein, 466 aa, synthetic construct; identical to SEQ ID NO: 28635
  REGION 1..466: note = neuraminidase__InfluenzaB__ACA64903

SEQ ID NO: 28721 - protein, 466 aa, synthetic construct
  REGION 1..466: note = neuraminidase__InfluenzaB__ACA64914
MLPSTIQTLTLFLTSGGVLLSLYVSASLSYLLYSDILLKFSQTEITAPIMPLDCANASNVQAVNRSAAKGVTLLLPEPEWTYPRLSCPGSTFQKALLISPHRFGETKGNSAPLIIREPFIACGPTECKHFALTHYAAQPGGYYNGTREDRNKLRHLISVKLGKIPTVENSIFHMAAWSGSACHDGKEWTYVGVDGPDSNALLKIKYGEAYTDTYHSYAKNILRTQESACNCIGGDCYLMITDGPASGISECRFLKIREGRIIKEIFPTGRVKHTEECTCGFASNKTIECACRDNSYTAKRPFVKLNVETDTAEIRLMCTETYLDTPRPNDGSITGPCESDGDKGSGGIKGGFVHQRMASKIGRWYSRTMSKTKRMGMGLYVKYDGDPWTDSEALALSGVMVSMDEPGWYSFGFEIKDKKCDVPCIGIEMVHDGGKTTWHSAATAIYCLMGSGQLLWDTVTGVDMAL

SEQ ID NO: 28722 - protein, 466 aa, synthetic construct; identical to SEQ ID NO: 28635
  REGION 1..466: note = neuraminidase__InfluenzaB__ACA64936

SEQ ID NO: 28723 - protein, 466 aa, synthetic construct
  REGION 1..466: note = neuraminidase__InfluenzaB__ACA64969
MLPSTIQTLTLFLTSGGVLLSLYVSASLSYLLYSDILLKFSPTEITAPTMPLDCANASNVQAVNRSAAKGVTLLLPEPEWTYPRLSCPGSTFQKALLISPHRFGETKGNSAPLIIREPFIACGPNECKHFALTHYAAQPGGYYNGTRGDRNKLRHLISVKLGKIPTVENSIFHMAAWSGSACHDGKEWTYIGVDGPDNNALLKIKYGEAYTDTYHSYANKILRTQESACNCIGGNCYLMITDGSASGVSECRFLKIREGRIIKEIFPTGRVKHTEECTCGFASNKTIECACRDNSYTAKRPFVKLNVETDTAEIRLMCTDTYLDTPRPDDGSITGPCESNGDKGSGGIKGGFVHQRMASKIGRWYSRTMSKTERMGMGLYVKYDGDPWADSDALAFSGVMVSMKEPGWYSFGFEIKDKKCDVPCIGIEMVHDGGKETWHSAATAIYCLMGSGQLLWDTVTGVDMAL

SEQ ID NO: 28724 - protein, 466 aa, synthetic construct
  REGION 1..466: note = neuraminidase__InfluenzaB__ACA64980
MLPSTIQTLTLFLTSGGVLLSLYVSASLSYLLYSDILLKFSPTEITAPTMSLDCANASNVQAVNRSATKGVTLLLPEPEWTYPRLSCPGSTFQKALLISPHRFGETKGNSAPLIIREPFIACGPNECKHFALTHYAAQPGGYYNGTRGDRNKLRHLISVKLGKIPTVENSIFHMAAWSGSACHDGKEWTYIGVDGPDNNALLKIKYGEAYTDTYHSYASKILRTQESACNCIGGNCYLMITDGSASGVSECRFLKIREGRIIKEIFPTGRVKHTEECTCGFASNKTIECACRDNSYTAKRPFVKLNVETDTAEIRLMCTDTYLDTPRPDDGSITGPCESNGDKGSGGIKGGFVHQRMASKIGRWYSRTMSKTERMGMGLYVKYDGDPWADSDALAFSGVMVSMKEPGWYSFGFEIKDKKCDVPCIGIEMVHDGGKETWHSAATAIYCLMGSGQLLWDTVTGVDMAL

SEQ ID NO: 28725 - protein, 466 aa, synthetic construct
  REGION 1..466: note = neuraminidase__InfluenzaB__ACA64991
MLPSTIQTLTLFLTSGGVLLSLYVSASLSYLLYSDILLKFSPTEITAPTMPLDCANASNVHAVNRSATKGVTLLLPEPEWTYPRLSCPGSTFQKALLISPHRFGETKGNSAPLIIREPFIACGPNECKHFALTHYAAQPGGYYNGTRGDRNKLRHLISVKLGKIPTVENSIFHMAAWSGSACHDGKEWTYIGVDGPDNNALLKIKYGEAYTDTYHSYANNILRTQESACNCIGGNCYLMITDGSASGVSECRFLKIREGRIIKEIFPTGRVKHTEECTCGFASNKTIECACRDNSYTAKRPFVKLNVETDTAEIRLMCTDTYLDTPRPDDGSITGPCESNGDKGSGGIKGGFVHQRMASKIGRWYSRTMSKTERMGMGLYVKYDGDPWADSDALAFGGVMVSMKEPGWYSFGFEIKDKKCDVPCIGIEMVHDGGKETWHSAATAIYCLMGSGQLLWDTVTGVDMAL

SEQ ID NO: 28726 - protein, 466 aa, synthetic construct; identical to SEQ ID NO: 28635
  REGION 1..466: note = neuraminidase__InfluenzaB__ACA65013

SEQ ID NO: 28727 - protein, 466 aa, synthetic construct; identical to SEQ ID NO: 28635
  REGION 1..466: note = neuraminidase__InfluenzaB__ACA65024

SEQ ID NO: 28728 - protein, 466 aa, synthetic construct
  REGION 1..466: note = neuraminidase__InfluenzaB__ACA65035
MLPSTIQTLTLFLTSGGVLLSLYVSASLSYLLYSDILLKFSPTEITAPTMPLDCANASNVQAVNRSATKGVTLLLPEPEWTYPRLSCPGSTFQKALLISPHRFGETKGNSAPLIIREPFIACGPNECKHFALTHYAAQPGGYYNGTRGDRNKLRHLISVKLGKIPTVENSIFHMAAWSGSACHDGKEWTYIGVDGPDNNALLKIKYGEAYTDTYHSYASKILRTQESACNCIGGNCYLMITDGSASGVSECRFLKIREGRIIKEIFPTGRVKHTEECTCGFASNKTIECACRDNSYTAKRPFVKLNVETDTAEIRLMCTDTYLDTPRPDDGSITGPCESNGDKGSGGIKGGFVHQRMASKIGRWYSRTMSKTERMGMGLYVKYDGDPWADSDALAFSGVMVSMKEPGWYSFGFEIKDKKCDVPCIGIEMVHDGGKETWHSAATAIYCLMGSGQLLWDTVTGVDMAL

SEQ ID NO: 28729 - protein, 466 aa, synthetic construct; identical to SEQ ID NO: 28635
  REGION 1..466: note = neuraminidase__InfluenzaB__ACA65046

SEQ ID NO: 28730 - protein, 466 aa, synthetic construct
  REGION 1..466: note = neuraminidase__InfluenzaB__ACA65057
MLPSTIQTLTLFLTSGGVLLSLYVSASLSYLLYSDILLKFSPTEITAPTMPLDCANASNVQAVNRSATKGVTLLLPEPEWTYPRLSCPGSTFQKALLISPHRFGETKGNSAPLIIREPFIACGPNECKHFALTHYAAQPGGYYNGTRGDRNKLRHLISVKLGKIPTVENSIFHMAAWSGSACHDGKEWTYIGVDGPDNNALLKIKYGEAYTDTYHSYANKILRTQESACNCIGGNCYLMITDGSASGVSECRFLKIREGRIIKEIFPTGRVKHTEECTCGFASNKTIECACRDNSYTAKRPFVKLNVEADTAEIRLMCTDTYLDTPRPDDGSITGPCEFNGDKGSGGIKGGFVHQRMASKIGRWYSRTMSKTERMGMGLYVKYDGDPWADSDALAFSGVMVSMKEPGWYSFGFEIKDKKCDVPCIGIEMVHDGGKETWHSAATAIYCLMGSGQLLWDTVTGVDMAL

SEQ ID NO: 28731 - protein, 466 aa, synthetic construct; identical to SEQ ID NO: 28635
  REGION 1..466: note = neuraminidase__InfluenzaB__ACA65068

SEQ ID NO: 28732 - protein, 466 aa, synthetic construct; identical to SEQ ID NO: 28635
  REGION 1..466: note = neuraminidase__InfluenzaB__ACA65079

SEQ ID NO: 28733 - protein, 466 aa, synthetic construct; identical to SEQ ID NO: 28635
  REGION 1..466: note = neuraminidase__InfluenzaB__ACA65090

SEQ ID NO: 28734 - protein, 466 aa, synthetic construct; identical to SEQ ID NO: 28635
  REGION 1..466: note = neuraminidase__InfluenzaB__ACA65101

SEQ ID NO: 28735 - protein, 466 aa, synthetic construct
  REGION 1..466: note = neuraminidase__InfluenzaB__ACA96567
MLPSTIQTLTLFLTSGGVLLSLYVSASLSYLLYSDILLKFSPTEITAPTMPLDCANASNVHAVNRSATKGVTLLLPEPEWAYPRLSCPGSTFQKALLISPHRFGETKGNSAPLIIREPFIACGPNECKHFALTHYAAQPGGYYNGTRGDRNKLRHLISVKLGKIPTVENSIFHMAAWSGSACHDGKEWTYIGVDGPDNNALLKIKYGEAYTDTYHSYANNILRTQESACNCIGGNCYLMITDGSASGVSECRFLKIREGRIIKEIFPTGRVKHTEECTCGFASNKTIECACRDNSYTAKRPFVKLNVETDTAEIRLMCTDTYLDTPRPDDGSITGPCESNGDKGSGGIKGGFVHQRMASKIGRWYSRTMSKTERMGMGLYVKYDGDPWADSDALAFSGIMVSMKEPGWYSFGFEIKDKKCDVPCIGIEMVHDGGKETWHSAATAIYCLMGSGQLLWDTVTGVDMAL

SEQ ID NO: 28736 - protein, 466 aa, synthetic construct; identical to SEQ ID NO: 28635
  REGION 1..466: note = neuraminidase__InfluenzaB__ACA96578

SEQ ID NO: 28737 - protein, 466 aa, synthetic construct; identical to SEQ ID NO: 28723
  REGION 1..466: note = neuraminidase__InfluenzaB__ACA96589

SEQ ID NO: 28738 - protein, 466 aa, synthetic construct; identical to SEQ ID NO: 28635
  REGION 1..466: note = neuraminidase__InfluenzaB__ACA96600

SEQ ID NO: 28739 - protein, 466 aa, synthetic construct
  REGION 1..466: note = neuraminidase__InfluenzaB__ACA96611
MLPSTIQTLTLFLTSGGVLLSLYVSASLSYLLYSDILLKFSPTEITAPTMPLDYANASNVHAVNHSATKGVTLLLPEPEWTYPRLSCPGSTFQKALLISPHRFGETKGNSAPLIIREPFIACGPNECKHFALTHYAAQPGGYYNGTRGDRNKLRHLISVKLGKIPTVENSIFHMAAWSGSACHDGKEWTYIGVDGPDNNALLKIKYGEAYTDTYHSYANNILRTQESACNCIGGNCYLMITDGSASGVSECRFLKIREGRIIKEIFPTGRVKHTEECTCGFASNKTIECACRDNSYTAKRPFVKLNVETDTAEIRLMCTDTYLDTPRPDDGSITGPCESNGDKGSGGIKGGFVHQRMASKIGRWYSRTMSKTERMGMGLYVKYDGDPWADSDALAFSGVMVSMKEPGWYSFGFEIKDKKCDVPCIGIEMVHDGGKETWHSAATAIYCLMGSGRLLWDTVTGVDMAL

SEQ ID NO: 28740 - protein, 466 aa, synthetic construct
  REGION 1..466: note = neuraminidase__InfluenzaB__ACA96622
MLPSTIQTLTLFLTSGGVLLSLYVSASLSYLLYSDILLKFSPTEITAPTMPLDCANASNVHAVNRSATKGVTLLLPEPEWTYPRLSCPGSTFQKALLISPHRFGETKGNSAPLIIREPFIACGPNECKHFALTHYAAQPGGYYNGTRGDRNKLRHLISVKLGKIPTVENSIFHMAAWSGSACHDGKEWTYIGVDGPDNNALLKIKYGEAYTDTYHSYANNILRTQESACNCIGGNCYLMITDGSASGVSECRFLKIREGRIIKEIFPTGRVKHTEECTCGFASNKTIECACRDNSYTAKRPFVKLNVETDTAEIRLMCTDTYLDTPRPDDGSIIGPCESNGDKGSGGIKGGFVHQRMASKIGRWYSRTMSKTERMGMGLYVKYDGDPWADSDALAFSGVMVSMKEPGWYSFGFEIKDKKCDVPCIGIEMVHDGGKETWHSAATAIYCLMGSGQLLWDTVTGVDMAL

SEQ ID NO: 28741 - protein, 466 aa, synthetic construct; identical to SEQ ID NO: 28723
  REGION 1..466: note = neuraminidase__InfluenzaB__ACA96633

SEQ ID NO: 28742 - protein, 466 aa, synthetic construct
  REGION 1..466: note = neuraminidase__InfluenzaB__ACA96644
MLPSTIQTLTLFLTSGGVLLSLYVSASLSYLLYSDILLKFSPTEITAPTMPLDCANASNVQAVNRSATKGVTLLLPEPEWTYPRLSCPGSTFQKALLISPHRFGETKGNSAPLIIREPFIACGPNECKHFALTHYAAQPGGYYNGTRGDRNKLRHLISIKLGKIPTVENSIFHMAAWSGSACHDGKEWTYIGVDGPDNNALLKIKYGEAYTDTYHSYANKILRTQESACNCIGGNCYLMITDGSASGVSECRFLKIREGRIIKEIFPTGRVKHTEECTCGFASNKTIECACRDNSYTAKRPFVKLNVETDTAEIRLMCTDTYLDTPRPDDGSITGPCESNGDKGSGGIKGGFVHQRMASKIGRWYSRTMSKTERMGMGLYVKYDGDPWADSDALAFSGVMISMKEPGWYSFGFEIKDKKCDVPCIGIEMVHDGGKETWHSAATAIYCLMGSGQLLWDTVTGVDMAL

SEQ ID NO: 28743 - protein, 466 aa, synthetic construct
  REGION 1..466: note = neuraminidase__InfluenzaB__ACA96655
MLPSTIQTLTLFLTSGGVLLSLYVSASLSYLLYSDILLKFSQTEITAPIMPLDCANASNVQAVNRSATKGVTLLLPEPEWTYPRLSCPGSTFQKALLISPHRFGETKGNSAPLIIREPFIACGPKECKHFALTHYAAQPGGYYNGTREDRNKLRHLISVKLGKIPTVENSIFHMAAWSGSACHDGREWTYIGVDGPDSNALLKIKYGEAYTDTYHSYAKNILRTQESACNCIGGDCYLMITDGPASGISECRFLKIREGRIIKEIFPTGRVKHTEECTCGFASNKTIECACRDNSYTAKRPFVKLNVETDTAEIRLMCTETYLDTPRPNDGSITGPCESNGDKGSGGIKGGFVHQRMASKIGRWYSRTMSKTKRMGMGLYVKYDGDPWTDSEALALSGVMVSMEEPGWYSFGFEIKDKKCDVPCIGIEMVHDGGKTTWHSAATAIYCLMGSGQLLWDTVTGVDMAL

SEQ ID NO: 28744 - protein, 466 aa, synthetic construct
  REGION 1..466: note = neuraminidase__InfluenzaB__ACA96666
MLPSTIQTLTLFLTSGGVLLSLYVSASLSYLLYSDILLKFSPTEITAPTMPLDCANASNVQAVNRSATKGVTLLLPEPEWTYPRLSCPGSTFQKALLISPHRFGETKGNSAPLIIREPFIACGPNECKHFALTHYAAQPGGYYNGTREDRNKLRHLISVKLGKIPTVENSIFHMAAWSGSACHDGKEWTYIGVDGPDNNALLKIKYGEAYTDTYHSYANKILRTQESACNCIGGNCYLMITDGSASGVSECRFLKIREGRIIKEIFPTGRVKHTEECTCGFASNKTIECACRDNSYTAKRPFVKLNVETDTAEIRLMCTDTYLDTPRPDDGSITGPCESNGDRGSGGIKGGFVHQRMASKIGRWYSRTMSKTERMGMGLYVKYDGDPWADSDALAFSGVMVSMKEPGWYSFGFEIKDKKCDVPCIGIEMVHDDGKETWHSAATAIYCLMGSGQLLWDTVTGVDMAL

SEQ ID NO: 28745 - protein, 466 aa, synthetic construct
  REGION 1..466: note = neuraminidase__InfluenzaB__ACD56581
MLPSTIQTLTLFLTSGGVLLSLYVSASLSYLLYSDILLKFSTTEITAPTMPLDCANASNVQAVNRSATKGVTLLLPEPEWTYPRLSCPGSTFQKALLISPHRFGETKGNSAPLIIREPFIACGPKECKHFALTHYAAQPGGYYNGTREDRNKLRHLISVKLGKIPTVENSIFHMAAWSGSACHDGKEWTYIGVDGPDSNALLKIKYGEAYTDTYHSYANNILRTQESACNCIGGNCYLMITDGSASGISECRFLKIREGRIIKEIFPTGRVKHTEECTCGFASNKTIECACRDNSYTAKRPFVKLNVETDTAEIRLMCTETYLDTPRPDDGSITGPCESNGNKGSGGIKGGFVHQRMASKIGRWYSRTMSKTKRMGMGLYVKYDGDPWTDSDALALSGVMVSMEEPGWYSFGFEIKDKKCDVPCIGIEMVHDGGKETWHSAATAIYCLMGSGQLLWDTVTGVDMAL

SEQ ID NO: 28746 - protein, 466 aa, synthetic construct
  REGION 1..466: note = neuraminidase__InfluenzaB__ACF33793
MLPSTIQTLTLFLTSGGVLLSLYVSASLSYLLYSDILLKFSPTEITAPTMPLDCANASNVQAVNRSATKGVTLLLPEPEWTYPRLSCPGSTFQKALLISPHRFGETKGNSAPLIIREPFIACGPNECKHFALTHYAAQPGGYYNGTRGDRNKLRHLISVKLGKIPTVENSIFHMAAWSGSACHDGKEWTYIGVDGPDNNALLKIKYGEAYTDTYHSYANNILRTQESACNCIGGNCYLMITDGSASGVSECRFLKIREGRIIKEIFPTGRVKHTEECTCGFASNKTIECACRDNSYTAKRPFVKLNVETDTAEIRLMCTDTYLDIPRPDDGSITGPCESNGDKGSGGIKGGFVHQRMASKIGRWYSRTMSKTERMGMGLYVKYDGDPWADSDALAFSGVMVSMKEPGWYSFGFEIKDKKCDVPCIGIEMVHDGGKETWHSAATAIYCLMGSGQLLWDTVTGVDMAL

SEQ ID NO: 28747 - protein, 466 aa, synthetic construct
  REGION 1..466: note = neuraminidase__InfluenzaB__ACF33795
MLPSTIQTLTLFLTSGGVLLSLYVSASLSYLLYSDILLKFPSTEITAPTMPLDCANASNVQAVNRSATKGVTLLLPEPEWTYPRLSCPGSTFQKALLISPHRFGETKGNSAPLIIREPFIACGPKECKHFALTHYAAQPGGYYNGTRGDRNKLRHLISVKLGKIPTVENSIFHMAAWSGSACHDGKEWTYIGVDGPDNNALLKIKYGEAYTDTYHSYANNILRTQESACNCIGGNCYLMITDGSASGVSECRFLKIREGRIIKEIFPTGRIKHTEECTCGFASNKTIECACRDNSYTAKRPFVKLNVETDTAEIRLMCTETYLDTPRPDDGSITGPCESNGDKGSGGIKGGFVHQRMASKIGRWYSRTMSKTEKMGMGLYVKYDGEPWADSDALTFSGVMVSMEEPGWYSFGFEIKDKKCDVPCIGIEMVHDGGKETWHSAATAIYCLMGSGQLLWDTVTGVNMAL

SEQ ID NO: 28748 - protein, 466 aa, synthetic construct
  REGION 1..466: note = neuraminidase__InfluenzaB__ACF33797
MLPSTIQTLTLFLTSGGVLLSLYVSASLSYLLYSDILLKFSPTEITAPTMPLDCANASNVQAVNRSATKGVTLLLPEPEWTYPRLSCPGSTFQKALLISPHRFGETKGNSAPLIIREPFIACGPNECKHFALTHYAAQPGGYYNGTRGDRNKLRHLISVKLGKIPTVENSIFHMAAWSGSACHDGKEWTYIGVDGPDNNALLKIKYGEAYTDTYHSYANNTLRTQESACNCIGGNCYLMITDGSASGVSECRFLKIREGRIIKEIFPTGRVKHTEECTCGFASNKTIECACRDNSYTAKRPFVKLNVETDTAEIRLMCTETYLDTPRPDDGSITGPCESNGDKGSGGIKGGFVHQRMASKIGRWYSRTMSKTERMGMGLYVKYDGDPWADSDALALIGVMVSMEEPGWYSFGFEIKDKKCDVPCIGIEMVHDGGKETWHSAATAIYCLMGSGQLLWDTVTGVNMAL

SEQ ID NO: 28749 - protein, 466 aa, synthetic construct; identical to SEQ ID NO: 28728
  REGION 1..466: note = neuraminidase__InfluenzaB__ACF41662

SEQ ID NO: 28750 - protein, 466 aa, synthetic construct
  REGION 1..466: note = neuraminidase__InfluenzaB__ACF54140
MLPSTIQTLTLFLTSGGVLLSLYVSASLSYLLYSDILLKFSPTEITAPTMPLDCANASNVQAVNRSATKGVTLLLPEPEWTYPRLSCPGSTFQKALLISPHRFGETKGNSAPLIIREPFIACGPNECKHFALTHYAAQPGGYYNGTKGDRNKLRHLISVKLGKIPTVENSIFHMAAWSGSACHDGKEWTYIGVDGPDNNALLKIKYGEAYTDTYHSYANKILRTQESACNCIGGNCYLMITDGSASGVSECRFLKIREGRIIKEIFPTGRVKHTEECTCGFASNKTIECACRDNSYTAKRPFVKLNVETDTAEIRLMCTDTYLDTPRPDDGSITGPCESNGDRGSGGIKGGFVHQRMASKIGRWYSRTMSKTERMGMGLYVKYDGDPWADSDALAFSGVMVSMKEPGWYSFGFEIKDKKCDVPCIGIEMVHDGGKETWHSAATAIYCLMGSGQLLWDTVTGVDMAL

SEQ ID NO: 28751 - protein, 466 aa, synthetic construct
  REGION 1..466: note = neuraminidase__InfluenzaB__ACF54151
MLPSTIQTLTLFLTSGGVLLSLYVSASLSYLLYSDILLKFPSTEITAPTMPLDCANASNVQAVNRSATKGVTLLLPEPEWTYPRLSCPGSTFQKALLISPHRFGETKGNSAPLIIREPFIACGPKECKHFALTHYAAQPGGYYNGTRGNRNKLRHLISVKLGKIPTVENSIFHMAAWSGSACHDGKEWTYIGVDGPDNNALLKIKYGEAYTDTYHSYANNILRTQESACNCIGGNCYLMITDGSASGVSECRFLKIREGRIIKEIFPTGRIKHTEECTCGFASNKTIECACRDNSYTAKRPFVKLNVETDTAEIRLMCTETYLDTPRPDDGSITGPCESNGDKGSGGIKGGFVHQRMASKIGRWYSRTMSKTKRMGMGLYVKYDGDPWADSDALAFSGVMVSMEEPGWYSFGFEIKDKKCDVPCIGIEMVHDGGKETWHSAATAIYCLMGSGQLLWDTVTGVNMAL

SEQ ID NO: 28752 - protein, 466 aa, synthetic construct
  REGION 1..466: note = neuraminidase__InfluenzaB__ACF54162
MLPSTIQTLTLFLTSGGVLLSLYVSASLSYLLYSDILLKFSQTEITAPIMPLDCANASNVQAVNRSATKGVTLLLPEPEWTYPRLSCPGSTFQKALLISPHRFGETKGNSAPLIIREPFIACGPKECKHFALTHYAAQPGGYYNGTREDRNKLRHLISVKLGKIPTVENSIFHMAAWSGSACHDGKEWTYIGVDGPDSNALLKIKYGEAYTDTYHSYAKNILRTQESACNCIGGDCYLMITDGPASGISECRFLKIREGRIIKEIFPTGRVKHTEECTCGFASNKTIECACRDNNYTAKRPFVKLNVETDTAEIRLMCTETYLDTPRPNDGSITGPCESDGDKGSGGIKGGFVHQRMASKIGRWYSRTMSKTKRMGMELYVKYDGDPWTDSEALALSGVMVSMEEPGWYSFGFEIKDKKCDVPCIGIEMVHDGGKTTWHSAATAIYCLMGSGQLLWDTVTGVDMAL

SEQ ID NO: 28753 - protein, 466 aa, synthetic construct
  REGION 1..466: note = neuraminidase__InfluenzaB__ACF54184
MLPSTIQTLTLFLTSGGVLLSLYVSASLSYLLYSDILLKFSTTEITAPTMPLDCANASNVQAVNRSATKGVTLLLPEPEWTYPRLSCPGSTFQKALLISPHRFGETKGNSAPLIIREPFIACGPKECKHFALTHYAAQPGGYYNGTKEDRNKLRHLISVKLGKIPTVENSIFHMAAWSGSACHDGKEWTYIGVDGPDSNALLKIKYGEAYTDTYHSYANNILRTQESACNCIGGNCYLMITDGSASGISECRFLKIREGRIIKEIFPTGRVKHTEECTCGFASNKTIECACRDNSYTAKRPFVKLNVETDTAEIRLMCTETYLDTPRPDDGSITGPCESNGNKGSGGIKGGFVHQRMASKIGRWYSRTMSKTKRMGMGLYVKYDGDPWTDSDALALSGVMVSMEEPGWYSFGFEIKDKKCDVPCIGIEMVHDGGKETWHSAATAIYCLMGSGQLLWDTVTGVDMAL

SEQ ID NO: 28754 - protein, 466 aa, synthetic construct
  REGION 1..466: note = neuraminidase__InfluenzaB__ACF54206
MLPSTIQTLTLFLTSGGVLLSLYVSASLSYLLYSDILLKFSTTETTAPTMPLDCANASNVQAVNRSATKGVTLLLPEPEWTYPRLSCPGSTFQKALLISPHRFGETKGNSAPLIIREPFIACGPKECKHFALTHYAAQPGGYYNGTREDRNKLRHLISVKLGKIPTVENSIFHMAAWSGSACHDGKEWTYIGVDGPDSNALLKIKYGEAYTDTYHSYANNILRTQESACNCIGGNCYLMITDGSASGISECRFLKIREGRIIKEIFPTGRVKHTEECTCGFASNKTIECACRDNSYTAKRPFVKLNVETDTAEIRLMCTETYLDTPRPDDGSITGPCESNGNKGSGGIKGGFVHQRMASKIGRWYSRTMSKTKRMGMGLYVKYDGDPWTDSDALALSGVMVSMEEPGWYSFGFEIKDKKCDVPCIGIEMVHDGGKETWHSAATAIYCLMGSGQLLWDTVTGVDMAL

SEQ ID NO: 28755 - protein, 466 aa, synthetic construct
  REGION 1..466: note = neuraminidase__InfluenzaB__ACF54217
MLPSTIQTLTLFLTSGGVLLSLYVSASLSYLLYSDILLKFSQTEITAPIMPLDCANASNVQAVNHSATKGVTLLLPEPEWTYPRLSCPGSTFQKALLISPHRFGETKGNSAPLIIREPFIACGPKECKHFALTHYAAQPGGYYNGTREDRNKLRHLISVKLGKIPTVENSIFHMAAWSGSACHDGREWTYIGVDGPDSNALLKIKYGEAYTDTYHSYAKNILRTQESACNCIGGDCYLMITDGPASGISECRFLKIREGRIIKEIFPTGRVKHTEECTCGFASNKTIECACRDNSYTAKRPFVKLNVETDTAEIRLMCTETYLDTPRPNDGSITGPCESNGDKGSGGIKGGFVHQRMASKIGRWYSRTMSKTKRMGMGLYVKYDGDPWTDSEALALSGVMVSMEEPGWYSFGFEIKDKKCDVPCIGIEMVHDGGKTTWHSAATAIYCLMGSGQLLWDTVTGVDMAL

SEQ ID NO: 28756 - protein, 466 aa, synthetic construct; identical to SEQ ID NO: 28647
  REGION 1..466: note = neuraminidase__InfluenzaB__ACF54228

SEQ ID NO: 28757 - protein, 466 aa, synthetic construct; identical to SEQ ID NO: 28668
  REGION 1..466: note = neuraminidase__InfluenzaB__ACF54239

SEQ ID NO: 28758 - protein, 466 aa, synthetic construct
  REGION 1..466: note = neuraminidase__InfluenzaB__ACF54261
MLPSTIQTLTLFLTSGGVLLSLYVSASLSYLLYSDILLKFSPTEITAPTMPLDCANASNVQAVNRSATKGVTLLLPEPEWTYPRLSCPGSTFQKALLISPHRFGETKGNSAPLIIREPFIACGPKECKHFALTHYAAQPGGYYNGTREDRNKLRHLVSVKLGKIPTVENSIFHMAAWSGSACHDGKEWTYIGVDGPDSNALLKIKYGEAYTDTYHSYANNILRTQESACNCIGGNCYLMITDGSASGISECRFLKIREGRIIKEIFPTGRVKHTEECTCGFASNKTIECACRDNSYTAKRPFVKLNVETDTAEIRLMCTETYLDTPRPDDGSITGPCESNGDKGSGGIKGGFVHQRMASKIGRWYSRTMSKTKRMGMGLYVKYDGDPWTDSDALALSGVMVSMEEPGWYSFGFEIKDKKCDVPCIGIEMVHDGGKETWHSAATAIYCLMGSGQLLWDTVTGVDMAL

SEQ ID NO: 28759 - protein, 466 aa, synthetic construct
  REGION 1..466: note = neuraminidase__InfluenzaB__ACF54272
MLPSTIQTLTLFLTSGGVLLSLYVSASLSYLLYSDILLKFSTTEITAPTMPLDCANASNVQAVNRSATKGVTLLLPEPEWTYPRLSCPGSTFQKALLISPHRFGETKGNSAPLIIREPFIACGPKECKHFALTHYAAQPGGYYNGTREDRNKLRHLISVKLGKIPTVENSIFHMAAWSGSACHDGKEWTYIGVDGPDSNALLKIKYGEAYTDTYHSYANNILRTQESACNCIGGNCYLMITDGSASGISECRFLKIREGRIIKEIFPTGRVKHTEECTCGFASNKTIECACRDNSYTAKRPFVKLNVETDTAEIRLMCTETYLDTPRPDDGSITGPCESNGDKGSGGIKGGFVHQRMASKIGRWYSRTMSKTKRMGMGLYVKYDGDPWTDSDALALSGVMVSMEEPGWYSFGFEIKDKKCDVPCIGIEMVHDGGKETWHSAATAIYCLMGSGQLLWDTVTGVDMAL

SEQ ID NO: 28760 - protein, 466 aa, synthetic construct
  REGION 1..466: note = neuraminidase__InfluenzaB__ACF54283
MLPSTIQTLTLFLTSGGVLLSLYVSASLSYLLYSDILLKFSTTEITAPTMPLDCANASNVQAVNRSATKGVTLLLPEPEWTYPRLSCPGSTFQKALLISPHRFGETKGNSAPLIIREPFIACGPKECKHFALTHYAAQPGGYYNGTREDRNKLRHLVSVKLGKIPTVENSIFHMAAWSGSACHDGKEWTYIGVDGPDSNALLKIKYGEAYTDTYHSYANNILRTQESACNCIGGNCYLMITDGSASGISECRFLKIREGRIIKEIFPTGRVKHTEECTCGFASNKTIECACRDNSYTAKRPFVKLNVETDTAEIRLMCTETYLDTPRPDDGSITGPCESNGDKGSGGIKGGFVHQRMASKIGRWYSRTMSKTKRMGMGLYVKYDGDPWTDSDALALSGVMVSMEEPGWYSFGFEIKDKKCDVPCIGIEMVHDGGKETWHSAATAIYCLMGSGQLLWDTVTGVDMAL

SEQ ID NO: 28761 - protein, 466 aa, synthetic construct
  REGION 1..466: note = neuraminidase__InfluenzaB__ACF54294
MLPSTIQTLTLFLTSGGVLLSLYVSASLSYLLYSDILLKFSTTEITAPTIPLDCANASNVQAVNRSATKGVTFLLPEPEWTYPRLSCPGSTFQKALLISPHRFGETKGNSAPLIIREPFIACGPKECKHFALTHYAAQPGGYYNGTREDRNKLRHLISVKLGKIPTVENSIFHMAAWSGSACHDGKEWTYIGVDGPDSNALLKIKYGEAYTDTYHSYANNILRTQESACNCIGGNCYLMITDGSASGISECRFLKIREGRIIKEIFPTGRVKHTEECTCGFASNKTIECACRDNSYTAKRPFVKLNVETDTAEIRLMCTETYLDTPRPDDGSITGPCESNGNKGSGGIKGGFVHQRMASKIGRWYSRTMSKTKRMGMGLYVKYDGDPWTDSDALALSGVMVSMEEPGWYSFGFEIKDKKCDVPCIGIEMVHDGGKETWHSAATAIYCLMGSGQLLWDTVTGVDMAL

SEQ ID NO: 28762 - protein, 466 aa, synthetic construct
  REGION 1..466: note = neuraminidase__InfluenzaB__ACF54305
MLPSTIQTLTLFLTSGGVLLSLYVSASLSYLLYSDILLKFSTTEITAPTMPLDCANASNVQAVNRSATKGVTFLLPEPEWTYPRLSCPGSTFQKALLISPHRFGETKGNSAPLIIREPFIACGPKECKHFALTHYAAQPGGYYNGTREDRNKLRHLISVELGKIPTVENSIFHMAAWSGSACHDGKEWTYIGVDGPDSNALLKIKYGEAYTDTYHSYANNILRTQESACNCIGGNCYLMITDGSASGISECRFLKIREGRIIKEIFPTGRVKHTEECTCGFASNKTIECACRDNSYTAKRPFVKLNVETDTAEIRLMCTETYLDTPRPDDGSITGPCESNGNKGSGGIKGGFVHQRMASKIGRWYSRTMSKTKRMGMGLYVKYDGDPWTDSDALALSGVMVSMEEPGWYSFGFEIKDKKCDVPCIGIEMVHDGGKETWHSAATAIYCLMGSGQLLWDTVTGVDMAL

SEQ ID NO: 28763 - protein, 466 aa, synthetic construct
  REGION 1..466: note = neuraminidase__InfluenzaB__ACF54316
MLPSTIQTLTLFLTSGGVLLSLYVSASLSYLLYSDILLKFSPTEITAPTMPLDCANASNVQAVNRSATKGVTLLLPEPEWTYPRLSCPGSTFQKALLISPHRFGETKGNSAPLIIREPFIACGPNECKHFALTHYAAQPGGYYNGTRGDRNKLRHLISVKLGKIPTVENSIFHMAAWSGSACHDGKEWTYIGVDGPDNNALLKIKYGEAYTDTYHSYANNILRTQESACNCIGGNCYLMITDGSASGVSECRFLKIREGRIIKEIFPTGRVKHTEECTCGFASNKTIECACRDNSYTAKRPFVKLNVETDTAEIRLMCTETYLDTPRPDDGSITGPCESNGDKGSGGIKGGFVHQRMASKIGRWYSRTMSKTERMGMGLYVKYDGDPWADSDALALIGVMVSMEEPGWYSFGFEIKDKNCDVPCIGIEMVHDGGKETWHSAATAIYCLMGSGQLLWDTVTGVNMAL

SEQ ID NO: 28764 - protein, 467 aa, synthetic construct
  REGION 1..467: note = neuraminidase__InfluenzaB__ACF54338
MLPSTIQTLTLFLTSGGVLLSLYVSASLSYLLYSDILLKFPSTEITAPTMPLDCANASNVQAVNRSATKGVTLLLLPEPEWTYPRLSCPGSTFQKALLISPHRFGETKGNSAPLIIREPFIACGPKECKHFALTHYAAQPGGYYNGTRGDRNKLRHLISVKLGKIPTVENSIFHMAAWSGSACHDGKEWTYIGVDGPDNNALLKIKYGEAYTDTYHSYANNILRTQESACNCIGGNCYLMITDGSASGVSECRFLKIREGRIIKEIFPTGRIKHTEECTCGFASNKTIECACRDNSYTAKRPFVKLNVETDTAEIRLMCTETYLDTPRPDDGSITGPCESNGGKGSGGIKGGFVHQRMASKIGRWYSRTMSKTERKGMGLYVKYDGDPWADSDALVFSGVMVSMEEPGWYSFGFEIKDKKCDVPCIGIEMVHDGGKETWHSAATAIYCLMGSGQLLWDTVTGVNMAL

SEQ ID NO: 28765 - protein, 466 aa, synthetic construct
  REGION 1..466: note = neuraminidase__InfluenzaB__ACF54349
MLPSTIQTLTLFLTSGGVLLSLYVSASLSYLLYSDILLKFSQTEITAPIMPLDCANASNVQAVNRSAAKGVTLLLPEPEWTYPRLSCPGSTFQKALLINPHRFGETKGNSAPLIIREPFIACGPTECKHFALTHYAAQPGGYYNGTREDRNKLRHLISVKLGKIPTVENSIFHMAAWSGSACHDGKEWTYIGVDGPDSNALLKIKYGEAYTDTYHSYAKNILRTQESACNCIGGDCYLMITDGSASGISECRFLKIREGRIIKEIFPTGRVKHTEECTCGFASNKTIECACRDNSYTAKRPFVKLNVETDTAEIRLMCTETYLDTPRPNDGSITGPCESDGDKGSGGIKGGFVHQRMASKIGRWYSRTMSKTKRMGMGLYVKYDGDPWTDSEALALSGVMVSMEEPGWYSFGFEIKDKKCDVPCIGIEMVHDGGKTTWHSAATAIYCLMGSGQLLWDTVTGVDMAL

SEQ ID NO: 28766 - protein, 466 aa, synthetic construct
  REGION 1..466: note = neuraminidase__InfluenzaB__ACF54371
MLPSTIQTLTLFLTSGGVLLSLYVSASLSYLLYSDILLKFSQTEITAPIMPLDCANASNVQAVNRSAAKGVTLLLPEPEWTYPRLSCPGSTFQKALLISPHRFGETKGNSAPLIIREPFIACGPTECKHFALTHYAAQPGGYYNGTREDRNKLRHLISVKLGKIPTVENSIFHMAAWSGSACHDGKEWTYIGVDGPDSNALLKIKYGEAYTDTYHSYAKNILRTQESACNCIGGDCYLMITDGPASGISECRFLKIREGRIIKEIFPTGRVKHTEECTCGFASNKTIECACRDNSYTAKRPFVKLNVETDTAEIRLMCTETYLDTPRPNDGSITGPCESDGDKGSGGIKGGFVHQRMASKIGRWYSRTMSKTKRMGMGLYVKYDGDPWTDSEALALSGVMVSMEEPGWYSFGFEIKDKKCDVPCIGIEMVHDGGKTTWHSAATAIYCLTGSGQLLWDTVTGVDMAL

SEQ ID NO: 28767 - protein, 466 aa, synthetic construct
  REGION 1..466: note = neuraminidase__InfluenzaB__ACI22549
MLPSTIQTLTLFLTSGGVLLSLYVSASLSYLLYSDILLKFSPTEITARTMPLDCANASNVQAVNRSATKGVTLLLPEPEWTYPRLSCPGSTFQKALLISPHRFGETKGNSAPLIIREPFIACGPNECKHFALTHYAAQPGGYYNGTRGDRNKLRHLISVKLGKIPTVEDSIFHMAAWSGSACHDGKEWTYIGVDGPDNNALLKIKYGEAYTDTYHSYANNILRTQESACNCIGGNCYLMITDGSASGVSECRFLKIREGRIIKEIFPTGRVKHTEECTCGFASNKTIECACRDNSYTAKRPFVKLNVETDTAEIRLMCTETYLDTPRPDDGSITGPCESNGDKGSGGIKGGFVHQRMASKIGRWYSRTMSKTERMGMGLYVKYDGDPWADSDALALIGVMVSMEEPGWYSFGFEIKDKNCDVPCIGIEMVHDGGKETWHSAATAIYCLMGSGQLLWDTVTGVNMAL

SEQ ID NO: 28768 - protein, 466 aa, synthetic construct
  REGION 1..466: note = neuraminidase__InfluenzaB__ACI22551
MLPSTIQTLTLFLTSGGVLLSLYVSASLSYLLYSDILLKFSPTEITALTMPLDCANASNVQAVNRSATKGVTLLLPEPEWTYPRLSCPGSTFQKALLISPHRFGETKGNSAPLIIREPFIACGPNECKHFALTHYAAQPGGYYNGTRGDRNKLRHLISVKLGKIPTVENSIFHMAAWSGSACHDGKEWTYIGVDGPDNNALLKIKYGEAYTDTYHSYANNILRTQESACNCIGGNCYLMITDGSASGVSECRFLKIREGRIIKEIFPTGRVKHTEECTCGFASNKTIECACRDNSYTAKRPFVKLNVETDTAEIRLMCTETYLDTPRPDDGSITGPCESNGDKGSGGIKGGFVHQRMASKIGRWYSRTMSKTERMGMGLYVKYDGDPWADSDALALIGVMVSMEEPGWYSFGFEIKDKNCDVPCIGIEMVHDGGKETWHSAATAIYCLMGSGQLLWDTVTGVNMAL

SEQ ID NO: 28769 - protein, 466 aa, synthetic construct; identical to SEQ ID NO: 28768
  REGION 1..466: note = neuraminidase__InfluenzaB__ACI22555

SEQ ID NO: 28770 - protein, 466 aa, synthetic construct; identical to SEQ ID NO: 28635
  REGION 1..466: note = neuraminidase__InfluenzaB__ACI22557

SEQ ID NO: 28771 - protein, 466 aa, synthetic construct
  REGION 1..466: note = neuraminidase__InfluenzaB__ACI22559
MLPSTIQTLTLFLTSGGVLLSLYVSASLSYLLYSDILLKFPSTEITAPTMPLDCANASNVQAVNLSATKGVTLLLPEPEWTYPRLSCPGSTFQKALLISPHRFGETKGNSAPLIIREPFIACGPKECKHFALTHYAAQPGGYYNGTRGDRNKLRHLISVKLGKIPTVENSIFHMAAWSGSACHDGKEWTYIGVDGPDNNALLKIKYGEAYTDTYHSYANNILRTQESACNCIGGNCYLMITDGSASGVSECRFLKIREGRIIKEIFPTGRIKHTEECTCGFASNKTIECACRDNSYTAKRPFVKLNVETDTAEIRLMCTETYLDTPRPDDGSITGPCESNGGKGSGGIKGGFVHQRMASKIGRWYSRTMSKTERKGMGLYVKYDGDPWADSDALAFSGVMVSMEEPGWYSFGFEIKDKKCDVPCIGIEMVHDGGKETWHSAATAIYCLMGSGQLLWDTVTGVNMAL

SEQ ID NO: 28772 - protein, 466 aa, synthetic construct
  REGION 1..466: note = neuraminidase__InfluenzaB__ACI22561
MLPSTIQTLTLFLTSGGVLLSLYVSASLSYLLYSDILLKFSPTEITAPTMPLDCANASNVQAVNRSATKGGTLLLPEPEWTYPRLSCPGSTFQKALLISPHRFGETKGNSAPLIIREPFIACGPNECKHFALTHYAAQPGGYYNGTRGDRNKLRHLISVKLGKIPTVENSIFHMAAWSGSACHDGKEWTYIGVDGPDNNALLKIKYGEAYTDTYHSYANKILRTQESACNCIGGNCYLMITDGSASGVSECRFLKIREGRIIKEIFPTGRVKHTEECTCGFASNKTIECACRDNSYTAKRPFVKLNVETDTAEIRLMCTDTYLDTPRPDDGSITGPCESNGDKGSGGIKGGFVHQRMASKIGRWYSRTMSKTERMGMGLYVKYDGDPWADSDALAFSGVMVSMKEPGWYSFGFEIKDKKCDVPCIGIEMVHDGGKETWHSAATAIYCLMGSGQLLWDTVTGVDMAL

SEQ ID NO: 28773 - protein, 466 aa, synthetic construct; identical to SEQ ID NO: 28635
  REGION 1..466: note = neuraminidase__InfluenzaB__ACI22563

SEQ ID NO: 28774 - protein, 466 aa, synthetic construct
  REGION 1..466: note = neuraminidase__InfluenzaB__ACI22565
MLPSTIQTLTLFLTSGGVLLSLYVSASLSYLLYSDILLKFPSTEITAPTMPLDCANASNVQAVNHSATKGVTLLLPEPEWTYPRLSCPGSTFQKALLISPHRFGETKGNSAPLIIREPFIACGPKECKHFALTHYAAQPGGYYNGTRGDRNKLRHLISVKLGKIPTVENSIFHMAAWSGSACHDGKEWTYIGVDGPDNNALLKIKYGEAYTDTYHSYANNILRTQESACNCIGGNCYLMITDGSASGVSECRFLKIREGRIIKEIFPTGRIKHTEECTCGFASNKTIECACRDNSYTAKRPFVKLNVETDTAEIRLMCTETYLDTPRPDDGSITGPCESNGGKGSGGIKGGFVHQRMASKIGRWYSRTMSKIERKGMGLYVKYDGDPWADSDALAFSGVMVSMEEPGWYSFGFEIRDKKCDVPCIGIEMVHDGGKETWHSAATAIYCLMGSGQLLWDTVTGVNMAL

SEQ ID NO: 28775 - protein, 466 aa, synthetic construct; identical to SEQ ID NO: 28635
  REGION 1..466: note = neuraminidase__InfluenzaB__ACI22567

SEQ ID NO: 28776 - protein, 466 aa, synthetic construct; identical to SEQ ID NO: 28635
  REGION 1..466: note = neuraminidase__InfluenzaB__ACI22569

SEQ ID NO: 28777 - protein, 466 aa, synthetic construct
  REGION 1..466: note = neuraminidase__InfluenzaB__ACJ53908
MLHSTIQTLTLFLTSGGVLLSLYVSASLSYLLYSDILLKFSQTEITAPIMPLDCANASSVQAVNRSAAKGVTLLLPEPEWTYPRLSCPGSTFQKALLISPHRFGETKGNSAPLIIREPFIACGPTECKHFALTHYAAQPGGYYNGTREDRNKLRHLISVKLGKIPTVENSIFHMAAWSGSACHDGKEWTYIGVDGPDSNALLKIKYGEAYTDTYHSYAKNILRTQESACNCIGGDCYLMITDGPASGISECRFLKIREGRIIKEIFPTGRVKHTEECTCGFASNKTIECACRDNSYTAKRPFVKLNVETDTAEIRLMCTETYLDTPRPNDGSITGPCESDGDKGSGGIKGGFVHQRMASKIGRWYSRTMSKTKRMGMGLYVKYDGDPWTDSEALALSGVMVSMEEPGWYSFGFEIKDKKCDVPCIGIEMVHDGGKTTWHSAATAIYCLMGSGQLLWDTVTGVDMAL

SEQ ID NO: 28778 - protein, 466 aa, synthetic construct; identical to SEQ ID NO: 28653
  REGION 1..466: note = neuraminidase__InfluenzaB__ACN32560

SEQ ID NO: 28779 - protein, 466 aa, synthetic construct; identical to SEQ ID NO: 28723
  REGION 1..466: note = neuraminidase__InfluenzaB__ACN32582

SEQ ID NO: 28780 - protein, 466 aa, synthetic construct; identical to SEQ ID NO: 28635
  REGION 1..466: note = neuraminidase__InfluenzaB__ACN32593

SEQ ID NO: 28781 - protein, 466 aa, synthetic construct
  REGION 1..466: note = neuraminidase__InfluenzaB__ACN32604
MLPSTIQTLTLFLTSGGVLLSLYVSASLSYLLYSDILLKFSPTEITAPTMPLDCANASNVHAVNRSATKGVTLLLPEPEWTYPRLSCPGSTFQKALLISPHRFGETKGNSAPLIIREPFIACGPNECKHFALTHYAAQPGGYYNGTRGDRNKLRHLISVKLGKIPTVENSIFHMAAWSGSACHDGKEWTYIGVDGPDNNALLKIKYGEAYTDTYHSYANNILRTQESACNCIGGNCYLMITDGSASGVSECRFLKIREGRIIKEIFPTGRVKHTEECTCGFASNKTIECACRDNSYTAKRPFVKLNVETDTAEIRLMCTDTYLDTPRPDDGSITGPCEFNGDKGSGGIKGGFVHQRMASKIGRWYSRTMSKTERMGMGLYVKYDGDPWADSDALAFSGVMVSMKEPGWYSFGFEIKDKKCDVPCIGIEMVHDGGKETWHSAATAIYCLMGSGQLLWDTVTGVDMAL

SEQ ID NO: 28782 - protein, 466 aa, synthetic construct; identical to SEQ ID NO: 28635
  REGION 1..466: note = neuraminidase__InfluenzaB__ACN32615

SEQ ID NO: 28783 - protein, 466 aa, synthetic construct
  REGION 1..466: note = neuraminidase__InfluenzaB__ACN32775
MLPSTIQTLTLFLTSGGVLLSLYVSASLSYLLYSDILLKFSPTEINAPTMPLDCANASNVHAVNRSATKGVTLLLPEPEWTYPRLSCPGSTFQKALLISPHRFGETKGNSAPLIIREPFIACGPNECKHFALTHYAAQPGGYYNGTRGDRNKLRHLISVKLGKIPTVENSIFHMAAWSGSACHDGKEWTYIGVDGPDNNALLKIKYGEAYTDTYHSYANNILRTQESACNCIGGNCYLMITDGSASGISECRFLKIREGRIIKEIFPTGRVKHTEECTCGFASNKSIECACRDNSYTAKRPFVKLNVETDTAEIRLMCTDTYLDTPRPDDGSITGPCESNGDKGSGGIKGGFVHQRMASKIGRWYSRTMSKTERMGMGLYVKYDGDPWADSDALAFSGVMVSMKEPGWYSFGFEIKDKKCDVPCIGIEMVHDGGKETWHSAATAIYCLMGSGQLLWDTVTGVDMAL

SEQ ID NO: 28784 - protein, 466 aa, synthetic construct; identical to SEQ ID NO: 28635
  REGION 1..466: note = neuraminidase__InfluenzaB__ACN32786

SEQ ID NO: 28785 - protein, 466 aa, synthetic construct
  REGION 1..466: note = neuraminidase__InfluenzaB__ACO05928
MLPSTIQTLTLFLTSGGVLLSLYVSASLSYLLYSDILLKFPSTEITAPTMPLDCANASNVQAVNRSATKGVTLLLPEPEWTYPRLSCPGSTFQKALLISPHRFGETKGNSAPLIIREPFIACGPKECKHFALTHYAAQPGGYYNGTRGDRNKLRHLISVKLGKIPTVENSIFHMAAWSGSACHDGKEWTYIGVDGPDNNALLKIKYGEAYTDTYHSYANNILRTQESACNCIGGNCYLMITDGSASGVSECRFLKIREGRIIKEIFPTGRIKHTEECTCGFASNKTIECACRDNSYTAKRPFVKLNVETDTAEIRLMCTETYLDTPRPDDGSITGPCESNGDKGSGGIKGGFVHQRMASKIGRWYSRTMSKTKRMGMGLYVKYDGDPWADSDALAFSGVMVPMEEPGWYSFGFEIKDKKCDVPCIGIEMVHDGGKETWHSAATAIYCLMGSGQLLWDTVTGVNMAL

SEQ ID NO: 28786 - protein, 466 aa, synthetic construct; identical to SEQ ID NO: 28647
  REGION 1..466: note = neuraminidase__InfluenzaB__ACO05950

SEQ ID NO: 28787 - protein, 466 aa, synthetic construct
  REGION 1..466: note = neuraminidase__InfluenzaB__ACO05961
MLPSTIQTLTLFLTSGGVLLSLYVSASLSYLPYSDILLKFPSTEITAPTMPLDCANASNVQAVNRSATKGVTLLLPEPEWTYPRLSCPGSTFQKALLISPHRFGETKGNSAPLIIREPFIACGPKECKHFALTHYAAQPGGYYNGTRGDRNKLRHLISVKLGKIPTVENSIFHMAAWSGSACHDGKEWTYIGVDGPDNNALLKIKYGEAYTDTYHSYANNILRTQESACNCIGGNCYLMITDGSASGVSECRFLKIREGRIIKEIFPTGRIKHTEECTCGFASNKTIECACRDNSYTAKRPFVKLNVETDTAEIRLMCTETYLDTPRPDDGSITGPCESNGDKGSGGIKGGFVHQRMASKIGRWYSRTMSKTKRMGMGLYVKYDGDPWADSDALAFSGVMVSMEEPGWYSFGFEIKDKKCDVPCIGIEMVHDGGKETWHSAATAIYCLMGSGQLLWDTVTGVNMAL

SEQ ID NO: 28788 - protein, 466 aa, synthetic construct
  REGION 1..466: note = neuraminidase__InfluenzaB__ACO05972
MLPSTIQTLTLFLTSGGVLLSLYVSASLSYLLYSDILLKFSQTEITAPIMPLDCANASNVQAVNRSAAKGVTLLLPEPEWTYPRLSCPGSTFQKALLISPHRFGETKGNSAPLIIREPFIACGPTECKHFALTHYAAQPGGYYNGTREDRNKLRHLISVKLGKIPTVENSIFHMAAWSGSACHDGKEWTYIGVDGPDSNALLKIKYGEAYTDTYHSYAKNILRTQESACNCIGGDCYLMITDGPASGISECRFLKIREGRIIKEIFPTGRVKHTEECTCGFASNKTIECACRDNSYTAKRPFVKLNVETDTAEIRLMCTETYLDTPRPNDGSITGPCESDGDKGSGGIKGGFVHQRMASKIGRWYSRTMSKTKRMGMGLYVKYDGDPWTDSEALALSGVMVSMEEPGWYSFGFEIKDKKCDVPCIGIEMVHDGGKTTWHSAATAIYCLMGSGQLLWDTVTGVDMAL

SEQ ID NO: 28789 - protein, 466 aa, synthetic construct; identical to SEQ ID NO: 28788
  REGION 1..466: note = neuraminidase__InfluenzaB__ACO05983

SEQ ID NO: 28790 - protein, 466 aa, synthetic construct; identical to SEQ ID NO: 28788
  REGION 1..466: note = neuraminidase__InfluenzaB__ACO05994

SEQ ID NO: 28791 - protein, 466 aa, synthetic construct
  REGION 1..466: note = neuraminidase__InfluenzaB__ACO06005
MLPSTIQTLTLFLTSGGVLLSLYVSASLSYLLYSDILLKFSPTEITAPTMPLDCANASNVQAVNRSATKGVTLLLPEPEWTYPRLSCPGSTFQKALLISPHRFGETKGNSAPLIIREPFIACGPNECKHFALTHYAAQPGGYYNGTRGDRNKLRHLISVKLGKIPTVENSIFHMAAWSGSACHDGKEWTYIGVDGPDNNALLKIKYGEAYTDTYHSYANKILRTQESACNCIGGNCYLMITDGSASGVSECRFLKIREGRIIKEIFPTGRVKHTEECTCGFASNKTIECACRDNSYTAKRPFVKLNVETDTAEIRLMCTDTYLDTPRPDDGSITGPCESNGDRGSGGIKGGFVHQRMASKIGRWYSRTMSKTERMGMGLYVKYDGDPWADSDALAFSGVMVSMKEPGWYSFGFEIKDKKCDVPCIGIEMVHDGGKETWHSAATAIYCLMGSGQLLWDTVTGVDMAL

SEQ ID NO: 28792 - protein, 466 aa, synthetic construct
  REGION 1..466: note = neuraminidase__InfluenzaB__ACO06027
MLPSTIQTLTLFLTSGGVLLSLYVSASLSYLLYSDILLKFSQTEITAPIMPLDCANASNVQAVNRSAAKGVTLLLPEPEWTYPRLSCPGSTFQKALLISPHRFGETKGNSAPLIIREPFIACGPTECKHFALTHYAAQPGGYYNGTREDRNKLRHLISVKLGKIPTVENSIFHMAAWSGSACHDGKEWTYIGVDGPDSNALLKIKYGEAYTDTYHSYAKNILRTQESACNCIGGDCYLMITDGPASGISECRFLKIREGRIIKEIFPTGRVKHTEECTCGFASNKTIECACRDNSYTAKRPFVKLNVETDTAEIRLMCTETYLDTPRPNDGSITGPCESDGDKGSGGIKGGFVHQRMASKIGRWYSRTMSKTKRMGMGLYVKYDGDPWTDSEALALSGVMVSMEEPGWYSFGFEIKDKKCDVPCIGIEMVHDGGKTTWHSAATAIYCLMGSGQLLWDTVTGVDMTL

SEQ ID NO: 28793 - protein, 466 aa, synthetic construct
  REGION 1..466: note = neuraminidase__InfluenzaB__ACO06066
MLPSTIQTLTLFLTSGGVLLSLYVSASLSYLLYSDILLKFSQTEITAPIMPLDCANASNVQAVNRSVAKGVTLLLPEPEWTYPRLSCPGSTFQKALLISPHRFGETKGNSAPLIIREPFIACGPTECKHFALTHYAAQPGGYYNGTREDRNKLRHLISVKLGKIPTVENSIFHMAAWSGSACHDGKEWTYIGVDGPDSNALLKIKYGEAYTDTYHSYAKNILRTQESACNCIGGDCYLMITDGPASGISECRFLKIREGRIIKEIFPTGRVKHTEECTCGFASNKTIECACRDNSYTAKRPFVKLNVETDTAEIRLMCTETYLDTPRPNDGSITGPCESDGDKGSGGIKGGFVHQRMASKIGRWYSRTMSKTKRMGMGLYVKYDGDPWTDSEALALSGVMVSMEEPGWYSFGFEIKDKKCDVPCIGIEMVHDGGKTTWHSAATAIYCLMGSGQLLWDTVTGVDMTL

SEQ ID NO: 28794 - protein, 466 aa, synthetic construct
  REGION 1..466: note = neuraminidase__InfluenzaB__ACO94665
MLPSTIQTLTLFLTSGGVLLSLYVSASLSYLLYSDILLKFSPTEITASTMPLDCANASNVQAVNRSATKGVTLLLPEPEWTYPRLSCPGSTFQKALLISPHRFGETKGNSAPLIIREPFIACGPNECKHFALTHYAAQPGGYYNGTRGDRNKLRHLISVKLGKIPTVENSIFHMAAWSGSACHDGKEWTYIGVDGPDNNALLKIKYGEAYTDTYHSYANKILRTQESACNCIGGNCYLMITDGSASGVSECRFLKIREGRIIKEIFPTGRVKHTEECTCGFASNKTIECACRDNSYTAKRPFVKLNVETDTAEIRLMCTDTYLDTPRPDDGSITGPCESNGDKGSGGIKGGFVHQRMASKIGRWYSRTMSKTERMGMGLYVKYDGDPWADSDALAFSGVMVSMKEPGWYSFGFEIKDKKCDVPCIGIEMVHDGGKETWHSAATAIYCLMGSGQLLWDTVTGVDMAL

SEQ ID NO: 28795 - protein, 466 aa, synthetic construct; identical to SEQ ID NO: 28635
  REGION 1..466: note = neuraminidase__InfluenzaB__ACQ45607

SEQ ID NO: 28796 - protein, 466 aa, synthetic construct
  REGION 1..466: note = neuraminidase__InfluenzaB__ACQ45610
MLPSTIQTLTLFLTSGGVLLSLYVSASLSYLLYSDILLKFSPTEITAPTVPLDCANASNVQAVNRSATKGVTLLLPEPEWTYPRLSCPGSTFQKALLISPHRFGETKGNSAPLIIREPFIACGPNECKHFALTHYAAQPGGYYNGTRGDRNKLRHLISVKLGKIPTVENSIFHMAAWSGSACHDGKEWTYIGVDGPDNNALLKIKYGEAYTDTYHSYANKILRTQESACNCIGGNCYLMITDGSASGVSECRFLKIREGRIIKEIFPTGRVKYTEECTCGFASNKTIECACRDNSYTAKRPFVKLNVETDTAEIRLMCTDTYLDTPRPDDGSITGPCESNGDKGSGGIKGGFVHQRMASKIGRWYSRTMSKTERMGMGLYVKYDGDPWADSDALAFSGVMVSMKEPGWYSFGFEIKDKKCDVPCIGIEMVHDGGKETWHSAATAIYCLMGSGQLLWDTVTGVDMAL

SEQ ID NO: 28797 - protein, 466 aa, synthetic construct; identical to SEQ ID NO: 28635
  REGION 1..466: note = neuraminidase__InfluenzaB__ACQ45613

SEQ ID NO: 28798 - protein, 466 aa, synthetic construct; identical to SEQ ID NO: 28791
  REGION 1..466: note = neuraminidase__InfluenzaB__ACR15626

SEQ ID NO: 28799 - protein, 466 aa, synthetic construct; identical to SEQ ID NO: 28791
  REGION 1..466: note = neuraminidase__InfluenzaB__ACR15637

SEQ ID NO: 28800 - protein, 466 aa, synthetic construct; identical to SEQ ID NO: 28762
  REGION 1..466: note = neuraminidase__InfluenzaB__ACR15648

SEQ ID NO: 28801 - protein, 466 aa, synthetic construct; identical to SEQ ID NO: 28791
  REGION 1..466: note = neuraminidase__InfluenzaB__ACR15659

SEQ ID NO: 28802 - protein, 466 aa, synthetic construct; identical to SEQ ID NO: 28791
  REGION 1..466: note = neuraminidase__InfluenzaB__ACR15670

SEQ ID NO: 28803 - protein, 466 aa, synthetic construct; identical to SEQ ID NO: 28616
  REGION 1..466: note = neuraminidase__InfluenzaB__ACR15681

SEQ ID NO: 28804 - protein, 466 aa, synthetic construct
  REGION 1..466: note = neuraminidase__InfluenzaB__ACR15692
MLPSTIQTLTLFLTSGGVLLSLYVSASLSYLLYSDILLKFSPTEITAPTMPLGCANASNVQAVNRSATKGVTLLLPEPEWTYPRLSCPGSTFQKALLISPHRFGETKGNSAPLIIREPFIACGPKECKHFALTHYAAQPGGYYNGTRGDRNKLRHLISVKLGKIPTVENSIFHMAAWSGSACHDGKEWTYIGVDGPDNNALLKIKYGEAYTDTYHSYANNILRTQESACNCIGGNCYLMITDGSASGISECRFLKIREGRIIKEIFPTGRVKHTEECTCGFASNKTIECACRDNSYTAKRPFVKLNVETDTAEIRLMCTETYLDTPRPDDGSITGPCESNGDKGSGGIKGGFVHQRMASKIGRWYSRTMSKTKRMGMGLYVKYDGDPWADNDALALSGVMVSMEEPGWYSFGFEIKDKKCDVPCIGIEMVHDGGKETWHSAATAIYCLMGSGQLLWDTVTGVDMAL

SEQ ID NO: 28805 - protein, 466 aa, synthetic construct; identical to SEQ ID NO: 28792
  REGION 1..466: note = neuraminidase__InfluenzaB__ACR15703

SEQ ID NO: 28806 - protein, 466 aa, synthetic construct; identical to SEQ ID NO: 28792
  REGION 1..466: note = neuraminidase__InfluenzaB__ACR15714

SEQ ID NO: 28807 - protein, 466 aa, synthetic construct; identical to SEQ ID NO: 28707
  REGION 1..466: note = neuraminidase__InfluenzaB__ACR15725

SEQ ID NO: 28808 - protein, 466 aa, synthetic construct; identical to SEQ ID NO: 28668
  REGION 1..466: note = neuraminidase__InfluenzaB__ACR15736

SEQ ID NO: 28809 - protein, 466 aa, synthetic construct; identical to SEQ ID NO: 28791
  REGION 1..466: note = neuraminidase__InfluenzaB__ACR39340

SEQ ID NO: 28810 - protein, 466 aa, synthetic construct
  REGION 1..466: note = neuraminidase__InfluenzaB__ADL28399
MLPSTIQTLTLFLTSGGVLLSLYVSASLSYLLYSDILLKFSPTEITAPTMPLDCANASNVQAVNRSATKGVTLLLPEPEWTYPRLSCPGSTFQKALLISPHRFGETKGNSAPLIIREPFIACGPNECKHFALTHYAAQPGGYYNGTRGDRNKLRHLISVKLGKIPTVENSIFHMAAWSGSACHDGKEWTYIGVDGPDNNALLKIKYGEAYTDTYHSYANNILRTQESACNCIGGNCYLMITDGSASGVSECRFLKIREGRIIKEIFPTGRVKHTEECTCGFASNKIIECACRDSSYTAKRPFVKLNVETDTAEIRLMCTETYLDTPRPNDGSITGPCESNGDKGSGGIKGGFVHQRMASKIGRWYSRTMSKTERMGMGLYVKYDGDPWADSDALALSGVMVSMEEPGWYSFGFEIKDKKCDVPCIGIEMVHDGGKETWHSAATAIYCLMGSGQLLWDTVTGVDMAL

SEQ ID NO: 28811 - protein, 466 aa, synthetic construct; identical to SEQ ID NO: 28788
  REGION 1..466: note = neuraminidase__InfluenzaB__ADN32822

SEQ ID NO: 28812 - protein, 466 aa, synthetic construct
  REGION 1..466: note = neuraminidase__InfluenzaB__ADR02756
MLPSTIQTLTLFLTSGGVLLSLYVSASLSYLLYSDILLKFSQTEITAPIIPLDCANASNVQAVNRSAAKGVTLLLPEPEWTYPRLSCPGSTFQKALLISPHRFGETKGNSAPLIIREPFIACGPTECKHFALTHYAAQPGGYYNGTREDRNKLRHLISVKLGKIPTVENSIFHMAAWSGSACHDGKEWTYIGVDGPDSNALLKIKYGEAYTDTYHSYAKNILRTQESACNCIGGDCYLMITDGPASGISECRFLKIREGRIIKEIFPTGRVKHTEECTCGFASNKTIECACRDNSYTAKRPFVKLNVETDTAEIRLMCTETYLDTPRPNDGSITGPCESDGDKGSGGIKGGFVHQRMASKIGRWYSRTMSKTKRMGMGLYVKYDGDPWTDSEALALSGVMVSMEEPGWYSFGFEIKDKKCDVPCIGIEMVHDGGKTTWHSAATAIYCLMGSGQLLWDTVTGVDMAL

SEQ ID NO: 28813 - protein, 466 aa, synthetic construct
  REGION 1..466: note = neuraminidase__InfluenzaB__AEA51353
MLPSTIQTLTLFLTSGGVLLSLYVSASLSYLLYSDILLKFSRTEITAPIMPLDCANASNVQAVNRSATKGVTLLLPEPEWTYPRLSCPGSTFQKALLISPHRFGETKGNSAPLIIREPFIACGPKECKHFALTHYAAQPGGYYNGTREDRNKLRHLISVKLGKIPTVENSIFHMAAWSGSACHDGREWTYIGVDGPDSNALLKIKYGGAFTDTYHSYAKNILSPQESACNCIGGDCYLMITDGPASGISECRFLKIREGRIIKEIFPTGRVKHTEECTCGFASNKTIECACRDNSYTAKRPFVKLNVETDTAEIRLMCTETYLDTPRPNDGSITGPCESNGDKGSGGIKGGFVHQRMASKIGRWYSRTMSKTKRMGMGLYVKYDGDPWTDSEALALSGVMVSMEEPGWYSFGFEIKDKKCDVPCIGIEMVHDGGKTTWHSAATAIYCLMGSGQLLWDTVTGVNMTL

SEQ ID NO: 28814 - protein, 466 aa, synthetic construct
  REGION 1..466: note = neuraminidase__InfluenzaB__AEA51355
MLPSTIQTLTLFLTSGGVLLSLYVSASLSYLLYSDILLKFSPTEITAPTMPLDCANTSNVQAVNRSATKGVTLLLPEPEWTYPRLSCPGSTFQKALLISPHRFGETKGNSAPLIIREPFIACGPNECKHFALTHYAAQPGGYYNGTRGDRNKLRHLISVKLGKIPTVENSIFHMAAWSGSACHDGKEWTYIGVDGPDNNALLKITYGEAYPGTYHSYAIKNPRTQESAPNCFGGHSFPIITHAPPSGVWEPRFLKIREGRIINEIFPTGRVKPPEECTCGFASNNTIECACRDNNCTAKRPFVKFHVESDPAEIRAMCTDTYLDSPRPDDGSITGPCDSNGDKGSGGIKGGFVHQRMESKIGRWYSRTMSKTERMGMGLYVKYDGDPWADSDALANSGVMVSMNEPGSSSFGFEIKDKKCDVPCIGIEMVHDGGKETWHSAATAIYCLMGSGQLLWDTVTGVDMAL

SEQ ID NO: 28815 - protein, 466 aa, synthetic construct
  REGION 1..466: note = neuraminidase__InfluenzaB__AEA51357
MLPSTIQTLTLFLTSGGVLLSLYVSASLSYLLYSDILLKFSRTEITAPIMPLDCANASNVQAVNRSATKGVTLLLPEPEWTYPRLSCPGSTFQKALLISPHRFGETKGNSAPLIIREPFIACGPKECKHFALTHYAAQPGGYYNGTREDRNKLRHLISVKLGKIPTVENSIFHMAAWSGSACHDGREWTYIGVDGPDSNALLKIKFGEAYTDTYHSYAKNILGTQESACNCIGGDCNLMITDGPASGISESRFLKIGEGRIIKEIFPTGRVKHTEECTCGFASNKTIECACRDNSYTAKRPFVKLNVETDTAEIRLMCTETYLDTPRPNDGSITGPCESNGDKGSGGIKGGFVHQRMASKIGRWYSRTMSKTERMGMGLYVKYDGDPWADSDALAFSGVMVSMKEPGWYSFGFEIKDKKCDVPCIGIEMVHDGGKETWHSAATAIYCLMGSGQLLWDTVTGVNMAL

SEQ ID NO: 28816 - protein, 466 aa, synthetic construct
  REGION 1..466: note = neuraminidase__InfluenzaB__AEA51359
MLPSTIQTLTLFLTSGGVLLSLYVSASLSYLLYSDILLKFSRTEITAPIMPLDCANASNVQAVNRSATKGVTLLLPEPEWTYPRLSCPGSTFQKALLISPHRFGETKGNSAPLIIREPFIACGPKECKHFALTHYAAQPGGYYNGTREDRNKLRHLISVKLGKIPTVENSIFHMAAWSGSACHDGREWTYIGVDGPDSNALLKIKYGEAYTDTYHSYAKNILRTQESACNCIGGDCYLMITDGPASGISECRFLKIREGRIIKEIFPTGRVKHTEECTCGFASNKTIECACRDNSYTAKRPFVKLNVETDTAEIRLMCTETYLDTPRPNDGSITGPCESDGDKGSGGIKGGFVHQRMASKIGRWYSRTMSKTKRMGMGLYVKYDGDPWTDSEALALSGVMVSMEEPGWYSFGFEIKDKKCDVPCIGIEMVHDGGKTTWHSAATAIYCLMGSGQLLWDTVTGVDMAL

SEQ ID NO: 28817 - protein, 466 aa, synthetic construct
  REGION 1..466: note = neuraminidase__InfluenzaB__AEA51365
MLPSTIQTLTLFLTSGGVLLSLYVSASLSYLLYSDILLKFSRTEITAPIMPLDCANASNVQAVNRSATKGVTLLLPEPEWTYPRLSCPGSTFQKALLISPHRFGETKGNSAPLIIREPFIACGPKECKHFALTHYAAQPGGYYNGTREDRNKLRHLISVKLGKIPTVENSIFHMAAWSGSACHDGREWTYIGVDGPDSNALLKIKYGEAYTDTYHSYAKNILRTQESACNCIGGDCYLMITDGPASGISECRFLKIREGRIIKEIFPTGRVKHTEECTCGFASNKTIECACRDNSYTAKRPFVKLNVETDTAEIRLMCTETYLDTPRPNDGSITGPCESNGDKGSGGIKGGFVHQRMASKIGRWYSRTMSKTKRMGMGLYVKYDGDPWTDSEALALSGVMVSMEEPGWYSFGFEIKDKKCDVPCIGIEMVHDGGKTTWHSAATAIYCLMGSGQLLWDTVTGVNMTL

SEQ ID NO: 28818 - protein, 466 aa, synthetic construct; identical to SEQ ID NO: 28817
  REGION 1..466: note = neuraminidase__InfluenzaB__AEA51367

SEQ ID NO: 28819 - protein, 466 aa, synthetic construct; identical to SEQ ID NO: 28817
  REGION 1..466: note = neuraminidase__InfluenzaB__AEA51371

SEQ ID NO: 28820 - protein, 466 aa, synthetic construct
  REGION 1..466: note = neuraminidase__InfluenzaB__AEA51373
MLPSTIQTLTLFLTSGGVLLSLYVSASLSYLLYSDILLKFSPTEITAPTMPLDCANASNVQAVNRSATKGVTLLLPEPEWTYPRLSCPGSTFQKALLISPHRFGETKGNSAPLIIREPFIACGPNECKHFALTHYAAQPGGYYNGTRGDRNKLRHLISVKLGKIPTVENSIFHMAAWSGSACHDGKEWTYIGVDGPDNNALLKVKYGEAYTDTYHSYANKILRTQESACNCIGGNCYLMITDGSASGVSECRFLKIREGRIIKEIFPTGRVKHTEECTCGFASNKTIECACRDNSYTAKRPFVKLNVETDTAEIRLMCTDTYLDTPRPDDGSITGPCESNGDKGSGGIKGGFVHQRMASKIGRWYSRTMSKTKRMGMGLYVKYDGDPWTDSEALALSGVMVSMEEPGWYSFGFEIKDKKCDVPCIGIEMVHDGGKETWHSAATAIYCLMGSGQLLWDTVTGVNMTL

SEQ ID NO: 28821 - protein, 466 aa, synthetic construct
  REGION 1..466: note = neuraminidase__InfluenzaB__AEA51377
MLPSTIQTLTLFLTSGGVLLSLYVSASLSYLLYSDILLKFSPTEITAPTMPLDCANASNVQAVNRSATKGVTLLLPEPEWTYPRLSCPGSTFQKALLISPHRFGETKGNSAPLIIREPFIACGPNECKHFALTHYAAQPGGYYNGTRGDRNKLRHLISVKLGKIPTVENSIFHMAAWSGSACHDGKEWTYIGVDGPDNNALLKVKYGEAYTDTYHSYANKILRTQESACNCIGGNCYLMITDGSASGVSECRFLKIREGRIIKEIFPTGRVKHTEECTCGFASNKTIECACRDNSYTAKRPFVKLNVETDTAEIRLMCTDTYLDTPRPDDGSITGPCESNGDKGSGGIKGGFVHQRMESKIGRWYSRTMSKTERMGMGLYVKYDGDPWADSDALAFSGVMVSMKEPGWYSFGFEIKDKKCDVPCIGIEMVHDGGKETWHSAATAIYCLMGSGQLLWDTVTGVDMAL

SEQ ID NO: 28822 - protein, 466 aa, synthetic construct; identical to SEQ ID NO: 28821
  REGION 1..466: note = neuraminidase__InfluenzaB__AEA51379

SEQ ID NO: 28823 - protein, 466 aa, synthetic construct
  REGION 1..466: note = neuraminidase__InfluenzaB__AEA51381
MLPSTIQTLTLFLTSGGVLLSLYVSASLSYLLYSDILLKFSPTEITAPTMPLDCANASNVQAVNRSATKGVTLLLPEPEWTYPRLSCPGSTFQKALLISPHRFGETKGNSAPLIIREPFIACGPNECKHFALTHYAAQPGGYYNGTRGDRNKLRHLISVKLGKIPTVENSIFHMAAWSGSACHDGKEWTYIGVDGPDNNALLKVKYGEAYTDTYHSYANKILRTQESACNCIGGNCYLMITDGSASGVSECRFLKIREGRIIKEIFPTGRVKHTEECTCGFASNKTIECACRDNSYTAKRPFVKLNVETDTAEIRLMCTDTYLDTPRPNDGSITGPCESDGDKGSGGIKGGFVHQRMKSKIGRWYSRTMSKTERMGMGLYVKYDGDPWADSDALAFSGVMVSVKEPGWYSFGFEIKDKKCDVPCIGIEMVHDGGKETWHSAATAIYCLMGSGQLLWDTVTGVDMAL

SEQ ID NO: 28824 - protein, 466 aa, synthetic construct; identical to SEQ ID NO: 28821
  REGION 1..466: note = neuraminidase__InfluenzaB__AEA51383

SEQ ID NO: 28825 - protein, 466 aa, synthetic construct
  REGION 1..466: note = neuraminidase__InfluenzaB__AEG20998
MLPSTIQTLTLFLTSGGVLLSLYVSASLSYLLYSDILLKFSRTEITAPILRLACANASNVQAVNRSATKGVTLLLPEPEWTYPRLSCPGSTFQKALLISPHRFGETKGNSAPLIIREPFIACGPKECKHFALTHYAAQPGGYYNGTREDRNKLRHLISVKLGKIPTVENSIFHMAAWSGSACHDGREWTYIGVDGPDSNALLKIKYGGAFTDTYHSYAKNILSPQESACNCIGGDCYLMITDGPASGISECRFLKIREGRIIKEIFPTGRVKHTEECTCGFASNKTIECACRDNSYTAKRPFVKLNVETDTAEIRLMCTETYLDTPRPNDGSITGPCESNGDKGSGGIKGGFVHQRMASKIGRWYSRTMSKTKRMGMGLYVKYDGDPWTDSEALALSGVMVSMEEPGWYSFGFEIKDKKCDVPCIGIEMVHDGGKTTWHSAATAIYCLMGSGQLLWDTVTGVNMTL

SEQ ID NO: 28826 - protein, 466 aa, synthetic construct
  REGION 1..466: note = neuraminidase__InfluenzaB__AEG20999
MLPSTIQTLTLFLTSGGVLLSLSVSASLSYLLYSDILLKFSRTEITAPIMPLDCANASNVQAVNRSATKGVTLLLPEPEWTYPRLSCPGSTFQKALLISPHRFGETKGNSAPLIIREPFIACGPKECKHFALTHYAAQPGGYYNGTREDRNKLRHLISVKLGKIPTVENSIFHMAAWSGSACHDGREWTYIGVDGPDSNALLKIKYGGAFTDTYHSYAKNILSPQESACNCIGGDCYLMITDGPASGISECRFLKIREGRIIKEIFPTGRVKHTEECTCGFASNKTIECACRDNSYTAKRPFVKLNVETDTAEIRLMCTETYLDTPRPNDGSITGPCESNGDKGSGGIKGGFVHQRMASKIGRWYSRTMSKTKRMGMGLYVKYDGDPWTDSEALALSGVMVSMEEPGWYSFGFEIKDKKCDVPCIGIEMVHDGGKTTWHSAATAIYCLMGSGQLLWDTVTGVNMTL

SEQ ID NO: 28827 - protein, 466 aa, synthetic construct
  REGION 1..466: note = neuraminidase__InfluenzaB__AEG21000
MLPSTIQTLTLFLTSGGVLLSLYVSASLSYLLYSDILLKFSRTEITAAILILDCANASNVQAVNRSATKGVTLLLPEPEWTYPRLSCPGSTFQKALLISPHRFGETKGNSAPLIIREPFIACGPKECKHFALTHYAAQPGGYYNGTREDRNKLRHLISVKLGKIPTVENSIFHMAAWSGSACHDGREWTYIGVDGPDSNALLKIKYGGAFTDTYHSYAKNILSPQESACNCIGGDCYLMITDGPASGISECRFLKIREGRIIKEIFPTGRVKHTEECTCGFASNKTIECACRDNSYTAKRPFVKLNVETDTAEIRLMCTETYLDTPRPNDGSITGPCESNGDKGSGGIKGGFVHQRMASKIGRWYSRTMSKTKRMGMGLYVKYDGDPWTDSEALALSGVMVSMEEPGWYSFGFEIKDKKCDVPCIGIEMVHDGGKTTWHSAATAIYCLMGSGQLLWDTVTGVNMTL

SEQ ID NO: 28828 - protein, 466 aa, synthetic construct
  REGION 1..466: note = neuraminidase__InfluenzaB__AEG21002
MLPSTIQTLTLFLTSGGVLLSLYVSASLSYLLYSDILLKFSRTEITAPIMPLDCANASNVQAVNRSATKGVTLLLPEPEWTYPRLSCPGSTFQKALLISPHRFGETKGNSAPLIIREPFIACGPKECKHFALTHYAAQPGGYYNGTREDRNKLRHLISVKLGKIPTVENSIFHMAAWSGSACHDGREWTYIGVDGPDSNALLKIKYGEAYTDTYHSYAKNILRTQESACNCIGGDCYLMITDGPASGISECRFLKIREGRIIKEIFPTGRVRHTEECTCGFASNKTIECACRDNSYTAKRPFVKLNVETDTAEIRLMCTETYLDTPRPNDGSITGPCESNGDKGSGGIKGGFVHQRMASKIGRWYSRTMSKTKRMGMGLYVKYDGDPWTDSEALALSGVMVSMEEPGWYSFGFEIKDKKCDVPCIGIEMVHDGGKTTWHSAATAIYCLMGSGQLLWDTVTGVNMTL

SEQ ID NO: 28829 - protein, 466 aa, synthetic construct
  REGION 1..466: note = neuraminidase__InfluenzaB__AEG21003
MLPSTIQTLTLFLTSGGVLLSLYVSASLSYLLYSDILLKFSRTEITAPIMPLDCANASNVQAVNRSATKGVTLLLPEPEWTYPRLSCPGSTFQKALLISPHRFGETKGNSAPLIIREPFIACGPKECKHFALTHYAAQPGGYYNGTREDRNKLRHLISVKLGKIPTVENSIFHMAAWSGSACHDGREWTYIGVDGPDSNALLKIKYGEAYTDTYHSYAKNILRTQESACNCIGGDCYLMITDGPASGISECRFLKIREGRIIKEIFPTGRVKHTEECTCGFASNKTIECACRDNSYTAKRPFVKLNVETDTAEIRLMCTETYLDTPRPNDGSITGPCESDGDKGSGGIKGGFVHQRMASKIGRWYSRTMSKTKRMGMGLYVKYDGDPWTDSEALALSGVMVSMEEPGWYSFGFEIKDKKCDVPCIGIEMVHDGGKTTWHSAATAIYCLMGSGQLLWDTVTGVNMTL

SEQ ID NO: 28830 - protein, 466 aa, synthetic construct
  REGION 1..466: note = neuraminidase__InfluenzaB__AEG21004
MLPSTIQTLTLFLTSGGVLLSLYVSASLSYLLYSDILLKFSPTEITAPTMPLDCANASNVQAVNRSATKGVTLLLPEPEWTYPRLSCPGSTFQKALLISPHRFGETKGNSAPLIIREPFIACGPNECKHFALTHYAAQPGGYYNGTRGDRNKLRHLISVKLGKIPTVENSIFHMAAWSGSACHDGKEWTYIGVDGPDNNALLKVKYGEAYTDTYHSYANKILRTQESACNCIGGNCYLMITDGSASGVSECRFLKIREGRIIKEIFPTGRVKHTEECTCGFASNKTIECACRDNSYTAKRPFVKLNVETDTAEIRLMCTDTYLDTPRPDDGSITGPCESNGDKGGGGIKGGFVHQRMESKIGRWYSRTMSKTERMGMGLYVKYDGDPWADSDALAFSGVMVSMKEPGWYSFGFEIKDKKCDVPCIGIEMVHDGGKETWHSAATAIYCLMGSGQLLWDTVTGVDMAL

SEQ ID NO: 28831 - protein, 466 aa, synthetic construct
  REGION 1..466: note = neuraminidase__InfluenzaB__AEG21005
MLPSTIQTLTLFLTSGGVLLSLYVSASLSYLLYSDILLKFSPTEITAPTMPLDCANASNVQAVNRSATKGVTLLLPEPEWTYPRLSCPGSTFQKALLISPHRFGETKGNSAPLIIREPFIACGPNECKHFALTHYAAQPGGYYNGTRGDRNKLRHLISVKLGKIPTVENSIFHMAAWSGSACHDGKEWTYIGVDGPDNNALLKVKYGEAYTDTYHSYANKILRTQESACNCIGGNCYLMITDGSASGVSECRFLKIREGRIIKEIFPTGRVKHTEECTCGFASNKTIECACRDNSYTAKRPFVKLNVETDTAEIRLMCTDTYLDTPRPDDGSITGPCESNGDKGGGGIKGGFVHQRMESKIGRWYSRTMSKTERMGMGLYVKYDGDPWADSDALAFSGVMVSMKEPGWYSFGFEIKDKKCDVPCIGIEMVHDGGKETWHSAATAIYCLMGSGQLLWDTVTGVNMTL

SEQ ID NO: 28832 - protein, 466 aa, synthetic construct; identical to SEQ ID NO: 28817
  REGION 1..466: note = neuraminidase__InfluenzaB__AEG21006

SEQ ID NO: 28833 - protein, 466 aa, synthetic construct; identical to SEQ ID NO: 28821
  REGION 1..466: note = neuraminidase__InfluenzaB__AEG21007

SEQ ID NO: 28834 - protein, 466 aa, synthetic construct
  REGION 1..466: note = neuraminidase__InfluenzaB__AEG21008
MLPSTIQTLTLFLTSGGVLLSLYVSASLSYLLYSDILLKFSPTEITAPTMPLDCANASNVQAVNRSATKGVTLLLPEPEWTYPRLSCPGSTFQKALLISPHRFGETKGNSAPLIIREPFIACGPNECKHFALTHYAAQPGGYYNGTRGDRNKLRHLISVKLGKIPTVENSIFHMAAWSGSACHDGKEWTYIGVDGPDNNALLKVKYGEAYTDTYHSYANKILRTQESACNCIGGNCYLMITDGSASGVSECRFLKIREGRIIKEIFPTGRVKHTEECTCGFASNKTIECACRDNSYTAKRPFVKLNVETDTAEIRLMCTDTYLDTPRPDDGSITGPCESNGDKGSGGIKGGFVHQRMASKIGRWYSRTMSKTKRMGMGLYVKYDGDPWADSDALAFSGVMVSMKEPGWYSFGFEIKDKKCDVPCIGIEMVHDGGKETWHSAATAIYCLMGSGQLLWDTVTGVDMAL

SEQ ID NO: 28835 - protein, 466 aa, synthetic construct; identical to SEQ ID NO: 28821
  REGION 1..466: note = neuraminidase__InfluenzaB__AEG21009

SEQ ID NO: 28836 - protein, 466 aa, synthetic construct; identical to SEQ ID NO: 28821
  REGION 1..466: note = neuraminidase__InfluenzaB__AEG21010

SEQ ID NO: 28837 - protein, 466 aa, synthetic construct; identical to SEQ ID NO: 28821
  REGION 1..466: note = neuraminidase__InfluenzaB__AEG21011

SEQ ID NO: 28838 - protein, 466 aa, synthetic construct; identical to SEQ ID NO: 28821
  REGION 1..466: note = neuraminidase__InfluenzaB__AEG21012

SEQ ID NO: 28839 - protein, 466 aa, synthetic construct
  REGION 1..466: note = neuraminidase__InfluenzaB__AEG21013
MLPSTIQTLTLFLTSGGVLLSLYVSASLSYLLYSDILLKFSPTEITAPTMPLDCANASNVQAVNRSATKGVTLLLPEPEWTYPRLSCPGSTFQKALLISPHRFGETKGNSAPLIIREPFIACGPNECKHFALTHYAAQPGGYYNGTRGDRNKLRHLISVKLGKIPTVENSIFHMAAWSGSACHDGKEWTYIGVDGPDNNALLKVKYGEAYTDTYHSYANKILRTQESACNCIGGNCYLMITDGSASGVSECRFLKIREGRIIKEIFPTGRVKHTEECTCGFASNKTIECACRDNSYTAKRPFVKLNVETDTAEIRLMCTDTYLDTPRPNDGSITGPCESDGDKGSGGIKGGFVHQRMKSKIGRWYSRTMSKTERMGMGLYVKYDGDPWADSDALAFSGVMVSMKEPGWYSFGFEIKDKKCDVPCIGIEMVHDGGKETWHSAATAIYCLMGSGQLLWDTVTGVDMAL

SEQ ID NO: 28840 - protein, 466 aa, synthetic construct
  REGION 1..466: note = neuraminidase__InfluenzaB__AEN68957
MLPSTIQTLTLFLTSGGVLLSLYVSASLSYLLYSDILLKFSRTEIPAPIMPLDCANASNVQAVNRSATKGVTLLLPEPEWTYPRLSCPGSTFQKALLISPHRFGETKGNSAPLIIREPFIACGPKECKHFALTHYAAQPGGYYNGTREDRNKMRHLISVKLGKIPTVENSIFHMAAWSGSACHDGREWTYIGVDGPDSNALLKIKYGEAYTDTYHSYAKNILRTQESACNCIGGDCYLMITDGPASGISECRFLKIREGRIIKEIFPTGRVKYTEECTCGFASNKTIGCACRDNSYTAKRPFVKLNVETDTAEIRLMCTETYLDTPRPNDGSITGPCESNGDKGSGGIKGGFVHQRMASKIGRWYSRTMSKTKRMGMGLYVKYDGDPWTDSEALALSGVMVSMEEPGWYSFGFEIKDKKCDVPCIGIEMVHDGGKTTWHSAATAIYCLMGSGQLMWDTVTGVNMTL

SEQ ID NO: 28841 - protein, 466 aa, synthetic construct
  REGION 1..466: note = neuraminidase__InfluenzaB__AEO80071
MLPSTIQTLTLFLTSGGVLLSLYVSASLSYLLYSDILLKFSPTEITAPTMPLDCANASNVHAVNRSATKGVTLLLPEPEWTYPRLSCPGSTFQKALLISPHRFGETKGNSAPLIIREPFIACGPNECKHFALTHYAAQPGGYYNGTRGDRNKLRHLISVKLGKIPTVENSIFHMAAWSGSACHDGKEWTYIGVDGPDNNALLKIKYGEAYTDTYHSYANNILRTQESACNCIGGNCYLMITDGSASGVSECRFLKIREGRIIKEIFPTGRVKHTEECTCGFASNKTIECACRDNSYTAKRPFVKLNVETDTAEIRLMCTDTYLDTPRPDDGSITGPCESNGDKGSGGIKGGFVHQRMASKIGRWYSRTMSKTERMGMGLYVKYDGDPWADSDALAFSGVMVSMKEPGWYSFGFEIKDKKCDVPCIGIEMVHDGGKETWHSAATAIYCLMGSGQLLWDTVTGVDMAL

SEQ ID NO: 28842 - protein, 466 aa, synthetic construct
  REGION 1..466: note = neuraminidase__InfluenzaB__AEO80082
MLPSTIQTLTLFLTSGGVLLSLYVSASLSYLLYSDILLKFSQTGITAPIMPLDCANASNVQAVNRSATKGVTLLLPEPEWTYPRLSCPGSTFQKALLISPHRFGETKGNSAPLIIREPFIACGPTECKYFALTHYAAQPGGYYNGTREDRNKLRHLISVKLGKIPTVENSIFHMAAWSGSACHDGKEWTYIGVDGPDSNALLKIKYGEAYTDTYHSYAKNILRTQESACNCIGGDCYLMITDGPASGISECRFLKIREGRIIKEIFPTGRVKHTEECTCGFASNKTIECACRDNSYTAKRPFVKLNVETDTAEIRLMCTETYLDTPRPNDGSITGPCESDGDKGSGGIKGGFVHQRMASKIGRWYSRTMSKTKRMGMGLYVKYDGDPWTDSEALALSGVMVSMEEPGWYSFGFEIKDKKCDVPCIGIEMVHDGGKTTWHSAATAIYCLMGSGQLLWDTVTGVDMAL

SEQ ID NO: 28843 - protein, 466 aa, synthetic construct; identical to SEQ ID NO: 28682
  REGION 1..466: note = neuraminidase__InfluenzaB__AEO80090

SEQ ID NO: 28844 - protein, 466 aa, synthetic construct; identical to SEQ ID NO: 28627
  REGION 1..466: note = neuraminidase__InfluenzaB__AEO80101

SEQ ID NO: 28845 - protein, 466 aa, synthetic construct; identical to SEQ ID NO: 28723
  REGION 1..466: note = neuraminidase__InfluenzaB__AEO80149

SEQ ID NO: 28846 - protein, 466 aa, synthetic construct; identical to SEQ ID NO: 28635
  REGION 1..466: note = neuraminidase__InfluenzaB__AEO80158

SEQ ID NO: 28847 - protein, 466 aa, synthetic construct; identical to SEQ ID NO: 28635
  REGION 1..466: note = neuraminidase__InfluenzaB__AEO80167

SEQ ID NO: 28848 - protein, 466 aa, synthetic construct; identical to SEQ ID NO: 28723
  REGION 1..466: note = neuraminidase__InfluenzaB__AEO80176

SEQ ID NO: 28849 - protein, 466 aa, synthetic construct
  REGION 1..466: note = neuraminidase__InfluenzaB__AEO80187
MLPSTIQTLTLFLTSGGVLLSLYVSASLSYLLYSDILLKFSPTEITAPTMPLGCANASNVQAVNRSATKGVTLLLPEPEWTYPRLSCPGSTFQKALLISPHRFGETKGNSAPLIIREPFIACGPNECKHFALTHYAAQPGGYYNGTRGDRNKLRHLISVKLGKIPTVENSIFHMAAWSGSACHDGKEWTYIGVDGPDNNALLKIKYGEAYTDTYHSYANKILRTQESACNCIGGNCYLMITDGSASGVSECRFLKIREGRIIKEIFPTGRVKHTEECTCGFASNKTIECACRDNSYTAKRPFVKLNVETDTAEIRLMCTDTYLDTPRPDDGSITGPCESNGDRGSGGIKGGFVHQRMASKIGRWYSRTMSKTERMGMGLYVKYDGDPWADSDALAFSGVMVSMKEPGWYSFGFEIKDKKCDVPCIGIEMVHDGGKETWHSAATAIYCLMGSGQLLWDTVTGVDMAL

SEQ ID NO: 28850 - protein, 466 aa, synthetic construct
  REGION 1..466: note = neuraminidase__InfluenzaB__AEO80198
MLPSTIQTLTLFLTSGGVLLSLYVSASLSYLLYSDILLKFSPTEITAPTMPLDCANASNVQAVNRSATKGVTLLLPEPEWTYPRLSCPGSTFQKALLISPHRFGETKGNSAPLIIREPFIACGPNECKHFALTHYAAQPGGYYNGTRGDRNKLRHLISVKLGKIPTVENSIFHMAAWSGSACHDGKEWTYIGVDGPDNNALLKIKYGEAYTDTYHSYANKILRTQESACNCIGGNCYLMITDGSASGVSECRFLKIREGRIIKEIFPTGRVKHTEECTCGFASNKTIECACRDNSYTAKRPFVKLNVETDTAEIRLMCTDTYLDTPRPDDGSITGPCESNGDRGSGGIKGGFVHQRMASKIGRWYSRTMSKTERMGMGLYVKYDGDPWADSDALAFRGVMVSMKEPGWYSFGFEIKDKKCDVPCIGIEMVHDGGKETWHSAATAIYCLMGSGQLLWDTVTGVDMAL

SEQ ID NO: 28851 - protein, 466 aa, synthetic construct; identical to SEQ ID NO: 28791
  REGION 1..466: note = neuraminidase__InfluenzaB__AEO80209

SEQ ID NO: 28852 - protein, 466 aa, synthetic construct
  REGION 1..466: note = neuraminidase__InfluenzaB__AEO80220
MLPSTIQTLTLFLTSGGVLLSLYVSASLSYLLYSDILLKFSPTEITAPTMPLDCANASNVQAVNRSATKGLTLLLPEPEWTYPRLSCPGSTFQKALLISPHRFGETKGNSAPLIIREPFIACGPNECKHFALTHYAAQPGGYYNGTRGDRNKLRHLISVKLGKIPTVETSIFHMAAWSGSACHDGKEWTYIGVDGPDNNALLKIKYGEAYTDTYHSYANKILRTQESACNCIGGNCYLMITDGSASGVSECRFLKIREGRIIKEIFPTGRVKHTEECTCGFASNKTIECACRDNSYTAKRPFVKLNVETDTAEIRLMCTDTYLDTPRPDDGSITGPCESNGDRGSGGIKGGFVHQRMASKIGRWYSRTMSKTERMGMGLYVKYDGDPWADSDALAFSGVMVSMKEPGWYSFGFEIKDKKCDVPCIGIEMVHDGGKETWHSAATAIYCLMGSGQLLWDTVTGVDMAL

SEQ ID NO: 28853 - protein, 466 aa, synthetic construct; identical to SEQ ID NO: 28788
  REGION 1..466: note = neuraminidase__InfluenzaB__AEO80231

SEQ ID NO: 28854 - protein, 466 aa, synthetic construct; identical to SEQ ID NO: 28791
  REGION 1..466: note = neuraminidase__InfluenzaB__AEO80242

SEQ ID NO: 28855 - protein, 466 aa, synthetic construct; identical to SEQ ID NO: 28635
  REGION 1..466: note = neuraminidase__InfluenzaB__AEP20182

SEQ ID NO: 28856 - protein, 466 aa, synthetic construct
  REGION 1..466: note = neuraminidase__InfluenzaB__AEP20193
MLPSTIQTLTLFLTSGGVLLSLYVSASLSYLLYSDILLKFSPTEITAPTMPLDCANASNVHAVNRSATKGVTLLLPEPEWTYPRLSCPGSTFQKALLISPHRFGETKGNSAPLIIREPFIACGPNECKHFALTHYAAQPGGYYNGTRGDRNKLRHLISVKLGKIPTVENSIFHMAAWSGSACHDGKEWTYIGVDGPDNNALLKIKYGEAYTDTYHSYANNILRTQESACNCIGGNCYLMITDGSASGVSECRFLKIREGRIIKEIFPTGRVKHTEECTCGFASNKTIECACRDNSYTAKRPFVKLNVETDTAEIRLMCTDTYLDTPRPDDGSITGPCESNGDKGSGGIKGGFVHQRMASKIGRWYSRTMSKTERMGMGLYVKYDGDPWADSDALAFSGVMVSVKEPGWYSFGFEIKDKKCDVPCIGIEMVHDGGKETWHSAATAIYCLMGSGQLLWDTVTGVDMAL

SEQ ID NO: 28857 - protein, 466 aa, synthetic construct
  REGION 1..466: note = neuraminidase__InfluenzaB__AEP20204
MLPSTIQTLTLFLTSGGVLLSLYVSASLSYLLYSDILLKFSPTEITAPTMPLDCANASNVQAVNRSATKGVTLLLPEPEWTYPRLSCPGSTFQKALLISPHRFGETKGNSAPLIIREPFIACGPNECKHFALTHYAAQPGGYYNGTRGDRNKLRHLISVKLGKIPTVENSIFHMAAWSGSACHDGKEWTYIGVDGPDNNALLKIKYGEAYTDTYHSYANKILRTQESACNCIGGNCYLMITDGSASGVSECRFLKIREGRIIKEIFPTGRVKHTEECTCGFASNKTIECACRDNSYTAKRPFVKLNVETDTAEIRLMCTDTYLDTPRPDDGSITGPCESNGDKGSGGIKGGFVHQRMASKIGRWYSRTMSKTERMGMGLYVKYDGDPWADSDALAFSGVMVSIKEPGWYSFGFEIKDKKCDVPCIGIEMVHDGGKETWHSAATAIYCLMGSGQLLWDTVTGVDMAL

SEQ ID NO: 28858 - protein, 466 aa, synthetic construct; identical to SEQ ID NO: 28687
  REGION 1..466: note = neuraminidase__InfluenzaB__AEP20215

SEQ ID NO: 28859 - protein, 466 aa, synthetic construct
  REGION 1..466: note = neuraminidase__InfluenzaB__AEP20237
MLPSTIQTLTLFLTSGGVLLSLYVSASLSYLLYSDILLKFSPTEITAPTMPLDCANASNVQAVNRSATKGVTLLLPEPEWTYPRLSCPGSTFQKALLISPHRFGETKGNSAPLIIREPFIACGPKECKHFALTHYAAQPGGYYNGTRGDRNKLRHLISVKLGKIPTVENSIFHMAAWSGSACHDGKEWTYIGVDGPDSNALLKIKYGEAYTDTYHSYANNILRTQESACNCIGGNCYLMITDGSASGISECRFLKIREGRIIKEIFPTGRVKHTEECTCGFASNKTIECACRDNSYTAKRPFVKLNVETDAAEIRLMCTETYLDTPRPDDGSITGPCESNGDKGSGGIKGGFVHQRMASKIGRWYSRTMSKTKRMGMGLYVKYDGDPWTDSDALALSGVMVSMEEPGWYSFGFEIKDKKCDVPCIGIEMVHDGGKETWHSAATAIYCLMGSGQLLWDTVTGVDMAL

SEQ ID NO: 28860 - protein, 466 aa, synthetic construct; identical to SEQ ID NO: 28687
  REGION 1..466: note = neuraminidase__InfluenzaB__AEP20248

SEQ ID NO: 28861 - protein, 466 aa, synthetic construct
  REGION 1..466: note = neuraminidase__InfluenzaB__AEP20259
MLPSTIQTLTLFLTSGGVLLSLYVSASLSYLLYSDILLKFSPTEITAPTMPLDCANASNVQAVNRSATKGVTLLLPEPEWTYPRLSCPGSTFQKALLISPHRFGETKGNSAPLIIREPFIACGPNECKHFALTHYAAQPGGYYNGTRGDRNKLRHLISVKLGKIPTVENSIFHMAAWSGSACHDGKEWTYIGVDGPDNNALLKIKYGEAYTDTYHSYANNILRTQESACNCIGGNCYLMITDGSASGVSECRFLKIREGRIIKEIFPTGRVKHTEECTCGFASNKIIECACRDNSYTAKRPFVKLNVETDTAEIRLMCTETYLDTPRPDDGSITGPCESNGDKGSGGIKGGFVHQRMASKIGRWYSRTMSKTERMGMGLYVKYDGDPWADSDALALSGVMVSMEEPGWYSFGFEIKDKKCDVPCIGIEMVHDGGKETWHSAATAIYCLMGSGQLLWDTVTGVDMAL

SEQ ID NO: 28862 - protein, 466 aa, synthetic construct
  REGION 1..466: note = neuraminidase__InfluenzaB__AEP20281
MLPSTIQTLTLFLTSGGVLLSLYVSASLSYLLYSDILLKFSPTEITAPTMPLDCANASNVQAVNRSTTKGVTLLLPEPEWTYPRLSCPGSTFQKALLISPHRFGETKGNSAPLIIREPFIACGPNECKHFALTHYAAQPGGYYNGTRGDRNKLRHLISVKLGKIPTVENSIFHMAAWSGSACHDGKEWTYIGVDGPDNNALLKIKYGEAYTDTYHSYANNILRTQESACNCIGGNCYLMITDGSASGVSECRFLKIREGRIIKEIFPTGRVKHTEECTCGFASNKTIECACRDNSYTAKRPFVKLNVETDTAEIRLMCTETYLDTPRPDDGSITGPCESNGDKGSGGIKGGFVHQRMASKIGRWYSRTMSKTERMGMGLYVKYDGDPWADSDALALSGVMVSMEEPGWYSFGFEIKDKKCDVPCIGIEMVHDGGKETWHSAATAIYCLMGSGQLLWDTVTGVDMAL

SEQ ID NO: 28863 - protein, 466 aa, synthetic construct; identical to SEQ ID NO: 28635
  REGION 1..466: note = neuraminidase__InfluenzaB__AEP20292

SEQ ID NO: 28864 - protein, 466 aa, synthetic construct; identical to SEQ ID NO: 28627
  REGION 1..466: note = neuraminidase__InfluenzaB__AEP20303

SEQ ID NO: 28865 - protein, 466 aa, synthetic construct
  REGION 1..466: note = neuraminidase__InfluenzaB__AEP20314
MLPSTIQTLTLFLTSGGVLLSLYVSASLSYLLYSDILLKFSQTGITAPIMPLDCANASNVQAVNRSATKGVTLLLPEPEWTYPRLSCPGSTFQKALLISPHRFGETKGNSAPLIIREPFIACGPKECKHFALTHYAAQPGGYYNGTREDRNKLRHLISVKLGKIPTVENSIFHMAAWSGSACHDGREWTYIGVDGPDSNALLKIKYGEAYTDTYHSYAKNILRTQESACNCIGGDCYLMITDGPASGISECRFLKIREGRIIKEIFPTGRVKHTEECTCGFASNKTIECACRDNSYTAKRPFVKLNVETDTAEIRLMCTETYLDTPRPNDGSITGPCESNGDKGSGGIKGGFVHQRMASKIGRWYSRTMSKTKRMGMGLYVKYDGDPWTDSEALALSGVMISMEEPGWYSFGFEIKDKKCDVPCIGIEMVHDGGKTTWHSAATAIYCLMGSGQLLWDTVTGVDMAL

SEQ ID NO: 28866 - protein, 466 aa, synthetic construct
  REGION 1..466: note = neuraminidase__InfluenzaB__AEP20336
MLPSTIQTLTLFLTSGGVLLSLYVSASLSYLLYSDILLKFSPTEITAPTMPLDCANASNVQAVNRSATKGVTLLLPEPEWTYPRLSCPGSTFQKALLISPHRFGETKGNSAPLIIREPFIACGPNECKHFALTHYAAQPGGYYNGTRGDRNKLRHLISVKLGKIPTVENSIFHMAAWSGSACHDGKEWTYIGVDGPDNNALLKIKYGEAYTDTYHSYANNILRTQESACNCIGGNCYLMITDGSASGVSECRFLKIREGRIIKEIFPTGRVKHTEECTCGFASNKTIECACRDNSYTAKRPFVKLNVETDTAEIRLMCTETYLDTPRPDDGSITGPCESNGDKGSGGIKGGFVHQRMASKIGRWYSRTMSKTERMGMGLYVKYDGDPWADSDALTLSGVMVSMEEPGWYSFGFEIKDKKCDVPCIGIEMVHDGGKETWHSAATSIYCLMGSGQLLWDTVTGVDMAL

SEQ ID NO: 28867 - protein, 466 aa, synthetic construct
  REGION 1..466: note = neuraminidase__InfluenzaB__AEP20347
MLPSTIQTLTLFLTSGGVLLSLYVSASLSYLLYSDILLKFSQTEITAPIMPLDCANASNVQAVNRSATKGVTLLLPEPEWTYPRLSCPGSTFQKALLISPHRFGETKGNSAPLIIREPFIACGPTECKHFALTHYAAQPGGYYNGTREDRNKLRHLISVKLGKIPTVENSIFHMAAWSGSACHDGKEWTYIGVDGPDSNALLKIKYGEAYTDTYHSYAKNILRTQESACNCIGGDCYLMITDGPASGISECRFLKIREGRIIKEIFPTGRVKHTEECTCGFASNKTIECACRDNSYTAKRPFVKLNVETDTAEIRLMCTETYLDTPRPNDGSITGPCESDGDKGSGGIKGGFVHQRMASKIGRWYSRTMSKTKRMGMGLYVKYDGDPWTDSEALALSGVMVPMEEPGWYSFGFEIKDKKCDVPCIGIEMVHDGGKTTWHSAATAIYCLMGSGQLLWDTVTGVDMAL

SEQ ID NO: 28868 - protein, 466 aa, synthetic construct; identical to SEQ ID NO: 28867
  REGION 1..466: note = neuraminidase__InfluenzaB__AEP20358

SEQ ID NO: 28869 - protein, 466 aa, synthetic construct; identical to SEQ ID NO: 28867
  REGION 1..466: note = neuraminidase__InfluenzaB__AEP20369

SEQ ID NO: 28870 - protein, 466 aa, synthetic construct; identical to SEQ ID NO: 28867
  REGION 1..466: note = neuraminidase__InfluenzaB__AEP20380

SEQ ID NO: 28871 - protein, 466 aa, synthetic construct
  REGION 1..466: note = neuraminidase__InfluenzaB__AEP20391
MLPSTIQTLTLFLTSGGVLLSLYVSASLSYLLYSDILLKFSPTEITAPTMPLDCANASNVQAVNRSATKGVTLLLPEPEWTYPRLSCPGSTFQKALLISPHRFGETKGNSAPLIIREPFIACGPNECKHFALTHYAAQPGGYYNGTRGDRNRLRHLISVKLGKIPTVENSIFHMAAWSGSACHDGKEWTYIGVDGPDNNALLKIKYGEAYTDTYHSYANNILRTQESACNCIGGNCYLMITDGSASGVSECRFLKIREGRIIKEIFPTGRVKHTEECTCGFASNKTIECACRDNSYTAKRPFVKLNVETDTAEIRLMCTDTYLDTPRPDDGSITGPCESNGDKGSGGIKGGFVHQRMASKVGRWYSRTMSKTERMGMGLYVKYDGDPWADSDALAFSGVMVSMKEPGWYSFGFEIKDKKCDVPCIGIEMVHDGGKETWHSAATAIYCLMGSGQLLWDTVTGVDMAL

SEQ ID NO: 28872 - protein, 466 aa, synthetic construct
  REGION 1..466: note = neuraminidase__InfluenzaB__AEP20413
MLPSTIQTLTLFLTSGGVLLSLYVSALLSYLLYSDILLKFSPTEIIAPTMSLDCANASNVQAVNRSATKGVTFLLPEPEWTYPRLSCPGSTFQKALLISPHRFGETKGNSAPLIIREPFIACGPNECKHFALTHYAAQPGGYYNGTRGDRNKLRHLISVKLGKIPTVENSIFHMAAWSGSACHDGKEWTYIGVDGPDNDALLKVKYGEAYTDTYHSYANKILRTQESACNCIGGNCYLMITDGSASGVSECRFLKIREGRIIKEIFPTGRVKHTEECTCGFASNKTIECACRDNSYTAKRPFVKLNVETDTAEIRLMCTDTYLDTPRPDDGSITGPCESNGDKGSGGIKGGFVHQRMESKIGRWYSRTMSKTERMGMGLYVKYNGDPWADSDALAFSGVMVSMKEPGWYSFGFEIKDKKCDVPCIGIEMVHDGGKETWHSAATAIYCLMGSGQLLWDTVTGVDMAL

SEQ ID NO: 28873 - protein, 466 aa, synthetic construct; identical to SEQ ID NO: 28872
  REGION 1..466: note = neuraminidase__InfluenzaB__AEP20435

SEQ ID NO: 28874 - protein, 466 aa, synthetic construct; identical to SEQ ID NO: 28867
  REGION 1..466: note = neuraminidase__InfluenzaB__AEQ39031

SEQ ID NO: 28875 - protein, 466 aa, synthetic construct
  REGION 1..466: note = neuraminidase__InfluenzaB__AEQ39275
MLPSTIQTLTLFLTSGGVLLSLYVSASLSYLLYSDILLKFSPKEITAPTMPLDCANASNVQAVNHSATKGVTLLLPEPEWTYPRLSCPGSTFQKALLISPHRFGETKGNSAPLIIREPFIACGPNECKHFALTHYAAQPGGYYNGTRGDRNKLRHLISVKLGKIPTVENSIFHMAAWSGSACHDGKEWTYIGVDGPDNNALLKVKYGEAYTDTYHSYANKILRTQESACNCIGGNCYLMITDGSASGVSECRFLKIREGRIIKEIFPTGRVKHTEECTCGFASNKTIECACRDNSYTAKRPFVKLNVETDTAEIRLMCTDTYLDTPRPDDGSITGPCESNGDKGSGGIKGGFVHQRMESKIGRWYSRTMSKTERMGMGLYVKYDGDPWADSDALAFSGVMVSMKEPGWYSFGFEIKDKKCDVPCIGIEMVHDGGKETWHSAATAIYCLMGSGQLLWDTVTGVDMAL

SEQ ID NO: 28876 - protein, 466 aa, synthetic construct; identical to SEQ ID NO: 28875
  REGION 1..466: note = neuraminidase__InfluenzaB__AEQ39286

SEQ ID NO: 28877 - protein, 466 aa, synthetic construct; identical to SEQ ID NO: 28875
  REGION 1..466: note = neuraminidase__InfluenzaB__AEQ39297

SEQ ID NO: 28878 - protein, 466 aa, synthetic construct; identical to SEQ ID NO: 28875
  REGION 1..466: note = neuraminidase__InfluenzaB__AEQ39308

SEQ ID NO: 28879 - protein, 466 aa, synthetic construct; identical to SEQ ID NO: 28875
  REGION 1..466: note = neuraminidase__InfluenzaB__AEQ39319

SEQ ID NO: 28880 - protein, 466 aa, synthetic construct
  REGION 1..466: note = neuraminidase__InfluenzaB__AEQ39330
MLPSTIQTLTLFLTSGGVLLSLYVSASLSYLLYSDILLKFSPKEITAPTMPLDCANASNVQAVNHSATKGVTLLLPEPEWTYPRLSCPGSTFQKALLISPHRFGETKGNSAPLIIREPFIACGPNECKHFALTHYAAQPGGYYNGTRGDRNKLRHLISVKLGKIPTVENSIFHMAAWSGSACHDGKEWTYIGVDGPDNNALLKVKYGEAYTDTYHSYANKILRTQESACNCIGGNCYLMITDGSASGVSECRFLKIREGRIIKEIFPTGRVKHTEECTCGFASNKTIECACRDNSYTAKRPFVKLNVETDTAEIRLMCTDTYLDTPRPDDGSITGPCESNGDKGSGGIKGGFVHQRMESKIGRWYSRTMSKTERMGMGLYVKYDGDPWADSDALAFSGVMVSMKEPGWYSFGFEIKDKKCDVPCIGIEMVHDGGKETWHSAATAIYCLMGSGQLLWDTVTGVDIAL

SEQ ID NO: 28881 - protein, 466 aa, synthetic construct; identical to SEQ ID NO: 28875
  REGION 1..466: note = neuraminidase__InfluenzaB__AEQ39341

SEQ ID NO: 28882 - protein, 466 aa, synthetic construct; identical to SEQ ID NO: 28875
  REGION 1..466: note = neuraminidase__InfluenzaB__AEQ39352

SEQ ID NO: 28883 - protein, 466 aa, synthetic construct; identical to SEQ ID NO: 28875
  REGION 1..466: note = neuraminidase__InfluenzaB__AEQ39363

SEQ ID NO: 28884 - protein, 466 aa, synthetic construct; identical to SEQ ID NO: 28841
  REGION 1..466: note = neuraminidase__InfluenzaB__AEQ39374

SEQ ID NO: 28885 - protein, 466 aa, synthetic construct
  REGION 1..466: note = neuraminidase__InfluenzaB__AEQ39385
MLPSTIQTLTLFLTSGGVLLSLYVSASLSYLLYSDILLKFSPTEITAPTMPLDCANASNVQAVNRSATKGVTLLLPEPEWTYPRLSCPGSTFQKALLISPHRFGETKGNSAPLIIREPFIACGPKECKHFALTHYAAQPGGYYNGTRGDRNKLRHLISVKLGKIPTVENSIFHMAAWSGSACHDGKEWTYIGVDGPDSNALLKIKYGEAYTDTYHSYANNILRTQESACNCIGGNCYLMITDGSASGISECRFLKIREGRIIKEIFPTGRVKHTEECTCGFASNKTIECACRDNSYTAKRPFVKLNVETDTAEIRLMCTETYLDTPRPDDGSITGPCESNGDKGSGGIKGGFVHQRMTSKIGRWYSRTMSKTKRMGMGLYVKYDGDPWTDSDALALSGVMVSMEEPGWYSFGFEIKDKKCDVPCIGIEMVHDGGKETWHSAATAIYCLMGSGQLLWDTVTGVDMAL

SEQ ID NO: 28886 - protein, 466 aa, synthetic construct
  REGION 1..466: note = neuraminidase__InfluenzaB__AEQ39444
MLPSTIQTLTLFLTSGGVLLSLYVSASLSYLLYSDILLKFSQTEIIAPIMPLDCANASNVQAVNRSATKGVTLLLPEPEWTYPRLSCPGSTFQKALLISPHRFGETKGNSAPLIIREPFIACGPTECKHFALTHYAAQPGGYYNGTREDRNKLRHLISVKLGKIPTVENSIFHMAAWSGSACHDGKEWTYIGVDGPDSNALLKIKYGEAYTDTYHSYAKNILRTQESACNCIGGDCYLMITDGPASGISECRFLKIREGRIIKEIFPTGRVKHTEECTCGFASNKTIECACRDNSYTAKRPFVKLNVETDTAEIRLMCTETYLDTPRPNDGSITGPCESDGDKGSGGIKGGFVHQRMASKIGRWYSRTMSKTKRMGMGLYVKYDGDPWTDSEALALSGVMVSMEEPGWYSFGFEIKDKKCDVPCIGIEMVHDGGKTTWHSAATAIYCLMGSGQLLWDTVTGVDMAL

SEQ ID NO: 28887 - protein, 466 aa, synthetic construct; identical to SEQ ID NO: 28788
  REGION 1..466: note = neuraminidase__InfluenzaB__AEQ39455

SEQ ID NO: 28888 - protein, 466 aa, synthetic construct
  REGION 1..466: note = neuraminidase__InfluenzaB__AEQ39466
MLPSTIQTLTLFLTSGGVLLSLYVSASLSYLLYSDILLKFSPTEITAPTMPLDCANASNVQAVNRSATKGVTLLLPEPEWTYPRLSCPGSTFQKALLISPHRFGETKGNSAPLIIREPFIACGPNECKHFALTHYAAQPGGYYNGTRGDRNKLRHLISVKLGKIPTVENSIFHMAAWSGSACHDGKEWTYIGVDGPDNNALLKIKYGEAYTDTYHSYANNILRTQESACNCIGGNCYLMITDGSASGVSECRFLKIREGRIIKEIFPTGRVKHTEECTCGFASNKTIECACRDNSYTAKRPFVKLNVETDTAEIRLMCTDTYLDTPRPDDGSITGPCESNGDKGSGGIKGGFVHQRMASKVGRWYSRTMSKTERMGMGLYVKYDGDPWADSDALAFSGVMVSMKEPGWYSFGFEIKDKKCDVPCIGIEMVHDGGKETWHSAATAIYCLMGSGQLLWDTVTGVDMAL

SEQ ID NO: 28889 - protein, 466 aa, synthetic construct; identical to SEQ ID NO: 28875
  REGION 1..466: note = neuraminidase__InfluenzaB__AEQ39477

SEQ ID NO: 28890 - protein, 466 aa, synthetic construct
  REGION 1..466: note = neuraminidase__InfluenzaB__AEQ39488
MLPSTIQTLTLFLTSGGVLLSLYVSASLSYLLYSDILLKFSPTEITAPTMPLDCANASNVQAVNRSATKGVTLLLPEPEWTYPRLSCPGSTFQKALLISPHRFGETKGNSAPLIIREPFIACGPNECKHFALTHYAAQPGGYYNGTRGDRNKLRHLISVKLGKIPTVENSIFHMAAWSGSACHDGKEWTYIGVDGPDNNALLKVKYGEAYTDTYHSYANKILRTQESACNCIGGNCYLMITDGSASGVSECRFLKIREGRIIKEIFPTGRVKHTEECTCGFASNKTIECACRDNSYTAKRPFVKLNVETDTAEIRLMCTDTYLDTPRPNDGSITGPCESNGDKGSGGIKGGFVHQRMESRIGRWYSRTMSKTERMGMGLYVKYDGDPWTDSDALAFSGVMVSMKEPGWYSFGFEIKDKKCDVPCIGIEMVHDGGKETWHSAATAIYCLMGSGQLLWDTVTGVDMAL

SEQ ID NO: 28891 - protein, 466 aa, synthetic construct; identical to SEQ ID NO: 28841
  REGION 1..466: note = neuraminidase__InfluenzaB__AEQ39499

SEQ ID NO: 28892 - protein, 466 aa, synthetic construct; identical to SEQ ID NO: 28687
  REGION 1..466: note = neuraminidase__InfluenzaB__AEQ39510

SEQ ID NO: 28893 - protein, 466 aa, synthetic construct
  REGION 1..466: note = neuraminidase__InfluenzaB__AEQ49685
MLPSTIQTLTLFLTSGGVLLSLYVSASLSYLLYSDILLKFSPTEITAPTMPLDCANASNVQAVNRSATKGVTLLLPEPEWTYPRLSCPGSTFQKALLISPHRFGETKGNSAPLIIREPFIACGPNECKHFALTHYAAQPGGYYNGTRGDRNKLRHLISVKLGKIPTVENSIFHMAAWSGSACHDGKEWTYIGVDGPDNNALLKVKYGEAYTDTYHSYANKILRTQESACNCIGGNCYLMITDGSASGVSECRFLKIREGRIIKEIFPTGRVKHTEECTCGFASNKTIECACRDNSYTAKRPFVKLNVETDTAEIRLMCTDTYLDTPRPNDGSITGPCESDGDKGSGGIKGGFVHQRMESKIGRWYSRTMSKTERMGMGLYVKYDGDPWADSDALAFSGVMVSMKEPGWYSFGFEIKDKKCDVPCIGIEMVHDGGKETWHSAATAIYCLMGSGQLLWDTVTGVDMDL

SEQ ID NO: 28894 - protein, 466 aa, synthetic construct
  REGION 1..466: note = neuraminidase__InfluenzaB__AEQ49686
MLPSTIQTLTLFLTSGGVLLSLYVSASLSYLLYSDILLKFSPTEITAPTMPLDCANASNVQAVNRSATKGVTLLLPEPEWTYPRLSCPGSTFQKALLISPHRFGETKGNSAPLIIREPFIACGPNECKHFALTHYAAQPGGYYNGTRGDRNKLRHLISVKLGKIPTVENSIFHMAAWSGSACHDGKEWTYIGVDGPDNDALLKVKYGEAYTDTYHSYANKILRTQESACNCIGGNCYLMITDGSASGVSECRFLKIREGRIIKEIFPTGRVKHTEECTCGFASNKTIECACRDNSYTAKRPFVKLNVETDTAEIRLMCTDTYLDTPRPDDGSITGPCESNGDKGSGGIKGGFVHQRMESKIGRWYSRTMSKTERMGMGLYVKYDGDPWADSDALAFSGVMVSMKEPGWYSFGFEIKDKKCDVPCIGIEMVHDGGKETWHSAATAIYCLMGSGQLLWDTVTGVDMAL

SEQ ID NO: 28895 - protein, 466 aa, synthetic construct
  REGION 1..466: note = neuraminidase__InfluenzaB__AEQ49687
MLPSTIQTLTLFLTSGGVLLSLYVSALLSYLLYSDILLKFSPTEITAPTMSLDCANASNVQAVNRSATKGVTFLLPEPEWTYPRLSCPGSTFQKALLISPHRFGETKGNSAPLIIREPFIACGPNECKHFALTHYAAQPGGYYNGTRGDRNKLRHLISVKLGKIPTVENSIFHMAAWSGSACHDGKEWTYIGVDGPDNDALLKVKYGEAYTDTYHSYANKILRTQESACNCIGGNCYLMITDGSASGVSECRFLKIREGRIIKEIFPTGRVKHTEECTCGFASNKTIECACRDNSYTAKRPFVKLNVETDTAEIRLMCTDTYLDTPRPDDGSITGPCESNGDKGSGGIKGGFVHQRMESKIGRWYSRTMSKTERMGMGLYVKYDGDPWADSDALAFSGVMVSMKEPGWYSFGFEIKDKKCDVPCIGIEMVHDGGKETWHSAATAIYCLMGSGQLLWDTVTGVDMAL

SEQ ID NO: 28896 - protein, 466 aa, synthetic construct
  REGION 1..466: note = neuraminidase__InfluenzaB__AEQ49688
MLPSTIQTLTLFLTSGGVLLSLYVSASLSYLLYSDILLKFSRTEITAPIMPLGCANASNVQAVNRSATKGVTLLLPEPEWTYPRLSCPGSTFQKALLISPHRFGETKGNSAPLIIREPFIACGPKECKHFALTHYAAQPGGYYNGTREDRNKLRHLISVKLGKIPTVENSIFHMAAWSGSACHDGREWTYIGVDGPDSNALLKIKYGEAYTDTYHSYAKNILRTQESACNCIGGDCYLMITDGPASGISECRFLKIREGRIIKEIFPTGRVKHTEECTCGFASNKTIECACRDNSYTAKRPFVKLNVETDTAEIRLMCTETYLDTPRPNDGSITGPCESNGDKGSGGIKGGFVHQRMASKIGRWYSRTMSKTKRMGMGLYVKYDGDPWTDSEALALSGVMVSMEEPGWYSFGFEIKDKKCDVPCIGIEMVHDGGKTTWHSAATAIYCLMGSGQLLWDTVTGVNMTL

SEQ ID NO: 28897 - protein, 466 aa, synthetic construct
  REGION 1..466: note = neuraminidase__InfluenzaB__AEQ49691
MLPSTIQTLTLFLTSGGVLLSLYVSALLSYLLYSDILLKFSPTEITAPTMSLDCANASNVQAVNRSATKGVTFLLPEPEWTYPRLSCPGSTFQKALLISPHRFGETKGNSAPLIIREPFIACGPNECKHFALTHYAAQPGGYYNGTRGDRNKLRHLISVKLGKIPTVENSIFHMAAWSGSACHDGKEWTYIGVDGPDNDALLKVKYGEAYTDTYHSYANKILRTQESACNCIGGNCYLMITDGSASGVSECRFLKIREGRIIKEIFPTGRVKHTEECTCGFASNKTIECACRDNSYTAKRPFVKLNVETDTAEIRLMCTDTYLDTPRPDDGSITGPCESNGDRGSGGIKGGFVHQRMESKIGRWYSRTMSKTERMGMGLYVKYDGDPWADSDALAFSGVMVSMKEPGWYSFGFEIKDKKCDVPCIGIEMVHDGGKETWHSAATAIYCLMGSGQLLWDTVTGVDMAL

SEQ ID NO: 28898 - protein, 466 aa, synthetic construct
  REGION 1..466: note = neuraminidase__InfluenzaB__AEQ49692
MLPSTIQTLTLFLTSGGVLLSLYVSASLSYLLYSDILLKFSPTETTAPTMSLDCANASNVQAVNRSATKGVTFLLPEPEWTYPRLSCPGSTFQKALLISPHRFGETKGNSAPLIIREPFIACGPNECKHFALTHYAAQPGGYYNGTRGDRNKLRHLISVKLGKIPTVENSIFHMAAWSGSACHDGKEWTYIGVDGPDNDALLKVKYGEAYTDTYHSYANKILRTQESACNCIGGNCYLMITDGSASGVSECRFLKIREGRIIKEIFPTGRVKHTEECTCGFASNKTIECACRDNSYTAKRPFVKLNVETDTAEIRLMCTDTYLDTPRPDDGSITGPCESNGDKGSGGIKGGFVHQRMESKIGRWYSRTMSKTERMGMGLYVKYDGDPWADSDALAFSGVMVSMKEPGWYSFGFEIKDKKCDVPCIGIEMVHDGGKETWHSAATAIYCLMGSGQLLWDTVTGVDMAL

SEQ ID NO: 28899 - protein, 466 aa, synthetic construct
  REGION 1..466: note = neuraminidase__InfluenzaB__AEQ49693
MLPSTIQTLTLFLTSGGVLLSLYVSASLSYLLYSDILLKFSPTEITAPTMPLDCANASNVQAVNRSATKGVTLLLPEPEWTYPRLSCPGSTFQKALLISPHRFGETKGNSAPLIIREPFIACGPNECKHFALTHYAAQPGGYYNGTRGDRNKLRHLISVKLGKIPTVENSIFHMAAWSGSACHDGKEWTYIGVDGPDNNALLKVKYGEAYTDTYHSYANKILRTQESACNCIGGNCYLMITDGSASGVSECRFLKIREGRIIKEIFPTGRVKHTEECTCGFASNRTIECACRDNSYTAKRPFVKLNVETDTAEIRLMCTDTYLDTPRPNDGSITGPCESDGDKGSGGIKGGFVHQRMESKIGRWYSRTMSKTERMGMGLYVKYDGDPWADSDALAFSGVMVSMKEPGWYSFGFEIKDKKCDVPCIGIEMVHDGGKETWHSAATAIYCLMGSGQLLWDTVTGVDMAL

SEQ ID NO: 28900 - protein, 466 aa, synthetic construct
  REGION 1..466: note = neuraminidase__InfluenzaB__AEQ49695
MLPSTIQTLTLFLTSGGVLLSLYVSASLSYLLYSDILLKFSPTEITAPTMPLDCANASNVQAVNRSATKGVTLLLPEPEWTYPRLSCPGSTFQKALLISPHRFGETKGNSAPLIIREPFIACGPNECKHFALTHYAAQPGGYYNGTRGDRNKLRHLISVKLGKIPTVENSIFHMAAWSGSACHDGKEWTYIGVDGPDNNALLKVKYGEAYTDTYHSYANKILRTQESACNCIGGNCYLMITDGSASGVSECRFLKIREGRIIKEIFPTGRVKHTEECTCGFASNKTIECACRDNSYTAKRPFVKLNVETDTAEIRLMCTDTYLDTPRPNDGSITGPCESDGDKGSGGIKGGFVHQRMESKIGRWYSRTMSKTERMGMGLYVKYDGDPWADSDALAFSGVMVSMKEPGWYSFGFEIKDKKCDVPCIGIEMVHDGGKETWHSAATAIYCLMGSGQLLWDTVTGVDMAL

SEQ ID NO: 28901 - protein, 466 aa, synthetic construct
  REGION 1..466: note = neuraminidase__InfluenzaB__AEQ49697
MLPSTIQTLTLFLTSGGVLLSLYVSASLSYLLYSDILLKFSPTEITAPTMSLDCANASNVQAVNRSATKGVTFLLPEPEWTYPRLSCPGSTFQKALLISPHRFGETKGNSAPLIIREPFIACGPNECKHFALTHYAAQPGGYYNGTRGDRNKLRHLISVKLGKIPTVENSIFHMAAWSGSACHDGKEWTYIGVDGPDNDALLKVKYGEAYTDTYHSYANKILRTQESACNCIGGNCYLMITDGSASGVSECRFLKIREGRIIKEIFPTGRVKHTEECTCGFASNKTIECACRDNSYTAKRPFVKLNVETDTAEIRLMCTDTYLDTPRPDDGSITGPCESNGDKGSGGIKGGFVHQRMESKIGRWYSRTMSKTERMGMGLYVKYDGDPWADSDALAFSGVMVSMKEPGWYSFGFEIKDKKCDVPCIGIEMVHDGGKETWHSAATAIYCLMGSGQLLWDTVTGVDMAL

SEQ ID NO: 28902 - protein, 466 aa, synthetic construct; identical to SEQ ID NO: 28901
  REGION 1..466: note = neuraminidase__InfluenzaB__AEQ49698

SEQ ID NO: 28903 - protein, 466 aa, synthetic construct; identical to SEQ ID NO: 28901
  REGION 1..466: note = neuraminidase__InfluenzaB__AEQ49699

SEQ ID NO: 28904 - protein, 466 aa, synthetic construct; identical to SEQ ID NO: 28901
  REGION 1..466: note = neuraminidase__InfluenzaB__AEQ49700

SEQ ID NO: 28905 - protein, 466 aa, synthetic construct; identical to SEQ ID NO: 28898
  REGION 1..466: note = neuraminidase__InfluenzaB__AEQ49701

SEQ ID NO: 28906 - protein, 466 aa, synthetic construct; identical to SEQ ID NO: 28901
  REGION 1..466: note = neuraminidase__InfluenzaB__AEQ49702

SEQ ID NO: 28907 - protein, 466 aa, synthetic construct; identical to SEQ ID NO: 28898
  REGION 1..466: note = neuraminidase__InfluenzaB__AEQ49703

SEQ ID NO: 28908 - protein, 466 aa, synthetic construct; identical to SEQ ID NO: 28901
  REGION 1..466: note = neuraminidase__InfluenzaB__AEQ49705

SEQ ID NO: 28909 - protein, 466 aa, synthetic construct
  REGION 1..466: note = neuraminidase__InfluenzaB__AEQ49706
MLPSTIQMLTLFLTLGGVLLSLYVSASLSYLLYLDILLKFPPTEITAPTMPLDCANASNVQAVNRSATKGVTFLLPEPEWTYPRLSCPGSTFQKALLISPHRFGETKGNSAPLIIREPFIACGPKECKHFALTHYAAQPGGYYNGTRGDRNKLRHLISVKLGKIPTVENSIFHMAAWSGSACHDGKEWTYIGVDGPDNNALLKIKYGEAFTDTYHSYANNILRTQESACNCIGGNCYLMITDGSASGVSECRFLKIREGRIIKEIFPTGRVKHTEECTCGFASNKTIECACRDNSYTAKRPFVKLNVETDTAEIRLMCTDTYLDTPRPDDGSITGPCESNGDKGSGGIKGGFVHQRMASKIGRWYSRTMSKTERMGMGLYVKYDGDPWADSDALAFSGVMVSMKEPGWYSFGFEIKDKKCDVPCIGIEMVHDGGKETWHSAATAIYCLMGSGQLLWDTVTGVNMAL

SEQ ID NO: 28910 - protein, 466 aa, synthetic construct; identical to SEQ ID NO: 28901
  REGION 1..466: note = neuraminidase__InfluenzaB__AEQ49707

SEQ ID NO: 28911 - protein, 466 aa, synthetic construct; identical to SEQ ID NO: 28901
  REGION 1..466: note = neuraminidase__InfluenzaB__AEQ49708

SEQ ID NO: 28912 - protein, 466 aa, synthetic construct
  REGION 1..466: note = neuraminidase__InfluenzaB__AEQ49709
MLPSTIQTLTLFLTSGGVLLSLYVSALLSYLLYSDILLKFSPTEITAPTMSLDCANASNVQAVNRSATKGVTFLLPEPEWTYPRLSCPGSTFQKALLISPHRFGETKGNSAPLIIREPFIACGPNECKHFALTHYAAQPGGYYNGTRGDRNKLRHLISVKLGKIPTVENSIFHMAAWSGSACHDGKEWTYIGVDGPDNDALLKVKYGEAYTDTYHSYANKILRTQESACNCIGGNCYLMITDGSASGVSECRFLKIREGRIIKEIFPTGRVKHTEECTCGFASNKTIECACRDNSYTAKRPFVKLNVETDTAEIRLMCTDTYLDTPRPDDGSITGPCESNGDKGSGGIKGGFVHQRMESKIGRWYSRTMSKTERMGMGLYVKYDGDPWADSDALAFSGVMVSMKEPGWYSFGFEIKDKKCDVPCIGIEMVHDGGKETWHSAATAIYCLMGSGHLLWDTVTGVDMAL

SEQ ID NO: 28913 - protein, 466 aa, synthetic construct; identical to SEQ ID NO: 28875
  REGION 1..466: note = neuraminidase__InfluenzaB__AEQ49710

SEQ ID NO: 28914 - protein, 466 aa, synthetic construct; identical to SEQ ID NO: 28872
  REGION 1..466: note = neuraminidase__InfluenzaB__AER27042

SEQ ID NO: 28915 - protein, 466 aa, synthetic construct; identical to SEQ ID NO: 28900
  REGION 1..466: note = neuraminidase__InfluenzaB__AER27053

SEQ ID NO: 28916 - protein, 466 aa, synthetic construct; identical to SEQ ID NO: 28872
  REGION 1..466: note = neuraminidase__InfluenzaB__AER27064

SEQ ID NO: 28917 - protein, 466 aa, synthetic construct; identical to SEQ ID NO: 28875
  REGION 1..466: note = neuraminidase__InfluenzaB__AET43128

SEQ ID NO: 28918 - protein, 466 aa, synthetic construct; identical to SEQ ID NO: 28875
  REGION 1..466: note = neuraminidase__InfluenzaB__AET43139

SEQ ID NO: 28919 - protein, 466 aa, synthetic construct
  REGION 1..466: note = neuraminidase__InfluenzaB__AET43150
MLPSTIQTLTLFLTSGGVLLSLYVSASLSYLLYSDILLKFSPKEITAPTMPLDCANASNVQAVNHSATKGVTLLLPEPEWTYPRLSCPGSTFQKALLISPHRFGETKGNSAPLIIREPFIACGPNECKHFALTHYAAQPGGYYNGTRGDRNKLRHLISVKLGKIPTVENSIFHMAAWSGSACHDGKEWTYIGVDGPDNNALLKVKYGEAYTDTYHSYANKILRTQESACNCIGGNCYLMITDGSASGVSECRFLKIREGRIIKEIFPTGRVKHTEECTCGFASNKTIECACRDNSYTAKRPFVKLNVETDTAEIRLMCTDTYLDTPRPDDGSITGPCESNGDKGSGGIKGGFVHQRMESKIGRWYSRTMSKTERMGMGLYVKYDGDPWADSDALTFSGVMVSMKEPGWYSFGFEIKDKKCDVPCIGIEMVHDGGKETWHSAATAIYCLMGSGQLLWDTVTGVDMAL

SEQ ID NO: 28920 - protein, 466 aa, synthetic construct; identical to SEQ ID NO: 28875
  REGION 1..466: note = neuraminidase__InfluenzaB__AET43161

SEQ ID NO: 28921 - protein, 466 aa, synthetic construct; identical to SEQ ID NO: 28875
  REGION 1..466: note = neuraminidase__InfluenzaB__AET43172

SEQ ID NO: 28922 - protein, 466 aa, synthetic construct; identical to SEQ ID NO: 28875
  REGION 1..466: note = neuraminidase__InfluenzaB__AET43183

SEQ ID NO: 28923 - protein, 466 aa, synthetic construct; identical to SEQ ID NO: 28875
  REGION 1..466: note = neuraminidase__InfluenzaB__AET43194

SEQ ID NO: 28924 - protein, 466 aa, synthetic construct; identical to SEQ ID NO: 28875
  REGION 1..466: note = neuraminidase__InfluenzaB__AET43216

SEQ ID NO: 28925 - protein, 466 aa, synthetic construct; identical to SEQ ID NO: 28875
  REGION 1..466: note = neuraminidase__InfluenzaB__AET43227

SEQ ID NO: 28926 - protein, 466 aa, synthetic construct
  REGION 1..466: note = neuraminidase__InfluenzaB__AET50947
MLPSTIQTLTLFLTSGGVLLSLYVSASLSYLLYSDILLKFSPKEITAPTMPLDCANASNVQAVNHSATKGVTLLLPEPEWTYPRLSCPGSTFQKALLISPHRFGETKGNSAPLIIREPFIACGPNECKHFALTHYAAQPGGYYNGTRGDRNKLRHLISVKLGKIPTVENSIFHMAAWSGSACHDGKEWTYIGVDGPDNNALLKVKYGEAYTDTYHSYANKILRTQESACNCIGGNCYLMITDGSASGVSECRFLKIREGRIIKEIFPTGRVKHTEECTCGFASNKTIECACRDNSYTAKRPFVKLNVETDTAEIRLMCTDTYLDTPRPDDGSITGPCESNGDKGSGGIKGGFVHQRMESKIGRWYSRTMSKTERMGMGLYVKYDGDPWADSDALAFSGVMISMKEPGWYSFGFEIKDKKCDVPCIGIEMVHDGGKETWHSAATAIYCLMGSGQLLWDTVTGVDMAL

SEQ ID NO: 28927 - protein, 466 aa, synthetic construct
  REGION 1..466: note = neuraminidase__InfluenzaB__AET50958
MLPSTIQTLTLFLTSGGVLLSLYVSASLSYLLYSDILLKFSPKEITAPTMPLDCANASNVQAVNHSATKGVTLLLPELEWTYPRLSCPGSTFQKALLISPHRFGETKGNSAPLIIREPFIACGPNECKHFALTHYAAQPGGYYNGTRGDRNKLRHLISVKLGKIPTVENSIFHMAAWSGSACHDGKEWTYIGVDGPDNNALLKVKYGEAYTDTYHSYANKILRTQESACNCIGGNCYLMITDGSASGVSECRFLKIREGRIIKEIFPTGRVKHTEECTCGFASNKTIECACRDNSYTAKRPFVKLNVETDTAEIRLMCTDTYLDTPRPDDGSITGPCESNGDKGSGGIKGGFVHQRMESKIGRWYSRTMSKTERMGMGLYVKYDGDPWADSDALAFSGVMVSMKEPGWYSFGFEIKDKKCDVPCIGIEMVHDGGKETWHSAATAIYCLMGSGQLLWDTVTGVDMAL

SEQ ID NO: 28928 - protein, 466 aa, synthetic construct; identical to SEQ ID NO: 28875
  REGION 1..466: note = neuraminidase__InfluenzaB__AET50969

SEQ ID NO: 28929 - protein, 466 aa, synthetic construct; identical to SEQ ID NO: 28875
  REGION 1..466: note = neuraminidase__InfluenzaB__AET50980

SEQ ID NO: 28930 - protein, 466 aa, synthetic construct; identical to SEQ ID NO: 28875
  REGION 1..466: note = neuraminidase__InfluenzaB__AET74259

SEQ ID NO: 28931 - protein, 466 aa, synthetic construct; identical to SEQ ID NO: 28875
  REGION 1..466: note = neuraminidase__InfluenzaB__AET74270

SEQ ID NO: 28932 - protein, 466 aa, synthetic construct; identical to SEQ ID NO: 28926
  REGION 1..466: note = neuraminidase__InfluenzaB__AET74281

SEQ ID NO: 28933 - protein, 466 aa, synthetic construct; identical to SEQ ID NO: 28875
  REGION 1..466: note = neuraminidase__InfluenzaB__AET74292

SEQ ID NO: 28934 - protein, 466 aa, synthetic construct; identical to SEQ ID NO: 28875
  REGION 1..466: note = neuraminidase__InfluenzaB__AET74303

SEQ ID NO: 28935 - protein, 466 aa, synthetic construct; identical to SEQ ID NO: 28875
  REGION 1..466: note = neuraminidase__InfluenzaB__AET74314

SEQ ID NO: 28936 - protein, 466 aa, synthetic construct; identical to SEQ ID NO: 28875
  REGION 1..466: note = neuraminidase__InfluenzaB__AET74333

SEQ ID NO: 28937 - protein, 466 aa, synthetic construct
  REGION 1..466: note = neuraminidase__InfluenzaB__AET74344
MLPSTIQTLTLFLTSGGVLLSLYVSASLSYLLYSDILLKFSPKEITAPTMPLDCANASNVQAVNHSATKGVTLLLPEPEWTYPRLSCPGSTFQKALLISPHRFGETKGNSAPLIIREPFIACGPNECKHFALTHYAAQPGGYYNGTRGDRNKLRHLISVKLGKIPTVENSIFHMAAWSGSACHDGKEWTYIGVDGPDNNALLKVKYGEAYTDTYHSYANKILRTQESACNCIGGNCYLMITDGSASGVSECRFLKIREGRIIKEIFPTGRVKHTEECTCGFASNKTIECACRDNSYTAKRPFVKLNVEADTAEIRLMCTDTYLDTPRPDDGSITGPCESNGDKGSGGIKGGFVHQRMESKIGRWYSRTMSKTERMGMGLYVKYDGDPWADSDALAFSGVMVSMKEPGWYSFGFEIKDKKCDVPCIGIEMVHDGGKETWHSAATAIYCLMGSGQLLWDTVTGVDMAL

SEQ ID NO: 28938 - protein, 466 aa, synthetic construct; identical to SEQ ID NO: 28875
  REGION 1..466: note = neuraminidase__InfluenzaB__AET74355

SEQ ID NO: 28939 - protein, 467 aa, synthetic construct
  REGION 1..467: note = neuraminidase__InfluenzaB__AEY75594
MLPSTIQMLTLFLTSGGVLLSLYVSASLSYLLYSDILLKFSPTEITAPTMPLDCANASNVHAVNRSATKGVTFLLLPEPEWTYPRLSCPGSTFQKALLISPHRFGETKGNSAPLIIREPFIACGPNECKHFALTHYAAQPGGYYNGTRGDRNKLRHLISVKLGKIPTVENSIFHMAAWSGSACHDGKEWTYIGVDGPDNNALLKIKYGEAYTDTYHSYANNILRTQESACNCIGGNCYLMITDGSASGVSECRFLKIREGRIIKEIFPTGRVKHTEECTCGFASNKTIECACRDNSYTAKRPFVKLNVETDTAEIRLMCTDTYLDTPRPDDGSITGPCESNGDKGSGGTKGGFVHQRMASKIGRWYSRTMSKTERKGMGLYVKYDGDPWTDSDALAFRGVMVSMKEPGWYSFGFEIKDKKCDVPCIGIEMVHDGGKETWHSAATAIYCLMGSGQLLWDTVTGVDMAL

SEQ ID NO: 28940 - protein, 466 aa, synthetic construct
  REGION 1..466: note = neuraminidase__InfluenzaB__AFA45223
MLPSTIQTLTLFLTSGGVLLSLYVSALLSYLLYSDILPKFSPTEITAPTMSLDCANASNVQAVNRSATKGVTFLLSEPEWTYPRLSCPGSTFQKALLISPHRFGETKGNSAPLIIREPFIACGPNECKHFALTHYAAQPGGYYNGTRGDRNKLRHLISVKLGKIPTVENSIFHMAAWSGSACHDGKEWTYIGVDGPDNDALLKVKYGEAYTDTYHSYANKILRTQESACNCIGGNCYLMITDGSASGVSECRFLKIREGRIIKEIFPTGRVKHTEECTCGFASNKTIECACRDNSYTAKRPFVKLNVETDTAEIRLMCTDTYLDTPRPDDGSITGPCESNGDKGSGGIKGGFVHQRMESKIGRWYSRTMSKTERMGMGLYVKYDGDPWADSDALAFSGVMVSMKEPGWYSFGFEIKDKKCDVPCIGIEMVHDGGKETWHSAATAIYCLMGSGQLLWDTVTGVDMAL

SEQ ID NO: 28941 - protein, 466 aa, synthetic construct
  REGION 1..466: note = neuraminidase__InfluenzaB__AFA45226
MLPSTIQTLTLFLTSGGVLLSLYVSASLSYLLYSDILLKFSPTETTAPTMSLDCANASNVQAVNRSATKGVTFLLPEPEWTYPRLSCPGSTFQKALLISPHRFGETKGNSAPLIIREPFIACGPNECKHFALTHYAAQPGGYYNGTRGDRNKLRHLISVKLGKVPTVENSIFHMAAWSGSACHDGKEWTYIGVDGPDNDALLKVKYGEAYTDTYHSYANKILRTQESACNCIGGNCYLMITDGSASGVSECRFLKIREGRIIKEIFPTGRVKHTEECTCGFASNKTIECACRDNSYTAKRPFVKLNVETDTAEIRLMCTDTYLDTPRPDDGSITGPCESNGDKGSGGIKGGFVHQRMESKIGRWYSRTMSKTERMGMGLYVKYDGDPWADSDALAFSGVMVSMKEPGWYSFGFEIKDKKCDVPCIGIEMVHDGGKGTWHSAATAIYCLMGSGQLLWDTVTGVDMAL

SEQ ID NO: 28942 - protein, 466 aa, synthetic construct
  REGION 1..466: note = neuraminidase__InfluenzaB__AFA45229
MLPSTIQTLTLFLTSGGVLLSLYVSALLSYLLYSDILLKFSPTEITAPTMPLDCANASNVQAVNRSATKGVTFLLPEPEWTYPRLSCPGSTFQKALLISPHRFGETKGNSAPLIIREPFIACGPNECKHFALTHYAAQPGGYYNGTRGDRNKLRHLISVKLGKIPTVENSIFHMAAWSGSACHDGKEWTYIGVDGPDNDALLKVKYGEAYTDTYHSYANKILRTQESACNCIGGNCYLMITDGSASGVSECRFLKIREGRIIKEIFPTGRVKHTEECTCGFASNKTIECACRDNSYTAKRPFVKLNVETDTAEIRLMCTDTYLDTPRPDDGSITGPCESNGDKGSGGIKGGFVHQRMESKIGRWYSRTMSKTERMGMGLYVKYDGDPWADSDALAFSGVMVSMKEPGWYSFGFEIKDKKCDVPCIGIEMVHDGGKETWHSAATAIYCLMGSGQLLWDTVTGVDMAL

SEQ ID NO: 28943 - protein, 466 aa, synthetic construct; identical to SEQ ID NO: 28895
  REGION 1..466: note = neuraminidase__InfluenzaB__AFA45235

SEQ ID NO: 28944 - protein, 466 aa, synthetic construct
  REGION 1..466: note = neuraminidase__InfluenzaB__AFA45238
MLPSTIQTLTLFLTSGGVLLSLYVSASLSYLLYSDILLKFSPTKTTAPTMSLDCANASNVQAVNRSATKGVTFLLPEPEWTYPRLSCPGSTFQKALLISPHRFGETKGNSAPLIIREPFIACGPNECKHFALTHYAAQPGGYYNGTRGDRNKLRHLISVKLGKIPTVENSIFHMAAWSGSACHDGKEWTYIGVDGPDNDALLKVKYGEAYTDTYHSYANKILRTQESACNCIGGNCYLMITDGSASGVSECRFLKIREGRIIKEIFPTGRVKHTEECTCGFASNKTIECACRDNSYTAKRPFVKLNVETDTAEIRLMCTDTYLDTPRPDDGSITGPCESNGDKGSGGIKGGFVHQRMESKIGRWYSRTMSKTERMGMGLYVKYDGDPWADSDALAFSGVMVSMKEPGWYSFGFEIKDKKCDVPCIGIEMVHDGGKETWHSAATAIYCLMGSGQLLWDTVTGVDMAL

SEQ ID NO: 28945 - protein, 466 aa, synthetic construct
  REGION 1..466: note = neuraminidase__InfluenzaB__AFA45241
MLPSTIQTLTLFLTSGGVLLSLYVSASLSYLLYSDILLKFSPTEITAPTMPLDCANASNVQAVNRSATKGVIFLLPEPEWTYPRLSCPGSTFQKALLISPHRFGETKGNSAPLIIREPFIACGPNECKHFALTHYAAQPGGYYNGTRGDRNKLRHLISVKLGKIPTVENSIFHMAAWSGSACHDGKEWTYIGVDGPDNNALLKVKYGEAYTDTYHSYANKILRTQESACNCIGGNCYLMITDGSASGVSECRFLKIREGRIIKEIFPTGRVKHTEECTCGFASNKTIECACRDNSYTAKRPFVKLNVETDTAEIRLMCTDTYLDTPRPDDGSITGPCESNGDKGSGGIKGGFVHQRMESKIGRWYSRTMSKTERMGMGLYVKYDGDPWADSDALTFSGVMVSMKEPGWYSFGFEIKDKKCDVPCIGIEMVHDGGKETWHSAATAIYCLMGSGQLLWDTVTGVDMAL

SEQ ID NO: 28946 - protein, 466 aa, synthetic construct
  REGION 1..466: note = neuraminidase__InfluenzaB__AFA45244
MLPSTIQTLTLFLTSGGVLLSLYVSASLSYLLYSDILLKFSPTETTAPTMSLDCANASNVQAVNRSATKGVTFLLPEPEWTYPRLSCPGSTFQKALLISPHRFGETKGNSAPLIIREPFIACGPNECKHFALTHYAAQPGGYYNGTRGDRNKLRHLISVKLGKIPTVENSIFHMAAWSGSACHDGKEWTYIGVDGPDNDALLKVKYGEAYTDTYHSYANKILRTQESACNCIGGNCYLMITDGSASGVSECRFLKIREGRIIKEIFPTGRVKHTEECTCGFASNKTIECACRDNSYTAKRPFVKLNVETDTAEIRLMCTDTYLDTPRPDDGSITGPCESNGDKGSGGIKGGFVHQRMESKIGRWYSRTMSKTERMGMGLYVKYDGDPWADSDALAFSGVMVSMKEPGWYSFGFEIKDKKCDVPCIGIEMVHDGGKKTWHSAATAIYCLMGSGQLLWDTVTGVDMAL

SEQ ID NO: 28947 - protein, 466 aa, synthetic construct
  REGION 1..466: note = neuraminidase__InfluenzaB__AFA45247
MLPSTIQTLTLFLTSGGVLLSLYVSASLSYLLYSDILLKFSTTEITAPTMPLDCANASNVQAVNRSATKGVTLLLPEPEWTYPRLSCPGSTFQKALLISPHRFGETKGNSAPLIIREPFIACGPNECKHFALTHYAAQPGGYYNGTRGDRNKLRHLISVKLGKIPTVENSIFHMAAWSGSACHDGKEWTYIGVDGPDNNALLKVKYGEAYTDTYHSYANKILRTQESACNCIGGNCYLMVTDGSASGVSECRFLKIREGRIIKEIFPTGRVKHTEECTCGFASNKTIECACRDNSYTAKRPFVKLNVETDTAEIRLMCTDTYLDTPRPDDGSITGPCESNGDKGSGGIKGGFVHQRMESKIGRWYSRTMSKTERMGMGLYVKYDGDPWADSDALVFSGVMVSMKEPGWYSFGFEIKDKKCDVPCIGIEMVHDGGKETWHSAATAIYCLMGSGQLLWDTVTGVDMAL

SEQ ID NO: 28948 - protein, 466 aa, synthetic construct; identical to SEQ ID NO: 28898
  REGION 1..466: note = neuraminidase__InfluenzaB__AFA45250

SEQ ID NO: 28949 - protein, 466 aa, synthetic construct
  REGION 1..466: note = neuraminidase__InfluenzaB__AFA45253
MLPSTIQTLTLFLTSGGVLLSLYVSALLSYLLYSDILLKFSPTEITAPTMSLDCANASNVQAVNRSATKGVTFLLPEPEWTYPRLSCPGSTFQKALLISPHRFGETKGNSAPLIIREPFIACGPNECKHFALTHYAAQPGGYYNGTRGDRNKLRHLISVKLGKIPTVENSIFHMAAWSGSACHDGKEWTYIGVDGPDNDALLKVKYGEAYTDTYHSYANKILRTQESACNCIGGNCYLMITDGSASGVSECRFLKIREGRIIKEIFPTGRVKHTEECTCGFASNKTIECVCRDNSYTAKRPFVKLNVETDTAEIRLMCTDTYLDTPRPDDGSITGPCESNGDKGSGGIKGGFVHQRMESKIGRWYSRTMSKTERMGMGLYVKYDGDPWADSDALAFSGVMVSMKEPGWYSFGFEIKDKKCDVPCIGIEMVHDGGKETWHSAATAIYCLMGSGQLLWDTVTGVDMAL

SEQ ID NO: 28950 - protein, 466 aa, synthetic construct
  REGION 1..466: note = neuraminidase__InfluenzaB__AFB77645
MLPSTIQTLTLFLTSGGVLLSLYVSASLSYLLYSDILLKFSPTEITAPAMPLDCANASNVQAVNRSATKGVTLLLPEPEWTYPRLSCPGSTFQKALLISPHRFGETKGNSAPLIIREPFIACGPNECKHFALTHYAAQPGGYYNGTRGDRNKLRHLISVKLGKIPTVENSIFHMAAWSGSACHDGKEWTYIGVDGPDNNALLKVKYGEAYTDTYHSYANKILRTQESACNCIGGNCYLMITDGSASGVSECRFLKIREGRIIKEIFPTGRVKHTEECTCGFASNKTIECACRDNSYTAKRPFVKLNVETDTAEIRLMCTDTYLDTPRPNDGSITGPCESDGDKGSGGIKGGFVHQRMESKIGRWYSRTMSKTERMGMGLYVKYDGDPWADSDALVFSGVMVSMKEPGWYSFGFEIKDKKCDVPCIGIEMVHDGGKETWHSAATAIYCLMGSGQLLWDTVTGVDMAL

SEQ ID NO: 28951 - protein, 466 aa, synthetic construct
  REGION 1..466: note = neuraminidase__InfluenzaB__AFB77647
MLPSTIQTLTLFLTSGGVLLSLYVSASLSYLLYSDILLKFSPTEITAPAIPLDCANASNVQAVNRSATKGVTLLLPEPEWTYPRLSCPGSTFQKALLISPHRFGETKGNSAPLIIREPFIACGPNECKHFALTHYAAQPGGYYNGTRGDRNKLRHLISVKLGKIPTVENSIFHMAAWSGSACHDGKEWTYIGVDGPDNNALLKVKYGEAYTDTYHSYANKILRTQESACNCIGGNCYLMITDGSASGVSECRFLKIREGRIIKEIFPTGRVKHTEECTCGFASNKTIECACRDNSYTAKRPFVKLNVETDTAEIRLMCTDTYLDTPRPNDGSITGPCESDGDKGSGGIKGGFVHQRMESKIGRWYSRTMSKTERMGMGLYVKYDGDPWADSDALAFSGVMVSMKEPGWYSFGFEIKDKKCDVPCIGIEMVHDGGKETWHSAATAIYCLMGSGQLLWDTVTGVDMAL

SEQ ID NO: 28952 - protein, 466 aa, synthetic construct
  REGION 1..466: note = neuraminidase__InfluenzaB__AFB77649
MLPSTIQTLTLFLTSGGVLLSLYVSASLSYLLYSDILLKFSPTEITAPAMPLDCANASNVQAVNRSATKGVTLLLPEPEWTYPRLSCPGSTFQKALLISPHRFGETKGNSAPLIIREPFIACGPNECKHFALTHYAAQPGGYYNGTRGDRNKLRHLISVKLGKIPTVENSIFHMAAWSGSACHDGKEWTYIGVDGPDNNALLKVKYGEAYTDTYHSYANKILRTQESACNCIGGNCYLMITDGSASGVSECRFLKIREGRIIKEIFPTGRIKHTEECTCGFASNKTIECACRDNSYTAKRPFVKLNVETDTAEIRLMCTDTYLDTPRPNDGSITGPCESDGDKGSGGIKGGFVHQRMESKIGRWYSRTMSKTERMGMGLYVKYDGDPWADSDALAFSGVMVSMKEPGWYSFGFEIKDKKCDVPCIGIEMVHDGGKETWHSAATAIYCLMGSGQLLWDTVTGVDMAL

SEQ ID NO: 28953 - protein, 466 aa, synthetic construct
  REGION 1..466: note = neuraminidase__InfluenzaB__AFB77651
MLPSTIQTLTLFLTSGGVLLSLYVSASLSYLLYSDILLKFSPTEITAPAMPLDCANASNVQAVNRSATKGVTLLLPEPEWTYPRLSCPGSTFQKALLISPHRFGETKGNSAPLIIREPFIACGPNECKHFALTHYAAQPGGYYNGTRGDRNKLRHLTSVKLGKIPTVENSIFHMAAWSGSACHDGKEWTYIGVDGPDNNALLKVKYGEAYTDTYHSYANKILRTQESACNCIGGNCYLMITDGSASGVSECRFLKIREGRIIKEIFPTGRVKHTEECTCGFASNKTIECACRDNSYTAKRPFVKLNVETDTAEIRLMCTDTYLDTPRPNDGSITGPCESDGDKGSGGIKGGFVHQRMESKIGRWYSRTMSKTERMGMGLYVKYDGDPWADSDALAFSGVMVSMKEPGWYSFGFEIKDKKCDVPCIGIEMVHDGGKETWHSAATAIYCLMGSGQLLWDTVTGVDMAL

SEQ ID NO: 28954 - protein, 466 aa, synthetic construct
  REGION 1..466: note = neuraminidase__InfluenzaB__AFE00364
MLPSTIQMLTLFLTSGGVLLSLYVSASLSYLLYSDILLKFSPTEITAPTMPLDCANASNVHAVNRSATKGVTFLLPEPEWTYPRLSCPGSTFQKALLISPHRFGETKGNSAPLIIREPFIACGPNECKHFALTHYAAQPGGYYNGTRGDRNRLRHLISVKLGKIPTVENSIFHMAAWSGSACHDGKEWTYIGVDGPDNNALLKIKYGEAYTDTYHSYANNILRTQESACNCIGGNCYLMITDGSASGVSECRFLKIREGRIIKEIFPTGRVKHTEECTCGFASNKTIECACRDNSYTAKRPFVKLNVETDTAEIRLMCTDTYLDTPRPDDGSITGPCESNGDKGSGGIKGGFVHQRMASKIGRWYSRTMSKTERKGMGLYVKYDGDPWTDSDALAFRGVMVSMKEPGWYSFGFEIKDKKCDVPCIGIEMVHDGGKETWHSAATAIYCLMGSGQLLWDTVTGVDMAL

SEQ ID NO: 28955 - protein, 466 aa, synthetic construct
  REGION 1..466: note = neuraminidase__InfluenzaB__AFF18536
MLPSTIQMLTLFLTSGGVLLSLYVSASLSYLLYSDILLKFSPTEITAPTMPLDCANASNVHAVNRSATKGVTFLLPEPEWTYPRLSCPGSTFQKALLISPHRFGETKGNSAPLIIREPFIACGPNECRHFALTHYAAQPGGYYNGTRGDRNKLRHLISVKLGKIPTVENSIFHMAAWSGSACHDGKEWTYIGVDGPDNNALLKIKYGEAYTDTYHSYANNILRTQESACNCIRGNCYLMITDGSASGVSECRFLKIREGRIIKEIFPTGRVKHTEECTCGFASNKTIECACRDNSYTAKRPFVKLNVETDTAEIRLMCTDTYLDTPRPDDGSITGPCESNGDKGSGGIKGGFVHQRMASKIGRWYSRTMSKTERKGMGLYVKYDGDPWTDSDALAFRGVMVSMKEPGWYSFGFEIKDKKCDVPCIGIEMVHDGGKETWHSAATAIYCLMGSGQLLWDTVTGVDMAL

SEQ ID NO: 28956 - protein, 466 aa, synthetic construct
  REGION 1..466: note = neuraminidase__InfluenzaB__AFF18545
MLPSTIQMLTLFLTSGGVLLSLYVSASLSYLLYSDILLKFSPTEITAPTMPLDCANASNVHAVNRSATKGVTFLLPEPEWTYPRLSCPGSTFQKALLISPHRFGETKGNSAPLIIREPFIACGPNECKHFALTHYAAQPGGYYNGTRGDRNKLRHLISVKLGKIPTVENSIFHMAAWSGSACHDGKEWTYIGVDGPDNNALLKIKYGEAYTDTYHSYANNILRTQESACNCIGGNCYLMITDGSASGVSECRFLKIREGRIIKEIFPTGRVKHTEECTCGFASNKTIECACRDNSYTAKRPFVKLNVETDTAEIRLMCTDTYLDTPRPDDGSITGPCESNGDKGSGGIKGGFVHQRMASKIGRWYSRTMSKTERKGMGLYVKYDGDPWTDSDALAFRGVMVSMKEPGWYSFGFEIKDKKCDVPCIGIEMVHDGGKETWHSAATAIYCLMGSGQLLWDTVTGVDMAL

SEQ ID NO: 28957 - protein, 466 aa, synthetic construct; identical to SEQ ID NO: 28817
  REGION 1..466: note = neuraminidase__InfluenzaB__AFH34933

SEQ ID NO: 28958 - protein, 466 aa, synthetic construct; identical to SEQ ID NO: 28817
  REGION 1..466: note = neuraminidase__InfluenzaB__AFH34939

SEQ ID NO: 28959 - protein, 466 aa, synthetic construct; identical to SEQ ID NO: 28755
  REGION 1..466: note = neuraminidase__InfluenzaB__AFH57869

SEQ ID NO: 28960 - protein, 466 aa, synthetic construct
  REGION 1..466: note = neuraminidase__InfluenzaB__AFH57891
MLPSTIQTLTLFLTSGGVLLSLYVSASLSYLLYSDILLKFSQTEITAPIMPLDYANASNVQAVNHSAAKGVTLLLPEPEWTYPRLSCPGSTFQKALLISPHRFGETKGNSAPLIIREPFIACGPTECKHFALTHYAAQPGGYYNGTREDRNKLRHLISVKLGKIPTVENSIFHMAAWSGSACHDGKEWTYIGVDGPDSNALLKIKYGEAYTDTYHSYAKNILRTQESACNCIGGDCYLMITDGPASGISECRFLKIREGRIIKEIFPTGRVKHTEECTCGFASNKTIECACRDNSYTAKRPFVKLNVETDTAEIRLMCTETYLDTPRPNDGSITGPCESDGDKGSGGIKGGFVHQRMASKIGRWYSRTMSKTKRMGMGLYVKYDGDPWTDSEALALSGVMVSMEEPGWYSFGFEIKDKKCDVPCIGIEMVHDGGKTTWHSAATAIYCLMGSGQLLWDTVTGVDMAL

SEQ ID NO: 28961 - protein, 466 aa, synthetic construct
  REGION 1..466: note = neuraminidase__InfluenzaB__AFH57913
MLPSTIQTLTLFLTSGGVLLSLYVSASLSYLLYSDILLKFSPTEITAPTMPLDCANASNVQAVNRSATKGVTLLLPEPEWTYPRLSCPGSTFQKALLISPHRFGETKGNSAPLIIREPFIACGPNECKHFALTHYAAQPGGYYNGTRGDRNKLRHLISVKLGKIPTVENSIFHMAAWSGSACHDGKEWTYIGVDGPDNNALLKVKYGEAYTDTYHSYANKILRTQESACNCIGGNCYLMITDGSASGVSECRFLKIREGRIIKEIFPTGRVKHTEECTCGFASNKTIECACRDNSYTAKRPFVKLNVETDTAEIRLMCTDTYLDTPRPNDGSITGPCESNGDKGSGGIKGGFVHQRMESKIGRWYSRTMSKTERMGMGLYVKYDGDPWADSDALAFSGVMVSMKEPGWYSFGFEIKDKKCDVPCIGIEMVHDGGKETWHSAATAIYCLMGSGQLLWDTVTGVDMAL

SEQ ID NO: 28962 - protein, 466 aa, synthetic construct; identical to SEQ ID NO: 28817
  REGION 1..466: note = neuraminidase__InfluenzaB__AFH57935

SEQ ID NO: 28963 - protein, 466 aa, synthetic construct; identical to SEQ ID NO: 28817
  REGION 1..466: note = neuraminidase__InfluenzaB__AFH57946

SEQ ID NO: 28964 - protein, 466 aa, synthetic construct; identical to SEQ ID NO: 28817
  REGION 1..466: note = neuraminidase__InfluenzaB__AFH57957

SEQ ID NO: 28965 - protein, 466 aa, synthetic construct; identical to SEQ ID NO: 28895
  REGION 1..466: note = neuraminidase__InfluenzaB__AFH57968

SEQ ID NO: 28966 - protein, 466 aa, synthetic construct
  REGION 1..466: note = neuraminidase__InfluenzaB__AFH57979
MLPSTIQTLTLFLTSGGVLLSLYVSALLSYLLYSDILLKFSPTEITAPTMSLDCANASNVQAVNRSATKGVIFLLPEPEWTYPRLSCPGSTFQKALLISPHRFGETKGNSAPLIIREPFIACGPNECKHFALTHYAAQPGGYYNGTRGDRNKLRHLISVKLGKIPTVENSIFHMAAWSGSACHDGKEWTYIGVDGPDNDALLKVKYGEAYTDTYHSYANKILRTQESACNCIGGNCYLMITDGSASGVSECRFLKIREGRIIKEIFPTGRVKHTEECTCGFASNKTIECACRDNSYTAKRPFVKLNVETDTAEIRLMCTDTYLDTPRPDDGSITGPCESNGDKGSGGIKGGFVHQRMESKIGRWYSRTMSKTERMGMGLYVKYDGDPWADSDALAFSGVMVSMKEPGWYSFGFEIKDKKCDVPCIGIEMVHDGGKETWHSAATAIYCLMGSGQLLWDTVTGVDMAL

SEQ ID NO: 28967 - protein, 466 aa, synthetic construct; identical to SEQ ID NO: 28584
  REGION 1..466: note = neuraminidase__InfluenzaB__AFH58253

SEQ ID NO: 28968 - protein, 466 aa, synthetic construct; identical to SEQ ID NO: 28647
  REGION 1..466: note = neuraminidase__InfluenzaB__AFH58264

SEQ ID NO: 28969 - protein, 466 aa, synthetic construct; identical to SEQ ID NO: 28788
  REGION 1..466: note = neuraminidase__InfluenzaB__AFH58275

SEQ ID NO: 28970 - protein, 466 aa, synthetic construct; identical to SEQ ID NO: 28788
  REGION 1..466: note = neuraminidase__InfluenzaB__AFH58286

SEQ ID NO: 28971 - protein, 466 aa, synthetic construct; identical to SEQ ID NO: 28961
  REGION 1..466: note = neuraminidase__InfluenzaB__AFH58297

SEQ ID NO: 28972 - protein, 466 aa, synthetic construct
  REGION 1..466: note = neuraminidase__InfluenzaB__AFH58308
MLPSTIQTLTLFLTSGGVLLSLYVSASLSYLLYSDILLKFSRTETTAPIMPLDCANASNVQAVNRSATKGVTLLLPEPEWTYPRLSCPGSTFQKALLISPHRFGETKGNSAPLIIREPFIACGPKECKHFALTHYAAQPGGYYNGTREDRNKLRHLISVKLGKIPTVENSIFHMAAWSGSACHDGREWTYIGVDGPDSNALLKIKYGEAYTDTYHSYAKNILRTQESACNCIGGDCYLMITDGPASGISECRFLKIREGRIIKEIFPTGRVKHTEECTCGFASNKTIECACRDNSYTAKRPFVKLNVETDTAEIRLMCTETYLDTPRPNDGSITGPCESNGDKGSGGIKGGFVHQRMASKIGRWYSRTMSKTKRMGMGLYVKYDGDPWTDSEALALSGVMVSMEEPGWYSFGFEIKDKKCDVPCIGIEMVHDGGKTTWHSAATAIYCLMGSGQLLWDTVTGVDMAL

SEQ ID NO: 28973 - protein, 466 aa, synthetic construct; identical to SEQ ID NO: 28972
  REGION 1..466: note = neuraminidase__InfluenzaB__AFH58319

SEQ ID NO: 28974 - protein, 466 aa, synthetic construct
  REGION 1..466: note = neuraminidase__InfluenzaB__AFH58341
MLPSTIQTLTLFLTSGGVLLSLYVSASLSYLLYSDILLKFSRTEITAPIMPLDCANASNVQAVNRSATKGVTLLLPEPEWTYPRLSCPGSTFQKALLISPHRFGETKGNSAPLIIREPFIACGPKECKHFALTHYAAQPGGYYNGTREDRNKLRHLISVRLGKIPTVENSIFHMAAWSGSACHDGREWTYIGVDGPDSNALLKIKYGEAYTDTYHSYAKNILRTQESACNCIGGDCYLMITDGPASGISECRFLKIREGRIIKEIFPTGRVKHTEECTCGFASNKTIECACRDNSYTAKRPFVKLNVETDTAEIRLMCTETYLDTPRPNDGSITGPCESNGDKGSGGIKGGFVHQRMASKIGRWYSRTMSKTKRMGMGLYVKYDGDPWTDSEALALSGVMVSMEEPGWYSFGFEIKDKKCDVPCIGIEMVHDGGKTTWHSAATAIYCLMGSGQLLWDTVTGVNMTL

SEQ ID NO: 28975 - protein, 466 aa, synthetic construct
  REGION 1..466: note = neuraminidase__InfluenzaB__AFH58363
MLPSTIQTLTLFLTSGGVLLSLYVSASLSYLLYSDILLKFPSTEITAPTMPLDCANASNVQAVNRSATKGVTFLLPEPEWTYPRLSCPGSTFQKALLISPHRFGETKGNSAPLIIREPFIACGPKECKHFALTHYAAQPGGYYNGTRGDRNKLRHLISVKLGKIPTVENSIFHMAAWSGSACHDGKEWTYIGVDGPDNNALLKIKYGEAYTDTYHSYANNILRTQESACNCIGGNCYLMITDGSASGVSECRFLKIREGRIIKEIFPTGRIKHTEECTCGFASNKTIECACRDNSYTAKRPFVKLNVETDTAEIRLMCTETYLDTPRPDDGSITGPCESNGGKGSGGIKGGFVHQRMASKIGRWYSRTMSKTERKGMGLYVKYDGDPWADSDALAFSGVMVSMEEPGWYSFGFEIKDKKCDVPCIGIEMVHDGGKETWHSAATAIYCLMGSGQLLWDTVTGVNMAL

SEQ ID NO: 28976 - protein, 466 aa, synthetic construct; identical to SEQ ID NO: 28975
  REGION 1..466: note = neuraminidase__InfluenzaB__AFH58374

SEQ ID NO: 28977 - protein, 466 aa, synthetic construct; identical to SEQ ID NO: 28961
  REGION 1..466: note = neuraminidase__InfluenzaB__AFH58385

SEQ ID NO: 28978 - protein, 466 aa, synthetic construct; identical to SEQ ID NO: 28961
  REGION 1..466: note = neuraminidase__InfluenzaB__AFH58396

SEQ ID NO: 28979 - protein, 466 aa, synthetic construct; identical to SEQ ID NO: 28961
  REGION 1..466: note = neuraminidase__InfluenzaB__AFH58407

SEQ ID NO: 28980 - protein, 466 aa, synthetic construct; identical to SEQ ID NO: 28961
  REGION 1..466: note = neuraminidase__InfluenzaB__AFH58418

SEQ ID NO: 28981 - protein, 466 aa, synthetic construct
  REGION 1..466: note = neuraminidase__InfluenzaB__AFH58429
MLPSTIQTLTLFLTSGGVLLSLYVSASLSYLLYSDILLKFSPTEITAPTMPLDCANASNVQAVNRSATKGVTLLLPEPEWTYPRLSCPGSTFQKALLISPHRFGETKGNSAPLIIREPFIACGPNECKHFALTHYAAQPGGYYNGTRGDRNKLRHLISVKLGKIPTVENSIFHMAAWSGSACHDGKEWTYIGVDGPDNNALLKVKYGEAYTDTYHSYANKILRTQESACNCIGGNCYLMITDGSASGVSECRFLKIREGRIIKEIFPTGRVKHTEECTCGFASNETIECACRDNSYTAKRPFVKLNVETDTAEIRLMCTDTYLDTPRPNDGSITGPCESNGDKGSGGIKGGFVHQRMESKIGRWYSRTMSKTERMGMGLYVKYDGDPWADSDALAFSGVMVSMKEPGWYSFGFEIKDKKCDVPCIGIEMVHDGGKETWHSAATAIYCLMGSGQLLWDTVTGVDMAL

SEQ ID NO: 28982 - protein, 466 aa, synthetic construct
  REGION 1..466: note = neuraminidase__InfluenzaB__AFH58440
MLPSTIQTLTLFLTSGGVLLSLYVSASLSYLLYSDILLKFSPTEITAPTMPLDCANASNVQAVNRSATKGVTLLLPEPEWTYPRLSCPGSTFQKALLISPHRFGETKGNSAPLIIREPFIACGPNECKHFALTHYAAQPGGYYNGTRGDRNKLRHLISVKLGKIPTVENSIFHMAAWSGSACHDGKEWTYIGVDGPDNNALLKVKYGEAYTDTYHSYANKILRTQESACNCIGGNCYLMITDGSASGVSECRFLKIQEGRIIKEIFPTGRVKHTEECTCGFASNKTIECACRDNSYTAKRPFVKLNVETDTAEIRLMCTDTYLDTPRPNDGSITGPCESNGDKGSGGIKGGFVHQRMESKIGRWYSRTMSKTERMGMGLYVKYDGDPWADSDALAFSGVMVSMKEPGWYSFGFEIKDKKCDVPCIGIEMVHDGGKETWHSAATAIYCLMGSGQLLWDTVTGVDMAL

SEQ ID NO: 28983 - protein, 466 aa, synthetic construct
  REGION 1..466: note = neuraminidase__InfluenzaB__AFH58462
MLPSTIQTLTLFLTSGGVLLSLYVSASLSYLLYSDILLKFSPTEITAPTMPLDCANASNVQAVNRSATKGVTFLLPEPEWTYPRLSCPGSTFQKALLISPHRFGETKGNSAPLIIREPFIACGPNECKHFALTHYAAQPGGYYNGTRGDRNKLRHLISVKLGKIPTVENSIFHMAAWSGSACHDGKEWTYIGVDGPDNNALLKVKYGEAYTDTYHSYANKILRTQESACNCIGGNCYLMITDGSASGVSECRFLKIREGRIIKEIFPTGRVKHTEECTCGFASNKTIECACRDNSYTAKRPFVKLNVETDTAEIRLMCTDTYLDTPRPDDGSITGPCESNGDEGSGGIKGGFVHQRMESKIGRWYSRTMSKTERMGMGLYVKYDGDPWADSDALAFSGVMVSMKEPGWYSFGFEIKDKKCDVPCIGIEMVHDGGKETWHSAATAIYCLMGSGQLLWDTVTGVDMTL

SEQ ID NO: 28984 - protein, 466 aa, synthetic construct; identical to SEQ ID NO: 28983
  REGION 1..466: note = neuraminidase__InfluenzaB__AFH58473

SEQ ID NO: 28985 - protein, 466 aa, synthetic construct; identical to SEQ ID NO: 28817
  REGION 1..466: note = neuraminidase__InfluenzaB__AFH58484

SEQ ID NO: 28986 - protein, 466 aa, synthetic construct; identical to SEQ ID NO: 28817
  REGION 1..466: note = neuraminidase__InfluenzaB__AFH58495

SEQ ID NO: 28987 - protein, 466 aa, synthetic construct; identical to SEQ ID NO: 28817
  REGION 1..466: note = neuraminidase__InfluenzaB__AFH58506

SEQ ID NO: 28988 - protein, 466 aa, synthetic construct
  REGION 1..466: note = neuraminidase__InfluenzaB__AFH58517
MLPSTIQTLTLFLTSGGVLLSLYVSALLSYLLYSDILLKFSPTEITAPTMSLDCANASNVQAVNRSATKGVTFLLPEPEWTYPRLSCPGSTFQKALLISPHRFGETKGNSAPLIIREPFIACGPNECKHFALTHYAAQPGGYYNGTRGDRNKLRHLISVKLGKIPTVENSIFHMAAWSGSACHDGKEWTYIGVDGPDNDALLKVKYGEAYTDTYHSYANKILRTQESACNCIGGNCYLMITDGSASGVSECRFLKIREGRIIKEIFPTGRVKHTEECTCGFASNKTIECACRDNSYTAKRPFVKLNVETDTAEIRLMCTDTYLDTPRPDDGSITGPCESNGDKGSGGIKGGFVHQRMESKIGRWYSRTMSKTERMGMGLYVKYDGDPWADSDALAFSGVMVSMKEPGWYSFGFEIKDKKCDVPCIGIEMVHDGGKETWHSAATAIYCLMGSGRLLWDTVTGVDMAL

SEQ ID NO: 28989 - protein, 466 aa, synthetic construct; identical to SEQ ID NO: 28895
  REGION 1..466: note = neuraminidase__InfluenzaB__AFH58528

SEQ ID NO: 28990 - protein, 466 aa, synthetic construct
  REGION 1..466: note = neuraminidase__InfluenzaB__AFH58539
MLPSTVQTLTLLLTSGGVLLSLYVSASLSYLLYSDVLLKFSSTKTTAPTMSLECTNASNAQTVNHSATKEMTFPPPEPEWTYPRLSCQGSTFQKALLISPHRFGEIKGNSAPLIIREPFVACGPKECRHFALTHYAAQPGGYYNGTRKDRNKLRHLVSVKLGKIPTVENSIFHMAAWSGSACHDGREWTYIGVDGPDNDALVKIKYGEAYTDTYHSYAHNILRTQESACNCIGGDCYLMITDGSASGISKCRFLKIREGRIIKEILPTGRVEHTEECTCGFASNKTIECACRDNSYTAKRPFVKLNVETDTAEIRLMCTKTYLDTPRPDDGSIAGPCESNGDKWLGGIKGGFVHQRMASKIGRWYSRTMSKTNRMGMELYVKYDGDPWTDSDALTLSGVMVSIEEPGWYSFGFEIKDKKCDVPCIGIEMVHDGGKDTWHSAATAIYCLMGSGQLLWDTATGVDMAL

SEQ ID NO: 28991 - protein, 466 aa, synthetic construct
  REGION 1..466: note = neuraminidase__InfluenzaB__AFH58550
MLPSTIQTLTLFLTSGGVLLSLYVSASLSYLLYSDILLKFSPTEITAPTMPLDCANASNVQAVNRSATKEMTLLLPEPEWTYPRLSCPGSTFQKALLISPHRFGETRGNSAPLTIREPFIACGPKECKHFALTHYAAQPGGYYNGTREDRNKLRHLISVKLGKIPTVENSIFHMAAWSGSACHDGREWTYIGVDGPDSNALIKIKYGEAYTDTYHSYANNILRTQESACNCIGGDCYLMITDGSASGISKCRFLKIREGRIIKEIFPTGRVEHTEECTCGFASNKTIECACRDNSYTAKRPFVKLNVETDTAEIRLMCTETYLDTPRPDDGSITGPCESNGDKGRGGIKGGFVHQRMASKIGRWYSRTMSKTERMGMELYVKYDGDPWTDSEALAPSGVMVSMEEPGWYSFGFEIKDKKCDVPCIGIEMVHDGGKKTWHSAATAIYCLMGSGQLLWDTVTGVDMAL

SEQ ID NO: 28992 - protein, 466 aa, synthetic construct; identical to SEQ ID NO: 28991
  REGION 1..466: note = neuraminidase__InfluenzaB__AFH58561

SEQ ID NO: 28993 - protein, 466 aa, synthetic construct
  REGION 1..466: note = neuraminidase__InfluenzaB__AFJ69969
MLPSTIQTLTLFLTSGGVLLSLYVSASLSYLLYSDILLKFSPTEITAPTMPLDCANASNVQAVNRSATKGVTLLLPEPEWTYPRLSCPGSTFQKALLISPHRFGETKGNSAPLIIREPFIACGPNECKHFALTHYAAQPGGYYNGTRGDRNKLRHLISVKLGKIPTVENSIFHMAAWSGSACHDGKEWTYIGVDGPDNNALLKVKYGEAYTDTYHSYANKILRTQESACNCIGGNCYLMITDGSASGVSECRFLKIREGRIIKEIFPTGRVKHTEECTCGFASNKTIECACRDNSYTAKRPFVKLNVETDTAEIRLMCTDTYLDTPRPNDGSITGPCESNGDKGSGGIKGGFVHQRMESKIGRWYSRTMSKTERMGMGLYVKYDGDPWTDSDALAFSGVMVSMKEPGWYSFGFEIKDKKCDVPCIGIEMVHDGGKETWHSAATAIYCLMGSGQLLWDTVTGVDMAL

SEQ ID NO: 28994 - protein, 466 aa, synthetic construct; identical to SEQ ID NO: 28956
  REGION 1..466: note = neuraminidase__InfluenzaB__AFJ69971

SEQ ID NO: 28995 - protein, 466 aa, synthetic construct
  REGION 1..466: note = neuraminidase__InfluenzaB__AFJ69973
MLPSTIQMLTLFLTSGGVLLSLYVSASLSYLLYSDILLKFSPTEITAPTMPLDCANASNVHAVNRSATKGVTFLLPEPEWTYPRLSCPGSTFQKALLISPHRFGETKGNSAPLIIREPFIACGPNECKHFALTHYAAQPGGYYNGTRGDRNKLRHLISVKLGKIPTVENSIFHMAAWSGSACHDGKEWTYIGVDGPDNNALLKIKYGEAYTDTYHSYANNILRTQESACNCIGGNCYLMITDGSASGVSACRFLKIREGRIIKEIFPTGRVKHTEECTCGFASNKTIECACRDNSYTAKRPFVKLNVETDTAEIRLMCTDTYLDTPRPDDGSITGPCESNGDKGSGGIKGGFVHQRMASKIGRWYSRTMSKTERKGMGLYVKYDGDPWTDSDALAFRGVMVSMKEPGWYSFGFEIKDKKCDVPCIGIEMVHDGGKETWHSAATAIYCLMGSGQLLWDTVTGVDMAL

SEQ ID NO: 28996 - protein, 466 aa, synthetic construct; identical to SEQ ID NO: 28817
  REGION 1..466: note = neuraminidase__InfluenzaB__AFJ69975

SEQ ID NO: 28997 - protein, 466 aa, synthetic construct
  REGION 1..466: note = neuraminidase__InfluenzaB__AFJ69979
MLPSTIQTLTLFLTSGGVLLSLYVSASLSYLLYSDILLKFSPTEITAPTMPLDCANTSNVQAVNHSATKGVTLLLPEPEWTYPRLSCPGSTFQKALLISPHRFGETKGNSAPLIIREPFIACGPNECKHFALTHYAAQPGGYYNGTRGDRNKLRHLISVKLGKIPTVENSIFHMAAWSGSACHDGKEWTYIGVDGPDNNALLKVKYGEAYTDTYHSYANKILRTQESACNCIGGNCYLMITDGSASGVSECRFLKIREGRIIKEIFPTGRVKHTEECTCGFASNKTIECACRDNSYTAKRPFVKLNVETDTAEIRLMCTDTYLDTPRPDDGSITGPCESNGDKGSGGIKGGFVHQRMESKIGRWYSRTMSKTERMGMGLYVKYDGDPWADSDALAFSGVMVSMKEPGWYSFGFEIKDKKCDVPCIGIEMVHDGGKETWHSAATAIYCLMGSGQLLWDTVTGVDMAL

SEQ ID NO: 28998 - protein, 466 aa, synthetic construct; identical to SEQ ID NO: 28956
  REGION 1..466: note = neuraminidase__InfluenzaB__AFJ69981

SEQ ID NO: 28999 - protein, 466 aa, synthetic construct
  REGION 1..466: note = neuraminidase__InfluenzaB__AFJ69983
MLPSTIQMLTLFLTSGGVLLSLYVSASLSYLLYSDILLKFSPTEITAPTMPLDCANASNVHAVNRSATKGVTFLLPEPEWTYPRLSCPGSTFQKALLISPHRFGETKGNSAPLIIREPFIACGPNECKHFALTHYAAQPGGYYNGTRGDRNKLRHLISVKLGKIPTVENSIFHMAAWSGSACHDGKEWTYIGVDGPDNNALLKIKYGEAYTDTYHSYANNILRTQESACNCIGGNCYLMITDGSASGVSECRFLKIREGRIIKEILPTGRVKHTEECTCGFASNKTIECACRDNSYTAKRPFVKLNVETDTAEIRLMCTDTYLDTPRPDDGSITGPCESNGGKGSGGIKGGFVHQRMASKIGRWYSRTMSKTERKGMGLYVKYDGDPWTDSDALAFRGVMVSMKEPGWYSFGFEIKDKKCDVPCIGIEMVHDGGKETWHSAATAIYCLMGSGQLLWDTVTGVDMAL

SEQ ID NO: 29000 - protein, 466 aa, synthetic construct
  REGION 1..466: note = neuraminidase__InfluenzaB__AFJ69987
MLPSTIQTLTLFLTSGGVLLSLYVSASLSYLLYSDILLKFSPTEITAPTMPLDCANASNVQAVNRSATKGVTLLLPEPEWTYPRLSCPGSTFQKALLISPHRFGETKGNSAPLIIREPFIACGPNECKHFALTHYAAQPGGYYNGTRGDRNKLRHLISVKLGKIPTVENSIFHMAAWSGSACHDGKEWTYIGVDGPDNNALLKVKYGEAYTDTYHSYANKILRTQESACNCIGGNCYLMITDGSASGVSECRFLKIREGRIIKEIFPTGRVKHTEECTCGFASNKTIECACRDNRYTAKRPFVKLNVETDTAEIRLMCTDTYLDTPRPNDGSITGPCESDGDKGSGGTKGGFVHQRMKSKIGRWYSRTMSKTERMGMGLYVKYDGDPWADSDALTFSGVMVSMKEPGWYSFGFEIKDKKCDVPCIGIEMVHDGGKETWHSAATAIYCLMGSGQLLWDTVTGVDMAL

SEQ ID NO: 29001 - protein, 466 aa, synthetic construct
  REGION 1..466: note = neuraminidase__InfluenzaB__AFJ76228
MLPSTIQTLTLFLTSGGVLLSLYVSASLSYLLYSGILLKFSPTEITAPTMPLNCANASNVQAVNRSATKGVTLLLPEPEWTYPRLSCPGSTFQKALLISPHRFGETKGNSAPLIIREPFIACGPKECKHFALTHYAAQPGGYYNGTREDRNKLRHLISVKLGKIPTVENSIFHMAAWSGSACHDGREWTYIGVDGPDSNALLKIKYGEAYTDTYHSYANNILRTQESACNCIGGDCYLMITDGSASGISECRFLKIREGRIIKEIFPTGRVEHTEECTCGFASNKTIECACRDNSYTAKRPFVKLNVETDTAEIRLMCTETYLDTPRPDDGSITGPCESNGDKGSGGIKGGFVHQRMASKIGRWYSRTMSKTKRMGMGLYVKYDGDPWIDSDALTLSGVMVSMEEPGWYSFGFEIKDKKCDVPCIGIEMVHDGGKKTWHSAATAIYCLMGSGQLLWDTVTGVDMAL

SEQ ID NO: 29002 - protein, 466 aa, synthetic construct; identical to SEQ ID NO: 28668
  REGION 1..466: note = neuraminidase__InfluenzaB__AFJ76261

SEQ ID NO: 29003 - protein, 466 aa, synthetic construct
  REGION 1..466: note = neuraminidase__InfluenzaB__AFJ76283
MLPSTIQTLTLFLTSGGVLLSLYVSASLSYLLYSDILLKFPPTEITAPTMPLDCANASNVQAVNRSATKGVTLLLPEPEWTYPRLSCPGSTFQKALLISPHRFGETKGNSAPLIIREPFIACGPKECKHFALTHYAAQPGGYYNGTRGDRNKLRHLISVKLGKIPTVENSIFHMAAWSGSACHDGKEWTYIGVDGPDNNALLKIKYGEAYTDTYHSYANNILRTQESACNCIGGNCYLMITDGSASGVSECRFLKIREGRIIKEIFPTGRIKHTEECTCGFASNKTIECACRDNSYTAKRPFVKLNVETDTAEIRLMCTETYLDTPRPDDGSITGPCESNGDKGSGGIKGGFVHQRMASKIGRWYSRTMSKTERMGMGLYVKYDGDPWADSDALTFSGVMVSMEEPGWYSFGFEIKDKKCDVPCIGIEMVHDGGKETWHSAATAIYCLMGSGQLLWDTVTGVNMAL

SEQ ID NO: 29004 - protein, 466 aa, synthetic construct
  REGION 1..466: note = neuraminidase__InfluenzaB__AFJ76305
MLPSTIQTLTLFLTSGGVLLSLYVSASLSYLLYSDILLKFPSTEITAPTMPLDCANASNVQAVNRSATKGVTLLLPEPEWTYPRLSCPGSTFQRALLISPHRFGETKGNSAPLIIREPFIACGPKECKHFALTHYAAQPGGYYNGTRGDRNKLRHLISVKLGKIPTVENSIFHMAAWSGSACHDGKEWTYIGVDGPDNNALLKIKYGEAYTDTYHSYANNILRTQESACNCIGGNCYLMITDGSASGVSECRFLKIREGRIIKEIFPTGRIKHTEECTCGFASNKTIECACRDNSYTAKRPFVKLNVETDTAEIRLMCTETYLDTPRPDDGSITGPCESNGDKGSGGIKGGFVHQRMASKIGRWYSRTMSKTERMGMGLYVKYDGDPWADSDALTFSGVMVSMEEPGWYSFGFEIKDKKCDVPCIGIEMVHDGGKETWHSAATAIYCLMGSGQLLWDTVTGVDMAL

SEQ ID NO: 29005 - protein, 466 aa, synthetic construct
  REGION 1..466: note = neuraminidase__InfluenzaB__AFJ76316
MLPSTIQTLTLFLTSGGVLLSLYVSASLSYLLYSDILLKFPSTEITAPTMPLDCANASNVQAVNRSATKGVTLLLPEPEWTYPRLSCPGSTFQKALLISPHRFGETKGNSAPLIIREPFIACGPKECKHFALTHYAAQPGGYYNGTRGDRNKLRHLISVKLGKIPTVENSIFHMAAWSGSACHDGKEWTYIGVDGPDNNALLKIKYGEAYTDTYHSYANNILRTQESACNCIGGNCYLMITDGSASGVSECRFLKIREGRIIKEIFPTGRIKHTEECTCGFASNKTIECACRDNSYTAKRPFVKLNVETDTAEIRLMCTETYLDTPRPDDGSITGPCESNGDKGSGGIKGGFVHQRMASKIGRWYSRTMSKTERMGMGLYVKYDGDPWADSDALTFSGVMVSMEEPGWYSFGFEIKDKKCDVPCIGIEMVHDGGKETWHSAATAIYCLMGSGQLLWDTVTGVNMAL

SEQ ID NO: 29006 - protein, 466 aa, synthetic construct; identical to SEQ ID NO: 28668
  REGION 1..466: note = neuraminidase__InfluenzaB__AFJ76338

SEQ ID NO: 29007 - protein, 466 aa, synthetic construct
  REGION 1..466: note = neuraminidase__InfluenzaB__AFJ77331
MLPSTIQTLTLFLTSGGVLLSLYVSASLSYLLYSDILLKFSQTEITAPIMPLDCANASNVQAVNHSAAKGVTLLLPEPEWTYPRLSCPGSTFQKALLISPHRFGETKGNSAPLIIREPFIACGPTECKHFALTHYAAQPGGYYNGTREDRNKLRHLISVKLGKIPTVENSIFHMAAWSGSACHDGKEWTYIGVDGPDSNALLKIKYGEAYTDTYHSYAKNILRTQESAYNCIGGDCYLMITDGPASGISECRFLKIREGRIIKEIFPTGRVKHTEECTCGFASNKTIECACRDNSYTAKRPFVKLNVETDTAEIRLMCTETYLDTPRPNDGSITGPCESDGDKGSGGIKGGFVHQRMASKIGRWYSRTMSKTKRMGMGLYVKYDGDPWTDSEALALSGVMVSMEEPGWYSFGFEIKDKKCDVPCIGIEMVHDGGKTTWHSAATAIYCLMGSGQLLWDTVTGVDMAL

SEQ ID NO: 29008 - protein, 466 aa, synthetic construct; identical to SEQ ID NO: 28743
  REGION 1..466: note = neuraminidase__InfluenzaB__AFJ77351

SEQ ID NO: 29009 - protein, 466 aa, synthetic construct; identical to SEQ ID NO: 28635
  REGION 1..466: note = neuraminidase__InfluenzaB__AFJ77362

SEQ ID NO: 29010 - protein, 466 aa, synthetic construct; identical to SEQ ID NO: 28788
  REGION 1..466: note = neuraminidase__InfluenzaB__AFJ77384

SEQ ID NO: 29011 - protein, 466 aa, synthetic construct; identical to SEQ ID NO: 28710
  REGION 1..466: note = neuraminidase__InfluenzaB__AFJ80132

SEQ ID NO: 29012 - protein, 466 aa, synthetic construct
  REGION 1..466: note = neuraminidase__InfluenzaB__AFJ80143
MLPSTIQTLTLFLTSGGVLLSLYVSASLSYLLYSDILLKFSPTEITAPTMPLDCANASNVQAVNRSATKGVTLLLPEPEWTYPRLSCPGSTFQKALLISPHRFGETKGNSAPLIIREPFIACGPKECKHFALTHYAAQPGGYYNGTREDRNKLRHLISVKLGKIPTVENSIFHMAAWSGSACHDGREWTYIGVDGPDSNALLKIKYGEAYTDTYHSYANNILRTQESACNCIGGNCYLMITDGSASGISECRFLKIREGRIIKEIFPTGRVEHTEECTCGFASNKTIECACRDNSYTAKRPFVKLNVETDTAEIRLMCTETYLDTPRPDDGSITGPCESNGDKGSGGIKGGFVHQRMASKIGRWYSRTMSKTKRMGMGLYVKYDGDPWTDSDALALSGVMVSMEEPGWYSFGFEIKDKKCDVPCIGIEMVHDGGKKTWHSAATAIYCLMGSGQLLWDTVTGVDMAL

SEQ ID NO: 29013 - protein, 466 aa, synthetic construct
  REGION 1..466: note = neuraminidase__InfluenzaB__AFJ80154
MLPSTIQTLTLFLTSGGVLLSLYVSASLSYLLYSDILLKFSPTEITAPTMPLDCANASNVQAVNRSATKGVTLLLPEPEWTYPRLSCPGSTFQKAILISPHRFGETKGNSAPLIIREPFIACGPKECKHFALTHYAAQPGGYYNGTREDRNKLRHLISVKLGKIPTVENSIFHMAAWSGSACHDGREWTYIGVDGPDSNALLKIKYGEAYTDTYHSYANNILRTQESACNCIGGNCYLMITDGSASGISECRFLKIREGRIIKEIFPTGRVEHTEECTCGFASNKTIECACRDNSYTAKRPFVKLNVETDTAEIRLMCTETYLDTPRPDDGSITGPCESNGDKGSGGIKGGFVHQRMASKIGRWYSRTMSKTKRMGMGLYVKYDGDPWTDSDALALSGVMVSMEEPGWYSFGFEIKDKKCDVPCIGIEMVHDGGKKTWHSAATAIYCLMGSGQLLWDTVTGVDMAL

SEQ ID NO: 29014 - protein, 466 aa, synthetic construct
  REGION 1..466: note = neuraminidase__InfluenzaB__AFJ80165
MLPSTIQTLTLFLTSGGVLLSLYVSASLSYLLYSDILLKFSPTEITAPTIPLDCANASNVQAVNRSATKGVTLLLPEPEWTYPRLSCPGSTFQKALLISPHRFGEIKGNSAPLIIREPFIACGPKECKHFALTHYAAQPGGYYNGTREDRNKLRHLISVKLGKIPTVENSIFHMAAWSGSACHDGKEWTYIGVDGPDSNALLKIKYGEAYTDTYHSYANNILRTQESACNCIGGNCYLMITDGSASGISECRFLKIREGRIIKEIFPTGRVEHTEECTCGFASNKTIECACRDNSYTAKRPFVKLNVETDTAEIRLMCTETYLDTPRPDDGSITGPCESNGDKGSGGIKGGFVHQRMASKIGRWYSRTMSKTKRMGMGLYVKYDGDPWTDSDALALSGVMVSMEEPGWYSFGFEIKDKKCDIPCIGIEMVHDGGKETWHSAATAIYCLMGSGQLLWDTVTGVDMAL

SEQ ID NO: 29015 - protein, 466 aa, synthetic construct
  REGION 1..466: note = neuraminidase__InfluenzaB__AFJ80176
MLPSTIQTLTLFLTSGGVLLSLYVSASLSYLLYSDILLKFSPTEITVPTMPLDCANASNVQAVNRSATKGVTLLLPEPEWTYPRLSCPGSTFQKALLISPHRFGETKGNSAPLIIREPFIACGPKECKHFALTHYAAQPGGYYNGTREDRNKLRHLISVKLGKIPTVENSIFHMAAWSGSACHDGREWTYIGVDGPDSNALLKIKYGEAYTDTYHSYANNILRTQESACNCIGGNCYLMITDGSASGISECRFLKIREGRIIKEIFPTGRVEHTEECTCGFASNKTIECACRDNSYTAKRPFVKLNVETDTAEIRLMCTETYLDTPRPDDGSITGPCESNGDKGSGGIKGGFVHQRMASKIGRWYSRTMSKTKRMGMGLYVKYDGDPWTDSDALALSGVMVSMEEPGWYSFGFEIKDKKCDVPCIGIEMVHDGGKKTWHSAATAIYCLMGSGQLLWDTVTGVDMAL

SEQ ID NO: 29016 - protein, 466 aa, synthetic construct
  REGION 1..466: note = neuraminidase__InfluenzaB__AFJ80187
MLPSTIQTLTLFLTSGGVLLSLYVSASLSYLLYSGILLKFSPTEITAPTMPLNCANASNFQAVNRSATKGVTLLLPEPEWTYPRLSCPGSTFQKALLISPHRFGETKGNSAPLIIREPFIACGPKECKHFALTHYAAQPGGYYNGTREDRNKLRHLISVKLGKIPTVENSIFHMAAWSGSACHDGREWTYIGVDGPDSNALLKIKYGEAYTDTYHSYANNILRTQESACNCIGGDCYLMITDGSASGISECRFLKIREGRIIKEIFPTGRVEHTEECTCGFASNKTIECACRDNSYTAKRPFVKLNVETDTAEIRLMCTETYLDTPRPDDGSITGPCESNGDKGSGGIKGGFVHQRMASKIGRWYSRTMSKTKRMGMGLYVKYDGDPWIDSDALTLSGVMVSMEEPGWYSFGFEIKDKKCDVPCIGIEMVHDGGKKTWHSAATAIYCLMGSGQLLWDTVTGVDMAL

SEQ ID NO: 29017 - protein, 466 aa, synthetic construct; identical to SEQ ID NO: 29012
  REGION 1..466: note = neuraminidase__InfluenzaB__AFJ80198

SEQ ID NO: 29018 - protein, 466 aa, synthetic construct; identical to SEQ ID NO: 28640
  REGION 1..466: note = neuraminidase__InfluenzaB__AFJ80220

SEQ ID NO: 29019 - protein, 466 aa, synthetic construct
  REGION 1..466: note = neuraminidase__InfluenzaB__AFJ80231
MLPSTIQTLTLFLTSGGVLLSLYVSASLSYLLYSGILLKFSLTEITAPTMPLNCANASNVQAVNRSATKGVTLFLPEPEWTYPRLSCPGSTFQKALLISPHRFGETKGNSAPLIIREPFIACGPKECKHFALTHYAAQPGGYYNGTREDRNKLRHLISVELGKIPTVENSIFHMAAWSGSACHDGKEWTYIGVDGPDSNALLKIKYGEAYTDTYHSYANNILRTQESACNCIGGDCYLMITDGSASGISECRFLKIREGRIIKEIFPTGRVEHTEECTCGFASNKTIECACRDNSYTAKRPFVKLNVETDTAEIRLMCTETYLDTPRPDDGSITGPCESNGDKGSGGIKGGFVHQRMASKIGRWYSRTMSKTKRMGMGLYVKYDGDPWIDSDALTLSGVMVSMEEPGWYSFGFEIKDKKCDVPCIGIEMVHDGGKKTWHSAATAIYCLMGSGQLLWDTVTGVDMAL

SEQ ID NO: 29020 - protein, 466 aa, synthetic construct
  REGION 1..466: note = neuraminidase__InfluenzaB__AFJ80242
MLPSTIQTLTLFLTSGGVLLSLYVSALLSYLLYSDILLKFSPTKVIAPTMSLDCANASNVQAVNHSATEEMTFLLPEPEWTYPRLSCQGSTFQKALLISPHRFGEAKGNSAPLIIREPFIACGPKECKHFALTHYAAQPGGYYNGTREDRNKLRHLISVNLGKIPTVENSIFHMAAWSGSACHDGREWTYIGVDGPDSNALIKIKYGEAYTDTYHSYANNILRTQESACNCIGGDCYLMITDGSASGISRCRFLKIREGRIIKEIFPTGRVEHTEECTCGFASNKTIECACRDNSYTAKRPFVKLNVETDTAEIRLMCTETYLDTPRPDDGSITGPCESNGDKGNGGIKGGFVHQRMASRIGRWYSRTMSKTKRMGMELYVKYDGDPWTDSDALAPSGVMVSMEEPGWYSFGFEIKDKKCDVPCIGIEMVHDGGKTTWHSAATAIYCLMGSGQLLWDTVTGVDMAL

SEQ ID NO: 29021 - protein, 466 aa, synthetic construct
  REGION 1..466: note = neuraminidase__InfluenzaB__AFJ80660
MLPSTIQTLTLFLTSGGVLLSLYVSASLSYLLYSDILLKFSPTEITAPTMPLDCANASNVQAVNRSATKGVTLLLPEPEWTYPRLSCPGSTFQKALLISPHRFGETKGNSAPLIIREPFIACGPKECKHFALTHYAAQPGGYYNGTREDRNKLRHLISVKLGKIPTVENSIFHMAAWSGSACHDGREWTYIGVDGPDSNALLKIKYGEAYTDTYHSYANNILRTQESACNCIGGDCYLMITDGSASGISECRFLKIREGRIIKEIFPTGRVEHTEECTCGFASNKTIECACRDNSYTAKRPFVKLNVETDTAEIRLMCTETYLDTPRPDDGSITGPCESNGDKGSGGIKGGFVHQRMTSKIGRWYSRTMSKTKRMGMGLYVKYDGDPWTDSDALALSGVMVSMEEPGWYSFGFEIKDKKCDVPCIGIEMVHDGGKKTWHSAATAIYCLMGSGQLLWDTVTGVDMAL

SEQ ID NO: 29022 - protein, 466 aa, synthetic construct; identical to SEQ ID NO: 29019
  REGION 1..466: note = neuraminidase__InfluenzaB__AFJ80671

SEQ ID NO: 29023 - protein, 466 aa, synthetic construct; identical to SEQ ID NO: 29019
  REGION 1..466: note = neuraminidase__InfluenzaB__AFJ80682

SEQ ID NO: 29024 - protein, 466 aa, synthetic construct
  REGION 1..466: note = neuraminidase__InfluenzaB__AFJ80693
MLPSTIQTLTLFLTSGGVLLSLYVSASLSYLLYSGILLKFSPTEITAPTMPLNCANASNVQAVNRSATKGVTLLLPEPEWTYPRLSCPGSTFQKALLISPHRFGETKGNSAPLIIREPFIACGPKECKHFALTHYAAQPGGYYNGTREDRNKLRHLISVKLGKIPTVENSIFHMAAWSGSACHDGREWTYIGVDGPDSNALLKIKYGEAYTDTYHSYANNILRTQESACNCIGGDCYLMITDGSASGISECRFLKIREGRIIKEIFPTGRVEHTEECTCGFASNKTIECACRDNSYTAKRPFVKLNVETDTAEIRLMCTETYLDTPRPDDGSITGPCESHGDKGSGGIKGGFVHQRMASKIGRWYSRTMSKTKRMGMGLYVKYDGDPWIDSGALTLSGVMVSMEEPGWYSFGFEIKDKKCDVPCIGIEMVHDGGKKTWHSAATAIYCLMGSGQLLWDTVTGVDMAL

SEQ ID NO: 29025 - protein, 466 aa, synthetic construct
  REGION 1..466: note = neuraminidase__InfluenzaB__AFJ80726
MLPSTIQTLTLFLTSGGVLLSLYVSASLSYLLYSDILLKFSQTEITAPTMPLDCANASNVQAVNRSATKGVTLLLPEPEWTYPRLSCPGSTFQKALLISPHRFGETKGNSAPLIIREPFIACGPKECKHFALTHYAAQPGGYYNGTREDRNKLRHLISVKLGKIPTVENSIFHMAAWSGSACHDGREWTYIGVDGPDSNALLKIKYGEAYTDTYHSYAKNILRTQESACNCIGGDCYLMITDGSASGISECRFLKIREGRIIKEIFPTGRVKHTEECTCGFASNKTIECACRDNSYTAKRPFVKLNVETDTAEIRLMCTETYLDTPRPNDGSITGPCESNGDRGGGGIKGGFVHQRMASKIGRWYSRTMSKTKRMGMGLYVKYDGDPWTDSEALALSGVMVPMEEPGWYSFGFEIKDKKCDVPCIGIEMVHDGGKTTWHSAATAIYCLMGSGQLLWDTVTGVDMAL

SEQ ID NO: 29026 - protein, 466 aa, synthetic construct
  REGION 1..466: note = neuraminidase__InfluenzaB__AFJ80737
MLPSTIQTLTLFLTSGGVLLSLYVSASLSYLLYSDILLKFSQTEITAPIMPLDCANASNVQAVNRSATKGVTLLLPEPEWTYPRLSCPGSTFQKALLISPHRFGETKGNSAPLIIREPFIACGPKECKHFALTHYAAQPGGYYNGTREDRNKLRHLISVKLGKIPTVENSIFHMAAWSGSACHDGREWTYIGVDGPDSNALLKIKYGEAYTDTYHSYAKNILRTQESACNCIRGDCYLMITDGPASGISECRFLKIREGRIIKEIFPTGRVKHTEECTCGFASNKTIECACRDNSYTAKRPFVKLNVETDTAEIRLMCTETYLDTPRPNDGSITGPCESNGDKGSGGIKGGFVHQRMASKIGRWYSRTMSKTKRMGMGLYVKYDGDPWTDSEALALSGVMVSMEEPGWYSFGFEIKDKKCDVPCIGIEMVHDGGKTTWHSAATAIYCLMGSGQLLWDTVTGVDMAL

SEQ ID NO: 29027 - protein, 466 aa, synthetic construct; identical to SEQ ID NO: 28668
  REGION 1..466: note = neuraminidase__InfluenzaB__AFJ80759

SEQ ID NO: 29028 - protein, 466 aa, synthetic construct
  REGION 1..466: note = neuraminidase__InfluenzaB__AFJ80770
MLPSTIQTLTLFLTSGGVLLSLYVSASLSYLLYSDILLKFSQTEITAPTMPLDCANASNVQAVNRSATKGVTLLLPEPEWTYPRLSCPGSTFQKALLISPHRFGETKGNSAPLIIREPFIACGPNECKHFALTHYAAQPGGYYNGTREDRNKLRHLISVKLGKIPTVENSIFHMAAWSGSACHDGREWTYIGVDGPDSNALLKIKYGEAYTDTYHSYAKNILRTQESACNCIGGDCYLMITDGPASGISECRFLKIREGRIIKEIFPTGRVKHTEECTCGFASNKTIECACRDNSYTAKRPFVKLDVETDTAEIRLMCTETYLDTPRPNDGSITGPCESNGDKGSGGIKGGFVHQRMASKIGRWYSRTLSKTKRMGMGLYVKYDGDPWTDSEALALSGVMVSMEEPGWYSFGFEIKDKKCDVPCIGIEMVHDGGKTTWHSAATAIYCLMGSGQLLWDTVTGVDMAL

SEQ ID NO: 29029 - protein, 466 aa, synthetic construct; identical to SEQ ID NO: 28668
  REGION 1..466: note = neuraminidase__InfluenzaB__AFJ80785

SEQ ID NO: 29030 - protein, 466 aa, synthetic construct; identical to SEQ ID NO: 28668
  REGION 1..466: note = neuraminidase__InfluenzaB__AFJ80796

SEQ ID NO: 29031 - protein, 466 aa, synthetic construct
  REGION 1..466: note = neuraminidase__InfluenzaB__AFJ80807
MLPSTIQTLTLFLTSGGVLLSLYVSVSLSYLLYSDILLKFPSTEITAPTMPLDCANASNVQAVNRSATKGVTLLLPEPEWTYPRLSCPGSTFQKALLISPHRFGETKGNSAPLIIREPFIACGPKECKHFALTHYAAQPGGYYNGTRGDRNKLRHLISVKLGKIPTVENSIFHMAAWSGSACHDGKEWTYIGVDGPDNNALLKIKYGEAYTDTYHSYANNILRTQESACNCIGGNCYLMITDGSASGVSECRFLKIREGRIIKEIFPTGRIKHTEECTCGFASNKTIECACRDNSYTAKRPFVKLNVETDTAEIRLMCTETYLDTPRPDDGSITGPCESNGDKGSGGIKGGFVHQRMASKIGRWYSRTMSKTKRMGMGLYVKYDGDPWADSDALAFSGVMVSMEEPGWYSFGFEIKDKKCDVPCIGIEMVHDGGKETWHSAATAIYCLMGSGQLLWDTVTGVNMAL

SEQ ID NO: 29032 - protein, 466 aa, synthetic construct; identical to SEQ ID NO: 28668
  REGION 1..466: note = neuraminidase__InfluenzaB__AFJ80818

SEQ ID NO: 29033 - protein, 466 aa, synthetic construct; identical to SEQ ID NO: 28668
  REGION 1..466: note = neuraminidase__InfluenzaB__AFJ80829

SEQ ID NO: 29034 - protein, 466 aa, synthetic construct; identical to SEQ ID NO: 29005
  REGION 1..466: note = neuraminidase__InfluenzaB__AFJ80840

SEQ ID NO: 29035 - protein, 466 aa, synthetic construct; identical to SEQ ID NO: 29005
  REGION 1..466: note = neuraminidase__InfluenzaB__AFJ80851

SEQ ID NO: 29036 - protein, 466 aa, synthetic construct
  REGION 1..466: note = neuraminidase__InfluenzaB__AFJ80862
MLPSTIQTLTLFLTSGGVLLSLYVSASLSYLLYSDILLKFPSTEITAPTMPLDCANASNVQAMNRSATKGVTLLLPETEWTYPRLSCPGSTFQKALLISPHRFGETKGNSAPLIIREPFIACGPKECKHFALTHYAAQPGGYYNGTRGDRNKLRHLISVKLGKIPTVENSIFHMAAWSGSACHDGKEWTYIGVDGPDNNALLKIKYGEAYTDTYHSYANNILRTQESACNCIGGNCYLMITDGSASGVSECRFLKIREGRIIKEIFPTGRIKHTEECTCGFASNKTIECACRDNSYTAKRPFVKLNVETDTAEIRLMCTETYLDTPRPDDGSITGPCESNGDKGSGGIKGGFVHQRMASKIGRWYSRTMSKTERMGMGLYVKYDGDPWADSDALTFSGVMVSMEEPGWYSFGFEIKDKKCDVPCIGIEMVHDGGKETWHSAATAIYCLMGSGQLLWDTVTGVNMAL

SEQ ID NO: 29037 - protein, 466 aa, synthetic construct
  REGION 1..466: note = neuraminidase__InfluenzaB__AFJ80873
MLPSTIQTLTLFLTSGGVLLSLYVSASLSHLLYSGILLKFPSTEITAPTMPLDCANASNVQAVNRSATKGVTLLPPEPEWTYPRLSCPGSTFQKALLISPHRFGETKGNSAPLIIREPFIACGPKECKHFALTHYAAQPGGYYNGTRGDRNKLRHLISVKLGKIPTVENSIFHMAAWSGSACHDGKEWTYIGVDGPDNNALLKIKYGEAYTDTYHSYANNILRTQESACNCIGGNCYLMITDGSASGVSECRFLKIREGRIIKEIFPTGRIKHTEECTCGFASNKTIECACRDNSYTAKRPFVKLNVETDTAEIRLMCTETYLDTPRPDDGSITGPCESNGDKGSGGIKGGFVHQRMASKIGRWYSRTMSKTERMGMGLYVKYDGDPWADSDALTFSGVMVSMEEPGWYSFGFEIKDKKCDVPCIGIEMVHDGGKETWHSAATAIYCLMGSGQLLWDTVTGVNMAL

SEQ ID NO: 29038 - protein, 466 aa, synthetic construct
  REGION 1..466: note = neuraminidase__InfluenzaB__AFJ80884
MLPSTIQTLTLFLTSGGVLLSLYVSASLSYLLYSDILLKFPSTEITAPTMPLDCANASNVQAVNRSATKGVTLLLPEPEWTYPRLSCPGSTFQKALLISPHRFGETKGNSAPLIIREPFIACGPKECKHFALTHYAAQPGGYYNGTRGDRNKLRHLISVKLGKIPTVENSIFHMAAWSGSACHDGKEWTYIGVDGPDNNALLKIKYGEAYTDTYHSYANNILRTQESACNCIGGNCYLMITDGSASGVSKCRFLKIREGRIIKEIFPTGRIKHTEECTCGFASNKTIECACRDNSYTAKRPFVKLNVETDTAEIRLMCTETYLDTPRPDDGSITGPCESNGDKGSGGIKGGFVHQRMASKIGRWYSRTMSKTERMGMGLYVKYDGDPWADSDALTFSGVMVSMEEPGWYSFGFEIKDKKCDVPCIGIEMVHDGGKETWHSAATAIYCLMGSGQLLWDTVTGVNMAL

SEQ ID NO: 29039 - protein, 466 aa, synthetic construct; identical to SEQ ID NO: 29004
  REGION 1..466: note = neuraminidase__InfluenzaB__AFJ80895

SEQ ID NO: 29040 - protein, 466 aa, synthetic construct
  REGION 1..466: note = neuraminidase__InfluenzaB__AFJ80917
MLPSTIQTLTLFLTSGGVLLSLYVSASLSYLLYSDILLKFPSTEITAPTMPLDCANASNVQAVNRSATKGVTLLLPEPEWTYPRLSCPGSTFQKALLISPHRFGETKGNSAPLIIREPFIACGPKECKHFALTHYAAQPGGYYNGTRGDRNKLRHLISVKLGKIPTVENSIFHMAAWSGSACHDGKEWTYIGVDGPDNNALLKIKYGEAYTDTYHSYANNILRTQESACNCIGGNCYLMITDGSASGVSECRFLKIREGRIIKEIFPTGRIKHTEECTCGFASNKTIECTCRDNSYTAKRPFVKLNVETDTAEIRLMCTETYLDTPRPDDGSITGPCESNGDKGSGGIKGGFVHQRMASKIGRWYSRTMSKTERMGMGLYVKYDGDPWADSDALTFSGVMVSMEEPGWYSFGFEIKDKKCDVPCIGIEMVHDGGKETWHSAATAIYCLMGSGQLLWDTVTGVNMAL

SEQ ID NO: 29041 - protein, 466 aa, synthetic construct
  REGION 1..466: note = neuraminidase__InfluenzaB__AFJ80928
MLPSTIQTLTLFLTSGGVLLSLYVSASLSYLLYSDILLKFPSTEITAPTMPLDCANASNVQAVNRSATKGVTLLLPEPEWTYPRLSCPGSTFQKALLISPHRFGETKGNSAPLIIREPFIACEPKECKHFALTHYAAQPGGYYNGTRGDRNKLRHLISVKLGKIPTVENSIFHMAAWSGSACHDGKEWTYIGVDGPDNNALLKIKYGEAYTDTYHSYANNILRTQESACNCIGGNCYLMITDGSASGVSECRFLKIREGRIIKEIFPTGRIKHTEECTCGFASNKTIECACRDNSYTAKRPFVKLNVETDTAEIRLMCTETYLDTPRPDDGSITGPCESNGDKGSGGIKGGFVHQRMASKIGRWYSRTMSKTERMGMGLYVKYDGDPWADSDALTFSGVMVSMEEPGWYSFGFEIKDKKCDVPCIGIEMVHDGGKETWHSAATAIYCLMGSGQLLWDTVTGVNMAL

SEQ ID NO: 29042 - protein, 466 aa, synthetic construct
  REGION 1..466: note = neuraminidase__InfluenzaB__AFJ80939
MLPSTIQTLTLFLTSGGVLLSLYVSASLSYLLYSDILLKFPPTEVTAPTMPLDCANASNVQAVNRSATKGVTLLLPEPEWTYPRLSCPGSTFQKALLISPHRFGETKGNSAPLIIREPFIACGPKECKHFALTHYAAQPGGYYNGTRGDRNKLRHLISVKLGKIPTVENSIFHMAAWSGSACHDGKEWTYIGVDGPDNNALLKIKYGEAYTDTYHSYANNILRTQESACNCIGGNCYLMITDGSASGVSECRFLKIREGRIIKEIFPTGRIKHTEECTCGFASNKTIECACRDNSYTAKRPFVKLNVETDTAEIRLMCTETYLDTPRPDDGSITGPCESNGDKGSGGIKGGFVHQRMASKIGRWYSRTMSKTERMGMGLYVKYDGDPWADSDALTFSGVMVSMEEPGWYSFGFEIKDKKCDVPCIGIEMVHDGGKETWHSAATAIYCLMGSGQLLWDTVTGVNMAL

SEQ ID NO: 29043 - protein, 466 aa, synthetic construct
  REGION 1..466: note = neuraminidase__InfluenzaB__AFJ80950
MLPSTIQTLTLFLTSGGVLLSLYVSASLSYLLYSDILLKFSQTEITAPIMPLDCANASNVQAVNRSAAKGVTLLLPEPEWTYPRLSCPGSTFQKALLISPHRFGETKGNSAPLIIREPFIACGPTECKHFALTHYAAQPGGYYNGTREDRNKLRHLISVKLGKIPTVENSIFHMAAWSGSACHDGKEWTYIGVDGPDSNALLKIKYGEAYTDTYHSYAKNILRTQESACNCIGGDCYLMITDGPASGISECRFLKIREGRIIKEIFPTGRVKHTEECTCGFASNKTIECACRDNSYTAKRPFVKLNVETDTAEIRLMCTETYLDTPRPNDGSITGPCESDGDKGNGGIKGGFVHQRMASKIGRWYSRTMSKTKRMGMGLYVKYDGDPWTDSEALALSGVMVSMEEPGWYSFGFEIKDKKCDVPCIGIEMVHDGGKTTWHSAATAIYCLMGSGQLLWDTVTGVDMAL

SEQ ID NO: 29044 - protein, 466 aa, synthetic construct; identical to SEQ ID NO: 29005
  REGION 1..466: note = neuraminidase__InfluenzaB__AFJ80961

SEQ ID NO: 29045 - protein, 466 aa, synthetic construct; identical to SEQ ID NO: 28788
  REGION 1..466: note = neuraminidase__InfluenzaB__AFJ80972

SEQ ID NO: 29046 - protein, 466 aa, synthetic construct; identical to SEQ ID NO: 28788
  REGION 1..466: note = neuraminidase__InfluenzaB__AFJ80983

SEQ ID NO: 29047 - protein, 466 aa, synthetic construct; identical to SEQ ID NO: 28743
  REGION 1..466: note = neuraminidase__InfluenzaB__AFJ80994

SEQ ID NO: 29048 - protein, 466 aa, synthetic construct; identical to SEQ ID NO: 28788
  REGION 1..466: note = neuraminidase__InfluenzaB__AFJ81005

SEQ ID NO: 29049 - protein, 466 aa, synthetic construct; identical to SEQ ID NO: 28788
  REGION 1..466: note = neuraminidase__InfluenzaB__AFJ84364

SEQ ID NO: 29050 - protein, 466 aa, synthetic construct
  REGION 1..466: note = neuraminidase__InfluenzaB__AFJ90399
MLPSTIQTLTLFLTSGGVLLSLYVSASLSYLLYSDILLKFPSTEITAPPMPLDCANASNVQAVNRSATKGVTLLLPEPEWTYPRLSCPGSTFQRALLISPHRFGETKGNSAPLIIREPFIACGPRECKHFALTHYAAQPGGYYNGTRGDRNKLRHLISVKLGKIPTVENSIFHMAAWSGSACHDGKEWTYIGVDGPDNNALLKIKYGEAYTDTYHSYANNILRTQESACNCIGGNCYLMITDGSASGVSECRFLKIREGRIIKEIFPTGRIKHTEECTCGFASNKTIECACRDNSYTAKRPFVKLNVETDTAEIRLMCTETYLDTPRPDDGSITGPCESNGDKGSGGIKGGFVHQRMTSKIGRWYSRTMSKTERMGMGLYVKYDGDPWADSDALTFSGVMVSMEEPGWYSFGFEIKDKKCDVPCIGIEMVHDGGKETWHSAATAIYCLMGSGQLLWDTVTGVNMAL

SEQ ID NO: 29051 - protein, 466 aa, synthetic construct
  REGION 1..466: note = neuraminidase__InfluenzaB__AFJ90410
MLPSTIQTLTLFLTSGGVLLSLYVSASLSYLLYSDILLKFSQTEITAPIMPLDCANASNVQAVNRSAAKGVTLLLPKPEWTYPRLSCPGSTFQKALLISPHRFGETKGNSAPLIIREPFIACGPTECKHFALTHYAAQPGGYYNGTREDRNNLRHLISVKLGKIPTVENSIFHMAAWSGSACHDGKEWTYIGVDGPDSNALLKIKYGEAYTDTYHSYAKNILRTQESACNCIGGDCYLMITDGPASGISECRFLKIREGRIIKEIFPTGRVKHTEECTCGFASNKTIECACRDNSYTAKRPFVKLNVETDTAEIRLMCTETYLDTPRPNDGSITGPCESDGDKGSGGIKGGFVHQRMASKIGRWYSRTMSKTKRMGMGLYVKYDGDPWTDSEALALSGVMVSMEEPGWYSFGFEIKDKKCDVPCIGIEMVHDGGKTTWHSAATAIYCLMGSGQLLWDTVTGVDMAL

SEQ ID NO: 29052 - protein, 466 aa, synthetic construct
  REGION 1..466: note = neuraminidase__InfluenzaB__AFJ90432
MLPSTIQTLTLFLTSGGVLLSLYVSTSLSYLLYSDILLKFSQTEITAPIMPLDCANASNVQAVNRSAAKGVTLLLPEPEWTYPRLSCPGSTFQKALLISPHRFGETKGNSAPLIIREPFIACGPTECKHFALTHYAAQPGGYYNGTREDRNKLRHLISVKLGKIPTVENSIFHMAAWSGSACHDGKEWTYIGVDGPDSNALLKIKYGEAYTDTYHSYAKNILRTQESACNCIGGDCYLMITDGPASGISECRFLKIREGRIIKEIFPTGRVKHTEECTCGFASNKTIECACRDNSYTAKRPFVKLNVETDTAEIRLMCTETYLDTPRPNDGSITGPCESDGDKGSGGIKGGFVHQRMASKIGRWYSRTMSKTKRMGMGLYVKYDGDPWTDSEALALSGVMVSMEEPGWYSFGFEIKDKKCDVPCIGIEMVHDGGKTTWHSAATAIYCLMGSGQLLWDTVTGVDMAL

SEQ ID NO: 29053 - protein, 466 aa, synthetic construct; identical to SEQ ID NO: 28972
  REGION 1..466: note = neuraminidase__InfluenzaB__AFJ90443

SEQ ID NO: 29054 - protein, 466 aa, synthetic construct
  REGION 1..466: note = neuraminidase__InfluenzaB__AFJ90454
MLPSTIQTLTLFLTSGGVLLSLYVSASLSYLLYSDILLKFSQTEITAPIVPLDCANASNVQAVNRSAAKGVTLLLPEPEWTYPRLSCPGSTFQKALLISPHRFGETKGNSAPLIIREPFIACGPTECKHFALTHYAAQPGEYYNGTREDRNKLRHLISVKLGKIPTVENSIFHMAAWSGSACHDGKEWTYIGVDGPDSNALLKIKYGEAYTDTYHSYAKNILRTQESACNCIGGDCYLMITDGPASGISECRFLKIREGRIIKEIFPTGRVKHTEECTCGFASNKTIECACRDNSYTAKRPFVKLNVETDTAEIRLMCTETYLDTPRPNDGSITGPCESDGDKGSGGIKGGFVHQRMASKIGRWYSRTMSKTKRMGMGLYVKYDGDPWTDSEALALSGVMVSMEEPGWYSFGFEIKDKKCDVPCIGIEMVHDGGKTTWHSAATAIYCLMGSGQLLWDTVTGVDMAL

SEQ ID NO: 29055 - protein, 466 aa, synthetic construct
  REGION 1..466: note = neuraminidase__InfluenzaB__AFJ91042
MLPSTIQTLTLFLTSGGVLLSLYVSASLSYLLYSDILLKFSQTEITAPIMPLDCANASNVQAVNRSAAKGVTLLIPEPEWTYPRLSCPGSTFQKALLISPHRFGETKGNSAPLIIREPFIACGPTECKHFALTHYAAQPGGYYNGTREDRNKLRHLISVKLGKIPTVENSIFHMAAWSGSACHDGKEWTYIGVDGPDSNALLKIKYGEAYTDTYHSYAKNILRTQESACNCIGGDCYLMITDGPASGISECRFLKIREGRIIKEIFPTGRVKHTEECTCGFASNKTIECACRDNSYTAKRPFVKLNVETDTAEIRLMCTETYLDTPRPNDGSIAGPCESDGDKGSGGIKGGFVHQRMTSKIGRWYSRTMSKTKRMGMGLYVKYDGDPWTDSEALALSGVMVSMEEPGWYSFGFEIKDKKCDVPCIGIEMVHDGGKTTWHSAATAIYCLMGSGQLLWDTVTGVDMAL

SEQ ID NO: 29056 - protein, 466 aa, synthetic construct
  REGION 1..466: note = neuraminidase__InfluenzaB__AFJ91053
MLPSTIQTLTLFLTSGGVLLSLYVSASLSYLLYSDILLKFSQTEITAPIMPLDCANASNVQAVNRSAAKEVTLLLPEPEWTYPRLSCPGSTFQKALLISPHRFGETKGNSAPLIIREPFIACGPTECKHFALTHYAAQPGGYYNGTREDRNKLRHLISVKLGKIPTVENSIFHMAAWSGSACHDGKEWTYIGVDGPDSNALLKIKYGEAYTDTYHSYAKNILRTQESACNCIGGDCYLMITDGPASGISECRFLKIREGRIIKEIFPTGRVKHTEECTCGFASNKTIECACRDNSYTAKRPFVKLNVETDTAEIRLMCTETYLDTPRPNDGSITGPCESDGDKGSGGIKGGFVHQRMASKIGRWYSRTMSKTKRMGMGLYVKYDGDPWTDSEALALSGVMVSMEEPGWYSFGFEIKDKKCDVPCIGIEMVHDGGKTTWHSAATAIYCLMGSGQLLWDTVTGVDMAL

SEQ ID NO: 29057 - protein, 466 aa, synthetic construct
  REGION 1..466: note = neuraminidase__InfluenzaB__AFJ91075
MLPSTIQTLTLFLTSGGVLLSLYVSASLSYLLYSDILLKFSQTEITAPIMPLDCANASNVQAVNRSAAKGVTLLLPEPEWTYPRLSCPGSTFQKALLISPHRFGETKGNSAPLIIREPFIACGPTECKHFALTHYAAQPGGYYNGTREDRNKLRHLISVKLGKIPTVENSIFHMAAWSGSACHDGKEWTYIGVDGPDSNTLLKIKYGEAYTDTYHSYAKNILRTQESACNCIGGDCYLMITDGPASGISECRFLKIREGRIIKEIFPTGRVKHTEECTCGFASNKTIECACRDNSYTAKRPFVKLNVETDTAEIRLMCTETYLDTPRPNDGSITGPCESDGDKGSGGIKGGFVHQRMASKIGRWYSRTMSKTKRMGMGLYVKYDGDPWTDSEALALSGVMVSMEEPGWYSFGFEIKDKKCDVPCIGIEMVHDGGKTTWHSAATAIYCLMGSGQLLWDTVTGVDMAL

SEQ ID NO: 29058 - protein, 466 aa, synthetic construct; identical to SEQ ID NO: 28817
  REGION 1..466: note = neuraminidase__InfluenzaB__AFJ91086

SEQ ID NO: 29059 - protein, 466 aa, synthetic construct; identical to SEQ ID NO: 28817
  REGION 1..466: note = neuraminidase__InfluenzaB__AFJ91097

SEQ ID NO: 29060 - protein, 466 aa, synthetic construct; identical to SEQ ID NO: 28817
  REGION 1..466: note = neuraminidase__InfluenzaB__AFJ91108

SEQ ID NO: 29061 - protein, 466 aa, synthetic construct; identical to SEQ ID NO: 28817
  REGION 1..466: note = neuraminidase__InfluenzaB__AFJ91119

SEQ ID NO: 29062 - protein, 466 aa, synthetic construct; identical to SEQ ID NO: 28668
  REGION 1..466: note = neuraminidase__InfluenzaB__AFJ91707

SEQ ID NO: 29063 - protein, 466 aa, synthetic construct
  REGION 1..466: note = neuraminidase__InfluenzaB__AFK09801
MLPSTIQTLTLFLTSGGVLLSLYVSASLSYLLYSDILLKFSQTEITAPTMPLDCANASNVQAVNRSATKGVTLLLPEPEWTYPRLSCPGSTFQKALLISPHRFGETKGNSAPLIIREPFIACGPKECKHFALTHYAAQPGGYYNGTREDRNKLRHLISVKLGKIPTVENSIFHMAAWSGSACHDGREWTYIGVDGPDSNALLKIKYGEAYTDTYHSYAKNILRTQESACNCIGGDCYLMITDGSASGISECRFLKIREGRIIKEIFPTGRVKHTEECTCGFASNKTIECACRDNSYTAKRPFVKLNVETDTAEIRLMCTETYLDTPRPNDGSITGPCESNGDRGSGGIKGGFVHQRMASKIGRWYSRTMSKTKRMGMGLYVKYDGDPWTDSEALALSGVMVPMEEPGWYSFGFEIKDKKCDVPCIGIEMVHDGGKTTWHSAATAIYCLMGSGQLLWDTVTGVDMAL

SEQ ID NO: 29064 - protein, 466 aa, synthetic construct; identical to SEQ ID NO: 28792
  REGION 1..466: note = neuraminidase__InfluenzaB__AFN54669

SEQ ID NO: 29065 - protein, 466 aa, synthetic construct; identical to SEQ ID NO: 28792
  REGION 1..466: note = neuraminidase__InfluenzaB__AFN54680

SEQ ID NO: 29066 - protein, 466 aa, synthetic construct; identical to SEQ ID NO: 28817
  REGION 1..466: note = neuraminidase__InfluenzaB__AFN54691

SEQ ID NO: 29067 - protein, 466 aa, synthetic construct; identical to SEQ ID NO: 28817
  REGION 1..466: note = neuraminidase__InfluenzaB__AFN54702

SEQ ID NO: 29068 - protein, 466 aa, synthetic construct; identical to SEQ ID NO: 28817
  REGION 1..466: note = neuraminidase__InfluenzaB__AFN54713

SEQ ID NO: 29069 - protein, 466 aa, synthetic construct; identical to SEQ ID NO: 28817
  REGION 1..466: note = neuraminidase__InfluenzaB__AFN54724

SEQ ID NO: 29070 - protein, 466 aa, synthetic construct; identical to SEQ ID NO: 28817
  REGION 1..466: note = neuraminidase__InfluenzaB__AFN54735

SEQ ID NO: 29071 - protein, 466 aa, synthetic construct; identical to SEQ ID NO: 28817
  REGION 1..466: note = neuraminidase__InfluenzaB__AFN54746

SEQ ID NO: 29072 - protein, 466 aa, synthetic construct; identical to SEQ ID NO: 28817
  REGION 1..466: note = neuraminidase__InfluenzaB__AFN54757

SEQ ID NO: 29073 - protein, 466 aa, synthetic construct; identical to SEQ ID NO: 28817
  REGION 1..466: note = neuraminidase__InfluenzaB__AFN54768

SEQ ID NO: 29074 - protein, 466 aa, synthetic construct; identical to SEQ ID NO: 28817
  REGION 1..466: note = neuraminidase__InfluenzaB__AFN54779

SEQ ID NO: 29075 - protein, 466 aa, synthetic construct; identical to SEQ ID NO: 28817
  REGION 1..466: note = neuraminidase__InfluenzaB__AFN54790

SEQ ID NO: 29076 - protein, 466 aa, synthetic construct; identical to SEQ ID NO: 28817
  REGION 1..466: note = neuraminidase__InfluenzaB__AFN54801

SEQ ID NO: 29077 - protein, 466 aa, synthetic construct; identical to SEQ ID NO: 28817
  REGION 1..466: note = neuraminidase__InfluenzaB__AFN54812

SEQ ID NO: 29078 - protein, 466 aa, synthetic construct
  REGION 1..466: note = neuraminidase__InfluenzaB__AFN54834
MLPSTIQTLTLFLTSGGVLLSLYVSASLSYLLYSDILLKFSRTEITAPIMPLDCANASNVQAVNRSATKGVTLLLPEPEWTYPRLSCPGSTFQKALLISPHRFGETKGNSAPLIIREPFIACGPKECKHFALTHYAAQPGGYYNGTREDRNKLRHLISVKLGKIPTVENSIFHMAAWSGSACHDGREWIYIGVDGPDSNALLKIKYGEAYTDTYHSYAKNILRTQESACNCIGGDCYLMITDGPASGISECRFLKIREGRIIKEIFPTGRVKHTEECTCGFASNKTIECACRDNSYTAKRPFVKLNVETDTAEIRLMCTETYLDTPRPNDGSITGPCESNGDKGSGGIKGGFVHQRMASKIGRWYSRTMSKTKRMGMGLYVKYDGDPWTDSEALALSGVMVSMEEPGWYSFGFEIKDKKCDVPCIGIEMVHDGGKTTWHSAATAIYCLMGSGQLLWDTVTGVNMTL

SEQ ID NO: 29079 - protein, 466 aa, synthetic construct; identical to SEQ ID NO: 28817
  REGION 1..466: note = neuraminidase__InfluenzaB__AFN54845

SEQ ID NO: 29080 - protein, 466 aa, synthetic construct
  REGION 1..466: note = neuraminidase__InfluenzaB__AFN54856
MLPSTIQTLTLFLTSGGVLLSLYVSASLSYLLYSDILLKFSRTEITAPIMPLDCANASNVQAVNRSATKGVTLLLPEPEWTYPRLSCPGSTFQKALLISPHRFGETKGNSAPLIIREPFIACGPKECKHFALTHYAAQPGGYYNGTREDRNKLRHLISVKLGKIPTVENSIFHMAAWSGSACHDGREWTYIGVDGPDSNALLKIKYGEAYTDTYHSYAKNILRTQESACNCIGGDCYLMITDGPASGVSECRFLKIREGRIIKEIFPTGRVKHTEECTCGFASNKTIECACRDNSYTAKRPFVKLNVETDTAEIRLMCTETYLDTPRPNDGSITGPCESNGDKGSGGIKGGFVHQRMASKIGRWYSRTMSKTKRMGMGLYVKYDGDPWTDSEALALSGVMVSMEEPGWYSFGFEIKDKKCDVPCIGIEMVHDGGKTTWHSAATAIYCLMGSGQLLWDTATGVNMTL

SEQ ID NO: 29081 - protein, 466 aa, synthetic construct; identical to SEQ ID NO: 28817
  REGION 1..466: note = neuraminidase__InfluenzaB__AFN54867

SEQ ID NO: 29082 - protein, 466 aa, synthetic construct
  REGION 1..466: note = neuraminidase__InfluenzaB__AFU34598
MLPSTIQTLTLFLTSGGVLLSLYVSASLSYLLYSDILLKFSPTEITAPTMSLDCANASNVQAVNRSATKGVTFLLPEPEWTYPRLSCPGSTFQKALLISPHRFGETKGNSAPLIIREPFIACGPNECKHFALTHYAAQPGGYYNGTRGDRNKLRHLISVKLGKIPTVENSIFHMAAWSGSACHDGKEWTYIGVDGPDNNALLKVKYGEAYTDTYHSYANKILRTRESACNCIGGNCYLMITDGSASGVSECRFLKIRVGRIIKEIFPTGRVKHTEECTCGFASNKTIECACRDNSYTAKRPFVKLNVETDTAEIRLMCTDTYLDTPRPDDGSITGPCESNGDKGSGGIKGGFVHQRMESKIGRWYSRTMSKTERMGMGLYVKYDGDPWADSDALAFSGVMVSMKEPGWYSFGFEIKDKKCDVPCIGIEMVHDGGKETWHSAATAIYCLMGSGQLLWDTVTGVDVAL

SEQ ID NO: 29083 - protein, 466 aa, synthetic construct
  REGION 1..466: note = neuraminidase__InfluenzaB__AFU34609
MLPSTIQTLTLFLTSGGVLLSLYVSALLSYLLYSDILLKFSPTEITAPTMSLDCANASNVQAVNRSATRGVTFLLPEPEWAYPRLSCPGSTFQKALLISPHRFGETKGNSAPLIIREPFIACGPNECKHFALTHYAAQPGGYYNGTRGDRNKLRHLISVKLGKIPTVENSIFHMAAWSGSACHDGKEWTYIGVDGPDNDALLKVKYGEAYTDTYHSYANKILRTQESACNCIGGNCYLMITDGSASGVSECRFLKIREGRIIKEIFPTGRVKHTEECTCGFASNKTIECACRDNSYTAKRPFVKLNVETDTAEIRLMCTDTYLDTPRPDDGSITGPCESNGDKGSGGIKGGFVHQRMESKIGRWYSRTMSKTERMGMGLYVKYDGDPWADSDALAFSGVMVSMKEPGWYSFGFEIKDKKCDVPCIGIEMVHDGGKETWHSAATAIYCLMGSGQLLWDTVTGVDMAL

SEQ ID NO: 29084 - protein, 466 aa, synthetic construct
  REGION 1..466: note = neuraminidase__InfluenzaB__AFU34620
MLPSTIQTLTLFLTSGGVLLSLYVSALLSYLLYSDILLKFSPTEITAPTMSLDCANASNVQAVNRSATRGVTFLLPEPEWTYPRLSCPGSTFQKALLISPHRFGETKGNSAPLIIREPFIACGPNECKHFALTHYAAQPGGYYNGTRGDRNKLRHLISVKLGKIPTVENSIFHMAAWSGSACHDGKEWTYIGVDGPDNDALLKVKYGEAYTDTYHSYANKILRTQESACNCIGGNCYLMITDGSASGVSECRFLKIREGRIIKEIFPTGRVKHTEECTCGFASNKTIECACRDNSYTAKRPFVKLNVETDTAEIRLMCTDTYLDTPRPDDGSITGPCESNGDKGSGGIKGGFVHQRMESKIGRWYSRTMSKTERMGMGLYVKYDGDPWADSDALAFSGVMVSMKEPGWYSFGFEIKDKKCDVPCIGIEMVHDGGKETWHSAATAIYCLMGSGQLLWDTVTGVDMAL

SEQ ID NO: 29085 - protein, 466 aa, synthetic construct
  REGION 1..466: note = neuraminidase__InfluenzaB__AFU34631
MLPSTIQTLTLFLTSGGVLLSLYVSALLSYLLYSDILLKFSPTEITAPTMSLDCANASNVQAVNRSATRGVTFLLPEPEWTYPRLSCPGSTFQKALLISPHRFGETKGNSAPLIIREPFIACGPNECKHFALTHYAAQPGGYYNGTRGDRNKLRHLISVKLGKIPTVENSIFHMAAWSGSACHDGKEWTYIGVDGPDNDALLKVKYGEAYTDTYHSYANKILRTQESACNCIRGNCYLMITDGSASGVSECRFLKIREGRIIKEIFPTGRVKHTEECTCGFASNKTIECACRDNSYTAKRPFVKLNVETDTAEIRLMCTDTYLDTPRPDDGSITGPCESNGDKGSGGIKGGFVHQRMESKIGRWYSRTMSKTERMGMGLYVKYDGDPWADSDALAFSGVMVSMKEPGWYSFGFEIKDKKCDVPCIGIEMVHDGGKETWHSAATAIYCLMGSGQLLWDTVTGVDMAL

SEQ ID NO: 29086 - protein, 466 aa, synthetic construct
  REGION 1..466: note = neuraminidase__InfluenzaB__AFU34642
MLPSTIQTLTLFLTSGGVLLSLYVSASLSYLLYSDILLKFSPTEITAPTMSLDCANASNVQAVNRSATKGMTFLLPEPEWTYPRLSCPGSTFQKALLISPHRFGETKGNSAPLIIREPFIACGPNGCKHFALTHYAAQPGGYYNGTRGDRNKLRHLISVKLGKIPTVENSIFHMAAWSGSACHDGKEWTYIGVDGPDNNALLKVKYGEAYTDTYHSYANKILRTQESACNCIGGNCYLMITDGSASGVSECRFLKIREGRIIKEIFPTGRVKHTEECTCGFASNKTIECACRDNSYTAKRPFVKLNVETDTAEIRLMCTDTYLDTPRPDDGSITGPCESYGDKGSGGIKGGFVHQRMESKIGRWYSRTMSKTERMGMGLYVKYDGDPWADSDALAFSGVMVSMKEPGWYSFGFEIKDKKCDVPCIGIEMVHDGGKETWHSAATAIYCLMGSGQLLWDTVTGVDMAL

SEQ ID NO: 29087 - protein, 466 aa, synthetic construct
  REGION 1..466: note = neuraminidase__InfluenzaB__AGB97261
MLPSTIQTLTLFLTSGGVLLSLYVSASLSYLLYSDMLLKFSRTEITAPIMPLDCANASNVQAVNRSATKGVTLLLPEPEWTYPRLSCPGSTFQKALLISPHRFGETKGNSAPLIIREPFIACGPKECKHFALTHYAAQPGGYYNGTREDRNKLRHLISVKLGKIPTVENSIFHMAAWSGSACHDGREWTYIGVDGPDSNALLKIKYGEAYTDTYHSYAKNILRTQESACNCIGGDCYLMITDGPASGISECRFLKIREGRIIKEIFPTGRVKHTEECTCGFASNKTIECACRDNSYTAKRPFVKLNVETDTAEIRLMCTETYLDTPRPNDGSITGPCESNGDKGSGGIKGGFVHQRMASKIGRWYSRTMSKTKRMGMGLYVKYDGDPWTDSEALALSGVMVSMEEPGWYSFGFEIKDKKCDVPCIGIEMVHDGGKTTWHSAATAIYCLMGSGQLLWDTVTGVNMTL

SEQ ID NO: 29088 - protein, 466 aa, synthetic construct
  REGION 1..466: note = neuraminidase__InfluenzaB__AGB97267
MLPSTIQTLTLFLTSGGVLLSLYVSASLSYLLYSDILLKFSQTEITAPIMPLDCTNASNVQAVNRSAAKGVTLLLPEPEWTYPRLSCPGSTFQKALLISPHRFGEIKGNSAPLIIREPFIACGPTECKHFALTHYAAQPGGYYNGTREDRNKLRHLISVKLGKIPTVENSIFHMAAWSGSACHDGKEWTYIGIDGPDSNALLKIKYGEAYTDTYHSYAKNILRTQESACNCIGGDCYLMITDGPASGVSECRFLKIREGRIIKEIFPTGRVKHTEECTCGFASNKTIECACRDNRYTAKRPFVKLNVETDTAEIRLMCTETYLDTPRPNDGSITGPCESDGDKGSGGIKGGFVHQRMASKIGRWYSRTMSKTKRMGMGLYVKYDGDPWTDSEALALSGVMVSMEEPGWYSFGFEIKDKKCDVPCIGIEMVHDGGKTTWHSAATAIYCLMGSGQLLWDTVTGVDMAL

SEQ ID NO: 29089 - protein, 466 aa, synthetic construct; identical to SEQ ID NO: 28817
  REGION 1..466: note = neuraminidase__InfluenzaB__AGR54784

SEQ ID NO: 29090 - protein, 466 aa, synthetic construct; identical to SEQ ID NO: 28682
  REGION 1..466: note = neuraminidase__InfluenzaB__AGX15491

SEQ ID NO: 29091 - protein, 466 aa, synthetic construct
  REGION 1..466: note = neuraminidase__InfluenzaB__AGX15533
MLPSTIQTLTLFLTSGGVLLSLYVSASLSYLLYSDILLKFSPTEITAPTMPLDCANASNVQAVNRSATKGVTLLLPEPEWTYPRLSCPGSTFQKALLISPHRFGETKGNSAPLIIREPFIACGPNECKHFALTHYAAQPGGYYNGKRGDRNKLRHLISVKLGKIPTVENSIFHMAAWSGSACHDGKEWTYIGVDGPDNNALLKIKYGEAYTDTYHSYANNILRTQESACNCIGGNCYLMITDGSASGVSECRFLKIREGRIIKEIFPTGRVKHTEECTCGFASNKTIECACRDNSYTAKRPFVKLNVETDTAEIRLMCTDTYLDTPRPDDGSITGPCESNGDKGSGGIKGGFVHQRMASKVGRWYSRTMSKTERMGMGLYVKYDGDPWADSDALAFSGVMVSMKEPGWYSFGFEIKDKKCDVPCIGIEMVHDGGKETWHSAATAIYCLMGSGQLLWDTVTGVDMAL

SEQ ID NO: 29092 - protein, 466 aa, synthetic construct; identical to SEQ ID NO: 28635
  REGION 1..466: note = neuraminidase__InfluenzaB__AGX15545

SEQ ID NO: 29093 - protein, 466 aa, synthetic construct; identical to SEQ ID NO: 28635
  REGION 1..466: note = neuraminidase__InfluenzaB__AGX15556

SEQ ID NO: 29094 - protein, 466 aa, synthetic construct
  REGION 1..466: note = neuraminidase__InfluenzaB__AGX15567
MLPSTIQTLTLFLTSGGVLLSLYVSASLSYLLYSDILLKFPSTEITAPTMPLDCANASNVQAVNRSATKGVTLLLPEPEWTYPRLSCPGSTFQKALLISPHRFGETKGNSAPLIIREPFIACGPKECKHFALTHYAAQPGGYYNGTRGDRNKLRHLISVKLGKIPTVENSIFHMAAWSGSACHDGKEWTYIGVDGPDNNALLKIKYGEAYTDTYHSYANNILRTQESACNCIGGNCYLMITDGSASGVSECRFLKIREGRIIKEIFPTGRIKHTEECTCGFASNKTIECACRDNSYTAKRPFVKLNVETDTAEIRLMCTETYLDTPRPDDGSITGPCESNGDKGSGGIKGGFVHQRMASKIGRWYSRTMSKTERMGMGLYVKYDGDPWADSDALAFSGVMVSMEEPGWYSFGFEIKDKKCDVPCIGIEMVHDGGKETWHSAATAIYCLMGSGQLLWDTVTGVNMAL

SEQ ID NO: 29095 - protein, 466 aa, synthetic construct; identical to SEQ ID NO: 28635
  REGION 1..466: note = neuraminidase__InfluenzaB__AGX15578

SEQ ID NO: 29096 - protein, 466 aa, synthetic construct; identical to SEQ ID NO: 28635
  REGION 1..466: note = neuraminidase__InfluenzaB__AGX15589

SEQ ID NO: 29097 - protein, 466 aa, synthetic construct; identical to SEQ ID NO: 28841
  REGION 1..466: note = neuraminidase__InfluenzaB__AGX15600

SEQ ID NO: 29098 - protein, 466 aa, synthetic construct; identical to SEQ ID NO: 28841
  REGION 1..466: note = neuraminidase__InfluenzaB__AGX15611

SEQ ID NO: 29099 - protein, 466 aa, synthetic construct; identical to SEQ ID NO: 28961
  REGION 1..466: note = neuraminidase__InfluenzaB__AGX15644

SEQ ID NO: 29100 - protein, 466 aa, synthetic construct; identical to SEQ ID NO: 28961
  REGION 1..466: note = neuraminidase__InfluenzaB__AGX15655

SEQ ID NO: 29101 - protein, 466 aa, synthetic construct; identical to SEQ ID NO: 28961
  REGION 1..466: note = neuraminidase__InfluenzaB__AGX15666

SEQ ID NO: 29102 - protein, 466 aa, synthetic construct; identical to SEQ ID NO: 28961
  REGION 1..466: note = neuraminidase__InfluenzaB__AGX15679

SEQ ID NO: 29103 - protein, 466 aa, synthetic construct
  REGION 1..466: note = neuraminidase__InfluenzaB__AGX15690
MLPSTIQTLTLFLTSGGVLLSLYVSASLSYLLYSDILLKFSPTEITAPTMPLDCANASNVQAVNRSATKGVTLLLPEPEWTYPRLSCPGSTFQKALLISPHRFGETKGNSAPLIIREPFIACGPNECKHFALTHYAAQPGGYYNGTRGDRNKLRHLISVKLGKIPTVENSIFHMAAWSGSACHDGKEWTYIGVDGPDNNALLKVKYGEAYTDTYHSYANKILRTQESACNCIGGNCYLMITDGSASGVSECRFLKIREGRIIKEIFPTGRVKHTEECTCGFASNKTIECACRDNSYTAKRPFVKLNVETDTAEIRLMCTDTYLDTPRPNDGSITGPCESNGDKGSGGIKGGFVHQRMKSKIGRWYSRTMSKTERMGMGLYVKYDGDPWADSDALAFSGVMVSMKEPGWYSFGFEIKDKKCDVPCIGIEMVHDGGKETWHSAATAIYCLMGSGQLLWDTVTGVDMAL

SEQ ID NO: 29104 - protein, 466 aa, synthetic construct; identical to SEQ ID NO: 28961
  REGION 1..466: note = neuraminidase__InfluenzaB__AGX15701

SEQ ID NO: 29105 - protein, 466 aa, synthetic construct
  REGION 1..466: note = neuraminidase__InfluenzaB__AGX15712
MLPSTIQTLTLFLTSGGVLLSLYVSASLSYLLYSDILLKFSPTEITAPTMPLDCANASNVQAVNRSATKGVTLLLPEPEWTYPRLSCPGSTFQKALLISPHRFGEPKGNSAPLIIREPFIACGPNECKHFALTHYAAQPGGYYNGTRGDRNKLRHLISVKLGKIPTVENSIFHMAAWSGSACHDGKEWTYIGVDGPDNNALLKVKYGEAYTDTYHSYANKILRTQESACNCIGGNCYLMITDGSASGVSECRFLKIREGRIIKEIFPTGRVKHTEECTCGFASNKTIECACRDNSYTAKRPFVKLNVETDTAEIRLMCTDTYLDTPRPNDGSITGPCESDGDKGSGGIKGGFVHQRMESKIGRWYSRTMSKTERMGMGLYVKYDGDPWADSDALAFSGVMVSMKEPGWYSFGFEIKDKKCDVPCIGIEMVHDGGKETWHSAATAIYCLMGSGQLLWDTVTGVNMAL

SEQ ID NO: 29106 - protein, 466 aa, synthetic construct; identical to SEQ ID NO: 28961
  REGION 1..466: note = neuraminidase__InfluenzaB__AGX15723

SEQ ID NO: 29107 - protein, 466 aa, synthetic construct; identical to SEQ ID NO: 28961
  REGION 1..466: note = neuraminidase__InfluenzaB__AGX15745

SEQ ID NO: 29108 - protein, 466 aa, synthetic construct; identical to SEQ ID NO: 28961
  REGION 1..466: note = neuraminidase__InfluenzaB__AGX15757

SEQ ID NO: 29109 - protein, 466 aa, synthetic construct
  REGION 1..466: note = neuraminidase__InfluenzaB__AGX15768
MLPSTIQTLTLFLTSGGVLLSLYVSASLSYLLYSDILLKFSPTEITAPTMPLDCANASNVQAVNRSATKGVTLLLPEPEWTYPRLSCPGSTFQKALLISPHRFGETKGNSAPLIIREPFIACGPNECKHFALTHYAAQPGGYYNGTRGDRNKLRHLISVKLGKIPTVENSIFHMAAWSGSACHDGKEWTYIGVDGPDNNALLKVKYGEAYTDTYHSYANKILRTQESACNCIGGNCYLMITDGSASGVSECRFLKIREGRIIKEIFPTGRVKHTEECTCGFASNKTIECACRDNSYTAKRPFVKLNVETDTAEIRLMCTDTYLDTPRPNDGSITGPCESNGDKGSGGIKGGFVHQRMESKIGRWYSRTMSKTERMGMGLYVKYDGDPWADSDALAFSGVMISMKEPGWYSFGFEIKDKKCDVPCIGIEMVHDGGKETWHSAATAIYCLMGSGQLLWDTVTGVDMAL

SEQ ID NO: 29110 - protein, 466 aa, synthetic construct
  REGION 1..466: note = neuraminidase__InfluenzaB__AGX15801
MLPSTIQTLTLFLTSGGVLLSLYVSASLSYLLYSDILLKFSPTEITAPTMSLDCVNASNVQAVNRSATKGVTLLLPEPEWTYPRLSCPGSTFQKALLISPHRFGETKGNSAPLIIREPFIACGPNECKHFALTHYAAQPGGYYNGTRGDRNKLRHLISVKLGKIPTVENSIFHMAAWSGSACHDGKEWTYIGVDGPDNNALLKVKYGEAYTDTYHSYANKILRTQESACNCIGGNCYLMITDGSASGVSECRFLKIREGRIIKEIFPTGRVKHTEECTCGFASNKTIECACRDNSYTAKRPFVKLNVETDTAEIRLMCTDTYLDTPRPNDGSITGPCESNGDKGSGGIKGGFVHQRMESKIGRWYSRTMSKTERMGMGLYVKYDGDPWADSDALAFSGVMVSMKEPGWYSFGFEIKDKKCDVPCIGIEMVHDGGKETWHSAATAIYCLMGSGQLLWDTVTGVDMAL

SEQ ID NO: 29111 - protein, 466 aa, synthetic construct; identical to SEQ ID NO: 28961
  REGION 1..466: note = neuraminidase__InfluenzaB__AGX15812

SEQ ID NO: 29112 - protein, 466 aa, synthetic construct; identical to SEQ ID NO: 28961
  REGION 1..466: note = neuraminidase__InfluenzaB__AGX15823

SEQ ID NO: 29113 - protein, 466 aa, synthetic construct; identical to SEQ ID NO: 28895
  REGION 1..466: note = neuraminidase__InfluenzaB__AGX15845

SEQ ID NO: 29114 - protein, 466 aa, synthetic construct; identical to SEQ ID NO: 28872
  REGION 1..466: note = neuraminidase__InfluenzaB__AGX15856

SEQ ID NO: 29115 - protein, 466 aa, synthetic construct; identical to SEQ ID NO: 28895
  REGION 1..466: note = neuraminidase__InfluenzaB__AGX15867

SEQ ID NO: 29116 - protein, 466 aa, synthetic construct; identical to SEQ ID NO: 28895
  REGION 1..466: note = neuraminidase__InfluenzaB__AGX15889

SEQ ID NO: 29117 - protein, 466 aa, synthetic construct
  REGION 1..466: note = neuraminidase__InfluenzaB__AGX15900
MLPSTIQTLTLFLTSGGVLLSLYVSALLSYLLYSDILLKFSPTEITAPTMSLDCANTSNVQAVNRSATKGVTFLLPEPEWTYPRLSCPGSTFQKALLISPHRFGETKGNSAPLIIREPFIACGPNECKHFALTHYAAQPGGYYNGTRGDRNKLRHLISVKLGKIPTVENSIFHMAAWSGSACHDGKEWTYIGVDGPDNDALLKVKYGEAYTDTYHSYANKILRTQESACNCIGGNCYLMITDGSASGVSECRFLKIREGRIIKEIFPTGRVKHTEECTCGFASNKTIECACRDNSYTAKRPFVKLNVETDTAEIRLMCTDTYLDTPRPDDGSITGPCESNGDKGSGGIKGGFVHQRMESKIGRWYSRTMSKTERRGMGLYVKYDGDPWADSDALAFSGVMVSMKEPGWYSFGFEIKDKKCDVPCIGIEMVHDGGKETWHSAATAIYCLMGSGQLLWDTVTGVDMAL

SEQ ID NO: 29118 - protein, 466 aa, synthetic construct; identical to SEQ ID NO: 28895
  REGION 1..466: note = neuraminidase__InfluenzaB__AGX15911

SEQ ID NO: 29119 - protein, 466 aa, synthetic construct
  REGION 1..466: note = neuraminidase__InfluenzaB__AGX15933
MLPSTIQTLTLFLTSGGVLLSLYVSASLSYLLYSDILLKFSPTEITAPAMPLDCANASNVQAVNRSATKGVTLLLPEPEWTYPRLSCPGSTFQKALLISPHRFGETKGNSAPLIIREPFIACGPNECKHFALTHYAAQPGGYYNGTRGDRNKLRHLISVKLGKIPTVENSIFHMAAWSGSACHDGKEWTYIGVDGPDNNALLKVKYGEAYTDTYHSYANKILRTQESACNCIGGNCYLMITDGSASGVSECRFLKIREGRIIKEIFPTGRVKHTEECTCGFASNKTIECACRDNSYTAKRPFVKLNVETDTAEIRLMCTDTYLDTPRPNDGSITGPCESDGDKGSGGIKGGFVHQRMESKIGRWYSRTMSKTERMGMGLYVKYDGDPWADSDALAFSGVMVSMKEPGWYSFGFEIKDKKCDVPCIGIEMVHDGGKETWHSAATAIYCLMGSGQLLWDTVTGVDMAL

SEQ ID NO: 29120 - protein, 466 aa, synthetic construct; identical to SEQ ID NO: 28895
  REGION 1..466: note = neuraminidase__InfluenzaB__AGX15944

SEQ ID NO: 29121 - protein, 466 aa, synthetic construct; identical to SEQ ID NO: 28956
  REGION 1..466: note = neuraminidase__InfluenzaB__AGX15966

SEQ ID NO: 29122 - protein, 466 aa, synthetic construct
  REGION 1..466: note = neuraminidase__InfluenzaB__AGX15988
MLPSTIQTLTLFLTSGGVLLSLYVSASLSYLLYSDILLKFSPTEITAPTMPLDCANASNVQAVNRSATKGVTLLLPEPEWTYPRLSCPGSTFQKALLISPHRFGETKGNSAPLIIREPFIACGPNECKHFALTHYAAQPGGYYNGTRGDRNKLRHLISVKLGKIPTVENSIFHMAAWSGSACHDGKEWTYIGVDGPDNNALLKVKYGEAYTDTYHSYANKILRTQESACNCIGGNCYLMITDGSASGVSECRFLKIREGRIIKEIFPTGRVKHTEECTCGFASNKTIECACRDNSYTAKRPFVKLNVETDTAEVRLMCTDTYLDTPRPNDGSITGPCESDGDKGSGGIKGGFVHQRMESKIGRWYSRTMSKTERMGMGLYVKYDGDPWADSDALTFSGVMVSMKEPGWYSFGFEIKDKKCDVPCIGIEMVHDGGKETWHSAATAIYCLMGSGQLLWDTVTGVDMAL

SEQ ID NO: 29123 - protein, 466 aa, synthetic construct; identical to SEQ ID NO: 28956
  REGION 1..466: note = neuraminidase__InfluenzaB__AGX15999

SEQ ID NO: 29124 - protein, 466 aa, synthetic construct; identical to SEQ ID NO: 28956
  REGION 1..466: note = neuraminidase__InfluenzaB__AGX16010

SEQ ID NO: 29125 - protein, 466 aa, synthetic construct; identical to SEQ ID NO: 28956
  REGION 1..466: note = neuraminidase__InfluenzaB__AGX16021

SEQ ID NO: 29126 - protein, 466 aa, synthetic construct
  REGION 1..466: note = neuraminidase__InfluenzaB__AGX16032
MLPSTIQTLTLFLTSGGVLLSLYVSASLSYLLYSDILLKFSQTEITAPIMPLDCANASNVQAVNRSATKGVTLLLPEPEWTYPRLSCPGSTFQKALLISPHRFGETKGNSAPLIIREPFIACGPKECKHFALTHYAAQPGGYYNGTREDRNKLRHLISVKLGKIPTVENSIFHMAAWSGSACHDGKEWTYIGVDGPDSNALLKIKYGEAYTDTYHSYAKNILRTQESACNCIGGDCYLMITDGPASGISECRFLKIREGRIIKEIFPTGRVKHTEECTCGFASNKTIECACRDNSYTAKRPFVKLNVETDTAEIRLMCTETYLDTPRPNDGSITGPCESDGDKGSGGIKGGFVHQRMASKIGRWYSRTMSKTKRMGMGLYVKYDGDPWTDSEALALSGVMVSMEEPGWYSFGFEIKDKKCDVPCIGIEMVHDGGKTTWHSAATAIYCLMGSGQLLWDTVTGVDMAL

SEQ ID NO: 29127 - protein, 466 aa, synthetic construct; identical to SEQ ID NO: 28743
  REGION 1..466: note = neuraminidase__InfluenzaB__AGX16043

SEQ ID NO: 29128 - protein, 466 aa, synthetic construct; identical to SEQ ID NO: 28745
  REGION 1..466: note = neuraminidase__InfluenzaB__AGX16054

SEQ ID NO: 29129 - protein, 466 aa, synthetic construct
  REGION 1..466: note = neuraminidase__InfluenzaB__AGX16087
MLPSTIQTLTLFLTSGGVLLSLYVSASLSYLLYSDILLKFSQTEITAPIMPLDCANASNVQAVNRSATKGVTLLLPEPEWTYPRLSCPGSTFQKALLISPHRFGETKGNSAPLIIREPFIACGPKECKHFALTHYAAQPGGYYNGTREDRNKLRHLISVKLGKIPTVENSIFHMAAWSGSACHDGREWTYIGVDGPDSNALLKIKYGEAYTDTYHSYAKNILRTQESACNCIGGDCYLMITDGPASGISECRFLKIREGRIIKEIFPTGRVKHTEECTCGFASNKTIECACRDNNYTAKRPFVKLNVETDTAEIRLMCTETYLDTPRPNDGSITGPCESNGDKGSGGIKGGFVHQRMASKIGRWYSRTMSKTKRMGMGLYVKYDGDPWTDSEALALSGVMVSMEEPGWYSFGFEIKDKKCDVPCIGIEMVHDGGKTTWHSAATAIYCLMGSGQLLWDTVTGVDMAL

SEQ ID NO: 29130 - protein, 466 aa, synthetic construct
  REGION 1..466: note = neuraminidase__InfluenzaB__AGX16109
MLPSTIQTLTLFLTSGGVLLSLYVSASLSYLLYSDILLKFSQTEITAPTMPLDCANASNVQAVNRSATKGVTLLLPEPEWTYPRLSCPGSTFQKALLISPHRFGETKGNSAPLIIREPFIACGPKECKHFALTHYAAQPGGYYNGTREDRNKLRHLISVKLGKIPTVENSIFHMAAWSGSACHDGREWTYVGVDGPDSNALLKIKYGEAYTDTYHSYAKNILRTQESACNCIGGDCYLMITDGPASGISECRFLKIREGRIIKEIFPTGRVKHTEECTCGFASNKTIECACRDNSYTAKRPFVKLDVETDTAEIRLMCTETYLDTPRPNDGSITGPCEANGDKGSGGIKGGFVHQRMASKIGRWYSRTMSKTKRMGMGLYVKYDGDPWTDSEALALSGVMVSMEEPGWYSFGFEIKDKKCDVPCIGIEMVHDGGKTTWHSAATAIYCLMGSGQLLWDTVTGVDMAL

SEQ ID NO: 29131 - protein, 466 aa, synthetic construct
  REGION 1..466: note = neuraminidase__InfluenzaB__AGX16120
MLPSTIQTLTLFLTSGGVLLSLYVSASLSYLLYSDILLKFSTTEITAPTMPLDCANASNVQAVNRSATKGVTFLLPEPEWTYPRLSCPGSTFQKALLISPHRFGETKGNSAPLIIREPFIACGPKECKHFALTHYAAQPGGYYNGTREDRNKLRHLISVKLGKIPTVENSIFHMAAWSGSACHDGKEWTYIGVDGPDSNALLKIKYGEAYTDTYHSYANNILRTQESACNCIGGNCYLMITDGSASGISECRFLKIREGRIIKEIFPTGRVKHTEECTCGFASNKTIECACRDNSYTAKRPFVKLNVETDTAEIRLMCTETYLDTPRPDDGSITGPCESNGNKGSGGIKGGFVHQRMASKIGRWYSRTMSKTKRMGMGLYVKYDGDPWTDSDALALSGVMVSMEEPGWYSFGFEIKDKKCDVPCIGIEMVHDGGKETWHSAATAIYCLMGSGQLLWDTVTGVDMAL

SEQ ID NO: 29132 - protein, 466 aa, synthetic construct; identical to SEQ ID NO: 29131
  REGION 1..466: note = neuraminidase__InfluenzaB__AGX16131

SEQ ID NO: 29133 - protein, 466 aa, synthetic construct; identical to SEQ ID NO: 29131
  REGION 1..466: note = neuraminidase__InfluenzaB__AGX16142

SEQ ID NO: 29134 - protein, 466 aa, synthetic construct
  REGION 1..466: note = neuraminidase__InfluenzaB__AGX16153
MLPSTIQTLTLFLTSGGVLLSLYVSASLSYLLYSDILLKFSQTEITAPIMPLDCANASNVQAVNRSATRGVTLLLPEPEWTYPRLSCPGSTFQKALLISPHRFGETKGNSAPLIIREPFIACGPKECKHFALTHYAAQPGGYYNGTREDRNKLRHLISVKLGKIPTVENSIFHMTAWSGSACHDGREWTYIGVDGPDSNALLKIKYGEAYTDTYHSYAKNILRTQESACNCIGGDCYLMITDGPASGISECRFLKIREGRIIKEIFPTGRVKHTEECTCGFASNKTIECACRDNSYTAKRPFVKLNVETDTAEIRLMCTETYLDTPRPNDGSITGPCESNGDKGSGGIKGGFVHQRMASKIGRWYSRTMSKTKRMGMGLYVKYDGDPWTDSEALALSGVMVSMEEPGWYSFGFEIKDKKCDVPCIGIEMVHDGGKTTWHSAATAIYCLMGSGQLLWDTVTGVDMAL

SEQ ID NO: 29135 - protein, 466 aa, synthetic construct; identical to SEQ ID NO: 29129
  REGION 1..466: note = neuraminidase__InfluenzaB__AGX16164

SEQ ID NO: 29136 - protein, 466 aa, synthetic construct; identical to SEQ ID NO: 28788
  REGION 1..466: note = neuraminidase__InfluenzaB__AGX16197

SEQ ID NO: 29137 - protein, 466 aa, synthetic construct; identical to SEQ ID NO: 28788
  REGION 1..466: note = neuraminidase__InfluenzaB__AGX16208

SEQ ID NO: 29138 - protein, 466 aa, synthetic construct; identical to SEQ ID NO: 28788
  REGION 1..466: note = neuraminidase__InfluenzaB__AGX16219

SEQ ID NO: 29139 - protein, 466 aa, synthetic construct; identical to SEQ ID NO: 28627
  REGION 1..466: note = neuraminidase__InfluenzaB__AGX16230

SEQ ID NO: 29140 - protein, 466 aa, synthetic construct
  REGION 1..466: note = neuraminidase__InfluenzaB__AGX16241
MLPSTIQTLTLFLTSGGVLLSLYVSASLSYLLYSDILLKFSQTEITAPIMPLDCANASNVQAVNHSATKGVTLLLPEPEWTYPRLSCPGSTFQKALLISPHRFGETKGNSAPLIIREPFIACGPKECKHFALTHYAAQPGGYYNGTREDRNKLRHLISVKLGKIPTVENSIFHMAAWSGSACHDGREWTYIGVDGPDSNALLKIKYGEAYTDTYHSYAKNILRTQESACNCIGGDCYLMITDGPASGISECRFLKIREGRIIKEIFPTGRVKHTEECTCGFASNKTIECACRDNSYTAKRPFVKLNVETDTAEIRLMCTETYLDTPRPNDGSIIGPCESNGDKGSGGIKGGFVHQRMASKIGRWYSRTMSKTKRMGMGLYVKYDGDPWTDSEALTLSGVMVSMEEPGWYSFGFEIKDKKCDVPCIGIEMVHDGGKTTWHSAATAIYCLMGSGQLLWDTVTGVDMAL

SEQ ID NO: 29141 - protein, 466 aa, synthetic construct
  REGION 1..466: note = neuraminidase__InfluenzaB__AGX16252
MLPSTIQTLTLFLTSGGVLLSLYVSASLSYLLYSDILLKFSQTEITAPIMPLDCANASNVQAVNRSAAKGVTLLLPEPEWAYPRLSCPGSTFQKALLISPHRFGETKGNSAPLIIREPFIACGPTECKHFALTHYAAQPGGYYNGTREDRNKLRHLISVKLGKIPTVENSIFHMAAWSGSACHDGKEWTYIGVDGPDSNALLKIKYGEAYTDTYHSYAKNILRTQESACNCIGGDCYLMITDGPASGISECRFLKIREGRIIKEIFPTGRVKHTEECTCGFASNKTIECACRDNRYTAKRPFVKLNVETDTAEIRLMCTETYLDTPRPNDGSITGPCESDGDKGSGGIKGGFVHQRMASKIGRWYSRTMSKTKRMGMGLYVKYDGDPWTDSEALALSGVMVSMEEPGWYSFGFEIKDKKCDVPCIGIEMVHDGGKTTWHSAATAIYCLMGSGQLLWDTVTGVDMAL

SEQ ID NO: 29142 - protein, 466 aa, synthetic construct; identical to SEQ ID NO: 28788
  REGION 1..466: note = neuraminidase__InfluenzaB__AGX16274

SEQ ID NO: 29143 - protein, 466 aa, synthetic construct
  REGION 1..466: note = neuraminidase__InfluenzaB__AGX16285
MLPSTIQTLTLFLTSGGVLLSLYVSASLSYLLYSDILLKFSQTEITAPIMPLDCANASNVQAVNRSAAKGVTLLLPEPEWTYPRLSCPGSTFQKALLISPHRFGETKGNSAPLIIREPFIACGPTECKHFALTHYAAQPGGYYNGTREDRNKLRHLISVKLGKIPTVENSIFHMAAWSGSACHDGKEWTYIGVDGPDSNALLKIKYGEAYTDTYHSYAKNILRTQESACNCIGGDCYLMITDGPASGISECRFLKIREGRIIKEIFPTGRVKHTEECTCGFASNKTIECACRDNSYTAKRPFVKLNVETDTAEIRLMCTETYLDTPRPNDGSTTGPCESDGDKGSGGIKGGFVHQRMASKIGRWYSRTMSKTKRMGMGLYVKYDGDPWTDSEALALSGVMVSMEEPGWYSFGFEIKDKKCDVPCIGIEMVHDGGKTTWHSAATAIYCLMGSGQLLWDTVTGVDMAL

SEQ ID NO: 29144 - protein, 466 aa, synthetic construct; identical to SEQ ID NO: 28788
  REGION 1..466: note = neuraminidase__InfluenzaB__AGX16296

SEQ ID NO: 29145 - protein, 466 aa, synthetic construct; identical to SEQ ID NO: 28635
  REGION 1..466: note = neuraminidase__InfluenzaB__AGX16307

SEQ ID NO: 29146 - protein, 466 aa, synthetic construct; identical to SEQ ID NO: 28788
  REGION 1..466: note = neuraminidase__InfluenzaB__AGX16329

SEQ ID NO: 29147 - protein, 466 aa, synthetic construct
  REGION 1..466: note = neuraminidase__InfluenzaB__AGX16362
MLPSTIQTLTLFLTSGGVLLSLYVSASLSYLLYSDILLKFSQTEITAPIMPLDCANASNVQAVNRSAAKGVTLLLPEPEWTYPRLSCPGSTFQKALLISPHRFGETKGNSAPLIIREPFIACGPTECKHFALTHYAAQPGGYYNGTREDRNKLRHLISVKLGKIPTVENSIFHMAAWSGSACHDGKEWTYIGVDGPDSNALLKIKYGEAYTDTYHSYAKNILRTQESACNCIGGDCYLMITDGPASGVSECRFLKIREGRIIKEIFPTGRVKHTEECTCGFASNKTIECACRDNSYTAKRPFVKLNVETDTAEIRLMCTETYLDTPRPNDGSITGPCESDGDKGSGGIKGGFVHQRMASKIGRWYSRTMSKTKRMGMGLYVKYDGDPWTDSEALALSGVMVSMEEPGWYSFGFEIKDKKCDVPCIGIEMVHDGGKTTWHSAATAIYCLMGSGQLLWDTVTGVDMAL

SEQ ID NO: 29148 - protein, 466 aa, synthetic construct; identical to SEQ ID NO: 28960
  REGION 1..466: note = neuraminidase__InfluenzaB__AGX16373

SEQ ID NO: 29149 - protein, 466 aa, synthetic construct
  REGION 1..466: note = neuraminidase__InfluenzaB__AGX16384
MLPSTIQTLTLFLTSGGVLLSLYVSASLSYLLYSDILLKFSQTEITAPIMPLDCANASNVQAVNRSAAKGVTLLLPEPEWTYPRLSCPGSTFQKALLISPHRFGETKGNSAPLIIREPFIACGPTECKHFALTHYAAQPGGYYNGTREDRNKLKHLISVKLGKIPTVENSIFHMAAWSGSACHDGKEWTYIGVDGPDSNALLKIKYGEAYTDTYHSYAKNILRTQESACNCIGGDCYLMITDGPASGISECRFLKIREGRIIKEIFPTGRVKHTEECTCGFASNKTIECACRDNSYTAKRPFVKLNVETDTAEIRLMCTETYLDTPRPNDGSITGPCESDGDKGSGGIKGGFVHQRMASKIGRWYSRTMSKTKRMGMGLYVKYDGDPWTDSEALALSGVMVSMEEPGWYSFGFEIKDKKCDVPCIGIEMVHDGGKTTWHSAATAIYCLMGSGQLLWDTVTGVDMAL

SEQ ID NO: 29150 - protein, 466 aa, synthetic construct; identical to SEQ ID NO: 28817
  REGION 1..466: note = neuraminidase__InfluenzaB__AGX16406

SEQ ID NO: 29151 - protein, 466 aa, synthetic construct; identical to SEQ ID NO: 28817
  REGION 1..466: note = neuraminidase__InfluenzaB__AGX16427

SEQ ID NO: 29152 - protein, 466 aa, synthetic construct; identical to SEQ ID NO: 28817
  REGION 1..466: note = neuraminidase__InfluenzaB__AGX16438

SEQ ID NO: 29153 - protein, 466 aa, synthetic construct; identical to SEQ ID NO: 28817
  REGION 1..466: note = neuraminidase__InfluenzaB__AGX16449

SEQ ID NO: 29154 - protein, 466 aa, synthetic construct; identical to SEQ ID NO: 28817
  REGION 1..466: note = neuraminidase__InfluenzaB__AGX16460

SEQ ID NO: 29155 - protein, 466 aa, synthetic construct
  REGION 1..466: note = neuraminidase__InfluenzaB__AGX16471
MLPSTIQTLTLFLTSGGVLLSLYVSASLSYLLYSDILLKFSQTEITAPIMPLDCANASNVQAVNRSAAKGVTLLLPEPEWTYPRLSCPGSTFQKALLISPHRFGETKGNSAPLIIREPFIACGPTECKHFALTHYAAQPGGYYNGTREDRNKLRHLISVKLGKIPTVENSIFHMAAWSGSACHDGKEWTYIGVDGPDSNALLKIKYGEAYTDTYHSYAKNILRTQESACNCIGGDCYLMITDGPASGISECRFLKIREGRIIKEIFPTGRVKHTEECTCGFASNKTIECACRDNSYTAKRPFVKLNVETDTAEIRLMCTKTYLDTPRPNDGSITGPCESDGDKGSGGIKGGFVHQRMASKIGRWYSRTMSKTRRMGMGLYVKYDGDPWTDSEALALSGVMVSMEEPGWYSFGFEIKDKKCDVPCIGIEMVHDGGKTTWHSAATAIYCLMGSGQLLWDTVTGVDMAL

SEQ ID NO: 29156 - protein, 466 aa, synthetic construct; identical to SEQ ID NO: 28817
  REGION 1..466: note = neuraminidase__InfluenzaB__AGX16482

SEQ ID NO: 29157 - protein, 466 aa, synthetic construct
  REGION 1..466: note = neuraminidase__InfluenzaB__AGX16493
MLPSTIQTLTLFLTSGGVLLSLYVSASLSYLLYSDILLKFSQTEITAPIMPLDCANASNVQAVNRSAAKGVTLLLPEPEWTYPRLSCPGSTFQKALLISPHRFGETKGNSAPLIIREPFIACGPTECKHFALTHYAAQPGGYYNGTREDRNKLRHLISVKLGKIPTVENSIFHMAAWSGSACHDGKEWTYIGVDGPDSNALLKIKYGEAYTDTYHSYAKNILRTQESACNCIGGDCYLMITDGPASGISECRFLKIREGRIIKEIFPTGRVKHTEECTCGFASNKTIECACRDNSYTAKRPFVKLNVETDTAEIRLMCTETYLDTPRPNDGSITGPCESDGDKGSGGIKGGFVHQRMASKIGRWYSRTMSKTKRMGMGLYVKYDGDPWTDSEALALSGVVVSMEEPGWYSFGFEIKDKKCDVPCIGIEMVHDGGKTTWHSAATAIYCLMGSGQLLWDTVTGVDMAL

SEQ ID NO: 29158 - protein, 466 aa, synthetic construct; identical to SEQ ID NO: 28616
  REGION 1..466: note = neuraminidase__InfluenzaB__AGX16504

SEQ ID NO: 29159 - protein, 466 aa, synthetic construct; identical to SEQ ID NO: 28616
  REGION 1..466: note = neuraminidase__InfluenzaB__AGX16515

SEQ ID NO: 29160 - protein, 466 aa, synthetic construct
  REGION 1..466: note = neuraminidase__InfluenzaB__AGX16548
MLPSTIQTLTLFLTSGGVLLSLYVSASLSYLLYSDILLKFSPTEITAPTMPLDCANASNVQAVNRSATKGVTLLLPEPEWTYPRLSCPGSTFQKALLISPHRFGETKGNSAPLIIREPFIACGPKECKHFALTHYAAQPGGYYNGTRGDRNKLRHLISVKLGKIPTVENSIFHMAAWSGSACHDGKEWTYIGVDGPDNNALLKIKYGEAYTDTYHSYANNILRTQESACNCIGGNCYLMITDGSASGISECRFLKIREGRIIKEIFPTGRVKHTEECTCGFASNKTIECACRDNSYTAKRPFVKLNVETDTAEIRLMCTETYLDTPRPDDGSITGPCESNGDNGSGGIKGGFVHQRMASKIGRWYSRTMSKTKRMGMGLYVKYDGDPWADSDALALSGVMVSMEEPGWYSFGFEIKDKKCDVPCIGIEMVHDGGKETWHSAATAIYCLMGSGQLLWDTVTGVDMAL

SEQ ID NO: 29161 - protein, 466 aa, synthetic construct
  REGION 1..466: note = neuraminidase__InfluenzaB__AGX16559
MLPSTIQTLTLFLTSGGVLLSLYVSASLSYLLYSDILLKFSPTEIIAPTMPLDCANASNVQAVNRSATKGVTLLLPEPEWTYPRLSCPGSTFQKALLISPHRFGETKGNSAPLIIREPFIACGPKECKHFALTHYAAQPGGYYNGTRGDRNKLRHLISVKLGKIPTVENSIFHMAAWSGSACHDGKEWTYIGVDGPDNNALLKIKYGEAYTDTYHSYANNILRTQESACNCIGGNCYLMITDGSASGISECRFLKIREGRIIKEIFPTGRVKHTEECTCGFASNKTIECACRDNSYTAKRPFVKLNVETDTAEIRLMCTETYLDTPRPDDGSITGPCESNGDKGSGGIKGGFVHQRMASKIGRWYSRTMSKTKRMGMGLYVKYDGDPWADSDALALSGVMVSMEEPGWYSFGFEIRDKKCDVPCIGIEMVHDGGKETWHSAATAIYCLMGSGQLLWDTVTGVDMAL

SEQ ID NO: 29162 - protein, 466 aa, synthetic construct
  REGION 1..466: note = neuraminidase__InfluenzaB__AGX16581
MLPSTIQTLTLFLTSGGVLLSLYVSASLSYLLYSDILLKFSPTEIIAPTMPLDCANASNVQAVNRSATKGVTLLLPEPEWTYPRLSCPGSTFQKALLISPHRFGETKGNSAPLIIREPFIACGPKECKHFALTHYAAQPGGYYNGTRGDRNKLRHLISVKLGKIPTVENSIFHMAAWSGSACHDGKEWTYIGVDGPDNNALLKIKYGEAYTDTYHSYANNILRTQESACNCIGGNCYLMITDGSASGISECRFLKIREGRIIKEIFPTGRVKHTEECTCGFASNKTIECACRDNSYTAKRPFVKLNVETDTAEIRLMCTETYLDTPRPDDGSITGPCESNGDKGSGGIKGGFVHQRMASKIGRWYSRTMSKTKRMGMGLYVKYDGDPWADSDALALSGVMVSMEEPGWYSFGFEIKDKKCDVPCIGIEMVHDGGKETWHSAATAIYCLMGSGQLLWDTVTGVDMAL

SEQ ID NO: 29163 - protein, 466 aa, synthetic construct; identical to SEQ ID NO: 29162
  REGION 1..466: note = neuraminidase__InfluenzaB__AGX16592

SEQ ID NO: 29164 - protein, 466 aa, synthetic construct; identical to SEQ ID NO: 28616
  REGION 1..466: note = neuraminidase__InfluenzaB__AGX16603

SEQ ID NO: 29165 - protein, 466 aa, synthetic construct; identical to SEQ ID NO: 28682
  REGION 1..466: note = neuraminidase__InfluenzaB__AGX16614

SEQ ID NO: 29166 - protein, 466 aa, synthetic construct; identical to SEQ ID NO: 29160
  REGION 1..466: note = neuraminidase__InfluenzaB__AGX16625

SEQ ID NO: 29167 - protein, 466 aa, synthetic construct
  REGION 1..466: note = neuraminidase__InfluenzaB__AGX16636
MLPSTIQTLTLFLTSGGVLLSLYVSASLSYLLYSDILLKFSPTEIIAPTMPLDCANASNVQAVNRSATKGVTLLLPEPEWTYPRLSCPGSTFQKALLISPHRFGETKGNSAPLIIREPFIACGPKECKHFALTHYAAQPGGYYNGTRGDRNKLRHLISVKLGKIPTVENSIFHMAAWSGSACHDGKEWTYIGVDGPDNNALLKIKYGEAYTDTYHSYANNILRTQESACNCIGGNCYLMITDGSASGISECRFLKIREGRIIKEIFPTGRVKHTEECTCGFASNKTIECACRDNSYTAKRPFVKLNVETDTAEIRLMCTETYLDTPRPDDGSITGPCESNGDKGSGGIKGGFVHQRMASKIGRWYSRTMSKTKRMGMGLYVKYDGDPWADSDALALSGVMVSMEEPGWYSFGFEIKDKKCDVPCIGIEMVHDGGKETWHSAATAIYCLMGSGQLLWNTVTGVDMAL

SEQ ID NO: 29168 - protein, 466 aa, synthetic construct; identical to SEQ ID NO: 28614
  REGION 1..466: note = neuraminidase__InfluenzaB__AGX16647

SEQ ID NO: 29169 - protein, 466 aa, synthetic construct; identical to SEQ ID NO: 29162
  REGION 1..466: note = neuraminidase__InfluenzaB__AGX16658

SEQ ID NO: 29170 - protein, 466 aa, synthetic construct; identical to SEQ ID NO: 28616
  REGION 1..466: note = neuraminidase__InfluenzaB__AGX16669

SEQ ID NO: 29171 - protein, 466 aa, synthetic construct; identical to SEQ ID NO: 28682
  REGION 1..466: note = neuraminidase__InfluenzaB__AGX16680

SEQ ID NO: 29172 - protein, 466 aa, synthetic construct; identical to SEQ ID NO: 28616
  REGION 1..466: note = neuraminidase__InfluenzaB__AGX16691

SEQ ID NO: 29173 - protein, 466 aa, synthetic construct
  REGION 1..466: note = neuraminidase__InfluenzaB__AGX16702
MLPSTIQTLTLFLTSGGVLLSLYVSASLSYLLYSDILLKFSPTEITAPTMPLDCANASNVQAVNRSATKGVTLLLPEPEWTYPRLSCPGSTFQKALLISPHRFGETKGNSAPLIIREPFIACGPKECKHFALTHYAAQPGGYYNGKRGDRNKLRHLISVKLGKIPTVENSIFHMAAWSGSACHDGKEWTYIGVDGPDNNALLKIKYGEAYTDTYHSYANNILRTQESACNCIGGNCYLMITDGSASGISECRFLKIREGRIIKEIFPTGRVKHTEECTCGFASNKTIECACRDNSYTAKRPFVKLNVETDTAEIRLMCTETYLDTPRPDDGSITGPCESNGDKGSGGIKGGFVHQRMASKIGRWYSRTMSKTKRMGMGLYVKYDGDPWADSDALALSGVMVSMEEPGWYSFGFEIKDKKCDVPCIGIEMVHDGGKETWHSAATAIYCLMGSGQLLWDTVTGVDMAL

SEQ ID NO: 29174 - protein, 466 aa, synthetic construct
  REGION 1..466: note = neuraminidase__InfluenzaB__AGX16713
MLPSTIQTLTLFLTSGGVLLSLYVSASLSYLLYSDILLKFSPTEITAPTMPLDCANASNVQAVNRSATKGVTLLLPEPEWTYPRLSCPGSIFQKALLISPHRFGETKGNSAPLIIREPFIACGPKECKHFALTHYAAQPGGYYNGTRGDRNKLRHLISVKLGKIPTVENSIFHMAAWSGSACHDGKEWTYIGVDGPDNNALLKIKYGEAYTDTYHSYANNILRTQESACNCIGGNCYLMITDGSASGISECRFLKIREGRIIKEIFPTGRVKHTEECTCGFASNKTIECACRDNSYTAKRPFVKLNVETDTAEIRLMCTETYLDTPRPDDGSITGPCESNGDKGSGGIKGGFVHQRMASKIGRWYSRTMSKTKRMGMGLYVKYDGDPWADSDALALSGVMVSMEEPGWYSFGFEIRDKKCDVPCIGIEMVHDGGKETWHSAATAIYCLMGSGQLLWDTVTGVDMAL

SEQ ID NO: 29175 - protein, 466 aa, synthetic construct; identical to SEQ ID NO: 28616
  REGION 1..466: note = neuraminidase__InfluenzaB__AGX16724

SEQ ID NO: 29176 - protein, 466 aa, synthetic construct; identical to SEQ ID NO: 29162
  REGION 1..466: note = neuraminidase__InfluenzaB__AGX16735

SEQ ID NO: 29177 - protein, 466 aa, synthetic construct; identical to SEQ ID NO: 29162
  REGION 1..466: note = neuraminidase__InfluenzaB__AGX16746

SEQ ID NO: 29178 - protein, 466 aa, synthetic construct; identical to SEQ ID NO: 28616
  REGION 1..466: note = neuraminidase__InfluenzaB__AGX16757

SEQ ID NO: 29179 - protein, 466 aa, synthetic construct
  REGION 1..466: note = neuraminidase__InfluenzaB__AGX16768
MLPSTIQTLTLFLTSGGVLLSLYVSASLSYLLYSDILLKFSPTEIIAPTMPLDCANASNVQAVNRSATKGVTLLLPEPEWTYPRLSCPGSTFQKALLISPHRFGETKGNSAPLIIREPFIACGPKECKHFALTHYAAQPGGYYNGTRGDRNKLRHLISVKLGKIPTVENSIFHMAAWSGSACHDGKEWTYIGVDGPDNNALLKIKYGEAYTDTYHSYANNILRTQESACNCIGGNCYLMITDGSASGISECRFLKIREGRIIKEIFPTGRVKHTEECTCGFASNKTIECACRDNSYTAKRPFVKLNVETDTAEIRLMCTETYLDTPRPDDGSITGPCKSNGDKGSGGIKGGFVHQRMASKIGRWYSRTMSKTKRMGMGLYVKYDGDPWADSDALALSGVMVSMEEPGWYSFGFEIKDKKCDVPCIGIEMVHDGGKETWHSAATAIYCLMGSGQLLWDTVTGVDMAL

SEQ ID NO: 29180 - protein, 466 aa, synthetic construct; identical to SEQ ID NO: 28682
  REGION 1..466: note = neuraminidase__InfluenzaB__AGX16779

SEQ ID NO: 29181 - protein, 466 aa, synthetic construct
  REGION 1..466: note = neuraminidase__InfluenzaB__AGX16790
MLPSTIQTLTLFLTSGGVLLSLYVSASLSYLLYSDILLKFSPTEITAPTMPLDCANASNVQAVNRSATKGVTLLLPEPEWTYPRLSCPGSTFQKALLISPHRFGETKGNSAPLIIREPFIACGPKECKHFALTHYAAQPGGYYNGTRGGRNKLRHLISVKLGKIPTVENSIFHMAAWSGSACHDGKEWTYIGVDGPDNNALLKIKYGEAYTDTYHSYANNILRTQESACNCIGGNCYLMITDGSASGISECRFLKIREGRIIKEIFPTGRVKHTEECTCGFASNKTIECACRDNSYTAKRPFVKLNVETDTAEIRLMCTETYLDTPRPDDGSITGPCESNGDKGSGGIKGGFVHQRMASKIGRWYSRTMSKTKRMGMGLYVKYDGDPWADSDALALSGVMVSMEEPGWYSFGFEIRDKKCDVPCIGIEMVHDGGKETWHSAATAIYCLMGSGQLLWDTVTGVDMAL

SEQ ID NO: 29182 - protein, 466 aa, synthetic construct
  REGION 1..466: note = neuraminidase__InfluenzaB__AGX16801
MLPSTIQTLTLFLTSGGVLLSLYVSASLSYLLYSDILLKFSPTEIIAPTMPLDCANASNVQAVNRSATKGVTLLLPEPEWTYPRLSCPGSTFQKALLISPHRFGETKGNSAPLIIREPFIACGPKECKHFALTHYAAQPGGYYNGTRGDRNKLRHLISVKLGKIPTVENSIFHMAAWSGSACHDGKEWTYIGVDGPDNNALLKIKYGEAYTDTYHSYANNILRTQESACNCIGGNCYLMITDGSASGISECRFLKIREGRIIKEIFPTGRVKHTEECTCGFASNKTIECACRDNSYTAKRPFVKLNVETDTAEIRLMCTETYLDTPRPNDGSITGPCESNGDKGSGGIKGGFVHQRMASKIGRWYSRTMSKTKRMGMGLYVKYDGDPWADSDALALSGVMVSMEEPGWYSFGFEIKDKKCDVPCIGIEMVHDGGKETWHSAATAIYCLMGSGQLLWDTVTGVDMAL

SEQ ID NO: 29183 - protein, 466 aa, synthetic construct; identical to SEQ ID NO: 28616
  REGION 1..466: note = neuraminidase__InfluenzaB__AGX16812

SEQ ID NO: 29184 - protein, 466 aa, synthetic construct
  REGION 1..466: note = neuraminidase__InfluenzaB__AGX16823
MLPSTIQTLTLFLTSGGVLLSLYVSASLSYLLYSDILLKFSPTEITAPTMPLDCANASNVQAVNRSATKGVTLLLPEPEWTYPRLSCPGSTFQKALLISPHRFGETKGNSAPLIIREPFIACGPKECKHFALTHYAAQPGGYYNGTRGDRNKLRHLISVKLGKIPTVENSIFHMAAWSGSACHDGKEWTYIGVDGPDNNALLKIKYGEAYTDTYHSYANNILRTQESACNCIGGNCYLMITDGSASGISECRFLKIREGRIIKEIFPTGRVKHTEECTCGFASNKTIECACRDNSYTAKRPFVKLNVETDTAEIRLMCTETYLDTPRPADGSITGPCESNGDKGSGGIKGGFVHQRMASKIGRWYSRTMSKTKRMGMGLYVKYDGDPWADSDALALSGVMVSMEEPGWYSFGFEIKDKKCDVPCIGIEMVHDGGKETWHSAATAIYCLMGSGQLLWDTVTGVDMAL

SEQ ID NO: 29185 - protein, 466 aa, synthetic construct; identical to SEQ ID NO: 28616
  REGION 1..466: note = neuraminidase__InfluenzaB__AGX16834

SEQ ID NO: 29186 - protein, 466 aa, synthetic construct
  REGION 1..466: note = neuraminidase__InfluenzaB__AGX16845
MLPSTIQTLTLFLTSGGVLLSLYVSASLSYLLYSDILLKFSPTEITTPTMPLDCANASNVQAVNRSATKGVTLLLPEPEWTYPRLSCPGSTFQKALLVSPHRFGETKGNSAPLIIREPFIACGPKECKHFALTHYAAQPGGYYNGTRGDRNKLRHLISVKLGKIPTVENSIFHMAAWSGSACHDGKEWTYIGVDGPDNNALLKIKYGEAYTDTYHSYANNILRTQESACNCIGGNCYLMITDGSASGISECRFLKIREGRIIKEIFPTGRVKHTEECTCGFASNKTIECACRDNSYTAKRPFVKLNVETDTAEIRLMCTETYLDTPRPDDGSITGPCESNGDKGSGGIKGGFVHQRMASKIGRWYSRTMSKTKRMGMGLYVKYDGDPWADSDALALSGVMVSMEEPGWYSFGFEIKDKKCDVPCIGIEMVHDGGKETWHSAATAIYCLMGSGQLLWDTVTGVDMAL

SEQ ID NO: 29187 - protein, 466 aa, synthetic construct
  REGION 1..466: note = neuraminidase__InfluenzaB__AGX16856
MLPSTIQTLTLFLTSGGVLLSLYVSASLSYLLYSDILLKFSPTEITAPTVPLDCANASNVQAVNRSATKGVTLLLPEPEWTYPRLSCPGSTFQKALLISPHRFGETKGNSAPLIIREPFIACGPKECKHFALTHYAAQPGGYYSGTRGDRNKLRHLISVKLGKIPTVENSIFHMAAWSGSACHDGKEWTYIGVDGPDNNALLKIKYGEAYTDTYHSYANNILRTQESACNCIGGNCYLMITDGSASGISECRFLKIREGRIIKEIFPTGRVKHTEECTCGFASNKTIECACRDNSYTAKRPFVKLNVETDTAEIRLMCTETYLDTPRPDDGSITGPCESNGDKGSGGIKGGFVHQRMASKIGRWYSRTMSKNKRMGMGLYVKYDGDPWADSDALALSGVMVSMEEPGWYSFGFEIKDKKCDVPCIGIEMVHDGGKETWHSAATAIYCLMGSGQLLWDTVTGVDMAL

SEQ ID NO: 29188 - protein, 466 aa, synthetic construct; identical to SEQ ID NO: 28616
  REGION 1..466: note = neuraminidase__InfluenzaB__AGX16867

SEQ ID NO: 29189 - protein, 466 aa, synthetic construct
  REGION 1..466: note = neuraminidase__InfluenzaB__AGX16878
MLPSTIQTLTLFLTSGGVLLSLYVSASLSYLLYSDILLKFSPTELTAPTMPLDCANASNVQAVNRSATKGVTLLLPEPEWTYPRLSCPGSTFQKALLISPHRFGETKGNSAPLIIREPFIACGPKECKHFALTHYAAQPGGYYNGKRGDRNKLRHLISVKLGKIPTVENSIFHMAAWSGSACHDGKEWTYIGVDGPDNNALLKIKYGEAYTDTYHSYANNILRTQESACNCIGGNCYLMITDGSASGISECRFLKIREGRIIKEIFPTGRVKHTEECTCGFASNKTIECACRDNSYTAKRPFVKLNVETDTAEIRLMCTETYLDTPRPDDGSITGPCESNGDNGSGGIKGGFVHQRMASKIGRWYSRTMSKTKRMGMGLYVKYDGDPWADSDALALSGVMVSMEEPGWYSFGFEIKDKKCDVPCIGIEMVHDGGKETWHSAATAIYCLMGSGQLLWDTVTGVDMAL

SEQ ID NO: 29190 - protein, 466 aa, synthetic construct; identical to SEQ ID NO: 29162
  REGION 1..466: note = neuraminidase__InfluenzaB__AGX16889

SEQ ID NO: 29191 - protein, 466 aa, synthetic construct
  REGION 1..466: note = neuraminidase__InfluenzaB__AGX16900
MLPSTIQTLTLFLTTGGVLLSLYVSASLSYLLYSDILLKFSPTEIIAPTMPLDCANASNVQAVNRSATKGVTLLLPEPEWTYPRLSCPGSTFQKALLISPHRFGETKGNSAPLIIREPFIACGPKECKHFALTHYAAQPGGYYNGTRGDRNKLRHLISVKLGKIPTVENSIFHMAAWSGSACHDGKEWTYIGVDGPDNNALLKIKYGEAYTDTYHSYANNILRTQESACNCIGGNCYLMITDGSASGISECRFLKIREGRIIKEIFPTGRVKHTEECTCGFASNKTIECACRDNSYTAKRPFVKLNVETDTAEIRLMCTETYLDTPRPDDGSITGPCESNGDKGSGGIKGGFVHQRMASKIGRWYSRTMSKTKRMGMGLYVKYDGDPWADSDALALSGVMVSMEEPGWYSFGFEIKDKKCDVPCIGIEMVHDGGKETWHSAATAIYCLMGSGQLLWDTVTGVDMAL

SEQ ID NO: 29192 - protein, 466 aa, synthetic construct
  REGION 1..466: note = neuraminidase__InfluenzaB__AGX16911
MLPSTIQTLTLFLTSGGVLLSLYVSALLSYLLYSDILLKFSPTEITAPTMPLDCANASNVQAVNRSATKGVTLLLPEPEWTYPRLSCPGSTFQKALLISPHRFGETKGNSAPLIIREPFIACGPKECKHFALTHYAAQPGGYYNGTRGDRNKLRHLISVKLGKIPTVENSIFHMAAWSGSACHDGKEWTYIGVDGPDNNALLKIKYGEAYTDTYHSYANNILRTQESACNCIGGNCYLMITDGSASGISECRFLKIREGRIIKEIFPTGRVKHTEECTCGFASNKTIECACRDNSYTAKRPFVKLNVETDTAEIRLMCTETYLDTPRPDDGSITGPCESNGDKGSGGIKGGFVHQRMASKIGRWYSRTMSKTKRMGMGLYVKYDGDPWADSDALALSGVMVSMEEPGWYSFGFEIKDKKCDVPCIGIEMVHDGGKETWHSAATAIYCLMGSGQLLWDTVTGVDMAL

SEQ ID NO: 29193 - protein, 466 aa, synthetic construct
  REGION 1..466: note = neuraminidase__InfluenzaB__AGX16922
MLPSTIQTLTLFLTSGGVLLSLYVSASLSYLLYSDILLKFSPTEITAPTMPLDCANASNVQAVNRSATKGVTFLLPEPEWTYPRLSCPGSTFQKALLISPHRFGETKGNSAPLIIREPFIACGPKECKHFALTHYAAQPGGYYNGTRGDRNKLRHLISVKLGKIPTVENSIFHMAAWSGSACHDGKEWTYIGVDGPDNNALLKIKYGEAYTDTYHSYANNILRTQESACNCIGGNCYLMITDGSASGISECRFLKIREGRIIKEIFPTGRVKHTEECTCGFASNKTIECACRDNSYTAKRPFVKLNVETDTAEIRLMCTETYLDTPRPDDGSITGPCESNGDKGSGGIKGGFVHQRMASKIGRWYSRTMSKTKRMGMGLYVKYDGDPWADSDALALSGVMVSMEEPGWYSFGFEIKDKKCDVPCIGIEMVHDGGKETWHSAATAIYCLMGSGQLLWDTVTGVDMAL

SEQ ID NO: 29194 - protein, 466 aa, synthetic construct
  REGION 1..466: note = neuraminidase__InfluenzaB__AGX16933
MLPSTIQTLTLFLTSGGVLLSLYVSASLSYLLYSDILLKFSPTEINAPTMPLDCANASNVQAVNRSATKGVTLLLPEPEWTYPRLSCPGSTFQKALLISPHRFGETKGNSAPLIIREPFIACGPKECKHFALTHYAAQPGGYYNGTRGDRNKLRHLISVKLGKIPTVENSIFHMAAWSGSACHDGKEWTYIGVDGPDNNALLKIKYGEAYTDTYHSYANNILRTQESACNCIGGNCYLMITDGSASGISECRFLKIREGRIIKEIFPTGRVKHTEECTCGFASNKTIECACRDNSYTAKRPFVKLNVETDTAEIRLMCTETYLDTPRPDDGSITGPCESNGDKGSGGIKGGFVHQRMASKIGRWYSRTMSKTKRMGMGLYVKYDGDPWADSDALALSGVMVSMEEPGWYSFGFEIKDKKCDVPCIGIEMVHDGGKETWHSAATAIYCLMGSGQLLLDTVTGVDMAL

SEQ ID NO: 29195 - protein, 466 aa, synthetic construct
  REGION 1..466: note = neuraminidase__InfluenzaB__AGX16944
MLPSTIQTLTLFLTSGGVLLSLYVSASLSYLLYSDILLKFSPTEITAPTMPLDCANASNVQAVNRSATKGVTLLLPEPEWTYPRLSCPGSTFQKALLISPHRFGETKGNSAPLIIREPFIACGPKECKHFALTHYAAQPGGYYSGTRGDRNKLRHLISVKLGKIPTVENSIFHMAAWSGSACHDGKEWTYIGVDGPDNNALLKIKYGEAYTDTYHSYANNILRTQESACNCIGGNCYLMITDGSASGISECRFLKIREGRIIKEIFPTGRVKHTEECTCGFASNKTIECACRDNSYTAKRPFVKLNVETDTAEIRLMCTETYLDTPRPDDGSITGPCESNGDKGSGGIKGGFVHQRMASKIGRWYSRTMSKNKRMGMGLYVKYDGDPWADSDALALSGVMVSMEEPGWYSFGFEIKDKKCDVPCIGIEMVHDGGKETWHSAATAIYCLMGSGQLLWDTVTGVDMAL

SEQ ID NO: 29196 - protein, 466 aa, synthetic construct; identical to SEQ ID NO: 28616
  REGION 1..466: note = neuraminidase__InfluenzaB__AGX16955

SEQ ID NO: 29197 - protein, 466 aa, synthetic construct; identical to SEQ ID NO: 28614
  REGION 1..466: note = neuraminidase__InfluenzaB__AGX16966

SEQ ID NO: 29198 - protein, 466 aa, synthetic construct; identical to SEQ ID NO: 28616
  REGION 1..466: note = neuraminidase__InfluenzaB__AGX16977

SEQ ID NO: 29199 - protein, 466 aa, synthetic construct; identical to SEQ ID NO: 28616
  REGION 1..466: note = neuraminidase__InfluenzaB__AGX16988

SEQ ID NO: 29200 - protein, 466 aa, synthetic construct; identical to SEQ ID NO: 29160
  REGION 1..466: note = neuraminidase__InfluenzaB__AGX16999

SEQ ID NO: 29201 - protein, 466 aa, synthetic construct; identical to SEQ ID NO: 28616
  REGION 1..466: note = neuraminidase__InfluenzaB__AGX17010

SEQ ID NO: 29202 - protein, 466 aa, synthetic construct; identical to SEQ ID NO: 29162
  REGION 1..466: note = neuraminidase__InfluenzaB__AGX17021

SEQ ID NO: 29203 - protein, 466 aa, synthetic construct
  REGION 1..466: note = neuraminidase__InfluenzaB__AGX17032
MLPSTIQTLTLFLTSGGVLLSLYVSASLSYLLYSDILLKFSPTEITAPTMPLDCANASDVQAVNRSATKGVTLLLPEPEWTYPRLSCPGSTFQKALLISPHRFGETKGNSAPLIIREPFIACGPKECKHFALTHYAAQPGGYYNRTRGDRNKLRHLISVKLGKIPTVENSIFHMAAWSGSACHDGKEWTYIGVDGPDNNALLKIKYGEAYTDTYHSYANNILRTQESACNCIGGNCYLMITDGSASGISECRFLKIREGRIIKEIFPTGRVKHTEECTCGFASNKTIECACRDNSYTAKRPFVKLNVETDTAEIRLMCTETYLDTPRPDDGSITGPCESNGDKGSGGIKGGFVHQRMASKIGRWYSRTMSKTKRMGMGLYVKYDGDPWADSDALALSGVMVSMEEPGWYSFGFEIKDKKCDVPCIGIEMVHDGGKETWHSAATAIYCLMGSGQLLWDTVTGVDMAL

SEQ ID NO: 29204 - protein, 466 aa, synthetic construct; identical to SEQ ID NO: 28614
  REGION 1..466: note = neuraminidase__InfluenzaB__AGX17043

SEQ ID NO: 29205 - protein, 466 aa, synthetic construct
  REGION 1..466: note = neuraminidase__InfluenzaB__AGX17054
MLPSTIQTLTLFLTSGGVLLSLYVSASLSYLLYSDILLKFSPTEITAPTMPLDCANASNVQAVNRSATKGVTLLLPEPEWTYPRLSCPGSTFQKALLISPHRFGETKGNSAPLIIREPFIACGPKECKHFALTHYAAQPGGYYNGTRGDRNKLRHLISVKLGKIPTVENSIFHMAAWSGSACHDGKEWTYIGVDGPDNNALLKIKYGEAYTDTYHSYANNILRTQESACNCIGGNCYLMITDGSASGISECRFLKIREGRIIKEIFPTGRVKHTEECTCGFASNKTIECACRDNSYTAKRPFVKLNVETDTAEIRLMCTETYLDTPRPDDGSITGPCESNGDNGNGGIKGGFVHQRMASKIGRWYSRTMSKTKRMGMGLYVKYDGDPWADSDALALSGVMVSMEEPGWYSFGFEIKDKKCDVPCIGIEMVHDGGKETWHSAATAIYCLMGSGQLLWDTVTGVDMAL

SEQ ID NO: 29206 - protein, 466 aa, synthetic construct
  REGION 1..466: note = neuraminidase__InfluenzaB__AGX17065
MLPSTIQTLTLFLTSGGVLLSLYVSALLSYLLYSDILLKFSPTKIIAPTTSLDSANASNFQAVNHSATKEMTFLLPEPEWTYPRLSCQGSTFQKALLISPHRFGEAKGNSAPLIIREPFIACGPKECKHFALTHYAAQPGGYYNGTREDRNKLRHLISVNLGKIPTVENSIFHMAAWSGSACHDGREWTYIGVDGPDSNALIKIKYGEAYTDTYHSYANNILRTQESACNCIGGDCYLMITDGSASGISKCRFLKIREGRIIKEIFPTGRVEHTEECTCGFASNKTIECACRDNSYTAKRPFVKLNVETDTAEIRLMCTETYLDTPRPDDGSITGPCESNGDKGSGGIKGGFVHQRMASKIGRWYSRTISKTKRMGMELYVKYDGDPWTDSDALAPSGVMVSIEEPGWYSFGFEIKDKKCDVPCIGIEMVHDGGKTTWHSAATAIYCLMGSGQLLWDTVTGVDMAL

SEQ ID NO: 29207 - protein, 466 aa, synthetic construct
  REGION 1..466: note = neuraminidase__InfluenzaB__AGX17076
MLPSTIQTLTLFLTSGGVLLSLYVSASLSYLLYSDILLKFSPTEITAPTMPLDCANASNVQAVNRSATKGVTLLLPEPEWTYPRLSCPGSTFQKALLISPHRFGETKGNSAPLIIREPFIACGPKECKHFALTHYAAQPGGYYNGTRGDRNKLRHLISVKLGKIPTVENSIFHMAAWSGSACHDGKEWTYIGVDGPDNNALLKIKYGEAYTDTYHSYANNILRTQESACNCIGGNCYLMITDGSASGISECRFLKIREGRIIKEIFPTGRVKHTEECTCGFASNKTIECACRDNSYTAKRPFVKLNVETDTAEIRLMCTETYLDTPRPDDGSITGPCESNGDKGSGGIKGGFVHQRMASKIGRWYSRTMSKTKRMGMGLYVKYDGDPWADSDALALSGVMVSMEEPGWYSFGFEIRDKKCDVPCIGIEIVHDGGKETWHSAATAIYCLMGSGQLLWDTVTGVDMAL

SEQ ID NO: 29208 - protein, 466 aa, synthetic construct; identical to SEQ ID NO: 29162
  REGION 1..466: note = neuraminidase__InfluenzaB__AGX17087

SEQ ID NO: 29209 - protein, 466 aa, synthetic construct; identical to SEQ ID NO: 29162
  REGION 1..466: note = neuraminidase__InfluenzaB__AGX17098

SEQ ID NO: 29210 - protein, 466 aa, synthetic construct; identical to SEQ ID NO: 29162
  REGION 1..466: note = neuraminidase__InfluenzaB__AGX17109

SEQ ID NO: 29211 - protein, 466 aa, synthetic construct; identical to SEQ ID NO: 29162
  REGION 1..466: note = neuraminidase__InfluenzaB__AGX17120

SEQ ID NO: 29212 - protein, 466 aa, synthetic construct; identical to SEQ ID NO: 28614
  REGION 1..466: note = neuraminidase__InfluenzaB__AGX17131

SEQ ID NO: 29213 - protein, 466 aa, synthetic construct; identical to SEQ ID NO: 28616
  REGION 1..466: note = neuraminidase__InfluenzaB__AGX17142

SEQ ID NO: 29214 - protein, 466 aa, synthetic construct
  REGION 1..466: note = neuraminidase__InfluenzaB__AGX17153
MLPSTIQTLTLFLTSGGVLLSLYVSASLSYLLYSDILLKFSPTEITAPTMPLDCANASNVQAVNRSATKGVTLLLPEPEWTYPRLSCPGSTFQKALLISPHRFGETKGNSAPLIIREPFIACGPKECKHFALTHYAAQPGGYYNGTRGDRNKLRHLISVKLGKIPTVENSIFHMAAWSGSACHDGKEWTYIGVDGPDNNALLKIKYGEAYTDTYHSYANNILRTQESACNCIGGNCYLMITDGSASGISECRFLKIREGRIIKEIFPTGRVKHTEECTCGFASNKTIECACRDNSYTAKRPFVKLNVETDTAEIRLMCTETYLDTPRPDDGSIIGPCESNGDKGSGGIKGGFVHQRMASKIGRWYSRTMSKTKRMGMGLYVKYDGDPWADSDALALSGVMVSMEEPGWYSFGFEIKDKKCDVPCIGIEMVHDGGKETWHSAATAIYCLMGSGQLLWDTVTGVDMAL

SEQ ID NO: 29215 - protein, 466 aa, synthetic construct; identical to SEQ ID NO: 29162
  REGION 1..466: note = neuraminidase__InfluenzaB__AGX17164

SEQ ID NO: 29216 - protein, 467 aa, synthetic construct
  REGION 1..467: note = neuraminidase__InfluenzaB__AGX17175
MLPSTIQTLTLFLTSGGVLLSLYVSASLSYLLYSDILLKFSPTEITAPTMPLDCANASNVQAVNRSATKGVTLLLLPEPEWTYPRLSCPGSTFQKALLISPHRFGETKGNSAPLIIREPFIACGPKECKHFALTHYAAQPGGYYNGTRGDRNKLRHLISVKLGKIPTVENSIFHMAAWSGSACHDGKEWTYIGVDGPDNNALLKIKYGEAYTDTYHSYANNILRTQESACNCIGGNCYLMITDGSASGISECRFLKIREGRIIKEIFPTGRVKHTEECTCGFASNKTIECACRDNSYTAKRPFVKLNVETDTAEIRLMCTETYLDTPRPDDGSITGPCESNGDKGSGGIKGGFVHQRMASKIGRWYSRTMSKTKRMGMGLYVKYDGDPWADSDALALSGVMVSMEEPGWYSFGFEIRDKKCDVPCIGIEMVHDGGKETWHSAATAIYCLMGSGQLLWDTVTGVDMAL

SEQ ID NO: 29217 - protein, 466 aa, synthetic construct
  REGION 1..466: note = neuraminidase__InfluenzaB__AGX17186
MLPSTIQTLTLFLTSGGVLLSLYVSASLSYLLYSDILLKFSPTEITTPTMPLDCANASNVQAVNRSATKGVTLLLPEPEWTYPRLSCPGSTFQKALLISPHRFGETKGNSAPLIIREPFIACGPKECKHFALTHYAAQPGGYYNGTRGDRNKLRHLISVKLGKIPTVENSIFHMAAWSGSACHDGKEWTYIGVDGPDNNALLKIKYGEAYTDTYHSYANNILRTQESACNCIGGNCYLMITDGSASGISECRFLKIREGRIIKEIFPTGRVKYTEECTCGFASNKTIECACRDNSYTAKRPFVKLNVETDTAEIRLMCTETYLDTPRPDDGSITGPCESNGDKGSGGIKGGFVHQRMASKIGRWYSRTMSKTRRMGMGLYVKYDGDPWADSDALALSGVMVSMEEPGWYSFGFEIKDKKCDVPCIGIEMVHDGGKETWHSAATAIYCLMGSGQLLWDTVTGVDMAL

SEQ ID NO: 29218 - protein, 466 aa, synthetic construct; identical to SEQ ID NO: 29193
  REGION 1..466: note = neuraminidase__InfluenzaB__AGX17197

SEQ ID NO: 29219 - protein, 466 aa, synthetic construct
  REGION 1..466: note = neuraminidase__InfluenzaB__AGX17208
MLPSTIQTLTLFLTSGGVLLSLYVSASLSYLLYSDILLKFSPTEITTPTMPLDCANASNVQAVNRSATKGVTLLLPEPEWTYPRLSCPGSTFQKALLISPHRFGETKGNSAPLIIREPFIACGPKECKHFALTHYAAQPGGYYNGTRGDRNKLRHLISVKLGKIPTVENSIFHMAAWSGSACHDGKEWTYIGVDGPDNNALLKIKYGEAYTDTYHSYANNILRTQESACNCIGGNCYLMITDGSASGISECRFLKIREGRIIKEIFPTGRVKHTEECTCGFASNKTIECACRDNSYTAKRPFVKLNVETDTAEIRLMCTETYLDTPRPDDGSITGPCESNGDKGSGGIKGGFVHQRMASKIGRWYSRTMSKTRRMGMGLYVKYDGDPWADSDALALSGVMVSMEEPGWYSFGFEIKDKKCDVPCIGIEMVHDGGKETWHSAATAIYCLMGSGQLLWDTVTGVDMAL

SEQ ID NO: 29220 - protein, 466 aa, synthetic construct; identical to SEQ ID NO: 29162
  REGION 1..466: note = neuraminidase__InfluenzaB__AGX17219

SEQ ID NO: 29221 - protein, 466 aa, synthetic construct; identical to SEQ ID NO: 28616
  REGION 1..466: note = neuraminidase__InfluenzaB__AGX17230

SEQ ID NO: 29222 - protein, 466 aa, synthetic construct; identical to SEQ ID NO: 29162
  REGION 1..466: note = neuraminidase__InfluenzaB__AGX17241

SEQ ID NO: 29223 - protein, 466 aa, synthetic construct
  REGION 1..466: note = neuraminidase__InfluenzaB__AGX17252
MLPSTIQTLTLFLTSGGVLLSLYVSASLSYLLYSDILLKFSPTEITAPTMPLDCANASNVQAVNRSATKGVTLLLPELEWTYPRLSCPGSTFQKALLISPHRFGETKGNSAPLIIREPFIACGPKECKHFALTYYAAQPGGYYNGTRGDRNKLRHLISVKLGKIPTVENSIFHMAAWSGSACHDGKEWTYIGVDGPDNNALLKIKYGEAYTDTYHSYANNILRTQESACNCIGGNCYLMITDGSASGISECRFLKIREGRIIKEIFPTGRVKHTEECTCGFASNKTIECACRDNSYTAKRPFVKLNVETDTAEIRLMCTETYLDTPRPADGSITGPCESNGDKGSGGIKGGFVHQRMASKIGRWYSRTMSKTKRMGMGLYVKYDGDPWADSDALALSGVMVSMEEPGWYSFGFEIKDKKCDVPCIGIEMVHDGGKETWHSAATAIYCLMGSGQLLWDTVTGVDMAL

SEQ ID NO: 29224 - protein, 466 aa, synthetic construct
  REGION 1..466: note = neuraminidase__InfluenzaB__AGX17263
MLPSTIQTLTLFLTSGGVLLSLYVSASLSYLLYSDILLKLSPTEITAPTMPLDCANASNVQAVNRSATKGVTLLLPEPEWTYPRLSCPGSTFQKALLISPHRFGETKGNSAPLIIREPFIACGPKECKHFALTHYAAQPGGYYNGTRGDRNKLRHLISVKLGKIPTVENSIFHMAAWSGSACHDGKEWTYIGVDGPDNNALLKIKYGEAYTDTYHSYANNILRTQESACNCIGGNCYLMITDGSASGISECRFLKIREGRIIKEIFPTGRVKHTEECTCGFASNKTIECACRDNSYTAKRPFVKLNVETDTAEIRLMCTETYLDTPRPDDGSITGPCESNGDKGSGGIKGGFVHQRMASKIGRWYSRTMSKTKRMGMGLYVKYDGDPWADSDALALSGVMVSMEEPGWYSFGFEIKDKKCDVPCIGIEMVHDGGKETWHSAATAIYCLMGSGQLLWDTVTGVDMAL

SEQ ID NO: 29225 - protein, 466 aa, synthetic construct
  REGION 1..466: note = neuraminidase__InfluenzaB__AGX17274
MLPSTIQTLTLFLTSGGVLLSLYVSASLSYLLYSDILLKFSPTEINAPTMPLDCANASNVQAVNRSATKGVTLLLPEPEWTYPRLSCPGSTFQKALLISPHRFGETKGNSAPLIIREPFIACGPKECKHFALTHYAAQPGGYYNGTRGDRNKLRHLISVKLGKIPTVENSIFHMAAWSGSACHDGKEWTYIGVDGPDNNALLKIKYGEAYTDTYHSYANNILRTQESACNCIGGNCYLMITDGSASGISECRFLKIREGRIIKEIFPTGRVKHTEECTCGFASNKTIECACRDNSYTAKRPFVKLNVETDTAEIRLMCTETYLDTPRPDDGSITGPCESNGDKGSGGIKGGFVHQRMASKIGRWYSRTMSKTKRMGMGLYVKYDGDPWADSDALALSGVMVSMEEPGWYSFGFEIKDKKCDVPCIGIEMVHDGGKETWHSAATAIYCLMGSGQLLWDTVTGVDMAL

SEQ ID NO: 29226 - protein, 466 aa, synthetic construct
  REGION 1..466: note = neuraminidase__InfluenzaB__AGX17285
MLPSTIQTLTLFLTSGGVLLSLYMSASLSYLLYSDILLKFSPTEITAPTMPLDCANASNVQAVNRSATKGVTLLLPEPEWTYPRLSCPGSTFQKALLISPHRFGETKGNSAPLIIREPFIACGPKECKHFALTHYAAQPGGYYNGTRGDRNKLRHLISVKLGKIPTVENSIFHMAAWSGSACHDGKEWTYIGVDGPDNNALLKIKYGEAYTDTYHSYANNILRTQESACNCIGGNCYLMITDGSASGISECRFLKIREGRIIKEIFPTGRVKHTEECTCGFASNKTIECACRDNSYTAKRPFVKLNVETDTAEIRLMCTETYLDTPRPDDGSITGPCESNGDKGSGGIKGGFVHQRMASKIGRWYSRTMSKTKRMGMGLYVKYDGDPWADSDALALSGVMVSMEEPGWYSFGFEIKDKKCDVPCIGIEMVHDGGKETWHSAATAIYCLMGSGQLLWDTVTGVDMAL

SEQ ID NO: 29227 - protein, 466 aa, synthetic construct
  REGION 1..466: note = neuraminidase__InfluenzaB__AGX17296
MLPSTIQTLTLFLTSGGVLLSLYVSASLSYLLYSDILLKFSPTEITAPTMPLDCANASNVQAVNRSATKGVTLLLPEPEWTYPRLSCPGSTFQKALLISPHRFGEAKGNSAPLIIREPFIACGPKECKHFALTHYAAQPGGYYNGTRGDRNKLRHLISVKLGKIPTVENSIFHMAAWSGSACHDGKEWTYIGVDGPDNNALLKIKYGEAYTDTYHSYANNILRTQESACNCIGGNCYLMITDGSASGISECRFLKIREGRIIKEIFPTGRVKHTEECTCGFASNKTIECACRDNSYTAKRPFVKLNVETDTAEIRLMCTETYLDTPRPDDGSITGPCESNGDKGSGGIKGGFVHQRMASKIGRWYSRTMSKTKRMGMGLYVKYDGDPWADSDALALSGVMVSMEEPGWYSFGFEIKDKKCDVPCIGIEMVHDGGKETWHSAATAIYCLMGSGQLLWDTVTGVDMAL

SEQ ID NO: 29228 - protein, 466 aa, synthetic construct; identical to SEQ ID NO: 29160
  REGION 1..466: note = neuraminidase__InfluenzaB__AGX17307

SEQ ID NO: 29229 - protein, 466 aa, synthetic construct; identical to SEQ ID NO: 28614
  REGION 1..466: note = neuraminidase__InfluenzaB__AGX17318

SEQ ID NO: 29230 - protein, 466 aa, synthetic construct
  REGION 1..466: note = neuraminidase__InfluenzaB__AGX17329
MLPSTIQTLTLFLTSGGVLLSLYVSASLSYLLYSDMLLKFSPTEITAPTMPLDCANASNVQAVNRSATKGVTLLLPEPEWTYPRLSCPGSTFQKALLISPHRFGETKGNSAPLIIREPFIACGPKECKHFALTHYAAQPGGYYSGTRGDRNKLRHLISVKLGKIPTVENSIFHMAAWSGSACHDGKEWTYIGVDGPDNNALLKIKYGEAYTDTYHSYANNILRTQESACNCIGGNCYLMITDGSASGISECRFLKIREGRIIKEIFPTGRVKHTEECTCGFASNKTIECACRDNSYTAKRPFVKLNVETDTAEIRLMCTETYLDTPRPDDGSITGPCESNGDKGSGGIKGGFVHQRMASKIGRWYSRTMSKNKRMGMGLYVKYDGDPWADSDALALSGVMVSMEEPGWYSFGFEIKDKKCDVPCIGIEMVHDGGKETWHSAATAIYCLMGSGQLLWDTVTGVDMAL

SEQ ID NO: 29231 - protein, 466 aa, synthetic construct; identical to SEQ ID NO: 29162
  REGION 1..466: note = neuraminidase__InfluenzaB__AGX17340

SEQ ID NO: 29232 - protein, 466 aa, synthetic construct
  REGION 1..466: note = neuraminidase__InfluenzaB__AGX17351
MLPSTIQTLTLFLTSGGVLLSLYVSASLSYLLYSDILLKFSPTEITAPTMPLDCANASNVQAVNRSATKGVTLLLPEPEWTYPRLSCPGSTFQKALLISPHRFGETKGNSAPLIIREPFIACGPKECKHFALTHYAAQPGGYYNGTRGDRNKLRHLISVKLGKIPTVENSIFHMAAWSGSACHDGKEWTYIGVDGPDNNALLKIKYGEAYTDTYHSYANNILRTQESACNCIGGNCYLMITDGSASGISECRFLKIREGRIIKEIFPTGRVKHTEECTCGFASNKTIECACRDNSYTAKRPFVKLNVETDTAEIRLMCTETYLDTPRPDDGSITGPCETNGDKGSGGIKGGFVHQRMASKIGRWYSRTMSKTKRMGMGLYVKYDGDPWADSDALALSGVMVSMEEPGWYSFGFEIKDKKCDVPCIGIEMVHDGGKETWHSAATAIYCLMGSGQLLWDTVTGVDMAL

SEQ ID NO: 29233 - protein, 466 aa, synthetic construct
  REGION 1..466: note = neuraminidase__InfluenzaB__AGX17362
MLPSTIQTLTLFLTSGGVLLSLYVSASLSYLLYSDILLKFSPTEITAPTIPLDCANASNIQAVNRSATKGVTLLLPEPEWTYPRLSCPGSTFQKALLISPHRFGETKGNSAPLIIREPFIACGPKECKHFALTHYAAQPGGYYNGTRGDRNKLRHLISVKLGKIPTVENSIFHMAAWSGSACHDGKEWTYIGVDGPDNNALLKIKYGEAYTDTYHSYANNILRTQESACNCIGGNCYLMITDGSASGISECRFLKIREGRIIKEIFPTGRVKHTEECTCGFASNKTIECACRDNSYTAKRPFVKLNVETDTAEIRLMCTETYLDTPRPDDGSITGPCESNGDKGSGGIKGGFVHQRMASKIGRWYSRTMSKTKRMGMGLYVKYDGDPWADSDALALSGVMVSMEEPGWYSFGFEIKDKKCDVPCIGIEMVHDGGKETWHSAATAIYCLMGSGQLLWDTVTGVDMAL

SEQ ID NO: 29234 - protein, 466 aa, synthetic construct
  REGION 1..466: note = neuraminidase__InfluenzaB__AGX17373
MLPSTIQTLTLFLTSGGVLLSLYVSASLSYLLYSDILLKFSPTEITAPTMPLDCANASNVQAVNRSATKGVTLLLPEPEWTYPRLSCPGSTFQKALLISPHRFGETKGNSAPLIIREPFIACGPKECKHFALTHYAAQPGGYYNGTRGDRNKLRHLISVKLGKIPTVENSIFHMAAWSGSACHDGKEWTYIGVDGPDNNALLKIKYGEAYTDTYHSYANNILRTQESACNCIGGNCYLMITDGSASGVSECRFLKIREGRIIKEIFPTGRVKHTEECTCGFANNKTIECACRDNSYTAKRPFVKLNVETDTAEIRLMCTETYLDTPRPDDGSITGPCESNGDKGSGGIKGGFVHQRMASKIGRWYSRTMSKTKRMGMGLYVKYDGDPWADSDALALSGVMVSMEEPGWYSFGFEIKDKKCDVPCIGIEMVHDGGKETWHSAATAIYCLMGSGQLLWDTVTGVNMAL

SEQ ID NO: 29235 - protein, 466 aa, synthetic construct; identical to SEQ ID NO: 28614
  REGION 1..466: note = neuraminidase__InfluenzaB__AGX17384

SEQ ID NO: 29236 - protein, 466 aa, synthetic construct; identical to SEQ ID NO: 28682
  REGION 1..466: note = neuraminidase__InfluenzaB__AGX17395

SEQ ID NO: 29237 - protein, 466 aa, synthetic construct
  REGION 1..466: note = neuraminidase__InfluenzaB__AGX17404
MLPSTIQTLTLFLTSGGVLLSLYVSASLSYLLYSDILLKFSPTEITAPTMPLDCANASNVQAVNRSATKGVTLLLPEPEWTYPRLSCPGSTFQKALLISPHRFGETKGNSAPLIIREPFIACGPKECKHFALTHYAAQPGGYYNGTRGDRNKLRHLISVKLGKIPTVENSIFHMAAWSGSACHDGKEWTYIGVDGSDNNALLKIKYGEAYTDTYHSYANNILRTQESACNCIGGNCYLMITDGSASGISECRFLKIREGRIIKEIFPTGRVKHTEECTCGFASNKTIECACRDNSYTAKRPFVKLNVETDTAEIRLMCTETYLDTPRPDDGSITGPCESNGDKGSGGIKGGFVHQRMASKIGRWYSRTMSKTKRMGMGLYVKYDGDPWADSDALALSGIMVSMEEPGWYSFGFEIKDKKCDVPCIGIEMVHDGGKETWHSAATAIYCLMGSGQLLWDTVTGVDMAL

SEQ ID NO: 29238 - protein, 466 aa, synthetic construct
  REGION 1..466: note = neuraminidase__InfluenzaB__AGX17415
MLPSTIQTLTLFLTSGGVLLSLYVSASLSYLLYSDILLKFSPTEITAPTMPLDCANASNVQAVNRSATKGVTLLLPEPDWTYPRLSCPGSTFQKALLISPHRFGETKGNSAPLIIREPFIACGPKECKHFALTHYAAQPGGYYNGTRGDRNKLRHLISVKLGKIPTVENSIFHMAAWSGSACHDGKEWTYIGVDGPDNNALLKIKYGEAYTDTYHSYANNILRTQESACNCIGGNCYLMITDGSASGISECRFLKIREGRIIKEIFPTGRVKHTEECTCGFASNKTIECACRDNSYTAKRPFVKLNVETDTAEIRLMCTETYLDTPRPDDGSITGPCESNGDKGSGGIKGGFVHQRMASKIGRWYSRTMSKTKRMGMGLYVKYDGDPWADSDALALSGVMVSMEEPGWYSFGFEIKDKKCDVPCIGIEMVHDGGKETWHSAATAIYCLMGSGQLLWDTVTGVDMAL

SEQ ID NO: 29239 - protein, 466 aa, synthetic construct
  REGION 1..466: note = neuraminidase__InfluenzaB__AGX17426
MLPSTIQTLTLFLTSGGVLLSLYVSASLSYLLYSDILLKFSPTEITAPTMPLDCANASNVQAVNRSATKGVTFLLPEPEWTYPRLSCPGSTFQKALLISPHRFGETKGNSAPLIIREPFIACGPKECKHFALTHYAAQPGGYYNGTRGDRNKLRHLISVKLGKIPTVENSIFHMAAWSGSACHDGKEWTYIGVDGPDNNALLKIKYGEAYTDTYHSYANNILRTQESACNCIGGNCYLMITDGSASGISECRFLKIREGRIIKEIFPTGRVKHTEECTCGFASNKTIECACRDNSYTAKRPFVKLNVETDTAEIRLMCTETYLDTPRPDDGSITGPCESNGDKGSGGIKGGFVHQRMASKIGRWYSRTMSKTKRMGMGLYVKYDGDPWADSDALALSGVMVSMEEPGWYSFGFEIRDKKCDVPCIGIEMVHDGGKETWHSAATAIYCLMGSGQLLWDTVTGVDMAL

SEQ ID NO: 29240 - protein, 466 aa, synthetic construct
  REGION 1..466: note = neuraminidase__InfluenzaB__AGX17437
MLPSTIQTLTLFLTSGGVLLSLYVSVSLSYLLYSDILLKFSPTEITAQTMPLDFANASNVQAVNRSATKGVTLLLPEPEWTYPRLSCPGSTFQKALLISPHRFGETKGNSAPLIIREPFIACGPKECKHFALTHYAAQPGGYYNGTRGDRNKLRHLISVKLGKIPTVENSIFHMAAWSGSACHDGKEWTYIGVDGPDNNALLKIKYGEAYTDTYHSYANNILRTQESACNCIGGNCYLMITDGSASGISECRFLKIREGRIIKEIFPTGRVKHTEECTCGFASNKTIECACRDNSYTAKRPFVKLNVETDTAEIRLMCTETYLDTPRPDDGSITGPCESNGDKGSGGIKGGFVHQRMASKIGRWYSRTMSKTKRMGMGLYVKYDGDPWADSDALALSGVMVSMEEPGWYSFGFEIRDKKCDVPCIGIEMVHDGGKETWHSAATAIYCLMGSGQLLWDTVTGVDMAL

SEQ ID NO: 29241 - protein, 466 aa, synthetic construct
  REGION 1..466: note = neuraminidase__InfluenzaB__AGX17448
MLPSTIQTLTLFLTSGGVLLSLYVSASLSYLLYSDILLKFSPTEITAPTMPLDCANASNVQAVNRSATKGVTLLLPEPEWTYPRLSCPGSTFQKALLISPHRFGETKGNSAPLIIREPFIACGPKECKHFALTHYAAQPGGYYNGTRGDRNKLRHLISVKLGKIPTVENSIFHMAAWSGSACHDGKEWTYIGVDGPDNNALLKIKYGEAYTDTYHSYANNILRTQESACNCIGGNCYLMITDGSASGISECRFLKIREGRIIKEIFPTGRVKHTEECTCGFASNKTIECACRDNSYTAKRPFVKLNVETDTAEIRLMCTETYLDTPRPDDGSITGPCETNGDKGSGGIKGGFVHQRMASKIGRWYSRTMSKTKRMGMGLYVKYDGDPWADSDALVLSGVMVSMEEPGWYSFGFEIKDKKCDVPCIGIEMVHDGGKETWHSAATAIYCLMGSGQLLWDTVTGVDMAL

SEQ ID NO: 29242 - protein, 466 aa, synthetic construct
  REGION 1..466: note = neuraminidase__InfluenzaB__AGX17459
MLPSTIQTLTLFLTSGGVLLSLYVSASLSYLLYSDILLKFSPTEITASTMPLDCANASNVQAVNRSATKGVTLLLPEPDWTYPRLSCPGSTFQKALLISPHRFGETKGNSAPLIIREPFIACGPKECKHFALTHYAAQPGGYYNGTRGDRNKLRHLISVKLGKIPTVENSIFHMAAWSGSACHDGKEWTYIGVDGPDNNALLKIKYGEAYTDTYHSYANNILRTQESACNCIGGNCYLMITDGSASGISECRFLKIREGRIIKEIFPTGRVKHTEECTCGFASNKTIECACRDNSYTAKRPFVKLNVETDTAEIRLMCTETYLDTPRPDDGSITGPCESNGDKGSGGIKGGFVHQRMASKIGRWYSRTMSKTKRMGMGLYVKYDGDPWADSDALALSGVMVSMEEPGWYSFGFEIKDKKCDVPCIGIEMVHDGGKETWHSAATAIYCLMGSGQLLWDTVTGVDMAL

SEQ ID NO: 29243 - protein, 466 aa, synthetic construct; identical to SEQ ID NO: 28614
  REGION 1..466: note = neuraminidase__InfluenzaB__AGX17470

SEQ ID NO: 29244 - protein, 466 aa, synthetic construct
  REGION 1..466: note = neuraminidase__InfluenzaB__AGX17481
MLPSTIQTLTLFLTSGGVLLSLYVSASLSYLLYSDILLKFSPTEITAPTMPLDCANASNVQAVNRSATKGVTLILPEPEWTYPRLSCPGSTFQKALLISPHRFGETKGNSAPLIIREPFIACGPKECKHFALTHYAAQPGGYYNGTRGDRNKLRHLISVKLGKIPTVENSIFHMAAWSGSACHDGKEWTYIGVDGPDNNALLKIKYGEAYTDTYHSYANNILRTQESACNCIGGNCYLMITDGSASGISECRFLKIREGRIIKEIFPTGRVKHTEECTCGFASNKTIECACRDNSYTAKRPFVKLNVETDTAEIRLMCTETYLDTPRPDDGSITGPCESNGDKGSGGIKGGFVHQRMASKIGRWYSRTMSKTKRMGMGLYVKYDGDPWADSDALALSGVMVSVEEPGWYSFGFEIKDKKCDVPCIGIEMVHDGGKETWHSAATAIYCLMGSGQLLWDTVTGVDMAL

SEQ ID NO: 29245 - protein, 466 aa, synthetic construct
  REGION 1..466: note = neuraminidase__InfluenzaB__AGX17492
MLPSTIQTLTLFLTSGGVLLSLYVSASLSYLLYSDILLKFSPTEITAPTMPLDCANASNVQAVNRSATKGVTLLLPEPEWTYPRLSCPGSTFQKALLISPHRFGETKGNSAPLIIREPFIACGPKECKHFALTHYAAQPGGYYNGTRGDRNKLRHLISVKLGKIPTVENSIFHMAAWSGSACHDGKEWTYIGVDGPDNNALLKIKYGEAYTDTYHSYANNILRTQESACNCIGGNCYLMITDGSASGISECRFLKIREGRIIKEIFPTGRVKHTEECTCGFASNKTIECACRDNSYTAKRPFVKLNVETDTAEIRLMCTETYLDTPRPDDGSITGPCESNGDKGSGGIKGGFVHQRMASKIGRWYSRTMSKTKRMGMGLYVKYDGDPWADSDALALSGVMVSMEEPGWYSFGFEIKDKKCDVPCIGIEMVHDGGKETWHSAATAIYCLMGSGQLLWDTVTGVDIAL

SEQ ID NO: 29246 - protein, 466 aa, synthetic construct
  REGION 1..466: note = neuraminidase__InfluenzaB__AGX17503
MLPSTIQTLTLFLTSGGVLLSLYVSASLSYLLYSDILLKFSPTEITAPTMPLDCANASNVQAVNRSATKGVTLLLPEPEWTYPRLSCPGLTFQKALLISPHRFGETKGNSAPLIIREPFIACGPKECKHFALTHYAAQPGGYYNGTRGDRNKLRHLISVKLGKIPTVENSIFHMAAWSGSACHDGKEWTYIGVDGPDNNALLKIKYGEAYTDTYHSYANNILRTQESACNCIGGNCYLMITDGSASGISECRFLKIREGRIIKEIFPTGRVKHTEECTCGFASNKTIECACRDNSYTAKRPFVKLNVETDTAEIRLMCTETYLDTPRPDDGSITGPCESNGDKGSGGIKGGFVHQRMASKIGRWYSRTMSKTKRMGMGLYVKYDGDPWADSDALALSGVMVSMEEPGWYSFGFEIKDKKCDVPCIGIEMVHDGGKETWHSAATAIYCLMGSGQLLWDTVTGVDMAL

SEQ ID NO: 29247 - protein, 466 aa, synthetic construct; identical to SEQ ID NO: 28614
  REGION 1..466: note = neuraminidase__InfluenzaB__AGX17514

SEQ ID NO: 29248 - protein, 466 aa, synthetic construct
  REGION 1..466: note = neuraminidase__InfluenzaB__AGX17525
MLPSTIQTLTLFLTSGGVLLSLYVSASLSYLLYSDILLKFSPTEITAPTMPLDCANASNVQAVNRSATKGVTLLLPEPEWTYPRLSCPGSTFQKALLISPHRFGETKGNSAPLIIREPFIACGPKECKHFALTHYAAQPGGYYNGKRGDRNKLRHLISVKLGKIPTVENSIFHMAAWSGSACHDGKEWTYIGVDGPDNNALLKIKYGEAYTDTYHSYANNILRTQESACNCIGGNCYLMITDGSASGISECRFLKIREGRIIKEIFPTGRVKHTEECTCGFASNKTIECACRDNSYTAKRPFVKLNVETDTAEIRLMCTETYLDTPRPDDGSITGPCESNGDKGSGGIKGGFVHQRMASKIGRWYSRTMSKTKRMGMGLYVKYDGDPWADSDALALSGVMVSMEEPGWYSFGFEIRDKKCDVPCIGIEMVHDGGKETWHSAATAIYCLMGSGQLLWDTVTGVDMAL

SEQ ID NO: 29249 - protein, 466 aa, synthetic construct; identical to SEQ ID NO: 29193
  REGION 1..466: note = neuraminidase__InfluenzaB__AGX17536

SEQ ID NO: 29250 - protein, 466 aa, synthetic construct; identical to SEQ ID NO: 29224
  REGION 1..466: note = neuraminidase__InfluenzaB__AGX17547

SEQ ID NO: 29251 - protein, 466 aa, synthetic construct
  REGION 1..466: note = neuraminidase__InfluenzaB__AGX17558
MLPSTIQTLTLFLTSGGVLLSLYVSASLSYLLYSDVLLKFSPAEITAPTMPLDCANASNVQAVNRSATKGVTLLLPEPEWTYPRLSCPGSTFQKALLISPHRFGETKGNSAPLIIREPFIACGPKECKHFALTHYAAQPGGYYNGTRGDRNKLRHLISVKLGKIPTVENSIFHMAAWSGSACHDGKEWTYIGVDGPDNNALLKIKYGEAYTDTYHSYANNILRTQESACNCIGGNCYLMITDGSASGVSECRFLKIREGRIIKEIFPTGRVKHTEECTCGFASNKTIECACRDNSYTAKRPFVKLNVETDTAEIRLMCTETYLDTPRPDDGSITGPCESNGDKGSGGIKGGFVHQRMASKIGRWYSRTMSKTKRMGMGLYVKYDGDPWADSDALALSGVMVSMEEPGWYSFGFEIKDKKCDVPCIGIEMVHDGGKETWHSAATAIYCLMGSGQLLWDTVTGVDMAL

SEQ ID NO: 29252 - protein, 466 aa, synthetic construct; identical to SEQ ID NO: 28743
  REGION 1..466: note = neuraminidase__InfluenzaB__AGX17569

SEQ ID NO: 29253 - protein, 466 aa, synthetic construct; identical to SEQ ID NO: 28670
  REGION 1..466: note = neuraminidase__InfluenzaB__AGX17580

SEQ ID NO: 29254 - protein, 466 aa, synthetic construct
  REGION 1..466: note = neuraminidase__InfluenzaB__AGX17591
MLPSTIQTLTLFLTSGGVLLSLYVSASLSYLLYSDILLKFPPTEITAPTMPLDCANASNVQAVNRSATKGVTLLLPEPEWTYPRLSCPGSTFQKALLISPHRFGETKGNSAPLIIREPFIACGPKECKHFALTHYAAQPGGYYNGTRGDRNKLRHLISVKLGKIPTVENSIFHMAAWSGSACHDGKEWTYIGVDGPDNNALLKIKYGEAYTDTYHSYANNILRTQESACNCIGGNCYLMITDGSASGVSECRFLKIREGRIIKEIFPTGRVKHTEECTCGFASNKTIECACRDNSYTAKRPFVKLNVETDTAEIRLMCTETYLDTPRPDDGSITGPCESNGDKGSGGIKGGFVHQRMASKIGRWYSRTMSKTKRMGMGLYVKYDGDPWADSDALAFSGVMVSMEEPGWYSFGFEIKDKKCDVPCIGIEMVHDGGKETWHSAATAIYCLMGSGQLLWDTVTGVNMAL

SEQ ID NO: 29255 - protein, 466 aa, synthetic construct; identical to SEQ ID NO: 28668
  REGION 1..466: note = neuraminidase__InfluenzaB__AGX17602

SEQ ID NO: 29256 - protein, 466 aa, synthetic construct; identical to SEQ ID NO: 29254
  REGION 1..466: note = neuraminidase__InfluenzaB__AGX17613

SEQ ID NO: 29257 - protein, 466 aa, synthetic construct; identical to SEQ ID NO: 28841
  REGION 1..466: note = neuraminidase__InfluenzaB__AGX17624

SEQ ID NO: 29258 - protein, 466 aa, synthetic construct
  REGION 1..466: note = neuraminidase__InfluenzaB__AGX17635
MLPSTIQTLTLFLTSGGVLLSLYVSASLSYLLYSDILLKFPPTEITAPTMPLDCANASNVQAVNRSATKGVTLLLPEPEWTYPRLSCPGSTFQKALLISPHRFGETKGNSAPLIIREPFIACGPKECKHFALTHYAAQPGGYYNGTRGDRNKLRHLISVKLGKIPTVENSIFHMAAWSGSACHDGKEWTYIGVDGPDNNALLKIKYGEAYTDTYHSYANNILRTQESACNCIGGNCYLMITDGSASGISECRFLKIREGRIIKEIFPTGRVKHTEECTCGFASNKTIECACRDNSYTAKRPFVKLNVETDTAEIRLMCTETYLDTPRPDDGSITGPCESNGDKGSGGIKGGFVHQRMASKIGRWYSRTMSKTKRMGMGLYVKYDGDPWADSDALAFSGVMVSMEEPGWYSFGFEIKDKKCDVPCIGIEMVHDGGKETWHSAATAIYCLMGSGQLLWDTVTGVNMAL

SEQ ID NO: 29259 - protein, 466 aa, synthetic construct; identical to SEQ ID NO: 28841
  REGION 1..466: note = neuraminidase__InfluenzaB__AGX17657

SEQ ID NO: 29260 - protein, 466 aa, synthetic construct; identical to SEQ ID NO: 29254
  REGION 1..466: note = neuraminidase__InfluenzaB__AGX17668

SEQ ID NO: 29261 - protein, 466 aa, synthetic construct
  REGION 1..466: note = neuraminidase__InfluenzaB__AGX17679
MLPSTIQTLTLFLTSGGVLLSLYVSASLSYLLYSDILLKFSPTEITAPTMPLDCANASNVQAVNRSATKGVTLLLPEPEWTYPRLSCPGSTFQKALLISPHRFGETKGNSAPLIIREPFIACGPNECKHFALTHYAAQPGGYYNGTRGDRNKLRHLISVKLGKIPTVENSIFHMAAWSGSACHDGKEWTYIGVDGPDNNALLKIKYGEAYTDTYHSYANNILRTQESACNCIGGNCYLMITDGSASGVSECRFLKIREGRIIKEIFPTGRVKHTEECTCGFASNKTIECACRDNSYTAKRPFVKLNVEIDTAEIRLMCTDTYLDTPRPDDGSITGPCESNGDKGSGGIKGGFVHQRMASKIGRWYSRTMSKTERMGMGLYVKYDGDPWADSDALAFSGVMVSMKEPGWYSFGFEIKDKKCDVPCIGIEMVHDGGKETWHSAATAIYCLMGSGQLLWDTVTGVDMAL

SEQ ID NO: 29262 - protein, 466 aa, synthetic construct; identical to SEQ ID NO: 28841
  REGION 1..466: note = neuraminidase__InfluenzaB__AGX17690

SEQ ID NO: 29263 - protein, 466 aa, synthetic construct
  REGION 1..466: note = neuraminidase__InfluenzaB__AGX17701
MLPSTIQTLTLFLTSGGVLLSLYVSASLSYLLYSDILLKFPPTEITAPTMPLDCANASNVQAVNRSATKGVTLLLPEPEWTYPRLSCPGSTFQKALLISPHRFGETKGNSAPLIIREPFIACGPKECKHFALTHYAAQPGGYYNGKRGDRNKLRHLISVKLGKIPTVENSIFHMAAWSGSACHDGKEWTYIGVDGPDNNALLKIKYGEAYTDTYHSYANNILRTQESACNCIGGNCYLMITDGSASGVSECRFLKIREGRIIKEIFPTGRVKHTEECTCGFASNKTIECACRDNSYTAKRPFVKLNVETDTAEIRLMCTETYLDTPRPDDGSITGPCESNGDKGSGGIKGGFVHQRMASKIGRWYSRTMSKTKRMGMGLYVKYDGDPWADSDALAFSGVMVSMEEPGWYSFGFEIKDKKCDVPCIGIEMVHDGGKETWHSAATAIYCLMGSGQLLWDTVTGVNMAL

SEQ ID NO: 29264 - protein, 466 aa, synthetic construct; identical to SEQ ID NO: 28841
  REGION 1..466: note = neuraminidase__InfluenzaB__AGX17723

SEQ ID NO: 29265 - protein, 466 aa, synthetic construct; identical to SEQ ID NO: 29261
  REGION 1..466: note = neuraminidase__InfluenzaB__AGX17734

SEQ ID NO: 29266 - protein, 466 aa, synthetic construct
  REGION 1..466: note = neuraminidase__InfluenzaB__AGX17745
MLPSTIQTLTLFLTSGGVLLSLYVSASLSYLLYSDILLKFPPTEITAPTMPLDCANASNVQAVNRSATKGVTLLLPEPEWTYPRLSCSGSTFQKALLISPHRFGEIKGNSAPLIIREPFIACGPKECKHFALTHYAAQPGGYYNGTRGDRNKLRHLISVKLGKIPTVENSIFHMAAWSGSACHDGKEWTYIGVDGPDNNALLKIKYGEAYTDTYHSYANNILRTQESACNCIGGNCYLMITDGSASGVSECRFLKIREGRIIKEIFPTGRVKHTEECTCGFASNKTIECACRDNSYTAKRPFVKLNVETDTAEIRLMCTETYLDTPRPDDGSITGPCESNGDKGSGGIKGGFVHQRMASKIGRWYSRTMSKTKRMGMGLYVKYDGDPWADSDALAFSGVMVSMEEPGWYSFGFEIKDKKCDVPCIGIEMVHDGGKETWHSAATAIYCLMGSGQLLWDTVTGVNMAL

SEQ ID NO: 29267 - protein, 466 aa, synthetic construct
  REGION 1..466: note = neuraminidase__InfluenzaB__AGX17756
MLPSTIQTLTLFLTSGGVLLSLYVSASLSYLLYSDILLKFSPTEITAPTMPLDCANASNVHAVNRSATKGVTLLLPEPEWTYPRLSCPGSTFQKALLISPHRFGETKGNSAPLIIREPFIACGPNECKHFALTHYAARPGGYYNGTRGDRNKLRHLISVKLGKIPTVENSIFHMAAWSGSACHDGKEWTYIGVDGPDNNALLKIKYGEAYTDTYHSYANNILRTQESACNCIGGNCYLMITDGSASGVSECRFLKIREGRIIKEIFPTGRVKHTEECTCGFASNKTIECACRDNSYTAKRPFVKLNVETDTAEIRLMCTDTYLDTPRPDDGSITGPCESNGDKGSGGIKGGFVHQRMASKIGRWYSRTMSKTERMGMGLYVKYDGDPWADSDALAFSGVMVSMKEPGWYSFGFEIKDKKCDVPCIGIEMVHDGGKETWHSAATAIYCLMGSGQLLWDTVTGVDMAL

SEQ ID NO: 29268 - protein, 466 aa, synthetic construct; identical to SEQ ID NO: 28888
  REGION 1..466: note = neuraminidase__InfluenzaB__AGX17767

SEQ ID NO: 29269 - protein, 466 aa, synthetic construct
  REGION 1..466: note = neuraminidase__InfluenzaB__AGX17778
MLPSTIQTLTLFLTSGGVLLSLYVSASLSYLLYSDILLKFSPTEITAPTMPLDCANASNVHAVNRSATKGVTLLLPEPEWTYPRLSCPGSTFQKALLISPHRFGETKGNSAPLIIREPFIACGPNECKHFALTHYAAQPGGYYNGTRGDRNKLRHLISVKLGKIPTVENSIFHMAAWSGSACHDGKEWTYIGVDGPDNNALLKIKYGEAYTDTYHSYANNILRTQESACNCIGGNCYLMITDGSASGVSECRFLKIREGRIIKEIFPTGRVKHTEECTCGFASNKTIECACRDNSYTAKRPFVKLNVETDTAEIRLMCTDTYLDTPRPDDGSITGPCESNGDKGSGGIKGGFVHQRMASKIGRWYSRTMSKTERMGMGLYVKYDGDPWAESDALAFSGVMVSMKEPGWYSFGFEIKDKKCDVPCIGIEMVHDGGKETWHSAATAIYCLMGSGQLLWDTVTGVDMAL

SEQ ID NO: 29270 - protein, 466 aa, synthetic construct
  REGION 1..466: note = neuraminidase__InfluenzaB__AGX17789
MLPSTIQTLTLFLTSGGVLLSLYVSASLSYLLYSDILLKFSPTEITAPTMPLDCANASNVQAVNRSATKGVTLLLPEPEWTYPRLSCPGSTFQKALLISPHRFGETKGNSAPLIIREPFIACGPNECKHFALTHYAAQPGGYYNGTRGDRNKLRHLISVKLGKIPTVENSIFHMAAWSGSACHDGKEWTYIGVDGPDNNALLKIKYGEAYTDTYHSYANNILRTQESACNCIGGNCYLMITDGSASGVSECRFLKIREGRIIKEIFPTGRVKHTEECTCGFASNKTIECACRDNSYTAKRPFVKLNVEIDTAEIRLMCTDTYLDTPRPDDGSITGPCESNGDKGSGGIKGGFVHQRMASKIGRWYSRTMSKTERMGMGLYVKYDGDPWADSDALVFSGVMVSMKEPGWYSFGFEIKDKKCDVPCIGIEMVHDGGKETWHSAATAIYCLMGSGQLLWDTVTGVDMAL

SEQ ID NO: 29271 - protein, 466 aa, synthetic construct; identical to SEQ ID NO: 28841
  REGION 1..466: note = neuraminidase__InfluenzaB__AGX17800

SEQ ID NO: 29272 - protein, 466 aa, synthetic construct
  REGION 1..466: note = neuraminidase__InfluenzaB__AGX17811
MLPSTIQTLTLFLTSGGVLLSLYVSASLSYLLYSDILLKFPPTEITAPTMPLDCANASNVQAVNRSATKGVTLLLPEPEWTYPRLSCPGSTFQKALLISPHRFGETKGNSAPLIIREPFIACGPKECKHFALTHYAAQPGGYYNGTRGDRNKLRHLISVKLGKIPTVENSIFHMAAWSGSACHDGKEWTYIGVDGPDNNALLKIKYGEAYTDTYHSYANNILRTQESACNCIGGNCYLMITDGSASGVSECRFLKIREGRIIKEIFPTGRVKHTEECTCGFASNKTIECACRDNSYTAKRPFVKLNVETDTAEIRLMCTETYLDTPRPDDGSITGPCESNGDKGSGGIKGGFVHQRMASKIGRWYSRTMSKTKRMGMGLYVKYDGDPWADSDALAFSGVMVSMEEPGWYSFGFEIKDKKCDVPCIGIEMVHDGGKETWHSAATAIYCLMGSGQLLWDTVTGVNMAQ

SEQ ID NO: 29273 - protein, 466 aa, synthetic construct; identical to SEQ ID NO: 29254
  REGION 1..466: note = neuraminidase__InfluenzaB__AGX17822

SEQ ID NO: 29274 - protein, 466 aa, synthetic construct
  REGION 1..466: note = neuraminidase__InfluenzaB__AGX17833
MLPSTIQTLTLFLTSGGVLLSLYVSASLSYLLYSDILLKFPPTEITAPTMPLDCANASNVQAVNRSATKGVTLLLPEPEWTYPRLSCPGSTFQKALLISPHRFGETKGNSAPLIIREPFIACGPKECKHFALTHYAAQPGGYYNGTRGDRNKLRHLISIKLGKIPTVENSIFHMAAWSGSACHDGKEWTYIGVDGPDNNALLKIKYGEAYTDTYHSYANNILRTQESACNCIGGNCYLMITDGSASGVSECRFLKIREGRIIKEIFPTGRVKHTEECTCGFASNKTIECACRDNSYTAKRPFVKLNVETDTAEIRLMCTETYLDTPRPDDGSITGPCESNGDKGSGGIKGGFVHQRMASKIGRWYSRTMSKTKRMGMGLYVKYDGDPWADSDALAFSGVMVSMEEPGWYSFGFEIKDKKCDVPCIGIEMVHDGGKETWHSAATAIYCLMGSGQLLWDTVTGVNMAL

SEQ ID NO: 29275 - protein, 466 aa, synthetic construct; identical to SEQ ID NO: 29261
  REGION 1..466: note = neuraminidase__InfluenzaB__AGX17844

SEQ ID NO: 29276 - protein, 466 aa, synthetic construct; identical to SEQ ID NO: 29269
  REGION 1..466: note = neuraminidase__InfluenzaB__AGX17855

SEQ ID NO: 29277 - protein, 466 aa, synthetic construct; identical to SEQ ID NO: 28888
  REGION 1..466: note = neuraminidase__InfluenzaB__AGX17866

SEQ ID NO: 29278 - protein, 466 aa, synthetic construct; identical to SEQ ID NO: 29254
  REGION 1..466: note = neuraminidase__InfluenzaB__AGX17877

SEQ ID NO: 29279 - protein, 466 aa, synthetic construct; identical to SEQ ID NO: 29261
  REGION 1..466: note = neuraminidase__InfluenzaB__AGX17888

SEQ ID NO: 29280 - protein, 466 aa, synthetic construct; identical to SEQ ID NO: 29254
  REGION 1..466: note = neuraminidase__InfluenzaB__AGX17899
